United States Patent Application Publication US 2018/0305689 A1 - sequence listing, part 54

SEQ ID NO: 754126 - RNA, 19 nt, Artificial Sequence
  Description of Artificial Sequence: Synthetic oligonucleotide
  Sense strand starting at position 3236 of SEQ ID NO: 586924
uuuggaagaguacguaaga

SEQ ID NO: 754127 - RNA, 19 nt, Artificial Sequence
  Description of Artificial Sequence: Synthetic oligonucleotide
  Antisense strand to SEQ ID NO: 754126
ucuuacguacucuuccaaa

SEQ ID NO: 754128 - RNA, 19 nt, Artificial Sequence
  Description of Artificial Sequence: Synthetic oligonucleotide
  Sense strand starting at position 3237 of SEQ ID NO: 586924
uuggaagaguacguaagaa

SEQ ID NO: 754129 - RNA, 19 nt, Artificial Sequence
  Description of Artificial Sequence: Synthetic oligonucleotide
  Antisense strand to SEQ ID NO: 754128
uucuuacguacucuuccaa

SEQ ID NO: 754130 - RNA, 19 nt, Artificial Sequence
  Description of Artificial Sequence: Synthetic oligonucleotide
  Sense strand starting at position 3364 of SEQ ID NO: 586924
acaugaguaaacggauagu

SEQ ID NO: 754131 - RNA, 19 nt, Artificial Sequence
  Description of Artificial Sequence: Synthetic oligonucleotide
  Antisense strand to SEQ ID NO: 754130
acuauccguuuacucaugu

SEQ ID NO: 754132 - RNA, 19 nt, Artificial Sequence
  Description of Artificial Sequence: Synthetic oligonucleotide
  Sense strand starting at position 3406 of SEQ ID NO: 586924
guagguacugcagaauaga

SEQ ID NO: 754133 - RNA, 19 nt, Artificial Sequence
  Description of Artificial Sequence: Synthetic oligonucleotide
  Antisense strand to SEQ ID NO: 754132
ucuauucugcaguaccuac

SEQ ID NO: 754134 - RNA, 19 nt, Artificial Sequence
  Description of Artificial Sequence: Synthetic oligonucleotide
  Sense strand starting at position 3523 of SEQ ID NO: 586924
aaauuucuagcgggcuuau

SEQ ID NO: 754135 - RNA, 19 nt, Artificial Sequence
  Description of Artificial Sequence: Synthetic oligonucleotide
  Antisense strand to SEQ ID NO: 754134
auaagcccgcuagaaauuu

SEQ ID NO: 754136 - RNA, 19 nt, Artificial Sequence
  Description of Artificial Sequence: Synthetic oligonucleotide
  Sense strand starting at position 3547 of SEQ ID NO: 586924
gguuccagcccagaucuau

SEQ ID NO: 754137 - RNA, 19 nt, Artificial Sequence
  Description of Artificial Sequence: Synthetic oligonucleotide
  Antisense strand to SEQ ID NO: 754136
auagaucugggcuggaacc

SEQ ID NO: 754138 - RNA, 19 nt, Artificial Sequence
  Description of Artificial Sequence: Synthetic oligonucleotide
  Sense strand starting at position 3553 of SEQ ID NO: 586924
agcccagaucuauggaauu

SEQ ID NO: 754139 - RNA, 19 nt, Artificial Sequence
  Description of Artificial Sequence: Synthetic oligonucleotide
  Antisense strand to SEQ ID NO: 754138
aauuccauagaucugggcu

SEQ ID NO: 754140 - RNA, 19 nt, Artificial Sequence
  Description of Artificial Sequence: Synthetic oligonucleotide
  Sense strand starting at position 3622 of SEQ ID NO: 586924
guuguuucucuugcauguu

SEQ ID NO: 754141 - RNA, 19 nt, Artificial Sequence
  Description of Artificial Sequence: Synthetic oligonucleotide
  Antisense strand to SEQ ID NO: 754140
aacaugcaagagaaacaac

SEQ ID NO: 754142 - RNA, 19 nt, Artificial Sequence
  Description of Artificial Sequence: Synthetic oligonucleotide
  Sense strand starting at position 3635 of SEQ ID NO: 586924
cauguuaaagucugaaagu

SEQ ID NO: 754143 - RNA, 19 nt, Artificial Sequence
  Description of Artificial Sequence: Synthetic oligonucleotide
  Antisense strand to SEQ ID NO: 754142
acuuucagacuuuaacaug

SEQ ID NO: 754144 - RNA, 19 nt, Artificial Sequence
  Description of Artificial Sequence: Synthetic oligonucleotide
  Sense strand starting at position 3751 of SEQ ID NO: 586924
gguacacguuuacuuauau

SEQ ID NO: 754145 - RNA, 19 nt, Artificial Sequence
  Description of Artificial Sequence: Synthetic oligonucleotide
  Antisense strand to SEQ ID NO: 754144
auauaaguaaacguguacc

SEQ ID NO: 754146 - RNA, 19 nt, Artificial Sequence
  Description of Artificial Sequence: Synthetic oligonucleotide
  Sense strand starting at position 3752 of SEQ ID NO: 586924
guacacguuuacuuauaua

SEQ ID NO: 754147 - RNA, 19 nt, Artificial Sequence
  Description of Artificial Sequence: Synthetic oligonucleotide
  Antisense strand to SEQ ID NO: 754146
uauauaaguaaacguguac

SEQ ID NO: 754148 - RNA, 19 nt, Artificial Sequence
  Description of Artificial Sequence: Synthetic oligonucleotide
  Sense strand starting at position 53 of SEQ ID NO: 586925
guguguggccaguaugaga

SEQ ID NO: 754149 - RNA, 19 nt, Artificial Sequence
  Description of Artificial Sequence: Synthetic oligonucleotide
  Antisense strand to SEQ ID NO: 754148
ucucauacuggccacacac

SEQ ID NO: 754150 - RNA, 19 nt, Artificial Sequence
  Description of Artificial Sequence: Synthetic oligonucleotide
  Sense strand starting at position 68 of SEQ ID NO: 586925
gagagcuucuuguuggaau

SEQ ID NO: 754151 - RNA, 19 nt, Artificial Sequence
  Description of Artificial Sequence: Synthetic oligonucleotide
  Antisense strand to SEQ ID NO: 754150
auuccaacaagaagcucuc

SEQ ID NO: 754152 - RNA, 19 nt, Artificial Sequence
  Description of Artificial Sequence: Synthetic oligonucleotide
  Sense strand starting at position 70 of SEQ ID NO: 586925
gagcuucuuguuggaauua

SEQ ID NO: 754153 - RNA, 19 nt, Artificial Sequence
  Description of Artificial Sequence: Synthetic oligonucleotide
  Antisense strand to SEQ ID NO: 754152
uaauuccaacaagaagcuc

SEQ ID NO: 754154 - RNA, 19 nt, Artificial Sequence
  Description of Artificial Sequence: Synthetic oligonucleotide
  Sense strand starting at position 95 of SEQ ID NO: 586925
gaccgauucccagguaaga

SEQ ID NO: 754155 - RNA, 19 nt, Artificial Sequence
  Description of Artificial Sequence: Synthetic oligonucleotide
  Antisense strand to SEQ ID NO: 754154
ucuuaccugggaaucgguc

SEQ ID NO: 754156 - RNA, 19 nt, Artificial Sequence
  Description of Artificial Sequence: Synthetic oligonucleotide
  Sense strand starting at position 113 of SEQ ID NO: 586925
aggcaaugggcaugaaaca

SEQ ID NO: 754157 - RNA, 19 nt, Artificial Sequence
  Description of Artificial Sequence: Synthetic oligonucleotide
  Antisense strand to SEQ ID NO: 754156
uguuucaugcccauugccu

SEQ ID NO: 754158 - RNA, 19 nt, Artificial Sequence
  Description of Artificial Sequence: Synthetic oligonucleotide
  Sense strand starting at position 218 of SEQ ID NO: 586925
aauucugaauguguguuau

SEQ ID NO: 754159 - RNA, 19 nt, Artificial Sequence
  Description of Artificial Sequence: Synthetic oligonucleotide
  Antisense strand to SEQ ID NO: 754158
auaacacacauucagaauu

SEQ ID NO: 754160 - RNA, 19 nt, Artificial Sequence
  Description of Artificial Sequence: Synthetic oligonucleotide
  Sense strand starting at position 220 of SEQ ID NO: 586925
uucugaauguguguuauga

SEQ ID NO: 754161 - RNA, 19 nt, Artificial Sequence
  Description of Artificial Sequence: Synthetic oligonucleotide
  Antisense strand to SEQ ID NO: 754160
ucauaacacacauucagaa

SEQ ID NO: 754162 - RNA, 19 nt, Artificial Sequence
  Description of Artificial Sequence: Synthetic oligonucleotide
  Sense strand starting at position 228 of SEQ ID NO: 586925
guguguuaugacgccuauu

SEQ ID NO: 754163 - RNA, 19 nt, Artificial Sequence
  Description of Artificial Sequence: Synthetic oligonucleotide
  Antisense strand to SEQ ID NO: 754162
aauaggcgucauaacacac

SEQ ID NO: 754164 - RNA, 19 nt, Artificial Sequence
  Description of Artificial Sequence: Synthetic oligonucleotide
  Sense strand starting at position 250 of SEQ ID NO: 586925
gggugaaauaaaugucugu

SEQ ID NO: 754165 - RNA, 19 nt, Artificial Sequence
  Description of Artificial Sequence: Synthetic oligonucleotide
  Antisense strand to SEQ ID NO: 754164
acagacauuuauuucaccc

SEQ ID NO: 754166 - RNA, 19 nt, Artificial Sequence
  Description of Artificial Sequence: Synthetic oligonucleotide
  Sense strand starting at position 254 of SEQ ID NO: 586925
gaaauaaaugucuguagga

SEQ ID NO: 754167 - RNA, 19 nt, Artificial Sequence
  Description of Artificial Sequence: Synthetic oligonucleotide
  Antisense strand to SEQ ID NO: 754166
uccuacagacauuuauuuc

SEQ ID NO: 754168 - RNA, 19 nt, Artificial Sequence
  Description of Artificial Sequence: Synthetic oligonucleotide
  Sense strand starting at position 255 of SEQ ID NO: 586925
aaauaaaugucuguaggag

SEQ ID NO: 754169 - RNA, 19 nt, Artificial Sequence
  Description of Artificial Sequence: Synthetic oligonucleotide
  Antisense strand to SEQ ID NO: 754168
cuccuacagacauuuauuu

SEQ ID NO: 754170 - RNA, 19 nt, Artificial Sequence
  Description of Artificial Sequence: Synthetic oligonucleotide
  Sense strand starting at position 373 of SEQ ID NO: 586925
gggauuaugcuggaaagca

SEQ ID NO: 754171 - RNA, 19 nt, Artificial Sequence
  Description of Artificial Sequence: Synthetic oligonucleotide
  Antisense strand to SEQ ID NO: 754170
ugcuuuccagcauaauccc

SEQ ID NO: 754172 - RNA, 19 nt, Artificial Sequence
  Description of Artificial Sequence: Synthetic oligonucleotide
  Sense strand starting at position 630 of SEQ ID NO: 586925
ccuugugucagggaaggau

SEQ ID NO: 754173 - RNA, 19 nt, Artificial Sequence
  Description of Artificial Sequence: Synthetic oligonucleotide
  Antisense strand to SEQ ID NO: 754172
auccuucccugacacaagg

SEQ ID NO: 754174 - RNA, 19 nt, Artificial Sequence
  Description of Artificial Sequence: Synthetic oligonucleotide
  Sense strand starting at position 772 of SEQ ID NO: 586925
uuuaguuacucagcaaaga

SEQ ID NO: 754175 - RNA, 19 nt, Artificial Sequence
  Description of Artificial Sequence: Synthetic oligonucleotide
  Antisense strand to SEQ ID NO: 754174
ucuuugcugaguaacuaaa

SEQ ID NO: 754176 - RNA, 19 nt, Artificial Sequence
  Description of Artificial Sequence: Synthetic oligonucleotide
  Sense strand starting at position 773 of SEQ ID NO: 586925
uuaguuacucagcaaagau

SEQ ID NO: 754177 - RNA, 19 nt, Artificial Sequence
  Description of Artificial Sequence: Synthetic oligonucleotide
  Antisense strand to SEQ ID NO: 754176
aucuuugcugaguaacuaa

SEQ ID NO: 754178 - RNA, 19 nt, Artificial Sequence
  Description of Artificial Sequence: Synthetic oligonucleotide
  Sense strand starting at position 848 of SEQ ID NO: 586925
guguuguggcgggagagau

SEQ ID NO: 754179 - RNA, 19 nt, Artificial Sequence
  Description of Artificial Sequence: Synthetic oligonucleotide
  Antisense strand to SEQ ID NO: 754178
aucucucccgccacaacac

SEQ ID NO: 754180 - RNA, 19 nt, Artificial Sequence
  Description of Artificial Sequence: Synthetic oligonucleotide
  Sense strand starting at position 856 of SEQ ID NO: 586925
gcgggagagauccgcauuu

SEQ ID NO: 754181 - RNA, 19 nt, Artificial Sequence
  Description of Artificial Sequence: Synthetic oligonucleotide
  Antisense strand to SEQ ID NO: 754180
aaaugcggaucucucccgc

SEQ ID NO: 754182 - RNA, 19 nt, Artificial Sequence
  Description of Artificial Sequence: Synthetic oligonucleotide
  Sense strand starting at position 867 of SEQ ID NO: 586925
ccgcauuucucucccugau

SEQ ID NO: 754183 - RNA, 19 nt, Artificial Sequence
  Description of Artificial Sequence: Synthetic oligonucleotide
  Antisense strand to SEQ ID NO: 754182
aucagggagagaaaugcgg

SEQ ID NO: 754184 - RNA, 19 nt, Artificial Sequence
  Description of Artificial Sequence: Synthetic oligonucleotide
  Sense strand starting at position 869 of SEQ ID NO: 586925
gcauuucucucccugaugu

SEQ ID NO: 754185 - RNA, 19 nt, Artificial Sequence
  Description of Artificial Sequence: Synthetic oligonucleotide
  Antisense strand to SEQ ID NO: 754184
acaucagggagagaaaugc

SEQ ID NO: 754186 - RNA, 19 nt, Artificial Sequence
  Description of Artificial Sequence: Synthetic oligonucleotide
  Sense strand starting at position 890 of SEQ ID NO: 586925
ucauuacagucuguuuaau

SEQ ID NO: 754187 - RNA, 19 nt, Artificial Sequence
  Description of Artificial Sequence: Synthetic oligonucleotide
  Antisense strand to SEQ ID NO: 754186
auuaaacagacuguaauga

SEQ ID NO: 754188 - RNA, 19 nt, Artificial Sequence
  Description of Artificial Sequence: Synthetic oligonucleotide
  Sense strand starting at position 930 of SEQ ID NO: 586925
accuuuauguguuugacau

SEQ ID NO: 754189 - RNA, 19 nt, Artificial Sequence
  Description of Artificial Sequence: Synthetic oligonucleotide
  Antisense strand to SEQ ID NO: 754188
augucaaacacauaaaggu

SEQ ID NO: 754190 - RNA, 19 nt, Artificial Sequence
  Description of Artificial Sequence: Synthetic oligonucleotide
  Sense strand starting at position 978 of SEQ ID NO: 586925
gauuuagaguuccaugaaa

SEQ ID NO: 754191 - RNA, 19 nt, Artificial Sequence
  Description of Artificial Sequence: Synthetic oligonucleotide
  Antisense strand to SEQ ID NO: 754190
uuucauggaacucuaaauc

SEQ ID NO: 754192 - RNA, 19 nt, Artificial Sequence
  Description of Artificial Sequence: Synthetic oligonucleotide
  Sense strand starting at position 1219 of SEQ ID NO: 586925
ugggauguguugccagaua

SEQ ID NO: 754193 - RNA, 19 nt, Artificial Sequence
  Description of Artificial Sequence: Synthetic oligonucleotide
  Antisense strand to SEQ ID NO: 754192
uaucuggcaacacauccca

SEQ ID NO: 754194 - RNA, 19 nt, Artificial Sequence
  Description of Artificial Sequence: Synthetic oligonucleotide
  Sense strand starting at position 1400 of SEQ ID NO: 586925
uccacuccaggcugaaauu

SEQ ID NO: 754195 - RNA, 19 nt, Artificial Sequence
  Description of Artificial Sequence: Synthetic oligonucleotide
  Antisense strand to SEQ ID NO: 754194
aauuucagccuggagugga

SEQ ID NO: 754196 - RNA, 19 nt, Artificial Sequence
  Description of Artificial Sequence: Synthetic oligonucleotide
  Sense strand starting at position 1409 of SEQ ID NO: 586925
ggcugaaauuggccauaua

SEQ ID NO: 754197 - RNA, 19 nt, Artificial Sequence
  Description of Artificial Sequence: Synthetic oligonucleotide
  Antisense strand to SEQ ID NO: 754196
uauauggccaauuucagcc

SEQ ID NO: 754198 - RNA, 19 nt, Artificial Sequence
  Description of Artificial Sequence: Synthetic oligonucleotide
  Sense strand starting at position 1410 of SEQ ID NO: 586925
gcugaaauuggccauauaa

SEQ ID NO: 754199 - RNA, 19 nt, Artificial Sequence
  Description of Artificial Sequence: Synthetic oligonucleotide
  Antisense strand to SEQ ID NO: 754198
uuauauggccaauuucagc

SEQ ID NO: 754200 - RNA, 19 nt, Artificial Sequence
  Description of Artificial Sequence: Synthetic oligonucleotide
  Sense strand starting at position 1412 of SEQ ID NO: 586925
ugaaauuggccauauaagu

SEQ ID NO: 754201 - RNA, 19 nt, Artificial Sequence
  Description of Artificial Sequence: Synthetic oligonucleotide
  Antisense strand to SEQ ID NO: 754200
acuuauauggccaauuuca

SEQ ID NO: 754202 - RNA, 19 nt, Artificial Sequence
  Description of Artificial Sequence: Synthetic oligonucleotide
  Sense strand starting at position 1421 of SEQ ID NO: 586925
ccauauaagugcucaguga

SEQ ID NO: 754203 - RNA, 19 nt, Artificial Sequence
  Description of Artificial Sequence: Synthetic oligonucleotide
  Antisense strand to SEQ ID NO: 754202
ucacugagcacuuauaugg

SEQ ID NO: 754204 - RNA, 19 nt, Artificial Sequence
  Description of Artificial Sequence: Synthetic oligonucleotide
  Sense strand starting at position 1422 of SEQ ID NO: 586925
cauauaagugcucagugac

SEQ ID NO: 754205 - RNA, 19 nt, Artificial Sequence
  Description of Artificial Sequence: Synthetic oligonucleotide
  Antisense strand to SEQ ID NO: 754204
gucacugagcacuuauaug

SEQ ID NO: 754206 - RNA, 19 nt, Artificial Sequence
  Description of Artificial Sequence: Synthetic oligonucleotide
  Sense strand starting at position 1425 of SEQ ID NO: 586925
auaagugcucagugacuga

SEQ ID NO: 754207 - RNA, 19 nt, Artificial Sequence
  Description of Artificial Sequence: Synthetic oligonucleotide
  Antisense strand to SEQ ID NO: 754206
ucagucacugagcacuuau

SEQ ID NO: 754208 - RNA, 19 nt, Artificial Sequence
  Description of Artificial Sequence: Synthetic oligonucleotide
  Sense strand starting at position 1520 of SEQ ID NO: 586925
aauuguuugcauuggaaag

SEQ ID NO: 754209 - RNA, 19 nt, Artificial Sequence
  Description of Artificial Sequence: Synthetic oligonucleotide
  Antisense strand to SEQ ID NO: 754208
cuuuccaaugcaaacaauu

SEQ ID NO: 754210 - RNA, 19 nt, Artificial Sequence
  Description of Artificial Sequence: Synthetic oligonucleotide
  Sense strand starting at position 2014 of SEQ ID NO: 586925
gccugcugccuggucauaa

SEQ ID NO: 754211 - RNA, 19 nt, Artificial Sequence
  Description of Artificial Sequence: Synthetic oligonucleotide
  Antisense strand to SEQ ID NO: 754210
uuaugaccaggcagcaggc

SEQ ID NO: 754212 - RNA, 19 nt, Artificial Sequence
  Description of Artificial Sequence: Synthetic oligonucleotide
  Sense strand starting at position 2024 of SEQ ID NO: 586925
uggucauaaucugcaagau

SEQ ID NO: 754213 - RNA, 19 nt, Artificial Sequence
  Description of Artificial Sequence: Synthetic oligonucleotide
  Antisense strand to SEQ ID NO: 754212
aucuugcagauuaugacca

SEQ ID NO: 754214 - RNA, 19 nt, Artificial Sequence
  Description of Artificial Sequence: Synthetic oligonucleotide
  Sense strand starting at position 2025 of SEQ ID NO: 586925
ggucauaaucugcaagauc

SEQ ID NO: 754215 - RNA, 19 nt, Artificial Sequence
  Description of Artificial Sequence: Synthetic oligonucleotide
  Antisense strand to SEQ ID NO: 754214
gaucuugcagauuaugacc

SEQ ID NO: 754216 - RNA, 19 nt, Artificial Sequence
  Description of Artificial Sequence: Synthetic oligonucleotide
  Sense strand starting at position 2036 of SEQ ID NO: 586925
gcaagaucugagggcccaa

SEQ ID NO: 754217 - RNA, 19 nt, Artificial Sequence
  Description of Artificial Sequence: Synthetic oligonucleotide
  Antisense strand to SEQ ID NO: 754216
uugggcccucagaucuugc

SEQ ID NO: 754218 - RNA, 19 nt, Artificial Sequence
  Description of Artificial Sequence: Synthetic oligonucleotide
  Sense strand starting at position 3186 of SEQ ID NO: 586925
cugaacugcucccugagau

SEQ ID NO: 754219 - RNA, 19 nt, Artificial Sequence
  Description of Artificial Sequence: Synthetic oligonucleotide
  Antisense strand to SEQ ID NO: 754218
aucucagggagcaguucag

SEQ ID NO: 754220 - RNA, 19 nt, Artificial Sequence
  Description of Artificial Sequence: Synthetic oligonucleotide
  Sense strand starting at position 3187 of SEQ ID NO: 586925
ugaacugcucccugagauc

SEQ ID NO: 754221 - RNA, 19 nt, Artificial Sequence
  Description of Artificial Sequence: Synthetic oligonucleotide
  Antisense strand to SEQ ID NO: 754220
gaucucagggagcaguuca

SEQ ID NO: 754222 - RNA, 19 nt, Artificial Sequence
  Description of Artificial Sequence: Synthetic oligonucleotide
  Sense strand starting at position 3287 of SEQ ID NO: 586925
aggaauguggugugaaguu

SEQ ID NO: 754223 - RNA, 19 nt, Artificial Sequence
  Description of Artificial Sequence: Synthetic oligonucleotide
  Antisense strand to SEQ ID NO: 754222
aacuucacaccacauuccu

SEQ ID NO: 754224 - RNA, 19 nt, Artificial Sequence
  Description of Artificial Sequence: Synthetic oligonucleotide
  Sense strand starting at position 3508 of SEQ ID NO: 586925
cgaaacagcucauucugau

SEQ ID NO: 754225 - RNA, 19 nt, Artificial Sequence
  Description of Artificial Sequence: Synthetic oligonucleotide
  Antisense strand to SEQ ID NO: 754224
aucagaaugagcuguuucg

SEQ ID NO: 754226 - RNA, 19 nt, Artificial Sequence
  Description of Artificial Sequence: Synthetic oligonucleotide
  Sense strand starting at position 3578 of SEQ ID NO: 586925
cgagugauggaacgaggaa

SEQ ID NO: 754227 - RNA, 19 nt, Artificial Sequence
  Description of Artificial Sequence: Synthetic oligonucleotide
  Antisense strand to SEQ ID NO: 754226
uuccucguuccaucacucg

SEQ ID NO: 754228 - RNA, 19 nt, Artificial Sequence
  Description of Artificial Sequence: Synthetic oligonucleotide
  Sense strand starting at position 176 of SEQ ID NO: 586926
gaaccugguugcucuaaca

SEQ ID NO: 754229 - RNA, 19 nt, Artificial Sequence
  Description of Artificial Sequence: Synthetic oligonucleotide
  Antisense strand to SEQ ID NO: 754228
uguuagagcaaccagguuc

SEQ ID NO: 754230 - RNA, 19 nt, Artificial Sequence
  Description of Artificial Sequence: Synthetic oligonucleotide
  Sense strand starting at position 235 of SEQ ID NO: 586926
uuucuuccagaguaaguca

SEQ ID NO: 754231 - RNA, 19 nt, Artificial Sequence
  Description of Artificial Sequence: Synthetic oligonucleotide
  Antisense strand to SEQ ID NO: 754230
ugacuuacucuggaagaaa

SEQ ID NO: 754232 - RNA, 19 nt, Artificial Sequence
  Description of Artificial Sequence: Synthetic oligonucleotide
  Sense strand starting at position 238 of SEQ ID NO: 586926
cuuccagaguaagucauua

SEQ ID NO: 754233 - RNA, 19 nt, Artificial Sequence
  Description of Artificial Sequence: Synthetic oligonucleotide
  Antisense strand to SEQ ID NO: 754232
uaaugacuuacucuggaag

SEQ ID NO: 754234 - RNA, 19 nt, Artificial Sequence
  Description of Artificial Sequence: Synthetic oligonucleotide
  Sense strand starting at position 242 of SEQ ID NO: 586926
cagaguaagucauuaagca

SEQ ID NO: 754235 - RNA, 19 nt, Artificial Sequence
  Description of Artificial Sequence: Synthetic oligonucleotide
  Antisense strand to SEQ ID NO: 754234
ugcuuaaugacuuacucug

SEQ ID NO: 754236 - RNA, 19 nt, Artificial Sequence
  Description of Artificial Sequence: Synthetic oligonucleotide
  Sense strand starting at position 243 of SEQ ID NO: 586926
agaguaagucauuaagcaa

SEQ ID NO: 754237 - RNA, 19 nt, Artificial Sequence
  Description of Artificial Sequence: Synthetic oligonucleotide
  Antisense strand to SEQ ID NO: 754236
uugcuuaaugacuuacucu

SEQ ID NO: 754238 - RNA, 19 nt, Artificial Sequence
  Description of Artificial Sequence: Synthetic oligonucleotide
  Sense strand starting at position 291 of SEQ ID NO: 586926
ccaaguaauggaggaguua

SEQ ID NO: 754239 - RNA, 19 nt, Artificial Sequence
  Description of Artificial Sequence: Synthetic oligonucleotide
  Antisense strand to SEQ ID NO: 754238
uaacuccuccauuacuugg

SEQ ID NO: 754240 - RNA, 19 nt, Artificial Sequence
  Description of Artificial Sequence: Synthetic oligonucleotide
  Sense strand starting at position 316 of SEQ ID NO: 586926
ccagaaauauggcaauuug

SEQ ID NO: 754241 - RNA, 19 nt, Artificial Sequence
  Description of Artificial Sequence: Synthetic oligonucleotide
  Antisense strand to SEQ ID NO: 754240
caaauugccauauuucugg

SEQ ID NO: 754242 - RNA, 19 nt, Artificial Sequence
  Description of Artificial Sequence: Synthetic oligonucleotide
  Sense strand starting at position 358 of SEQ ID NO: 586926
gggagcauuuaugaaagcu

SEQ ID NO: 754243 - RNA, 19 nt, Artificial Sequence
  Description of Artificial Sequence: Synthetic oligonucleotide
  Antisense strand to SEQ ID NO: 754242
agcuuucauaaaugcuccc

SEQ ID NO: 754244 - RNA, 19 nt, Artificial Sequence
  Description of Artificial Sequence: Synthetic oligonucleotide
  Sense strand starting at position 431 of SEQ ID NO: 586926
aaaguaugaguucguuguu

SEQ ID NO: 754245 - RNA, 19 nt, Artificial Sequence
  Description of Artificial Sequence: Synthetic oligonucleotide
  Antisense strand to SEQ ID NO: 754244
aacaacgaacucauacuuu

SEQ ID NO: 754246 - RNA, 19 nt, Artificial Sequence
  Description of Artificial Sequence: Synthetic oligonucleotide
  Sense strand starting at position 432 of SEQ ID NO: 586926
aaguaugaguucguuguua

SEQ ID NO: 754247 - RNA, 19 nt, Artificial Sequence
  Description of Artificial Sequence: Synthetic oligonucleotide
  Antisense strand to SEQ ID NO: 754246
uaacaacgaacucauacuu

SEQ ID NO: 754248 - RNA, 19 nt, Artificial Sequence
  Description of Artificial Sequence: Synthetic oligonucleotide
  Sense strand starting at position 434 of SEQ ID NO: 586926
guaugaguucguuguuaag

SEQ ID NO: 754249 - RNA, 19 nt, Artificial Sequence
  Description of Artificial Sequence: Synthetic oligonucleotide
  Antisense strand to SEQ ID NO: 754248
cuuaacaacgaacucauac

SEQ ID NO: 754250 - RNA, 19 nt, Artificial Sequence
  Description of Artificial Sequence: Synthetic oligonucleotide
  Sense strand starting at position 446 of SEQ ID NO: 586926
uguuaagcuauuggaugau

SEQ ID NO: 754251 - RNA, 19 nt, Artificial Sequence
  Description of Artificial Sequence: Synthetic oligonucleotide
  Antisense strand to SEQ ID NO: 754250
aucauccaauagcuuaaca

SEQ ID NO: 754252 - RNA, 19 nt, Artificial Sequence
  Description of Artificial Sequence: Synthetic oligonucleotide
  Sense strand starting at position 449 of SEQ ID NO: 586926
uaagcuauuggaugauagu

SEQ ID NO: 754253 - RNA, 19 nt, Artificial Sequence
  Description of Artificial Sequence: Synthetic oligonucleotide
  Antisense strand to SEQ ID NO: 754252
acuaucauccaauagcuua

SEQ ID NO: 754254 - RNA, 19 nt, Artificial Sequence
  Description of Artificial Sequence: Synthetic oligonucleotide
  Sense strand starting at position 450 of SEQ ID NO: 586926
aagcuauuggaugauaguu

SEQ ID NO: 754255 - RNA, 19 nt, Artificial Sequence
  Description of Artificial Sequence: Synthetic oligonucleotide
  Antisense strand to SEQ ID NO: 754254
aacuaucauccaauagcuu

SEQ ID NO: 754256 - RNA, 19 nt, Artificial Sequence
  Description of Artificial Sequence: Synthetic oligonucleotide
  Sense strand starting at position 496 of SEQ ID NO: 586926
acauuuaagucauguuacu

SEQ ID NO: 754257 - RNA, 19 nt, Artificial Sequence
  Description of Artificial Sequence: Synthetic oligonucleotide
  Antisense strand to SEQ ID NO: 754256
aguaacaugacuuaaaugu

SEQ ID NO: 754258 - RNA, 19 nt, Artificial Sequence
  Description of Artificial Sequence: Synthetic oligonucleotide
  Sense strand starting at position 591 of SEQ ID NO: 586926
uaucgaguuccuuaccaug

SEQ ID NO: 754259 - RNA, 19 nt, Artificial Sequence
  Description of Artificial Sequence: Synthetic oligonucleotide
  Antisense strand to SEQ ID NO: 754258
caugguaaggaacucgaua

SEQ ID NO: 754260 - RNA, 19 nt, Artificial Sequence
  Description of Artificial Sequence: Synthetic oligonucleotide
  Sense strand starting at position 593 of SEQ ID NO: 586926
ucgaguuccuuaccaugau

SEQ ID NO: 754261 - RNA, 19 nt, Artificial Sequence
  Description of Artificial Sequence: Synthetic oligonucleotide
  Antisense strand to SEQ ID NO: 754260
aucaugguaaggaacucga

SEQ ID NO: 754262 - RNA, 19 nt, Artificial Sequence
  Description of Artificial Sequence: Synthetic oligonucleotide
  Sense strand starting at position 597 of SEQ ID NO: 586926
guuccuuaccaugauuguu

SEQ ID NO: 754263 - RNA, 19 nt, Artificial Sequence
  Description of Artificial Sequence: Synthetic oligonucleotide
  Antisense strand to SEQ ID NO: 754262
aacaaucaugguaaggaac

SEQ ID NO: 754264 - RNA, 19 nt, Artificial Sequence
  Description of Artificial Sequence: Synthetic oligonucleotide
  Sense strand starting at position 602 of SEQ ID NO: 586926
uuaccaugauuguucguua

SEQ ID NO: 754265 - RNA, 19 nt, Artificial Sequence
  Description of Artificial Sequence: Synthetic oligonucleotide
  Antisense strand to SEQ ID NO: 754264
uaacgaacaaucaugguaa

SEQ ID NO: 754266 - RNA, 19 nt, Artificial Sequence
  Description of Artificial Sequence: Synthetic oligonucleotide
  Sense strand starting at position 607 of SEQ ID NO: 586926
augauuguucguuagcugu

SEQ ID NO: 754267 - RNA, 19 nt, Artificial Sequence
  Description of Artificial Sequence: Synthetic oligonucleotide
  Antisense strand to SEQ ID NO: 754266
acagcuaacgaacaaucau

SEQ ID NO: 754268 - RNA, 19 nt, Artificial Sequence
  Description of Artificial Sequence: Synthetic oligonucleotide
  Sense strand starting at position 721 of SEQ ID NO: 586926
aauaguuauuucuggguug

SEQ ID NO: 754269 - RNA, 19 nt, Artificial Sequence
  Description of Artificial Sequence: Synthetic oligonucleotide
  Antisense strand to SEQ ID NO: 754268
caacccagaaauaacuauu

SEQ ID NO: 754270 - RNA, 19 nt, Artificial Sequence
  Description of Artificial Sequence: Synthetic oligonucleotide
  Sense strand starting at position 722 of SEQ ID NO: 586926
auaguuauuucuggguuga

SEQ ID NO: 754271 - RNA, 19 nt, Artificial Sequence
  Description of Artificial Sequence: Synthetic oligonucleotide
  Antisense strand to SEQ ID NO: 754270
ucaacccagaaauaacuau

SEQ ID NO: 754272 - RNA, 19 nt, Artificial Sequence
  Description of Artificial Sequence: Synthetic oligonucleotide
  Sense strand starting at position 1145 of SEQ ID NO: 586926
gcgacuggcacuugauauu

SEQ ID NO: 754273 - RNA, 19 nt, Artificial Sequence
  Description of Artificial Sequence: Synthetic oligonucleotide
  Antisense strand to SEQ ID NO: 754272
aauaucaagugccagucgc

SEQ ID NO: 754274 - RNA, 19 nt, Artificial Sequence
  Description of Artificial Sequence: Synthetic oligonucleotide
  Sense strand starting at position 1165 of SEQ ID NO: 586926
ccaagucuucuggauguca

SEQ ID NO: 754275 - RNA, 19 nt, Artificial Sequence
  Description of Artificial Sequence: Synthetic oligonucleotide
  Antisense strand to SEQ ID NO: 754274
ugacauccagaagacuugg

SEQ ID NO: 754276 - RNA, 19 nt, Artificial Sequence
  Description of Artificial Sequence: Synthetic oligonucleotide
  Sense strand starting at position 1167 of SEQ ID NO: 586926
aagucuucuggaugucacu

SEQ ID NO: 754277 - RNA, 19 nt, Artificial Sequence
  Description of Artificial Sequence: Synthetic oligonucleotide
  Antisense strand to SEQ ID NO: 754276
agugacauccagaagacuu

SEQ ID NO: 754278 - RNA, 19 nt, Artificial Sequence
  Description of Artificial Sequence: Synthetic oligonucleotide
  Sense strand starting at position 1176 of SEQ ID NO: 586926
ggaugucacucaccggaaa

SEQ ID NO: 754279 - RNA, 19 nt, Artificial Sequence
  Description of Artificial Sequence: Synthetic oligonucleotide
  Antisense strand to SEQ ID NO: 754278
uuuccggugagugacaucc

SEQ ID NO: 754280 - RNA, 19 nt, Artificial Sequence
  Description of Artificial Sequence: Synthetic oligonucleotide
  Sense strand starting at position 2057 of SEQ ID NO: 586926
gcgagaagaaguugucaac

SEQ ID NO: 754281 - RNA, 19 nt, Artificial Sequence
  Description of Artificial Sequence: Synthetic oligonucleotide
  Antisense strand to SEQ ID NO: 754280
guugacaacuucuucucgc

SEQ ID NO: 754282 - RNA, 19 nt, Artificial Sequence
  Description of Artificial Sequence: Synthetic oligonucleotide
  Sense strand starting at position 2696 of SEQ ID NO: 586926
aaguuaccguaauugcaaa

SEQ ID NO: 754283 - RNA, 19 nt, Artificial Sequence
  Description of Artificial Sequence: Synthetic oligonucleotide
  Antisense strand to SEQ ID NO: 754282
uuugcaauuacgguaacuu

SEQ ID NO: 754284 - RNA, 19 nt, Artificial Sequence
  Description of Artificial Sequence: Synthetic oligonucleotide
  Sense strand starting at position 2778 of SEQ ID NO: 586926
uguucagaggaguggauau

SEQ ID NO: 754285 - RNA, 19 nt, Artificial Sequence
  Description of Artificial Sequence: Synthetic oligonucleotide
  Antisense strand to SEQ ID NO: 754284
auauccacuccucugaaca

SEQ ID NO: 754286 - RNA, 19 nt, Artificial Sequence
  Description of Artificial Sequence: Synthetic oligonucleotide
  Sense strand starting at position 2790 of SEQ ID NO: 586926
uggauauggcauuguagaa

SEQ ID NO: 754287 - RNA, 19 nt, Artificial Sequence
  Description of Artificial Sequence: Synthetic oligonucleotide
  Antisense strand to SEQ ID NO: 754286
uucuacaaugccauaucca

SEQ ID NO: 754288 - RNA, 19 nt, Artificial Sequence
  Description of Artificial Sequence: Synthetic oligonucleotide
  Sense strand starting at position 2988 of SEQ ID NO: 586926
ugugguaagcauuagcaga

SEQ ID NO: 754289 - RNA, 19 nt, Artificial Sequence
  Description of Artificial Sequence: Synthetic oligonucleotide
  Antisense strand to SEQ ID NO: 754288
ucugcuaaugcuuaccaca

SEQ ID NO: 754290 - RNA, 19 nt, Artificial Sequence
  Description of Artificial Sequence: Synthetic oligonucleotide
  Sense strand starting at position 2993 of SEQ ID NO: 586926
uaagcauuagcagaguuua

SEQ ID NO: 754291 - RNA, 19 nt, Artificial Sequence
  Description of Artificial Sequence: Synthetic oligonucleotide
  Antisense strand to SEQ ID NO: 754290
uaaacucugcuaaugcuua

SEQ ID NO: 754292 - RNA, 19 nt, Artificial Sequence
  Description of Artificial Sequence: Synthetic oligonucleotide
  Sense strand starting at position 3121 of SEQ ID NO: 586926
ugugaugauggucgcauga

SEQ ID NO: 754293 - RNA, 19 nt, Artificial Sequence
  Description of Artificial Sequence: Synthetic oligonucleotide
  Antisense strand to SEQ ID NO: 754292
ucaugcgaccaucaucaca

SEQ ID NO: 754294 - RNA, 19 nt, Artificial Sequence
  Description of Artificial Sequence: Synthetic oligonucleotide
  Sense strand starting at position 3131 of SEQ ID NO: 586926
gucgcaugagaucauguaa

SEQ ID NO: 754295 - RNA, 19 nt, Artificial Sequence
  Description of Artificial Sequence: Synthetic oligonucleotide
  Antisense strand to SEQ ID NO: 754294
uuacaugaucucaugcgac

SEQ ID NO: 754296 - RNA, 19 nt, Artificial Sequence
  Description of Artificial Sequence: Synthetic oligonucleotide
  Sense strand starting at position 3138 of SEQ ID NO: 586926
gagaucauguaagagauga

SEQ ID NO: 754297 - RNA, 19 nt, Artificial Sequence
  Description of Artificial Sequence: Synthetic oligonucleotide
  Antisense strand to SEQ ID NO: 754296
ucaucucuuacaugaucuc

SEQ ID NO: 754298 - RNA, 19 nt, Artificial Sequence
  Description of Artificial Sequence: Synthetic oligonucleotide
  Sense strand starting at position 3314 of SEQ ID NO: 586926
cgccuaugguauuugucaa

SEQ ID NO: 754299 - RNA, 19 nt, Artificial Sequence
  Description of Artificial Sequence: Synthetic oligonucleotide
  Antisense strand to SEQ ID NO: 754298
uugacaaauaccauaggcg

SEQ ID NO: 754300 - RNA, 19 nt, Artificial Sequence
  Description of Artificial Sequence: Synthetic oligonucleotide
  Sense strand starting at position 3336 of SEQ ID NO: 586926
acugauugguggcucaaua

SEQ ID NO: 754301 - RNA, 19 nt, Artificial Sequence
  Description of Artificial Sequence: Synthetic oligonucleotide
  Antisense strand to SEQ ID NO: 754300
uauugagccaccaaucagu

SEQ ID NO: 754302 - RNA, 19 nt, Artificial Sequence
  Description of Artificial Sequence: Synthetic oligonucleotide
  Sense strand starting at position 3936 of SEQ ID NO: 586926
ggugaaaccucgucugcag

SEQ ID NO: 754303 - RNA, 19 nt, Artificial Sequence
  Description of Artificial Sequence: Synthetic oligonucleotide
  Antisense strand to SEQ ID NO: 754302
cugcagacgagguuucacc

SEQ ID NO: 754304 - RNA, 19 nt, Artificial Sequence
  Description of Artificial Sequence: Synthetic oligonucleotide
  Sense strand starting at position 3939 of SEQ ID NO: 586926
gaaaccucgucugcaguua

SEQ ID NO: 754305 - RNA, 19 nt, Artificial Sequence
  Description of Artificial Sequence: Synthetic oligonucleotide
  Antisense strand to SEQ ID NO: 754304
uaacugcagacgagguuuc

SEQ ID NO: 754306 - RNA, 19 nt, Artificial Sequence
  Description of Artificial Sequence: Synthetic oligonucleotide
  Sense strand starting at position 3940 of SEQ ID NO: 586926
aaaccucgucugcaguuaa

SEQ ID NO: 754307 - RNA, 19 nt, Artificial Sequence
  Description of Artificial Sequence: Synthetic oligonucleotide
  Antisense strand to SEQ ID NO: 754306
uuaacugcagacgagguuu

SEQ ID NO: 754308 - RNA, 19 nt, Artificial Sequence
  Description of Artificial Sequence: Synthetic oligonucleotide
  Sense strand starting at position 22 of SEQ ID NO: 586927
ggaacauaaggcuguaaua

SEQ ID NO: 754309 - RNA, 19 nt, Artificial Sequence
  Description of Artificial Sequence: Synthetic oligonucleotide
  Antisense strand to SEQ ID NO: 754308
uauuacagccuuauguucc

SEQ ID NO: 754310 - RNA, 19 nt, Artificial Sequence
  Description of Artificial Sequence: Synthetic oligonucleotide
  Sense strand starting at position 154 of SEQ ID NO: 586927
aaaguaaugcaagggcuau

SEQ ID NO: 754311 - RNA, 19 nt, Artificial Sequence
  Description of Artificial Sequence: Synthetic oligonucleotide
  Antisense strand to SEQ ID NO: 754310
auagcccuugcauuacuuu

SEQ ID NO: 754312 - RNA, 19 nt, Artificial Sequence
  Description of Artificial Sequence: Synthetic oligonucleotide
  Sense strand starting at position 168 of SEQ ID NO: 586927
gcuauuaaucaagauguua

SEQ ID NO: 754313 - RNA, 19 nt, Artificial Sequence
  Description of Artificial Sequence: Synthetic oligonucleotide
  Antisense strand to SEQ ID NO: 754312
uaacaucuugauuaauagc

SEQ ID NO: 754314 - RNA, 19 nt, Artificial Sequence
  Description of Artificial Sequence: Synthetic oligonucleotide
  Sense strand starting at position 306 of SEQ ID NO: 586927
gccgacuuggcucaacaaa

SEQ ID NO: 754315 - RNA, 19 nt, Artificial Sequence
  Description of Artificial Sequence: Synthetic oligonucleotide
  Antisense strand to SEQ ID NO: 754314
uuuguugagccaagucggc

SEQ ID NO: 754316 - RNA, 19 nt, Artificial Sequence
  Description of Artificial Sequence: Synthetic oligonucleotide
  Sense strand starting at position 326 of SEQ ID NO: 586927
ugcauuaccugauccauga

SEQ ID NO: 754317 - RNA, 19 nt, Artificial Sequence
  Description of Artificial Sequence: Synthetic oligonucleotide
  Antisense strand to SEQ ID NO: 754316
ucauggaucagguaaugca

SEQ ID NO: 754318 - RNA, 19 nt, Artificial Sequence
  Description of Artificial Sequence: Synthetic oligonucleotide
  Sense strand starting at position 375 of SEQ ID NO: 586927
ugguauugguucucauaca

SEQ ID NO: 754319 - RNA, 19 nt, Artificial Sequence
  Description of Artificial Sequence: Synthetic oligonucleotide
  Antisense strand to SEQ ID NO: 754318
uguaugagaaccaauacca

SEQ ID NO: 754320 - RNA, 19 nt, Artificial Sequence
  Description of Artificial Sequence: Synthetic oligonucleotide
  Sense strand starting at position 795 of SEQ ID NO: 586927
cagugucuuguacagugaa

SEQ ID NO: 754321 - RNA, 19 nt, Artificial Sequence
  Description of Artificial Sequence: Synthetic oligonucleotide
  Antisense strand to SEQ ID NO: 754320
uucacuguacaagacacug

SEQ ID NO: 754322 - RNA, 19 nt, Artificial Sequence
  Description of Artificial Sequence: Synthetic oligonucleotide
  Sense strand starting at position 827 of SEQ ID NO: 586927
gcugcaagagccuagaaua

SEQ ID NO: 754323 - RNA, 19 nt, Artificial Sequence
  Description of Artificial Sequence: Synthetic oligonucleotide
  Antisense strand to SEQ ID NO: 754322
uauucuaggcucuugcagc

SEQ ID NO: 754324 - RNA, 19 nt, Artificial Sequence
  Description of Artificial Sequence: Synthetic oligonucleotide
  Sense strand starting at position 945 of SEQ ID NO: 586927
agaagcuacuagcuaaauu

SEQ ID NO: 754325 - RNA, 19 nt, Artificial Sequence
  Description of Artificial Sequence: Synthetic oligonucleotide
  Antisense strand to SEQ ID NO: 754324
aauuuagcuaguagcuucu

SEQ ID NO: 754326 - RNA, 19 nt, Artificial Sequence
  Description of Artificial Sequence: Synthetic oligonucleotide
  Sense strand starting at position 1050 of SEQ ID NO: 586927
auagaaauguuauccgauc

SEQ ID NO: 754327 - RNA, 19 nt, Artificial Sequence
  Description of Artificial Sequence: Synthetic oligonucleotide
  Antisense strand to SEQ ID NO: 754326
gaucggauaacauuucuau

SEQ ID NO: 754328 - RNA, 19 nt, Artificial Sequence
  Description of Artificial Sequence: Synthetic oligonucleotide
  Sense strand starting at position 1051 of SEQ ID NO: 586927
uagaaauguuauccgaucu

SEQ ID NO: 754329 - RNA, 19 nt, Artificial Sequence
  Description of Artificial Sequence: Synthetic oligonucleotide
  Antisense strand to SEQ ID NO: 754328
agaucggauaacauuucua

SEQ ID NO: 754330 - RNA, 19 nt, Artificial Sequence
  Description of Artificial Sequence: Synthetic oligonucleotide
  Sense strand starting at position 1264 of SEQ ID NO: 586927
ccaggaauucugcaacguu

SEQ ID NO: 754331 - RNA, 19 nt, Artificial Sequence
  Description of Artificial Sequence: Synthetic oligonucleotide
  Antisense strand to SEQ ID NO: 754330
aacguugcagaauuccugg

SEQ ID NO: 754332 - RNA, 19 nt, Artificial Sequence
  Description of Artificial Sequence: Synthetic oligonucleotide
  Sense strand starting at position 1367 of SEQ ID NO: 586927
uaaucauaguugucacgaa

SEQ ID NO: 754333 - RNA, 19 nt, Artificial Sequence
  Description of Artificial Sequence: Synthetic oligonucleotide
  Antisense strand to SEQ ID NO: 754332
uucgugacaacuaugauua

SEQ ID NO: 754334 - RNA, 19 nt, Artificial Sequence
  Description of Artificial Sequence: Synthetic oligonucleotide
  Sense strand starting at position 1371 of SEQ ID NO: 586927
cauaguugucacgaaggaa

SEQ ID NO: 754335 - RNA, 19 nt, Artificial Sequence
  Description of Artificial Sequence: Synthetic oligonucleotide
  Antisense strand to SEQ ID NO: 754334
uuccuucgugacaacuaug

SEQ ID NO: 754336 - RNA, 19 nt, Artificial Sequence
  Description of Artificial Sequence: Synthetic oligonucleotide
  Sense strand starting at position 1470 of SEQ ID NO: 586927
cuaugaucucucgaacuag

SEQ ID NO: 754337 - RNA, 19 nt, Artificial Sequence
  Description of Artificial Sequence: Synthetic oligonucleotide
  Antisense strand to SEQ ID NO: 754336
cuaguucgagagaucauag

SEQ ID NO: 754338 - RNA, 19 nt, Artificial Sequence
  Description of Artificial Sequence: Synthetic oligonucleotide
  Sense strand starting at position 1544 of SEQ ID NO: 586927
gaguacagcucuucccaga

SEQ ID NO: 754339 - RNA, 19 nt, Artificial Sequence
  Description of Artificial Sequence: Synthetic oligonucleotide
  Antisense strand to SEQ ID NO: 754338
ucugggaagagcuguacuc

SEQ ID NO: 754340 - RNA, 19 nt, Artificial Sequence
  Description of Artificial Sequence: Synthetic oligonucleotide
  Sense strand starting at position 2354 of SEQ ID NO: 586927
uauauaauguuggucgaaa

SEQ ID NO: 754341 - RNA, 19 nt, Artificial Sequence
  Description of Artificial Sequence: Synthetic oligonucleotide
  Antisense strand to SEQ ID NO: 754340
uuucgaccaacauuauaua

SEQ ID NO: 754342 - RNA, 19 nt, Artificial Sequence
  Description of Artificial Sequence: Synthetic oligonucleotide
  Sense strand starting at position 2355 of SEQ ID NO: 586927
auauaauguuggucgaaau

SEQ ID NO: 754343 - RNA, 19 nt, Artificial Sequence
  Description of Artificial Sequence: Synthetic oligonucleotide
  Antisense strand to SEQ ID NO: 754342
auuucgaccaacauuauau

SEQ ID NO: 754344 - RNA, 19 nt, Artificial Sequence
  Description of Artificial Sequence: Synthetic oligonucleotide
  Sense strand starting at position 2356 of SEQ ID NO: 586927
uauaauguuggucgaaaug

SEQ ID NO: 754345 - RNA, 19 nt, Artificial Sequence
  Description of Artificial Sequence: Synthetic oligonucleotide
  Antisense strand to SEQ ID NO: 754344
cauuucgaccaacauuaua

SEQ ID NO: 754346 - RNA, 19 nt, Artificial Sequence
  Description of Artificial Sequence: Synthetic oligonucleotide
  Sense strand starting at position 2373 of SEQ ID NO: 586927
ugaagcuuaugagcaauau

SEQ ID NO: 754347 - RNA, 19 nt, Artificial Sequence
  Description of Artificial Sequence: Synthetic oligonucleotide
  Antisense strand to SEQ ID NO: 754346
auauugcucauaagcuuca

SEQ ID NO: 754348 - RNA, 19 nt, Artificial Sequence
  Description of Artificial Sequence: Synthetic oligonucleotide
  Sense strand starting at position 2377 of SEQ ID NO: 586927
gcuuaugagcaauauaaug

SEQ ID NO: 754349 - RNA, 19 nt, Artificial Sequence
  Description of Artificial Sequence: Synthetic oligonucleotide
  Antisense strand to SEQ ID NO: 754348
cauuauauugcucauaagc

SEQ ID NO: 754350 - RNA, 19 nt, Artificial Sequence
  Description of Artificial Sequence: Synthetic oligonucleotide
  Sense strand starting at position 2473 of SEQ ID NO: 586927
aauugaggccuuugucaaa

SEQ ID NO: 754351 - RNA, 19 nt, Artificial Sequence
  Description of Artificial Sequence: Synthetic oligonucleotide
  Antisense strand to SEQ ID NO: 754350
uuugacaaaggccucaauu

SEQ ID NO: 754352 - RNA, 19 nt, Artificial Sequence
  Description of Artificial Sequence: Synthetic oligonucleotide
  Sense strand starting at position 2580 of SEQ ID NO: 586927
ggcugaaaccgucaguaga

SEQ ID NO: 754353 - RNA, 19 nt, Artificial Sequence
  Description of Artificial Sequence: Synthetic oligonucleotide
  Antisense strand to SEQ ID NO: 754352
ucuacugacgguuucagcc

SEQ ID NO: 754354 - RNA, 19 nt, Artificial Sequence
  Description of Artificial Sequence: Synthetic oligonucleotide
  Sense strand starting at position 2582 of SEQ ID NO: 586927
cugaaaccgucaguagaga

SEQ ID NO: 754355 - RNA, 19 nt, Artificial Sequence
  Description of Artificial Sequence: Synthetic oligonucleotide
  Antisense strand to SEQ ID NO: 754354
ucucuacugacgguuucag

SEQ ID NO: 754356 - RNA, 19 nt, Artificial Sequence
  Description of Artificial Sequence: Synthetic oligonucleotide
  Sense strand starting at position 2776 of SEQ ID NO: 586927
ggaacauuaagacguguua

SEQ ID NO: 754357 - RNA, 19 nt, Artificial Sequence
  Description of Artificial Sequence: Synthetic oligonucleotide
  Antisense strand to SEQ ID NO: 754356
uaacacgucuuaauguucc

SEQ ID NO: 754358 - RNA, 19 nt, Artificial Sequence
  Description of Artificial Sequence: Synthetic oligonucleotide
  Sense strand starting at position 3069 of SEQ ID NO: 586927
ggccuauagugaccaucua

SEQ ID NO: 754359 - RNA, 19 nt, Artificial Sequence
  Description of Artificial Sequence: Synthetic oligonucleotide
  Antisense strand to SEQ ID NO: 754358
uagauggucacuauaggcc

SEQ ID NO: 754360 - RNA, 19 nt, Artificial Sequence
  Description of Artificial Sequence: Synthetic oligonucleotide
  Sense strand starting at position 3070 of SEQ ID NO: 586927
gccuauagugaccaucuaa

SEQ ID NO: 754361 - RNA, 19 nt, Artificial Sequence
  Description of Artificial Sequence: Synthetic oligonucleotide
  Antisense strand to SEQ ID NO: 754360
uuagauggucacuauaggc

SEQ ID NO: 754362 - RNA, 19 nt, Artificial Sequence
  Description of Artificial Sequence: Synthetic oligonucleotide
  Sense strand starting at position 3089 of SEQ ID NO: 586927
ggcaauccugucuaucuca

SEQ ID NO: 754363 - RNA, 19 nt, Artificial Sequence
  Description of Artificial Sequence: Synthetic oligonucleotide
  Antisense strand to SEQ ID NO: 754362
ugagauagacaggauugcc

SEQ ID NO: 754364 - RNA, 19 nt, Artificial Sequence
  Description of Artificial Sequence: Synthetic oligonucleotide
  Sense strand starting at position 3139 of SEQ ID NO: 586927
ucauuugcugcauagcauu

SEQ ID NO: 754365 - RNA, 19 nt, Artificial Sequence
  Description of Artificial Sequence: Synthetic oligonucleotide
  Antisense strand to SEQ ID NO: 754364
aaugcuaugcagcaaauga

SEQ ID NO: 754366 - RNA, 19 nt, Artificial Sequence
  Description of Artificial Sequence: Synthetic oligonucleotide
  Sense strand starting at position 3147 of SEQ ID NO: 586927
ugcauagcauuuguauuaa

SEQ ID NO: 754367 - RNA, 19 nt, Artificial Sequence
  Description of Artificial Sequence: Synthetic oligonucleotide
  Antisense strand to SEQ ID NO: 754366
uuaauacaaaugcuaugca

SEQ ID NO: 754368 - RNA, 19 nt, Artificial Sequence
  Description of Artificial Sequence: Synthetic oligonucleotide
  Sense strand starting at position 3172 of SEQ ID NO: 586927
uuuauuuauuccucggucu

SEQ ID NO: 754369 - RNA, 19 nt, Artificial Sequence
  Description of Artificial Sequence: Synthetic oligonucleotide
  Antisense strand to SEQ ID NO: 754368
agaccgaggaauaaauaaa

SEQ ID NO: 754370 - RNA, 19 nt, Artificial Sequence
  Description of Artificial Sequence: Synthetic oligonucleotide
  Sense strand starting at position 3174 of SEQ ID NO: 586927
uauuuauuccucggucugu

SEQ ID NO: 754371 - RNA, 19 nt, Artificial Sequence
  Description of Artificial Sequence: Synthetic oligonucleotide
  Antisense strand to SEQ ID NO: 754370
acagaccgaggaauaaaua

SEQ ID NO: 754372 - RNA, 19 nt, Artificial Sequence
  Description of Artificial Sequence: Synthetic oligonucleotide
  Sense strand starting at position 3228 of SEQ ID NO: 586927
gcuccaaguggguauaaua

SEQ ID NO: 754373 - RNA, 19 nt, Artificial Sequence
  Description of Artificial Sequence: Synthetic oligonucleotide
  Antisense strand to SEQ ID NO: 754372
uauuauacccacuuggagc

SEQ ID NO: 754374 - RNA, 19 nt, Artificial Sequence
  Description of Artificial Sequence: Synthetic oligonucleotide
  Sense strand starting at position 3354 of SEQ ID NO: 586927
ccaccaaaugucugaguug

SEQ ID NO: 754375 - RNA, 19 nt, Artificial Sequence
  Description of Artificial Sequence: Synthetic oligonucleotide
  Antisense strand to SEQ ID NO: 754374
caacucagacauuuggugg

SEQ ID NO: 754376 - RNA, 19 nt, Artificial Sequence
  Description of Artificial Sequence: Synthetic oligonucleotide
  Sense strand starting at position 3357 of SEQ ID NO: 586927
ccaaaugucugaguugaca

SEQ ID NO: 754377 - RNA, 19 nt, Artificial Sequence
  Description of Artificial Sequence: Synthetic oligonucleotide
  Antisense strand to SEQ ID NO: 754376
ugucaacucagacauuugg

SEQ ID NO: 754378 - RNA, 19 nt, Artificial Sequence
  Description of Artificial Sequence: Synthetic oligonucleotide
  Sense strand starting at position 3453 of SEQ ID NO: 586927
agauguguaccagaaggua

SEQ ID NO: 754379 - RNA, 19 nt, Artificial Sequence
  Description of Artificial Sequence: Synthetic oligonucleotide
  Antisense strand to SEQ ID NO: 754378
uaccuucugguacacaucu

SEQ ID NO: 754380 - RNA, 19 nt, Artificial Sequence
  Description of Artificial Sequence: Synthetic oligonucleotide
  Sense strand starting at position 3516 of SEQ ID NO: 586927
guuauaauugucuacucac

SEQ ID NO: 754381 - RNA, 19 nt, Artificial Sequence
  Description of Artificial Sequence: Synthetic oligonucleotide
  Antisense strand to SEQ ID NO: 754380
gugaguagacaauuauaac

SEQ ID NO: 754382 - RNA, 19 nt, Artificial Sequence
  Description of Artificial Sequence: Synthetic oligonucleotide
  Sense strand starting at position 3522 of SEQ ID NO: 586927
auugucuacucaccugauu

SEQ ID NO: 754383 - RNA, 19 nt, Artificial Sequence
  Description of Artificial Sequence: Synthetic oligonucleotide
  Antisense strand to SEQ ID NO: 754382
aaucaggugaguagacaau

SEQ ID NO: 754384 - RNA, 19 nt, Artificial Sequence
  Description of Artificial Sequence: Synthetic oligonucleotide
  Sense strand starting at position 3777 of SEQ ID NO: 586927
ggcugauaacagcaaaucu

SEQ ID NO: 754385 - RNA, 19 nt, Artificial Sequence
  Description of Artificial Sequence: Synthetic oligonucleotide
  Antisense strand to SEQ ID NO: 754384
agauuugcuguuaucagcc

SEQ ID NO: 754386 - RNA, 19 nt, Artificial Sequence
  Description of Artificial Sequence: Synthetic oligonucleotide
  Sense strand starting at position 3830 of SEQ ID NO: 586927
ucuaauuccugguuacuag

SEQ ID NO: 754387 - RNA, 19 nt, Artificial Sequence
  Description of Artificial Sequence: Synthetic oligonucleotide
  Antisense strand to SEQ ID NO: 754386
cuaguaaccaggaauuaga

SEQ ID NO: 754388 - RNA, 19 nt, Artificial Sequence
  Description of Artificial Sequence: Synthetic oligonucleotide
  Sense strand starting at position 30 of SEQ ID NO: 586928
gaugucaccuugucaagga

SEQ ID NO: 754389 - RNA, 19 nt, Artificial Sequence
  Description of Artificial Sequence: Synthetic oligonucleotide
  Antisense strand to SEQ ID NO: 754388
uccuugacaaggugacauc

SEQ ID NO: 754390 - RNA, 19 nt, Artificial Sequence
  Description of Artificial Sequence: Synthetic oligonucleotide
  Sense strand starting at position 34 of SEQ ID NO: 586928
ucaccuugucaaggaguga

SEQ ID NO: 754391 - RNA, 19 nt, Artificial Sequence
  Description of Artificial Sequence: Synthetic oligonucleotide
  Antisense strand to SEQ ID NO: 754390
ucacuccuugacaagguga

SEQ ID NO: 754392 - RNA, 19 nt, Artificial Sequence
  Description of Artificial Sequence: Synthetic oligonucleotide
  Sense strand starting at position 306 of SEQ ID NO: 586928
acacauuacuagguguuua

SEQ ID NO: 754393 - RNA, 19 nt, Artificial Sequence
  Description of Artificial Sequence: Synthetic oligonucleotide
  Antisense strand to SEQ ID NO: 754392
uaaacaccuaguaaugugu

SEQ ID NO: 754394 - RNA, 19 nt, Artificial Sequence
  Description of Artificial Sequence: Synthetic oligonucleotide
  Sense strand starting at position 571 of SEQ ID NO: 586928
ugagaaucauaagaaauca

SEQ ID NO: 754395 - RNA, 19 nt, Artificial Sequence
  Description of Artificial Sequence: Synthetic oligonucleotide
  Antisense strand to SEQ ID NO: 754394
ugauuucuuaugauucuca

SEQ ID NO: 754396 - RNA, 19 nt, Artificial Sequence
  Description of Artificial Sequence: Synthetic oligonucleotide
  Sense strand starting at position 678 of SEQ ID NO: 586928
ccacuaaauguauguauau

SEQ ID NO: 754397 - RNA, 19 nt, Artificial Sequence
  Description of Artificial Sequence: Synthetic oligonucleotide
  Antisense strand to SEQ ID NO: 754396
auauacauacauuuagugg

SEQ ID NO: 754398 - RNA, 19 nt, Artificial Sequence
  Description of Artificial Sequence: Synthetic oligonucleotide
  Sense strand starting at position 744 of SEQ ID NO: 586928
agaccuaucuaagcaaaug

SEQ ID NO: 754399 - RNA, 19 nt, Artificial Sequence
  Description of Artificial Sequence: Synthetic oligonucleotide
  Antisense strand to SEQ ID NO: 754398
cauuugcuuagauaggucu

SEQ ID NO: 754400 - RNA, 19 nt, Artificial Sequence
  Description of Artificial Sequence: Synthetic oligonucleotide
  Sense strand starting at position 1063 of SEQ ID NO: 586928
cuuggcaaaccaugaucua

SEQ ID NO: 754401 - RNA, 19 nt, Artificial Sequence
  Description of Artificial Sequence: Synthetic oligonucleotide
  Antisense strand to SEQ ID NO: 754400
uagaucaugguuugccaag

SEQ ID NO: 754402 - RNA, 19 nt, Artificial Sequence
  Description of Artificial Sequence: Synthetic oligonucleotide
  Sense strand starting at position 1092 of SEQ ID NO: 586928
uaagcaucugauugucaga

SEQ ID NO: 754403 - RNA, 19 nt, Artificial Sequence
  Description of Artificial Sequence: Synthetic oligonucleotide
  Antisense strand to SEQ ID NO: 754402
ucugacaaucagaugcuua

SEQ ID NO: 754404 - RNA, 19 nt, Artificial Sequence
  Description of Artificial Sequence: Synthetic oligonucleotide
  Sense strand starting at position 1097 of SEQ ID NO: 586928
aucugauugucagauuuga

SEQ ID NO: 754405 - RNA, 19 nt, Artificial Sequence
  Description of Artificial Sequence: Synthetic oligonucleotide
  Antisense strand to SEQ ID NO: 754404
ucaaaucugacaaucagau

SEQ ID NO: 754406 - RNA, 19 nt, Artificial Sequence
  Description of Artificial Sequence: Synthetic oligonucleotide
  Sense strand starting at position 1102 of SEQ ID NO: 586928
auugucagauuugaacaaa

SEQ ID NO: 754407 - RNA, 19 nt, Artificial Sequence
  Description of Artificial Sequence: Synthetic oligonucleotide
  Antisense strand to SEQ ID NO: 754406
uuuguucaaaucugacaau

SEQ ID NO: 754408 - RNA, 19 nt, Artificial Sequence
  Description of Artificial Sequence: Synthetic oligonucleotide
  Sense strand starting at position 1184 of SEQ ID NO: 586928
aguaauuauagguaaggca

SEQ ID NO: 754409 - RNA, 19 nt, Artificial Sequence
  Description of Artificial Sequence: Synthetic oligonucleotide
  Antisense strand to SEQ ID NO: 754408
ugccuuaccuauaauuacu

SEQ ID NO: 754410 - RNA, 19 nt, Artificial Sequence
  Description of Artificial Sequence: Synthetic oligonucleotide
  Sense strand starting at position 1343 of SEQ ID NO: 586928
cagcaaaugugauuaaaug

SEQ ID NO: 754411 - RNA, 19 nt, Artificial Sequence
  Description of Artificial Sequence: Synthetic oligonucleotide
  Antisense strand to SEQ ID NO: 754410
cauuuaaucacauuugcug

SEQ ID NO: 754412 - RNA, 19 nt, Artificial Sequence
  Description of Artificial Sequence: Synthetic oligonucleotide
  Sense strand starting at position 1344 of SEQ ID NO: 586928
agcaaaugugauuaaaugu

SEQ ID NO: 754413 - RNA, 19 nt, Artificial Sequence
  Description of Artificial Sequence: Synthetic oligonucleotide
  Antisense strand to SEQ ID NO: 754412
acauuuaaucacauuugcu

SEQ ID NO: 754414 - RNA, 19 nt, Artificial Sequence
  Description of Artificial Sequence: Synthetic oligonucleotide
  Sense strand starting at position 1368 of SEQ ID NO: 586928
guuugcauuuaaguuguca

SEQ ID NO: 754415 - RNA, 19 nt, Artificial Sequence
  Description of Artificial Sequence: Synthetic oligonucleotide
  Antisense strand to SEQ ID NO: 754414
ugacaacuuaaaugcaaac

SEQ ID NO: 754416 - RNA, 19 nt, Artificial Sequence
  Description of Artificial Sequence: Synthetic oligonucleotide
  Sense strand starting at position 1459 of SEQ ID NO: 586928
gguuuaccagguuaaacua

SEQ ID NO: 754417 - RNA, 19 nt, Artificial Sequence
  Description of Artificial Sequence: Synthetic oligonucleotide
  Antisense strand to SEQ ID NO: 754416
uaguuuaaccugguaaacc

SEQ ID NO: 754418 - RNA, 19 nt, Artificial Sequence
  Description of Artificial Sequence: Synthetic oligonucleotide
  Sense strand starting at position 1468 of SEQ ID NO: 586928
gguuaaacuaaagguuuga

SEQ ID NO: 754419 - RNA, 19 nt, Artificial Sequence
  Description of Artificial Sequence: Synthetic oligonucleotide
  Antisense strand to SEQ ID NO: 754418
ucaaaccuuuaguuuaacc

SEQ ID NO: 754420 - RNA, 19 nt, Artificial Sequence
  Description of Artificial Sequence: Synthetic oligonucleotide
  Sense strand starting at position 1567 of SEQ ID NO: 586928
gauuuaccuuuguaggaua

SEQ ID NO: 754421 - RNA, 19 nt, Artificial Sequence
  Description of Artificial Sequence: Synthetic oligonucleotide
  Antisense strand to SEQ ID NO: 754420
uauccuacaaagguaaauc

SEQ ID NO: 754422 - RNA, 19 nt, Artificial Sequence
  Description of Artificial Sequence: Synthetic oligonucleotide
  Sense strand starting at position 1569 of SEQ ID NO: 586928
uuuaccuuuguaggauaau

SEQ ID NO: 754423 - RNA, 19 nt, Artificial Sequence
  Description of Artificial Sequence: Synthetic oligonucleotide
  Antisense strand to SEQ ID NO: 754422
auuauccuacaaagguaaa

SEQ ID NO: 754424 - RNA, 19 nt, Artificial Sequence
  Description of Artificial Sequence: Synthetic oligonucleotide
  Sense strand starting at position 1619 of SEQ ID NO: 586928
gauaguuugcucuugcugu

SEQ ID NO: 754425 - RNA, 19 nt, Artificial Sequence
  Description of Artificial Sequence: Synthetic oligonucleotide
  Antisense strand to SEQ ID NO: 754424
acagcaagagcaaacuauc

SEQ ID NO: 754426 - RNA, 19 nt, Artificial Sequence
  Description of Artificial Sequence: Synthetic oligonucleotide
  Sense strand starting at position 1621 of SEQ ID NO: 586928
uaguuugcucuugcuguaa

SEQ ID NO: 754427 - RNA, 19 nt, Artificial Sequence
  Description of Artificial Sequence: Synthetic oligonucleotide
  Antisense strand to SEQ ID NO: 754426
uuacagcaagagcaaacua

SEQ ID NO: 754428 - RNA, 19 nt, Artificial Sequence
  Description of Artificial Sequence: Synthetic oligonucleotide
  Sense strand starting at position 1624 of SEQ ID NO: 586928
uuugcucuugcuguaagua

SEQ ID NO: 754429 - RNA, 19 nt, Artificial Sequence
  Description of Artificial Sequence: Synthetic oligonucleotide
  Antisense strand to SEQ ID NO: 754428
uacuuacagcaagagcaaa

SEQ ID NO: 754430 - RNA, 19 nt, Artificial Sequence
  Description of Artificial Sequence: Synthetic oligonucleotide
  Sense strand starting at position 1940 of SEQ ID NO: 586928
cacaacuguuguguggaaa

SEQ ID NO: 754431 - RNA, 19 nt, Artificial Sequence
  Description of Artificial Sequence: Synthetic oligonucleotide
  Antisense strand to SEQ ID NO: 754430
uuuccacacaacaguugug

SEQ ID NO: 754432 - RNA, 19 nt, Artificial Sequence
  Description of Artificial Sequence: Synthetic oligonucleotide
  Sense strand starting at position 1941 of SEQ ID NO: 586928
acaacuguuguguggaaag

SEQ ID NO: 754433 - RNA, 19 nt, Artificial Sequence
  Description of Artificial Sequence: Synthetic oligonucleotide
  Antisense strand to SEQ ID NO: 754432
cuuuccacacaacaguugu

SEQ ID NO: 754434 - RNA, 19 nt, Artificial Sequence
  Description of Artificial Sequence: Synthetic oligonucleotide
  Sense strand starting at position 1943 of SEQ ID NO: 586928
aacuguuguguggaaagaa

SEQ ID NO: 754435 - RNA, 19 nt, Artificial Sequence
  Description of Artificial Sequence: Synthetic oligonucleotide
  Antisense strand to SEQ ID NO: 754434
uucuuuccacacaacaguu

SEQ ID NO: 754436 - RNA, 19 nt, Artificial Sequence
  Description of Artificial Sequence: Synthetic oligonucleotide
  Sense strand starting at position 2036 of SEQ ID NO: 586928
gccgguggcagucucuaau

SEQ ID NO: 754437 - RNA, 19 nt, Artificial Sequence
  Description of Artificial Sequence: Synthetic oligonucleotide
  Antisense strand to SEQ ID NO: 754436
auuagagacugccaccggc

SEQ ID NO: 754438 - RNA, 19 nt, Artificial Sequence
  Description of Artificial Sequence: Synthetic oligonucleotide
  Sense strand starting at position 2360 of SEQ ID NO: 586928
gugaaaggcauguagcuau

SEQ ID NO: 754439 - RNA, 19 nt, Artificial Sequence
  Description of Artificial Sequence: Synthetic oligonucleotide
  Antisense strand to SEQ ID NO: 754438
auagcuacaugccuuucac

SEQ ID NO: 754440 - RNA, 19 nt, Artificial Sequence
  Description of Artificial Sequence: Synthetic oligonucleotide
  Sense strand starting at position 2363 of SEQ ID NO: 586928
aaaggcauguagcuauaaa

SEQ ID NO: 754441 - RNA, 19 nt, Artificial Sequence
  Description of Artificial Sequence: Synthetic oligonucleotide
  Antisense strand to SEQ ID NO: 754440
uuuauagcuacaugccuuu

SEQ ID NO: 754442 - RNA, 19 nt, Artificial Sequence
  Description of Artificial Sequence: Synthetic oligonucleotide
  Sense strand starting at position 2589 of SEQ ID NO: 586928
uuuaaagccuuguuagaga

SEQ ID NO: 754443 - RNA, 19 nt, Artificial Sequence
  Description of Artificial Sequence: Synthetic oligonucleotide
  Antisense strand to SEQ ID NO: 754442
ucucuaacaaggcuuuaaa

SEQ ID NO: 754444 - RNA, 19 nt, Artificial Sequence
  Description of Artificial Sequence: Synthetic oligonucleotide
  Sense strand starting at position 2721 of SEQ ID NO: 586928
aaauauagguccuuugaga

SEQ ID NO: 754445 - RNA, 19 nt, Artificial Sequence
  Description of Artificial Sequence: Synthetic oligonucleotide
  Antisense strand to SEQ ID NO: 754444
ucucaaaggaccuauauuu

SEQ ID NO: 754446 - RNA, 19 nt, Artificial Sequence
  Description of Artificial Sequence: Synthetic oligonucleotide
  Sense strand starting at position 2973 of SEQ ID NO: 586928
gcugaaggguuacuaaauu

SEQ ID NO: 754447 - RNA, 19 nt, Artificial Sequence
  Description of Artificial Sequence: Synthetic oligonucleotide
  Antisense strand to SEQ ID NO: 754446
aauuuaguaacccuucagc

SEQ ID NO: 754448 - RNA, 19 nt, Artificial Sequence
  Description of Artificial Sequence: Synthetic oligonucleotide
  Sense strand starting at position 3282 of SEQ ID NO: 586928
gggaaacuucuuggcugaa

SEQ ID NO: 754449 - RNA, 19 nt, Artificial Sequence
  Description of Artificial Sequence: Synthetic oligonucleotide
  Antisense strand to SEQ ID NO: 754448
uucagccaagaaguuuccc

SEQ ID NO: 754450 - RNA, 19 nt, Artificial Sequence
  Description of Artificial Sequence: Synthetic oligonucleotide
  Sense strand starting at position 3283 of SEQ ID NO: 586928
ggaaacuucuuggcugaag

SEQ ID NO: 754451 - RNA, 19 nt, Artificial Sequence
  Description of Artificial Sequence: Synthetic oligonucleotide
  Antisense strand to SEQ ID NO: 754450
cuucagccaagaaguuucc

SEQ ID NO: 754452 - RNA, 19 nt, Artificial Sequence
  Description of Artificial Sequence: Synthetic oligonucleotide
  Sense strand starting at position 3341 of SEQ ID NO: 586928
cugaaaguggcuuaguauu

SEQ ID NO: 754453 - RNA, 19 nt, Artificial Sequence
  Description of Artificial Sequence: Synthetic oligonucleotide
  Antisense strand to SEQ ID NO: 754452
aauacuaagccacuuucag

SEQ ID NO: 754454 - RNA, 19 nt, Artificial Sequence
  Description of Artificial Sequence: Synthetic oligonucleotide
  Sense strand starting at position 3349 of SEQ ID NO: 586928
ggcuuaguauucuuaagaa

SEQ ID NO: 754455 - RNA, 19 nt, Artificial Sequence
  Description of Artificial Sequence: Synthetic oligonucleotide
  Antisense strand to SEQ ID NO: 754454
uucuuaagaauacuaagcc

SEQ ID NO: 754456 - RNA, 19 nt, Artificial Sequence
  Description of Artificial Sequence: Synthetic oligonucleotide
  Sense strand starting at position 3515 of SEQ ID NO: 586928
gugugaauguagguggaga

SEQ ID NO: 754457 - RNA, 19 nt, Artificial Sequence
  Description of Artificial Sequence: Synthetic oligonucleotide
  Antisense strand to SEQ ID NO: 754456
ucuccaccuacauucacac

SEQ ID NO: 754458 - RNA, 19 nt, Artificial Sequence
  Description of Artificial Sequence: Synthetic oligonucleotide
  Sense strand starting at position 3516 of SEQ ID NO: 586928
ugugaauguagguggagaa

SEQ ID NO: 754459 - RNA, 19 nt, Artificial Sequence
  Description of Artificial Sequence: Synthetic oligonucleotide
  Antisense strand to SEQ ID NO: 754458
uucuccaccuacauucaca

SEQ ID NO: 754460 - RNA, 19 nt, Artificial Sequence
  Description of Artificial Sequence: Synthetic oligonucleotide
  Sense strand starting at position 3626 of SEQ ID NO: 586928
cuuauuguauuugucaguu

SEQ ID NO: 754461 - RNA, 19 nt, Artificial Sequence
  Description of Artificial Sequence: Synthetic oligonucleotide
  Antisense strand to SEQ ID NO: 754460
aacugacaaauacaauaag

SEQ ID NO: 754462 - RNA, 19 nt, Artificial Sequence
  Description of Artificial Sequence: Synthetic oligonucleotide
  Sense strand starting at position 3630 of SEQ ID NO: 586928
uuguauuugucaguuuccu

SEQ ID NO: 754463 - RNA, 19 nt, Artificial Sequence
  Description of Artificial Sequence: Synthetic oligonucleotide
  Antisense strand to SEQ ID NO: 754462
aggaaacugacaaauacaa

SEQ ID NO: 754464 - RNA, 19 nt, Artificial Sequence
  Description of Artificial Sequence: Synthetic oligonucleotide
  Sense strand starting at position 3662 of SEQ ID NO: 586928
cagccaguauuguuaagaa

SEQ ID NO: 754465 - RNA, 19 nt, Artificial Sequence
  Description of Artificial Sequence: Synthetic oligonucleotide
  Antisense strand to SEQ ID NO: 754464
uucuuaacaauacuggcug

SEQ ID NO: 754466 - RNA, 19 nt, Artificial Sequence
  Description of Artificial Sequence: Synthetic oligonucleotide
  Sense strand starting at position 3906 of SEQ ID NO: 586928
guuuaaaugcuuuaaguag

SEQ ID NO: 754467 - RNA, 19 nt, Artificial Sequence
  Description of Artificial Sequence: Synthetic oligonucleotide
  Antisense strand to SEQ ID NO: 754466
cuacuuaaagcauuuaaac

SEQ ID NO: 754468 - RNA, 19 nt, Artificial Sequence
  Description of Artificial Sequence: Synthetic oligonucleotide
  Sense strand starting at position 2 of SEQ ID NO: 586929
cacugaagucacuggaauc

SEQ ID NO: 754469 - RNA, 19 nt, Artificial Sequence
  Description of Artificial Sequence: Synthetic oligonucleotide
  Antisense strand to SEQ ID NO: 754468
gauuccagugacuucagug

SEQ ID NO: 754470 - RNA, 19 nt, Artificial Sequence
  Description of Artificial Sequence: Synthetic oligonucleotide
  Sense strand starting at position 59 of SEQ ID NO: 586929
uguuaaaugaugcaguuga

SEQ ID NO: 754471 - RNA, 19 nt, Artificial Sequence
  Description of Artificial Sequence: Synthetic oligonucleotide
  Antisense strand to SEQ ID NO: 754470
ucaacugcaucauuuaaca

SEQ ID NO: 754472 - RNA, 19 nt, Artificial Sequence
  Description of Artificial Sequence: Synthetic oligonucleotide
  Sense strand starting at position 111 of SEQ ID NO: 586929
ugaccuaguggugagcaau

SEQ ID NO: 754473 - RNA, 19 nt, Artificial Sequence
  Description of Artificial Sequence: Synthetic oligonucleotide
  Antisense strand to SEQ ID NO: 754472
auugcucaccacuagguca

SEQ ID NO: 754474 - RNA, 19 nt, Artificial Sequence
  Description of Artificial Sequence: Synthetic oligonucleotide
  Sense strand starting at position 291 of SEQ ID NO: 586929
accagauaauguguuacca

SEQ ID NO: 754475 - RNA, 19 nt, Artificial Sequence
  Description of Artificial Sequence: Synthetic oligonucleotide
  Antisense strand to SEQ ID NO: 754474
ugguaacacauuaucuggu

SEQ ID NO: 754476 - RNA, 19 nt, Artificial Sequence
  Description of Artificial Sequence: Synthetic oligonucleotide
  Sense strand starting at position 801 of SEQ ID NO: 586929
gugacuuucccucaguaau

SEQ ID NO: 754477 - RNA, 19 nt, Artificial Sequence
  Description of Artificial Sequence: Synthetic oligonucleotide
  Antisense strand to SEQ ID NO: 754476
auuacugagggaaagucac

SEQ ID NO: 754478 - RNA, 19 nt, Artificial Sequence
  Description of Artificial Sequence: Synthetic oligonucleotide
  Sense strand starting at position 1003 of SEQ ID NO: 586929
gauacaauggcaggugaaa

SEQ ID NO: 754479 - RNA, 19 nt, Artificial Sequence
  Description of Artificial Sequence: Synthetic oligonucleotide
  Antisense strand to SEQ ID NO: 754478
uuucaccugccauuguauc

SEQ ID NO: 754480 - RNA, 19 nt, Artificial Sequence
  Description of Artificial Sequence: Synthetic oligonucleotide
  Sense strand starting at position 1225 of SEQ ID NO: 586929
uuaucuccucuggagcaau

SEQ ID NO: 754481 - RNA, 19 nt, Artificial Sequence
  Description of Artificial Sequence: Synthetic oligonucleotide
  Antisense strand to SEQ ID NO: 754480
auugcuccagaggagauaa

SEQ ID NO: 754482 - RNA, 19 nt, Artificial Sequence
  Description of Artificial Sequence: Synthetic oligonucleotide
  Sense strand starting at position 1334 of SEQ ID NO: 586929
gggaaagcuucccugacaa

SEQ ID NO: 754483 - RNA, 19 nt, Artificial Sequence
  Description of Artificial Sequence: Synthetic oligonucleotide
  Antisense strand to SEQ ID NO: 754482
uugucagggaagcuuuccc

SEQ ID NO: 754484 - RNA, 19 nt, Artificial Sequence
  Description of Artificial Sequence: Synthetic oligonucleotide
  Sense strand starting at position 1385 of SEQ ID NO: 586929
ugagcauaccaauguauga

SEQ ID NO: 754485 - RNA, 19 nt, Artificial Sequence
  Description of Artificial Sequence: Synthetic oligonucleotide
  Antisense strand to SEQ ID NO: 754484
ucauacauugguaugcuca

SEQ ID NO: 754486 - RNA, 19 nt, Artificial Sequence
  Description of Artificial Sequence: Synthetic oligonucleotide
  Sense strand starting at position 2533 of SEQ ID NO: 586929
ggucaagauaaacgacaau

SEQ ID NO: 754487 - RNA, 19 nt, Artificial Sequence
  Description of Artificial Sequence: Synthetic oligonucleotide
  Antisense strand to SEQ ID NO: 754486
auugucguuuaucuugacc

SEQ ID NO: 754488 - RNA, 19 nt, Artificial Sequence
  Description of Artificial Sequence: Synthetic oligonucleotide
  Sense strand starting at position 2602 of SEQ ID NO: 586929
ccuuaaugcccugaaagca

SEQ ID NO: 754489 - RNA, 19 nt, Artificial Sequence
  Description of Artificial Sequence: Synthetic oligonucleotide
  Antisense strand to SEQ ID NO: 754488
ugcuuucagggcauuaagg

SEQ ID NO: 754490 - RNA, 19 nt, Artificial Sequence
  Description of Artificial Sequence: Synthetic oligonucleotide
  Sense strand starting at position 2610 of SEQ ID NO: 586929
cccugaaagcaguaauucu

SEQ ID NO: 754491 - RNA, 19 nt, Artificial Sequence
  Description of Artificial Sequence: Synthetic oligonucleotide
  Antisense strand to SEQ ID NO: 754490
agaauuacugcuuucaggg

SEQ ID NO: 754492 - RNA, 19 nt, Artificial Sequence
  Description of Artificial Sequence: Synthetic oligonucleotide
  Sense strand starting at position 2708 of SEQ ID NO: 586929
uugacaauucuauguggag

SEQ ID NO: 754493 - RNA, 19 nt, Artificial Sequence
  Description of Artificial Sequence: Synthetic oligonucleotide
  Antisense strand to SEQ ID NO: 754492
cuccacauagaauugucaa

SEQ ID NO: 754494 - RNA, 19 nt, Artificial Sequence
  Description of Artificial Sequence: Synthetic oligonucleotide
  Sense strand starting at position 2709 of SEQ ID NO: 586929
ugacaauucuauguggaga

SEQ ID NO: 754495 - RNA, 19 nt, Artificial Sequence
  Description of Artificial Sequence: Synthetic oligonucleotide
  Antisense strand to SEQ ID NO: 754494
ucuccacauagaauuguca

SEQ ID NO: 754496 - RNA, 19 nt, Artificial Sequence
  Description of Artificial Sequence: Synthetic oligonucleotide
  Sense strand starting at position 2737 of SEQ ID NO: 586929
gaguuaugccaacagauug

SEQ ID NO: 754497 - RNA, 19 nt, Artificial Sequence
  Description of Artificial Sequence: Synthetic oligonucleotide
  Antisense strand to SEQ ID NO: 754496
caaucuguuggcauaacuc

SEQ ID NO: 754498 - RNA, 19 nt, Artificial Sequence
  Description of Artificial Sequence: Synthetic oligonucleotide
  Sense strand starting at position 2820 of SEQ ID NO: 586929
cguuaaacucuggaacuga

SEQ ID NO: 754499 - RNA, 19 nt, Artificial Sequence
  Description of Artificial Sequence: Synthetic oligonucleotide
  Antisense strand to SEQ ID NO: 754498
ucaguuccagaguuuaacg

SEQ ID NO: 754500 - RNA, 19 nt, Artificial Sequence
  Description of Artificial Sequence: Synthetic oligonucleotide
  Sense strand starting at position 2858 of SEQ ID NO: 586929
auuacuucuccggaccaca

SEQ ID NO: 754501 - RNA, 19 nt, Artificial Sequence
  Description of Artificial Sequence: Synthetic oligonucleotide
  Antisense strand to SEQ ID NO: 754500
ugugguccggagaaguaau

SEQ ID NO: 754502 - RNA, 19 nt, Artificial Sequence
  Description of Artificial Sequence: Synthetic oligonucleotide
  Sense strand starting at position 2887 of SEQ ID NO: 586929
uguuuaaacaucgggagaa

SEQ ID NO: 754503 - RNA, 19 nt, Artificial Sequence
  Description of Artificial Sequence: Synthetic oligonucleotide
  Antisense strand to SEQ ID NO: 754502
uucucccgauguuuaaaca

SEQ ID NO: 754504 - RNA, 19 nt, Artificial Sequence
  Description of Artificial Sequence: Synthetic oligonucleotide
  Sense strand starting at position 2990 of SEQ ID NO: 586929
gaacguggaguguaauauc

SEQ ID NO: 754505 - RNA, 19 nt, Artificial Sequence
  Description of Artificial Sequence: Synthetic oligonucleotide
  Antisense strand to SEQ ID NO: 754504
gauauuacacuccacguuc

SEQ ID NO: 754506 - RNA, 19 nt, Artificial Sequence
  Description of Artificial Sequence: Synthetic oligonucleotide
  Sense strand starting at position 2999 of SEQ ID NO: 586929
guguaauaucuccaccuua

SEQ ID NO: 754507 - RNA, 19 nt, Artificial Sequence
  Description of Artificial Sequence: Synthetic oligonucleotide
  Antisense strand to SEQ ID NO: 754506
uaagguggagauauuacac

SEQ ID NO: 754508 - RNA, 19 nt, Artificial Sequence
  Description of Artificial Sequence: Synthetic oligonucleotide
  Sense strand starting at position 3145 of SEQ ID NO: 586929
gugagugagacacaucuuu

SEQ ID NO: 754509 - RNA, 19 nt, Artificial Sequence
  Description of Artificial Sequence: Synthetic oligonucleotide
  Antisense strand to SEQ ID NO: 754508
aaagaugugucucacucac

SEQ ID NO: 754510 - RNA, 19 nt, Artificial Sequence
  Description of Artificial Sequence: Synthetic oligonucleotide
  Sense strand starting at position 3223 of SEQ ID NO: 586929
ugcauagucaaggaacgaa

SEQ ID NO: 754511 - RNA, 19 nt, Artificial Sequence
  Description of Artificial Sequence: Synthetic oligonucleotide
  Antisense strand to SEQ ID NO: 754510
uucguuccuugacuaugca

SEQ ID NO: 754512 - RNA, 19 nt, Artificial Sequence
  Description of Artificial Sequence: Synthetic oligonucleotide
  Sense strand starting at position 3279 of SEQ ID NO: 586929
auacuauuccagggcuaau

SEQ ID NO: 754513 - RNA, 19 nt, Artificial Sequence
  Description of Artificial Sequence: Synthetic oligonucleotide
  Antisense strand to SEQ ID NO: 754512
auuagcccuggaauaguau

SEQ ID NO: 754514 - RNA, 19 nt, Artificial Sequence
  Description of Artificial Sequence: Synthetic oligonucleotide
  Sense strand starting at position 3282 of SEQ ID NO: 586929
cuauuccagggcuaauauu

SEQ ID NO: 754515 - RNA, 19 nt, Artificial Sequence
  Description of Artificial Sequence: Synthetic oligonucleotide
  Antisense strand to SEQ ID NO: 754514
aauauuagcccuggaauag

SEQ ID NO: 754516 - RNA, 19 nt, Artificial Sequence
  Description of Artificial Sequence: Synthetic oligonucleotide
  Sense strand starting at position 3290 of SEQ ID NO: 586929
gggcuaauauuaucuccaa

SEQ ID NO: 754517 - RNA, 19 nt, Artificial Sequence
  Description of Artificial Sequence: Synthetic oligonucleotide
  Antisense strand to SEQ ID NO: 754516
uuggagauaauauuagccc

SEQ ID NO: 754518 - RNA, 19 nt, Artificial Sequence
  Description of Artificial Sequence: Synthetic oligonucleotide
  Sense strand starting at position 3353 of SEQ ID NO: 586929
gugaugaugcgugagaaga

SEQ ID NO: 754519 - RNA, 19 nt, Artificial Sequence
  Description of Artificial Sequence: Synthetic oligonucleotide
  Antisense strand to SEQ ID NO: 754518
ucuucucacgcaucaucac

SEQ ID NO: 754520 - RNA, 19 nt, Artificial Sequence
  Description of Artificial Sequence: Synthetic oligonucleotide
  Sense strand starting at position 3363 of SEQ ID NO: 586929
gugagaagauccuugacau

SEQ ID NO: 754521 - RNA, 19 nt, Artificial Sequence
  Description of Artificial Sequence: Synthetic oligonucleotide
  Antisense strand to SEQ ID NO: 754520
augucaaggaucuucucac

SEQ ID NO: 754522 - RNA, 19 nt, Artificial Sequence
  Description of Artificial Sequence: Synthetic oligonucleotide
  Sense strand starting at position 3430 of SEQ ID NO: 586929
uccagaugucaaugugaau

SEQ ID NO: 754523 - RNA, 19 nt, Artificial Sequence
  Description of Artificial Sequence: Synthetic oligonucleotide
  Antisense strand to SEQ ID NO: 754522
auucacauugacaucugga

SEQ ID NO: 754524 - RNA, 19 nt, Artificial Sequence
  Description of Artificial Sequence: Synthetic oligonucleotide
  Sense strand starting at position 3454 of SEQ ID NO: 586929
cugugcgugcuucucugaa

SEQ ID NO: 754525 - RNA, 19 nt, Artificial Sequence
  Description of Artificial Sequence: Synthetic oligonucleotide
  Antisense strand to SEQ ID NO: 754524
uucagagaagcacgcacag

SEQ ID NO: 754526 - RNA, 19 nt, Artificial Sequence
  Description of Artificial Sequence: Synthetic oligonucleotide
  Sense strand starting at position 3477 of SEQ ID NO: 586929
uucugaaacugaguaagau

SEQ ID NO: 754527 - RNA, 19 nt, Artificial Sequence
  Description of Artificial Sequence: Synthetic oligonucleotide
  Antisense strand to SEQ ID NO: 754526
aucuuacucaguuucagaa

SEQ ID NO: 754528 - RNA, 19 nt, Artificial Sequence
  Description of Artificial Sequence: Synthetic oligonucleotide
  Sense strand starting at position 3487 of SEQ ID NO: 586929
gaguaagauccagguuaua

SEQ ID NO: 754529 - RNA, 19 nt, Artificial Sequence
  Description of Artificial Sequence: Synthetic oligonucleotide
  Antisense strand to SEQ ID NO: 754528
uauaaccuggaucuuacuc

SEQ ID NO: 754530 - RNA, 19 nt, Artificial Sequence
  Description of Artificial Sequence: Synthetic oligonucleotide
  Sense strand starting at position 3576 of SEQ ID NO: 586929
ucauuagaaagaugagugu

SEQ ID NO: 754531 - RNA, 19 nt, Artificial Sequence
  Description of Artificial Sequence: Synthetic oligonucleotide
  Antisense strand to SEQ ID NO: 754530
acacucaucuuucuaauga

SEQ ID NO: 754532 - RNA, 19 nt, Artificial Sequence
  Description of Artificial Sequence: Synthetic oligonucleotide
  Sense strand starting at position 3582 of SEQ ID NO: 586929
gaaagaugaguguguggau

SEQ ID NO: 754533 - RNA, 19 nt, Artificial Sequence
  Description of Artificial Sequence: Synthetic oligonucleotide
  Antisense strand to SEQ ID NO: 754532
auccacacacucaucuuuc

SEQ ID NO: 754534 - RNA, 19 nt, Artificial Sequence
  Description of Artificial Sequence: Synthetic oligonucleotide
  Sense strand starting at position 3583 of SEQ ID NO: 586929
aaagaugaguguguggauu

SEQ ID NO: 754535 - RNA, 19 nt, Artificial Sequence
  Description of Artificial Sequence: Synthetic oligonucleotide
  Antisense strand to SEQ ID NO: 754534
aauccacacacucaucuuu

SEQ ID NO: 754536 - RNA, 19 nt, Artificial Sequence
  Description of Artificial Sequence: Synthetic oligonucleotide
  Sense strand starting at position 3589 of SEQ ID NO: 586929
gaguguguggauuaaauua

SEQ ID NO: 754537 - RNA, 19 nt, Artificial Sequence
  Description of Artificial Sequence: Synthetic oligonucleotide
  Antisense strand to SEQ ID NO: 754536
uaauuuaauccacacacuc

SEQ ID NO: 754538 - RNA, 19 nt, Artificial Sequence
  Description of Artificial Sequence: Synthetic oligonucleotide
  Sense strand starting at position 3626 of SEQ ID NO: 586929
guuagaaauugaucagcaa

SEQ ID NO: 754539 - RNA, 19 nt, Artificial Sequence
  Description of Artificial Sequence: Synthetic oligonucleotide
  Antisense strand to SEQ ID NO: 754538
uugcugaucaauuucuaac

SEQ ID NO: 754540 - RNA, 19 nt, Artificial Sequence
  Description of Artificial Sequence: Synthetic oligonucleotide
  Sense strand starting at position 3656 of SEQ ID NO: 586929
auggaauucguuuauacau

SEQ ID NO: 754541 - RNA, 19 nt, Artificial Sequence
  Description of Artificial Sequence: Synthetic oligonucleotide
  Antisense strand to SEQ ID NO: 754540
auguauaaacgaauuccau

SEQ ID NO: 754542 - RNA, 19 nt, Artificial Sequence
  Description of Artificial Sequence: Synthetic oligonucleotide
  Sense strand starting at position 3719 of SEQ ID NO: 586929
caucucaaacgguguauuu

SEQ ID NO: 754543 - RNA, 19 nt, Artificial Sequence
  Description of Artificial Sequence: Synthetic oligonucleotide
  Antisense strand to SEQ ID NO: 754542
aaauacaccguuugagaug

SEQ ID NO: 754544 - RNA, 19 nt, Artificial Sequence
  Description of Artificial Sequence: Synthetic oligonucleotide
  Sense strand starting at position 3819 of SEQ ID NO: 586929
cuugacaaauagcuuagau

SEQ ID NO: 754545 - RNA, 19 nt, Artificial Sequence
  Description of Artificial Sequence: Synthetic oligonucleotide
  Antisense strand to SEQ ID NO: 754544
aucuaagcuauuugucaag

SEQ ID NO: 754546 - RNA, 19 nt, Artificial Sequence
  Description of Artificial Sequence: Synthetic oligonucleotide
  Sense strand starting at position 3923 of SEQ ID NO: 586929
gguauuugcuuagcucuga

SEQ ID NO: 754547 - RNA, 19 nt, Artificial Sequence
  Description of Artificial Sequence: Synthetic oligonucleotide
  Antisense strand to SEQ ID NO: 754546
ucagagcuaagcaaauacc

SEQ ID NO: 754548 - RNA, 19 nt, Artificial Sequence
  Description of Artificial Sequence: Synthetic oligonucleotide
  Sense strand starting at position 54 of SEQ ID NO: 586930
gggucuugcauacaaugau

SEQ ID NO: 754549 - RNA, 19 nt, Artificial Sequence
  Description of Artificial Sequence: Synthetic oligonucleotide
  Antisense strand to SEQ ID NO: 754548
aucauuguaugcaagaccc

SEQ ID NO: 754550 - RNA, 19 nt, Artificial Sequence
  Description of Artificial Sequence: Synthetic oligonucleotide
  Sense strand starting at position 144 of SEQ ID NO: 586930
ggauuauaggcauguacaa

SEQ ID NO: 754551 - RNA, 19 nt, Artificial Sequence
  Description of Artificial Sequence: Synthetic oligonucleotide
  Antisense strand to SEQ ID NO: 754550
uuguacaugccuauaaucc

SEQ ID NO: 754552 - RNA, 19 nt, Artificial Sequence
  Description of Artificial Sequence: Synthetic oligonucleotide
  Sense strand starting at position 227 of SEQ ID NO: 586930
uaguuuaucuaguugaaga

SEQ ID NO: 754553 - RNA, 19 nt, Artificial Sequence
  Description of Artificial Sequence: Synthetic oligonucleotide
  Antisense strand to SEQ ID NO: 754552
ucuucaacuagauaaacua

SEQ ID NO: 754554 - RNA, 19 nt, Artificial Sequence
  Description of Artificial Sequence: Synthetic oligonucleotide
  Sense strand starting at position 228 of SEQ ID NO: 586930
aguuuaucuaguugaagag

SEQ ID NO: 754555 - RNA, 19 nt, Artificial Sequence
  Description of Artificial Sequence: Synthetic oligonucleotide
  Antisense strand to SEQ ID NO: 754554
cucuucaacuagauaaacu

SEQ ID NO: 754556 - RNA, 19 nt, Artificial Sequence
  Description of Artificial Sequence: Synthetic oligonucleotide
  Sense strand starting at position 229 of SEQ ID NO: 586930
guuuaucuaguugaagagu

SEQ ID NO: 754557 - RNA, 19 nt, Artificial Sequence
  Description of Artificial Sequence: Synthetic oligonucleotide
  Antisense strand to SEQ ID NO: 754556
acucuucaacuagauaaac

SEQ ID NO: 754558 - RNA, 19 nt, Artificial Sequence
  Description of Artificial Sequence: Synthetic oligonucleotide
  Sense strand starting at position 280 of SEQ ID NO: 586930
uuauacuggcaagguuaaa

SEQ ID NO: 754559 - RNA, 19 nt, Artificial Sequence
  Description of Artificial Sequence: Synthetic oligonucleotide
  Antisense strand to SEQ ID NO: 754558
uuuaaccuugccaguauaa

SEQ ID NO: 754560 - RNA, 19 nt, Artificial Sequence
  Description of Artificial Sequence: Synthetic oligonucleotide
  Sense strand starting at position 973 of SEQ ID NO: 586930
uggauauaaugugcuaauu

SEQ ID NO: 754561 - RNA, 19 nt, Artificial Sequence
  Description of Artificial Sequence: Synthetic oligonucleotide
  Antisense strand to SEQ ID NO: 754560
aauuagcacauuauaucca

SEQ ID NO: 754562 - RNA, 19 nt, Artificial Sequence
  Description of Artificial Sequence: Synthetic oligonucleotide
  Sense strand starting at position 1034 of SEQ ID NO: 586930
gguauuucguuugucuaua

SEQ ID NO: 754563 - RNA, 19 nt, Artificial Sequence
  Description of Artificial Sequence: Synthetic oligonucleotide
  Antisense strand to SEQ ID NO: 754562
uauagacaaacgaaauacc

SEQ ID NO: 754564 - RNA, 19 nt, Artificial Sequence
  Description of Artificial Sequence: Synthetic oligonucleotide
  Sense strand starting at position 1035 of SEQ ID NO: 586930
guauuucguuugucuauaa

SEQ ID NO: 754565 - RNA, 19 nt, Artificial Sequence
  Description of Artificial Sequence: Synthetic oligonucleotide
  Antisense strand to SEQ ID NO: 754564
uuauagacaaacgaaauac

SEQ ID NO: 754566 - RNA, 19 nt, Artificial Sequence
  Description of Artificial Sequence: Synthetic oligonucleotide
  Sense strand starting at position 1104 of SEQ ID NO: 586930
ugccuaucacauugagaau

SEQ ID NO: 754567 - RNA, 19 nt, Artificial Sequence
  Description of Artificial Sequence: Synthetic oligonucleotide
  Antisense strand to SEQ ID NO: 754566
auucucaaugugauaggca

SEQ ID NO: 754568 - RNA, 19 nt, Artificial Sequence
  Description of Artificial Sequence: Synthetic oligonucleotide
  Sense strand starting at position 1301 of SEQ ID NO: 586930
acaacuagcuuagcagauu

SEQ ID NO: 754569 - RNA, 19 nt, Artificial Sequence
  Description of Artificial Sequence: Synthetic oligonucleotide
  Antisense strand to SEQ ID NO: 754568
aaucugcuaagcuaguugu

SEQ ID NO: 754570 - RNA, 19 nt, Artificial Sequence
  Description of Artificial Sequence: Synthetic oligonucleotide
  Sense strand starting at position 1389 of SEQ ID NO: 586930
guacauauauaguugagaa

SEQ ID NO: 754571 - RNA, 19 nt, Artificial Sequence
  Description of Artificial Sequence: Synthetic oligonucleotide
  Antisense strand to SEQ ID NO: 754570
uucucaacuauauauguac

SEQ ID NO: 754572 - RNA, 19 nt, Artificial Sequence
  Description of Artificial Sequence: Synthetic oligonucleotide
  Sense strand starting at position 1441 of SEQ ID NO: 586930
gaagauaccuuacuguguu

SEQ ID NO: 754573 - RNA, 19 nt, Artificial Sequence
  Description of Artificial Sequence: Synthetic oligonucleotide
  Antisense strand to SEQ ID NO: 754572
aacacaguaagguaucuuc

SEQ ID NO: 754574 - RNA, 19 nt, Artificial Sequence
  Description of Artificial Sequence: Synthetic oligonucleotide
  Sense strand starting at position 1494 of SEQ ID NO: 586930
guaagaguuauaugaaaug

SEQ ID NO: 754575 - RNA, 19 nt, Artificial Sequence
  Description of Artificial Sequence: Synthetic oligonucleotide
  Antisense strand to SEQ ID NO: 754574
cauuucauauaacucuuac

SEQ ID NO: 754576 - RNA, 19 nt, Artificial Sequence
  Description of Artificial Sequence: Synthetic oligonucleotide
  Sense strand starting at position 1590 of SEQ ID NO: 586930
uuauaaauacugggcugaa

SEQ ID NO: 754577 - RNA, 19 nt, Artificial Sequence
  Description of Artificial Sequence: Synthetic oligonucleotide
  Antisense strand to SEQ ID NO: 754576
uucagcccaguauuuauaa

SEQ ID NO: 754578 - RNA, 19 nt, Artificial Sequence
  Description of Artificial Sequence: Synthetic oligonucleotide
  Sense strand starting at position 1616 of SEQ ID NO: 586930
cuugaauagcuuuagcauc

SEQ ID NO: 754579 - RNA, 19 nt, Artificial Sequence
  Description of Artificial Sequence: Synthetic oligonucleotide
  Antisense strand to SEQ ID NO: 754578
gaugcuaaagcuauucaag

SEQ ID NO: 754580 - RNA, 19 nt, Artificial Sequence
  Description of Artificial Sequence: Synthetic oligonucleotide
  Sense strand starting at position 1851 of SEQ ID NO: 586930
gugccagugacuggaagaa

SEQ ID NO: 754581 - RNA, 19 nt, Artificial Sequence
  Description of Artificial Sequence: Synthetic oligonucleotide
  Antisense strand to SEQ ID NO: 754580
uucuuccagucacuggcac

SEQ ID NO: 754582 - RNA, 19 nt, Artificial Sequence
  Description of Artificial Sequence: Synthetic oligonucleotide
  Sense strand starting at position 2329 of SEQ ID NO: 586930
uugguagacuuuccucaac

SEQ ID NO: 754583 - RNA, 19 nt, Artificial Sequence
  Description of Artificial Sequence: Synthetic oligonucleotide
  Antisense strand to SEQ ID NO: 754582
guugaggaaagucuaccaa

SEQ ID NO: 754584 - RNA, 19 nt, Artificial Sequence
  Description of Artificial Sequence: Synthetic oligonucleotide
  Sense strand starting at position 2331 of SEQ ID NO: 586930
gguagacuuuccucaacuu

SEQ ID NO: 754585 - RNA, 19 nt, Artificial Sequence
  Description of Artificial Sequence: Synthetic oligonucleotide
  Antisense strand to SEQ ID NO: 754584
aaguugaggaaagucuacc

SEQ ID NO: 754586 - RNA, 19 nt, Artificial Sequence
  Description of Artificial Sequence: Synthetic oligonucleotide
  Sense strand starting at position 2593 of SEQ ID NO: 586930
cuugaauuauuugaucaga

SEQ ID NO: 754587 - RNA, 19 nt, Artificial Sequence
  Description of Artificial Sequence: Synthetic oligonucleotide
  Antisense strand to SEQ ID NO: 754586
ucugaucaaauaauucaag

SEQ ID NO: 754588 - RNA, 19 nt, Artificial Sequence
  Description of Artificial Sequence: Synthetic oligonucleotide
  Sense strand starting at position 2598 of SEQ ID NO: 586930
auuauuugaucagacgaga

SEQ ID NO: 754589 - RNA, 19 nt, Artificial Sequence
  Description of Artificial Sequence: Synthetic oligonucleotide
  Antisense strand to SEQ ID NO: 754588
ucucgucugaucaaauaau

SEQ ID NO: 754590 - RNA, 19 nt, Artificial Sequence
  Description of Artificial Sequence: Synthetic oligonucleotide
  Sense strand starting at position 2800 of SEQ ID NO: 586930
guguuaggccuggaacaau

SEQ ID NO: 754591 - RNA, 19 nt, Artificial Sequence
  Description of Artificial Sequence: Synthetic oligonucleotide
  Antisense strand to SEQ ID NO: 754590
auuguuccaggccuaacac

SEQ ID NO: 754592 - RNA, 19 nt, Artificial Sequence
  Description of Artificial Sequence: Synthetic oligonucleotide
  Sense strand starting at position 2817 of SEQ ID NO: 586930
augcaauguuaccugaaac

SEQ ID NO: 754593 - RNA, 19 nt, Artificial Sequence
  Description of Artificial Sequence: Synthetic oligonucleotide
  Antisense strand to SEQ ID NO: 754592
guuucagguaacauugcau

SEQ ID NO: 754594 - RNA, 19 nt, Artificial Sequence
  Description of Artificial Sequence: Synthetic oligonucleotide
  Sense strand starting at position 2918 of SEQ ID NO: 586930
uuaacuggguugccauaaa

SEQ ID NO: 754595 - RNA, 19 nt, Artificial Sequence
  Description of Artificial Sequence: Synthetic oligonucleotide
  Antisense strand to SEQ ID NO: 754594
uuuauggcaacccaguuaa

SEQ ID NO: 754596 - RNA, 19 nt, Artificial Sequence
  Description of Artificial Sequence: Synthetic oligonucleotide
  Sense strand starting at position 2958 of SEQ ID NO: 586930
cuguaagauguagagucaa

SEQ ID NO: 754597 - RNA, 19 nt, Artificial Sequence
  Description of Artificial Sequence: Synthetic oligonucleotide
  Antisense strand to SEQ ID NO: 754596
uugacucuacaucuuacag

SEQ ID NO: 754598 - RNA, 19 nt, Artificial Sequence
  Description of Artificial Sequence: Synthetic oligonucleotide
  Sense strand starting at position 3101 of SEQ ID NO: 586930
agccauuaaggguggguaa

SEQ ID NO: 754599 - RNA, 19 nt, Artificial Sequence
  Description of Artificial Sequence: Synthetic oligonucleotide
  Antisense strand to SEQ ID NO: 754598
uuacccacccuuaauggcu

SEQ ID NO: 754600 - RNA, 19 nt, Artificial Sequence
  Description of Artificial Sequence: Synthetic oligonucleotide
  Sense strand starting at position 3103 of SEQ ID NO: 586930
ccauuaaggguggguaauu

SEQ ID NO: 754601 - RNA, 19 nt, Artificial Sequence
  Description of Artificial Sequence: Synthetic oligonucleotide
  Antisense strand to SEQ ID NO: 754600
aauuacccacccuuaaugg

SEQ ID NO: 754602 - RNA, 19 nt, Artificial Sequence
  Description of Artificial Sequence: Synthetic oligonucleotide
  Sense strand starting at position 3104 of SEQ ID NO: 586930
cauuaaggguggguaauua

SEQ ID NO: 754603 - RNA, 19 nt, Artificial Sequence
  Description of Artificial Sequence: Synthetic oligonucleotide
  Antisense strand to SEQ ID NO: 754602
uaauuacccacccuuaaug

SEQ ID NO: 754604 - RNA, 19 nt, Artificial Sequence
  Description of Artificial Sequence: Synthetic oligonucleotide
  Sense strand starting at position 3188 of SEQ ID NO: 586930
cggcaaguaagagauggau

SEQ ID NO: 754605 - RNA, 19 nt, Artificial Sequence
  Description of Artificial Sequence: Synthetic oligonucleotide
  Antisense strand to SEQ ID NO: 754604
auccaucucuuacuugccg

SEQ ID NO: 754606 - RNA, 19 nt, Artificial Sequence
  Description of Artificial Sequence: Synthetic oligonucleotide
  Sense strand starting at position 3190 of SEQ ID NO: 586930
gcaaguaagagauggauca

SEQ ID NO: 754607 - RNA, 19 nt, Artificial Sequence
  Description of Artificial Sequence: Synthetic oligonucleotide
  Antisense strand to SEQ ID NO: 754606
ugauccaucucuuacuugc

SEQ ID NO: 754608 - RNA, 19 nt, Artificial Sequence
  Description of Artificial Sequence: Synthetic oligonucleotide
  Sense strand starting at position 3222 of SEQ ID NO: 586930
ucaggacuuuagcuagagu

SEQ ID NO: 754609 - RNA, 19 nt, Artificial Sequence
  Description of Artificial Sequence: Synthetic oligonucleotide
  Antisense strand to SEQ ID NO: 754608
acucuagcuaaaguccuga

SEQ ID NO: 754610 - RNA, 19 nt, Artificial Sequence
  Description of Artificial Sequence: Synthetic oligonucleotide
  Sense strand starting at position 3274 of SEQ ID NO: 586930
ugcauuaugguagaaucua

SEQ ID NO: 754611 - RNA, 19 nt, Artificial Sequence
  Description of Artificial Sequence: Synthetic oligonucleotide
  Antisense strand to SEQ ID NO: 754610
uagauucuaccauaaugca

SEQ ID NO: 754612 - RNA, 19 nt, Artificial Sequence
  Description of Artificial Sequence: Synthetic oligonucleotide
  Sense strand starting at position 3433 of SEQ ID NO: 586930
agcauuagacuuuaaguaa

SEQ ID NO: 754613 - RNA, 19 nt, Artificial Sequence
  Description of Artificial Sequence: Synthetic oligonucleotide
  Antisense strand to SEQ ID NO: 754612
uuacuuaaagucuaaugcu

SEQ ID NO: 754614 - RNA, 19 nt, Artificial Sequence
  Description of Artificial Sequence: Synthetic oligonucleotide
  Sense strand starting at position 3514 of SEQ ID NO: 586930
aggccuaauaaggguugaa

SEQ ID NO: 754615 - RNA, 19 nt, Artificial Sequence
  Description of Artificial Sequence: Synthetic oligonucleotide
  Antisense strand to SEQ ID NO: 754614
uucaacccuuauuaggccu

SEQ ID NO: 754616 - RNA, 19 nt, Artificial Sequence
  Description of Artificial Sequence: Synthetic oligonucleotide
  Sense strand starting at position 3607 of SEQ ID NO: 586930
cuuaaaucucaguaguuaa

SEQ ID NO: 754617 - RNA, 19 nt, Artificial Sequence
  Description of Artificial Sequence: Synthetic oligonucleotide
  Antisense strand to SEQ ID NO: 754616
uuaacuacugagauuuaag

SEQ ID NO: 754618 - RNA, 19 nt, Artificial Sequence
  Description of Artificial Sequence: Synthetic oligonucleotide
  Sense strand starting at position 3624 of SEQ ID NO: 586930
aagucaagucuugggaagu

SEQ ID NO: 754619 - RNA, 19 nt, Artificial Sequence
  Description of Artificial Sequence: Synthetic oligonucleotide
  Antisense strand to SEQ ID NO: 754618
acuucccaagacuugacuu

SEQ ID NO: 754620 - RNA, 19 nt, Artificial Sequence
  Description of Artificial Sequence: Synthetic oligonucleotide
  Sense strand starting at position 3825 of SEQ ID NO: 586930
uguauauaaucugucaaca

SEQ ID NO: 754621 - RNA, 19 nt, Artificial Sequence
  Description of Artificial Sequence: Synthetic oligonucleotide
  Antisense strand to SEQ ID NO: 754620
uguugacagauuauauaca

SEQ ID NO: 754622 - RNA, 19 nt, Artificial Sequence
  Description of Artificial Sequence: Synthetic oligonucleotide
  Sense strand starting at position 3856 of SEQ ID NO: 586930
uuuagaagguuacuacaua

SEQ ID NO: 754623 - RNA, 19 nt, Artificial Sequence
  Description of Artificial Sequence: Synthetic oligonucleotide
  Antisense strand to SEQ ID NO: 754622
uauguaguaaccuucuaaa

SEQ ID NO: 754624 - RNA, 19 nt, Artificial Sequence
  Description of Artificial Sequence: Synthetic oligonucleotide
  Sense strand starting at position 3864 of SEQ ID NO: 586930
guuacuacauaugcauaua

SEQ ID NO: 754625 - RNA, 19 nt, Artificial Sequence
  Description of Artificial Sequence: Synthetic oligonucleotide
  Antisense strand to SEQ ID NO: 754624
uauaugcauauguaguaac

SEQ ID NO: 754626 - RNA, 19 nt, Artificial Sequence
  Description of Artificial Sequence: Synthetic oligonucleotide
  Sense strand starting at position 3877 of SEQ ID NO: 586930
cauauaaguugguuuagau

SEQ ID NO: 754627 - RNA, 19 nt, Artificial Sequence
  Description of Artificial Sequence: Synthetic oligonucleotide
  Antisense strand to SEQ ID NO: 754626
aucuaaaccaacuuauaug

SEQ ID NO: 754628 - RNA, 19 nt, Artificial Sequence
  Description of Artificial Sequence: Synthetic oligonucleotide
  Sense strand starting at position 72 of SEQ ID NO: 586931
uaggaaugauuugaaguga

SEQ ID NO: 754629 - RNA, 19 nt, Artificial Sequence
  Description of Artificial Sequence: Synthetic oligonucleotide
  Antisense strand to SEQ ID NO: 754628
ucacuucaaaucauuccua

SEQ ID NO: 754630 - RNA, 19 nt, Artificial Sequence
  Description of Artificial Sequence: Synthetic oligonucleotide
  Sense strand starting at position 303 of SEQ ID NO: 586931
gccucaguucgaugauuua

SEQ ID NO: 754631 - RNA, 19 nt, Artificial Sequence
  Description of Artificial Sequence: Synthetic oligonucleotide
  Antisense strand to SEQ ID NO: 754630
uaaaucaucgaacugaggc

SEQ ID NO: 754632 - RNA, 19 nt, Artificial Sequence
  Description of Artificial Sequence: Synthetic oligonucleotide
  Sense strand starting at position 306 of SEQ ID NO: 586931
ucaguucgaugauuuagca

SEQ ID NO: 754633 - RNA, 19 nt, Artificial Sequence
  Description of Artificial Sequence: Synthetic oligonucleotide
  Antisense strand to SEQ ID NO: 754632
ugcuaaaucaucgaacuga

SEQ ID NO: 754634 - RNA, 19 nt, Artificial Sequence
  Description of Artificial Sequence: Synthetic oligonucleotide
  Sense strand starting at position 597 of SEQ ID NO: 586931
acuuuacuuccacagugua

SEQ ID NO: 754635 - RNA, 19 nt, Artificial Sequence
  Description of Artificial Sequence: Synthetic oligonucleotide
  Antisense strand to SEQ ID NO: 754634
uacacuguggaaguaaagu

SEQ ID NO: 754636 - RNA, 19 nt, Artificial Sequence
  Description of Artificial Sequence: Synthetic oligonucleotide
  Sense strand starting at position 639 of SEQ ID NO: 586931
aucauuuccugggaaagaa

SEQ ID NO: 754637 - RNA, 19 nt, Artificial Sequence
  Description of Artificial Sequence: Synthetic oligonucleotide
  Antisense strand to SEQ ID NO: 754636
uucuuucccaggaaaugau

SEQ ID NO: 754638 - RNA, 19 nt, Artificial Sequence
  Description of Artificial Sequence: Synthetic oligonucleotide
  Sense strand starting at position 754 of SEQ ID NO: 586931
aguugaucuggcuaccuaa

SEQ ID NO: 754639 - RNA, 19 nt, Artificial Sequence
  Description of Artificial Sequence: Synthetic oligonucleotide
  Antisense strand to SEQ ID NO: 754638
uuagguagccagaucaacu

SEQ ID NO: 754640 - RNA, 19 nt, Artificial Sequence
  Description of Artificial Sequence: Synthetic oligonucleotide
  Sense strand starting at position 795 of SEQ ID NO: 586931
uagggauucuguuccacca

SEQ ID NO: 754641 - RNA, 19 nt, Artificial Sequence
  Description of Artificial Sequence: Synthetic oligonucleotide
  Antisense strand to SEQ ID NO: 754640
ugguggaacagaaucccua

SEQ ID NO: 754642 - RNA, 19 nt, Artificial Sequence
  Description of Artificial Sequence: Synthetic oligonucleotide
  Sense strand starting at position 943 of SEQ ID NO: 586931
ccaguuuagcuacagaaua

SEQ ID NO: 754643 - RNA, 19 nt, Artificial Sequence
  Description of Artificial Sequence: Synthetic oligonucleotide
  Antisense strand to SEQ ID NO: 754642
uauucuguagcuaaacugg

SEQ ID NO: 754644 - RNA, 19 nt, Artificial Sequence
  Description of Artificial Sequence: Synthetic oligonucleotide
  Sense strand starting at position 1721 of SEQ ID NO: 586931
uauaaauaguuguccagga

SEQ ID NO: 754645 - RNA, 19 nt, Artificial Sequence
  Description of Artificial Sequence: Synthetic oligonucleotide
  Antisense strand to SEQ ID NO: 754644
uccuggacaacuauuuaua

SEQ ID NO: 754646 - RNA, 19 nt, Artificial Sequence
  Description of Artificial Sequence: Synthetic oligonucleotide
  Sense strand starting at position 1722 of SEQ ID NO: 586931
auaaauaguuguccaggau

SEQ ID NO: 754647 - RNA, 19 nt, Artificial Sequence
  Description of Artificial Sequence: Synthetic oligonucleotide
  Antisense strand to SEQ ID NO: 754646
auccuggacaacuauuuau

SEQ ID NO: 754648 - RNA, 19 nt, Artificial Sequence
  Description of Artificial Sequence: Synthetic oligonucleotide
  Sense strand starting at position 1723 of SEQ ID NO: 586931
uaaauaguuguccaggauu

SEQ ID NO: 754649 - RNA, 19 nt, Artificial Sequence
  Description of Artificial Sequence: Synthetic oligonucleotide
  Antisense strand to SEQ ID NO: 754648
aauccuggacaacuauuua

SEQ ID NO: 754650 - RNA, 19 nt, Artificial Sequence
  Description of Artificial Sequence: Synthetic oligonucleotide
  Sense strand starting at position 1969 of SEQ ID NO: 586931
cugauagcugccuauagga

SEQ ID NO: 754651 - RNA, 19 nt, Artificial Sequence
  Description of Artificial Sequence: Synthetic oligonucleotide
  Antisense strand to SEQ ID NO: 754650
uccuauaggcagcuaucag

SEQ ID NO: 754652 - RNA, 19 nt, Artificial Sequence
  Description of Artificial Sequence: Synthetic oligonucleotide
  Sense strand starting at position 1971 of SEQ ID NO: 586931
gauagcugccuauaggaca

SEQ ID NO: 754653 - RNA, 19 nt, Artificial Sequence
  Description of Artificial Sequence: Synthetic oligonucleotide
  Antisense strand to SEQ ID NO: 754652
uguccuauaggcagcuauc

SEQ ID NO: 754654 - RNA, 19 nt, Artificial Sequence
  Description of Artificial Sequence: Synthetic oligonucleotide
  Sense strand starting at position 2419 of SEQ ID NO: 586931
cuuccuaaggguuaaguau

SEQ ID NO: 754655 - RNA, 19 nt, Artificial Sequence
  Description of Artificial Sequence: Synthetic oligonucleotide
  Antisense strand to SEQ ID NO: 754654
auacuuaacccuuaggaag

SEQ ID NO: 754656 - RNA, 19 nt, Artificial Sequence
  Description of Artificial Sequence: Synthetic oligonucleotide
  Sense strand starting at position 2430 of SEQ ID NO: 586931
uuaaguauucugcacagua

SEQ ID NO: 754657 - RNA, 19 nt, Artificial Sequence
  Description of Artificial Sequence: Synthetic oligonucleotide
  Antisense strand to SEQ ID NO: 754656
uacugugcagaauacuuaa

SEQ ID NO: 754658 - RNA, 19 nt, Artificial Sequence
  Description of Artificial Sequence: Synthetic oligonucleotide
  Sense strand starting at position 2581 of SEQ ID NO: 586931
agauaugccucauccaaag

SEQ ID NO: 754659 - RNA, 19 nt, Artificial Sequence
  Description of Artificial Sequence: Synthetic oligonucleotide
  Antisense strand to SEQ ID NO: 754658
cuuuggaugaggcauaucu

SEQ ID NO: 754660 - RNA, 19 nt, Artificial Sequence
  Description of Artificial Sequence: Synthetic oligonucleotide
  Sense strand starting at position 2619 of SEQ ID NO: 586931
cugaaauucgaauguaaga

SEQ ID NO: 754661 - RNA, 19 nt, Artificial Sequence
  Description of Artificial Sequence: Synthetic oligonucleotide
  Antisense strand to SEQ ID NO: 754660
ucuuacauucgaauuucag

SEQ ID NO: 754662 - RNA, 19 nt, Artificial Sequence
  Description of Artificial Sequence: Synthetic oligonucleotide
  Sense strand starting at position 2643 of SEQ ID NO: 586931
uucuaauaccugggcuuaa

SEQ ID NO: 754663 - RNA, 19 nt, Artificial Sequence
  Description of Artificial Sequence: Synthetic oligonucleotide
  Antisense strand to SEQ ID NO: 754662
uuaagcccagguauuagaa

SEQ ID NO: 754664 - RNA, 19 nt, Artificial Sequence
  Description of Artificial Sequence: Synthetic oligonucleotide
  Sense strand starting at position 2644 of SEQ ID NO: 586931
ucuaauaccugggcuuaaa

SEQ ID NO: 754665 - RNA, 19 nt, Artificial Sequence
  Description of Artificial Sequence: Synthetic oligonucleotide
  Antisense strand to SEQ ID NO: 754664
uuuaagcccagguauuaga

SEQ ID NO: 754666 - RNA, 19 nt, Artificial Sequence
  Description of Artificial Sequence: Synthetic oligonucleotide
  Sense strand starting at position 2726 of SEQ ID NO: 586931
cugagaguuuagguaccaa

SEQ ID NO: 754667 - RNA, 19 nt, Artificial Sequence
  Description of Artificial Sequence: Synthetic oligonucleotide
  Antisense strand to SEQ ID NO: 754666
uugguaccuaaacucucag

SEQ ID NO: 754668 - RNA, 19 nt, Artificial Sequence
  Description of Artificial Sequence: Synthetic oligonucleotide
  Sense strand starting at position 2815 of SEQ ID NO: 586931
auaccaguuguggagguaa

SEQ ID NO: 754669 - RNA, 19 nt, Artificial Sequence
  Description of Artificial Sequence: Synthetic oligonucleotide
  Antisense strand to SEQ ID NO: 754668
uuaccuccacaacugguau

SEQ ID NO: 754670 - RNA, 19 nt, Artificial Sequence
  Description of Artificial Sequence: Synthetic oligonucleotide
  Sense strand starting at position 2849 of SEQ ID NO: 586931
ggagcccuaugguuagaau

SEQ ID NO: 754671 - RNA, 19 nt, Artificial Sequence
  Description of Artificial Sequence: Synthetic oligonucleotide
  Antisense strand to SEQ ID NO: 754670
auucuaaccauagggcucc

SEQ ID NO: 754672 - RNA, 19 nt, Artificial Sequence
  Description of Artificial Sequence: Synthetic oligonucleotide
  Sense strand starting at position 2850 of SEQ ID NO: 586931
gagcccuaugguuagaaua

SEQ ID NO: 754673 - RNA, 19 nt, Artificial Sequence
  Description of Artificial Sequence: Synthetic oligonucleotide
  Antisense strand to SEQ ID NO: 754672
uauucuaaccauagggcuc

SEQ ID NO: 754674 - RNA, 19 nt, Artificial Sequence
  Description of Artificial Sequence: Synthetic oligonucleotide
  Sense strand starting at position 2858 of SEQ ID NO: 586931
ugguuagaauauccugaaa

SEQ ID NO: 754675 - RNA, 19 nt, Artificial Sequence
  Description of Artificial Sequence: Synthetic oligonucleotide
  Antisense strand to SEQ ID NO: 754674
uuucaggauauucuaacca

SEQ ID NO: 754676 - RNA, 19 nt, Artificial Sequence
  Description of Artificial Sequence: Synthetic oligonucleotide
  Sense strand starting at position 2869 of SEQ ID NO: 586931
uccugaaauagguguuaga

SEQ ID NO: 754677 - RNA, 19 nt, Artificial Sequence
  Description of Artificial Sequence: Synthetic oligonucleotide
  Antisense strand to SEQ ID NO: 754676
ucuaacaccuauuucagga

SEQ ID NO: 754678 - RNA, 19 nt, Artificial Sequence
  Description of Artificial Sequence: Synthetic oligonucleotide
  Sense strand starting at position 2899 of SEQ ID NO: 586931
aaacuucucgaguaaucag

SEQ ID NO: 754679 - RNA, 19 nt, Artificial Sequence
  Description of Artificial Sequence: Synthetic oligonucleotide
  Antisense strand to SEQ ID NO: 754678
cugauuacucgagaaguuu

SEQ ID NO: 754680 - RNA, 19 nt, Artificial Sequence
  Description of Artificial Sequence: Synthetic oligonucleotide
  Sense strand starting at position 2955 of SEQ ID NO: 586931
aucaauucugcagagaugu

SEQ ID NO: 754681 - RNA, 19 nt, Artificial Sequence
  Description of Artificial Sequence: Synthetic oligonucleotide
  Antisense strand to SEQ ID NO: 754680
acaucucugcagaauugau

SEQ ID NO: 754682 - RNA, 19 nt, Artificial Sequence
  Description of Artificial Sequence: Synthetic oligonucleotide
  Sense strand starting at position 2978 of SEQ ID NO: 586931
ucuugaagucaucacuguu

SEQ ID NO: 754683 - RNA, 19 nt, Artificial Sequence
  Description of Artificial Sequence: Synthetic oligonucleotide
  Antisense strand to SEQ ID NO: 754682
aacagugaugacuucaaga

SEQ ID NO: 754684 - RNA, 19 nt, Artificial Sequence
  Description of Artificial Sequence: Synthetic oligonucleotide
  Sense strand starting at position 3032 of SEQ ID NO: 586931
caacacuugguguaaaugu

SEQ ID NO: 754685 - RNA, 19 nt, Artificial Sequence
  Description of Artificial Sequence: Synthetic oligonucleotide
  Antisense strand to SEQ ID NO: 754684
acauuuacaccaaguguug

SEQ ID NO: 754686 - RNA, 19 nt, Artificial Sequence
  Description of Artificial Sequence: Synthetic oligonucleotide
  Sense strand starting at position 3043 of SEQ ID NO: 586931
guaaaugugguauggacau

SEQ ID NO: 754687 - RNA, 19 nt, Artificial Sequence
  Description of Artificial Sequence: Synthetic oligonucleotide
  Antisense strand to SEQ ID NO: 754686
auguccauaccacauuuac

SEQ ID NO: 754688 - RNA, 19 nt, Artificial Sequence
  Description of Artificial Sequence: Synthetic oligonucleotide
  Sense strand starting at position 3250 of SEQ ID NO: 586931
ucauccuuuguauaaggua

SEQ ID NO: 754689 - RNA, 19 nt, Artificial Sequence
  Description of Artificial Sequence: Synthetic oligonucleotide
  Antisense strand to SEQ ID NO: 754688
uaccuuauacaaaggauga

SEQ ID NO: 754690 - RNA, 19 nt, Artificial Sequence
  Description of Artificial Sequence: Synthetic oligonucleotide
  Sense strand starting at position 3257 of SEQ ID NO: 586931
uuguauaagguacagagua

SEQ ID NO: 754691 - RNA, 19 nt, Artificial Sequence
  Description of Artificial Sequence: Synthetic oligonucleotide
  Antisense strand to SEQ ID NO: 754690
uacucuguaccuuauacaa

SEQ ID NO: 754692 - RNA, 19 nt, Artificial Sequence
  Description of Artificial Sequence: Synthetic oligonucleotide
  Sense strand starting at position 3259 of SEQ ID NO: 586931
guauaagguacagaguauu

SEQ ID NO: 754693 - RNA, 19 nt, Artificial Sequence
  Description of Artificial Sequence: Synthetic oligonucleotide
  Antisense strand to SEQ ID NO: 754692
aauacucuguaccuuauac

SEQ ID NO: 754694 - RNA, 19 nt, Artificial Sequence
  Description of Artificial Sequence: Synthetic oligonucleotide
  Sense strand starting at position 3450 of SEQ ID NO: 586931
ugggauggcuauguaugaa

SEQ ID NO: 754695 - RNA, 19 nt, Artificial Sequence
  Description of Artificial Sequence: Synthetic oligonucleotide
  Antisense strand to SEQ ID NO: 754694
uucauacauagccauccca

SEQ ID NO: 754696 - RNA, 19 nt, Artificial Sequence
  Description of Artificial Sequence: Synthetic oligonucleotide
  Sense strand starting at position 3497 of SEQ ID NO: 586931
ucuggauuccugcagacua

SEQ ID NO: 754697 - RNA, 19 nt, Artificial Sequence
  Description of Artificial Sequence: Synthetic oligonucleotide
  Antisense strand to SEQ ID NO: 754696
uagucugcaggaauccaga

SEQ ID NO: 754698 - RNA, 19 nt, Artificial Sequence
  Description of Artificial Sequence: Synthetic oligonucleotide
  Sense strand starting at position 3601 of SEQ ID NO: 586931
ugaugauuccuuuaaaugu

SEQ ID NO: 754699 - RNA, 19 nt, Artificial Sequence
  Description of Artificial Sequence: Synthetic oligonucleotide
  Antisense strand to SEQ ID NO: 754698
acauuuaaaggaaucauca

SEQ ID NO: 754700 - RNA, 19 nt, Artificial Sequence
  Description of Artificial Sequence: Synthetic oligonucleotide
  Sense strand starting at position 3610 of SEQ ID NO: 586931
cuuuaaaugucuuugauga

SEQ ID NO: 754701 - RNA, 19 nt, Artificial Sequence
  Description of Artificial Sequence: Synthetic oligonucleotide
  Antisense strand to SEQ ID NO: 754700
ucaucaaagacauuuaaag

SEQ ID NO: 754702 - RNA, 19 nt, Artificial Sequence
  Description of Artificial Sequence: Synthetic oligonucleotide
  Sense strand starting at position 3699 of SEQ ID NO: 586931
uuauuauguggucauagaa

SEQ ID NO: 754703 - RNA, 19 nt, Artificial Sequence
  Description of Artificial Sequence: Synthetic oligonucleotide
  Antisense strand to SEQ ID NO: 754702
uucuaugaccacauaauaa

SEQ ID NO: 754704 - RNA, 19 nt, Artificial Sequence
  Description of Artificial Sequence: Synthetic oligonucleotide
  Sense strand starting at position 3777 of SEQ ID NO: 586931
cucagcucugacuagauga

SEQ ID NO: 754705 - RNA, 19 nt, Artificial Sequence
  Description of Artificial Sequence: Synthetic oligonucleotide
  Antisense strand to SEQ ID NO: 754704
ucaucuagucagagcugag

SEQ ID NO: 754706 - RNA, 19 nt, Artificial Sequence
  Description of Artificial Sequence: Synthetic oligonucleotide
  Sense strand starting at position 3863 of SEQ ID NO: 586931
aucauagcuguugaauaua

SEQ ID NO: 754707 - RNA, 19 nt, Artificial Sequence
  Description of Artificial Sequence: Synthetic oligonucleotide
  Antisense strand to SEQ ID NO: 754706
uauauucaacagcuaugau

SEQ ID NO: 754708 - RNA, 19 nt, Artificial Sequence
  Description of Artificial Sequence: Synthetic oligonucleotide
  Sense strand starting at position 258 of SEQ ID NO: 586932
uuauguaauccugaguauu

SEQ ID NO: 754709 - RNA, 19 nt, Artificial Sequence
  Description of Artificial Sequence: Synthetic oligonucleotide
  Antisense strand to SEQ ID NO: 754708
aauacucaggauuacauaa

SEQ ID NO: 754710 - RNA, 19 nt, Artificial Sequence
  Description of Artificial Sequence: Synthetic oligonucleotide
  Sense strand starting at position 260 of SEQ ID NO: 586932
auguaauccugaguauuac

SEQ ID NO: 754711 - RNA, 19 nt, Artificial Sequence
  Description of Artificial Sequence: Synthetic oligonucleotide
  Antisense strand to SEQ ID NO: 754710
guaauacucaggauuacau

SEQ ID NO: 754712 - RNA, 19 nt, Artificial Sequence
  Description of Artificial Sequence: Synthetic oligonucleotide
  Sense strand starting at position 261 of SEQ ID NO: 586932
uguaauccugaguauuaca

SEQ ID NO: 754713 - RNA, 19 nt, Artificial Sequence
  Description of Artificial Sequence: Synthetic oligonucleotide
  Antisense strand to SEQ ID NO: 754712
uguaauacucaggauuaca

SEQ ID NO: 754714 - RNA, 19 nt, Artificial Sequence
  Description of Artificial Sequence: Synthetic oligonucleotide
  Sense strand starting at position 404 of SEQ ID NO: 586932
guuuguuuacaggaggaau

SEQ ID NO: 754715 - RNA, 19 nt, Artificial Sequence
  Description of Artificial Sequence: Synthetic oligonucleotide
  Antisense strand to SEQ ID NO: 754714
auuccuccuguaaacaaac

SEQ ID NO: 754716 - RNA, 19 nt, Artificial Sequence
  Description of Artificial Sequence: Synthetic oligonucleotide
  Sense strand starting at position 406 of SEQ ID NO: 586932
uuguuuacaggaggaauua

SEQ ID NO: 754717 - RNA, 19 nt, Artificial Sequence
  Description of Artificial Sequence: Synthetic oligonucleotide
  Antisense strand to SEQ ID NO: 754716
uaauuccuccuguaaacaa

SEQ ID NO: 754718 - RNA, 19 nt, Artificial Sequence
  Description of Artificial Sequence: Synthetic oligonucleotide
  Sense strand starting at position 501 of SEQ ID NO: 586932
guugcuuuacaagacaauu

SEQ ID NO: 754719 - RNA, 19 nt, Artificial Sequence
  Description of Artificial Sequence: Synthetic oligonucleotide
  Antisense strand to SEQ ID NO: 754718
aauugucuuguaaagcaac

SEQ ID NO: 754720 - RNA, 19 nt, Artificial Sequence
  Description of Artificial Sequence: Synthetic oligonucleotide
  Sense strand starting at position 741 of SEQ ID NO: 586932
gacaguuauggguagggca

SEQ ID NO: 754721 - RNA, 19 nt, Artificial Sequence
  Description of Artificial Sequence: Synthetic oligonucleotide
  Antisense strand to SEQ ID NO: 754720
ugcccuacccauaacuguc

SEQ ID NO: 754722 - RNA, 19 nt, Artificial Sequence
  Description of Artificial Sequence: Synthetic oligonucleotide
  Sense strand starting at position 914 of SEQ ID NO: 586932
acuguuaacuugguggauu

SEQ ID NO: 754723 - RNA, 19 nt, Artificial Sequence
  Description of Artificial Sequence: Synthetic oligonucleotide
  Antisense strand to SEQ ID NO: 754722
aauccaccaaguuaacagu

SEQ ID NO: 754724 - RNA, 19 nt, Artificial Sequence
  Description of Artificial Sequence: Synthetic oligonucleotide
  Sense strand starting at position 993 of SEQ ID NO: 586932
gugaacuccuuauugauaa

SEQ ID NO: 754725 - RNA, 19 nt, Artificial Sequence
  Description of Artificial Sequence: Synthetic oligonucleotide
  Antisense strand to SEQ ID NO: 754724
uuaucaauaaggaguucac

SEQ ID NO: 754726 - RNA, 19 nt, Artificial Sequence
  Description of Artificial Sequence: Synthetic oligonucleotide
  Sense strand starting at position 1152 of SEQ ID NO: 586932
uuuaaaggucuuugaagac

SEQ ID NO: 754727 - RNA, 19 nt, Artificial Sequence
  Description of Artificial Sequence: Synthetic oligonucleotide
  Antisense strand to SEQ ID NO: 754726
gucuucaaagaccuuuaaa

SEQ ID NO: 754728 - RNA, 19 nt, Artificial Sequence
  Description of Artificial Sequence: Synthetic oligonucleotide
  Sense strand starting at position 1167 of SEQ ID NO: 586932
agaccauaagccuauguua

SEQ ID NO: 754729 - RNA, 19 nt, Artificial Sequence
  Description of Artificial Sequence: Synthetic oligonucleotide
  Antisense strand to SEQ ID NO: 754728
uaacauaggcuuauggucu

SEQ ID NO: 754730 - RNA, 19 nt, Artificial Sequence
  Description of Artificial Sequence: Synthetic oligonucleotide
  Sense strand starting at position 1170 of SEQ ID NO: 586932
ccauaagccuauguuaaug

SEQ ID NO: 754731 - RNA, 19 nt, Artificial Sequence
  Description of Artificial Sequence: Synthetic oligonucleotide
  Antisense strand to SEQ ID NO: 754730
cauuaacauaggcuuaugg

SEQ ID NO: 754732 - RNA, 19 nt, Artificial Sequence
  Description of Artificial Sequence: Synthetic oligonucleotide
  Sense strand starting at position 1256 of SEQ ID NO: 586932
guaaccuaccuuuauguga

SEQ ID NO: 754733 - RNA, 19 nt, Artificial Sequence
  Description of Artificial Sequence: Synthetic oligonucleotide
  Antisense strand to SEQ ID NO: 754732
ucacauaaagguagguuac

SEQ ID NO: 754734 - RNA, 19 nt, Artificial Sequence
  Description of Artificial Sequence: Synthetic oligonucleotide
  Sense strand starting at position 1343 of SEQ ID NO: 586932
acaggagcaaggugauaau

SEQ ID NO: 754735 - RNA, 19 nt, Artificial Sequence
  Description of Artificial Sequence: Synthetic oligonucleotide
  Antisense strand to SEQ ID NO: 754734
auuaucaccuugcuccugu

SEQ ID NO: 754736 - RNA, 19 nt, Artificial Sequence
  Description of Artificial Sequence: Synthetic oligonucleotide
  Sense strand starting at position 1892 of SEQ ID NO: 586932
ugccauucccucuaggagu

SEQ ID NO: 754737 - RNA, 19 nt, Artificial Sequence
  Description of Artificial Sequence: Synthetic oligonucleotide
  Antisense strand to SEQ ID NO: 754736
acuccuagagggaauggca

SEQ ID NO: 754738 - RNA, 19 nt, Artificial Sequence
  Description of Artificial Sequence: Synthetic oligonucleotide
  Sense strand starting at position 1947 of SEQ ID NO: 586932
ggcuguuuacaggaaaguu

SEQ ID NO: 754739 - RNA, 19 nt, Artificial Sequence
  Description of Artificial Sequence: Synthetic oligonucleotide
  Antisense strand to SEQ ID NO: 754738
aacuuuccuguaaacagcc

SEQ ID NO: 754740 - RNA, 19 nt, Artificial Sequence
  Description of Artificial Sequence: Synthetic oligonucleotide
  Sense strand starting at position 2002 of SEQ ID NO: 586932
aaguauuucugguccacgu

SEQ ID NO: 754741 - RNA, 19 nt, Artificial Sequence
  Description of Artificial Sequence: Synthetic oligonucleotide
  Antisense strand to SEQ ID NO: 754740
acguggaccagaaauacuu

SEQ ID NO: 754742 - RNA, 19 nt, Artificial Sequence
  Description of Artificial Sequence: Synthetic oligonucleotide
  Sense strand starting at position 2335 of SEQ ID NO: 586932
auaucuuagggauguuauu

SEQ ID NO: 754743 - RNA, 19 nt, Artificial Sequence
  Description of Artificial Sequence: Synthetic oligonucleotide
  Antisense strand to SEQ ID NO: 754742
aauaacaucccuaagauau

SEQ ID NO: 754744 - RNA, 19 nt, Artificial Sequence
  Description of Artificial Sequence: Synthetic oligonucleotide
  Sense strand starting at position 2452 of SEQ ID NO: 586932
uuaagcaaauuggucaaau

SEQ ID NO: 754745 - RNA, 19 nt, Artificial Sequence
  Description of Artificial Sequence: Synthetic oligonucleotide
  Antisense strand to SEQ ID NO: 754744
auuugaccaauuugcuuaa

SEQ ID NO: 754746 - RNA, 19 nt, Artificial Sequence
  Description of Artificial Sequence: Synthetic oligonucleotide
  Sense strand starting at position 2594 of SEQ ID NO: 586932
uucuauaaagcagguauua

SEQ ID NO: 754747 - RNA, 19 nt, Artificial Sequence
  Description of Artificial Sequence: Synthetic oligonucleotide
  Antisense strand to SEQ ID NO: 754746
uaauaccugcuuuauagaa

SEQ ID NO: 754748 - RNA, 19 nt, Artificial Sequence
  Description of Artificial Sequence: Synthetic oligonucleotide
  Sense strand starting at position 2620 of SEQ ID NO: 586932
uaggaugugcaauaccuua

SEQ ID NO: 754749 - RNA, 19 nt, Artificial Sequence
  Description of Artificial Sequence: Synthetic oligonucleotide
  Antisense strand to SEQ ID NO: 754748
uaagguauugcacauccua

SEQ ID NO: 754750 - RNA, 19 nt, Artificial Sequence
  Description of Artificial Sequence: Synthetic oligonucleotide
  Sense strand starting at position 2625 of SEQ ID NO: 586932
ugugcaauaccuuaggauu

SEQ ID NO: 754751 - RNA, 19 nt, Artificial Sequence
  Description of Artificial Sequence: Synthetic oligonucleotide
  Antisense strand to SEQ ID NO: 754750
aauccuaagguauugcaca

SEQ ID NO: 754752 - RNA, 19 nt, Artificial Sequence
  Description of Artificial Sequence: Synthetic oligonucleotide
  Sense strand starting at position 2770 of SEQ ID NO: 586932
gcuguuggcauggaaauga

SEQ ID NO: 754753 - RNA, 19 nt, Artificial Sequence
  Description of Artificial Sequence: Synthetic oligonucleotide
  Antisense strand to SEQ ID NO: 754752
ucauuuccaugccaacagc

SEQ ID NO: 754754 - RNA, 19 nt, Artificial Sequence
  Description of Artificial Sequence: Synthetic oligonucleotide
  Sense strand starting at position 2854 of SEQ ID NO: 586932
gguaaacacugaucucaac

SEQ ID NO: 754755 - RNA, 19 nt, Artificial Sequence
  Description of Artificial Sequence: Synthetic oligonucleotide
  Antisense strand to SEQ ID NO: 754754
guugagaucaguguuuacc

SEQ ID NO: 754756 - RNA, 19 nt, Artificial Sequence
  Description of Artificial Sequence: Synthetic oligonucleotide
  Sense strand starting at position 3056 of SEQ ID NO: 586932
cuuguacaagcagaguaua

SEQ ID NO: 754757 - RNA, 19 nt, Artificial Sequence
  Description of Artificial Sequence: Synthetic oligonucleotide
  Antisense strand to SEQ ID NO: 754756
uauacucugcuuguacaag

SEQ ID NO: 754758 - RNA, 19 nt, Artificial Sequence
  Description of Artificial Sequence: Synthetic oligonucleotide
  Sense strand starting at position 3084 of SEQ ID NO: 586932
auguaaaugucacuggaca

SEQ ID NO: 754759 - RNA, 19 nt, Artificial Sequence
  Description of Artificial Sequence: Synthetic oligonucleotide
  Antisense strand to SEQ ID NO: 754758
uguccagugacauuuacau

SEQ ID NO: 754760 - RNA, 19 nt, Artificial Sequence
  Description of Artificial Sequence: Synthetic oligonucleotide
  Sense strand starting at position 3085 of SEQ ID NO: 586932
uguaaaugucacuggacau

SEQ ID NO: 754761 - RNA, 19 nt, Artificial Sequence
  Description of Artificial Sequence: Synthetic oligonucleotide
  Antisense strand to SEQ ID NO: 754760
auguccagugacauuuaca

SEQ ID NO: 754762 - RNA, 19 nt, Artificial Sequence
  Description of Artificial Sequence: Synthetic oligonucleotide
  Sense strand starting at position 3175 of SEQ ID NO: 586932
ugaaguuauuuagagacuu

SEQ ID NO: 754763 - RNA, 19 nt, Artificial Sequence
  Description of Artificial Sequence: Synthetic oligonucleotide
  Antisense strand to SEQ ID NO: 754762
aagucucuaaauaacuuca

SEQ ID NO: 754764 - RNA, 19 nt, Artificial Sequence
  Description of Artificial Sequence: Synthetic oligonucleotide
  Sense strand starting at position 3243 of SEQ ID NO: 586932
accuaaagguugcucuaaa

SEQ ID NO: 754765 - RNA, 19 nt, Artificial Sequence
  Description of Artificial Sequence: Synthetic oligonucleotide
  Antisense strand to SEQ ID NO: 754764
uuuagagcaaccuuuaggu

SEQ ID NO: 754766 - RNA, 19 nt, Artificial Sequence
  Description of Artificial Sequence: Synthetic oligonucleotide
  Sense strand starting at position 3293 of SEQ ID NO: 586932
ugcuuucuucuaggaugga

SEQ ID NO: 754767 - RNA, 19 nt, Artificial Sequence
  Description of Artificial Sequence: Synthetic oligonucleotide
  Antisense strand to SEQ ID NO: 754766
uccauccuagaagaaagca

SEQ ID NO: 754768 - RNA, 19 nt, Artificial Sequence
  Description of Artificial Sequence: Synthetic oligonucleotide
  Sense strand starting at position 3560 of SEQ ID NO: 586932
uaugaaugccaagaucugu

SEQ ID NO: 754769 - RNA, 19 nt, Artificial Sequence
  Description of Artificial Sequence: Synthetic oligonucleotide
  Antisense strand to SEQ ID NO: 754768
acagaucuuggcauucaua

SEQ ID NO: 754770 - RNA, 19 nt, Artificial Sequence
  Description of Artificial Sequence: Synthetic oligonucleotide
  Sense strand starting at position 3601 of SEQ ID NO: 586932
ucagauuaaguuggagcaa

SEQ ID NO: 754771 - RNA, 19 nt, Artificial Sequence
  Description of Artificial Sequence: Synthetic oligonucleotide
  Antisense strand to SEQ ID NO: 754770
uugcuccaacuuaaucuga

SEQ ID NO: 754772 - RNA, 19 nt, Artificial Sequence
  Description of Artificial Sequence: Synthetic oligonucleotide
  Sense strand starting at position 3612 of SEQ ID NO: 586932
uggagcaauuuagaaguaa

SEQ ID NO: 754773 - RNA, 19 nt, Artificial Sequence
  Description of Artificial Sequence: Synthetic oligonucleotide
  Antisense strand to SEQ ID NO: 754772
uuacuucuaaauugcucca

SEQ ID NO: 754774 - RNA, 19 nt, Artificial Sequence
  Description of Artificial Sequence: Synthetic oligonucleotide
  Sense strand starting at position 3634 of SEQ ID NO: 586932
ccagaauaauggguuguuu

SEQ ID NO: 754775 - RNA, 19 nt, Artificial Sequence
  Description of Artificial Sequence: Synthetic oligonucleotide
  Antisense strand to SEQ ID NO: 754774
aaacaacccauuauucugg

SEQ ID NO: 754776 - RNA, 19 nt, Artificial Sequence
  Description of Artificial Sequence: Synthetic oligonucleotide
  Sense strand starting at position 3636 of SEQ ID NO: 586932
agaauaauggguuguuuag

SEQ ID NO: 754777 - RNA, 19 nt, Artificial Sequence
  Description of Artificial Sequence: Synthetic oligonucleotide
  Antisense strand to SEQ ID NO: 754776
cuaaacaacccauuauucu

SEQ ID NO: 754778 - RNA, 19 nt, Artificial Sequence
  Description of Artificial Sequence: Synthetic oligonucleotide
  Sense strand starting at position 3638 of SEQ ID NO: 586932
aauaauggguuguuuagau

SEQ ID NO: 754779 - RNA, 19 nt, Artificial Sequence
  Description of Artificial Sequence: Synthetic oligonucleotide
  Antisense strand to SEQ ID NO: 754778
aucuaaacaacccauuauu

SEQ ID NO: 754780 - RNA, 19 nt, Artificial Sequence
  Description of Artificial Sequence: Synthetic oligonucleotide
  Sense strand starting at position 3675 of SEQ ID NO: 586932
gcuuaucugccaguuguca

SEQ ID NO: 754781 - RNA, 19 nt, Artificial Sequence
  Description of Artificial Sequence: Synthetic oligonucleotide
  Antisense strand to SEQ ID NO: 754780
ugacaacuggcagauaagc

SEQ ID NO: 754782 - RNA, 19 nt, Artificial Sequence
  Description of Artificial Sequence: Synthetic oligonucleotide
  Sense strand starting at position 3689 of SEQ ID NO: 586932
ugucaauguccuuacuuau

SEQ ID NO: 754783 - RNA, 19 nt, Artificial Sequence
  Description of Artificial Sequence: Synthetic oligonucleotide
  Antisense strand to SEQ ID NO: 754782
auaaguaaggacauugaca

SEQ ID NO: 754784 - RNA, 19 nt, Artificial Sequence
  Description of Artificial Sequence: Synthetic oligonucleotide
  Sense strand starting at position 3824 of SEQ ID NO: 586932
uggcauuagcaauggaaua

SEQ ID NO: 754785 - RNA, 19 nt, Artificial Sequence
  Description of Artificial Sequence: Synthetic oligonucleotide
  Antisense strand to SEQ ID NO: 754784
uauuccauugcuaaugcca

SEQ ID NO: 754786 - RNA, 19 nt, Artificial Sequence
  Description of Artificial Sequence: Synthetic oligonucleotide
  Sense strand starting at position 3854 of SEQ ID NO: 586932
ggaccaaauuagucacuua

SEQ ID NO: 754787 - RNA, 19 nt, Artificial Sequence
  Description of Artificial Sequence: Synthetic oligonucleotide
  Antisense strand to SEQ ID NO: 754786
uaagugacuaauuuggucc

SEQ ID NO: 754788 - RNA, 19 nt, Artificial Sequence
  Description of Artificial Sequence: Synthetic oligonucleotide
  Sense strand starting at position 184 of SEQ ID NO: 586933
cuaagacacuugcuaaaga

SEQ ID NO: 754789 - RNA, 19 nt, Artificial Sequence
  Description of Artificial Sequence: Synthetic oligonucleotide
  Antisense strand to SEQ ID NO: 754788
ucuuuagcaagugucuuag

SEQ ID NO: 754790 - RNA, 19 nt, Artificial Sequence
  Description of Artificial Sequence: Synthetic oligonucleotide
  Sense strand starting at position 194 of SEQ ID NO: 586933
ugcuaaagauuuguugcua

SEQ ID NO: 754791 - RNA, 19 nt, Artificial Sequence
  Description of Artificial Sequence: Synthetic oligonucleotide
  Antisense strand to SEQ ID NO: 754790
uagcaacaaaucuuuagca

SEQ ID NO: 754792 - RNA, 19 nt, Artificial Sequence
  Description of Artificial Sequence: Synthetic oligonucleotide
  Sense strand starting at position 195 of SEQ ID NO: 586933
gcuaaagauuuguugcuag

SEQ ID NO: 754793 - RNA, 19 nt, Artificial Sequence
  Description of Artificial Sequence: Synthetic oligonucleotide
  Antisense strand to SEQ ID NO: 754792
cuagcaacaaaucuuuagc

SEQ ID NO: 754794 - RNA, 19 nt, Artificial Sequence
  Description of Artificial Sequence: Synthetic oligonucleotide
  Sense strand starting at position 198 of SEQ ID NO: 586933
aaagauuuguugcuagcau

SEQ ID NO: 754795 - RNA, 19 nt, Artificial Sequence
  Description of Artificial Sequence: Synthetic oligonucleotide
  Antisense strand to SEQ ID NO: 754794
augcuagcaacaaaucuuu

SEQ ID NO: 754796 - RNA, 19 nt, Artificial Sequence
  Description of Artificial Sequence: Synthetic oligonucleotide
  Sense strand starting at position 230 of SEQ ID NO: 586933
uuugcauaauguuugacua

SEQ ID NO: 754797 - RNA, 19 nt, Artificial Sequence
  Description of Artificial Sequence: Synthetic oligonucleotide
  Antisense strand to SEQ ID NO: 754796
uagucaaacauuaugcaaa

SEQ ID NO: 754798 - RNA, 19 nt, Artificial Sequence
  Description of Artificial Sequence: Synthetic oligonucleotide
  Sense strand starting at position 231 of SEQ ID NO: 586933
uugcauaauguuugacuaa

SEQ ID NO: 754799 - RNA, 19 nt, Artificial Sequence
  Description of Artificial Sequence: Synthetic oligonucleotide
  Antisense strand to SEQ ID NO: 754798
uuagucaaacauuaugcaa

SEQ ID NO: 754800 - RNA, 19 nt, Artificial Sequence
  Description of Artificial Sequence: Synthetic oligonucleotide
  Sense strand starting at position 385 of SEQ ID NO: 586933
cugagaaauuccucugaug

SEQ ID NO: 754801 - RNA, 19 nt, Artificial Sequence
  Description of Artificial Sequence: Synthetic oligonucleotide
  Antisense strand to SEQ ID NO: 754800
caucagaggaauuucucag

SEQ ID NO: 754802 - RNA, 19 nt, Artificial Sequence
  Description of Artificial Sequence: Synthetic oligonucleotide
  Sense strand starting at position 387 of SEQ ID NO: 586933
gagaaauuccucugauggu

SEQ ID NO: 754803 - RNA, 19 nt, Artificial Sequence
  Description of Artificial Sequence: Synthetic oligonucleotide
  Antisense strand to SEQ ID NO: 754802
accaucagaggaauuucuc

SEQ ID NO: 754804 - RNA, 19 nt, Artificial Sequence
  Description of Artificial Sequence: Synthetic oligonucleotide
  Sense strand starting at position 809 of SEQ ID NO: 586933
auuuauugucagugcauac

SEQ ID NO: 754805 - RNA, 19 nt, Artificial Sequence
  Description of Artificial Sequence: Synthetic oligonucleotide
  Antisense strand to SEQ ID NO: 754804
guaugcacugacaauaaau

SEQ ID NO: 754806 - RNA, 19 nt, Artificial Sequence
  Description of Artificial Sequence: Synthetic oligonucleotide
  Sense strand starting at position 863 of SEQ ID NO: 586933
uucucauuuauugggcgau

SEQ ID NO: 754807 - RNA, 19 nt, Artificial Sequence
  Description of Artificial Sequence: Synthetic oligonucleotide
  Antisense strand to SEQ ID NO: 754806
aucgcccaauaaaugagaa

SEQ ID NO: 754808 - RNA, 19 nt, Artificial Sequence
  Description of Artificial Sequence: Synthetic oligonucleotide
  Sense strand starting at position 894 of SEQ ID NO: 586933
cuuugaauuucuuuggugu

SEQ ID NO: 754809 - RNA, 19 nt, Artificial Sequence
  Description of Artificial Sequence: Synthetic oligonucleotide
  Antisense strand to SEQ ID NO: 754808
acaccaaagaaauucaaag

SEQ ID NO: 754810 - RNA, 19 nt, Artificial Sequence
  Description of Artificial Sequence: Synthetic oligonucleotide
  Sense strand starting at position 905 of SEQ ID NO: 586933
uuugguguuaaguagaaau

SEQ ID NO: 754811 - RNA, 19 nt, Artificial Sequence
  Description of Artificial Sequence: Synthetic oligonucleotide
  Antisense strand to SEQ ID NO: 754810
auuucuacuuaacaccaaa

SEQ ID NO: 754812 - RNA, 19 nt, Artificial Sequence
  Description of Artificial Sequence: Synthetic oligonucleotide
  Sense strand starting at position 907 of SEQ ID NO: 586933
ugguguuaaguagaaauag

SEQ ID NO: 754813 - RNA, 19 nt, Artificial Sequence
  Description of Artificial Sequence: Synthetic oligonucleotide
  Antisense strand to SEQ ID NO: 754812
cuauuucuacuuaacacca

SEQ ID NO: 754814 - RNA, 19 nt, Artificial Sequence
  Description of Artificial Sequence: Synthetic oligonucleotide
  Sense strand starting at position 1056 of SEQ ID NO: 586933
cuucuaugccuacaucagu

SEQ ID NO: 754815 - RNA, 19 nt, Artificial Sequence
  Description of Artificial Sequence: Synthetic oligonucleotide
  Antisense strand to SEQ ID NO: 754814
acugauguaggcauagaag

SEQ ID NO: 754816 - RNA, 19 nt, Artificial Sequence
  Description of Artificial Sequence: Synthetic oligonucleotide
  Sense strand starting at position 1121 of SEQ ID NO: 586933
aaugcagaguuauauuuga

SEQ ID NO: 754817 - RNA, 19 nt, Artificial Sequence
  Description of Artificial Sequence: Synthetic oligonucleotide
  Antisense strand to SEQ ID NO: 754816
ucaaauauaacucugcauu

SEQ ID NO: 754818 - RNA, 19 nt, Artificial Sequence
  Description of Artificial Sequence: Synthetic oligonucleotide
  Sense strand starting at position 1167 of SEQ ID NO: 586933
gcagguauuugugugggca

SEQ ID NO: 754819 - RNA, 19 nt, Artificial Sequence
  Description of Artificial Sequence: Synthetic oligonucleotide
  Antisense strand to SEQ ID NO: 754818
ugcccacacaaauaccugc

SEQ ID NO: 754820 - RNA, 19 nt, Artificial Sequence
  Description of Artificial Sequence: Synthetic oligonucleotide
  Sense strand starting at position 1168 of SEQ ID NO: 586933
cagguauuugugugggcau

SEQ ID NO: 754821 - RNA, 19 nt, Artificial Sequence
  Description of Artificial Sequence: Synthetic oligonucleotide
  Antisense strand to SEQ ID NO: 754820
augcccacacaaauaccug

SEQ ID NO: 754822 - RNA, 19 nt, Artificial Sequence
  Description of Artificial Sequence: Synthetic oligonucleotide
  Sense strand starting at position 1170 of SEQ ID NO: 586933
gguauuugugugggcauag

SEQ ID NO: 754823 - RNA, 19 nt, Artificial Sequence
  Description of Artificial Sequence: Synthetic oligonucleotide
  Antisense strand to SEQ ID NO: 754822
cuaugcccacacaaauacc

SEQ ID NO: 754824 - RNA, 19 nt, Artificial Sequence
  Description of Artificial Sequence: Synthetic oligonucleotide
  Sense strand starting at position 1384 of SEQ ID NO: 586933
ugggcuucuacaugaugaa

SEQ ID NO: 754825 - RNA, 19 nt, Artificial Sequence
  Description of Artificial Sequence: Synthetic oligonucleotide
  Antisense strand to SEQ ID NO: 754824
uucaucauguagaagccca

SEQ ID NO: 754826 - RNA, 19 nt, Artificial Sequence
  Description of Artificial Sequence: Synthetic oligonucleotide
  Sense strand starting at position 1521 of SEQ ID NO: 586933
aaaugacuccauggucgua

SEQ ID NO: 754827 - RNA, 19 nt, Artificial Sequence
  Description of Artificial Sequence: Synthetic oligonucleotide
  Antisense strand to SEQ ID NO: 754826
uacgaccauggagucauuu

SEQ ID NO: 754828 - RNA, 19 nt, Artificial Sequence
  Description of Artificial Sequence: Synthetic oligonucleotide
  Sense strand starting at position 1607 of SEQ ID NO: 586933
gcacuuaacuuuccagagu

SEQ ID NO: 754829 - RNA, 19 nt, Artificial Sequence
  Description of Artificial Sequence: Synthetic oligonucleotide
  Antisense strand to SEQ ID NO: 754828
acucuggaaaguuaagugc

SEQ ID NO: 754830 - RNA, 19 nt, Artificial Sequence
  Description of Artificial Sequence: Synthetic oligonucleotide
  Sense strand starting at position 1785 of SEQ ID NO: 586933
guuuaugugcuuuauuuac

SEQ ID NO: 754831 - RNA, 19 nt, Artificial Sequence
  Description of Artificial Sequence: Synthetic oligonucleotide
  Antisense strand to SEQ ID NO: 754830
guaaauaaagcacauaaac

SEQ ID NO: 754832 - RNA, 19 nt, Artificial Sequence
  Description of Artificial Sequence: Synthetic oligonucleotide
  Sense strand starting at position 1795 of SEQ ID NO: 586933
uuuauuuaccucuguuagu

SEQ ID NO: 754833 - RNA, 19 nt, Artificial Sequence
  Description of Artificial Sequence: Synthetic oligonucleotide
  Antisense strand to SEQ ID NO: 754832
acuaacagagguaaauaaa

SEQ ID NO: 754834 - RNA, 19 nt, Artificial Sequence
  Description of Artificial Sequence: Synthetic oligonucleotide
  Sense strand starting at position 1796 of SEQ ID NO: 586933
uuauuuaccucuguuaguc

SEQ ID NO: 754835 - RNA, 19 nt, Artificial Sequence
  Description of Artificial Sequence: Synthetic oligonucleotide
  Antisense strand to SEQ ID NO: 754834
gacuaacagagguaaauaa

SEQ ID NO: 754836 - RNA, 19 nt, Artificial Sequence
  Description of Artificial Sequence: Synthetic oligonucleotide
  Sense strand starting at position 1805 of SEQ ID NO: 586933
ucuguuaguccucauagua

SEQ ID NO: 754837 - RNA, 19 nt, Artificial Sequence
  Description of Artificial Sequence: Synthetic oligonucleotide
  Antisense strand to SEQ ID NO: 754836
uacuaugaggacuaacaga

SEQ ID NO: 754838 - RNA, 19 nt, Artificial Sequence
  Description of Artificial Sequence: Synthetic oligonucleotide
  Sense strand starting at position 1821 of SEQ ID NO: 586933
guagaucugagauguaugu

SEQ ID NO: 754839 - RNA, 19 nt, Artificial Sequence
  Description of Artificial Sequence: Synthetic oligonucleotide
  Antisense strand to SEQ ID NO: 754838
acauacaucucagaucuac

SEQ ID NO: 754840 - RNA, 19 nt, Artificial Sequence
  Description of Artificial Sequence: Synthetic oligonucleotide
  Sense strand starting at position 1894 of SEQ ID NO: 586933
cuuacuuucccagggauuc

SEQ ID NO: 754841 - RNA, 19 nt, Artificial Sequence
  Description of Artificial Sequence: Synthetic oligonucleotide
  Antisense strand to SEQ ID NO: 754840
gaaucccugggaaaguaag

SEQ ID NO: 754842 - RNA, 19 nt, Artificial Sequence
  Description of Artificial Sequence: Synthetic oligonucleotide
  Sense strand starting at position 2001 of SEQ ID NO: 586933
guuuguaacaguugggaac

SEQ ID NO: 754843 - RNA, 19 nt, Artificial Sequence
  Description of Artificial Sequence: Synthetic oligonucleotide
  Antisense strand to SEQ ID NO: 754842
guucccaacuguuacaaac

SEQ ID NO: 754844 - RNA, 19 nt, Artificial Sequence
  Description of Artificial Sequence: Synthetic oligonucleotide
  Sense strand starting at position 2061 of SEQ ID NO: 586933
agcagaacugccugagaag

SEQ ID NO: 754845 - RNA, 19 nt, Artificial Sequence
  Description of Artificial Sequence: Synthetic oligonucleotide
  Antisense strand to SEQ ID NO: 754844
cuucucaggcaguucugcu

SEQ ID NO: 754846 - RNA, 19 nt, Artificial Sequence
  Description of Artificial Sequence: Synthetic oligonucleotide
  Sense strand starting at position 2174 of SEQ ID NO: 586933
ugaaauauuugagaagcaa

SEQ ID NO: 754847 - RNA, 19 nt, Artificial Sequence
  Description of Artificial Sequence: Synthetic oligonucleotide
  Antisense strand to SEQ ID NO: 754846
uugcuucucaaauauuuca

SEQ ID NO: 754848 - RNA, 19 nt, Artificial Sequence
  Description of Artificial Sequence: Synthetic oligonucleotide
  Sense strand starting at position 2232 of SEQ ID NO: 586933
uugcucuauccugaggauu

SEQ ID NO: 754849 - RNA, 19 nt, Artificial Sequence
  Description of Artificial Sequence: Synthetic oligonucleotide
  Antisense strand to SEQ ID NO: 754848
aauccucaggauagagcaa

SEQ ID NO: 754850 - RNA, 19 nt, Artificial Sequence
  Description of Artificial Sequence: Synthetic oligonucleotide
  Sense strand starting at position 2336 of SEQ ID NO: 586933
ugguuuaaucuagaccagu

SEQ ID NO: 754851 - RNA, 19 nt, Artificial Sequence
  Description of Artificial Sequence: Synthetic oligonucleotide
  Antisense strand to SEQ ID NO: 754850
acuggucuagauuaaacca

SEQ ID NO: 754852 - RNA, 19 nt, Artificial Sequence
  Description of Artificial Sequence: Synthetic oligonucleotide
  Sense strand starting at position 2391 of SEQ ID NO: 586933
aaacuuaaugguggacauu

SEQ ID NO: 754853 - RNA, 19 nt, Artificial Sequence
  Description of Artificial Sequence: Synthetic oligonucleotide
  Antisense strand to SEQ ID NO: 754852
aauguccaccauuaaguuu

SEQ ID NO: 754854 - RNA, 19 nt, Artificial Sequence
  Description of Artificial Sequence: Synthetic oligonucleotide
  Sense strand starting at position 3051 of SEQ ID NO: 586933
gaaauacuguaguaauuug

SEQ ID NO: 754855 - RNA, 19 nt, Artificial Sequence
  Description of Artificial Sequence: Synthetic oligonucleotide
  Antisense strand to SEQ ID NO: 754854
caaauuacuacaguauuuc

SEQ ID NO: 754856 - RNA, 19 nt, Artificial Sequence
  Description of Artificial Sequence: Synthetic oligonucleotide
  Sense strand starting at position 3104 of SEQ ID NO: 586933
ucuguauaaugacugaauu

SEQ ID NO: 754857 - RNA, 19 nt, Artificial Sequence
  Description of Artificial Sequence: Synthetic oligonucleotide
  Antisense strand to SEQ ID NO: 754856
aauucagucauuauacaga

SEQ ID NO: 754858 - RNA, 19 nt, Artificial Sequence
  Description of Artificial Sequence: Synthetic oligonucleotide
  Sense strand starting at position 3158 of SEQ ID NO: 586933
agaugcaacuuaucuugua

SEQ ID NO: 754859 - RNA, 19 nt, Artificial Sequence
  Description of Artificial Sequence: Synthetic oligonucleotide
  Antisense strand to SEQ ID NO: 754858
uacaagauaaguugcaucu

SEQ ID NO: 754860 - RNA, 19 nt, Artificial Sequence
  Description of Artificial Sequence: Synthetic oligonucleotide
  Sense strand starting at position 3269 of SEQ ID NO: 586933
cccugaggauuccugagau

SEQ ID NO: 754861 - RNA, 19 nt, Artificial Sequence
  Description of Artificial Sequence: Synthetic oligonucleotide
  Antisense strand to SEQ ID NO: 754860
aucucaggaauccucaggg

SEQ ID NO: 754862 - RNA, 19 nt, Artificial Sequence
  Description of Artificial Sequence: Synthetic oligonucleotide
  Sense strand starting at position 3660 of SEQ ID NO: 586933
gguuuaauuugccuuucua

SEQ ID NO: 754863 - RNA, 19 nt, Artificial Sequence
  Description of Artificial Sequence: Synthetic oligonucleotide
  Antisense strand to SEQ ID NO: 754862
uagaaaggcaaauuaaacc

SEQ ID NO: 754864 - RNA, 19 nt, Artificial Sequence
  Description of Artificial Sequence: Synthetic oligonucleotide
  Sense strand starting at position 3708 of SEQ ID NO: 586933
aagcaauggugguugaaac

SEQ ID NO: 754865 - RNA, 19 nt, Artificial Sequence
  Description of Artificial Sequence: Synthetic oligonucleotide
  Antisense strand to SEQ ID NO: 754864
guuucaaccaccauugcuu

SEQ ID NO: 754866 - RNA, 19 nt, Artificial Sequence
  Description of Artificial Sequence: Synthetic oligonucleotide
  Sense strand starting at position 3709 of SEQ ID NO: 586933
agcaauggugguugaaacu

SEQ ID NO: 754867 - RNA, 19 nt, Artificial Sequence
  Description of Artificial Sequence: Synthetic oligonucleotide
  Antisense strand to SEQ ID NO: 754866
aguuucaaccaccauugcu

SEQ ID NO: 754868 - RNA, 19 nt, Artificial Sequence
  Description of Artificial Sequence: Synthetic oligonucleotide
  Sense strand starting at position 128 of SEQ ID NO: 586934
gaugaaagauuguuuacug

SEQ ID NO: 754869 - RNA, 19 nt, Artificial Sequence
  Description of Artificial Sequence: Synthetic oligonucleotide
  Antisense strand to SEQ ID NO: 754868
caguaaacaaucuuucauc

SEQ ID NO: 754870 - RNA, 19 nt, Artificial Sequence
  Description of Artificial Sequence: Synthetic oligonucleotide
  Sense strand starting at position 203 of SEQ ID NO: 586934
ucccuugcagucugaagaa

SEQ ID NO: 754871 - RNA, 19 nt, Artificial Sequence
  Description of Artificial Sequence: Synthetic oligonucleotide
  Antisense strand to SEQ ID NO: 754870
uucuucagacugcaaggga

SEQ ID NO: 754872 - RNA, 19 nt, Artificial Sequence
  Description of Artificial Sequence: Synthetic oligonucleotide
  Sense strand starting at position 243 of SEQ ID NO: 586934
agcugacuuggucauuguu

SEQ ID NO: 754873 - RNA, 19 nt, Artificial Sequence
  Description of Artificial Sequence: Synthetic oligonucleotide
  Antisense strand to SEQ ID NO: 754872
aacaaugaccaagucagcu

SEQ ID NO: 754874 - RNA, 19 nt, Artificial Sequence
  Description of Artificial Sequence: Synthetic oligonucleotide
  Sense strand starting at position 245 of SEQ ID NO: 586934
cugacuuggucauuguuua

SEQ ID NO: 754875 - RNA, 19 nt, Artificial Sequence
  Description of Artificial Sequence: Synthetic oligonucleotide
  Antisense strand to SEQ ID NO: 754874
uaaacaaugaccaagucag

SEQ ID NO: 754876 - RNA, 19 nt, Artificial Sequence
  Description of Artificial Sequence: Synthetic oligonucleotide
  Sense strand starting at position 246 of SEQ ID NO: 586934
ugacuuggucauuguuuau

SEQ ID NO: 754877 - RNA, 19 nt, Artificial Sequence
  Description of Artificial Sequence: Synthetic oligonucleotide
  Antisense strand to SEQ ID NO: 754876
auaaacaaugaccaaguca

SEQ ID NO: 754878 - RNA, 19 nt, Artificial Sequence
  Description of Artificial Sequence: Synthetic oligonucleotide
  Sense strand starting at position 390 of SEQ ID NO: 586934
ccugcaugugcauaaauau

SEQ ID NO: 754879 - RNA, 19 nt, Artificial Sequence
  Description of Artificial Sequence: Synthetic oligonucleotide
  Antisense strand to SEQ ID NO: 754878
auauuuaugcacaugcagg

SEQ ID NO: 754880 - RNA, 19 nt, Artificial Sequence
  Description of Artificial Sequence: Synthetic oligonucleotide
  Sense strand starting at position 415 of SEQ ID NO: 586934
cagguuagaugcuuaguaa

SEQ ID NO: 754881 - RNA, 19 nt, Artificial Sequence
  Description of Artificial Sequence: Synthetic oligonucleotide
  Antisense strand to SEQ ID NO: 754880
uuacuaagcaucuaaccug

SEQ ID NO: 754882 - RNA, 19 nt, Artificial Sequence
  Description of Artificial Sequence: Synthetic oligonucleotide
  Sense strand starting at position 416 of SEQ ID NO: 586934
agguuagaugcuuaguaau

SEQ ID NO: 754883 - RNA, 19 nt, Artificial Sequence
  Description of Artificial Sequence: Synthetic oligonucleotide
  Antisense strand to SEQ ID NO: 754882
auuacuaagcaucuaaccu

SEQ ID NO: 754884 - RNA, 19 nt, Artificial Sequence
  Description of Artificial Sequence: Synthetic oligonucleotide
  Sense strand starting at position 418 of SEQ ID NO: 586934
guuagaugcuuaguaauuu

SEQ ID NO: 754885 - RNA, 19 nt, Artificial Sequence
  Description of Artificial Sequence: Synthetic oligonucleotide
  Antisense strand to SEQ ID NO: 754884
aaauuacuaagcaucuaac

SEQ ID NO: 754886 - RNA, 19 nt, Artificial Sequence
  Description of Artificial Sequence: Synthetic oligonucleotide
  Sense strand starting at position 426 of SEQ ID NO: 586934
cuuaguaauuuagaugauc

SEQ ID NO: 754887 - RNA, 19 nt, Artificial Sequence
  Description of Artificial Sequence: Synthetic oligonucleotide
  Antisense strand to SEQ ID NO: 754886
gaucaucuaaauuacuaag

SEQ ID NO: 754888 - RNA, 19 nt, Artificial Sequence
  Description of Artificial Sequence: Synthetic oligonucleotide
  Sense strand starting at position 591 of SEQ ID NO: 586934
acaccuggacgucacaaau

SEQ ID NO: 754889 - RNA, 19 nt, Artificial Sequence
  Description of Artificial Sequence: Synthetic oligonucleotide
  Antisense strand to SEQ ID NO: 754888
auuugugacguccaggugu

SEQ ID NO: 754890 - RNA, 19 nt, Artificial Sequence
  Description of Artificial Sequence: Synthetic oligonucleotide
  Sense strand starting at position 694 of SEQ ID NO: 586934
cucgguugcuuauuucuua

SEQ ID NO: 754891 - RNA, 19 nt, Artificial Sequence
  Description of Artificial Sequence: Synthetic oligonucleotide
  Antisense strand to SEQ ID NO: 754890
uaagaaauaagcaaccgag

SEQ ID NO: 754892 - RNA, 19 nt, Artificial Sequence
  Description of Artificial Sequence: Synthetic oligonucleotide
  Sense strand starting at position 697 of SEQ ID NO: 586934
gguugcuuauuucuuacua

SEQ ID NO: 754893 - RNA, 19 nt, Artificial Sequence
  Description of Artificial Sequence: Synthetic oligonucleotide
  Antisense strand to SEQ ID NO: 754892
uaguaagaaauaagcaacc

SEQ ID NO: 754894 - RNA, 19 nt, Artificial Sequence
  Description of Artificial Sequence: Synthetic oligonucleotide
  Sense strand starting at position 698 of SEQ ID NO: 586934
guugcuuauuucuuacuau

SEQ ID NO: 754895 - RNA, 19 nt, Artificial Sequence
  Description of Artificial Sequence: Synthetic oligonucleotide
  Antisense strand to SEQ ID NO: 754894
auaguaagaaauaagcaac

SEQ ID NO: 754896 - RNA, 19 nt, Artificial Sequence
  Description of Artificial Sequence: Synthetic oligonucleotide
  Sense strand starting at position 755 of SEQ ID NO: 586934
aaugaaauggccuguucuu

SEQ ID NO: 754897 - RNA, 19 nt, Artificial Sequence
  Description of Artificial Sequence: Synthetic oligonucleotide
  Antisense strand to SEQ ID NO: 754896
aagaacaggccauuucauu

SEQ ID NO: 754898 - RNA, 19 nt, Artificial Sequence
  Description of Artificial Sequence: Synthetic oligonucleotide
  Sense strand starting at position 800 of SEQ ID NO: 586934
aaugaaagggcucguuaag

SEQ ID NO: 754899 - RNA, 19 nt, Artificial Sequence
  Description of Artificial Sequence: Synthetic oligonucleotide
  Antisense strand to SEQ ID NO: 754898
cuuaacgagcccuuucauu

SEQ ID NO: 754900 - RNA, 19 nt, Artificial Sequence
  Description of Artificial Sequence: Synthetic oligonucleotide
  Sense strand starting at position 1992 of SEQ ID NO: 586934
cuuccaucucgcgagauua

SEQ ID NO: 754901 - RNA, 19 nt, Artificial Sequence
  Description of Artificial Sequence: Synthetic oligonucleotide
  Antisense strand to SEQ ID NO: 754900
uaaucucgcgagauggaag

SEQ ID NO: 754902 - RNA, 19 nt, Artificial Sequence
  Description of Artificial Sequence: Synthetic oligonucleotide
  Sense strand starting at position 2123 of SEQ ID NO: 586934
cacugaggucauggauacu

SEQ ID NO: 754903 - RNA, 19 nt, Artificial Sequence
  Description of Artificial Sequence: Synthetic oligonucleotide
  Antisense strand to SEQ ID NO: 754902
aguauccaugaccucagug

SEQ ID NO: 754904 - RNA, 19 nt, Artificial Sequence
  Description of Artificial Sequence: Synthetic oligonucleotide
  Sense strand starting at position 2179 of SEQ ID NO: 586934
gguuaaccgcguuacauuu

SEQ ID NO: 754905 - RNA, 19 nt, Artificial Sequence
  Description of Artificial Sequence: Synthetic oligonucleotide
  Antisense strand to SEQ ID NO: 754904
aaauguaacgcgguuaacc

SEQ ID NO: 754906 - RNA, 19 nt, Artificial Sequence
  Description of Artificial Sequence: Synthetic oligonucleotide
  Sense strand starting at position 2185 of SEQ ID NO: 586934
ccgcguuacauuuguugga

SEQ ID NO: 754907 - RNA, 19 nt, Artificial Sequence
  Description of Artificial Sequence: Synthetic oligonucleotide
  Antisense strand to SEQ ID NO: 754906
uccaacaaauguaacgcgg

SEQ ID NO: 754908 - RNA, 19 nt, Artificial Sequence
  Description of Artificial Sequence: Synthetic oligonucleotide
  Sense strand starting at position 2187 of SEQ ID NO: 586934
gcguuacauuuguuggaga

SEQ ID NO: 754909 - RNA, 19 nt, Artificial Sequence
  Description of Artificial Sequence: Synthetic oligonucleotide
  Antisense strand to SEQ ID NO: 754908
ucuccaacaaauguaacgc

SEQ ID NO: 754910 - RNA, 19 nt, Artificial Sequence
  Description of Artificial Sequence: Synthetic oligonucleotide
  Sense strand starting at position 2462 of SEQ ID NO: 586934
acggcuuugugagugaaag

SEQ ID NO: 754911 - RNA, 19 nt, Artificial Sequence
  Description of Artificial Sequence: Synthetic oligonucleotide
  Antisense strand to SEQ ID NO: 754910
cuuucacucacaaagccgu

SEQ ID NO: 754912 - RNA, 19 nt, Artificial Sequence
  Description of Artificial Sequence: Synthetic oligonucleotide
  Sense strand starting at position 2464 of SEQ ID NO: 586934
ggcuuugugagugaaagug

SEQ ID NO: 754913 - RNA, 19 nt, Artificial Sequence
  Description of Artificial Sequence: Synthetic oligonucleotide
  Antisense strand to SEQ ID NO: 754912
cacuuucacucacaaagcc

SEQ ID NO: 754914 - RNA, 19 nt, Artificial Sequence
  Description of Artificial Sequence: Synthetic oligonucleotide
  Sense strand starting at position 2771 of SEQ ID NO: 586934
cuaauaaagggcugcgauu

SEQ ID NO: 754915 - RNA, 19 nt, Artificial Sequence
  Description of Artificial Sequence: Synthetic oligonucleotide
  Antisense strand to SEQ ID NO: 754914
aaucgcagcccuuuauuag

SEQ ID NO: 754916 - RNA, 19 nt, Artificial Sequence
  Description of Artificial Sequence: Synthetic oligonucleotide
  Sense strand starting at position 2794 of SEQ ID NO: 586934
gaguuucuacuguagcgau

SEQ ID NO: 754917 - RNA, 19 nt, Artificial Sequence
  Description of Artificial Sequence: Synthetic oligonucleotide
  Antisense strand to SEQ ID NO: 754916
aucgcuacaguagaaacuc

SEQ ID NO: 754918 - RNA, 19 nt, Artificial Sequence
  Description of Artificial Sequence: Synthetic oligonucleotide
  Sense strand starting at position 2798 of SEQ ID NO: 586934
uucuacuguagcgaugaau

SEQ ID NO: 754919 - RNA, 19 nt, Artificial Sequence
  Description of Artificial Sequence: Synthetic oligonucleotide
  Antisense strand to SEQ ID NO: 754918
auucaucgcuacaguagaa

SEQ ID NO: 754920 - RNA, 19 nt, Artificial Sequence
  Description of Artificial Sequence: Synthetic oligonucleotide
  Sense strand starting at position 2872 of SEQ ID NO: 586934
cggaauaaccuguggucuu

SEQ ID NO: 754921 - RNA, 19 nt, Artificial Sequence
  Description of Artificial Sequence: Synthetic oligonucleotide
  Antisense strand to SEQ ID NO: 754920
aagaccacagguuauuccg

SEQ ID NO: 754922 - RNA, 19 nt, Artificial Sequence
  Description of Artificial Sequence: Synthetic oligonucleotide
  Sense strand starting at position 2946 of SEQ ID NO: 586934
ccuguuuaacuacauguua

SEQ ID NO: 754923 - RNA, 19 nt, Artificial Sequence
  Description of Artificial Sequence: Synthetic oligonucleotide
  Antisense strand to SEQ ID NO: 754922
uaacauguaguuaaacagg

SEQ ID NO: 754924 - RNA, 19 nt, Artificial Sequence
  Description of Artificial Sequence: Synthetic oligonucleotide
  Sense strand starting at position 2961 of SEQ ID NO: 586934
guuaaagaaauguguaugu

SEQ ID NO: 754925 - RNA, 19 nt, Artificial Sequence
  Description of Artificial Sequence: Synthetic oligonucleotide
  Antisense strand to SEQ ID NO: 754924
acauacacauuucuuuaac

SEQ ID NO: 754926 - RNA, 19 nt, Artificial Sequence
  Description of Artificial Sequence: Synthetic oligonucleotide
  Sense strand starting at position 2963 of SEQ ID NO: 586934
uaaagaaauguguauguuc

SEQ ID NO: 754927 - RNA, 19 nt, Artificial Sequence
  Description of Artificial Sequence: Synthetic oligonucleotide
  Antisense strand to SEQ ID NO: 754926
gaacauacacauuucuuua

SEQ ID NO: 754928 - RNA, 19 nt, Artificial Sequence
  Description of Artificial Sequence: Synthetic oligonucleotide
  Sense strand starting at position 2965 of SEQ ID NO: 586934
aagaaauguguauguuccu

SEQ ID NO: 754929 - RNA, 19 nt, Artificial Sequence
  Description of Artificial Sequence: Synthetic oligonucleotide
  Antisense strand to SEQ ID NO: 754928
aggaacauacacauuucuu

SEQ ID NO: 754930 - RNA, 19 nt, Artificial Sequence
  Description of Artificial Sequence: Synthetic oligonucleotide
  Sense strand starting at position 3105 of SEQ ID NO: 586934
gaauaagugucauuguuga

SEQ ID NO: 754931 - RNA, 19 nt, Artificial Sequence
  Description of Artificial Sequence: Synthetic oligonucleotide
  Antisense strand to SEQ ID NO: 754930
ucaacaaugacacuuauuc

SEQ ID NO: 754932 - RNA, 19 nt, Artificial Sequence
  Description of Artificial Sequence: Synthetic oligonucleotide
  Sense strand starting at position 3110 of SEQ ID NO: 586934
agugucauuguugaacaaa

SEQ ID NO: 754933 - RNA, 19 nt, Artificial Sequence
  Description of Artificial Sequence: Synthetic oligonucleotide
  Antisense strand to SEQ ID NO: 754932
uuuguucaacaaugacacu

SEQ ID NO: 754934 - RNA, 19 nt, Artificial Sequence
  Description of Artificial Sequence: Synthetic oligonucleotide
  Sense strand starting at position 3183 of SEQ ID NO: 586934
uggauagagucauuaaccu

SEQ ID NO: 754935 - RNA, 19 nt, Artificial Sequence
  Description of Artificial Sequence: Synthetic oligonucleotide
  Antisense strand to SEQ ID NO: 754934
agguuaaugacucuaucca

SEQ ID NO: 754936 - RNA, 19 nt, Artificial Sequence
  Description of Artificial Sequence: Synthetic oligonucleotide
  Sense strand starting at position 3342 of SEQ ID NO: 586934
guugcuuccagagaugaac

SEQ ID NO: 754937 - RNA, 19 nt, Artificial Sequence
  Description of Artificial Sequence: Synthetic oligonucleotide
  Antisense strand to SEQ ID NO: 754936
guucaucucuggaagcaac

SEQ ID NO: 754938 - RNA, 19 nt, Artificial Sequence
  Description of Artificial Sequence: Synthetic oligonucleotide
  Sense strand starting at position 3580 of SEQ ID NO: 586934
gccauuucguaagucuaca

SEQ ID NO: 754939 - RNA, 19 nt, Artificial Sequence
  Description of Artificial Sequence: Synthetic oligonucleotide
  Antisense strand to SEQ ID NO: 754938
uguagacuuacgaaauggc

SEQ ID NO: 754940 - RNA, 19 nt, Artificial Sequence
  Description of Artificial Sequence: Synthetic oligonucleotide
  Sense strand starting at position 3864 of SEQ ID NO: 586934
cggagauaauacuuaucua

SEQ ID NO: 754941 - RNA, 19 nt, Artificial Sequence
  Description of Artificial Sequence: Synthetic oligonucleotide
  Antisense strand to SEQ ID NO: 754940
uagauaaguauuaucuccg

SEQ ID NO: 754942 - RNA, 19 nt, Artificial Sequence
  Description of Artificial Sequence: Synthetic oligonucleotide
  Sense strand starting at position 3929 of SEQ ID NO: 586934
cuuagucaaugcuuaguaa

SEQ ID NO: 754943 - RNA, 19 nt, Artificial Sequence
  Description of Artificial Sequence: Synthetic oligonucleotide
  Antisense strand to SEQ ID NO: 754942
uuacuaagcauugacuaag

SEQ ID NO: 754944 - RNA, 19 nt, Artificial Sequence
  Description of Artificial Sequence: Synthetic oligonucleotide
  Sense strand starting at position 3930 of SEQ ID NO: 586934
uuagucaaugcuuaguaaa

SEQ ID NO: 754945 - RNA, 19 nt, Artificial Sequence
  Description of Artificial Sequence: Synthetic oligonucleotide
  Antisense strand to SEQ ID NO: 754944
uuuacuaagcauugacuaa

SEQ ID NO: 754946 - RNA, 19 nt, Artificial Sequence
  Description of Artificial Sequence: Synthetic oligonucleotide
  Sense strand starting at position 3932 of SEQ ID NO: 586934
agucaaugcuuaguaaaua

SEQ ID NO: 754947 - RNA, 19 nt, Artificial Sequence
  Description of Artificial Sequence: Synthetic oligonucleotide
  Antisense strand to SEQ ID NO: 754946
uauuuacuaagcauugacu

SEQ ID NO: 754948 - RNA, 19 nt, Artificial Sequence
  Description of Artificial Sequence: Synthetic oligonucleotide
  Sense strand starting at position 144 of SEQ ID NO: 586935
gcucaugaauucuuuagga

SEQ ID NO: 754949 - RNA, 19 nt, Artificial Sequence
  Description of Artificial Sequence: Synthetic oligonucleotide
  Antisense strand to SEQ ID NO: 754948
uccuaaagaauucaugagc

SEQ ID NO: 754950 - RNA, 19 nt, Artificial Sequence
  Description of Artificial Sequence: Synthetic oligonucleotide
  Sense strand starting at position 149 of SEQ ID NO: 586935
ugaauucuuuaggacagca

SEQ ID NO: 754951 - RNA, 19 nt, Artificial Sequence
  Description of Artificial Sequence: Synthetic oligonucleotide
  Antisense strand to SEQ ID NO: 754950
ugcuguccuaaagaauuca

SEQ ID NO: 754952 - RNA, 19 nt, Artificial Sequence
  Description of Artificial Sequence: Synthetic oligonucleotide
  Sense strand starting at position 190 of SEQ ID NO: 586935
ggcaaacuuaacgagguua

SEQ ID NO: 754953 - RNA, 19 nt, Artificial Sequence
  Description of Artificial Sequence: Synthetic oligonucleotide
  Antisense strand to SEQ ID NO: 754952
uaaccucguuaaguuugcc

SEQ ID NO: 754954 - RNA, 19 nt, Artificial Sequence
  Description of Artificial Sequence: Synthetic oligonucleotide
  Sense strand starting at position 192 of SEQ ID NO: 586935
caaacuuaacgagguuaag

SEQ ID NO: 754955 - RNA, 19 nt, Artificial Sequence
  Description of Artificial Sequence: Synthetic oligonucleotide
  Antisense strand to SEQ ID NO: 754954
cuuaaccucguuaaguuug

SEQ ID NO: 754956 - RNA, 19 nt, Artificial Sequence
  Description of Artificial Sequence: Synthetic oligonucleotide
  Sense strand starting at position 209 of SEQ ID NO: 586935
agaucacacgguggugaau

SEQ ID NO: 754957 - RNA, 19 nt, Artificial Sequence
  Description of Artificial Sequence: Synthetic oligonucleotide
  Antisense strand to SEQ ID NO: 754956
auucaccaccgugugaucu

SEQ ID NO: 754958 - RNA, 19 nt, Artificial Sequence
  Description of Artificial Sequence: Synthetic oligonucleotide
  Sense strand starting at position 220 of SEQ ID NO: 586935
uggugaauaagcgguaaau

SEQ ID NO: 754959 - RNA, 19 nt, Artificial Sequence
  Description of Artificial Sequence: Synthetic oligonucleotide
  Antisense strand to SEQ ID NO: 754958
auuuaccgcuuauucacca

SEQ ID NO: 754960 - RNA, 19 nt, Artificial Sequence
  Description of Artificial Sequence: Synthetic oligonucleotide
  Sense strand starting at position 222 of SEQ ID NO: 586935
gugaauaagcgguaaaucu

SEQ ID NO: 754961 - RNA, 19 nt, Artificial Sequence
  Description of Artificial Sequence: Synthetic oligonucleotide
  Antisense strand to SEQ ID NO: 754960
agauuuaccgcuuauucac

SEQ ID NO: 754962 - RNA, 19 nt, Artificial Sequence
  Description of Artificial Sequence: Synthetic oligonucleotide
  Sense strand starting at position 231 of SEQ ID NO: 586935
cgguaaaucuacuggucag

SEQ ID NO: 754963 - RNA, 19 nt, Artificial Sequence
  Description of Artificial Sequence: Synthetic oligonucleotide
  Antisense strand to SEQ ID NO: 754962
cugaccaguagauuuaccg

SEQ ID NO: 754964 - RNA, 19 nt, Artificial Sequence
  Description of Artificial Sequence: Synthetic oligonucleotide
  Sense strand starting at position 232 of SEQ ID NO: 586935
gguaaaucuacuggucaga

SEQ ID NO: 754965 - RNA, 19 nt, Artificial Sequence
  Description of Artificial Sequence: Synthetic oligonucleotide
  Antisense strand to SEQ ID NO: 754964
ucugaccaguagauuuacc

SEQ ID NO: 754966 - RNA, 19 nt, Artificial Sequence
  Description of Artificial Sequence: Synthetic oligonucleotide
  Sense strand starting at position 245 of SEQ ID NO: 586935
gucagacacccuuggagau

SEQ ID NO: 754967 - RNA, 19 nt, Artificial Sequence
  Description of Artificial Sequence: Synthetic oligonucleotide
  Antisense strand to SEQ ID NO: 754966
aucuccaagggugucugac

SEQ ID NO: 754968 - RNA, 19 nt, Artificial Sequence
  Description of Artificial Sequence: Synthetic oligonucleotide
  Sense strand starting at position 246 of SEQ ID NO: 586935
ucagacacccuuggagauu

SEQ ID NO: 754969 - RNA, 19 nt, Artificial Sequence
  Description of Artificial Sequence: Synthetic oligonucleotide
  Antisense strand to SEQ ID NO: 754968
aaucuccaagggugucuga

SEQ ID NO: 754970 - RNA, 19 nt, Artificial Sequence
  Description of Artificial Sequence: Synthetic oligonucleotide
  Sense strand starting at position 281 of SEQ ID NO: 586935
uggaguguagugggaagaa

SEQ ID NO: 754971 - RNA, 19 nt, Artificial Sequence
  Description of Artificial Sequence: Synthetic oligonucleotide
  Antisense strand to SEQ ID NO: 754970
uucuucccacuacacucca

SEQ ID NO: 754972 - RNA, 19 nt, Artificial Sequence
  Description of Artificial Sequence: Synthetic oligonucleotide
  Sense strand starting at position 689 of SEQ ID NO: 586935
aucugcauccuagagcaau

SEQ ID NO: 754973 - RNA, 19 nt, Artificial Sequence
  Description of Artificial Sequence: Synthetic oligonucleotide
  Antisense strand to SEQ ID NO: 754972
auugcucuaggaugcagau

SEQ ID NO: 754974 - RNA, 19 nt, Artificial Sequence
  Description of Artificial Sequence: Synthetic oligonucleotide
  Sense strand starting at position 724 of SEQ ID NO: 586935
aaggaaucguucuggaaga

SEQ ID NO: 754975 - RNA, 19 nt, Artificial Sequence
  Description of Artificial Sequence: Synthetic oligonucleotide
  Antisense strand to SEQ ID NO: 754974
ucuuccagaacgauuccuu

SEQ ID NO: 754976 - RNA, 19 nt, Artificial Sequence
  Description of Artificial Sequence: Synthetic oligonucleotide
  Sense strand starting at position 725 of SEQ ID NO: 586935
aggaaucguucuggaagac

SEQ ID NO: 754977 - RNA, 19 nt, Artificial Sequence
  Description of Artificial Sequence: Synthetic oligonucleotide
  Antisense strand to SEQ ID NO: 754976
gucuuccagaacgauuccu

SEQ ID NO: 754978 - RNA, 19 nt, Artificial Sequence
  Description of Artificial Sequence: Synthetic oligonucleotide
  Sense strand starting at position 928 of SEQ ID NO: 586935
caucuugcccugugggaau

SEQ ID NO: 754979 - RNA, 19 nt, Artificial Sequence
  Description of Artificial Sequence: Synthetic oligonucleotide
  Antisense strand to SEQ ID NO: 754978
auucccacagggcaagaug

SEQ ID NO: 754980 - RNA, 19 nt, Artificial Sequence
  Description of Artificial Sequence: Synthetic oligonucleotide
  Sense strand starting at position 939 of SEQ ID NO: 586935
gugggaaucuuggaaucca

SEQ ID NO: 754981 - RNA, 19 nt, Artificial Sequence
  Description of Artificial Sequence: Synthetic oligonucleotide
  Antisense strand to SEQ ID NO: 754980
uggauuccaagauucccac

SEQ ID NO: 754982 - RNA, 19 nt, Artificial Sequence
  Description of Artificial Sequence: Synthetic oligonucleotide
  Sense strand starting at position 1010 of SEQ ID NO: 586935
gugagaagucauuaccacu

SEQ ID NO: 754983 - RNA, 19 nt, Artificial Sequence
  Description of Artificial Sequence: Synthetic oligonucleotide
  Antisense strand to SEQ ID NO: 754982
agugguaaugacuucucac

SEQ ID NO: 754984 - RNA, 19 nt, Artificial Sequence
  Description of Artificial Sequence: Synthetic oligonucleotide
  Sense strand starting at position 1538 of SEQ ID NO: 586935
augcuuucccagcgauugu

SEQ ID NO: 754985 - RNA, 19 nt, Artificial Sequence
  Description of Artificial Sequence: Synthetic oligonucleotide
  Antisense strand to SEQ ID NO: 754984
acaaucgcugggaaagcau

SEQ ID NO: 754986 - RNA, 19 nt, Artificial Sequence
  Description of Artificial Sequence: Synthetic oligonucleotide
  Sense strand starting at position 1539 of SEQ ID NO: 586935
ugcuuucccagcgauuguu

SEQ ID NO: 754987 - RNA, 19 nt, Artificial Sequence
  Description of Artificial Sequence: Synthetic oligonucleotide
  Antisense strand to SEQ ID NO: 754986
aacaaucgcugggaaagca

SEQ ID NO: 754988 - RNA, 19 nt, Artificial Sequence
  Description of Artificial Sequence: Synthetic oligonucleotide
  Sense strand starting at position 1571 of SEQ ID NO: 586935
caggcaugaggugggaaau

SEQ ID NO: 754989 - RNA, 19 nt, Artificial Sequence
  Description of Artificial Sequence: Synthetic oligonucleotide
  Antisense strand to SEQ ID NO: 754988
auuucccaccucaugccug

SEQ ID NO: 754990 - RNA, 19 nt, Artificial Sequence
  Description of Artificial Sequence: Synthetic oligonucleotide
  Sense strand starting at position 1581 of SEQ ID NO: 586935
gugggaaauggguaagugu

SEQ ID NO: 754991 - RNA, 19 nt, Artificial Sequence
  Description of Artificial Sequence: Synthetic oligonucleotide
  Antisense strand to SEQ ID NO: 754990
acacuuacccauuucccac

SEQ ID NO: 754992 - RNA, 19 nt, Artificial Sequence
  Description of Artificial Sequence: Synthetic oligonucleotide
  Sense strand starting at position 1588 of SEQ ID NO: 586935
auggguaagugucuugaug

SEQ ID NO: 754993 - RNA, 19 nt, Artificial Sequence
  Description of Artificial Sequence: Synthetic oligonucleotide
  Antisense strand to SEQ ID NO: 754992
caucaagacacuuacccau

SEQ ID NO: 754994 - RNA, 19 nt, Artificial Sequence
  Description of Artificial Sequence: Synthetic oligonucleotide
  Sense strand starting at position 1596 of SEQ ID NO: 586935
gugucuugaugcagaggga

SEQ ID NO: 754995 - RNA, 19 nt, Artificial Sequence
  Description of Artificial Sequence: Synthetic oligonucleotide
  Antisense strand to SEQ ID NO: 754994
ucccucugcaucaagacac

SEQ ID NO: 754996 - RNA, 19 nt, Artificial Sequence
  Description of Artificial Sequence: Synthetic oligonucleotide
  Sense strand starting at position 1621 of SEQ ID NO: 586935
gagucaagguucuuguuac

SEQ ID NO: 754997 - RNA, 19 nt, Artificial Sequence
  Description of Artificial Sequence: Synthetic oligonucleotide
  Antisense strand to SEQ ID NO: 754996
guaacaagaaccuugacuc

SEQ ID NO: 754998 - RNA, 19 nt, Artificial Sequence
  Description of Artificial Sequence: Synthetic oligonucleotide
  Sense strand starting at position 1629 of SEQ ID NO: 586935
guucuuguuacugggugau

SEQ ID NO: 754999 - RNA, 19 nt, Artificial Sequence
  Description of Artificial Sequence: Synthetic oligonucleotide
  Antisense strand to SEQ ID NO: 754998
aucacccaguaacaagaac

SEQ ID NO: 755000 - RNA, 19 nt, Artificial Sequence
  Description of Artificial Sequence: Synthetic oligonucleotide
  Sense strand starting at position 1796 of SEQ ID NO: 586935
cugccuuaagcccgaagua

SEQ ID NO: 755001 - RNA, 19 nt, Artificial Sequence
  Description of Artificial Sequence: Synthetic oligonucleotide
  Antisense strand to SEQ ID NO: 755000
uacuucgggcuuaaggcag

SEQ ID NO: 755002 - RNA, 19 nt, Artificial Sequence
  Description of Artificial Sequence: Synthetic oligonucleotide
  Sense strand starting at position 1797 of SEQ ID NO: 586935
ugccuuaagcccgaaguaa

SEQ ID NO: 755003 - RNA, 19 nt, Artificial Sequence
  Description of Artificial Sequence: Synthetic oligonucleotide
  Antisense strand to SEQ ID NO: 755002
uuacuucgggcuuaaggca

SEQ ID NO: 755004 - RNA, 19 nt, Artificial Sequence
  Description of Artificial Sequence: Synthetic oligonucleotide
  Sense strand starting at position 2338 of SEQ ID NO: 586935
aguguucagcuuggagaaa

SEQ ID NO: 755005 - RNA, 19 nt, Artificial Sequence
  Description of Artificial Sequence: Synthetic oligonucleotide
  Antisense strand to SEQ ID NO: 755004
uuucuccaagcugaacacu

SEQ ID NO: 755006 - RNA, 19 nt, Artificial Sequence
  Description of Artificial Sequence: Synthetic oligonucleotide
  Sense strand starting at position 2397 of SEQ ID NO: 586935
caggucacuguggaguuau

SEQ ID NO: 755007 - RNA, 19 nt, Artificial Sequence
  Description of Artificial Sequence: Synthetic oligonucleotide
  Antisense strand to SEQ ID NO: 755006
auaacuccacagugaccug

SEQ ID NO: 755008 - RNA, 19 nt, Artificial Sequence
  Description of Artificial Sequence: Synthetic oligonucleotide
  Sense strand starting at position 2548 of SEQ ID NO: 586935
ccacgugauugucuagguu

SEQ ID NO: 755009 - RNA, 19 nt, Artificial Sequence
  Description of Artificial Sequence: Synthetic oligonucleotide
  Antisense strand to SEQ ID NO: 755008
aaccuagacaaucacgugg

SEQ ID NO: 755010 - RNA, 19 nt, Artificial Sequence
  Description of Artificial Sequence: Synthetic oligonucleotide
  Sense strand starting at position 2694 of SEQ ID NO: 586935
gggcucucuugugucaaca

SEQ ID NO: 755011 - RNA, 19 nt, Artificial Sequence
  Description of Artificial Sequence: Synthetic oligonucleotide
  Antisense strand to SEQ ID NO: 755010
uguugacacaagagagccc

SEQ ID NO: 755012 - RNA, 19 nt, Artificial Sequence
  Description of Artificial Sequence: Synthetic oligonucleotide
  Sense strand starting at position 2806 of SEQ ID NO: 586935
aggagaccaacguguaagu

SEQ ID NO: 755013 - RNA, 19 nt, Artificial Sequence
  Description of Artificial Sequence: Synthetic oligonucleotide
  Antisense strand to SEQ ID NO: 755012
acuuacacguuggucuccu

SEQ ID NO: 755014 - RNA, 19 nt, Artificial Sequence
  Description of Artificial Sequence: Synthetic oligonucleotide
  Sense strand starting at position 2808 of SEQ ID NO: 586935
gagaccaacguguaaguuu

SEQ ID NO: 755015 - RNA, 19 nt, Artificial Sequence
  Description of Artificial Sequence: Synthetic oligonucleotide
  Antisense strand to SEQ ID NO: 755014
aaacuuacacguuggucuc

SEQ ID NO: 755016 - RNA, 19 nt, Artificial Sequence
  Description of Artificial Sequence: Synthetic oligonucleotide
  Sense strand starting at position 2910 of SEQ ID NO: 586935
auagaaacagagugucaau

SEQ ID NO: 755017 - RNA, 19 nt, Artificial Sequence
  Description of Artificial Sequence: Synthetic oligonucleotide
  Antisense strand to SEQ ID NO: 755016
auugacacucuguuucuau

SEQ ID NO: 755018 - RNA, 19 nt, Artificial Sequence
  Description of Artificial Sequence: Synthetic oligonucleotide
  Sense strand starting at position 2921 of SEQ ID NO: 586935
gugucaauucauggcaggu

SEQ ID NO: 755019 - RNA, 19 nt, Artificial Sequence
  Description of Artificial Sequence: Synthetic oligonucleotide
  Antisense strand to SEQ ID NO: 755018
accugccaugaauugacac

SEQ ID NO: 755020 - RNA, 19 nt, Artificial Sequence
  Description of Artificial Sequence: Synthetic oligonucleotide
  Sense strand starting at position 2989 of SEQ ID NO: 586935
gauagauucuguggagcag

SEQ ID NO: 755021 - RNA, 19 nt, Artificial Sequence
  Description of Artificial Sequence: Synthetic oligonucleotide
  Antisense strand to SEQ ID NO: 755020
cugcuccacagaaucuauc

SEQ ID NO: 755022 - RNA, 19 nt, Artificial Sequence
  Description of Artificial Sequence: Synthetic oligonucleotide
  Sense strand starting at position 2990 of SEQ ID NO: 586935
auagauucuguggagcagu

SEQ ID NO: 755023 - RNA, 19 nt, Artificial Sequence
  Description of Artificial Sequence: Synthetic oligonucleotide
  Antisense strand to SEQ ID NO: 755022
acugcuccacagaaucuau

SEQ ID NO: 755024 - RNA, 19 nt, Artificial Sequence
  Description of Artificial Sequence: Synthetic oligonucleotide
  Sense strand starting at position 3003 of SEQ ID NO: 586935
agcagugguccucaacguu

SEQ ID NO: 755025 - RNA, 19 nt, Artificial Sequence
  Description of Artificial Sequence: Synthetic oligonucleotide
  Antisense strand to SEQ ID NO: 755024
aacguugaggaccacugcu

SEQ ID NO: 755026 - RNA, 19 nt, Artificial Sequence
  Description of Artificial Sequence: Synthetic oligonucleotide
  Sense strand starting at position 3568 of SEQ ID NO: 586935
gggcuagacuaguggauuu

SEQ ID NO: 755027 - RNA, 19 nt, Artificial Sequence
  Description of Artificial Sequence: Synthetic oligonucleotide
  Antisense strand to SEQ ID NO: 755026
aaauccacuagucuagccc

SEQ ID NO: 755028 - RNA, 19 nt, Artificial Sequence
  Description of Artificial Sequence: Synthetic oligonucleotide
  Sense strand starting at position 14 of SEQ ID NO: 586936
aaugauauccagggcuuag

SEQ ID NO: 755029 - RNA, 19 nt, Artificial Sequence
  Description of Artificial Sequence: Synthetic oligonucleotide
  Antisense strand to SEQ ID NO: 755028
cuaagcccuggauaucauu

SEQ ID NO: 755030 - RNA, 19 nt, Artificial Sequence
  Description of Artificial Sequence: Synthetic oligonucleotide
  Sense strand starting at position 68 of SEQ ID NO: 586936
agcacaaaucgaugugaau

SEQ ID NO: 755031 - RNA, 19 nt, Artificial Sequence
  Description of Artificial Sequence: Synthetic oligonucleotide
  Antisense strand to SEQ ID NO: 755030
auucacaucgauuugugcu

SEQ ID NO: 755032 - RNA, 19 nt, Artificial Sequence
  Description of Artificial Sequence: Synthetic oligonucleotide
  Sense strand starting at position 74 of SEQ ID NO: 586936
aaucgaugugaauguauau

SEQ ID NO: 755033 - RNA, 19 nt, Artificial Sequence
  Description of Artificial Sequence: Synthetic oligonucleotide
  Antisense strand to SEQ ID NO: 755032
auauacauucacaucgauu

SEQ ID NO: 755034 - RNA, 19 nt, Artificial Sequence
  Description of Artificial Sequence: Synthetic oligonucleotide
  Sense strand starting at position 389 of SEQ ID NO: 586936
ucauguuuagagcaaugcu

SEQ ID NO: 755035 - RNA, 19 nt, Artificial Sequence
  Description of Artificial Sequence: Synthetic oligonucleotide
  Antisense strand to SEQ ID NO: 755034
agcauugcucuaaacauga

SEQ ID NO: 755036 - RNA, 19 nt, Artificial Sequence
  Description of Artificial Sequence: Synthetic oligonucleotide
  Sense strand starting at position 422 of SEQ ID NO: 586936
cagagauuccagcacagca

SEQ ID NO: 755037 - RNA, 19 nt, Artificial Sequence
  Description of Artificial Sequence: Synthetic oligonucleotide
  Antisense strand to SEQ ID NO: 755036
ugcugugcuggaaucucug

SEQ ID NO: 755038 - RNA, 19 nt, Artificial Sequence
  Description of Artificial Sequence: Synthetic oligonucleotide
  Sense strand starting at position 443 of SEQ ID NO: 586936
aucauagucuguuuaaaug

SEQ ID NO: 755039 - RNA, 19 nt, Artificial Sequence
  Description of Artificial Sequence: Synthetic oligonucleotide
  Antisense strand to SEQ ID NO: 755038
cauuuaaacagacuaugau

SEQ ID NO: 755040 - RNA, 19 nt, Artificial Sequence
  Description of Artificial Sequence: Synthetic oligonucleotide
  Sense strand starting at position 476 of SEQ ID NO: 586936
ccagauaaagccuggauaa

SEQ ID NO: 755041 - RNA, 19 nt, Artificial Sequence
  Description of Artificial Sequence: Synthetic oligonucleotide
  Antisense strand to SEQ ID NO: 755040
uuauccaggcuuuaucugg

SEQ ID NO: 755042 - RNA, 19 nt, Artificial Sequence
  Description of Artificial Sequence: Synthetic oligonucleotide
  Sense strand starting at position 643 of SEQ ID NO: 586936
ggccaaugacuaugaaaca

SEQ ID NO: 755043 - RNA, 19 nt, Artificial Sequence
  Description of Artificial Sequence: Synthetic oligonucleotide
  Antisense strand to SEQ ID NO: 755042
uguuucauagucauuggcc

SEQ ID NO: 755044 - RNA, 19 nt, Artificial Sequence
  Description of Artificial Sequence: Synthetic oligonucleotide
  Sense strand starting at position 768 of SEQ ID NO: 586936
gcuaaauggaacgaguauu

SEQ ID NO: 755045 - RNA, 19 nt, Artificial Sequence
  Description of Artificial Sequence: Synthetic oligonucleotide
  Antisense strand to SEQ ID NO: 755044
aauacucguuccauuuagc

SEQ ID NO: 755046 - RNA, 19 nt, Artificial Sequence
  Description of Artificial Sequence: Synthetic oligonucleotide
  Sense strand starting at position 813 of SEQ ID NO: 586936
ggcauuaaaugagucaaua

SEQ ID NO: 755047 - RNA, 19 nt, Artificial Sequence
  Description of Artificial Sequence: Synthetic oligonucleotide
  Antisense strand to SEQ ID NO: 755046
uauugacucauuuaaugcc

SEQ ID NO: 755048 - RNA, 19 nt, Artificial Sequence
  Description of Artificial Sequence: Synthetic oligonucleotide
  Sense strand starting at position 823 of SEQ ID NO: 586936
gagucaauaacguguaaug

SEQ ID NO: 755049 - RNA, 19 nt, Artificial Sequence
  Description of Artificial Sequence: Synthetic oligonucleotide
  Antisense strand to SEQ ID NO: 755048
cauuacacguuauugacuc

SEQ ID NO: 755050 - RNA, 19 nt, Artificial Sequence
  Description of Artificial Sequence: Synthetic oligonucleotide
  Sense strand starting at position 834 of SEQ ID NO: 586936
guguaauguguuuaacacu

SEQ ID NO: 755051 - RNA, 19 nt, Artificial Sequence
  Description of Artificial Sequence: Synthetic oligonucleotide
  Antisense strand to SEQ ID NO: 755050
aguguuaaacacauuacac

SEQ ID NO: 755052 - RNA, 19 nt, Artificial Sequence
  Description of Artificial Sequence: Synthetic oligonucleotide
  Sense strand starting at position 881 of SEQ ID NO: 586936
cugcuauuaucauuucugu

SEQ ID NO: 755053 - RNA, 19 nt, Artificial Sequence
  Description of Artificial Sequence: Synthetic oligonucleotide
  Antisense strand to SEQ ID NO: 755052
acagaaaugauaauagcag

SEQ ID NO: 755054 - RNA, 19 nt, Artificial Sequence
  Description of Artificial Sequence: Synthetic oligonucleotide
  Sense strand starting at position 969 of SEQ ID NO: 586936
ggugcagugcucuccgcua

SEQ ID NO: 755055 - RNA, 19 nt, Artificial Sequence
  Description of Artificial Sequence: Synthetic oligonucleotide
  Antisense strand to SEQ ID NO: 755054
uagcggagagcacugcacc

SEQ ID NO: 755056 - RNA, 19 nt, Artificial Sequence
  Description of Artificial Sequence: Synthetic oligonucleotide
  Sense strand starting at position 1689 of SEQ ID NO: 586936
gucccuucgccgaggaaga

SEQ ID NO: 755057 - RNA, 19 nt, Artificial Sequence
  Description of Artificial Sequence: Synthetic oligonucleotide
  Antisense strand to SEQ ID NO: 755056
ucuuccucggcgaagggac

SEQ ID NO: 755058 - RNA, 19 nt, Artificial Sequence
  Description of Artificial Sequence: Synthetic oligonucleotide
  Sense strand starting at position 2204 of SEQ ID NO: 586936
agacacucuuuggcugaaa

SEQ ID NO: 755059 - RNA, 19 nt, Artificial Sequence
  Description of Artificial Sequence: Synthetic oligonucleotide
  Antisense strand to SEQ ID NO: 755058
uuucagccaaagagugucu

SEQ ID NO: 755060 - RNA, 19 nt, Artificial Sequence
  Description of Artificial Sequence: Synthetic oligonucleotide
  Sense strand starting at position 2284 of SEQ ID NO: 586936
gcuucugcugcccucuaau

SEQ ID NO: 755061 - RNA, 19 nt, Artificial Sequence
  Description of Artificial Sequence: Synthetic oligonucleotide
  Antisense strand to SEQ ID NO: 755060
auuagagggcagcagaagc

SEQ ID NO: 755062 - RNA, 19 nt, Artificial Sequence
  Description of Artificial Sequence: Synthetic oligonucleotide
  Sense strand starting at position 2360 of SEQ ID NO: 586936
gacaauguccugcaaggca

SEQ ID NO: 755063 - RNA, 19 nt, Artificial Sequence
  Description of Artificial Sequence: Synthetic oligonucleotide
  Antisense strand to SEQ ID NO: 755062
ugccuugcaggacauuguc

SEQ ID NO: 755064 - RNA, 19 nt, Artificial Sequence
  Description of Artificial Sequence: Synthetic oligonucleotide
  Sense strand starting at position 2410 of SEQ ID NO: 586936
ggucacguuguauaaauca

SEQ ID NO: 755065 - RNA, 19 nt, Artificial Sequence
  Description of Artificial Sequence: Synthetic oligonucleotide
  Antisense strand to SEQ ID NO: 755064
ugauuuauacaacgugacc

SEQ ID NO: 755066 - RNA, 19 nt, Artificial Sequence
  Description of Artificial Sequence: Synthetic oligonucleotide
  Sense strand starting at position 2769 of SEQ ID NO: 586936
gcuugaguugaguaagaag

SEQ ID NO: 755067 - RNA, 19 nt, Artificial Sequence
  Description of Artificial Sequence: Synthetic oligonucleotide
  Antisense strand to SEQ ID NO: 755066
cuucuuacucaacucaagc

SEQ ID NO: 755068 - RNA, 19 nt, Artificial Sequence
  Description of Artificial Sequence: Synthetic oligonucleotide
  Sense strand starting at position 2791 of SEQ ID NO: 586936
uguacuaugggaugcaagu

SEQ ID NO: 755069 - RNA, 19 nt, Artificial Sequence
  Description of Artificial Sequence: Synthetic oligonucleotide
  Antisense strand to SEQ ID NO: 755068
acuugcaucccauaguaca

SEQ ID NO: 755070 - RNA, 19 nt, Artificial Sequence
  Description of Artificial Sequence: Synthetic oligonucleotide
  Sense strand starting at position 2797 of SEQ ID NO: 586936
augggaugcaaguauguau

SEQ ID NO: 755071 - RNA, 19 nt, Artificial Sequence
  Description of Artificial Sequence: Synthetic oligonucleotide
  Antisense strand to SEQ ID NO: 755070
auacauacuugcaucccau

SEQ ID NO: 755072 - RNA, 19 nt, Artificial Sequence
  Description of Artificial Sequence: Synthetic oligonucleotide
  Sense strand starting at position 2834 of SEQ ID NO: 586936
ucuuacuugcauuaggaaa

SEQ ID NO: 755073 - RNA, 19 nt, Artificial Sequence
  Description of Artificial Sequence: Synthetic oligonucleotide
  Antisense strand to SEQ ID NO: 755072
uuuccuaaugcaaguaaga

SEQ ID NO: 755074 - RNA, 19 nt, Artificial Sequence
  Description of Artificial Sequence: Synthetic oligonucleotide
  Sense strand starting at position 2868 of SEQ ID NO: 586936
uggcucagcuaucuacaga

SEQ ID NO: 755075 - RNA, 19 nt, Artificial Sequence
  Description of Artificial Sequence: Synthetic oligonucleotide
  Antisense strand to SEQ ID NO: 755074
ucuguagauagcugagcca

SEQ ID NO: 755076 - RNA, 19 nt, Artificial Sequence
  Description of Artificial Sequence: Synthetic oligonucleotide
  Sense strand starting at position 2939 of SEQ ID NO: 586936
agacuucugguauaugcua

SEQ ID NO: 755077 - RNA, 19 nt, Artificial Sequence
  Description of Artificial Sequence: Synthetic oligonucleotide
  Antisense strand to SEQ ID NO: 755076
uagcauauaccagaagucu

SEQ ID NO: 755078 - RNA, 19 nt, Artificial Sequence
  Description of Artificial Sequence: Synthetic oligonucleotide
  Sense strand starting at position 2959 of SEQ ID NO: 586936
uuauuagggcaucagcaau

SEQ ID NO: 755079 - RNA, 19 nt, Artificial Sequence
  Description of Artificial Sequence: Synthetic oligonucleotide
  Antisense strand to SEQ ID NO: 755078
auugcugaugcccuaauaa

SEQ ID NO: 755080 - RNA, 19 nt, Artificial Sequence
  Description of Artificial Sequence: Synthetic oligonucleotide
  Sense strand starting at position 2978 of SEQ ID NO: 586936
auggaaacauguucucuga

SEQ ID NO: 755081 - RNA, 19 nt, Artificial Sequence
  Description of Artificial Sequence: Synthetic oligonucleotide
  Antisense strand to SEQ ID NO: 755080
ucagagaacauguuuccau

SEQ ID NO: 755082 - RNA, 19 nt, Artificial Sequence
  Description of Artificial Sequence: Synthetic oligonucleotide
  Sense strand starting at position 2980 of SEQ ID NO: 586936
ggaaacauguucucugaau

SEQ ID NO: 755083 - RNA, 19 nt, Artificial Sequence
  Description of Artificial Sequence: Synthetic oligonucleotide
  Antisense strand to SEQ ID NO: 755082
auucagagaacauguuucc

SEQ ID NO: 755084 - RNA, 19 nt, Artificial Sequence
  Description of Artificial Sequence: Synthetic oligonucleotide
  Sense strand starting at position 2981 of SEQ ID NO: 586936
gaaacauguucucugaaug

SEQ ID NO: 755085 - RNA, 19 nt, Artificial Sequence
  Description of Artificial Sequence: Synthetic oligonucleotide
  Antisense strand to SEQ ID NO: 755084
cauucagagaacauguuuc

SEQ ID NO: 755086 - RNA, 19 nt, Artificial Sequence
  Description of Artificial Sequence: Synthetic oligonucleotide
  Sense strand starting at position 2986 of SEQ ID NO: 586936
auguucucugaauguuaau

SEQ ID NO: 755087 - RNA, 19 nt, Artificial Sequence
  Description of Artificial Sequence: Synthetic oligonucleotide
  Antisense strand to SEQ ID NO: 755086
auuaacauucagagaacau

SEQ ID NO: 755088 - RNA, 19 nt, Artificial Sequence
  Description of Artificial Sequence: Synthetic oligonucleotide
  Sense strand starting at position 3146 of SEQ ID NO: 586936
gugacaucuauugggaauu

SEQ ID NO: 755089 - RNA, 19 nt, Artificial Sequence
  Description of Artificial Sequence: Synthetic oligonucleotide
  Antisense strand to SEQ ID NO: 755088
aauucccaauagaugucac

SEQ ID NO: 755090 - RNA, 19 nt, Artificial Sequence
  Description of Artificial Sequence: Synthetic oligonucleotide
  Sense strand starting at position 3147 of SEQ ID NO: 586936
ugacaucuauugggaauuu

SEQ ID NO: 755091 - RNA, 19 nt, Artificial Sequence
  Description of Artificial Sequence: Synthetic oligonucleotide
  Antisense strand to SEQ ID NO: 755090
aaauucccaauagauguca

SEQ ID NO: 755092 - RNA, 19 nt, Artificial Sequence
  Description of Artificial Sequence: Synthetic oligonucleotide
  Sense strand starting at position 3165 of SEQ ID NO: 586936
uacaauggucaagguauga

SEQ ID NO: 755093 - RNA, 19 nt, Artificial Sequence
  Description of Artificial Sequence: Synthetic oligonucleotide
  Antisense strand to SEQ ID NO: 755092
ucauaccuugaccauugua

SEQ ID NO: 755094 - RNA, 19 nt, Artificial Sequence
  Description of Artificial Sequence: Synthetic oligonucleotide
  Sense strand starting at position 3284 of SEQ ID NO: 586936
caaagagucugguucuuau

SEQ ID NO: 755095 - RNA, 19 nt, Artificial Sequence
  Description of Artificial Sequence: Synthetic oligonucleotide
  Antisense strand to SEQ ID NO: 755094
auaagaaccagacucuuug

SEQ ID NO: 755096 - RNA, 19 nt, Artificial Sequence
  Description of Artificial Sequence: Synthetic oligonucleotide
  Sense strand starting at position 3343 of SEQ ID NO: 586936
cuagaaagguaaucuaguu

SEQ ID NO: 755097 - RNA, 19 nt, Artificial Sequence
  Description of Artificial Sequence: Synthetic oligonucleotide
  Antisense strand to SEQ ID NO: 755096
aacuagauuaccuuucuag

SEQ ID NO: 755098 - RNA, 19 nt, Artificial Sequence
  Description of Artificial Sequence: Synthetic oligonucleotide
  Sense strand starting at position 3351 of SEQ ID NO: 586936
guaaucuaguuccuauaga

SEQ ID NO: 755099 - RNA, 19 nt, Artificial Sequence
  Description of Artificial Sequence: Synthetic oligonucleotide
  Antisense strand to SEQ ID NO: 755098
ucuauaggaacuagauuac

SEQ ID NO: 755100 - RNA, 19 nt, Artificial Sequence
  Description of Artificial Sequence: Synthetic oligonucleotide
  Sense strand starting at position 3460 of SEQ ID NO: 586936
aguaaacuccaaugagucu

SEQ ID NO: 755101 - RNA, 19 nt, Artificial Sequence
  Description of Artificial Sequence: Synthetic oligonucleotide
  Antisense strand to SEQ ID NO: 755100
agacucauuggaguuuacu

SEQ ID NO: 755102 - RNA, 19 nt, Artificial Sequence
  Description of Artificial Sequence: Synthetic oligonucleotide
  Sense strand starting at position 3596 of SEQ ID NO: 586936
gcucaaauuucugcagcca

SEQ ID NO: 755103 - RNA, 19 nt, Artificial Sequence
  Description of Artificial Sequence: Synthetic oligonucleotide
  Antisense strand to SEQ ID NO: 755102
uggcugcagaaauuugagc

SEQ ID NO: 755104 - RNA, 19 nt, Artificial Sequence
  Description of Artificial Sequence: Synthetic oligonucleotide
  Sense strand starting at position 3632 of SEQ ID NO: 586936
cuguuuaacuauguaagua

SEQ ID NO: 755105 - RNA, 19 nt, Artificial Sequence
  Description of Artificial Sequence: Synthetic oligonucleotide
  Antisense strand to SEQ ID NO: 755104
uacuuacauaguuaaacag

SEQ ID NO: 755106 - RNA, 19 nt, Artificial Sequence
  Description of Artificial Sequence: Synthetic oligonucleotide
  Sense strand starting at position 3691 of SEQ ID NO: 586936
aggcaugcccuuuaagaaa

SEQ ID NO: 755107 - RNA, 19 nt, Artificial Sequence
  Description of Artificial Sequence: Synthetic oligonucleotide
  Antisense strand to SEQ ID NO: 755106
uuucuuaaagggcaugccu

SEQ ID NO: 755108 - RNA, 19 nt, Artificial Sequence
  Description of Artificial Sequence: Synthetic oligonucleotide
  Sense strand starting at position 161 of SEQ ID NO: 586937
gucucaguuaacuagguga

SEQ ID NO: 755109 - RNA, 19 nt, Artificial Sequence
  Description of Artificial Sequence: Synthetic oligonucleotide
  Antisense strand to SEQ ID NO: 755108
ucaccuaguuaacugagac

SEQ ID NO: 755110 - RNA, 19 nt, Artificial Sequence
  Description of Artificial Sequence: Synthetic oligonucleotide
  Sense strand starting at position 163 of SEQ ID NO: 586937
cucaguuaacuaggugaag

SEQ ID NO: 755111 - RNA, 19 nt, Artificial Sequence
  Description of Artificial Sequence: Synthetic oligonucleotide
  Antisense strand to SEQ ID NO: 755110
cuucaccuaguuaacugag

SEQ ID NO: 755112 - RNA, 19 nt, Artificial Sequence
  Description of Artificial Sequence: Synthetic oligonucleotide
  Sense strand starting at position 164 of SEQ ID NO: 586937
ucaguuaacuaggugaagu

SEQ ID NO: 755113 - RNA, 19 nt, Artificial Sequence
  Description of Artificial Sequence: Synthetic oligonucleotide
  Antisense strand to SEQ ID NO: 755112
acuucaccuaguuaacuga

SEQ ID NO: 755114 - RNA, 19 nt, Artificial Sequence
  Description of Artificial Sequence: Synthetic oligonucleotide
  Sense strand starting at position 337 of SEQ ID NO: 586937
guauaauuguguuuaccca

SEQ ID NO: 755115 - RNA, 19 nt, Artificial Sequence
  Description of Artificial Sequence: Synthetic oligonucleotide
  Antisense strand to SEQ ID NO: 755114
uggguaaacacaauuauac

SEQ ID NO: 755116 - RNA, 19 nt, Artificial Sequence
  Description of Artificial Sequence: Synthetic oligonucleotide
  Sense strand starting at position 352 of SEQ ID NO: 586937
cccaacuuccuagggaaau

SEQ ID NO: 755117 - RNA, 19 nt, Artificial Sequence
  Description of Artificial Sequence: Synthetic oligonucleotide
  Antisense strand to SEQ ID NO: 755116
auuucccuaggaaguuggg

SEQ ID NO: 755118 - RNA, 19 nt, Artificial Sequence
  Description of Artificial Sequence: Synthetic oligonucleotide
  Sense strand starting at position 363 of SEQ ID NO: 586937
agggaaaugucuuuguuaa

SEQ ID NO: 755119 - RNA, 19 nt, Artificial Sequence
  Description of Artificial Sequence: Synthetic oligonucleotide
  Antisense strand to SEQ ID NO: 755118
uuaacaaagacauuucccu

SEQ ID NO: 755120 - RNA, 19 nt, Artificial Sequence
  Description of Artificial Sequence: Synthetic oligonucleotide
  Sense strand starting at position 364 of SEQ ID NO: 586937
gggaaaugucuuuguuaaa

SEQ ID NO: 755121 - RNA, 19 nt, Artificial Sequence
  Description of Artificial Sequence: Synthetic oligonucleotide
  Antisense strand to SEQ ID NO: 755120
uuuaacaaagacauuuccc

SEQ ID NO: 755122 - RNA, 19 nt, Artificial Sequence
  Description of Artificial Sequence: Synthetic oligonucleotide
  Sense strand starting at position 445 of SEQ ID NO: 586937
caguaaaugggcuacaguu

SEQ ID NO: 755123 - RNA, 19 nt, Artificial Sequence
  Description of Artificial Sequence: Synthetic oligonucleotide
  Antisense strand to SEQ ID NO: 755122
aacuguagcccauuuacug

SEQ ID NO: 755124 - RNA, 19 nt, Artificial Sequence
  Description of Artificial Sequence: Synthetic oligonucleotide
  Sense strand starting at position 465 of SEQ ID NO: 586937
uguuuauuccuagaaaggc

SEQ ID NO: 755125 - RNA, 19 nt, Artificial Sequence
  Description of Artificial Sequence: Synthetic oligonucleotide
  Antisense strand to SEQ ID NO: 755124
gccuuucuaggaauaaaca

SEQ ID NO: 755126 - RNA, 19 nt, Artificial Sequence
  Description of Artificial Sequence: Synthetic oligonucleotide
  Sense strand starting at position 499 of SEQ ID NO: 586937
ggugucugcaacguuguua

SEQ ID NO: 755127 - RNA, 19 nt, Artificial Sequence
  Description of Artificial Sequence: Synthetic oligonucleotide
  Antisense strand to SEQ ID NO: 755126
uaacaacguugcagacacc

SEQ ID NO: 755128 - RNA, 19 nt, Artificial Sequence
  Description of Artificial Sequence: Synthetic oligonucleotide
  Sense strand starting at position 500 of SEQ ID NO: 586937
gugucugcaacguuguuau

SEQ ID NO: 755129 - RNA, 19 nt, Artificial Sequence
  Description of Artificial Sequence: Synthetic oligonucleotide
  Antisense strand to SEQ ID NO: 755128
auaacaacguugcagacac

SEQ ID NO: 755130 - RNA, 19 nt, Artificial Sequence
  Description of Artificial Sequence: Synthetic oligonucleotide
  Sense strand starting at position 512 of SEQ ID NO: 586937
uuguuaugacaauaaguca

SEQ ID NO: 755131 - RNA, 19 nt, Artificial Sequence
  Description of Artificial Sequence: Synthetic oligonucleotide
  Antisense strand to SEQ ID NO: 755130
ugacuuauugucauaacaa

SEQ ID NO: 755132 - RNA, 19 nt, Artificial Sequence
  Description of Artificial Sequence: Synthetic oligonucleotide
  Sense strand starting at position 637 of SEQ ID NO: 586937
cuaacucagcuguagacaa

SEQ ID NO: 755133 - RNA, 19 nt, Artificial Sequence
  Description of Artificial Sequence: Synthetic oligonucleotide
  Antisense strand to SEQ ID NO: 755132
uugucuacagcugaguuag

SEQ ID NO: 755134 - RNA, 19 nt, Artificial Sequence
  Description of Artificial Sequence: Synthetic oligonucleotide
  Sense strand starting at position 695 of SEQ ID NO: 586937
ucaucaacagauugucagu

SEQ ID NO: 755135 - RNA, 19 nt, Artificial Sequence
  Description of Artificial Sequence: Synthetic oligonucleotide
  Antisense strand to SEQ ID NO: 755134
acugacaaucuguugauga

SEQ ID NO: 755136 - RNA, 19 nt, Artificial Sequence
  Description of Artificial Sequence: Synthetic oligonucleotide
  Sense strand starting at position 697 of SEQ ID NO: 586937
aucaacagauugucaguuu

SEQ ID NO: 755137 - RNA, 19 nt, Artificial Sequence
  Description of Artificial Sequence: Synthetic oligonucleotide
  Antisense strand to SEQ ID NO: 755136
aaacugacaaucuguugau

SEQ ID NO: 755138 - RNA, 19 nt, Artificial Sequence
  Description of Artificial Sequence: Synthetic oligonucleotide
  Sense strand starting at position 746 of SEQ ID NO: 586937
gggaauccgcguuaagguu

SEQ ID NO: 755139 - RNA, 19 nt, Artificial Sequence
  Description of Artificial Sequence: Synthetic oligonucleotide
  Antisense strand to SEQ ID NO: 755138
aaccuuaacgcggauuccc

SEQ ID NO: 755140 - RNA, 19 nt, Artificial Sequence
  Description of Artificial Sequence: Synthetic oligonucleotide
  Sense strand starting at position 863 of SEQ ID NO: 586937
aauauuuguggccgaaucu

SEQ ID NO: 755141 - RNA, 19 nt, Artificial Sequence
  Description of Artificial Sequence: Synthetic oligonucleotide
  Antisense strand to SEQ ID NO: 755140
agauucggccacaaauauu

SEQ ID NO: 755142 - RNA, 19 nt, Artificial Sequence
  Description of Artificial Sequence: Synthetic oligonucleotide
  Sense strand starting at position 891 of SEQ ID NO: 586937
gcuggaaaggauuaaacgu

SEQ ID NO: 755143 - RNA, 19 nt, Artificial Sequence
  Description of Artificial Sequence: Synthetic oligonucleotide
  Antisense strand to SEQ ID NO: 755142
acguuuaauccuuuccagc

SEQ ID NO: 755144 - RNA, 19 nt, Artificial Sequence
  Description of Artificial Sequence: Synthetic oligonucleotide
  Sense strand starting at position 975 of SEQ ID NO: 586937
gaagcaaggucucugugua

SEQ ID NO: 755145 - RNA, 19 nt, Artificial Sequence
  Description of Artificial Sequence: Synthetic oligonucleotide
  Antisense strand to SEQ ID NO: 755144
uacacagagaccuugcuuc

SEQ ID NO: 755146 - RNA, 19 nt, Artificial Sequence
  Description of Artificial Sequence: Synthetic oligonucleotide
  Sense strand starting at position 976 of SEQ ID NO: 586937
aagcaaggucucuguguaa

SEQ ID NO: 755147 - RNA, 19 nt, Artificial Sequence
  Description of Artificial Sequence: Synthetic oligonucleotide
  Antisense strand to SEQ ID NO: 755146
uuacacagagaccuugcuu

SEQ ID NO: 755148 - RNA, 19 nt, Artificial Sequence
  Description of Artificial Sequence: Synthetic oligonucleotide
  Sense strand starting at position 996 of SEQ ID NO: 586937
ccucguaaucgccaccaaa

SEQ ID NO: 755149 - RNA, 19 nt, Artificial Sequence
  Description of Artificial Sequence: Synthetic oligonucleotide
  Antisense strand to SEQ ID NO: 755148
uuugguggcgauuacgagg

SEQ ID NO: 755150 - RNA, 19 nt, Artificial Sequence
  Description of Artificial Sequence: Synthetic oligonucleotide
  Sense strand starting at position 1438 of SEQ ID NO: 586937
agcucuuugcuacagggau

SEQ ID NO: 755151 - RNA, 19 nt, Artificial Sequence
  Description of Artificial Sequence: Synthetic oligonucleotide
  Antisense strand to SEQ ID NO: 755150
aucccuguagcaaagagcu

SEQ ID NO: 755152 - RNA, 19 nt, Artificial Sequence
  Description of Artificial Sequence: Synthetic oligonucleotide
  Sense strand starting at position 1775 of SEQ ID NO: 586937
acuaaccugucagcaagaa

SEQ ID NO: 755153 - RNA, 19 nt, Artificial Sequence
  Description of Artificial Sequence: Synthetic oligonucleotide
  Antisense strand to SEQ ID NO: 755152
uucuugcugacagguuagu

SEQ ID NO: 755154 - RNA, 19 nt, Artificial Sequence
  Description of Artificial Sequence: Synthetic oligonucleotide
  Sense strand starting at position 1776 of SEQ ID NO: 586937
cuaaccugucagcaagaau

SEQ ID NO: 755155 - RNA, 19 nt, Artificial Sequence
  Description of Artificial Sequence: Synthetic oligonucleotide
  Antisense strand to SEQ ID NO: 755154
auucuugcugacagguuag

SEQ ID NO: 755156 - RNA, 19 nt, Artificial Sequence
  Description of Artificial Sequence: Synthetic oligonucleotide
  Sense strand starting at position 2457 of SEQ ID NO: 586937
cccagaaugucuccacgca

SEQ ID NO: 755157 - RNA, 19 nt, Artificial Sequence
  Description of Artificial Sequence: Synthetic oligonucleotide
  Antisense strand to SEQ ID NO: 755156
ugcguggagacauucuggg

SEQ ID NO: 755158 - RNA, 19 nt, Artificial Sequence
  Description of Artificial Sequence: Synthetic oligonucleotide
  Sense strand starting at position 2458 of SEQ ID NO: 586937
ccagaaugucuccacgcaa

SEQ ID NO: 755159 - RNA, 19 nt, Artificial Sequence
  Description of Artificial Sequence: Synthetic oligonucleotide
  Antisense strand to SEQ ID NO: 755158
uugcguggagacauucugg

SEQ ID NO: 755160 - RNA, 19 nt, Artificial Sequence
  Description of Artificial Sequence: Synthetic oligonucleotide
  Sense strand starting at position 2609 of SEQ ID NO: 586937
acggucaggagcuauagau

SEQ ID NO: 755161 - RNA, 19 nt, Artificial Sequence
  Description of Artificial Sequence: Synthetic oligonucleotide
  Antisense strand to SEQ ID NO: 755160
aucuauagcuccugaccgu

SEQ ID NO: 755162 - RNA, 19 nt, Artificial Sequence
  Description of Artificial Sequence: Synthetic oligonucleotide
  Sense strand starting at position 2613 of SEQ ID NO: 586937
ucaggagcuauagaucgau

SEQ ID NO: 755163 - RNA, 19 nt, Artificial Sequence
  Description of Artificial Sequence: Synthetic oligonucleotide
  Antisense strand to SEQ ID NO: 755162
aucgaucuauagcuccuga

SEQ ID NO: 755164 - RNA, 19 nt, Artificial Sequence
  Description of Artificial Sequence: Synthetic oligonucleotide
  Sense strand starting at position 2799 of SEQ ID NO: 586937
gcgcuuuaugugccacaaa

SEQ ID NO: 755165 - RNA, 19 nt, Artificial Sequence
  Description of Artificial Sequence: Synthetic oligonucleotide
  Antisense strand to SEQ ID NO: 755164
uuuguggcacauaaagcgc

SEQ ID NO: 755166 - RNA, 19 nt, Artificial Sequence
  Description of Artificial Sequence: Synthetic oligonucleotide
  Sense strand starting at position 2831 of SEQ ID NO: 586937
gcuucaguggcgcuacaau

SEQ ID NO: 755167 - RNA, 19 nt, Artificial Sequence
  Description of Artificial Sequence: Synthetic oligonucleotide
  Antisense strand to SEQ ID NO: 755166
auuguagcgccacugaagc

SEQ ID NO: 755168 - RNA, 19 nt, Artificial Sequence
  Description of Artificial Sequence: Synthetic oligonucleotide
  Sense strand starting at position 3028 of SEQ ID NO: 586937
acaugagcugcggaacaau

SEQ ID NO: 755169 - RNA, 19 nt, Artificial Sequence
  Description of Artificial Sequence: Synthetic oligonucleotide
  Antisense strand to SEQ ID NO: 755168
auuguuccgcagcucaugu

SEQ ID NO: 755170 - RNA, 19 nt, Artificial Sequence
  Description of Artificial Sequence: Synthetic oligonucleotide
  Sense strand starting at position 3149 of SEQ ID NO: 586937
ggaguacaauuccucuguu

SEQ ID NO: 755171 - RNA, 19 nt, Artificial Sequence
  Description of Artificial Sequence: Synthetic oligonucleotide
  Antisense strand to SEQ ID NO: 755170
aacagaggaauuguacucc

SEQ ID NO: 755172 - RNA, 19 nt, Artificial Sequence
  Description of Artificial Sequence: Synthetic oligonucleotide
  Sense strand starting at position 3335 of SEQ ID NO: 586937
ggcacugauuggaguggaa

SEQ ID NO: 755173 - RNA, 19 nt, Artificial Sequence
  Description of Artificial Sequence: Synthetic oligonucleotide
  Antisense strand to SEQ ID NO: 755172
uuccacuccaaucagugcc

SEQ ID NO: 755174 - RNA, 19 nt, Artificial Sequence
  Description of Artificial Sequence: Synthetic oligonucleotide
  Sense strand starting at position 3391 of SEQ ID NO: 586937
ccuacuugugcuugauuga

SEQ ID NO: 755175 - RNA, 19 nt, Artificial Sequence
  Description of Artificial Sequence: Synthetic oligonucleotide
  Antisense strand to SEQ ID NO: 755174
ucaaucaagcacaaguagg

SEQ ID NO: 755176 - RNA, 19 nt, Artificial Sequence
  Description of Artificial Sequence: Synthetic oligonucleotide
  Sense strand starting at position 3392 of SEQ ID NO: 586937
cuacuugugcuugauugaa

SEQ ID NO: 755177 - RNA, 19 nt, Artificial Sequence
  Description of Artificial Sequence: Synthetic oligonucleotide
  Antisense strand to SEQ ID NO: 755176
uucaaucaagcacaaguag

SEQ ID NO: 755178 - RNA, 19 nt, Artificial Sequence
  Description of Artificial Sequence: Synthetic oligonucleotide
  Sense strand starting at position 3394 of SEQ ID NO: 586937
acuugugcuugauugaagu

SEQ ID NO: 755179 - RNA, 19 nt, Artificial Sequence
  Description of Artificial Sequence: Synthetic oligonucleotide
  Antisense strand to SEQ ID NO: 755178
acuucaaucaagcacaagu

SEQ ID NO: 755180 - RNA, 19 nt, Artificial Sequence
  Description of Artificial Sequence: Synthetic oligonucleotide
  Sense strand starting at position 3446 of SEQ ID NO: 586937
cagcaacaguuuguggaaa

SEQ ID NO: 755181 - RNA, 19 nt, Artificial Sequence
  Description of Artificial Sequence: Synthetic oligonucleotide
  Antisense strand to SEQ ID NO: 755180
uuuccacaaacuguugcug

SEQ ID NO: 755182 - RNA, 19 nt, Artificial Sequence
  Description of Artificial Sequence: Synthetic oligonucleotide
  Sense strand starting at position 3489 of SEQ ID NO: 586937
gggaauuggaucuguggau

SEQ ID NO: 755183 - RNA, 19 nt, Artificial Sequence
  Description of Artificial Sequence: Synthetic oligonucleotide
  Antisense strand to SEQ ID NO: 755182
auccacagauccaauuccc

SEQ ID NO: 755184 - RNA, 19 nt, Artificial Sequence
  Description of Artificial Sequence: Synthetic oligonucleotide
  Sense strand starting at position 3490 of SEQ ID NO: 586937
ggaauuggaucuguggauu

SEQ ID NO: 755185 - RNA, 19 nt, Artificial Sequence
  Description of Artificial Sequence: Synthetic oligonucleotide
  Antisense strand to SEQ ID NO: 755184
aauccacagauccaauucc

SEQ ID NO: 755186 - RNA, 19 nt, Artificial Sequence
  Description of Artificial Sequence: Synthetic oligonucleotide
  Sense strand starting at position 3507 of SEQ ID NO: 586937
uugcucuugcugcaugaaa

SEQ ID NO: 755187 - RNA, 19 nt, Artificial Sequence
  Description of Artificial Sequence: Synthetic oligonucleotide
  Antisense strand to SEQ ID NO: 755186
uuucaugcagcaagagcaa

SEQ ID NO: 755188 - RNA, 19 nt, Artificial Sequence
  Description of Artificial Sequence: Synthetic oligonucleotide
  Sense strand starting at position 743 of SEQ ID NO: 586938
gacgccugguucucauaaa

SEQ ID NO: 755189 - RNA, 19 nt, Artificial Sequence
  Description of Artificial Sequence: Synthetic oligonucleotide
  Antisense strand to SEQ ID NO: 755188
uuuaugagaaccaggcguc

SEQ ID NO: 755190 - RNA, 19 nt, Artificial Sequence
  Description of Artificial Sequence: Synthetic oligonucleotide
  Sense strand starting at position 744 of SEQ ID NO: 586938
acgccugguucucauaaau

SEQ ID NO: 755191 - RNA, 19 nt, Artificial Sequence
  Description of Artificial Sequence: Synthetic oligonucleotide
  Antisense strand to SEQ ID NO: 755190
auuuaugagaaccaggcgu

SEQ ID NO: 755192 - RNA, 19 nt, Artificial Sequence
  Description of Artificial Sequence: Synthetic oligonucleotide
  Sense strand starting at position 899 of SEQ ID NO: 586938
ccggagaggugucagagau

SEQ ID NO: 755193 - RNA, 19 nt, Artificial Sequence
  Description of Artificial Sequence: Synthetic oligonucleotide
  Antisense strand to SEQ ID NO: 755192
aucucugacaccucuccgg

SEQ ID NO: 755194 - RNA, 19 nt, Artificial Sequence
  Description of Artificial Sequence: Synthetic oligonucleotide
  Sense strand starting at position 974 of SEQ ID NO: 586938
ccagaacucgccugcuuua

SEQ ID NO: 755195 - RNA, 19 nt, Artificial Sequence
  Description of Artificial Sequence: Synthetic oligonucleotide
  Antisense strand to SEQ ID NO: 755194
uaaagcaggcgaguucugg

SEQ ID NO: 755196 - RNA, 19 nt, Artificial Sequence
  Description of Artificial Sequence: Synthetic oligonucleotide
  Sense strand starting at position 1088 of SEQ ID NO: 586938
cugggaggcuuccugaaag

SEQ ID NO: 755197 - RNA, 19 nt, Artificial Sequence
  Description of Artificial Sequence: Synthetic oligonucleotide
  Antisense strand to SEQ ID NO: 755196
cuuucaggaagccucccag

SEQ ID NO: 755198 - RNA, 19 nt, Artificial Sequence
  Description of Artificial Sequence: Synthetic oligonucleotide
  Sense strand starting at position 1204 of SEQ ID NO: 586938
uagucuugcuccuggagau

SEQ ID NO: 755199 - RNA, 19 nt, Artificial Sequence
  Description of Artificial Sequence: Synthetic oligonucleotide
  Antisense strand to SEQ ID NO: 755198
aucuccaggagcaagacua

SEQ ID NO: 755200 - RNA, 19 nt, Artificial Sequence
  Description of Artificial Sequence: Synthetic oligonucleotide
  Sense strand starting at position 1205 of SEQ ID NO: 586938
agucuugcuccuggagaua

SEQ ID NO: 755201 - RNA, 19 nt, Artificial Sequence
  Description of Artificial Sequence: Synthetic oligonucleotide
  Antisense strand to SEQ ID NO: 755200
uaucuccaggagcaagacu

SEQ ID NO: 755202 - RNA, 19 nt, Artificial Sequence
  Description of Artificial Sequence: Synthetic oligonucleotide
  Sense strand starting at position 1597 of SEQ ID NO: 586938
uaaugaaagcuucggcagu

SEQ ID NO: 755203 - RNA, 19 nt, Artificial Sequence
  Description of Artificial Sequence: Synthetic oligonucleotide
  Antisense strand to SEQ ID NO: 755202
acugccgaagcuuucauua

SEQ ID NO: 755204 - RNA, 19 nt, Artificial Sequence
  Description of Artificial Sequence: Synthetic oligonucleotide
  Sense strand starting at position 1797 of SEQ ID NO: 586938
ggacuaaccugguucagag

SEQ ID NO: 755205 - RNA, 19 nt, Artificial Sequence
  Description of Artificial Sequence: Synthetic oligonucleotide
  Antisense strand to SEQ ID NO: 755204
cucugaaccagguuagucc

SEQ ID NO: 755206 - RNA, 19 nt, Artificial Sequence
  Description of Artificial Sequence: Synthetic oligonucleotide
  Sense strand starting at position 2274 of SEQ ID NO: 586938
ucuugugacagcuggacaa

SEQ ID NO: 755207 - RNA, 19 nt, Artificial Sequence
  Description of Artificial Sequence: Synthetic oligonucleotide
  Antisense strand to SEQ ID NO: 755206
uuguccagcugucacaaga

SEQ ID NO: 755208 - RNA, 19 nt, Artificial Sequence
  Description of Artificial Sequence: Synthetic oligonucleotide
  Sense strand starting at position 2399 of SEQ ID NO: 586938
gcuggugcucagggagauu

SEQ ID NO: 755209 - RNA, 19 nt, Artificial Sequence
  Description of Artificial Sequence: Synthetic oligonucleotide
  Antisense strand to SEQ ID NO: 755208
aaucucccugagcaccagc

SEQ ID NO: 755210 - RNA, 19 nt, Artificial Sequence
  Description of Artificial Sequence: Synthetic oligonucleotide
  Sense strand starting at position 2402 of SEQ ID NO: 586938
ggugcucagggagauugau

SEQ ID NO: 755211 - RNA, 19 nt, Artificial Sequence
  Description of Artificial Sequence: Synthetic oligonucleotide
  Antisense strand to SEQ ID NO: 755210
aucaaucucccugagcacc

SEQ ID NO: 755212 - RNA, 19 nt, Artificial Sequence
  Description of Artificial Sequence: Synthetic oligonucleotide
  Sense strand starting at position 2509 of SEQ ID NO: 586938
uggaccaagacacgucaua

SEQ ID NO: 755213 - RNA, 19 nt, Artificial Sequence
  Description of Artificial Sequence: Synthetic oligonucleotide
  Antisense strand to SEQ ID NO: 755212
uaugacgugucuuggucca

SEQ ID NO: 755214 - RNA, 19 nt, Artificial Sequence
  Description of Artificial Sequence: Synthetic oligonucleotide
  Sense strand starting at position 2928 of SEQ ID NO: 586938
ggaucuggguuucagcaga

SEQ ID NO: 755215 - RNA, 19 nt, Artificial Sequence
  Description of Artificial Sequence: Synthetic oligonucleotide
  Antisense strand to SEQ ID NO: 755214
ucugcugaaacccagaucc

SEQ ID NO: 755216 - RNA, 19 nt, Artificial Sequence
  Description of Artificial Sequence: Synthetic oligonucleotide
  Sense strand starting at position 2939 of SEQ ID NO: 586938
ucagcagagcucugaaugu

SEQ ID NO: 755217 - RNA, 19 nt, Artificial Sequence
  Description of Artificial Sequence: Synthetic oligonucleotide
  Antisense strand to SEQ ID NO: 755216
acauucagagcucugcuga

SEQ ID NO: 755218 - RNA, 19 nt, Artificial Sequence
  Description of Artificial Sequence: Synthetic oligonucleotide
  Sense strand starting at position 2948 of SEQ ID NO: 586938
cucugaauguacucaugga

SEQ ID NO: 755219 - RNA, 19 nt, Artificial Sequence
  Description of Artificial Sequence: Synthetic oligonucleotide
  Antisense strand to SEQ ID NO: 755218
uccaugaguacauucagag

SEQ ID NO: 755220 - RNA, 19 nt, Artificial Sequence
  Description of Artificial Sequence: Synthetic oligonucleotide
  Sense strand starting at position 2952 of SEQ ID NO: 586938
gaauguacucauggaauuc

SEQ ID NO: 755221 - RNA, 19 nt, Artificial Sequence
  Description of Artificial Sequence: Synthetic oligonucleotide
  Antisense strand to SEQ ID NO: 755220
gaauuccaugaguacauuc

SEQ ID NO: 755222 - RNA, 19 nt, Artificial Sequence
  Description of Artificial Sequence: Synthetic oligonucleotide
  Sense strand starting at position 2989 of SEQ ID NO: 586938
ggaggaauguucugugugc

SEQ ID NO: 755223 - RNA, 19 nt, Artificial Sequence
  Description of Artificial Sequence: Synthetic oligonucleotide
  Antisense strand to SEQ ID NO: 755222
gcacacagaacauuccucc

SEQ ID NO: 755224 - RNA, 19 nt, Artificial Sequence
  Description of Artificial Sequence: Synthetic oligonucleotide
  Sense strand starting at position 66 of SEQ ID NO: 586939
agauccuggcuuggacaua

SEQ ID NO: 755225 - RNA, 19 nt, Artificial Sequence
  Description of Artificial Sequence: Synthetic oligonucleotide
  Antisense strand to SEQ ID NO: 755224
uauguccaagccaggaucu

SEQ ID NO: 755226 - RNA, 19 nt, Artificial Sequence
  Description of Artificial Sequence: Synthetic oligonucleotide
  Sense strand starting at position 129 of SEQ ID NO: 586939
ccauauucucaaggugaua

SEQ ID NO: 755227 - RNA, 19 nt, Artificial Sequence
  Description of Artificial Sequence: Synthetic oligonucleotide
  Antisense strand to SEQ ID NO: 755226
uaucaccuugagaauaugg

SEQ ID NO: 755228 - RNA, 19 nt, Artificial Sequence
  Description of Artificial Sequence: Synthetic oligonucleotide
  Sense strand starting at position 188 of SEQ ID NO: 586939
uuccacccuguauaugaua

SEQ ID NO: 755229 - RNA, 19 nt, Artificial Sequence
  Description of Artificial Sequence: Synthetic oligonucleotide
  Antisense strand to SEQ ID NO: 755228
uaucauauacaggguggaa

SEQ ID NO: 755230 - RNA, 19 nt, Artificial Sequence
  Description of Artificial Sequence: Synthetic oligonucleotide
  Sense strand starting at position 313 of SEQ ID NO: 586939
uugaaagcgagcuaaagaa

SEQ ID NO: 755231 - RNA, 19 nt, Artificial Sequence
  Description of Artificial Sequence: Synthetic oligonucleotide
  Antisense strand to SEQ ID NO: 755230
uucuuuagcucgcuuucaa

SEQ ID NO: 755232 - RNA, 19 nt, Artificial Sequence
  Description of Artificial Sequence: Synthetic oligonucleotide
  Sense strand starting at position 845 of SEQ ID NO: 586939
gagacaucagaagguuucu

SEQ ID NO: 755233 - RNA, 19 nt, Artificial Sequence
  Description of Artificial Sequence: Synthetic oligonucleotide
  Antisense strand to SEQ ID NO: 755232
agaaaccuucugaugucuc

SEQ ID NO: 755234 - RNA, 19 nt, Artificial Sequence
  Description of Artificial Sequence: Synthetic oligonucleotide
  Sense strand starting at position 851 of SEQ ID NO: 586939
ucagaagguuucuuaacca

SEQ ID NO: 755235 - RNA, 19 nt, Artificial Sequence
  Description of Artificial Sequence: Synthetic oligonucleotide
  Antisense strand to SEQ ID NO: 755234
ugguuaagaaaccuucuga

SEQ ID NO: 755236 - RNA, 19 nt, Artificial Sequence
  Description of Artificial Sequence: Synthetic oligonucleotide
  Sense strand starting at position 884 of SEQ ID NO: 586939
uuaucugaagaauggcaau

SEQ ID NO: 755237 - RNA, 19 nt, Artificial Sequence
  Description of Artificial Sequence: Synthetic oligonucleotide
  Antisense strand to SEQ ID NO: 755236
auugccauucuucagauaa

SEQ ID NO: 755238 - RNA, 19 nt, Artificial Sequence
  Description of Artificial Sequence: Synthetic oligonucleotide
  Sense strand starting at position 998 of SEQ ID NO: 586939
guuagcaauuugcuauuau

SEQ ID NO: 755239 - RNA, 19 nt, Artificial Sequence
  Description of Artificial Sequence: Synthetic oligonucleotide
  Antisense strand to SEQ ID NO: 755238
auaauagcaaauugcuaac

SEQ ID NO: 755240 - RNA, 19 nt, Artificial Sequence
  Description of Artificial Sequence: Synthetic oligonucleotide
  Sense strand starting at position 1251 of SEQ ID NO: 586939
uuaggucacaguuaaguga

SEQ ID NO: 755241 - RNA, 19 nt, Artificial Sequence
  Description of Artificial Sequence: Synthetic oligonucleotide
  Antisense strand to SEQ ID NO: 755240
ucacuuaacugugaccuaa

SEQ ID NO: 755242 - RNA, 19 nt, Artificial Sequence
  Description of Artificial Sequence: Synthetic oligonucleotide
  Sense strand starting at position 1294 of SEQ ID NO: 586939
aggcaauaauguguauuaa

SEQ ID NO: 755243 - RNA, 19 nt, Artificial Sequence
  Description of Artificial Sequence: Synthetic oligonucleotide
  Antisense strand to SEQ ID NO: 755242
uuaauacacauuauugccu

SEQ ID NO: 755244 - RNA, 19 nt, Artificial Sequence
  Description of Artificial Sequence: Synthetic oligonucleotide
  Sense strand starting at position 1295 of SEQ ID NO: 586939
ggcaauaauguguauuaag

SEQ ID NO: 755245 - RNA, 19 nt, Artificial Sequence
  Description of Artificial Sequence: Synthetic oligonucleotide
  Antisense strand to SEQ ID NO: 755244
cuuaauacacauuauugcc

SEQ ID NO: 755246 - RNA, 19 nt, Artificial Sequence
  Description of Artificial Sequence: Synthetic oligonucleotide
  Sense strand starting at position 1386 of SEQ ID NO: 586939
ggcguaacuacugacaauu

SEQ ID NO: 755247 - RNA, 19 nt, Artificial Sequence
  Description of Artificial Sequence: Synthetic oligonucleotide
  Antisense strand to SEQ ID NO: 755246
aauugucaguaguuacgcc

SEQ ID NO: 755248 - RNA, 19 nt, Artificial Sequence
  Description of Artificial Sequence: Synthetic oligonucleotide
  Sense strand starting at position 1480 of SEQ ID NO: 586939
aguuuaaguggugaguaac

SEQ ID NO: 755249 - RNA, 19 nt, Artificial Sequence
  Description of Artificial Sequence: Synthetic oligonucleotide
  Antisense strand to SEQ ID NO: 755248
guuacucaccacuuaaacu

SEQ ID NO: 755250 - RNA, 19 nt, Artificial Sequence
  Description of Artificial Sequence: Synthetic oligonucleotide
  Sense strand starting at position 1490 of SEQ ID NO: 586939
gugaguaacccaggugaac

SEQ ID NO: 755251 - RNA, 19 nt, Artificial Sequence
  Description of Artificial Sequence: Synthetic oligonucleotide
  Antisense strand to SEQ ID NO: 755250
guucaccuggguuacucac

SEQ ID NO: 755252 - RNA, 19 nt, Artificial Sequence
  Description of Artificial Sequence: Synthetic oligonucleotide
  Sense strand starting at position 2013 of SEQ ID NO: 586939
cgaggaaugcugggauacu

SEQ ID NO: 755253 - RNA, 19 nt, Artificial Sequence
  Description of Artificial Sequence: Synthetic oligonucleotide
  Antisense strand to SEQ ID NO: 755252
aguaucccagcauuccucg

SEQ ID NO: 755254 - RNA, 19 nt, Artificial Sequence
  Description of Artificial Sequence: Synthetic oligonucleotide
  Sense strand starting at position 2247 of SEQ ID NO: 586939
gagagacuacagugugacu

SEQ ID NO: 755255 - RNA, 19 nt, Artificial Sequence
  Description of Artificial Sequence: Synthetic oligonucleotide
  Antisense strand to SEQ ID NO: 755254
agucacacuguagucucuc

SEQ ID NO: 755256 - RNA, 19 nt, Artificial Sequence
  Description of Artificial Sequence: Synthetic oligonucleotide
  Sense strand starting at position 2312 of SEQ ID NO: 586939
aagccaguucccuaaaggu

SEQ ID NO: 755257 - RNA, 19 nt, Artificial Sequence
  Description of Artificial Sequence: Synthetic oligonucleotide
  Antisense strand to SEQ ID NO: 755256
accuuuagggaacuggcuu

SEQ ID NO: 755258 - RNA, 19 nt, Artificial Sequence
  Description of Artificial Sequence: Synthetic oligonucleotide
  Sense strand starting at position 2331 of SEQ ID NO: 586939
gguauuaaaugucuccaca

SEQ ID NO: 755259 - RNA, 19 nt, Artificial Sequence
  Description of Artificial Sequence: Synthetic oligonucleotide
  Antisense strand to SEQ ID NO: 755258
uguggagacauuuaauacc

SEQ ID NO: 755260 - RNA, 19 nt, Artificial Sequence
  Description of Artificial Sequence: Synthetic oligonucleotide
  Sense strand starting at position 2387 of SEQ ID NO: 586939
ucacucagguaguucuaga

SEQ ID NO: 755261 - RNA, 19 nt, Artificial Sequence
  Description of Artificial Sequence: Synthetic oligonucleotide
  Antisense strand to SEQ ID NO: 755260
ucuagaacuaccugaguga

SEQ ID NO: 755262 - RNA, 19 nt, Artificial Sequence
  Description of Artificial Sequence: Synthetic oligonucleotide
  Sense strand starting at position 2394 of SEQ ID NO: 586939
gguaguucuagacaaccga

SEQ ID NO: 755263 - RNA, 19 nt, Artificial Sequence
  Description of Artificial Sequence: Synthetic oligonucleotide
  Antisense strand to SEQ ID NO: 755262
ucgguugucuagaacuacc

SEQ ID NO: 755264 - RNA, 19 nt, Artificial Sequence
  Description of Artificial Sequence: Synthetic oligonucleotide
  Sense strand starting at position 2478 of SEQ ID NO: 586939
uagaauuacuuugugguaa

SEQ ID NO: 755265 - RNA, 19 nt, Artificial Sequence
  Description of Artificial Sequence: Synthetic oligonucleotide
  Antisense strand to SEQ ID NO: 755264
uuaccacaaaguaauucua

SEQ ID NO: 755266 - RNA, 19 nt, Artificial Sequence
  Description of Artificial Sequence: Synthetic oligonucleotide
  Sense strand starting at position 2509 of SEQ ID NO: 586939
aauagaauuuguguggugu

SEQ ID NO: 755267 - RNA, 19 nt, Artificial Sequence
  Description of Artificial Sequence: Synthetic oligonucleotide
  Antisense strand to SEQ ID NO: 755266
acaccacacaaauucuauu

SEQ ID NO: 755268 - RNA, 19 nt, Artificial Sequence
  Description of Artificial Sequence: Synthetic oligonucleotide
  Sense strand starting at position 2510 of SEQ ID NO: 586939
auagaauuuguguggugug

SEQ ID NO: 755269 - RNA, 19 nt, Artificial Sequence
  Description of Artificial Sequence: Synthetic oligonucleotide
  Antisense strand to SEQ ID NO: 755268
cacaccacacaaauucuau

SEQ ID NO: 755270 - RNA, 19 nt, Artificial Sequence
  Description of Artificial Sequence: Synthetic oligonucleotide
  Sense strand starting at position 2539 of SEQ ID NO: 586939
uaguaacucugguuuacag

SEQ ID NO: 755271 - RNA, 19 nt, Artificial Sequence
  Description of Artificial Sequence: Synthetic oligonucleotide
  Antisense strand to SEQ ID NO: 755270
cuguaaaccagaguuacua

SEQ ID NO: 755272 - RNA, 19 nt, Artificial Sequence
  Description of Artificial Sequence: Synthetic oligonucleotide
  Sense strand starting at position 2548 of SEQ ID NO: 586939
ugguuuacagguuauuaua

SEQ ID NO: 755273 - RNA, 19 nt, Artificial Sequence
  Description of Artificial Sequence: Synthetic oligonucleotide
  Antisense strand to SEQ ID NO: 755272
uauaauaaccuguaaacca

SEQ ID NO: 755274 - RNA, 19 nt, Artificial Sequence
  Description of Artificial Sequence: Synthetic oligonucleotide
  Sense strand starting at position 2550 of SEQ ID NO: 586939
guuuacagguuauuauaca

SEQ ID NO: 755275 - RNA, 19 nt, Artificial Sequence
  Description of Artificial Sequence: Synthetic oligonucleotide
  Antisense strand to SEQ ID NO: 755274
uguauaauaaccuguaaac

SEQ ID NO: 755276 - RNA, 19 nt, Artificial Sequence
  Description of Artificial Sequence: Synthetic oligonucleotide
  Sense strand starting at position 2558 of SEQ ID NO: 586939
guuauuauacaguaaugcu

SEQ ID NO: 755277 - RNA, 19 nt, Artificial Sequence
  Description of Artificial Sequence: Synthetic oligonucleotide
  Antisense strand to SEQ ID NO: 755276
agcauuacuguauaauaac

SEQ ID NO: 755278 - RNA, 19 nt, Artificial Sequence
  Description of Artificial Sequence: Synthetic oligonucleotide
  Sense strand starting at position 2633 of SEQ ID NO: 586939
ugaauagcauuugaauauc

SEQ ID NO: 755279 - RNA, 19 nt, Artificial Sequence
  Description of Artificial Sequence: Synthetic oligonucleotide
  Antisense strand to SEQ ID NO: 755278
gauauucaaaugcuauuca

SEQ ID NO: 755280 - RNA, 19 nt, Artificial Sequence
  Description of Artificial Sequence: Synthetic oligonucleotide
  Sense strand starting at position 2829 of SEQ ID NO: 586939
ccaggagcugugcaucaaa

SEQ ID NO: 755281 - RNA, 19 nt, Artificial Sequence
  Description of Artificial Sequence: Synthetic oligonucleotide
  Antisense strand to SEQ ID NO: 755280
uuugaugcacagcuccugg

SEQ ID NO: 755282 - RNA, 19 nt, Artificial Sequence
  Description of Artificial Sequence: Synthetic oligonucleotide
  Sense strand starting at position 2832 of SEQ ID NO: 586939
ggagcugugcaucaaacau

SEQ ID NO: 755283 - RNA, 19 nt, Artificial Sequence
  Description of Artificial Sequence: Synthetic oligonucleotide
  Antisense strand to SEQ ID NO: 755282
auguuugaugcacagcucc

SEQ ID NO: 755284 - RNA, 19 nt, Artificial Sequence
  Description of Artificial Sequence: Synthetic oligonucleotide
  Sense strand starting at position 2887 of SEQ ID NO: 586939
gcugcucagagacauguaa

SEQ ID NO: 755285 - RNA, 19 nt, Artificial Sequence
  Description of Artificial Sequence: Synthetic oligonucleotide
  Antisense strand to SEQ ID NO: 755284
uuacaugucucugagcagc

SEQ ID NO: 755286 - RNA, 19 nt, Artificial Sequence
  Description of Artificial Sequence: Synthetic oligonucleotide
  Sense strand starting at position 2969 of SEQ ID NO: 586939
ugaacagaguguuugggaa

SEQ ID NO: 755287 - RNA, 19 nt, Artificial Sequence
  Description of Artificial Sequence: Synthetic oligonucleotide
  Antisense strand to SEQ ID NO: 755286
uucccaaacacucuguuca

SEQ ID NO: 755288 - RNA, 19 nt, Artificial Sequence
  Description of Artificial Sequence: Synthetic oligonucleotide
  Sense strand starting at position 3131 of SEQ ID NO: 586939
ucagguaaugcauaucuua

SEQ ID NO: 755289 - RNA, 19 nt, Artificial Sequence
  Description of Artificial Sequence: Synthetic oligonucleotide
  Antisense strand to SEQ ID NO: 755288
uaagauaugcauuaccuga

SEQ ID NO: 755290 - RNA, 19 nt, Artificial Sequence
  Description of Artificial Sequence: Synthetic oligonucleotide
  Sense strand starting at position 3139 of SEQ ID NO: 586939
ugcauaucuuauuuagugu

SEQ ID NO: 755291 - RNA, 19 nt, Artificial Sequence
  Description of Artificial Sequence: Synthetic oligonucleotide
  Antisense strand to SEQ ID NO: 755290
acacuaaauaagauaugca

SEQ ID NO: 755292 - RNA, 19 nt, Artificial Sequence
  Description of Artificial Sequence: Synthetic oligonucleotide
  Sense strand starting at position 3146 of SEQ ID NO: 586939
cuuauuuagugugauuuag

SEQ ID NO: 755293 - RNA, 19 nt, Artificial Sequence
  Description of Artificial Sequence: Synthetic oligonucleotide
  Antisense strand to SEQ ID NO: 755292
cuaaaucacacuaaauaag

SEQ ID NO: 755294 - RNA, 19 nt, Artificial Sequence
  Description of Artificial Sequence: Synthetic oligonucleotide
  Sense strand starting at position 3332 of SEQ ID NO: 586939
uaugaugaaguuuguauca

SEQ ID NO: 755295 - RNA, 19 nt, Artificial Sequence
  Description of Artificial Sequence: Synthetic oligonucleotide
  Antisense strand to SEQ ID NO: 755294
ugauacaaacuucaucaua

SEQ ID NO: 755296 - RNA, 19 nt, Artificial Sequence
  Description of Artificial Sequence: Synthetic oligonucleotide
  Sense strand starting at position 3498 of SEQ ID NO: 586939
uugugaaauccagaaugcu

SEQ ID NO: 755297 - RNA, 19 nt, Artificial Sequence
  Description of Artificial Sequence: Synthetic oligonucleotide
  Antisense strand to SEQ ID NO: 755296
agcauucuggauuucacaa

SEQ ID NO: 755298 - RNA, 19 nt, Artificial Sequence
  Description of Artificial Sequence: Synthetic oligonucleotide
  Sense strand starting at position 3501 of SEQ ID NO: 586939
ugaaauccagaaugcugaa

SEQ ID NO: 755299 - RNA, 19 nt, Artificial Sequence
  Description of Artificial Sequence: Synthetic oligonucleotide
  Antisense strand to SEQ ID NO: 755298
uucagcauucuggauuuca

SEQ ID NO: 755300 - RNA, 19 nt, Artificial Sequence
  Description of Artificial Sequence: Synthetic oligonucleotide
  Sense strand starting at position 3852 of SEQ ID NO: 586939
agcuauuauuaacuaagga

SEQ ID NO: 755301 - RNA, 19 nt, Artificial Sequence
  Description of Artificial Sequence: Synthetic oligonucleotide
  Antisense strand to SEQ ID NO: 755300
uccuuaguuaauaauagcu

SEQ ID NO: 755302 - RNA, 19 nt, Artificial Sequence
  Description of Artificial Sequence: Synthetic oligonucleotide
  Sense strand starting at position 3969 of SEQ ID NO: 586939
ggaagucagucccucuaau

SEQ ID NO: 755303 - RNA, 19 nt, Artificial Sequence
  Description of Artificial Sequence: Synthetic oligonucleotide
  Antisense strand to SEQ ID NO: 755302
auuagagggacugacuucc

SEQ ID NO: 755304 - RNA, 19 nt, Artificial Sequence
  Description of Artificial Sequence: Synthetic oligonucleotide
  Sense strand starting at position 209 of SEQ ID NO: 586940
ugcagaguuaauuguggau

SEQ ID NO: 755305 - RNA, 19 nt, Artificial Sequence
  Description of Artificial Sequence: Synthetic oligonucleotide
  Antisense strand to SEQ ID NO: 755304
auccacaauuaacucugca

SEQ ID NO: 755306 - RNA, 19 nt, Artificial Sequence
  Description of Artificial Sequence: Synthetic oligonucleotide
  Sense strand starting at position 561 of SEQ ID NO: 586940
aaaggauguugaccuauau

SEQ ID NO: 755307 - RNA, 19 nt, Artificial Sequence
  Description of Artificial Sequence: Synthetic oligonucleotide
  Antisense strand to SEQ ID NO: 755306
auauaggucaacauccuuu

SEQ ID NO: 755308 - RNA, 19 nt, Artificial Sequence
  Description of Artificial Sequence: Synthetic oligonucleotide
  Sense strand starting at position 605 of SEQ ID NO: 586940
caguuauacgugcauggag

SEQ ID NO: 755309 - RNA, 19 nt, Artificial Sequence
  Description of Artificial Sequence: Synthetic oligonucleotide
  Antisense strand to SEQ ID NO: 755308
cuccaugcacguauaacug

SEQ ID NO: 755310 - RNA, 19 nt, Artificial Sequence
  Description of Artificial Sequence: Synthetic oligonucleotide
  Sense strand starting at position 634 of SEQ ID NO: 586940
ucuagaauuggcugggaga

SEQ ID NO: 755311 - RNA, 19 nt, Artificial Sequence
  Description of Artificial Sequence: Synthetic oligonucleotide
  Antisense strand to SEQ ID NO: 755310
ucucccagccaauucuaga

SEQ ID NO: 755312 - RNA, 19 nt, Artificial Sequence
  Description of Artificial Sequence: Synthetic oligonucleotide
  Sense strand starting at position 635 of SEQ ID NO: 586940
cuagaauuggcugggagau

SEQ ID NO: 755313 - RNA, 19 nt, Artificial Sequence
  Description of Artificial Sequence: Synthetic oligonucleotide
  Antisense strand to SEQ ID NO: 755312
aucucccagccaauucuag

SEQ ID NO: 755314 - RNA, 19 nt, Artificial Sequence
  Description of Artificial Sequence: Synthetic oligonucleotide
  Sense strand starting at position 636 of SEQ ID NO: 586940
uagaauuggcugggagauu

SEQ ID NO: 755315 - RNA, 19 nt, Artificial Sequence
  Description of Artificial Sequence: Synthetic oligonucleotide
  Antisense strand to SEQ ID NO: 755314
aaucucccagccaauucua

SEQ ID NO: 755316 - RNA, 19 nt, Artificial Sequence
  Description of Artificial Sequence: Synthetic oligonucleotide
  Sense strand starting at position 1004 of SEQ ID NO: 586940
aguugagaauucuuuggug

SEQ ID NO: 755317 - RNA, 19 nt, Artificial Sequence
  Description of Artificial Sequence: Synthetic oligonucleotide
  Antisense strand to SEQ ID NO: 755316
caccaaagaauucucaacu

SEQ ID NO: 755318 - RNA, 19 nt, Artificial Sequence
  Description of Artificial Sequence: Synthetic oligonucleotide
  Sense strand starting at position 1288 of SEQ ID NO: 586940
ucaucaaaucagggccaua

SEQ ID NO: 755319 - RNA, 19 nt, Artificial Sequence
  Description of Artificial Sequence: Synthetic oligonucleotide
  Antisense strand to SEQ ID NO: 755318
uauggcccugauuugauga

SEQ ID NO: 755320 - RNA, 19 nt, Artificial Sequence
  Description of Artificial Sequence: Synthetic oligonucleotide
  Sense strand starting at position 1469 of SEQ ID NO: 586940
cagaguuaagucuggaagu

SEQ ID NO: 755321 - RNA, 19 nt, Artificial Sequence
  Description of Artificial Sequence: Synthetic oligonucleotide
  Antisense strand to SEQ ID NO: 755320
acuuccagacuuaacucug

SEQ ID NO: 755322 - RNA, 19 nt, Artificial Sequence
  Description of Artificial Sequence: Synthetic oligonucleotide
  Sense strand starting at position 1471 of SEQ ID NO: 586940
gaguuaagucuggaagugu

SEQ ID NO: 755323 - RNA, 19 nt, Artificial Sequence
  Description of Artificial Sequence: Synthetic oligonucleotide
  Antisense strand to SEQ ID NO: 755322
acacuuccagacuuaacuc

SEQ ID NO: 755324 - RNA, 19 nt, Artificial Sequence
  Description of Artificial Sequence: Synthetic oligonucleotide
  Sense strand starting at position 1484 of SEQ ID NO: 586940
aaguguucggcuucucgua

SEQ ID NO: 755325 - RNA, 19 nt, Artificial Sequence
  Description of Artificial Sequence: Synthetic oligonucleotide
  Antisense strand to SEQ ID NO: 755324
uacgagaagccgaacacuu

SEQ ID NO: 755326 - RNA, 19 nt, Artificial Sequence
  Description of Artificial Sequence: Synthetic oligonucleotide
  Sense strand starting at position 1485 of SEQ ID NO: 586940
aguguucggcuucucguaa

SEQ ID NO: 755327 - RNA, 19 nt, Artificial Sequence
  Description of Artificial Sequence: Synthetic oligonucleotide
  Antisense strand to SEQ ID NO: 755326
uuacgagaagccgaacacu

SEQ ID NO: 755328 - RNA, 19 nt, Artificial Sequence
  Description of Artificial Sequence: Synthetic oligonucleotide
  Sense strand starting at position 1539 of SEQ ID NO: 586940
uggguuccuaccugaguca

SEQ ID NO: 755329 - RNA, 19 nt, Artificial Sequence
  Description of Artificial Sequence: Synthetic oligonucleotide
  Antisense strand to SEQ ID NO: 755328
ugacucagguaggaaccca

SEQ ID NO: 755330 - RNA, 19 nt, Artificial Sequence
  Description of Artificial Sequence: Synthetic oligonucleotide
  Sense strand starting at position 1540 of SEQ ID NO: 586940
ggguuccuaccugagucau

SEQ ID NO: 755331 - RNA, 19 nt, Artificial Sequence
  Description of Artificial Sequence: Synthetic oligonucleotide
  Antisense strand to SEQ ID NO: 755330
augacucagguaggaaccc

SEQ ID NO: 755332 - RNA, 19 nt, Artificial Sequence
  Description of Artificial Sequence: Synthetic oligonucleotide
  Sense strand starting at position 1542 of SEQ ID NO: 586940
guuccuaccugagucauca

SEQ ID NO: 755333 - RNA, 19 nt, Artificial Sequence
  Description of Artificial Sequence: Synthetic oligonucleotide
  Antisense strand to SEQ ID NO: 755332
ugaugacucagguaggaac

SEQ ID NO: 755334 - RNA, 19 nt, Artificial Sequence
  Description of Artificial Sequence: Synthetic oligonucleotide
  Sense strand starting at position 1618 of SEQ ID NO: 586940
gggugaguuccuuaaaucg

SEQ ID NO: 755335 - RNA, 19 nt, Artificial Sequence
  Description of Artificial Sequence: Synthetic oligonucleotide
  Antisense strand to SEQ ID NO: 755334
cgauuuaaggaacucaccc

SEQ ID NO: 755336 - RNA, 19 nt, Artificial Sequence
  Description of Artificial Sequence: Synthetic oligonucleotide
  Sense strand starting at position 1640 of SEQ ID NO: 586940
ggaguuucuggagaucuuc

SEQ ID NO: 755337 - RNA, 19 nt, Artificial Sequence
  Description of Artificial Sequence: Synthetic oligonucleotide
  Antisense strand to SEQ ID NO: 755336
gaagaucuccagaaacucc

SEQ ID NO: 755338 - RNA, 19 nt, Artificial Sequence
  Description of Artificial Sequence: Synthetic oligonucleotide
  Sense strand starting at position 2266 of SEQ ID NO: 586940
uucugauguuaacccugaa

SEQ ID NO: 755339 - RNA, 19 nt, Artificial Sequence
  Description of Artificial Sequence: Synthetic oligonucleotide
  Antisense strand to SEQ ID NO: 755338
uucaggguuaacaucagaa

SEQ ID NO: 755340 - RNA, 19 nt, Artificial Sequence
  Description of Artificial Sequence: Synthetic oligonucleotide
  Sense strand starting at position 2269 of SEQ ID NO: 586940
ugauguuaacccugaagaa

SEQ ID NO: 755341 - RNA, 19 nt, Artificial Sequence
  Description of Artificial Sequence: Synthetic oligonucleotide
  Antisense strand to SEQ ID NO: 755340
uucuucaggguuaacauca

SEQ ID NO: 755342 - RNA, 19 nt, Artificial Sequence
  Description of Artificial Sequence: Synthetic oligonucleotide
  Sense strand starting at position 2330 of SEQ ID NO: 586940
accugaaggauucgaguua

SEQ ID NO: 755343 - RNA, 19 nt, Artificial Sequence
  Description of Artificial Sequence: Synthetic oligonucleotide
  Antisense strand to SEQ ID NO: 755342
uaacucgaauccuucaggu

SEQ ID NO: 755344 - RNA, 19 nt, Artificial Sequence
  Description of Artificial Sequence: Synthetic oligonucleotide
  Sense strand starting at position 2394 of SEQ ID NO: 586940
agcgcaugucuugugguaa

SEQ ID NO: 755345 - RNA, 19 nt, Artificial Sequence
  Description of Artificial Sequence: Synthetic oligonucleotide
  Antisense strand to SEQ ID NO: 755344
uuaccacaagacaugcgcu

SEQ ID NO: 755346 - RNA, 19 nt, Artificial Sequence
  Description of Artificial Sequence: Synthetic oligonucleotide
  Sense strand starting at position 2453 of SEQ ID NO: 586940
cccugacuuucccuggaau

SEQ ID NO: 755347 - RNA, 19 nt, Artificial Sequence
  Description of Artificial Sequence: Synthetic oligonucleotide
  Antisense strand to SEQ ID NO: 755346
auuccagggaaagucaggg

SEQ ID NO: 755348 - RNA, 19 nt, Artificial Sequence
  Description of Artificial Sequence: Synthetic oligonucleotide
  Sense strand starting at position 2454 of SEQ ID NO: 586940
ccugacuuucccuggaaug

SEQ ID NO: 755349 - RNA, 19 nt, Artificial Sequence
  Description of Artificial Sequence: Synthetic oligonucleotide
  Antisense strand to SEQ ID NO: 755348
cauuccagggaaagucagg

SEQ ID NO: 755350 - RNA, 19 nt, Artificial Sequence
  Description of Artificial Sequence: Synthetic oligonucleotide
  Sense strand starting at position 2456 of SEQ ID NO: 586940
ugacuuucccuggaauggu

SEQ ID NO: 755351 - RNA, 19 nt, Artificial Sequence
  Description of Artificial Sequence: Synthetic oligonucleotide
  Antisense strand to SEQ ID NO: 755350
accauuccagggaaaguca

SEQ ID NO: 755352 - RNA, 19 nt, Artificial Sequence
  Description of Artificial Sequence: Synthetic oligonucleotide
  Sense strand starting at position 2546 of SEQ ID NO: 586940
cacagagucgcucacacau

SEQ ID NO: 755353 - RNA, 19 nt, Artificial Sequence
  Description of Artificial Sequence: Synthetic oligonucleotide
  Antisense strand to SEQ ID NO: 755352
augugugagcgacucugug

SEQ ID NO: 755354 - RNA, 19 nt, Artificial Sequence
  Description of Artificial Sequence: Synthetic oligonucleotide
  Sense strand starting at position 2697 of SEQ ID NO: 586940
gauaauuaugagugaccau

SEQ ID NO: 755355 - RNA, 19 nt, Artificial Sequence
  Description of Artificial Sequence: Synthetic oligonucleotide
  Antisense strand to SEQ ID NO: 755354
auggucacucauaauuauc

SEQ ID NO: 755356 - RNA, 19 nt, Artificial Sequence
  Description of Artificial Sequence: Synthetic oligonucleotide
  Sense strand starting at position 3001 of SEQ ID NO: 586940
cgaagcugugcucacacaa

SEQ ID NO: 755357 - RNA, 19 nt, Artificial Sequence
  Description of Artificial Sequence: Synthetic oligonucleotide
  Antisense strand to SEQ ID NO: 755356
uugugugagcacagcuucg

SEQ ID NO: 755358 - RNA, 19 nt, Artificial Sequence
  Description of Artificial Sequence: Synthetic oligonucleotide
  Sense strand starting at position 3055 of SEQ ID NO: 586940
gggugagcugaauguggaa

SEQ ID NO: 755359 - RNA, 19 nt, Artificial Sequence
  Description of Artificial Sequence: Synthetic oligonucleotide
  Antisense strand to SEQ ID NO: 755358
uuccacauucagcucaccc

SEQ ID NO: 755360 - RNA, 19 nt, Artificial Sequence
  Description of Artificial Sequence: Synthetic oligonucleotide
  Sense strand starting at position 3057 of SEQ ID NO: 586940
gugagcugaauguggaauu

SEQ ID NO: 755361 - RNA, 19 nt, Artificial Sequence
  Description of Artificial Sequence: Synthetic oligonucleotide
  Antisense strand to SEQ ID NO: 755360
aauuccacauucagcucac

SEQ ID NO: 755362 - RNA, 19 nt, Artificial Sequence
  Description of Artificial Sequence: Synthetic oligonucleotide
  Sense strand starting at position 3190 of SEQ ID NO: 586940
caguguucugguuaacgag

SEQ ID NO: 755363 - RNA, 19 nt, Artificial Sequence
  Description of Artificial Sequence: Synthetic oligonucleotide
  Antisense strand to SEQ ID NO: 755362
cucguuaaccagaacacug

SEQ ID NO: 755364 - RNA, 19 nt, Artificial Sequence
  Description of Artificial Sequence: Synthetic oligonucleotide
  Sense strand starting at position 3245 of SEQ ID NO: 586940
ggcaaucuuugagucuaua

SEQ ID NO: 755365 - RNA, 19 nt, Artificial Sequence
  Description of Artificial Sequence: Synthetic oligonucleotide
  Antisense strand to SEQ ID NO: 755364
uauagacucaaagauugcc

SEQ ID NO: 755366 - RNA, 19 nt, Artificial Sequence
  Description of Artificial Sequence: Synthetic oligonucleotide
  Sense strand starting at position 3415 of SEQ ID NO: 586940
cccacucaugugcaaugau

SEQ ID NO: 755367 - RNA, 19 nt, Artificial Sequence
  Description of Artificial Sequence: Synthetic oligonucleotide
  Antisense strand to SEQ ID NO: 755366
aucauugcacaugaguggg

SEQ ID NO: 755368 - RNA, 19 nt, Artificial Sequence
  Description of Artificial Sequence: Synthetic oligonucleotide
  Sense strand starting at position 3432 of SEQ ID NO: 586940
auuccucuagcauaggauu

SEQ ID NO: 755369 - RNA, 19 nt, Artificial Sequence
  Description of Artificial Sequence: Synthetic oligonucleotide
  Antisense strand to SEQ ID NO: 755368
aauccuaugcuagaggaau

SEQ ID NO: 755370 - RNA, 19 nt, Artificial Sequence
  Description of Artificial Sequence: Synthetic oligonucleotide
  Sense strand starting at position 3454 of SEQ ID NO: 586940
gagugaggguuauuuacgu

SEQ ID NO: 755371 - RNA, 19 nt, Artificial Sequence
  Description of Artificial Sequence: Synthetic oligonucleotide
  Antisense strand to SEQ ID NO: 755370
acguaaauaacccucacuc

SEQ ID NO: 755372 - RNA, 19 nt, Artificial Sequence
  Description of Artificial Sequence: Synthetic oligonucleotide
  Sense strand starting at position 3618 of SEQ ID NO: 586940
agaaguucccuuugcagau

SEQ ID NO: 755373 - RNA, 19 nt, Artificial Sequence
  Description of Artificial Sequence: Synthetic oligonucleotide
  Antisense strand to SEQ ID NO: 755372
aucugcaaagggaacuucu

SEQ ID NO: 755374 - RNA, 19 nt, Artificial Sequence
  Description of Artificial Sequence: Synthetic oligonucleotide
  Sense strand starting at position 3690 of SEQ ID NO: 586940
aucugucuugggcaugaga

SEQ ID NO: 755375 - RNA, 19 nt, Artificial Sequence
  Description of Artificial Sequence: Synthetic oligonucleotide
  Antisense strand to SEQ ID NO: 755374
ucucaugcccaagacagau

SEQ ID NO: 755376 - RNA, 19 nt, Artificial Sequence
  Description of Artificial Sequence: Synthetic oligonucleotide
  Sense strand starting at position 3707 of SEQ ID NO: 586940
gaggcugagcguuaacaag

SEQ ID NO: 755377 - RNA, 19 nt, Artificial Sequence
  Description of Artificial Sequence: Synthetic oligonucleotide
  Antisense strand to SEQ ID NO: 755376
cuuguuaacgcucagccuc

SEQ ID NO: 755378 - RNA, 19 nt, Artificial Sequence
  Description of Artificial Sequence: Synthetic oligonucleotide
  Sense strand starting at position 3812 of SEQ ID NO: 586940
aaucgugaucccuggagga

SEQ ID NO: 755379 - RNA, 19 nt, Artificial Sequence
  Description of Artificial Sequence: Synthetic oligonucleotide
  Antisense strand to SEQ ID NO: 755378
uccuccagggaucacgauu

SEQ ID NO: 755380 - RNA, 19 nt, Artificial Sequence
  Description of Artificial Sequence: Synthetic oligonucleotide
  Sense strand starting at position 3814 of SEQ ID NO: 586940
ucgugaucccuggaggaga

SEQ ID NO: 755381 - RNA, 19 nt, Artificial Sequence
  Description of Artificial Sequence: Synthetic oligonucleotide
  Antisense strand to SEQ ID NO: 755380
ucuccuccagggaucacga

SEQ ID NO: 755382 - RNA, 19 nt, Artificial Sequence
  Description of Artificial Sequence: Synthetic oligonucleotide
  Sense strand starting at position 3979 of SEQ ID NO: 586940
ccguguucucuccagagga

SEQ ID NO: 755383 - RNA, 19 nt, Artificial Sequence
  Description of Artificial Sequence: Synthetic oligonucleotide
  Antisense strand to SEQ ID NO: 755382
uccucuggagagaacacgg

SEQ ID NO: 755384 - RNA, 19 nt, Artificial Sequence
  Description of Artificial Sequence: Synthetic oligonucleotide
  Sense strand starting at position 49 of SEQ ID NO: 586941
aacuguacuaugggaggua

SEQ ID NO: 755385 - RNA, 19 nt, Artificial Sequence
  Description of Artificial Sequence: Synthetic oligonucleotide
  Antisense strand to SEQ ID NO: 755384
uaccucccauaguacaguu

SEQ ID NO: 755386 - RNA, 19 nt, Artificial Sequence
  Description of Artificial Sequence: Synthetic oligonucleotide
  Sense strand starting at position 87 of SEQ ID NO: 586941
cccagaggucuauauguua

SEQ ID NO: 755387 - RNA, 19 nt, Artificial Sequence
  Description of Artificial Sequence: Synthetic oligonucleotide
  Antisense strand to SEQ ID NO: 755386
uaacauauagaccucuggg

SEQ ID NO: 755388 - RNA, 19 nt, Artificial Sequence
  Description of Artificial Sequence: Synthetic oligonucleotide
  Sense strand starting at position 268 of SEQ ID NO: 586941
ucaguagucaugugaugca

SEQ ID NO: 755389 - RNA, 19 nt, Artificial Sequence
  Description of Artificial Sequence: Synthetic oligonucleotide
  Antisense strand to SEQ ID NO: 755388
ugcaucacaugacuacuga

SEQ ID NO: 755390 - RNA, 19 nt, Artificial Sequence
  Description of Artificial Sequence: Synthetic oligonucleotide
  Sense strand starting at position 298 of SEQ ID NO: 586941
ugaagucagucuuuagacu

SEQ ID NO: 755391 - RNA, 19 nt, Artificial Sequence
  Description of Artificial Sequence: Synthetic oligonucleotide
  Antisense strand to SEQ ID NO: 755390
agucuaaagacugacuuca

SEQ ID NO: 755392 - RNA, 19 nt, Artificial Sequence
  Description of Artificial Sequence: Synthetic oligonucleotide
  Sense strand starting at position 299 of SEQ ID NO: 586941
gaagucagucuuuagacuu

SEQ ID NO: 755393 - RNA, 19 nt, Artificial Sequence
  Description of Artificial Sequence: Synthetic oligonucleotide
  Antisense strand to SEQ ID NO: 755392
aagucuaaagacugacuuc

SEQ ID NO: 755394 - RNA, 19 nt, Artificial Sequence
  Description of Artificial Sequence: Synthetic oligonucleotide
  Sense strand starting at position 332 of SEQ ID NO: 586941
cuuagugguacccguuaau

SEQ ID NO: 755395 - RNA, 19 nt, Artificial Sequence
  Description of Artificial Sequence: Synthetic oligonucleotide
  Antisense strand to SEQ ID NO: 755394
auuaacggguaccacuaag

SEQ ID NO: 755396 - RNA, 19 nt, Artificial Sequence
  Description of Artificial Sequence: Synthetic oligonucleotide
  Sense strand starting at position 335 of SEQ ID NO: 586941
agugguacccguuaaugac

SEQ ID NO: 755397 - RNA, 19 nt, Artificial Sequence
  Description of Artificial Sequence: Synthetic oligonucleotide
  Antisense strand to SEQ ID NO: 755396
gucauuaacggguaccacu

SEQ ID NO: 755398 - RNA, 19 nt, Artificial Sequence
  Description of Artificial Sequence: Synthetic oligonucleotide
  Sense strand starting at position 357 of SEQ ID NO: 586941
aagcauuucuuagagugaa

SEQ ID NO: 755399 - RNA, 19 nt, Artificial Sequence
  Description of Artificial Sequence: Synthetic oligonucleotide
  Antisense strand to SEQ ID NO: 755398
uucacucuaagaaaugcuu

SEQ ID NO: 755400 - RNA, 19 nt, Artificial Sequence
  Description of Artificial Sequence: Synthetic oligonucleotide
  Sense strand starting at position 495 of SEQ ID NO: 586941
gacagaauauuaggagauu

SEQ ID NO: 755401 - RNA, 19 nt, Artificial Sequence
  Description of Artificial Sequence: Synthetic oligonucleotide
  Antisense strand to SEQ ID NO: 755400
aaucuccuaauauucuguc

SEQ ID NO: 755402 - RNA, 19 nt, Artificial Sequence
  Description of Artificial Sequence: Synthetic oligonucleotide
  Sense strand starting at position 513 of SEQ ID NO: 586941
uuggacucacauugcuaua

SEQ ID NO: 755403 - RNA, 19 nt, Artificial Sequence
  Description of Artificial Sequence: Synthetic oligonucleotide
  Antisense strand to SEQ ID NO: 755402
uauagcaaugugaguccaa

SEQ ID NO: 755404 - RNA, 19 nt, Artificial Sequence
  Description of Artificial Sequence: Synthetic oligonucleotide
  Sense strand starting at position 518 of SEQ ID NO: 586941
cucacauugcuauaggagu

SEQ ID NO: 755405 - RNA, 19 nt, Artificial Sequence
  Description of Artificial Sequence: Synthetic oligonucleotide
  Antisense strand to SEQ ID NO: 755404
acuccuauagcaaugugag

SEQ ID NO: 755406 - RNA, 19 nt, Artificial Sequence
  Description of Artificial Sequence: Synthetic oligonucleotide
  Sense strand starting at position 524 of SEQ ID NO: 586941
uugcuauaggaguaacaua

SEQ ID NO: 755407 - RNA, 19 nt, Artificial Sequence
  Description of Artificial Sequence: Synthetic oligonucleotide
  Antisense strand to SEQ ID NO: 755406
uauguuacuccuauagcaa

SEQ ID NO: 755408 - RNA, 19 nt, Artificial Sequence
  Description of Artificial Sequence: Synthetic oligonucleotide
  Sense strand starting at position 601 of SEQ ID NO: 586941
agcaaucuguaaucuaguu

SEQ ID NO: 755409 - RNA, 19 nt, Artificial Sequence
  Description of Artificial Sequence: Synthetic oligonucleotide
  Antisense strand to SEQ ID NO: 755408
aacuagauuacagauugcu

SEQ ID NO: 755410 - RNA, 19 nt, Artificial Sequence
  Description of Artificial Sequence: Synthetic oligonucleotide
  Sense strand starting at position 733 of SEQ ID NO: 586941
ccagaacauugagauaggu

SEQ ID NO: 755411 - RNA, 19 nt, Artificial Sequence
  Description of Artificial Sequence: Synthetic oligonucleotide
  Antisense strand to SEQ ID NO: 755410
accuaucucaauguucugg

SEQ ID NO: 755412 - RNA, 19 nt, Artificial Sequence
  Description of Artificial Sequence: Synthetic oligonucleotide
  Sense strand starting at position 742 of SEQ ID NO: 586941
ugagauagguaagauuugu

SEQ ID NO: 755413 - RNA, 19 nt, Artificial Sequence
  Description of Artificial Sequence: Synthetic oligonucleotide
  Antisense strand to SEQ ID NO: 755412
acaaaucuuaccuaucuca

SEQ ID NO: 755414 - RNA, 19 nt, Artificial Sequence
  Description of Artificial Sequence: Synthetic oligonucleotide
  Sense strand starting at position 804 of SEQ ID NO: 586941
aauuauugguucuuaguga

SEQ ID NO: 755415 - RNA, 19 nt, Artificial Sequence
  Description of Artificial Sequence: Synthetic oligonucleotide
  Antisense strand to SEQ ID NO: 755414
ucacuaagaaccaauaauu

SEQ ID NO: 755416 - RNA, 19 nt, Artificial Sequence
  Description of Artificial Sequence: Synthetic oligonucleotide
  Sense strand starting at position 833 of SEQ ID NO: 586941
cuccguauccaguaaauua

SEQ ID NO: 755417 - RNA, 19 nt, Artificial Sequence
  Description of Artificial Sequence: Synthetic oligonucleotide
  Antisense strand to SEQ ID NO: 755416
uaauuuacuggauacggag

SEQ ID NO: 755418 - RNA, 19 nt, Artificial Sequence
  Description of Artificial Sequence: Synthetic oligonucleotide
  Sense strand starting at position 978 of SEQ ID NO: 586941
ucgugucacacaggaagua

SEQ ID NO: 755419 - RNA, 19 nt, Artificial Sequence
  Description of Artificial Sequence: Synthetic oligonucleotide
  Antisense strand to SEQ ID NO: 755418
uacuuccugugugacacga

SEQ ID NO: 755420 - RNA, 19 nt, Artificial Sequence
  Description of Artificial Sequence: Synthetic oligonucleotide
  Sense strand starting at position 1083 of SEQ ID NO: 586941
aagucuuaaacgugaguga

SEQ ID NO: 755421 - RNA, 19 nt, Artificial Sequence
  Description of Artificial Sequence: Synthetic oligonucleotide
  Antisense strand to SEQ ID NO: 755420
ucacucacguuuaagacuu

SEQ ID NO: 755422 - RNA, 19 nt, Artificial Sequence
  Description of Artificial Sequence: Synthetic oligonucleotide
  Sense strand starting at position 1090 of SEQ ID NO: 586941
aaacgugagugagcugaau

SEQ ID NO: 755423 - RNA, 19 nt, Artificial Sequence
  Description of Artificial Sequence: Synthetic oligonucleotide
  Antisense strand to SEQ ID NO: 755422
auucagcucacucacguuu

SEQ ID NO: 755424 - RNA, 19 nt, Artificial Sequence
  Description of Artificial Sequence: Synthetic oligonucleotide
  Sense strand starting at position 1092 of SEQ ID NO: 586941
acgugagugagcugaaugu

SEQ ID NO: 755425 - RNA, 19 nt, Artificial Sequence
  Description of Artificial Sequence: Synthetic oligonucleotide
  Antisense strand to SEQ ID NO: 755424
acauucagcucacucacgu

SEQ ID NO: 755426 - RNA, 19 nt, Artificial Sequence
  Description of Artificial Sequence: Synthetic oligonucleotide
  Sense strand starting at position 1096 of SEQ ID NO: 586941
gagugagcugaauguuuaa

SEQ ID NO: 755427 - RNA, 19 nt, Artificial Sequence
  Description of Artificial Sequence: Synthetic oligonucleotide
  Antisense strand to SEQ ID NO: 755426
uuaaacauucagcucacuc

SEQ ID NO: 755428 - RNA, 19 nt, Artificial Sequence
  Description of Artificial Sequence: Synthetic oligonucleotide
  Sense strand starting at position 1099 of SEQ ID NO: 586941
ugagcugaauguuuaagaa

SEQ ID NO: 755429 - RNA, 19 nt, Artificial Sequence
  Description of Artificial Sequence: Synthetic oligonucleotide
  Antisense strand to SEQ ID NO: 755428
uucuuaaacauucagcuca

SEQ ID NO: 755430 - RNA, 19 nt, Artificial Sequence
  Description of Artificial Sequence: Synthetic oligonucleotide
  Sense strand starting at position 1380 of SEQ ID NO: 586941
uagaaacguccugauccca

SEQ ID NO: 755431 - RNA, 19 nt, Artificial Sequence
  Description of Artificial Sequence: Synthetic oligonucleotide
  Antisense strand to SEQ ID NO: 755430
ugggaucaggacguuucua

SEQ ID NO: 755432 - RNA, 19 nt, Artificial Sequence
  Description of Artificial Sequence: Synthetic oligonucleotide
  Sense strand starting at position 1391 of SEQ ID NO: 586941
ugaucccauuuguguagau

SEQ ID NO: 755433 - RNA, 19 nt, Artificial Sequence
  Description of Artificial Sequence: Synthetic oligonucleotide
  Antisense strand to SEQ ID NO: 755432
aucuacacaaaugggauca

SEQ ID NO: 755434 - RNA, 19 nt, Artificial Sequence
  Description of Artificial Sequence: Synthetic oligonucleotide
  Sense strand starting at position 2178 of SEQ ID NO: 586941
cugaucguuucugcaggau

SEQ ID NO: 755435 - RNA, 19 nt, Artificial Sequence
  Description of Artificial Sequence: Synthetic oligonucleotide
  Antisense strand to SEQ ID NO: 755434
auccugcagaaacgaucag

SEQ ID NO: 755436 - RNA, 19 nt, Artificial Sequence
  Description of Artificial Sequence: Synthetic oligonucleotide
  Sense strand starting at position 2242 of SEQ ID NO: 586941
cgauuacgccuucugcgua

SEQ ID NO: 755437 - RNA, 19 nt, Artificial Sequence
  Description of Artificial Sequence: Synthetic oligonucleotide
  Antisense strand to SEQ ID NO: 755436
uacgcagaaggcguaaucg

SEQ ID NO: 755438 - RNA, 19 nt, Artificial Sequence
  Description of Artificial Sequence: Synthetic oligonucleotide
  Sense strand starting at position 2321 of SEQ ID NO: 586941
gccuucuuuguccgauuga

SEQ ID NO: 755439 - RNA, 19 nt, Artificial Sequence
  Description of Artificial Sequence: Synthetic oligonucleotide
  Antisense strand to SEQ ID NO: 755438
ucaaucggacaaagaaggc

SEQ ID NO: 755440 - RNA, 19 nt, Artificial Sequence
  Description of Artificial Sequence: Synthetic oligonucleotide
  Sense strand starting at position 2330 of SEQ ID NO: 586941
guccgauugaacggaggua

SEQ ID NO: 755441 - RNA, 19 nt, Artificial Sequence
  Description of Artificial Sequence: Synthetic oligonucleotide
  Antisense strand to SEQ ID NO: 755440
uaccuccguucaaucggac

SEQ ID NO: 755442 - RNA, 19 nt, Artificial Sequence
  Description of Artificial Sequence: Synthetic oligonucleotide
  Sense strand starting at position 2681 of SEQ ID NO: 586941
acugucuucuaucuguaaa

SEQ ID NO: 755443 - RNA, 19 nt, Artificial Sequence
  Description of Artificial Sequence: Synthetic oligonucleotide
  Antisense strand to SEQ ID NO: 755442
uuuacagauagaagacagu

SEQ ID NO: 755444 - RNA, 19 nt, Artificial Sequence
  Description of Artificial Sequence: Synthetic oligonucleotide
  Sense strand starting at position 2684 of SEQ ID NO: 586941
gucuucuaucuguaaagcu

SEQ ID NO: 755445 - RNA, 19 nt, Artificial Sequence
  Description of Artificial Sequence: Synthetic oligonucleotide
  Antisense strand to SEQ ID NO: 755444
agcuuuacagauagaagac

SEQ ID NO: 755446 - RNA, 19 nt, Artificial Sequence
  Description of Artificial Sequence: Synthetic oligonucleotide
  Sense strand starting at position 2754 of SEQ ID NO: 586941
ggcauacaucuuugugcuu

SEQ ID NO: 755447 - RNA, 19 nt, Artificial Sequence
  Description of Artificial Sequence: Synthetic oligonucleotide
  Antisense strand to SEQ ID NO: 755446
aagcacaaagauguaugcc

SEQ ID NO: 755448 - RNA, 19 nt, Artificial Sequence
  Description of Artificial Sequence: Synthetic oligonucleotide
  Sense strand starting at position 2929 of SEQ ID NO: 586941
auauguuauggugaucuuu

SEQ ID NO: 755449 - RNA, 19 nt, Artificial Sequence
  Description of Artificial Sequence: Synthetic oligonucleotide
  Antisense strand to SEQ ID NO: 755448
aaagaucaccauaacauau

SEQ ID NO: 755450 - RNA, 19 nt, Artificial Sequence
  Description of Artificial Sequence: Synthetic oligonucleotide
  Sense strand starting at position 2931 of SEQ ID NO: 586941
auguuauggugaucuuuga

SEQ ID NO: 755451 - RNA, 19 nt, Artificial Sequence
  Description of Artificial Sequence: Synthetic oligonucleotide
  Antisense strand to SEQ ID NO: 755450
ucaaagaucaccauaacau

SEQ ID NO: 755452 - RNA, 19 nt, Artificial Sequence
  Description of Artificial Sequence: Synthetic oligonucleotide
  Sense strand starting at position 2935 of SEQ ID NO: 586941
uauggugaucuuugaaguu

SEQ ID NO: 755453 - RNA, 19 nt, Artificial Sequence
  Description of Artificial Sequence: Synthetic oligonucleotide
  Antisense strand to SEQ ID NO: 755452
aacuucaaagaucaccaua

SEQ ID NO: 755454 - RNA, 19 nt, Artificial Sequence
  Description of Artificial Sequence: Synthetic oligonucleotide
  Sense strand starting at position 2958 of SEQ ID NO: 586941
uuauaauuacuuugggaca

SEQ ID NO: 755455 - RNA, 19 nt, Artificial Sequence
  Description of Artificial Sequence: Synthetic oligonucleotide
  Antisense strand to SEQ ID NO: 755454
ugucccaaaguaauuauaa

SEQ ID NO: 755456 - RNA, 19 nt, Artificial Sequence
  Description of Artificial Sequence: Synthetic oligonucleotide
  Sense strand starting at position 3000 of SEQ ID NO: 586941
cagcgacuguaauccauaa

SEQ ID NO: 755457 - RNA, 19 nt, Artificial Sequence
  Description of Artificial Sequence: Synthetic oligonucleotide
  Antisense strand to SEQ ID NO: 755456
uuauggauuacagucgcug

SEQ ID NO: 755458 - RNA, 19 nt, Artificial Sequence
  Description of Artificial Sequence: Synthetic oligonucleotide
  Sense strand starting at position 3142 of SEQ ID NO: 586941
gccucugaguguuccagua

SEQ ID NO: 755459 - RNA, 19 nt, Artificial Sequence
  Description of Artificial Sequence: Synthetic oligonucleotide
  Antisense strand to SEQ ID NO: 755458
uacuggaacacucagaggc

SEQ ID NO: 755460 - RNA, 19 nt, Artificial Sequence
  Description of Artificial Sequence: Synthetic oligonucleotide
  Sense strand starting at position 3369 of SEQ ID NO: 586941
ggaggcuuauugcugguaa

SEQ ID NO: 755461 - RNA, 19 nt, Artificial Sequence
  Description of Artificial Sequence: Synthetic oligonucleotide
  Antisense strand to SEQ ID NO: 755460
uuaccagcaauaagccucc

SEQ ID NO: 755462 - RNA, 19 nt, Artificial Sequence
  Description of Artificial Sequence: Synthetic oligonucleotide
  Sense strand starting at position 3371 of SEQ ID NO: 586941
aggcuuauugcugguaaag

SEQ ID NO: 755463 - RNA, 19 nt, Artificial Sequence
  Description of Artificial Sequence: Synthetic oligonucleotide
  Antisense strand to SEQ ID NO: 755462
cuuuaccagcaauaagccu

SEQ ID NO: 755464 - RNA, 19 nt, Artificial Sequence
  Description of Artificial Sequence: Synthetic oligonucleotide
  Sense strand starting at position 302 of SEQ ID NO: 586942
auacuauagucaguccaca

SEQ ID NO: 755465 - RNA, 19 nt, Artificial Sequence
  Description of Artificial Sequence: Synthetic oligonucleotide
  Antisense strand to SEQ ID NO: 755464
uguggacugacuauaguau

SEQ ID NO: 755466 - RNA, 19 nt, Artificial Sequence
  Description of Artificial Sequence: Synthetic oligonucleotide
  Sense strand starting at position 569 of SEQ ID NO: 586942
aaaggagauuauguugcau

SEQ ID NO: 755467 - RNA, 19 nt, Artificial Sequence
  Description of Artificial Sequence: Synthetic oligonucleotide
  Antisense strand to SEQ ID NO: 755466
augcaacauaaucuccuuu

SEQ ID NO: 755468 - RNA, 19 nt, Artificial Sequence
  Description of Artificial Sequence: Synthetic oligonucleotide
  Sense strand starting at position 571 of SEQ ID NO: 586942
aggagauuauguugcauca

SEQ ID NO: 755469 - RNA, 19 nt, Artificial Sequence
  Description of Artificial Sequence: Synthetic oligonucleotide
  Antisense strand to SEQ ID NO: 755468
ugaugcaacauaaucuccu

SEQ ID NO: 755470 - RNA, 19 nt, Artificial Sequence
  Description of Artificial Sequence: Synthetic oligonucleotide
  Sense strand starting at position 573 of SEQ ID NO: 586942
gagauuauguugcaucaaa

SEQ ID NO: 755471 - RNA, 19 nt, Artificial Sequence
  Description of Artificial Sequence: Synthetic oligonucleotide
  Antisense strand to SEQ ID NO: 755470
uuugaugcaacauaaucuc

SEQ ID NO: 755472 - RNA, 19 nt, Artificial Sequence
  Description of Artificial Sequence: Synthetic oligonucleotide
  Sense strand starting at position 661 of SEQ ID NO: 586942
agagcugcucucuacuaaa

SEQ ID NO: 755473 - RNA, 19 nt, Artificial Sequence
  Description of Artificial Sequence: Synthetic oligonucleotide
  Antisense strand to SEQ ID NO: 755472
uuuaguagagagcagcucu

SEQ ID NO: 755474 - RNA, 19 nt, Artificial Sequence
  Description of Artificial Sequence: Synthetic oligonucleotide
  Sense strand starting at position 1045 of SEQ ID NO: 586942
acacgagaaucgcuugagu

SEQ ID NO: 755475 - RNA, 19 nt, Artificial Sequence
  Description of Artificial Sequence: Synthetic oligonucleotide
  Antisense strand to SEQ ID NO: 755474
acucaagcgauucucgugu

SEQ ID NO: 755476 - RNA, 19 nt, Artificial Sequence
  Description of Artificial Sequence: Synthetic oligonucleotide
  Sense strand starting at position 1048 of SEQ ID NO: 586942
cgagaaucgcuugaguccu

SEQ ID NO: 755477 - RNA, 19 nt, Artificial Sequence
  Description of Artificial Sequence: Synthetic oligonucleotide
  Antisense strand to SEQ ID NO: 755476
aggacucaagcgauucucg

SEQ ID NO: 755478 - RNA, 19 nt, Artificial Sequence
  Description of Artificial Sequence: Synthetic oligonucleotide
  Sense strand starting at position 1323 of SEQ ID NO: 586942
ucccuuauguuccugagac

SEQ ID NO: 755479 - RNA, 19 nt, Artificial Sequence
  Description of Artificial Sequence: Synthetic oligonucleotide
  Antisense strand to SEQ ID NO: 755478
gucucaggaacauaaggga

SEQ ID NO: 755480 - RNA, 19 nt, Artificial Sequence
  Description of Artificial Sequence: Synthetic oligonucleotide
  Sense strand starting at position 1324 of SEQ ID NO: 586942
cccuuauguuccugagacu

SEQ ID NO: 755481 - RNA, 19 nt, Artificial Sequence
  Description of Artificial Sequence: Synthetic oligonucleotide
  Antisense strand to SEQ ID NO: 755480
agucucaggaacauaaggg

SEQ ID NO: 755482 - RNA, 19 nt, Artificial Sequence
  Description of Artificial Sequence: Synthetic oligonucleotide
  Sense strand starting at position 1325 of SEQ ID NO: 586942
ccuuauguuccugagacua

SEQ ID NO: 755483 - RNA, 19 nt, Artificial Sequence
  Description of Artificial Sequence: Synthetic oligonucleotide
  Antisense strand to SEQ ID NO: 755482
uagucucaggaacauaagg

SEQ ID NO: 755484 - RNA, 19 nt, Artificial Sequence
  Description of Artificial Sequence: Synthetic oligonucleotide
  Sense strand starting at position 1412 of SEQ ID NO: 586942
cuuaacuagcaaugcaaga

SEQ ID NO: 755485 - RNA, 19 nt, Artificial Sequence
  Description of Artificial Sequence: Synthetic oligonucleotide
  Antisense strand to SEQ ID NO: 755484
ucuugcauugcuaguuaag

SEQ ID NO: 755486 - RNA, 19 nt, Artificial Sequence
  Description of Artificial Sequence: Synthetic oligonucleotide
  Sense strand starting at position 1455 of SEQ ID NO: 586942
guaaguuacgggcaggaga

SEQ ID NO: 755487 - RNA, 19 nt, Artificial Sequence
  Description of Artificial Sequence: Synthetic oligonucleotide
  Antisense strand to SEQ ID NO: 755486
ucuccugcccguaacuuac

SEQ ID NO: 755488 - RNA, 19 nt, Artificial Sequence
  Description of Artificial Sequence: Synthetic oligonucleotide
  Sense strand starting at position 2558 of SEQ ID NO: 586942
gucugaugcccgcuuucuu

SEQ ID NO: 755489 - RNA, 19 nt, Artificial Sequence
  Description of Artificial Sequence: Synthetic oligonucleotide
  Antisense strand to SEQ ID NO: 755488
aagaaagcgggcaucagac

SEQ ID NO: 755490 - RNA, 19 nt, Artificial Sequence
  Description of Artificial Sequence: Synthetic oligonucleotide
  Sense strand starting at position 2603 of SEQ ID NO: 586942
gcagaaauccuagagccua

SEQ ID NO: 755491 - RNA, 19 nt, Artificial Sequence
  Description of Artificial Sequence: Synthetic oligonucleotide
  Antisense strand to SEQ ID NO: 755490
uaggcucuaggauuucugc

SEQ ID NO: 755492 - RNA, 19 nt, Artificial Sequence
  Description of Artificial Sequence: Synthetic oligonucleotide
  Sense strand starting at position 2623 of SEQ ID NO: 586942
gaacucuacugagagcuga

SEQ ID NO: 755493 - RNA, 19 nt, Artificial Sequence
  Description of Artificial Sequence: Synthetic oligonucleotide
  Antisense strand to SEQ ID NO: 755492
ucagcucucaguagaguuc

SEQ ID NO: 755494 - RNA, 19 nt, Artificial Sequence
  Description of Artificial Sequence: Synthetic oligonucleotide
  Sense strand starting at position 2687 of SEQ ID NO: 586942
cugccaacgcguccucaua

SEQ ID NO: 755495 - RNA, 19 nt, Artificial Sequence
  Description of Artificial Sequence: Synthetic oligonucleotide
  Antisense strand to SEQ ID NO: 755494
uaugaggacgcguuggcag

SEQ ID NO: 755496 - RNA, 19 nt, Artificial Sequence
  Description of Artificial Sequence: Synthetic oligonucleotide
  Sense strand starting at position 2743 of SEQ ID NO: 586942
cugugaguucagugagcau

SEQ ID NO: 755497 - RNA, 19 nt, Artificial Sequence
  Description of Artificial Sequence: Synthetic oligonucleotide
  Antisense strand to SEQ ID NO: 755496
augcucacugaacucacag

SEQ ID NO: 755498 - RNA, 19 nt, Artificial Sequence
  Description of Artificial Sequence: Synthetic oligonucleotide
  Sense strand starting at position 2783 of SEQ ID NO: 586942
cgccuaaagguuugauaaa

SEQ ID NO: 755499 - RNA, 19 nt, Artificial Sequence
  Description of Artificial Sequence: Synthetic oligonucleotide
  Antisense strand to SEQ ID NO: 755498
uuuaucaaaccuuuaggcg

SEQ ID NO: 755500 - RNA, 19 nt, Artificial Sequence
  Description of Artificial Sequence: Synthetic oligonucleotide
  Sense strand starting at position 2784 of SEQ ID NO: 586942
gccuaaagguuugauaaau

SEQ ID NO: 755501 - RNA, 19 nt, Artificial Sequence
  Description of Artificial Sequence: Synthetic oligonucleotide
  Antisense strand to SEQ ID NO: 755500
auuuaucaaaccuuuaggc

SEQ ID NO: 755502 - RNA, 19 nt, Artificial Sequence
  Description of Artificial Sequence: Synthetic oligonucleotide
  Sense strand starting at position 2810 of SEQ ID NO: 586942
ugcaaauagcacugcauua

SEQ ID NO: 755503 - RNA, 19 nt, Artificial Sequence
  Description of Artificial Sequence: Synthetic oligonucleotide
  Antisense strand to SEQ ID NO: 755502
uaaugcagugcuauuugca

SEQ ID NO: 755504 - RNA, 19 nt, Artificial Sequence
  Description of Artificial Sequence: Synthetic oligonucleotide
  Sense strand starting at position 2831 of SEQ ID NO: 586942
uuagccacucugugaggua

SEQ ID NO: 755505 - RNA, 19 nt, Artificial Sequence
  Description of Artificial Sequence: Synthetic oligonucleotide
  Antisense strand to SEQ ID NO: 755504
uaccucacagaguggcuaa

SEQ ID NO: 755506 - RNA, 19 nt, Artificial Sequence
  Description of Artificial Sequence: Synthetic oligonucleotide
  Sense strand starting at position 2971 of SEQ ID NO: 586942
gcgcgaucucgugucacua

SEQ ID NO: 755507 - RNA, 19 nt, Artificial Sequence
  Description of Artificial Sequence: Synthetic oligonucleotide
  Antisense strand to SEQ ID NO: 755506
uagugacacgagaucgcgc

SEQ ID NO: 755508 - RNA, 19 nt, Artificial Sequence
  Description of Artificial Sequence: Synthetic oligonucleotide
  Sense strand starting at position 2998 of SEQ ID NO: 586942
gcauuuccggcucaagcau

SEQ ID NO: 755509 - RNA, 19 nt, Artificial Sequence
  Description of Artificial Sequence: Synthetic oligonucleotide
  Antisense strand to SEQ ID NO: 755508
augcuugagccggaaaugc

SEQ ID NO: 755510 - RNA, 19 nt, Artificial Sequence
  Description of Artificial Sequence: Synthetic oligonucleotide
  Sense strand starting at position 3301 of SEQ ID NO: 586942
cagggucaguuaguuauaa

SEQ ID NO: 755511 - RNA, 19 nt, Artificial Sequence
  Description of Artificial Sequence: Synthetic oligonucleotide
  Antisense strand to SEQ ID NO: 755510
uuauaacuaacugacccug

SEQ ID NO: 755512 - RNA, 19 nt, Artificial Sequence
  Description of Artificial Sequence: Synthetic oligonucleotide
  Sense strand starting at position 3302 of SEQ ID NO: 586942
agggucaguuaguuauaag

SEQ ID NO: 755513 - RNA, 19 nt, Artificial Sequence
  Description of Artificial Sequence: Synthetic oligonucleotide
  Antisense strand to SEQ ID NO: 755512
cuuauaacuaacugacccu

SEQ ID NO: 755514 - RNA, 19 nt, Artificial Sequence
  Description of Artificial Sequence: Synthetic oligonucleotide
  Sense strand starting at position 3303 of SEQ ID NO: 586942
gggucaguuaguuauaagc

SEQ ID NO: 755515 - RNA, 19 nt, Artificial Sequence
  Description of Artificial Sequence: Synthetic oligonucleotide
  Antisense strand to SEQ ID NO: 755514
gcuuauaacuaacugaccc

SEQ ID NO: 755516 - RNA, 19 nt, Artificial Sequence
  Description of Artificial Sequence: Synthetic oligonucleotide
  Sense strand starting at position 3390 of SEQ ID NO: 586942
ccuuguuagucugugguuu

SEQ ID NO: 755517 - RNA, 19 nt, Artificial Sequence
  Description of Artificial Sequence: Synthetic oligonucleotide
  Antisense strand to SEQ ID NO: 755516
aaaccacagacuaacaagg

SEQ ID NO: 755518 - RNA, 19 nt, Artificial Sequence
  Description of Artificial Sequence: Synthetic oligonucleotide
  Sense strand starting at position 3464 of SEQ ID NO: 586942
uucuacugcgcuuauuaaa

SEQ ID NO: 755519 - RNA, 19 nt, Artificial Sequence
  Description of Artificial Sequence: Synthetic oligonucleotide
  Antisense strand to SEQ ID NO: 755518
uuuaauaagcgcaguagaa

SEQ ID NO: 755520 - RNA, 19 nt, Artificial Sequence
  Description of Artificial Sequence: Synthetic oligonucleotide
  Sense strand starting at position 57 of SEQ ID NO: 586943
guaagaauguaugcugaga

SEQ ID NO: 755521 - RNA, 19 nt, Artificial Sequence
  Description of Artificial Sequence: Synthetic oligonucleotide
  Antisense strand to SEQ ID NO: 755520
ucucagcauacauucuuac

SEQ ID NO: 755522 - RNA, 19 nt, Artificial Sequence
  Description of Artificial Sequence: Synthetic oligonucleotide
  Sense strand starting at position 65 of SEQ ID NO: 586943
guaugcugagacuaacuca

SEQ ID NO: 755523 - RNA, 19 nt, Artificial Sequence
  Description of Artificial Sequence: Synthetic oligonucleotide
  Antisense strand to SEQ ID NO: 755522
ugaguuagucucagcauac

SEQ ID NO: 755524 - RNA, 19 nt, Artificial Sequence
  Description of Artificial Sequence: Synthetic oligonucleotide
  Sense strand starting at position 174 of SEQ ID NO: 586943
agaguugcaaagugaagau

SEQ ID NO: 755525 - RNA, 19 nt, Artificial Sequence
  Description of Artificial Sequence: Synthetic oligonucleotide
  Antisense strand to SEQ ID NO: 755524
aucuucacuuugcaacucu

SEQ ID NO: 755526 - RNA, 19 nt, Artificial Sequence
  Description of Artificial Sequence: Synthetic oligonucleotide
  Sense strand starting at position 191 of SEQ ID NO: 586943
aucauaaugugucuuagau

SEQ ID NO: 755527 - RNA, 19 nt, Artificial Sequence
  Description of Artificial Sequence: Synthetic oligonucleotide
  Antisense strand to SEQ ID NO: 755526
aucuaagacacauuaugau

SEQ ID NO: 755528 - RNA, 19 nt, Artificial Sequence
  Description of Artificial Sequence: Synthetic oligonucleotide
  Sense strand starting at position 251 of SEQ ID NO: 586943
gcacuauuucugugcugga

SEQ ID NO: 755529 - RNA, 19 nt, Artificial Sequence
  Description of Artificial Sequence: Synthetic oligonucleotide
  Antisense strand to SEQ ID NO: 755528
uccagcacagaaauagugc

SEQ ID NO: 755530 - RNA, 19 nt, Artificial Sequence
  Description of Artificial Sequence: Synthetic oligonucleotide
  Sense strand starting at position 433 of SEQ ID NO: 586943
uuuacaaauucuguacgaa

SEQ ID NO: 755531 - RNA, 19 nt, Artificial Sequence
  Description of Artificial Sequence: Synthetic oligonucleotide
  Antisense strand to SEQ ID NO: 755530
uucguacagaauuuguaaa

SEQ ID NO: 755532 - RNA, 19 nt, Artificial Sequence
  Description of Artificial Sequence: Synthetic oligonucleotide
  Sense strand starting at position 434 of SEQ ID NO: 586943
uuacaaauucuguacgaau

SEQ ID NO: 755533 - RNA, 19 nt, Artificial Sequence
  Description of Artificial Sequence: Synthetic oligonucleotide
  Antisense strand to SEQ ID NO: 755532
auucguacagaauuuguaa

SEQ ID NO: 755534 - RNA, 19 nt, Artificial Sequence
  Description of Artificial Sequence: Synthetic oligonucleotide
  Sense strand starting at position 460 of SEQ ID NO: 586943
cuuagaaauuuggaccaaa

SEQ ID NO: 755535 - RNA, 19 nt, Artificial Sequence
  Description of Artificial Sequence: Synthetic oligonucleotide
  Antisense strand to SEQ ID NO: 755534
uuugguccaaauuucuaag

SEQ ID NO: 755536 - RNA, 19 nt, Artificial Sequence
  Description of Artificial Sequence: Synthetic oligonucleotide
  Sense strand starting at position 662 of SEQ ID NO: 586943
ggacuuuauuagcucacau

SEQ ID NO: 755537 - RNA, 19 nt, Artificial Sequence
  Description of Artificial Sequence: Synthetic oligonucleotide
  Antisense strand to SEQ ID NO: 755536
augugagcuaauaaagucc

SEQ ID NO: 755538 - RNA, 19 nt, Artificial Sequence
  Description of Artificial Sequence: Synthetic oligonucleotide
  Sense strand starting at position 823 of SEQ ID NO: 586943
aggguucuugcccauuaag

SEQ ID NO: 755539 - RNA, 19 nt, Artificial Sequence
  Description of Artificial Sequence: Synthetic oligonucleotide
  Antisense strand to SEQ ID NO: 755538
cuuaaugggcaagaacccu

SEQ ID NO: 755540 - RNA, 19 nt, Artificial Sequence
  Description of Artificial Sequence: Synthetic oligonucleotide
  Sense strand starting at position 946 of SEQ ID NO: 586943
caaauaaguguuugaagag

SEQ ID NO: 755541 - RNA, 19 nt, Artificial Sequence
  Description of Artificial Sequence: Synthetic oligonucleotide
  Antisense strand to SEQ ID NO: 755540
cucuucaaacacuuauuug

SEQ ID NO: 755542 - RNA, 19 nt, Artificial Sequence
  Description of Artificial Sequence: Synthetic oligonucleotide
  Sense strand starting at position 1034 of SEQ ID NO: 586943
cagagacauuaaguagcau

SEQ ID NO: 755543 - RNA, 19 nt, Artificial Sequence
  Description of Artificial Sequence: Synthetic oligonucleotide
  Antisense strand to SEQ ID NO: 755542
augcuacuuaaugucucug

SEQ ID NO: 755544 - RNA, 19 nt, Artificial Sequence
  Description of Artificial Sequence: Synthetic oligonucleotide
  Sense strand starting at position 1155 of SEQ ID NO: 586943
cagagaaggugcucauuaa

SEQ ID NO: 755545 - RNA, 19 nt, Artificial Sequence
  Description of Artificial Sequence: Synthetic oligonucleotide
  Antisense strand to SEQ ID NO: 755544
uuaaugagcaccuucucug

SEQ ID NO: 755546 - RNA, 19 nt, Artificial Sequence
  Description of Artificial Sequence: Synthetic oligonucleotide
  Sense strand starting at position 1207 of SEQ ID NO: 586943
uuaaacaugcuugagcuua

SEQ ID NO: 755547 - RNA, 19 nt, Artificial Sequence
  Description of Artificial Sequence: Synthetic oligonucleotide
  Antisense strand to SEQ ID NO: 755546
uaagcucaagcauguuuaa

SEQ ID NO: 755548 - RNA, 19 nt, Artificial Sequence
  Description of Artificial Sequence: Synthetic oligonucleotide
  Sense strand starting at position 1222 of SEQ ID NO: 586943
cuuauuguucuggacuuaa

SEQ ID NO: 755549 - RNA, 19 nt, Artificial Sequence
  Description of Artificial Sequence: Synthetic oligonucleotide
  Antisense strand to SEQ ID NO: 755548
uuaaguccagaacaauaag

SEQ ID NO: 755550 - RNA, 19 nt, Artificial Sequence
  Description of Artificial Sequence: Synthetic oligonucleotide
  Sense strand starting at position 1321 of SEQ ID NO: 586943
ugguaaaugcuuuauuaga

SEQ ID NO: 755551 - RNA, 19 nt, Artificial Sequence
  Description of Artificial Sequence: Synthetic oligonucleotide
  Antisense strand to SEQ ID NO: 755550
ucuaauaaagcauuuacca

SEQ ID NO: 755552 - RNA, 19 nt, Artificial Sequence
  Description of Artificial Sequence: Synthetic oligonucleotide
  Sense strand starting at position 1410 of SEQ ID NO: 586943
ccaggaaguucugugacaa

SEQ ID NO: 755553 - RNA, 19 nt, Artificial Sequence
  Description of Artificial Sequence: Synthetic oligonucleotide
  Antisense strand to SEQ ID NO: 755552
uugucacagaacuuccugg

SEQ ID NO: 755554 - RNA, 19 nt, Artificial Sequence
  Description of Artificial Sequence: Synthetic oligonucleotide
  Sense strand starting at position 1411 of SEQ ID NO: 586943
caggaaguucugugacaaa

SEQ ID NO: 755555 - RNA, 19 nt, Artificial Sequence
  Description of Artificial Sequence: Synthetic oligonucleotide
  Antisense strand to SEQ ID NO: 755554
uuugucacagaacuuccug

SEQ ID NO: 755556 - RNA, 19 nt, Artificial Sequence
  Description of Artificial Sequence: Synthetic oligonucleotide
  Sense strand starting at position 1456 of SEQ ID NO: 586943
cugugcuggaccuaggauu

SEQ ID NO: 755557 - RNA, 19 nt, Artificial Sequence
  Description of Artificial Sequence: Synthetic oligonucleotide
  Antisense strand to SEQ ID NO: 755556
aauccuagguccagcacag

SEQ ID NO: 755558 - RNA, 19 nt, Artificial Sequence
  Description of Artificial Sequence: Synthetic oligonucleotide
  Sense strand starting at position 1550 of SEQ ID NO: 586943
gcaugcucccuggagaaug

SEQ ID NO: 755559 - RNA, 19 nt, Artificial Sequence
  Description of Artificial Sequence: Synthetic oligonucleotide
  Antisense strand to SEQ ID NO: 755558
cauucuccagggagcaugc

SEQ ID NO: 755560 - RNA, 19 nt, Artificial Sequence
  Description of Artificial Sequence: Synthetic oligonucleotide
  Sense strand starting at position 1622 of SEQ ID NO: 586943
ucuaguugauaggcagaga

SEQ ID NO: 755561 - RNA, 19 nt, Artificial Sequence
  Description of Artificial Sequence: Synthetic oligonucleotide
  Antisense strand to SEQ ID NO: 755560
ucucugccuaucaacuaga

SEQ ID NO: 755562 - RNA, 19 nt, Artificial Sequence
  Description of Artificial Sequence: Synthetic oligonucleotide
  Sense strand starting at position 1744 of SEQ ID NO: 586943
ccauccugacuuuagguau

SEQ ID NO: 755563 - RNA, 19 nt, Artificial Sequence
  Description of Artificial Sequence: Synthetic oligonucleotide
  Antisense strand to SEQ ID NO: 755562
auaccuaaagucaggaugg

SEQ ID NO: 755564 - RNA, 19 nt, Artificial Sequence
  Description of Artificial Sequence: Synthetic oligonucleotide
  Sense strand starting at position 1747 of SEQ ID NO: 586943
uccugacuuuagguaugaa

SEQ ID NO: 755565 - RNA, 19 nt, Artificial Sequence
  Description of Artificial Sequence: Synthetic oligonucleotide
  Antisense strand to SEQ ID NO: 755564
uucauaccuaaagucagga

SEQ ID NO: 755566 - RNA, 19 nt, Artificial Sequence
  Description of Artificial Sequence: Synthetic oligonucleotide
  Sense strand starting at position 1932 of SEQ ID NO: 586943
aagagaaaucggcgauaaa

SEQ ID NO: 755567 - RNA, 19 nt, Artificial Sequence
  Description of Artificial Sequence: Synthetic oligonucleotide
  Antisense strand to SEQ ID NO: 755566
uuuaucgccgauuucucuu

SEQ ID NO: 755568 - RNA, 19 nt, Artificial Sequence
  Description of Artificial Sequence: Synthetic oligonucleotide
  Sense strand starting at position 1935 of SEQ ID NO: 586943
agaaaucggcgauaaacca

SEQ ID NO: 755569 - RNA, 19 nt, Artificial Sequence
  Description of Artificial Sequence: Synthetic oligonucleotide
  Antisense strand to SEQ ID NO: 755568
ugguuuaucgccgauuucu

SEQ ID NO: 755570 - RNA, 19 nt, Artificial Sequence
  Description of Artificial Sequence: Synthetic oligonucleotide
  Sense strand starting at position 1942 of SEQ ID NO: 586943
ggcgauaaaccagaaugua

SEQ ID NO: 755571 - RNA, 19 nt, Artificial Sequence
  Description of Artificial Sequence: Synthetic oligonucleotide
  Antisense strand to SEQ ID NO: 755570
uacauucugguuuaucgcc

SEQ ID NO: 755572 - RNA, 19 nt, Artificial Sequence
  Description of Artificial Sequence: Synthetic oligonucleotide
  Sense strand starting at position 2462 of SEQ ID NO: 586943
agcaacuaauaguuggaau

SEQ ID NO: 755573 - RNA, 19 nt, Artificial Sequence
  Description of Artificial Sequence: Synthetic oligonucleotide
  Antisense strand to SEQ ID NO: 755572
auuccaacuauuaguugcu

SEQ ID NO: 755574 - RNA, 19 nt, Artificial Sequence
  Description of Artificial Sequence: Synthetic oligonucleotide
  Sense strand starting at position 2613 of SEQ ID NO: 586943
uguguauuucuuggacccu

SEQ ID NO: 755575 - RNA, 19 nt, Artificial Sequence
  Description of Artificial Sequence: Synthetic oligonucleotide
  Antisense strand to SEQ ID NO: 755574
aggguccaagaaauacaca

SEQ ID NO: 755576 - RNA, 19 nt, Artificial Sequence
  Description of Artificial Sequence: Synthetic oligonucleotide
  Sense strand starting at position 2755 of SEQ ID NO: 586943
ucugcauaaagaugaguga

SEQ ID NO: 755577 - RNA, 19 nt, Artificial Sequence
  Description of Artificial Sequence: Synthetic oligonucleotide
  Antisense strand to SEQ ID NO: 755576
ucacucaucuuuaugcaga

SEQ ID NO: 755578 - RNA, 19 nt, Artificial Sequence
  Description of Artificial Sequence: Synthetic oligonucleotide
  Sense strand starting at position 2758 of SEQ ID NO: 586943
gcauaaagaugagugauua

SEQ ID NO: 755579 - RNA, 19 nt, Artificial Sequence
  Description of Artificial Sequence: Synthetic oligonucleotide
  Antisense strand to SEQ ID NO: 755578
uaaucacucaucuuuaugc

SEQ ID NO: 755580 - RNA, 19 nt, Artificial Sequence
  Description of Artificial Sequence: Synthetic oligonucleotide
  Sense strand starting at position 2840 of SEQ ID NO: 586943
guuggagacuguuccaaca

SEQ ID NO: 755581 - RNA, 19 nt, Artificial Sequence
  Description of Artificial Sequence: Synthetic oligonucleotide
  Antisense strand to SEQ ID NO: 755580
uguuggaacagucuccaac

SEQ ID NO: 755582 - RNA, 19 nt, Artificial Sequence
  Description of Artificial Sequence: Synthetic oligonucleotide
  Sense strand starting at position 2857 of SEQ ID NO: 586943
cagugauauggaggaugua

SEQ ID NO: 755583 - RNA, 19 nt, Artificial Sequence
  Description of Artificial Sequence: Synthetic oligonucleotide
  Antisense strand to SEQ ID NO: 755582
uacauccuccauaucacug

SEQ ID NO: 755584 - RNA, 19 nt, Artificial Sequence
  Description of Artificial Sequence: Synthetic oligonucleotide
  Sense strand starting at position 2925 of SEQ ID NO: 586943
guaaauugaugauccagua

SEQ ID NO: 755585 - RNA, 19 nt, Artificial Sequence
  Description of Artificial Sequence: Synthetic oligonucleotide
  Antisense strand to SEQ ID NO: 755584
uacuggaucaucaauuuac

SEQ ID NO: 755586 - RNA, 19 nt, Artificial Sequence
  Description of Artificial Sequence: Synthetic oligonucleotide
  Sense strand starting at position 2937 of SEQ ID NO: 586943
uccaguaaaccucaaguua

SEQ ID NO: 755587 - RNA, 19 nt, Artificial Sequence
  Description of Artificial Sequence: Synthetic oligonucleotide
  Antisense strand to SEQ ID NO: 755586
uaacuugagguuuacugga

SEQ ID NO: 755588 - RNA, 19 nt, Artificial Sequence
  Description of Artificial Sequence: Synthetic oligonucleotide
  Sense strand starting at position 2959 of SEQ ID NO: 586943
acuacuacuugucuuuaga

SEQ ID NO: 755589 - RNA, 19 nt, Artificial Sequence
  Description of Artificial Sequence: Synthetic oligonucleotide
  Antisense strand to SEQ ID NO: 755588
ucuaaagacaaguaguagu

SEQ ID NO: 755590 - RNA, 19 nt, Artificial Sequence
  Description of Artificial Sequence: Synthetic oligonucleotide
  Sense strand starting at position 2962 of SEQ ID NO: 586943
acuacuugucuuuagauau

SEQ ID NO: 755591 - RNA, 19 nt, Artificial Sequence
  Description of Artificial Sequence: Synthetic oligonucleotide
  Antisense strand to SEQ ID NO: 755590
auaucuaaagacaaguagu

SEQ ID NO: 755592 - RNA, 19 nt, Artificial Sequence
  Description of Artificial Sequence: Synthetic oligonucleotide
  Sense strand starting at position 3063 of SEQ ID NO: 586943
guuagcauuuaggucuuau

SEQ ID NO: 755593 - RNA, 19 nt, Artificial Sequence
  Description of Artificial Sequence: Synthetic oligonucleotide
  Antisense strand to SEQ ID NO: 755592
auaagaccuaaaugcuaac

SEQ ID NO: 755594 - RNA, 19 nt, Artificial Sequence
  Description of Artificial Sequence: Synthetic oligonucleotide
  Sense strand starting at position 3067 of SEQ ID NO: 586943
gcauuuaggucuuauuucu

SEQ ID NO: 755595 - RNA, 19 nt, Artificial Sequence
  Description of Artificial Sequence: Synthetic oligonucleotide
  Antisense strand to SEQ ID NO: 755594
agaaauaagaccuaaaugc

SEQ ID NO: 755596 - RNA, 19 nt, Artificial Sequence
  Description of Artificial Sequence: Synthetic oligonucleotide
  Sense strand starting at position 3607 of SEQ ID NO: 586943
aggcauuugugugacauuu

SEQ ID NO: 755597 - RNA, 19 nt, Artificial Sequence
  Description of Artificial Sequence: Synthetic oligonucleotide
  Antisense strand to SEQ ID NO: 755596
aaaugucacacaaaugccu

SEQ ID NO: 755598 - RNA, 19 nt, Artificial Sequence
  Description of Artificial Sequence: Synthetic oligonucleotide
  Sense strand starting at position 3609 of SEQ ID NO: 586943
gcauuugugugacauuuaa

SEQ ID NO: 755599 - RNA, 19 nt, Artificial Sequence
  Description of Artificial Sequence: Synthetic oligonucleotide
  Antisense strand to SEQ ID NO: 755598
uuaaaugucacacaaaugc

SEQ ID NO: 755600 - RNA, 19 nt, Artificial Sequence
  Description of Artificial Sequence: Synthetic oligonucleotide
  Sense strand starting at position 62 of SEQ ID NO: 586944
ggguacaguccaggaagaa

SEQ ID NO: 755601 - RNA, 19 nt, Artificial Sequence
  Description of Artificial Sequence: Synthetic oligonucleotide
  Antisense strand to SEQ ID NO: 755600
uucuuccuggacuguaccc

SEQ ID NO: 755602 - RNA, 19 nt, Artificial Sequence
  Description of Artificial Sequence: Synthetic oligonucleotide
  Sense strand starting at position 74 of SEQ ID NO: 586944
ggaagaaugucagcagcaa

SEQ ID NO: 755603 - RNA, 19 nt, Artificial Sequence
  Description of Artificial Sequence: Synthetic oligonucleotide
  Antisense strand to SEQ ID NO: 755602
uugcugcugacauucuucc

SEQ ID NO: 755604 - RNA, 19 nt, Artificial Sequence
  Description of Artificial Sequence: Synthetic oligonucleotide
  Sense strand starting at position 134 of SEQ ID NO: 586944
ccuggcacucuggaguauu

SEQ ID NO: 755605 - RNA, 19 nt, Artificial Sequence
  Description of Artificial Sequence: Synthetic oligonucleotide
  Antisense strand to SEQ ID NO: 755604
aauacuccagagugccagg

SEQ ID NO: 755606 - RNA, 19 nt, Artificial Sequence
  Description of Artificial Sequence: Synthetic oligonucleotide
  Sense strand starting at position 281 of SEQ ID NO: 586944
cuacaaacgugauuaaccu

SEQ ID NO: 755607 - RNA, 19 nt, Artificial Sequence
  Description of Artificial Sequence: Synthetic oligonucleotide
  Antisense strand to SEQ ID NO: 755606
agguuaaucacguuuguag

SEQ ID NO: 755608 - RNA, 19 nt, Artificial Sequence
  Description of Artificial Sequence: Synthetic oligonucleotide
  Sense strand starting at position 1052 of SEQ ID NO: 586944
gaagauaucuugguuuccu

SEQ ID NO: 755609 - RNA, 19 nt, Artificial Sequence
  Description of Artificial Sequence: Synthetic oligonucleotide
  Antisense strand to SEQ ID NO: 755608
aggaaaccaagauaucuuc

SEQ ID NO: 755610 - RNA, 19 nt, Artificial Sequence
  Description of Artificial Sequence: Synthetic oligonucleotide
  Sense strand starting at position 1382 of SEQ ID NO: 586944
gcucucuauccagaaagac

SEQ ID NO: 755611 - RNA, 19 nt, Artificial Sequence
  Description of Artificial Sequence: Synthetic oligonucleotide
  Antisense strand to SEQ ID NO: 755610
gucuuucuggauagagagc

SEQ ID NO: 755612 - RNA, 19 nt, Artificial Sequence
  Description of Artificial Sequence: Synthetic oligonucleotide
  Sense strand starting at position 1460 of SEQ ID NO: 586944
gcaguuauacccucgcugu

SEQ ID NO: 755613 - RNA, 19 nt, Artificial Sequence
  Description of Artificial Sequence: Synthetic oligonucleotide
  Antisense strand to SEQ ID NO: 755612
acagcgaggguauaacugc

SEQ ID NO: 755614 - RNA, 19 nt, Artificial Sequence
  Description of Artificial Sequence: Synthetic oligonucleotide
  Sense strand starting at position 1507 of SEQ ID NO: 586944
cugcuuuaggugggauuga

SEQ ID NO: 755615 - RNA, 19 nt, Artificial Sequence
  Description of Artificial Sequence: Synthetic oligonucleotide
  Antisense strand to SEQ ID NO: 755614
ucaaucccaccuaaagcag

SEQ ID NO: 755616 - RNA, 19 nt, Artificial Sequence
  Description of Artificial Sequence: Synthetic oligonucleotide
  Sense strand starting at position 1518 of SEQ ID NO: 586944
gggauugaugagcaucguu

SEQ ID NO: 755617 - RNA, 19 nt, Artificial Sequence
  Description of Artificial Sequence: Synthetic oligonucleotide
  Antisense strand to SEQ ID NO: 755616
aacgaugcucaucaauccc

SEQ ID NO: 755618 - RNA, 19 nt, Artificial Sequence
  Description of Artificial Sequence: Synthetic oligonucleotide
  Sense strand starting at position 1589 of SEQ ID NO: 586944
gccuccucucggcuugauu

SEQ ID NO: 755619 - RNA, 19 nt, Artificial Sequence
  Description of Artificial Sequence: Synthetic oligonucleotide
  Antisense strand to SEQ ID NO: 755618
aaucaagccgagaggaggc

SEQ ID NO: 755620 - RNA, 19 nt, Artificial Sequence
  Description of Artificial Sequence: Synthetic oligonucleotide
  Sense strand starting at position 1606 of SEQ ID NO: 586944
uuaguaauagaguaacuuc

SEQ ID NO: 755621 - RNA, 19 nt, Artificial Sequence
  Description of Artificial Sequence: Synthetic oligonucleotide
  Antisense strand to SEQ ID NO: 755620
gaaguuacucuauuacuaa

SEQ ID NO: 755622 - RNA, 19 nt, Artificial Sequence
  Description of Artificial Sequence: Synthetic oligonucleotide
  Sense strand starting at position 1680 of SEQ ID NO: 586944
cugcucggccuugaagaaa

SEQ ID NO: 755623 - RNA, 19 nt, Artificial Sequence
  Description of Artificial Sequence: Synthetic oligonucleotide
  Antisense strand to SEQ ID NO: 755622
uuucuucaaggccgagcag

SEQ ID NO: 755624 - RNA, 19 nt, Artificial Sequence
  Description of Artificial Sequence: Synthetic oligonucleotide
  Sense strand starting at position 2200 of SEQ ID NO: 586944
gcugauuccgcagaaccua

SEQ ID NO: 755625 - RNA, 19 nt, Artificial Sequence
  Description of Artificial Sequence: Synthetic oligonucleotide
  Antisense strand to SEQ ID NO: 755624
uagguucugcggaaucagc

SEQ ID NO: 755626 - RNA, 19 nt, Artificial Sequence
  Description of Artificial Sequence: Synthetic oligonucleotide
  Sense strand starting at position 2268 of SEQ ID NO: 586944
agugaugaccaucaucgua

SEQ ID NO: 755627 - RNA, 19 nt, Artificial Sequence
  Description of Artificial Sequence: Synthetic oligonucleotide
  Antisense strand to SEQ ID NO: 755626
uacgaugauggucaucacu

SEQ ID NO: 755628 - RNA, 19 nt, Artificial Sequence
  Description of Artificial Sequence: Synthetic oligonucleotide
  Sense strand starting at position 2270 of SEQ ID NO: 586944
ugaugaccaucaucguaaa

SEQ ID NO: 755629 - RNA, 19 nt, Artificial Sequence
  Description of Artificial Sequence: Synthetic oligonucleotide
  Antisense strand to SEQ ID NO: 755628
uuuacgaugauggucauca

SEQ ID NO: 755630 - RNA, 19 nt, Artificial Sequence
  Description of Artificial Sequence: Synthetic oligonucleotide
  Sense strand starting at position 2318 of SEQ ID NO: 586944
auuguuucggaucauagga

SEQ ID NO: 755631 - RNA, 19 nt, Artificial Sequence
  Description of Artificial Sequence: Synthetic oligonucleotide
  Antisense strand to SEQ ID NO: 755630
uccuaugauccgaaacaau

SEQ ID NO: 755632 - RNA, 19 nt, Artificial Sequence
  Description of Artificial Sequence: Synthetic oligonucleotide
  Sense strand starting at position 2539 of SEQ ID NO: 586944
guaugagcucgugagaaag

SEQ ID NO: 755633 - RNA, 19 nt, Artificial Sequence
  Description of Artificial Sequence: Synthetic oligonucleotide
  Antisense strand to SEQ ID NO: 755632
cuuucucacgagcucauac

SEQ ID NO: 755634 - RNA, 19 nt, Artificial Sequence
  Description of Artificial Sequence: Synthetic oligonucleotide
  Sense strand starting at position 2611 of SEQ ID NO: 586944
gucucaugcccagauguca

SEQ ID NO: 755635 - RNA, 19 nt, Artificial Sequence
  Description of Artificial Sequence: Synthetic oligonucleotide
  Antisense strand to SEQ ID NO: 755634
ugacaucugggcaugagac

SEQ ID NO: 755636 - RNA, 19 nt, Artificial Sequence
  Description of Artificial Sequence: Synthetic oligonucleotide
  Sense strand starting at position 2632 of SEQ ID NO: 586944
ggucucucuggcuaaagua

SEQ ID NO: 755637 - RNA, 19 nt, Artificial Sequence
  Description of Artificial Sequence: Synthetic oligonucleotide
  Antisense strand to SEQ ID NO: 755636
uacuuuagccagagagacc

SEQ ID NO: 755638 - RNA, 19 nt, Artificial Sequence
  Description of Artificial Sequence: Synthetic oligonucleotide
  Sense strand starting at position 2644 of SEQ ID NO: 586944
uaaaguaggugcucaaaug

SEQ ID NO: 755639 - RNA, 19 nt, Artificial Sequence
  Description of Artificial Sequence: Synthetic oligonucleotide
  Antisense strand to SEQ ID NO: 755638
cauuugagcaccuacuuua

SEQ ID NO: 755640 - RNA, 19 nt, Artificial Sequence
  Description of Artificial Sequence: Synthetic oligonucleotide
  Sense strand starting at position 2776 of SEQ ID NO: 586944
gcaguugaacucuggaauu

SEQ ID NO: 755641 - RNA, 19 nt, Artificial Sequence
  Description of Artificial Sequence: Synthetic oligonucleotide
  Antisense strand to SEQ ID NO: 755640
aauuccagaguucaacugc

SEQ ID NO: 755642 - RNA, 19 nt, Artificial Sequence
  Description of Artificial Sequence: Synthetic oligonucleotide
  Sense strand starting at position 2799 of SEQ ID NO: 586944
cuguuuacagauuggaaga

SEQ ID NO: 755643 - RNA, 19 nt, Artificial Sequence
  Description of Artificial Sequence: Synthetic oligonucleotide
  Antisense strand to SEQ ID NO: 755642
ucuuccaaucuguaaacag

SEQ ID NO: 755644 - RNA, 19 nt, Artificial Sequence
  Description of Artificial Sequence: Synthetic oligonucleotide
  Sense strand starting at position 2886 of SEQ ID NO: 586944
cccaaacauucuguaagua

SEQ ID NO: 755645 - RNA, 19 nt, Artificial Sequence
  Description of Artificial Sequence: Synthetic oligonucleotide
  Antisense strand to SEQ ID NO: 755644
uacuuacagaauguuuggg

SEQ ID NO: 755646 - RNA, 19 nt, Artificial Sequence
  Description of Artificial Sequence: Synthetic oligonucleotide
  Sense strand starting at position 2887 of SEQ ID NO: 586944
ccaaacauucuguaaguag

SEQ ID NO: 755647 - RNA, 19 nt, Artificial Sequence
  Description of Artificial Sequence: Synthetic oligonucleotide
  Antisense strand to SEQ ID NO: 755646
cuacuuacagaauguuugg

SEQ ID NO: 755648 - RNA, 19 nt, Artificial Sequence
  Description of Artificial Sequence: Synthetic oligonucleotide
  Sense strand starting at position 2925 of SEQ ID NO: 586944
cuuaccuugaucugggaga

SEQ ID NO: 755649 - RNA, 19 nt, Artificial Sequence
  Description of Artificial Sequence: Synthetic oligonucleotide
  Antisense strand to SEQ ID NO: 755648
ucucccagaucaagguaag

SEQ ID NO: 755650 - RNA, 19 nt, Artificial Sequence
  Description of Artificial Sequence: Synthetic oligonucleotide
  Sense strand starting at position 2949 of SEQ ID NO: 586944
agcagagucaaaggguuau

SEQ ID NO: 755651 - RNA, 19 nt, Artificial Sequence
  Description of Artificial Sequence: Synthetic oligonucleotide
  Antisense strand to SEQ ID NO: 755650
auaacccuuugacucugcu

SEQ ID NO: 755652 - RNA, 19 nt, Artificial Sequence
  Description of Artificial Sequence: Synthetic oligonucleotide
  Sense strand starting at position 3010 of SEQ ID NO: 586944
uucgaagaucugcaacuau

SEQ ID NO: 755653 - RNA, 19 nt, Artificial Sequence
  Description of Artificial Sequence: Synthetic oligonucleotide
  Antisense strand to SEQ ID NO: 755652
auaguugcagaucuucgaa

SEQ ID NO: 755654 - RNA, 19 nt, Artificial Sequence
  Description of Artificial Sequence: Synthetic oligonucleotide
  Sense strand starting at position 3319 of SEQ ID NO: 586944
auuauaagcagcuguggaa

SEQ ID NO: 755655 - RNA, 19 nt, Artificial Sequence
  Description of Artificial Sequence: Synthetic oligonucleotide
  Antisense strand to SEQ ID NO: 755654
uuccacagcugcuuauaau

SEQ ID NO: 755656 - RNA, 19 nt, Artificial Sequence
  Description of Artificial Sequence: Synthetic oligonucleotide
  Sense strand starting at position 3338 of SEQ ID NO: 586944
gucaacauccacuguuaaa

SEQ ID NO: 755657 - RNA, 19 nt, Artificial Sequence
  Description of Artificial Sequence: Synthetic oligonucleotide
  Antisense strand to SEQ ID NO: 755656
uuuaacaguggauguugac

SEQ ID NO: 755658 - RNA, 19 nt, Artificial Sequence
  Description of Artificial Sequence: Synthetic oligonucleotide
  Sense strand starting at position 3367 of SEQ ID NO: 586944
auuccaaauuccucgguga

SEQ ID NO: 755659 - RNA, 19 nt, Artificial Sequence
  Description of Artificial Sequence: Synthetic oligonucleotide
  Antisense strand to SEQ ID NO: 755658
ucaccgaggaauuuggaau

SEQ ID NO: 755660 - RNA, 19 nt, Artificial Sequence
  Description of Artificial Sequence: Synthetic oligonucleotide
  Sense strand starting at position 3369 of SEQ ID NO: 586944
uccaaauuccucggugaga

SEQ ID NO: 755661 - RNA, 19 nt, Artificial Sequence
  Description of Artificial Sequence: Synthetic oligonucleotide
  Antisense strand to SEQ ID NO: 755660
ucucaccgaggaauuugga

SEQ ID NO: 755662 - RNA, 19 nt, Artificial Sequence
  Description of Artificial Sequence: Synthetic oligonucleotide
  Sense strand starting at position 3371 of SEQ ID NO: 586944
caaauuccucggugagaua

SEQ ID NO: 755663 - RNA, 19 nt, Artificial Sequence
  Description of Artificial Sequence: Synthetic oligonucleotide
  Antisense strand to SEQ ID NO: 755662
uaucucaccgaggaauuug

SEQ ID NO: 755664 - RNA, 19 nt, Artificial Sequence
  Description of Artificial Sequence: Synthetic oligonucleotide
  Sense strand starting at position 3372 of SEQ ID NO: 586944
aaauuccucggugagauac

SEQ ID NO: 755665 - RNA, 19 nt, Artificial Sequence
  Description of Artificial Sequence: Synthetic oligonucleotide
  Antisense strand to SEQ ID NO: 755664
guaucucaccgaggaauuu

SEQ ID NO: 755666 - RNA, 19 nt, Artificial Sequence
  Description of Artificial Sequence: Synthetic oligonucleotide
  Sense strand starting at position 3401 of SEQ ID NO: 586944
caaagauuccagugagcaa

SEQ ID NO: 755667 - RNA, 19 nt, Artificial Sequence
  Description of Artificial Sequence: Synthetic oligonucleotide
  Antisense strand to SEQ ID NO: 755666
uugcucacuggaaucuuug

SEQ ID NO: 755668 - RNA, 19 nt, Artificial Sequence
  Description of Artificial Sequence: Synthetic oligonucleotide
  Sense strand starting at position 3486 of SEQ ID NO: 586944
guacaauaagaccaguagu

SEQ ID NO: 755669 - RNA, 19 nt, Artificial Sequence
  Description of Artificial Sequence: Synthetic oligonucleotide
  Antisense strand to SEQ ID NO: 755668
acuacuggucuuauuguac

SEQ ID NO: 755670 - RNA, 19 nt, Artificial Sequence
  Description of Artificial Sequence: Synthetic oligonucleotide
  Sense strand starting at position 3588 of SEQ ID NO: 586944
gcuuguaugagguaucuua

SEQ ID NO: 755671 - RNA, 19 nt, Artificial Sequence
  Description of Artificial Sequence: Synthetic oligonucleotide
  Antisense strand to SEQ ID NO: 755670
uaagauaccucauacaagc

SEQ ID NO: 755672 - RNA, 19 nt, Artificial Sequence
  Description of Artificial Sequence: Synthetic oligonucleotide
  Sense strand starting at position 3687 of SEQ ID NO: 586944
uuguucgguggguauagaa

SEQ ID NO: 755673 - RNA, 19 nt, Artificial Sequence
  Description of Artificial Sequence: Synthetic oligonucleotide
  Antisense strand to SEQ ID NO: 755672
uucuauacccaccgaacaa

SEQ ID NO: 755674 - RNA, 19 nt, Artificial Sequence
  Description of Artificial Sequence: Synthetic oligonucleotide
  Sense strand starting at position 3967 of SEQ ID NO: 586944
caaugaagucugcagcagu

SEQ ID NO: 755675 - RNA, 19 nt, Artificial Sequence
  Description of Artificial Sequence: Synthetic oligonucleotide
  Antisense strand to SEQ ID NO: 755674
acugcugcagacuucauug

SEQ ID NO: 755676 - RNA, 19 nt, Artificial Sequence
  Description of Artificial Sequence: Synthetic oligonucleotide
  Sense strand starting at position 3970 of SEQ ID NO: 586944
ugaagucugcagcaguuaa

SEQ ID NO: 755677 - RNA, 19 nt, Artificial Sequence
  Description of Artificial Sequence: Synthetic oligonucleotide
  Antisense strand to SEQ ID NO: 755676
uuaacugcugcagacuuca

SEQ ID NO: 755678 - RNA, 19 nt, Artificial Sequence
  Description of Artificial Sequence: Synthetic oligonucleotide
  Sense strand starting at position 3983 of SEQ ID NO: 586944
aguuaaaugucuguugaug

SEQ ID NO: 755679 - RNA, 19 nt, Artificial Sequence
  Description of Artificial Sequence: Synthetic oligonucleotide
  Antisense strand to SEQ ID NO: 755678
caucaacagacauuuaacu

SEQ ID NO: 755680 - RNA, 19 nt, Artificial Sequence
  Description of Artificial Sequence: Synthetic oligonucleotide
  Sense strand starting at position 312 of SEQ ID NO: 586945
ccaccuacucuagggaauu

SEQ ID NO: 755681 - RNA, 19 nt, Artificial Sequence
  Description of Artificial Sequence: Synthetic oligonucleotide
  Antisense strand to SEQ ID NO: 755680
aauucccuagaguaggugg

SEQ ID NO: 755682 - RNA, 19 nt, Artificial Sequence
  Description of Artificial Sequence: Synthetic oligonucleotide
  Sense strand starting at position 400 of SEQ ID NO: 586945
gcuugaaaggguuaaggca

SEQ ID NO: 755683 - RNA, 19 nt, Artificial Sequence
  Description of Artificial Sequence: Synthetic oligonucleotide
  Antisense strand to SEQ ID NO: 755682
ugccuuaacccuuucaagc

SEQ ID NO: 755684 - RNA, 19 nt, Artificial Sequence
  Description of Artificial Sequence: Synthetic oligonucleotide
  Sense strand starting at position 435 of SEQ ID NO: 586945
ccuagugaugcucagagaa

SEQ ID NO: 755685 - RNA, 19 nt, Artificial Sequence
  Description of Artificial Sequence: Synthetic oligonucleotide
  Antisense strand to SEQ ID NO: 755684
uucucugagcaucacuagg

SEQ ID NO: 755686 - RNA, 19 nt, Artificial Sequence
  Description of Artificial Sequence: Synthetic oligonucleotide
  Sense strand starting at position 531 of SEQ ID NO: 586945
cagaguacuuuccuaagga

SEQ ID NO: 755687 - RNA, 19 nt, Artificial Sequence
  Description of Artificial Sequence: Synthetic oligonucleotide
  Antisense strand to SEQ ID NO: 755686
uccuuaggaaaguacucug

SEQ ID NO: 755688 - RNA, 19 nt, Artificial Sequence
  Description of Artificial Sequence: Synthetic oligonucleotide
  Sense strand starting at position 704 of SEQ ID NO: 586945
ugauuaguuugcuugaaua

SEQ ID NO: 755689 - RNA, 19 nt, Artificial Sequence
  Description of Artificial Sequence: Synthetic oligonucleotide
  Antisense strand to SEQ ID NO: 755688
uauucaagcaaacuaauca

SEQ ID NO: 755690 - RNA, 19 nt, Artificial Sequence
  Description of Artificial Sequence: Synthetic oligonucleotide
  Sense strand starting at position 753 of SEQ ID NO: 586945
ccucuugaggguuaucaca

SEQ ID NO: 755691 - RNA, 19 nt, Artificial Sequence
  Description of Artificial Sequence: Synthetic oligonucleotide
  Antisense strand to SEQ ID NO: 755690
ugugauaacccucaagagg

SEQ ID NO: 755692 - RNA, 19 nt, Artificial Sequence
  Description of Artificial Sequence: Synthetic oligonucleotide
  Sense strand starting at position 755 of SEQ ID NO: 586945
ucuugaggguuaucacaga

SEQ ID NO: 755693 - RNA, 19 nt, Artificial Sequence
  Description of Artificial Sequence: Synthetic oligonucleotide
  Antisense strand to SEQ ID NO: 755692
ucugugauaacccucaaga

SEQ ID NO: 755694 - RNA, 19 nt, Artificial Sequence
  Description of Artificial Sequence: Synthetic oligonucleotide
  Sense strand starting at position 839 of SEQ ID NO: 586945
uaagaaguuguauaggcuu

SEQ ID NO: 755695 - RNA, 19 nt, Artificial Sequence
  Description of Artificial Sequence: Synthetic oligonucleotide
  Antisense strand to SEQ ID NO: 755694
aagccuauacaacuucuua

SEQ ID NO: 755696 - RNA, 19 nt, Artificial Sequence
  Description of Artificial Sequence: Synthetic oligonucleotide
  Sense strand starting at position 841 of SEQ ID NO: 586945
agaaguuguauaggcuuga

SEQ ID NO: 755697 - RNA, 19 nt, Artificial Sequence
  Description of Artificial Sequence: Synthetic oligonucleotide
  Antisense strand to SEQ ID NO: 755696
ucaagccuauacaacuucu

SEQ ID NO: 755698 - RNA, 19 nt, Artificial Sequence
  Description of Artificial Sequence: Synthetic oligonucleotide
  Sense strand starting at position 842 of SEQ ID NO: 586945
gaaguuguauaggcuugau

SEQ ID NO: 755699 - RNA, 19 nt, Artificial Sequence
  Description of Artificial Sequence: Synthetic oligonucleotide
  Antisense strand to SEQ ID NO: 755698
aucaagccuauacaacuuc

SEQ ID NO: 755700 - RNA, 19 nt, Artificial Sequence
  Description of Artificial Sequence: Synthetic oligonucleotide
  Sense strand starting at position 845 of SEQ ID NO: 586945
guuguauaggcuugauuag

SEQ ID NO: 755701 - RNA, 19 nt, Artificial Sequence
  Description of Artificial Sequence: Synthetic oligonucleotide
  Antisense strand to SEQ ID NO: 755700
cuaaucaagccuauacaac

SEQ ID NO: 755702 - RNA, 19 nt, Artificial Sequence
  Description of Artificial Sequence: Synthetic oligonucleotide
  Sense strand starting at position 846 of SEQ ID NO: 586945
uuguauaggcuugauuaga

SEQ ID NO: 755703 - RNA, 19 nt, Artificial Sequence
  Description of Artificial Sequence: Synthetic oligonucleotide
  Antisense strand to SEQ ID NO: 755702
ucuaaucaagccuauacaa

SEQ ID NO: 755704 - RNA, 19 nt, Artificial Sequence
  Description of Artificial Sequence: Synthetic oligonucleotide
  Sense strand starting at position 921 of SEQ ID NO: 586945
ugggacuaaauaugguauu

SEQ ID NO: 755705 - RNA, 19 nt, Artificial Sequence
  Description of Artificial Sequence: Synthetic oligonucleotide
  Antisense strand to SEQ ID NO: 755704
aauaccauauuuaguccca

SEQ ID NO: 755706 - RNA, 19 nt, Artificial Sequence
  Description of Artificial Sequence: Synthetic oligonucleotide
  Sense strand starting at position 934 of SEQ ID NO: 586945
gguauucugccagagaagu

SEQ ID NO: 755707 - RNA, 19 nt, Artificial Sequence
  Description of Artificial Sequence: Synthetic oligonucleotide
  Antisense strand to SEQ ID NO: 755706
acuucucuggcagaauacc

SEQ ID NO: 755708 - RNA, 19 nt, Artificial Sequence
  Description of Artificial Sequence: Synthetic oligonucleotide
  Sense strand starting at position 973 of SEQ ID NO: 586945
cugaaaugguguccagguu

SEQ ID NO: 755709 - RNA, 19 nt, Artificial Sequence
  Description of Artificial Sequence: Synthetic oligonucleotide
  Antisense strand to SEQ ID NO: 755708
aaccuggacaccauuucag

SEQ ID NO: 755710 - RNA, 19 nt, Artificial Sequence
  Description of Artificial Sequence: Synthetic oligonucleotide
  Sense strand starting at position 974 of SEQ ID NO: 586945
ugaaaugguguccagguuu

SEQ ID NO: 755711 - RNA, 19 nt, Artificial Sequence
  Description of Artificial Sequence: Synthetic oligonucleotide
  Antisense strand to SEQ ID NO: 755710
aaaccuggacaccauuuca

SEQ ID NO: 755712 - RNA, 19 nt, Artificial Sequence
  Description of Artificial Sequence: Synthetic oligonucleotide
  Sense strand starting at position 1035 of SEQ ID NO: 586945
uuuccucuggguuagugaa

SEQ ID NO: 755713 - RNA, 19 nt, Artificial Sequence
  Description of Artificial Sequence: Synthetic oligonucleotide
  Antisense strand to SEQ ID NO: 755712
uucacuaacccagaggaaa

SEQ ID NO: 755714 - RNA, 19 nt, Artificial Sequence
  Description of Artificial Sequence: Synthetic oligonucleotide
  Sense strand starting at position 1042 of SEQ ID NO: 586945
uggguuagugaaugauuca

SEQ ID NO: 755715 - RNA, 19 nt, Artificial Sequence
  Description of Artificial Sequence: Synthetic oligonucleotide
  Antisense strand to SEQ ID NO: 755714
ugaaucauucacuaaccca

SEQ ID NO: 755716 - RNA, 19 nt, Artificial Sequence
  Description of Artificial Sequence: Synthetic oligonucleotide
  Sense strand starting at position 1169 of SEQ ID NO: 586945
aucuaaguguugucagaug

SEQ ID NO: 755717 - RNA, 19 nt, Artificial Sequence
  Description of Artificial Sequence: Synthetic oligonucleotide
  Antisense strand to SEQ ID NO: 755716
caucugacaacacuuagau

SEQ ID NO: 755718 - RNA, 19 nt, Artificial Sequence
  Description of Artificial Sequence: Synthetic oligonucleotide
  Sense strand starting at position 1174 of SEQ ID NO: 586945
aguguugucagauggagag

SEQ ID NO: 755719 - RNA, 19 nt, Artificial Sequence
  Description of Artificial Sequence: Synthetic oligonucleotide
  Antisense strand to SEQ ID NO: 755718
cucuccaucugacaacacu

SEQ ID NO: 755720 - RNA, 19 nt, Artificial Sequence
  Description of Artificial Sequence: Synthetic oligonucleotide
  Sense strand starting at position 1344 of SEQ ID NO: 586945
acguaauaggaucaggcuu

SEQ ID NO: 755721 - RNA, 19 nt, Artificial Sequence
  Description of Artificial Sequence: Synthetic oligonucleotide
  Antisense strand to SEQ ID NO: 755720
aagccugauccuauuacgu

SEQ ID NO: 755722 - RNA, 19 nt, Artificial Sequence
  Description of Artificial Sequence: Synthetic oligonucleotide
  Sense strand starting at position 2315 of SEQ ID NO: 586945
gacacauacuuugcuggau

SEQ ID NO: 755723 - RNA, 19 nt, Artificial Sequence
  Description of Artificial Sequence: Synthetic oligonucleotide
  Antisense strand to SEQ ID NO: 755722
auccagcaaaguauguguc

SEQ ID NO: 755724 - RNA, 19 nt, Artificial Sequence
  Description of Artificial Sequence: Synthetic oligonucleotide
  Sense strand starting at position 2316 of SEQ ID NO: 586945
acacauacuuugcuggaua

SEQ ID NO: 755725 - RNA, 19 nt, Artificial Sequence
  Description of Artificial Sequence: Synthetic oligonucleotide
  Antisense strand to SEQ ID NO: 755724
uauccagcaaaguaugugu

SEQ ID NO: 755726 - RNA, 19 nt, Artificial Sequence
  Description of Artificial Sequence: Synthetic oligonucleotide
  Sense strand starting at position 2410 of SEQ ID NO: 586945
ugacuuagaaggcgagauu

SEQ ID NO: 755727 - RNA, 19 nt, Artificial Sequence
  Description of Artificial Sequence: Synthetic oligonucleotide
  Antisense strand to SEQ ID NO: 755726
aaucucgccuucuaaguca

SEQ ID NO: 755728 - RNA, 19 nt, Artificial Sequence
  Description of Artificial Sequence: Synthetic oligonucleotide
  Sense strand starting at position 2422 of SEQ ID NO: 586945
cgagauugcaaauauugcu

SEQ ID NO: 755729 - RNA, 19 nt, Artificial Sequence
  Description of Artificial Sequence: Synthetic oligonucleotide
  Antisense strand to SEQ ID NO: 755728
agcaauauuugcaaucucg

SEQ ID NO: 755730 - RNA, 19 nt, Artificial Sequence
  Description of Artificial Sequence: Synthetic oligonucleotide
  Sense strand starting at position 2493 of SEQ ID NO: 586945
gaauguagugcagaacgua

SEQ ID NO: 755731 - RNA, 19 nt, Artificial Sequence
  Description of Artificial Sequence: Synthetic oligonucleotide
  Antisense strand to SEQ ID NO: 755730
uacguucugcacuacauuc

SEQ ID NO: 755732 - RNA, 19 nt, Artificial Sequence
  Description of Artificial Sequence: Synthetic oligonucleotide
  Sense strand starting at position 2705 of SEQ ID NO: 586945
uuuauaagacaguggugau

SEQ ID NO: 755733 - RNA, 19 nt, Artificial Sequence
  Description of Artificial Sequence: Synthetic oligonucleotide
  Antisense strand to SEQ ID NO: 755732
aucaccacugucuuauaaa

SEQ ID NO: 755734 - RNA, 19 nt, Artificial Sequence
  Description of Artificial Sequence: Synthetic oligonucleotide
  Sense strand starting at position 2706 of SEQ ID NO: 586945
uuauaagacaguggugauc

SEQ ID NO: 755735 - RNA, 19 nt, Artificial Sequence
  Description of Artificial Sequence: Synthetic oligonucleotide
  Antisense strand to SEQ ID NO: 755734
gaucaccacugucuuauaa

SEQ ID NO: 755736 - RNA, 19 nt, Artificial Sequence
  Description of Artificial Sequence: Synthetic oligonucleotide
  Sense strand starting at position 2749 of SEQ ID NO: 586945
guagguuguggauguaaua

SEQ ID NO: 755737 - RNA, 19 nt, Artificial Sequence
  Description of Artificial Sequence: Synthetic oligonucleotide
  Antisense strand to SEQ ID NO: 755736
uauuacauccacaaccuac

SEQ ID NO: 755738 - RNA, 19 nt, Artificial Sequence
  Description of Artificial Sequence: Synthetic oligonucleotide
  Sense strand starting at position 2968 of SEQ ID NO: 586945
gacuguucccagggcucaa

SEQ ID NO: 755739 - RNA, 19 nt, Artificial Sequence
  Description of Artificial Sequence: Synthetic oligonucleotide
  Antisense strand to SEQ ID NO: 755738
uugagcccugggaacaguc

SEQ ID NO: 755740 - RNA, 19 nt, Artificial Sequence
  Description of Artificial Sequence: Synthetic oligonucleotide
  Sense strand starting at position 3356 of SEQ ID NO: 586945
uugaucuugagcuauggga

SEQ ID NO: 755741 - RNA, 19 nt, Artificial Sequence
  Description of Artificial Sequence: Synthetic oligonucleotide
  Antisense strand to SEQ ID NO: 755740
ucccauagcucaagaucaa

SEQ ID NO: 755742 - RNA, 19 nt, Artificial Sequence
  Description of Artificial Sequence: Synthetic oligonucleotide
  Sense strand starting at position 3358 of SEQ ID NO: 586945
gaucuugagcuaugggauu

SEQ ID NO: 755743 - RNA, 19 nt, Artificial Sequence
  Description of Artificial Sequence: Synthetic oligonucleotide
  Antisense strand to SEQ ID NO: 755742
aaucccauagcucaagauc

SEQ ID NO: 755744 - RNA, 19 nt, Artificial Sequence
  Description of Artificial Sequence: Synthetic oligonucleotide
  Sense strand starting at position 3459 of SEQ ID NO: 586945
ggguaugcaccuuaacuga

SEQ ID NO: 755745 - RNA, 19 nt, Artificial Sequence
  Description of Artificial Sequence: Synthetic oligonucleotide
  Antisense strand to SEQ ID NO: 755744
ucaguuaaggugcauaccc

SEQ ID NO: 755746 - RNA, 19 nt, Artificial Sequence
  Description of Artificial Sequence: Synthetic oligonucleotide
  Sense strand starting at position 3526 of SEQ ID NO: 586945
aucucucuauggucugaau

SEQ ID NO: 755747 - RNA, 19 nt, Artificial Sequence
  Description of Artificial Sequence: Synthetic oligonucleotide
  Antisense strand to SEQ ID NO: 755746
auucagaccauagagagau

SEQ ID NO: 755748 - RNA, 19 nt, Artificial Sequence
  Description of Artificial Sequence: Synthetic oligonucleotide
  Sense strand starting at position 3528 of SEQ ID NO: 586945
cucucuauggucugaaugu

SEQ ID NO: 755749 - RNA, 19 nt, Artificial Sequence
  Description of Artificial Sequence: Synthetic oligonucleotide
  Antisense strand to SEQ ID NO: 755748
acauucagaccauagagag

SEQ ID NO: 755750 - RNA, 19 nt, Artificial Sequence
  Description of Artificial Sequence: Synthetic oligonucleotide
  Sense strand starting at position 3556 of SEQ ID NO: 586945
aauugauguguuggauaca

SEQ ID NO: 755751 - RNA, 19 nt, Artificial Sequence
  Description of Artificial Sequence: Synthetic oligonucleotide
  Antisense strand to SEQ ID NO: 755750
uguauccaacacaucaauu

SEQ ID NO: 755752 - RNA, 19 nt, Artificial Sequence
  Description of Artificial Sequence: Synthetic oligonucleotide
  Sense strand starting at position 3559 of SEQ ID NO: 586945
ugauguguuggauacaauc

SEQ ID NO: 755753 - RNA, 19 nt, Artificial Sequence
  Description of Artificial Sequence: Synthetic oligonucleotide
  Antisense strand to SEQ ID NO: 755752
gauuguauccaacacauca

SEQ ID NO: 755754 - RNA, 19 nt, Artificial Sequence
  Description of Artificial Sequence: Synthetic oligonucleotide
  Sense strand starting at position 3576 of SEQ ID NO: 586945
ucucuaaugcaucaguguu

SEQ ID NO: 755755 - RNA, 19 nt, Artificial Sequence
  Description of Artificial Sequence: Synthetic oligonucleotide
  Antisense strand to SEQ ID NO: 755754
aacacugaugcauuagaga

SEQ ID NO: 755756 - RNA, 19 nt, Artificial Sequence
  Description of Artificial Sequence: Synthetic oligonucleotide
  Sense strand starting at position 3736 of SEQ ID NO: 586945
auuccucaccuuugaagga

SEQ ID NO: 755757 - RNA, 19 nt, Artificial Sequence
  Description of Artificial Sequence: Synthetic oligonucleotide
  Antisense strand to SEQ ID NO: 755756
uccuucaaaggugaggaau

SEQ ID NO: 755758 - RNA, 19 nt, Artificial Sequence
  Description of Artificial Sequence: Synthetic oligonucleotide
  Sense strand starting at position 3825 of SEQ ID NO: 586945
cuuccuagcgucuagaacu

SEQ ID NO: 755759 - RNA, 19 nt, Artificial Sequence
  Description of Artificial Sequence: Synthetic oligonucleotide
  Antisense strand to SEQ ID NO: 755758
aguucuagacgcuaggaag

SEQ ID NO: 755760 - RNA, 19 nt, Artificial Sequence
  Description of Artificial Sequence: Synthetic oligonucleotide
  Sense strand starting at position 235 of SEQ ID NO: 586946
uggugcaguguucacuaga

SEQ ID NO: 755761 - RNA, 19 nt, Artificial Sequence
  Description of Artificial Sequence: Synthetic oligonucleotide
  Antisense strand to SEQ ID NO: 755760
ucuagugaacacugcacca

SEQ ID NO: 755762 - RNA, 19 nt, Artificial Sequence
  Description of Artificial Sequence: Synthetic oligonucleotide
  Sense strand starting at position 402 of SEQ ID NO: 586946
aggccaaguaguuagugaa

SEQ ID NO: 755763 - RNA, 19 nt, Artificial Sequence
  Description of Artificial Sequence: Synthetic oligonucleotide
  Antisense strand to SEQ ID NO: 755762
uucacuaacuacuuggccu

SEQ ID NO: 755764 - RNA, 19 nt, Artificial Sequence
  Description of Artificial Sequence: Synthetic oligonucleotide
  Sense strand starting at position 412 of SEQ ID NO: 586946
guuagugaagcccauauga

SEQ ID NO: 755765 - RNA, 19 nt, Artificial Sequence
  Description of Artificial Sequence: Synthetic oligonucleotide
  Antisense strand to SEQ ID NO: 755764
ucauaugggcuucacuaac

SEQ ID NO: 755766 - RNA, 19 nt, Artificial Sequence
  Description of Artificial Sequence: Synthetic oligonucleotide
  Sense strand starting at position 414 of SEQ ID NO: 586946
uagugaagcccauaugauu

SEQ ID NO: 755767 - RNA, 19 nt, Artificial Sequence
  Description of Artificial Sequence: Synthetic oligonucleotide
  Antisense strand to SEQ ID NO: 755766
aaucauaugggcuucacua

SEQ ID NO: 755768 - RNA, 19 nt, Artificial Sequence
  Description of Artificial Sequence: Synthetic oligonucleotide
  Sense strand starting at position 626 of SEQ ID NO: 586946
gugcucucuguagcuuaua

SEQ ID NO: 755769 - RNA, 19 nt, Artificial Sequence
  Description of Artificial Sequence: Synthetic oligonucleotide
  Antisense strand to SEQ ID NO: 755768
uauaagcuacagagagcac

SEQ ID NO: 755770 - RNA, 19 nt, Artificial Sequence
  Description of Artificial Sequence: Synthetic oligonucleotide
  Sense strand starting at position 761 of SEQ ID NO: 586946
aucaauagaccuugaugca

SEQ ID NO: 755771 - RNA, 19 nt, Artificial Sequence
  Description of Artificial Sequence: Synthetic oligonucleotide
  Antisense strand to SEQ ID NO: 755770
ugcaucaaggucuauugau

SEQ ID NO: 755772 - RNA, 19 nt, Artificial Sequence
  Description of Artificial Sequence: Synthetic oligonucleotide
  Sense strand starting at position 972 of SEQ ID NO: 586946
cugcguucuccagcuaauc

SEQ ID NO: 755773 - RNA, 19 nt, Artificial Sequence
  Description of Artificial Sequence: Synthetic oligonucleotide
  Antisense strand to SEQ ID NO: 755772
gauuagcuggagaacgcag

SEQ ID NO: 755774 - RNA, 19 nt, Artificial Sequence
  Description of Artificial Sequence: Synthetic oligonucleotide
  Sense strand starting at position 973 of SEQ ID NO: 586946
ugcguucuccagcuaaucu

SEQ ID NO: 755775 - RNA, 19 nt, Artificial Sequence
  Description of Artificial Sequence: Synthetic oligonucleotide
  Antisense strand to SEQ ID NO: 755774
agauuagcuggagaacgca

SEQ ID NO: 755776 - RNA, 19 nt, Artificial Sequence
  Description of Artificial Sequence: Synthetic oligonucleotide
  Sense strand starting at position 1007 of SEQ ID NO: 586946
uugucuauucuuuaaggua

SEQ ID NO: 755777 - RNA, 19 nt, Artificial Sequence
  Description of Artificial Sequence: Synthetic oligonucleotide
  Antisense strand to SEQ ID NO: 755776
uaccuuaaagaauagacaa

SEQ ID NO: 755778 - RNA, 19 nt, Artificial Sequence
  Description of Artificial Sequence: Synthetic oligonucleotide
  Sense strand starting at position 1053 of SEQ ID NO: 586946
cucugacuuccuugagcua

SEQ ID NO: 755779 - RNA, 19 nt, Artificial Sequence
  Description of Artificial Sequence: Synthetic oligonucleotide
  Antisense strand to SEQ ID NO: 755778
uagcucaaggaagucagag

SEQ ID NO: 755780 - RNA, 19 nt, Artificial Sequence
  Description of Artificial Sequence: Synthetic oligonucleotide
  Sense strand starting at position 1103 of SEQ ID NO: 586946
ccuauuauggccuggagua

SEQ ID NO: 755781 - RNA, 19 nt, Artificial Sequence
  Description of Artificial Sequence: Synthetic oligonucleotide
  Antisense strand to SEQ ID NO: 755780
uacuccaggccauaauagg

SEQ ID NO: 755782 - RNA, 19 nt, Artificial Sequence
  Description of Artificial Sequence: Synthetic oligonucleotide
  Sense strand starting at position 1104 of SEQ ID NO: 586946
cuauuauggccuggaguag

SEQ ID NO: 755783 - RNA, 19 nt, Artificial Sequence
  Description of Artificial Sequence: Synthetic oligonucleotide
  Antisense strand to SEQ ID NO: 755782
cuacuccaggccauaauag

SEQ ID NO: 755784 - RNA, 19 nt, Artificial Sequence
  Description of Artificial Sequence: Synthetic oligonucleotide
  Sense strand starting at position 1105 of SEQ ID NO: 586946
uauuauggccuggaguaga

SEQ ID NO: 755785 - RNA, 19 nt, Artificial Sequence
  Description of Artificial Sequence: Synthetic oligonucleotide
  Antisense strand to SEQ ID NO: 755784
ucuacuccaggccauaaua

SEQ ID NO: 755786 - RNA, 19 nt, Artificial Sequence
  Description of Artificial Sequence: Synthetic oligonucleotide
  Sense strand starting at position 1273 of SEQ ID NO: 586946
augagauguuacuuuccac

SEQ ID NO: 755787 - RNA, 19 nt, Artificial Sequence
  Description of Artificial Sequence: Synthetic oligonucleotide
  Antisense strand to SEQ ID NO: 755786
guggaaaguaacaucucau

SEQ ID NO: 755788 - RNA, 19 nt, Artificial Sequence
  Description of Artificial Sequence: Synthetic oligonucleotide
  Sense strand starting at position 1819 of SEQ ID NO: 586946
ccacuagguuuggucaaca

SEQ ID NO: 755789 - RNA, 19 nt, Artificial Sequence
  Description of Artificial Sequence: Synthetic oligonucleotide
  Antisense strand to SEQ ID NO: 755788
uguugaccaaaccuagugg

SEQ ID NO: 755790 - RNA, 19 nt, Artificial Sequence
  Description of Artificial Sequence: Synthetic oligonucleotide
  Sense strand starting at position 2591 of SEQ ID NO: 586946
gagcgcucugccguuuaca

SEQ ID NO: 755791 - RNA, 19 nt, Artificial Sequence
  Description of Artificial Sequence: Synthetic oligonucleotide
  Antisense strand to SEQ ID NO: 755790
uguaaacggcagagcgcuc

SEQ ID NO: 755792 - RNA, 19 nt, Artificial Sequence
  Description of Artificial Sequence: Synthetic oligonucleotide
  Sense strand starting at position 2756 of SEQ ID NO: 586946
cggacugcauccucaauuu

SEQ ID NO: 755793 - RNA, 19 nt, Artificial Sequence
  Description of Artificial Sequence: Synthetic oligonucleotide
  Antisense strand to SEQ ID NO: 755792
aaauugaggaugcaguccg

SEQ ID NO: 755794 - RNA, 19 nt, Artificial Sequence
  Description of Artificial Sequence: Synthetic oligonucleotide
  Sense strand starting at position 2816 of SEQ ID NO: 586946
ugagugauuguggguggau

SEQ ID NO: 755795 - RNA, 19 nt, Artificial Sequence
  Description of Artificial Sequence: Synthetic oligonucleotide
  Antisense strand to SEQ ID NO: 755794
auccacccacaaucacuca

SEQ ID NO: 755796 - RNA, 19 nt, Artificial Sequence
  Description of Artificial Sequence: Synthetic oligonucleotide
  Sense strand starting at position 2817 of SEQ ID NO: 586946
gagugauuguggguggauu

SEQ ID NO: 755797 - RNA, 19 nt, Artificial Sequence
  Description of Artificial Sequence: Synthetic oligonucleotide
  Antisense strand to SEQ ID NO: 755796
aauccacccacaaucacuc

SEQ ID NO: 755798 - RNA, 19 nt, Artificial Sequence
  Description of Artificial Sequence: Synthetic oligonucleotide
  Sense strand starting at position 2838 of SEQ ID NO: 586946
uggucuuacccuugaaagu

SEQ ID NO: 755799 - RNA, 19 nt, Artificial Sequence
  Description of Artificial Sequence: Synthetic oligonucleotide
  Antisense strand to SEQ ID NO: 755798
acuuucaaggguaagacca

SEQ ID NO: 755800 - RNA, 19 nt, Artificial Sequence
  Description of Artificial Sequence: Synthetic oligonucleotide
  Sense strand starting at position 2839 of SEQ ID NO: 586946
ggucuuacccuugaaaguu

SEQ ID NO: 755801 - RNA, 19 nt, Artificial Sequence
  Description of Artificial Sequence: Synthetic oligonucleotide
  Antisense strand to SEQ ID NO: 755800
aacuuucaaggguaagacc

SEQ ID NO: 755802 - RNA, 19 nt, Artificial Sequence
  Description of Artificial Sequence: Synthetic oligonucleotide
  Sense strand starting at position 3019 of SEQ ID NO: 586946
guguguaguaacuaccaau

SEQ ID NO: 755803 - RNA, 19 nt, Artificial Sequence
  Description of Artificial Sequence: Synthetic oligonucleotide
  Antisense strand to SEQ ID NO: 755802
auugguaguuacuacacac

SEQ ID NO: 755804 - RNA, 19 nt, Artificial Sequence
  Description of Artificial Sequence: Synthetic oligonucleotide
  Sense strand starting at position 3022 of SEQ ID NO: 586946
uguaguaacuaccaauuua

SEQ ID NO: 755805 - RNA, 19 nt, Artificial Sequence
  Description of Artificial Sequence: Synthetic oligonucleotide
  Antisense strand to SEQ ID NO: 755804
uaaauugguaguuacuaca

SEQ ID NO: 755806 - RNA, 19 nt, Artificial Sequence
  Description of Artificial Sequence: Synthetic oligonucleotide
  Sense strand starting at position 3038 of SEQ ID NO: 586946
uuaagaacagauugcguuu

SEQ ID NO: 755807 - RNA, 19 nt, Artificial Sequence
  Description of Artificial Sequence: Synthetic oligonucleotide
  Antisense strand to SEQ ID NO: 755806
aaacgcaaucuguucuuaa

SEQ ID NO: 755808 - RNA, 19 nt, Artificial Sequence
  Description of Artificial Sequence: Synthetic oligonucleotide
  Sense strand starting at position 3041 of SEQ ID NO: 586946
agaacagauugcguuugaa

SEQ ID NO: 755809 - RNA, 19 nt, Artificial Sequence
  Description of Artificial Sequence: Synthetic oligonucleotide
  Antisense strand to SEQ ID NO: 755808
uucaaacgcaaucuguucu

SEQ ID NO: 755810 - RNA, 19 nt, Artificial Sequence
  Description of Artificial Sequence: Synthetic oligonucleotide
  Sense strand starting at position 3090 of SEQ ID NO: 586946
ucagaucuguuucuaauga

SEQ ID NO: 755811 - RNA, 19 nt, Artificial Sequence
  Description of Artificial Sequence: Synthetic oligonucleotide
  Antisense strand to SEQ ID NO: 755810
ucauuagaaacagaucuga

SEQ ID NO: 755812 - RNA, 19 nt, Artificial Sequence
  Description of Artificial Sequence: Synthetic oligonucleotide
  Sense strand starting at position 3147 of SEQ ID NO: 586946
aguucuuaauacguagaca

SEQ ID NO: 755813 - RNA, 19 nt, Artificial Sequence
  Description of Artificial Sequence: Synthetic oligonucleotide
  Antisense strand to SEQ ID NO: 755812
ugucuacguauuaagaacu

SEQ ID NO: 755814 - RNA, 19 nt, Artificial Sequence
  Description of Artificial Sequence: Synthetic oligonucleotide
  Sense strand starting at position 3162 of SEQ ID NO: 586946
gacaaauuguaugugaaau

SEQ ID NO: 755815 - RNA, 19 nt, Artificial Sequence
  Description of Artificial Sequence: Synthetic oligonucleotide
  Antisense strand to SEQ ID NO: 755814
auuucacauacaauuuguc

SEQ ID NO: 755816 - RNA, 19 nt, Artificial Sequence
  Description of Artificial Sequence: Synthetic oligonucleotide
  Sense strand starting at position 3173 of SEQ ID NO: 586946
ugugaaauggaccguuuag

SEQ ID NO: 755817 - RNA, 19 nt, Artificial Sequence
  Description of Artificial Sequence: Synthetic oligonucleotide
  Antisense strand to SEQ ID NO: 755816
cuaaacgguccauuucaca

SEQ ID NO: 755818 - RNA, 19 nt, Artificial Sequence
  Description of Artificial Sequence: Synthetic oligonucleotide
  Sense strand starting at position 3190 of SEQ ID NO: 586946
aguuguuaauaugcagaca

SEQ ID NO: 755819 - RNA, 19 nt, Artificial Sequence
  Description of Artificial Sequence: Synthetic oligonucleotide
  Antisense strand to SEQ ID NO: 755818
ugucugcauauuaacaacu

SEQ ID NO: 755820 - RNA, 19 nt, Artificial Sequence
  Description of Artificial Sequence: Synthetic oligonucleotide
  Sense strand starting at position 3193 of SEQ ID NO: 586946
uguuaauaugcagacaaac

SEQ ID NO: 755821 - RNA, 19 nt, Artificial Sequence
  Description of Artificial Sequence: Synthetic oligonucleotide
  Antisense strand to SEQ ID NO: 755820
guuugucugcauauuaaca

SEQ ID NO: 755822 - RNA, 19 nt, Artificial Sequence
  Description of Artificial Sequence: Synthetic oligonucleotide
  Sense strand starting at position 3246 of SEQ ID NO: 586946
ccuugaggacuagguuauu

SEQ ID NO: 755823 - RNA, 19 nt, Artificial Sequence
  Description of Artificial Sequence: Synthetic oligonucleotide
  Antisense strand to SEQ ID NO: 755822
aauaaccuaguccucaagg

SEQ ID NO: 755824 - RNA, 19 nt, Artificial Sequence
  Description of Artificial Sequence: Synthetic oligonucleotide
  Sense strand starting at position 3258 of SEQ ID NO: 586946
gguuauucugcguaacaga

SEQ ID NO: 755825 - RNA, 19 nt, Artificial Sequence
  Description of Artificial Sequence: Synthetic oligonucleotide
  Antisense strand to SEQ ID NO: 755824
ucuguuacgcagaauaacc

SEQ ID NO: 755826 - RNA, 19 nt, Artificial Sequence
  Description of Artificial Sequence: Synthetic oligonucleotide
  Sense strand starting at position 3266 of SEQ ID NO: 586946
ugcguaacagaggauucuu

SEQ ID NO: 755827 - RNA, 19 nt, Artificial Sequence
  Description of Artificial Sequence: Synthetic oligonucleotide
  Antisense strand to SEQ ID NO: 755826
aagaauccucuguuacgca

SEQ ID NO: 755828 - RNA, 19 nt, Artificial Sequence
  Description of Artificial Sequence: Synthetic oligonucleotide
  Sense strand starting at position 3341 of SEQ ID NO: 586946
cucaauaaauaguugagua

SEQ ID NO: 755829 - RNA, 19 nt, Artificial Sequence
  Description of Artificial Sequence: Synthetic oligonucleotide
  Antisense strand to SEQ ID NO: 755828
uacucaacuauuuauugag

SEQ ID NO: 755830 - RNA, 19 nt, Artificial Sequence
  Description of Artificial Sequence: Synthetic oligonucleotide
  Sense strand starting at position 3452 of SEQ ID NO: 586946
auuucuugcugagucaacu

SEQ ID NO: 755831 - RNA, 19 nt, Artificial Sequence
  Description of Artificial Sequence: Synthetic oligonucleotide
  Antisense strand to SEQ ID NO: 755830
aguugacucagcaagaaau

SEQ ID NO: 755832 - RNA, 19 nt, Artificial Sequence
  Description of Artificial Sequence: Synthetic oligonucleotide
  Sense strand starting at position 3664 of SEQ ID NO: 586946
caucuuuaauagguggaau

SEQ ID NO: 755833 - RNA, 19 nt, Artificial Sequence
  Description of Artificial Sequence: Synthetic oligonucleotide
  Antisense strand to SEQ ID NO: 755832
auuccaccuauuaaagaug

SEQ ID NO: 755834 - RNA, 19 nt, Artificial Sequence
  Description of Artificial Sequence: Synthetic oligonucleotide
  Sense strand starting at position 3897 of SEQ ID NO: 586946
acuuucuacuguguaauca

SEQ ID NO: 755835 - RNA, 19 nt, Artificial Sequence
  Description of Artificial Sequence: Synthetic oligonucleotide
  Antisense strand to SEQ ID NO: 755834
ugauuacacaguagaaagu

SEQ ID NO: 755836 - RNA, 19 nt, Artificial Sequence
  Description of Artificial Sequence: Synthetic oligonucleotide
  Sense strand starting at position 3898 of SEQ ID NO: 586946
cuuucuacuguguaaucau

SEQ ID NO: 755837 - RNA, 19 nt, Artificial Sequence
  Description of Artificial Sequence: Synthetic oligonucleotide
  Antisense strand to SEQ ID NO: 755836
augauuacacaguagaaag

SEQ ID NO: 755838 - RNA, 19 nt, Artificial Sequence
  Description of Artificial Sequence: Synthetic oligonucleotide
  Sense strand starting at position 3974 of SEQ ID NO: 586946
gcuguuuaucguuaacaaa

SEQ ID NO: 755839 - RNA, 19 nt, Artificial Sequence
  Description of Artificial Sequence: Synthetic oligonucleotide
  Antisense strand to SEQ ID NO: 755838
uuuguuaacgauaaacagc

SEQ ID NO: 755840 - RNA, 19 nt, Artificial Sequence
  Description of Artificial Sequence: Synthetic oligonucleotide
  Sense strand starting at position 196 of SEQ ID NO: 586947
ggacaaaucuccuugaggu

SEQ ID NO: 755841 - RNA, 19 nt, Artificial Sequence
  Description of Artificial Sequence: Synthetic oligonucleotide
  Antisense strand to SEQ ID NO: 755840
accucaaggagauuugucc

SEQ ID NO: 755842 - RNA, 19 nt, Artificial Sequence
  Description of Artificial Sequence: Synthetic oligonucleotide
  Sense strand starting at position 197 of SEQ ID NO: 586947
gacaaaucuccuugaggug

SEQ ID NO: 755843 - RNA, 19 nt, Artificial Sequence
  Description of Artificial Sequence: Synthetic oligonucleotide
  Antisense strand to SEQ ID NO: 755842
caccucaaggagauuuguc

SEQ ID NO: 755844 - RNA, 19 nt, Artificial Sequence
  Description of Artificial Sequence: Synthetic oligonucleotide
  Sense strand starting at position 274 of SEQ ID NO: 586947
cuucucuucucuuuggaga

SEQ ID NO: 755845 - RNA, 19 nt, Artificial Sequence
  Description of Artificial Sequence: Synthetic oligonucleotide
  Antisense strand to SEQ ID NO: 755844
ucuccaaagagaagagaag

SEQ ID NO: 755846 - RNA, 19 nt, Artificial Sequence
  Description of Artificial Sequence: Synthetic oligonucleotide
  Sense strand starting at position 275 of SEQ ID NO: 586947
uucucuucucuuuggagaa

SEQ ID NO: 755847 - RNA, 19 nt, Artificial Sequence
  Description of Artificial Sequence: Synthetic oligonucleotide
  Antisense strand to SEQ ID NO: 755846
uucuccaaagagaagagaa

SEQ ID NO: 755848 - RNA, 19 nt, Artificial Sequence
  Description of Artificial Sequence: Synthetic oligonucleotide
  Sense strand starting at position 553 of SEQ ID NO: 586947
ggaauaauccuuggccgga

SEQ ID NO: 755849 - RNA, 19 nt, Artificial Sequence
  Description of Artificial Sequence: Synthetic oligonucleotide
  Antisense strand to SEQ ID NO: 755848
uccggccaaggauuauucc

SEQ ID NO: 755850 - RNA, 19 nt, Artificial Sequence
  Description of Artificial Sequence: Synthetic oligonucleotide
  Sense strand starting at position 554 of SEQ ID NO: 586947
gaauaauccuuggccggau

SEQ ID NO: 755851 - RNA, 19 nt, Artificial Sequence
  Description of Artificial Sequence: Synthetic oligonucleotide
  Antisense strand to SEQ ID NO: 755850
auccggccaaggauuauuc

SEQ ID NO: 755852 - RNA, 19 nt, Artificial Sequence
  Description of Artificial Sequence: Synthetic oligonucleotide
  Sense strand starting at position 1051 of SEQ ID NO: 586947
uugauagaguuaguaaugu

SEQ ID NO: 755853 - RNA, 19 nt, Artificial Sequence
  Description of Artificial Sequence: Synthetic oligonucleotide
  Antisense strand to SEQ ID NO: 755852
acauuacuaacucuaucaa

SEQ ID NO: 755854 - RNA, 19 nt, Artificial Sequence
  Description of Artificial Sequence: Synthetic oligonucleotide
  Sense strand starting at position 1057 of SEQ ID NO: 586947
gaguuaguaauguauggga

SEQ ID NO: 755855 - RNA, 19 nt, Artificial Sequence
  Description of Artificial Sequence: Synthetic oligonucleotide
  Antisense strand to SEQ ID NO: 755854
ucccauacauuacuaacuc

SEQ ID NO: 755856 - RNA, 19 nt, Artificial Sequence
  Description of Artificial Sequence: Synthetic oligonucleotide
  Sense strand starting at position 1059 of SEQ ID NO: 586947
guuaguaauguaugggaua

SEQ ID NO: 755857 - RNA, 19 nt, Artificial Sequence
  Description of Artificial Sequence: Synthetic oligonucleotide
  Antisense strand to SEQ ID NO: 755856
uaucccauacauuacuaac

SEQ ID NO: 755858 - RNA, 19 nt, Artificial Sequence
  Description of Artificial Sequence: Synthetic oligonucleotide
  Sense strand starting at position 1071 of SEQ ID NO: 586947
ugggauaaguacccauaca

SEQ ID NO: 755859 - RNA, 19 nt, Artificial Sequence
  Description of Artificial Sequence: Synthetic oligonucleotide
  Antisense strand to SEQ ID NO: 755858
uguauggguacuuauccca

SEQ ID NO: 755860 - RNA, 19 nt, Artificial Sequence
  Description of Artificial Sequence: Synthetic oligonucleotide
  Sense strand starting at position 1450 of SEQ ID NO: 586947
ucugaauccuuucuaguag

SEQ ID NO: 755861 - RNA, 19 nt, Artificial Sequence
  Description of Artificial Sequence: Synthetic oligonucleotide
  Antisense strand to SEQ ID NO: 755860
cuacuagaaaggauucaga

SEQ ID NO: 755862 - RNA, 19 nt, Artificial Sequence
  Description of Artificial Sequence: Synthetic oligonucleotide
  Sense strand starting at position 1483 of SEQ ID NO: 586947
uggagaaacucuuuccuua

SEQ ID NO: 755863 - RNA, 19 nt, Artificial Sequence
  Description of Artificial Sequence: Synthetic oligonucleotide
  Antisense strand to SEQ ID NO: 755862
uaaggaaagaguuucucca

SEQ ID NO: 755864 - RNA, 19 nt, Artificial Sequence
  Description of Artificial Sequence: Synthetic oligonucleotide
  Sense strand starting at position 1554 of SEQ ID NO: 586947
ucuauaaagucagauuuga

SEQ ID NO: 755865 - RNA, 19 nt, Artificial Sequence
  Description of Artificial Sequence: Synthetic oligonucleotide
  Antisense strand to SEQ ID NO: 755864
ucaaaucugacuuuauaga

SEQ ID NO: 755866 - RNA, 19 nt, Artificial Sequence
  Description of Artificial Sequence: Synthetic oligonucleotide
  Sense strand starting at position 1668 of SEQ ID NO: 586947
cuuguuaaagucuacuuaa

SEQ ID NO: 755867 - RNA, 19 nt, Artificial Sequence
  Description of Artificial Sequence: Synthetic oligonucleotide
  Antisense strand to SEQ ID NO: 755866
uuaaguagacuuuaacaag

SEQ ID NO: 755868 - RNA, 19 nt, Artificial Sequence
  Description of Artificial Sequence: Synthetic oligonucleotide
  Sense strand starting at position 1880 of SEQ ID NO: 586947
gacacauacucugugagga

SEQ ID NO: 755869 - RNA, 19 nt, Artificial Sequence
  Description of Artificial Sequence: Synthetic oligonucleotide
  Antisense strand to SEQ ID NO: 755868
uccucacagaguauguguc

SEQ ID NO: 755870 - RNA, 19 nt, Artificial Sequence
  Description of Artificial Sequence: Synthetic oligonucleotide
  Sense strand starting at position 2015 of SEQ ID NO: 586947
auauauaggcuauguaaga

SEQ ID NO: 755871 - RNA, 19 nt, Artificial Sequence
  Description of Artificial Sequence: Synthetic oligonucleotide
  Antisense strand to SEQ ID NO: 755870
ucuuacauagccuauauau

SEQ ID NO: 755872 - RNA, 19 nt, Artificial Sequence
  Description of Artificial Sequence: Synthetic oligonucleotide
  Sense strand starting at position 2106 of SEQ ID NO: 586947
caauguggucuugaccuuu

SEQ ID NO: 755873 - RNA, 19 nt, Artificial Sequence
  Description of Artificial Sequence: Synthetic oligonucleotide
  Antisense strand to SEQ ID NO: 755872
aaaggucaagaccacauug

SEQ ID NO: 755874 - RNA, 19 nt, Artificial Sequence
  Description of Artificial Sequence: Synthetic oligonucleotide
  Sense strand starting at position 2112 of SEQ ID NO: 586947
ggucuugaccuuugagacu

SEQ ID NO: 755875 - RNA, 19 nt, Artificial Sequence
  Description of Artificial Sequence: Synthetic oligonucleotide
  Antisense strand to SEQ ID NO: 755874
agucucaaaggucaagacc

SEQ ID NO: 755876 - RNA, 19 nt, Artificial Sequence
  Description of Artificial Sequence: Synthetic oligonucleotide
  Sense strand starting at position 2126 of SEQ ID NO: 586947
agacuuugaucagcagaag

SEQ ID NO: 755877 - RNA, 19 nt, Artificial Sequence
  Description of Artificial Sequence: Synthetic oligonucleotide
  Antisense strand to SEQ ID NO: 755876
cuucugcugaucaaagucu

SEQ ID NO: 755878 - RNA, 19 nt, Artificial Sequence
  Description of Artificial Sequence: Synthetic oligonucleotide
  Sense strand starting at position 2127 of SEQ ID NO: 586947
gacuuugaucagcagaagu

SEQ ID NO: 755879 - RNA, 19 nt, Artificial Sequence
  Description of Artificial Sequence: Synthetic oligonucleotide
  Antisense strand to SEQ ID NO: 755878
acuucugcugaucaaaguc

SEQ ID NO: 755880 - RNA, 19 nt, Artificial Sequence
  Description of Artificial Sequence: Synthetic oligonucleotide
  Sense strand starting at position 2129 of SEQ ID NO: 586947
cuuugaucagcagaaguga

SEQ ID NO: 755881 - RNA, 19 nt, Artificial Sequence
  Description of Artificial Sequence: Synthetic oligonucleotide
  Antisense strand to SEQ ID NO: 755880
ucacuucugcugaucaaag

SEQ ID NO: 755882 - RNA, 19 nt, Artificial Sequence
  Description of Artificial Sequence: Synthetic oligonucleotide
  Sense strand starting at position 2213 of SEQ ID NO: 586947
guguguacguaauuucauu

SEQ ID NO: 755883 - RNA, 19 nt, Artificial Sequence
  Description of Artificial Sequence: Synthetic oligonucleotide
  Antisense strand to SEQ ID NO: 755882
aaugaaauuacguacacac

SEQ ID NO: 755884 - RNA, 19 nt, Artificial Sequence
  Description of Artificial Sequence: Synthetic oligonucleotide
  Sense strand starting at position 2282 of SEQ ID NO: 586947
gaaucuucucaaggguuau

SEQ ID NO: 755885 - RNA, 19 nt, Artificial Sequence
  Description of Artificial Sequence: Synthetic oligonucleotide
  Antisense strand to SEQ ID NO: 755884
auaacccuugagaagauuc

SEQ ID NO: 755886 - RNA, 19 nt, Artificial Sequence
  Description of Artificial Sequence: Synthetic oligonucleotide
  Sense strand starting at position 2293 of SEQ ID NO: 586947
aggguuaucuccuugacau

SEQ ID NO: 755887 - RNA, 19 nt, Artificial Sequence
  Description of Artificial Sequence: Synthetic oligonucleotide
  Antisense strand to SEQ ID NO: 755886
augucaaggagauaacccu

SEQ ID NO: 755888 - RNA, 19 nt, Artificial Sequence
  Description of Artificial Sequence: Synthetic oligonucleotide
  Sense strand starting at position 2294 of SEQ ID NO: 586947
ggguuaucuccuugacauu

SEQ ID NO: 755889 - RNA, 19 nt, Artificial Sequence
  Description of Artificial Sequence: Synthetic oligonucleotide
  Antisense strand to SEQ ID NO: 755888
aaugucaaggagauaaccc

SEQ ID NO: 755890 - RNA, 19 nt, Artificial Sequence
  Description of Artificial Sequence: Synthetic oligonucleotide
  Sense strand starting at position 2313 of SEQ ID NO: 586947
ucaccaaccuguuuagaug

SEQ ID NO: 755891 - RNA, 19 nt, Artificial Sequence
  Description of Artificial Sequence: Synthetic oligonucleotide
  Antisense strand to SEQ ID NO: 755890
caucuaaacagguugguga

SEQ ID NO: 755892 - RNA, 19 nt, Artificial Sequence
  Description of Artificial Sequence: Synthetic oligonucleotide
  Sense strand starting at position 2319 of SEQ ID NO: 586947
accuguuuagaugagaguu

SEQ ID NO: 755893 - RNA, 19 nt, Artificial Sequence
  Description of Artificial Sequence: Synthetic oligonucleotide
  Antisense strand to SEQ ID NO: 755892
aacucucaucuaaacaggu

SEQ ID NO: 755894 - RNA, 19 nt, Artificial Sequence
  Description of Artificial Sequence: Synthetic oligonucleotide
  Sense strand starting at position 2405 of SEQ ID NO: 586947
agguuaacuccugguauga

SEQ ID NO: 755895 - RNA, 19 nt, Artificial Sequence
  Description of Artificial Sequence: Synthetic oligonucleotide
  Antisense strand to SEQ ID NO: 755894
ucauaccaggaguuaaccu

SEQ ID NO: 755896 - RNA, 19 nt, Artificial Sequence
  Description of Artificial Sequence: Synthetic oligonucleotide
  Sense strand starting at position 2465 of SEQ ID NO: 586947
aggccauaucugcauucca

SEQ ID NO: 755897 - RNA, 19 nt, Artificial Sequence
  Description of Artificial Sequence: Synthetic oligonucleotide
  Antisense strand to SEQ ID NO: 755896
uggaaugcagauauggccu

SEQ ID NO: 755898 - RNA, 19 nt, Artificial Sequence
  Description of Artificial Sequence: Synthetic oligonucleotide
  Sense strand starting at position 2869 of SEQ ID NO: 586947
uccuaagauucuguucuga

SEQ ID NO: 755899 - RNA, 19 nt, Artificial Sequence
  Description of Artificial Sequence: Synthetic oligonucleotide
  Antisense strand to SEQ ID NO: 755898
ucagaacagaaucuuagga

SEQ ID NO: 755900 - RNA, 19 nt, Artificial Sequence
  Description of Artificial Sequence: Synthetic oligonucleotide
  Sense strand starting at position 2871 of SEQ ID NO: 586947
cuaagauucuguucugaau

SEQ ID NO: 755901 - RNA, 19 nt, Artificial Sequence
  Description of Artificial Sequence: Synthetic oligonucleotide
  Antisense strand to SEQ ID NO: 755900
auucagaacagaaucuuag

SEQ ID NO: 755902 - RNA, 19 nt, Artificial Sequence
  Description of Artificial Sequence: Synthetic oligonucleotide
  Sense strand starting at position 2969 of SEQ ID NO: 586947
gcucucuagguccacauau

SEQ ID NO: 755903 - RNA, 19 nt, Artificial Sequence
  Description of Artificial Sequence: Synthetic oligonucleotide
  Antisense strand to SEQ ID NO: 755902
auauguggaccuagagagc

SEQ ID NO: 755904 - RNA, 19 nt, Artificial Sequence
  Description of Artificial Sequence: Synthetic oligonucleotide
  Sense strand starting at position 3149 of SEQ ID NO: 586947
gggaaccaucucugacacu

SEQ ID NO: 755905 - RNA, 19 nt, Artificial Sequence
  Description of Artificial Sequence: Synthetic oligonucleotide
  Antisense strand to SEQ ID NO: 755904
agugucagagaugguuccc

SEQ ID NO: 755906 - RNA, 19 nt, Artificial Sequence
  Description of Artificial Sequence: Synthetic oligonucleotide
  Sense strand starting at position 3596 of SEQ ID NO: 586947
ucacuuucucaaggagaac

SEQ ID NO: 755907 - RNA, 19 nt, Artificial Sequence
  Description of Artificial Sequence: Synthetic oligonucleotide
  Antisense strand to SEQ ID NO: 755906
guucuccuugagaaaguga

SEQ ID NO: 755908 - RNA, 19 nt, Artificial Sequence
  Description of Artificial Sequence: Synthetic oligonucleotide
  Sense strand starting at position 3681 of SEQ ID NO: 586947
cuugguuaauuugcaugua

SEQ ID NO: 755909 - RNA, 19 nt, Artificial Sequence
  Description of Artificial Sequence: Synthetic oligonucleotide
  Antisense strand to SEQ ID NO: 755908
uacaugcaaauuaaccaag

SEQ ID NO: 755910 - RNA, 19 nt, Artificial Sequence
  Description of Artificial Sequence: Synthetic oligonucleotide
  Sense strand starting at position 3684 of SEQ ID NO: 586947
gguuaauuugcauguacuu

SEQ ID NO: 755911 - RNA, 19 nt, Artificial Sequence
  Description of Artificial Sequence: Synthetic oligonucleotide
  Antisense strand to SEQ ID NO: 755910
aaguacaugcaaauuaacc

SEQ ID NO: 755912 - RNA, 19 nt, Artificial Sequence
  Description of Artificial Sequence: Synthetic oligonucleotide
  Sense strand starting at position 3738 of SEQ ID NO: 586947
uuauuuacuuggcuaaugu

SEQ ID NO: 755913 - RNA, 19 nt, Artificial Sequence
  Description of Artificial Sequence: Synthetic oligonucleotide
  Antisense strand to SEQ ID NO: 755912
acauuagccaaguaaauaa

SEQ ID NO: 755914 - RNA, 19 nt, Artificial Sequence
  Description of Artificial Sequence: Synthetic oligonucleotide
  Sense strand starting at position 3758 of SEQ ID NO: 586947
uggcuuucucauuagaaug

SEQ ID NO: 755915 - RNA, 19 nt, Artificial Sequence
  Description of Artificial Sequence: Synthetic oligonucleotide
  Antisense strand to SEQ ID NO: 755914
cauucuaaugagaaagcca

SEQ ID NO: 755916 - RNA, 19 nt, Artificial Sequence
  Description of Artificial Sequence: Synthetic oligonucleotide
  Sense strand starting at position 3894 of SEQ ID NO: 586947
gaauuauguuugcuauaag

SEQ ID NO: 755917 - RNA, 19 nt, Artificial Sequence
  Description of Artificial Sequence: Synthetic oligonucleotide
  Antisense strand to SEQ ID NO: 755916
cuuauagcaaacauaauuc

SEQ ID NO: 755918 - RNA, 19 nt, Artificial Sequence
  Description of Artificial Sequence: Synthetic oligonucleotide
  Sense strand starting at position 3897 of SEQ ID NO: 586947
uuauguuugcuauaagaca

SEQ ID NO: 755919 - RNA, 19 nt, Artificial Sequence
  Description of Artificial Sequence: Synthetic oligonucleotide
  Antisense strand to SEQ ID NO: 755918
ugucuuauagcaaacauaa

SEQ ID NO: 755920 - RNA, 19 nt, Artificial Sequence
  Description of Artificial Sequence: Synthetic oligonucleotide
  Sense strand starting at position 23 of SEQ ID NO: 586948
cuuuaaagauaugcaguaa

SEQ ID NO: 755921 - RNA, 19 nt, Artificial Sequence
  Description of Artificial Sequence: Synthetic oligonucleotide
  Antisense strand to SEQ ID NO: 755920
uuacugcauaucuuuaaag

SEQ ID NO: 755922 - RNA, 19 nt, Artificial Sequence
  Description of Artificial Sequence: Synthetic oligonucleotide
  Sense strand starting at position 122 of SEQ ID NO: 586948
aagaguaacuuggauuuga

SEQ ID NO: 755923 - RNA, 19 nt, Artificial Sequence
  Description of Artificial Sequence: Synthetic oligonucleotide
  Antisense strand to SEQ ID NO: 755922
ucaaauccaaguuacucuu

SEQ ID NO: 755924 - RNA, 19 nt, Artificial Sequence
  Description of Artificial Sequence: Synthetic oligonucleotide
  Sense strand starting at position 132 of SEQ ID NO: 586948
uggauuugaucacaguuga

SEQ ID NO: 755925 - RNA, 19 nt, Artificial Sequence
  Description of Artificial Sequence: Synthetic oligonucleotide
  Antisense strand to SEQ ID NO: 755924
ucaacugugaucaaaucca

SEQ ID NO: 755926 - RNA, 19 nt, Artificial Sequence
  Description of Artificial Sequence: Synthetic oligonucleotide
  Sense strand starting at position 143 of SEQ ID NO: 586948
acaguugaggccgagugau

SEQ ID NO: 755927 - RNA, 19 nt, Artificial Sequence
  Description of Artificial Sequence: Synthetic oligonucleotide
  Antisense strand to SEQ ID NO: 755926
aucacucggccucaacugu

SEQ ID NO: 755928 - RNA, 19 nt, Artificial Sequence
  Description of Artificial Sequence: Synthetic oligonucleotide
  Sense strand starting at position 269 of SEQ ID NO: 586948
guuugugacaucuaguuac

SEQ ID NO: 755929 - RNA, 19 nt, Artificial Sequence
  Description of Artificial Sequence: Synthetic oligonucleotide
  Antisense strand to SEQ ID NO: 755928
guaacuagaugucacaaac

SEQ ID NO: 755930 - RNA, 19 nt, Artificial Sequence
  Description of Artificial Sequence: Synthetic oligonucleotide
  Sense strand starting at position 273 of SEQ ID NO: 586948
gugacaucuaguuacggca

SEQ ID NO: 755931 - RNA, 19 nt, Artificial Sequence
  Description of Artificial Sequence: Synthetic oligonucleotide
  Antisense strand to SEQ ID NO: 755930
ugccguaacuagaugucac

SEQ ID NO: 755932 - RNA, 19 nt, Artificial Sequence
  Description of Artificial Sequence: Synthetic oligonucleotide
  Sense strand starting at position 344 of SEQ ID NO: 586948
ugaugaaguacuuggcaca

SEQ ID NO: 755933 - RNA, 19 nt, Artificial Sequence
  Description of Artificial Sequence: Synthetic oligonucleotide
  Antisense strand to SEQ ID NO: 755932
ugugccaaguacuucauca

SEQ ID NO: 755934 - RNA, 19 nt, Artificial Sequence
  Description of Artificial Sequence: Synthetic oligonucleotide
  Sense strand starting at position 1247 of SEQ ID NO: 586948
ccaaacuugaagcgaguaa

SEQ ID NO: 755935 - RNA, 19 nt, Artificial Sequence
  Description of Artificial Sequence: Synthetic oligonucleotide
  Antisense strand to SEQ ID NO: 755934
uuacucgcuucaaguuugg

SEQ ID NO: 755936 - RNA, 19 nt, Artificial Sequence
  Description of Artificial Sequence: Synthetic oligonucleotide
  Sense strand starting at position 1324 of SEQ ID NO: 586948
cgcuguccgcguucugaaa

SEQ ID NO: 755937 - RNA, 19 nt, Artificial Sequence
  Description of Artificial Sequence: Synthetic oligonucleotide
  Antisense strand to SEQ ID NO: 755936
uuucagaacgcggacagcg

SEQ ID NO: 755938 - RNA, 19 nt, Artificial Sequence
  Description of Artificial Sequence: Synthetic oligonucleotide
  Sense strand starting at position 1325 of SEQ ID NO: 586948
gcuguccgcguucugaaau

SEQ ID NO: 755939 - RNA, 19 nt, Artificial Sequence
  Description of Artificial Sequence: Synthetic oligonucleotide
  Antisense strand to SEQ ID NO: 755938
auuucagaacgcggacagc

SEQ ID NO: 755940 - RNA, 19 nt, Artificial Sequence
  Description of Artificial Sequence: Synthetic oligonucleotide
  Sense strand starting at position 1637 of SEQ ID NO: 586948
gcucucggcgucucagaaa

SEQ ID NO: 755941 - RNA, 19 nt, Artificial Sequence
  Description of Artificial Sequence: Synthetic oligonucleotide
  Antisense strand to SEQ ID NO: 755940
uuucugagacgccgagagc

SEQ ID NO: 755942 - RNA, 19 nt, Artificial Sequence
  Description of Artificial Sequence: Synthetic oligonucleotide
  Sense strand starting at position 2197 of SEQ ID NO: 586948
gaacaauggccagguuucu

SEQ ID NO: 755943 - RNA, 19 nt, Artificial Sequence
  Description of Artificial Sequence: Synthetic oligonucleotide
  Antisense strand to SEQ ID NO: 755942
agaaaccuggccauuguuc

SEQ ID NO: 755944 - RNA, 19 nt, Artificial Sequence
  Description of Artificial Sequence: Synthetic oligonucleotide
  Sense strand starting at position 2202 of SEQ ID NO: 586948
auggccagguuucuauauu

SEQ ID NO: 755945 - RNA, 19 nt, Artificial Sequence
  Description of Artificial Sequence: Synthetic oligonucleotide
  Antisense strand to SEQ ID NO: 755944
aauauagaaaccuggccau

SEQ ID NO: 755946 - RNA, 19 nt, Artificial Sequence
  Description of Artificial Sequence: Synthetic oligonucleotide
  Sense strand starting at position 2256 of SEQ ID NO: 586948
guauucaauggguggagga

SEQ ID NO: 755947 - RNA, 19 nt, Artificial Sequence
  Description of Artificial Sequence: Synthetic oligonucleotide
  Antisense strand to SEQ ID NO: 755946
uccuccacccauugaauac

SEQ ID NO: 755948 - RNA, 19 nt, Artificial Sequence
  Description of Artificial Sequence: Synthetic oligonucleotide
  Sense strand starting at position 2512 of SEQ ID NO: 586948
uugucuucuguugggauga

SEQ ID NO: 755949 - RNA, 19 nt, Artificial Sequence
  Description of Artificial Sequence: Synthetic oligonucleotide
  Antisense strand to SEQ ID NO: 755948
ucaucccaacagaagacaa

SEQ ID NO: 755950 - RNA, 19 nt, Artificial Sequence
  Description of Artificial Sequence: Synthetic oligonucleotide
  Sense strand starting at position 2523 of SEQ ID NO: 586948
ugggaugaacuuuguuaaa

SEQ ID NO: 755951 - RNA, 19 nt, Artificial Sequence
  Description of Artificial Sequence: Synthetic oligonucleotide
  Antisense strand to SEQ ID NO: 755950
uuuaacaaaguucauccca

SEQ ID NO: 755952 - RNA, 19 nt, Artificial Sequence
  Description of Artificial Sequence: Synthetic oligonucleotide
  Sense strand starting at position 2542 of SEQ ID NO: 586948
acuaaugcaugguuaagau

SEQ ID NO: 755953 - RNA, 19 nt, Artificial Sequence
  Description of Artificial Sequence: Synthetic oligonucleotide
  Antisense strand to SEQ ID NO: 755952
aucuuaaccaugcauuagu

SEQ ID NO: 755954 - RNA, 19 nt, Artificial Sequence
  Description of Artificial Sequence: Synthetic oligonucleotide
  Sense strand starting at position 2590 of SEQ ID NO: 586948
agaacauucucgccugauu

SEQ ID NO: 755955 - RNA, 19 nt, Artificial Sequence
  Description of Artificial Sequence: Synthetic oligonucleotide
  Antisense strand to SEQ ID NO: 755954
aaucaggcgagaauguucu

SEQ ID NO: 755956 - RNA, 19 nt, Artificial Sequence
  Description of Artificial Sequence: Synthetic oligonucleotide
  Sense strand starting at position 2605 of SEQ ID NO: 586948
gauuguuaguguucugaag

SEQ ID NO: 755957 - RNA, 19 nt, Artificial Sequence
  Description of Artificial Sequence: Synthetic oligonucleotide
  Antisense strand to SEQ ID NO: 755956
cuucagaacacuaacaauc

SEQ ID NO: 755958 - RNA, 19 nt, Artificial Sequence
  Description of Artificial Sequence: Synthetic oligonucleotide
  Sense strand starting at position 2691 of SEQ ID NO: 586948
auaugcagaccaugacaau

SEQ ID NO: 755959 - RNA, 19 nt, Artificial Sequence
  Description of Artificial Sequence: Synthetic oligonucleotide
  Antisense strand to SEQ ID NO: 755958
auugucauggucugcauau

SEQ ID NO: 755960 - RNA, 19 nt, Artificial Sequence
  Description of Artificial Sequence: Synthetic oligonucleotide
  Sense strand starting at position 2711 of SEQ ID NO: 586948
cuacgagcuccuggaaaca

SEQ ID NO: 755961 - RNA, 19 nt, Artificial Sequence
  Description of Artificial Sequence: Synthetic oligonucleotide
  Antisense strand to SEQ ID NO: 755960
uguuuccaggagcucguag

SEQ ID NO: 755962 - RNA, 19 nt, Artificial Sequence
  Description of Artificial Sequence: Synthetic oligonucleotide
  Sense strand starting at position 2758 of SEQ ID NO: 586948
ugaugcaaauucucugaaa

SEQ ID NO: 755963 - RNA, 19 nt, Artificial Sequence
  Description of Artificial Sequence: Synthetic oligonucleotide
  Antisense strand to SEQ ID NO: 755962
uuucagagaauuugcauca

SEQ ID NO: 755964 - RNA, 19 nt, Artificial Sequence
  Description of Artificial Sequence: Synthetic oligonucleotide
  Sense strand starting at position 2771 of SEQ ID NO: 586948
cugaaaugguagucagcau

SEQ ID NO: 755965 - RNA, 19 nt, Artificial Sequence
  Description of Artificial Sequence: Synthetic oligonucleotide
  Antisense strand to SEQ ID NO: 755964
augcugacuaccauuucag

SEQ ID NO: 755966 - RNA, 19 nt, Artificial Sequence
  Description of Artificial Sequence: Synthetic oligonucleotide
  Sense strand starting at position 2796 of SEQ ID NO: 586948
uuuccugagaagugaauga

SEQ ID NO: 755967 - RNA, 19 nt, Artificial Sequence
  Description of Artificial Sequence: Synthetic oligonucleotide
  Antisense strand to SEQ ID NO: 755966
ucauucacuucucaggaaa

SEQ ID NO: 755968 - RNA, 19 nt, Artificial Sequence
  Description of Artificial Sequence: Synthetic oligonucleotide
  Sense strand starting at position 2800 of SEQ ID NO: 586948
cugagaagugaaugaguca

SEQ ID NO: 755969 - RNA, 19 nt, Artificial Sequence
  Description of Artificial Sequence: Synthetic oligonucleotide
  Antisense strand to SEQ ID NO: 755968
ugacucauucacuucucag

SEQ ID NO: 755970 - RNA, 19 nt, Artificial Sequence
  Description of Artificial Sequence: Synthetic oligonucleotide
  Sense strand starting at position 2902 of SEQ ID NO: 586948
ggucaugaacuuugcaauu

SEQ ID NO: 755971 - RNA, 19 nt, Artificial Sequence
  Description of Artificial Sequence: Synthetic oligonucleotide
  Antisense strand to SEQ ID NO: 755970
aauugcaaaguucaugacc

SEQ ID NO: 755972 - RNA, 19 nt, Artificial Sequence
  Description of Artificial Sequence: Synthetic oligonucleotide
  Sense strand starting at position 2948 of SEQ ID NO: 586948
gaaucucuuguguauguuu

SEQ ID NO: 755973 - RNA, 19 nt, Artificial Sequence
  Description of Artificial Sequence: Synthetic oligonucleotide
  Antisense strand to SEQ ID NO: 755972
aaacauacacaagagauuc

SEQ ID NO: 755974 - RNA, 19 nt, Artificial Sequence
  Description of Artificial Sequence: Synthetic oligonucleotide
  Sense strand starting at position 2974 of SEQ ID NO: 586948
guauaccacugguucuuaa

SEQ ID NO: 755975 - RNA, 19 nt, Artificial Sequence
  Description of Artificial Sequence: Synthetic oligonucleotide
  Antisense strand to SEQ ID NO: 755974
uuaagaaccagugguauac

SEQ ID NO: 755976 - RNA, 19 nt, Artificial Sequence
  Description of Artificial Sequence: Synthetic oligonucleotide
  Sense strand starting at position 3016 of SEQ ID NO: 586948
aggucaaugccuggagaca

SEQ ID NO: 755977 - RNA, 19 nt, Artificial Sequence
  Description of Artificial Sequence: Synthetic oligonucleotide
  Antisense strand to SEQ ID NO: 755976
ugucuccaggcauugaccu

SEQ ID NO: 755978 - RNA, 19 nt, Artificial Sequence
  Description of Artificial Sequence: Synthetic oligonucleotide
  Sense strand starting at position 3017 of SEQ ID NO: 586948
ggucaaugccuggagacau

SEQ ID NO: 755979 - RNA, 19 nt, Artificial Sequence
  Description of Artificial Sequence: Synthetic oligonucleotide
  Antisense strand to SEQ ID NO: 755978
augucuccaggcauugacc

SEQ ID NO: 755980 - RNA, 19 nt, Artificial Sequence
  Description of Artificial Sequence: Synthetic oligonucleotide
  Sense strand starting at position 3067 of SEQ ID NO: 586948
gggaucuagugaguagaga

SEQ ID NO: 755981 - RNA, 19 nt, Artificial Sequence
  Description of Artificial Sequence: Synthetic oligonucleotide
  Antisense strand to SEQ ID NO: 755980
ucucuacucacuagauccc

SEQ ID NO: 755982 - RNA, 19 nt, Artificial Sequence
  Description of Artificial Sequence: Synthetic oligonucleotide
  Sense strand starting at position 3119 of SEQ ID NO: 586948
uugcuaucacuccaagguu

SEQ ID NO: 755983 - RNA, 19 nt, Artificial Sequence
  Description of Artificial Sequence: Synthetic oligonucleotide
  Antisense strand to SEQ ID NO: 755982
aaccuuggagugauagcaa

SEQ ID NO: 755984 - RNA, 19 nt, Artificial Sequence
  Description of Artificial Sequence: Synthetic oligonucleotide
  Sense strand starting at position 3211 of SEQ ID NO: 586948
uguauauaugcguguauuu

SEQ ID NO: 755985 - RNA, 19 nt, Artificial Sequence
  Description of Artificial Sequence: Synthetic oligonucleotide
  Antisense strand to SEQ ID NO: 755984
aaauacacgcauauauaca

SEQ ID NO: 755986 - RNA, 19 nt, Artificial Sequence
  Description of Artificial Sequence: Synthetic oligonucleotide
  Sense strand starting at position 3234 of SEQ ID NO: 586948
auuauuguuggauguauag

SEQ ID NO: 755987 - RNA, 19 nt, Artificial Sequence
  Description of Artificial Sequence: Synthetic oligonucleotide
  Antisense strand to SEQ ID NO: 755986
cuauacauccaacaauaau

SEQ ID NO: 755988 - RNA, 19 nt, Artificial Sequence
  Description of Artificial Sequence: Synthetic oligonucleotide
  Sense strand starting at position 3364 of SEQ ID NO: 586948
gcaagaacauucuuugaug

SEQ ID NO: 755989 - RNA, 19 nt, Artificial Sequence
  Description of Artificial Sequence: Synthetic oligonucleotide
  Antisense strand to SEQ ID NO: 755988
caucaaagaauguucuugc

SEQ ID NO: 755990 - RNA, 19 nt, Artificial Sequence
  Description of Artificial Sequence: Synthetic oligonucleotide
  Sense strand starting at position 3670 of SEQ ID NO: 586948
aagagcaugcuguggauau

SEQ ID NO: 755991 - RNA, 19 nt, Artificial Sequence
  Description of Artificial Sequence: Synthetic oligonucleotide
  Antisense strand to SEQ ID NO: 755990
auauccacagcaugcucuu

SEQ ID NO: 755992 - RNA, 19 nt, Artificial Sequence
  Description of Artificial Sequence: Synthetic oligonucleotide
  Sense strand starting at position 3714 of SEQ ID NO: 586948
uuucuuaaccuuggagaug

SEQ ID NO: 755993 - RNA, 19 nt, Artificial Sequence
  Description of Artificial Sequence: Synthetic oligonucleotide
  Antisense strand to SEQ ID NO: 755992
caucuccaagguuaagaaa

SEQ ID NO: 755994 - RNA, 19 nt, Artificial Sequence
  Description of Artificial Sequence: Synthetic oligonucleotide
  Sense strand starting at position 3811 of SEQ ID NO: 586948
gaaggcauucuguaccaau

SEQ ID NO: 755995 - RNA, 19 nt, Artificial Sequence
  Description of Artificial Sequence: Synthetic oligonucleotide
  Antisense strand to SEQ ID NO: 755994
auugguacagaaugccuuc

SEQ ID NO: 755996 - RNA, 19 nt, Artificial Sequence
  Description of Artificial Sequence: Synthetic oligonucleotide
  Sense strand starting at position 3858 of SEQ ID NO: 586948
auggauuucugcuccuugu

SEQ ID NO: 755997 - RNA, 19 nt, Artificial Sequence
  Description of Artificial Sequence: Synthetic oligonucleotide
  Antisense strand to SEQ ID NO: 755996
acaaggagcagaaauccau

SEQ ID NO: 755998 - RNA, 19 nt, Artificial Sequence
  Description of Artificial Sequence: Synthetic oligonucleotide
  Sense strand starting at position 3955 of SEQ ID NO: 586948
gcugguucagaggauuaag

SEQ ID NO: 755999 - RNA, 19 nt, Artificial Sequence
  Description of Artificial Sequence: Synthetic oligonucleotide
  Antisense strand to SEQ ID NO: 755998
cuuaauccucugaaccagc

SEQ ID NO: 756000 - RNA, 19 nt, Artificial Sequence
  Description of Artificial Sequence: Synthetic oligonucleotide
  Sense strand starting at position 143 of SEQ ID NO: 586949
cgugcuuccuauuuaucau

SEQ ID NO: 756001 - RNA, 19 nt, Artificial Sequence
  Description of Artificial Sequence: Synthetic oligonucleotide
  Antisense strand to SEQ ID NO: 756000
augauaaauaggaagcacg

SEQ ID NO: 756002 - RNA, 19 nt, Artificial Sequence
  Description of Artificial Sequence: Synthetic oligonucleotide
  Sense strand starting at position 276 of SEQ ID NO: 586949
aacugacuuugaucgucaa

SEQ ID NO: 756003 - RNA, 19 nt, Artificial Sequence
  Description of Artificial Sequence: Synthetic oligonucleotide
  Antisense strand to SEQ ID NO: 756002
uugacgaucaaagucaguu

SEQ ID NO: 756004 - RNA, 19 nt, Artificial Sequence
  Description of Artificial Sequence: Synthetic oligonucleotide
  Sense strand starting at position 279 of SEQ ID NO: 586949
ugacuuugaucgucaauua

SEQ ID NO: 756005 - RNA, 19 nt, Artificial Sequence
  Description of Artificial Sequence: Synthetic oligonucleotide
  Antisense strand to SEQ ID NO: 756004
uaauugacgaucaaaguca

SEQ ID NO: 756006 - RNA, 19 nt, Artificial Sequence
  Description of Artificial Sequence: Synthetic oligonucleotide
  Sense strand starting at position 280 of SEQ ID NO: 586949
gacuuugaucgucaauuaa

SEQ ID NO: 756007 - RNA, 19 nt, Artificial Sequence
  Description of Artificial Sequence: Synthetic oligonucleotide
  Antisense strand to SEQ ID NO: 756006
uuaauugacgaucaaaguc

SEQ ID NO: 756008 - RNA, 19 nt, Artificial Sequence
  Description of Artificial Sequence: Synthetic oligonucleotide
  Sense strand starting at position 331 of SEQ ID NO: 586949
aaggcaauccauugauugu

SEQ ID NO: 756009 - RNA, 19 nt, Artificial Sequence
  Description of Artificial Sequence: Synthetic oligonucleotide
  Antisense strand to SEQ ID NO: 756008
acaaucaauggauugccuu

SEQ ID NO: 756010 - RNA, 19 nt, Artificial Sequence
  Description of Artificial Sequence: Synthetic oligonucleotide
  Sense strand starting at position 337 of SEQ ID NO: 586949
auccauugauuguuagaaa

SEQ ID NO: 756011 - RNA, 19 nt, Artificial Sequence
  Description of Artificial Sequence: Synthetic oligonucleotide
  Antisense strand to SEQ ID NO: 756010
uuucuaacaaucaauggau

SEQ ID NO: 756012 - RNA, 19 nt, Artificial Sequence
  Description of Artificial Sequence: Synthetic oligonucleotide
  Sense strand starting at position 348 of SEQ ID NO: 586949
guuagaaacuuccucaguc

SEQ ID NO: 756013 - RNA, 19 nt, Artificial Sequence
  Description of Artificial Sequence: Synthetic oligonucleotide
  Antisense strand to SEQ ID NO: 756012
gacugaggaaguuucuaac

SEQ ID NO: 756014 - RNA, 19 nt, Artificial Sequence
  Description of Artificial Sequence: Synthetic oligonucleotide
  Sense strand starting at position 411 of SEQ ID NO: 586949
cucaaauacuuguuggauu

SEQ ID NO: 756015 - RNA, 19 nt, Artificial Sequence
  Description of Artificial Sequence: Synthetic oligonucleotide
  Antisense strand to SEQ ID NO: 756014
aauccaacaaguauuugag

SEQ ID NO: 756016 - RNA, 19 nt, Artificial Sequence
  Description of Artificial Sequence: Synthetic oligonucleotide
  Sense strand starting at position 413 of SEQ ID NO: 586949
caaauacuuguuggauuga

SEQ ID NO: 756017 - RNA, 19 nt, Artificial Sequence
  Description of Artificial Sequence: Synthetic oligonucleotide
  Antisense strand to SEQ ID NO: 756016
ucaauccaacaaguauuug

SEQ ID NO: 756018 - RNA, 19 nt, Artificial Sequence
  Description of Artificial Sequence: Synthetic oligonucleotide
  Sense strand starting at position 418 of SEQ ID NO: 586949
acuuguuggauugagucaa

SEQ ID NO: 756019 - RNA, 19 nt, Artificial Sequence
  Description of Artificial Sequence: Synthetic oligonucleotide
  Antisense strand to SEQ ID NO: 756018
uugacucaauccaacaagu

SEQ ID NO: 756020 - RNA, 19 nt, Artificial Sequence
  Description of Artificial Sequence: Synthetic oligonucleotide
  Sense strand starting at position 422 of SEQ ID NO: 586949
guuggauugagucaauucu

SEQ ID NO: 756021 - RNA, 19 nt, Artificial Sequence
  Description of Artificial Sequence: Synthetic oligonucleotide
  Antisense strand to SEQ ID NO: 756020
agaauugacucaauccaac

SEQ ID NO: 756022 - RNA, 19 nt, Artificial Sequence
  Description of Artificial Sequence: Synthetic oligonucleotide
  Sense strand starting at position 458 of SEQ ID NO: 586949
auuaaugaggaacguguaa

SEQ ID NO: 756023 - RNA, 19 nt, Artificial Sequence
  Description of Artificial Sequence: Synthetic oligonucleotide
  Antisense strand to SEQ ID NO: 756022
uuacacguuccucauuaau

SEQ ID NO: 756024 - RNA, 19 nt, Artificial Sequence
  Description of Artificial Sequence: Synthetic oligonucleotide
  Sense strand starting at position 561 of SEQ ID NO: 586949
cuagaaagcuuuccaagag

SEQ ID NO: 756025 - RNA, 19 nt, Artificial Sequence
  Description of Artificial Sequence: Synthetic oligonucleotide
  Antisense strand to SEQ ID NO: 756024
cucuuggaaagcuuucuag

SEQ ID NO: 756026 - RNA, 19 nt, Artificial Sequence
  Description of Artificial Sequence: Synthetic oligonucleotide
  Sense strand starting at position 565 of SEQ ID NO: 586949
aaagcuuuccaagagugca

SEQ ID NO: 756027 - RNA, 19 nt, Artificial Sequence
  Description of Artificial Sequence: Synthetic oligonucleotide
  Antisense strand to SEQ ID NO: 756026
ugcacucuuggaaagcuuu

SEQ ID NO: 756028 - RNA, 19 nt, Artificial Sequence
  Description of Artificial Sequence: Synthetic oligonucleotide
  Sense strand starting at position 588 of SEQ ID NO: 586949
agauaugagcuauagcaac

SEQ ID NO: 756029 - RNA, 19 nt, Artificial Sequence
  Description of Artificial Sequence: Synthetic oligonucleotide
  Antisense strand to SEQ ID NO: 756028
guugcuauagcucauaucu

SEQ ID NO: 756030 - RNA, 19 nt, Artificial Sequence
  Description of Artificial Sequence: Synthetic oligonucleotide
  Sense strand starting at position 687 of SEQ ID NO: 586949
gccugaaagucuucugaua

SEQ ID NO: 756031 - RNA, 19 nt, Artificial Sequence
  Description of Artificial Sequence: Synthetic oligonucleotide
  Antisense strand to SEQ ID NO: 756030
uaucagaagacuuucaggc

SEQ ID NO: 756032 - RNA, 19 nt, Artificial Sequence
  Description of Artificial Sequence: Synthetic oligonucleotide
  Sense strand starting at position 710 of SEQ ID NO: 586949
gcaauacuaccguaauuag

SEQ ID NO: 756033 - RNA, 19 nt, Artificial Sequence
  Description of Artificial Sequence: Synthetic oligonucleotide
  Antisense strand to SEQ ID NO: 756032
cuaauuacgguaguauugc

SEQ ID NO: 756034 - RNA, 19 nt, Artificial Sequence
  Description of Artificial Sequence: Synthetic oligonucleotide
  Sense strand starting at position 713 of SEQ ID NO: 586949
auacuaccguaauuagaag

SEQ ID NO: 756035 - RNA, 19 nt, Artificial Sequence
  Description of Artificial Sequence: Synthetic oligonucleotide
  Antisense strand to SEQ ID NO: 756034
cuucuaauuacgguaguau

SEQ ID NO: 756036 - RNA, 19 nt, Artificial Sequence
  Description of Artificial Sequence: Synthetic oligonucleotide
  Sense strand starting at position 771 of SEQ ID NO: 586949
aaagguugauacuucguau

SEQ ID NO: 756037 - RNA, 19 nt, Artificial Sequence
  Description of Artificial Sequence: Synthetic oligonucleotide
  Antisense strand to SEQ ID NO: 756036
auacgaaguaucaaccuuu

SEQ ID NO: 756038 - RNA, 19 nt, Artificial Sequence
  Description of Artificial Sequence: Synthetic oligonucleotide
  Sense strand starting at position 807 of SEQ ID NO: 586949
ccugcauuucuaugcugua

SEQ ID NO: 756039 - RNA, 19 nt, Artificial Sequence
  Description of Artificial Sequence: Synthetic oligonucleotide
  Antisense strand to SEQ ID NO: 756038
uacagcauagaaaugcagg

SEQ ID NO: 756040 - RNA, 19 nt, Artificial Sequence
  Description of Artificial Sequence: Synthetic oligonucleotide
  Sense strand starting at position 949 of SEQ ID NO: 586949
ccaugaauguuguuuaaau

SEQ ID NO: 756041 - RNA, 19 nt, Artificial Sequence
  Description of Artificial Sequence: Synthetic oligonucleotide
  Antisense strand to SEQ ID NO: 756040
auuuaaacaacauucaugg

SEQ ID NO: 756042 - RNA, 19 nt, Artificial Sequence
  Description of Artificial Sequence: Synthetic oligonucleotide
  Sense strand starting at position 2485 of SEQ ID NO: 586949
ggacaaugugaguaugagu

SEQ ID NO: 756043 - RNA, 19 nt, Artificial Sequence
  Description of Artificial Sequence: Synthetic oligonucleotide
  Antisense strand to SEQ ID NO: 756042
acucauacucacauugucc

SEQ ID NO: 756044 - RNA, 19 nt, Artificial Sequence
  Description of Artificial Sequence: Synthetic oligonucleotide
  Sense strand starting at position 2565 of SEQ ID NO: 586949
gcaaauauugacuauugca

SEQ ID NO: 756045 - RNA, 19 nt, Artificial Sequence
  Description of Artificial Sequence: Synthetic oligonucleotide
  Antisense strand to SEQ ID NO: 756044
ugcaauagucaauauuugc

SEQ ID NO: 756046 - RNA, 19 nt, Artificial Sequence
  Description of Artificial Sequence: Synthetic oligonucleotide
  Sense strand starting at position 2572 of SEQ ID NO: 586949
uugacuauugcacgacaag

SEQ ID NO: 756047 - RNA, 19 nt, Artificial Sequence
  Description of Artificial Sequence: Synthetic oligonucleotide
  Antisense strand to SEQ ID NO: 756046
cuugucgugcaauagucaa

SEQ ID NO: 756048 - RNA, 19 nt, Artificial Sequence
  Description of Artificial Sequence: Synthetic oligonucleotide
  Sense strand starting at position 2689 of SEQ ID NO: 586949
cugggagaauugcuugagu

SEQ ID NO: 756049 - RNA, 19 nt, Artificial Sequence
  Description of Artificial Sequence: Synthetic oligonucleotide
  Antisense strand to SEQ ID NO: 756048
acucaagcaauucucccag

SEQ ID NO: 756050 - RNA, 19 nt, Artificial Sequence
  Description of Artificial Sequence: Synthetic oligonucleotide
  Sense strand starting at position 2790 of SEQ ID NO: 586949
gcaucuagcaacugggaua

SEQ ID NO: 756051 - RNA, 19 nt, Artificial Sequence
  Description of Artificial Sequence: Synthetic oligonucleotide
  Antisense strand to SEQ ID NO: 756050
uaucccaguugcuagaugc

SEQ ID NO: 756052 - RNA, 19 nt, Artificial Sequence
  Description of Artificial Sequence: Synthetic oligonucleotide
  Sense strand starting at position 2894 of SEQ ID NO: 586949
augccuuagcaaggauuau

SEQ ID NO: 756053 - RNA, 19 nt, Artificial Sequence
  Description of Artificial Sequence: Synthetic oligonucleotide
  Antisense strand to SEQ ID NO: 756052
auaauccuugcuaaggcau

SEQ ID NO: 756054 - RNA, 19 nt, Artificial Sequence
  Description of Artificial Sequence: Synthetic oligonucleotide
  Sense strand starting at position 2898 of SEQ ID NO: 586949
cuuagcaaggauuauaguu

SEQ ID NO: 756055 - RNA, 19 nt, Artificial Sequence
  Description of Artificial Sequence: Synthetic oligonucleotide
  Antisense strand to SEQ ID NO: 756054
aacuauaauccuugcuaag

SEQ ID NO: 756056 - RNA, 19 nt, Artificial Sequence
  Description of Artificial Sequence: Synthetic oligonucleotide
  Sense strand starting at position 2956 of SEQ ID NO: 586949
gcauuucugcgcgugcaca

SEQ ID NO: 756057 - RNA, 19 nt, Artificial Sequence
  Description of Artificial Sequence: Synthetic oligonucleotide
  Antisense strand to SEQ ID NO: 756056
ugugcacgcgcagaaaugc

SEQ ID NO: 756058 - RNA, 19 nt, Artificial Sequence
  Description of Artificial Sequence: Synthetic oligonucleotide
  Sense strand starting at position 3130 of SEQ ID NO: 586949
gcuagagauucccucccua

SEQ ID NO: 756059 - RNA, 19 nt, Artificial Sequence
  Description of Artificial Sequence: Synthetic oligonucleotide
  Antisense strand to SEQ ID NO: 756058
uagggagggaaucucuagc

SEQ ID NO: 756060 - RNA, 19 nt, Artificial Sequence
  Description of Artificial Sequence: Synthetic oligonucleotide
  Sense strand starting at position 3262 of SEQ ID NO: 586949
aggguaauuuacuaaggag

SEQ ID NO: 756061 - RNA, 19 nt, Artificial Sequence
  Description of Artificial Sequence: Synthetic oligonucleotide
  Antisense strand to SEQ ID NO: 756060
cuccuuaguaaauuacccu

SEQ ID NO: 756062 - RNA, 19 nt, Artificial Sequence
  Description of Artificial Sequence: Synthetic oligonucleotide
  Sense strand starting at position 3265 of SEQ ID NO: 586949
guaauuuacuaaggaggag

SEQ ID NO: 756063 - RNA, 19 nt, Artificial Sequence
  Description of Artificial Sequence: Synthetic oligonucleotide
  Antisense strand to SEQ ID NO: 756062
cuccuccuuaguaaauuac

SEQ ID NO: 756064 - RNA, 19 nt, Artificial Sequence
  Description of Artificial Sequence: Synthetic oligonucleotide
  Sense strand starting at position 3391 of SEQ ID NO: 586949
cacuuuaaugugcauagga

SEQ ID NO: 756065 - RNA, 19 nt, Artificial Sequence
  Description of Artificial Sequence: Synthetic oligonucleotide
  Antisense strand to SEQ ID NO: 756064
uccuaugcacauuaaagug

SEQ ID NO: 756066 - RNA, 19 nt, Artificial Sequence
  Description of Artificial Sequence: Synthetic oligonucleotide
  Sense strand starting at position 3471 of SEQ ID NO: 586949
agaugugccuuucuaacag

SEQ ID NO: 756067 - RNA, 19 nt, Artificial Sequence
  Description of Artificial Sequence: Synthetic oligonucleotide
  Antisense strand to SEQ ID NO: 756066
cuguuagaaaggcacaucu

SEQ ID NO: 756068 - RNA, 19 nt, Artificial Sequence
  Description of Artificial Sequence: Synthetic oligonucleotide
  Sense strand starting at position 3654 of SEQ ID NO: 586949
cacuguucugaguacaugu

SEQ ID NO: 756069 - RNA, 19 nt, Artificial Sequence
  Description of Artificial Sequence: Synthetic oligonucleotide
  Antisense strand to SEQ ID NO: 756068
acauguacucagaacagug

SEQ ID NO: 756070 - RNA, 19 nt, Artificial Sequence
  Description of Artificial Sequence: Synthetic oligonucleotide
  Sense strand starting at position 3656 of SEQ ID NO: 586949
cuguucugaguacauguau

SEQ ID NO: 756071 - RNA, 19 nt, Artificial Sequence
  Description of Artificial Sequence: Synthetic oligonucleotide
  Antisense strand to SEQ ID NO: 756070
auacauguacucagaacag

SEQ ID NO: 756072 - RNA, 19 nt, Artificial Sequence
  Description of Artificial Sequence: Synthetic oligonucleotide
  Sense strand starting at position 3690 of SEQ ID NO: 586949
uugcuauuauuucugguuu

SEQ ID NO: 756073 - RNA, 19 nt, Artificial Sequence
  Description of Artificial Sequence: Synthetic oligonucleotide
  Antisense strand to SEQ ID NO: 756072
aaaccagaaauaauagcaa

SEQ ID NO: 756074 - RNA, 19 nt, Artificial Sequence
  Description of Artificial Sequence: Synthetic oligonucleotide
  Sense strand starting at position 3698 of SEQ ID NO: 586949
auuucugguuuagagauga

SEQ ID NO: 756075 - RNA, 19 nt, Artificial Sequence
  Description of Artificial Sequence: Synthetic oligonucleotide
  Antisense strand to SEQ ID NO: 756074
ucaucucuaaaccagaaau

SEQ ID NO: 756076 - RNA, 19 nt, Artificial Sequence
  Description of Artificial Sequence: Synthetic oligonucleotide
  Sense strand starting at position 3702 of SEQ ID NO: 586949
cugguuuagagaugaguuu

SEQ ID NO: 756077 - RNA, 19 nt, Artificial Sequence
  Description of Artificial Sequence: Synthetic oligonucleotide
  Antisense strand to SEQ ID NO: 756076
aaacucaucucuaaaccag

SEQ ID NO: 756078 - RNA, 19 nt, Artificial Sequence
  Description of Artificial Sequence: Synthetic oligonucleotide
  Sense strand starting at position 3922 of SEQ ID NO: 586949
cuggacauguacuccagaa

SEQ ID NO: 756079 - RNA, 19 nt, Artificial Sequence
  Description of Artificial Sequence: Synthetic oligonucleotide
  Antisense strand to SEQ ID NO: 756078
uucuggaguacauguccag

SEQ ID NO: 756080 - RNA, 19 nt, Artificial Sequence
  Description of Artificial Sequence: Synthetic oligonucleotide
  Sense strand starting at position 126 of SEQ ID NO: 586950
cuggcuuagucggcaaagu

SEQ ID NO: 756081 - RNA, 19 nt, Artificial Sequence
  Description of Artificial Sequence: Synthetic oligonucleotide
  Antisense strand to SEQ ID NO: 756080
acuuugccgacuaagccag

SEQ ID NO: 756082 - RNA, 19 nt, Artificial Sequence
  Description of Artificial Sequence: Synthetic oligonucleotide
  Sense strand starting at position 368 of SEQ ID NO: 586950
gcuuaauaacuccaguguu

SEQ ID NO: 756083 - RNA, 19 nt, Artificial Sequence
  Description of Artificial Sequence: Synthetic oligonucleotide
  Antisense strand to SEQ ID NO: 756082
aacacuggaguuauuaagc

SEQ ID NO: 756084 - RNA, 19 nt, Artificial Sequence
  Description of Artificial Sequence: Synthetic oligonucleotide
  Sense strand starting at position 544 of SEQ ID NO: 586950
gugagaguacgucacaaac

SEQ ID NO: 756085 - RNA, 19 nt, Artificial Sequence
  Description of Artificial Sequence: Synthetic oligonucleotide
  Antisense strand to SEQ ID NO: 756084
guuugugacguacucucac

SEQ ID NO: 756086 - RNA, 19 nt, Artificial Sequence
  Description of Artificial Sequence: Synthetic oligonucleotide
  Sense strand starting at position 1380 of SEQ ID NO: 586950
ccucaucagccgcaaaguu

SEQ ID NO: 756087 - RNA, 19 nt, Artificial Sequence
  Description of Artificial Sequence: Synthetic oligonucleotide
  Antisense strand to SEQ ID NO: 756086
aacuuugcggcugaugagg

SEQ ID NO: 756088 - RNA, 19 nt, Artificial Sequence
  Description of Artificial Sequence: Synthetic oligonucleotide
  Sense strand starting at position 3063 of SEQ ID NO: 586950
gauugaaaguuucgaagga

SEQ ID NO: 756089 - RNA, 19 nt, Artificial Sequence
  Description of Artificial Sequence: Synthetic oligonucleotide
  Antisense strand to SEQ ID NO: 756088
uccuucgaaacuuucaauc

SEQ ID NO: 756090 - RNA, 19 nt, Artificial Sequence
  Description of Artificial Sequence: Synthetic oligonucleotide
  Sense strand starting at position 116 of SEQ ID NO: 586951
gagcuuagauaucuugggu

SEQ ID NO: 756091 - RNA, 19 nt, Artificial Sequence
  Description of Artificial Sequence: Synthetic oligonucleotide
  Antisense strand to SEQ ID NO: 756090
acccaagauaucuaagcuc

SEQ ID NO: 756092 - RNA, 19 nt, Artificial Sequence
  Description of Artificial Sequence: Synthetic oligonucleotide
  Sense strand starting at position 121 of SEQ ID NO: 586951
uagauaucuugggucccau

SEQ ID NO: 756093 - RNA, 19 nt, Artificial Sequence
  Description of Artificial Sequence: Synthetic oligonucleotide
  Antisense strand to SEQ ID NO: 756092
augggacccaagauaucua

SEQ ID NO: 756094 - RNA, 19 nt, Artificial Sequence
  Description of Artificial Sequence: Synthetic oligonucleotide
  Sense strand starting at position 163 of SEQ ID NO: 586951
agugaagggucaccuaacu

SEQ ID NO: 756095 - RNA, 19 nt, Artificial Sequence
  Description of Artificial Sequence: Synthetic oligonucleotide
  Antisense strand to SEQ ID NO: 756094
aguuaggugacccuucacu

SEQ ID NO: 756096 - RNA, 19 nt, Artificial Sequence
  Description of Artificial Sequence: Synthetic oligonucleotide
  Sense strand starting at position 243 of SEQ ID NO: 586951
gauuguucggaugaucaac

SEQ ID NO: 756097 - RNA, 19 nt, Artificial Sequence
  Description of Artificial Sequence: Synthetic oligonucleotide
  Antisense strand to SEQ ID NO: 756096
guugaucauccgaacaauc

SEQ ID NO: 756098 - RNA, 19 nt, Artificial Sequence
  Description of Artificial Sequence: Synthetic oligonucleotide
  Sense strand starting at position 262 of SEQ ID NO: 586951
agagauacaaguugaguau

SEQ ID NO: 756099 - RNA, 19 nt, Artificial Sequence
  Description of Artificial Sequence: Synthetic oligonucleotide
  Antisense strand to SEQ ID NO: 756098
auacucaacuuguaucucu

SEQ ID NO: 756100 - RNA, 19 nt, Artificial Sequence
  Description of Artificial Sequence: Synthetic oligonucleotide
  Sense strand starting at position 492 of SEQ ID NO: 586951
acaaaugaguuuguguuua

SEQ ID NO: 756101 - RNA, 19 nt, Artificial Sequence
  Description of Artificial Sequence: Synthetic oligonucleotide
  Antisense strand to SEQ ID NO: 756100
uaaacacaaacucauuugu

SEQ ID NO: 756102 - RNA, 19 nt, Artificial Sequence
  Description of Artificial Sequence: Synthetic oligonucleotide
  Sense strand starting at position 494 of SEQ ID NO: 586951
aaaugaguuuguguuuaga

SEQ ID NO: 756103 - RNA, 19 nt, Artificial Sequence
  Description of Artificial Sequence: Synthetic oligonucleotide
  Antisense strand to SEQ ID NO: 756102
ucuaaacacaaacucauuu

SEQ ID NO: 756104 - RNA, 19 nt, Artificial Sequence
  Description of Artificial Sequence: Synthetic oligonucleotide
  Sense strand starting at position 638 of SEQ ID NO: 586951
acuuguaauguauagauuc

SEQ ID NO: 756105 - RNA, 19 nt, Artificial Sequence
  Description of Artificial Sequence: Synthetic oligonucleotide
  Antisense strand to SEQ ID NO: 756104
gaaucuauacauuacaagu

SEQ ID NO: 756106 - RNA, 19 nt, Artificial Sequence
  Description of Artificial Sequence: Synthetic oligonucleotide
  Sense strand starting at position 758 of SEQ ID NO: 586951
cggagccaagagugaaauu

SEQ ID NO: 756107 - RNA, 19 nt, Artificial Sequence
  Description of Artificial Sequence: Synthetic oligonucleotide
  Antisense strand to SEQ ID NO: 756106
aauuucacucuuggcuccg

SEQ ID NO: 756108 - RNA, 19 nt, Artificial Sequence
  Description of Artificial Sequence: Synthetic oligonucleotide
  Sense strand starting at position 968 of SEQ ID NO: 586951
guggacugaucuucuacau

SEQ ID NO: 756109 - RNA, 19 nt, Artificial Sequence
  Description of Artificial Sequence: Synthetic oligonucleotide
  Antisense strand to SEQ ID NO: 756108
auguagaagaucaguccac

SEQ ID NO: 756110 - RNA, 19 nt, Artificial Sequence
  Description of Artificial Sequence: Synthetic oligonucleotide
  Sense strand starting at position 995 of SEQ ID NO: 586951
guucuaccgcaucauuuau

SEQ ID NO: 756111 - RNA, 19 nt, Artificial Sequence
  Description of Artificial Sequence: Synthetic oligonucleotide
  Antisense strand to SEQ ID NO: 756110
auaaaugaugcgguagaac

SEQ ID NO: 756112 - RNA, 19 nt, Artificial Sequence
  Description of Artificial Sequence: Synthetic oligonucleotide
  Sense strand starting at position 1002 of SEQ ID NO: 586951
cgcaucauuuauguauguu

SEQ ID NO: 756113 - RNA, 19 nt, Artificial Sequence
  Description of Artificial Sequence: Synthetic oligonucleotide
  Antisense strand to SEQ ID NO: 756112
aacauacauaaaugaugcg

SEQ ID NO: 756114 - RNA, 19 nt, Artificial Sequence
  Description of Artificial Sequence: Synthetic oligonucleotide
  Sense strand starting at position 1117 of SEQ ID NO: 586951
gucagacugcuuuacaagu

SEQ ID NO: 756115 - RNA, 19 nt, Artificial Sequence
  Description of Artificial Sequence: Synthetic oligonucleotide
  Antisense strand to SEQ ID NO: 756114
acuuguaaagcagucugac

SEQ ID NO: 756116 - RNA, 19 nt, Artificial Sequence
  Description of Artificial Sequence: Synthetic oligonucleotide
  Sense strand starting at position 1211 of SEQ ID NO: 586951
gagagagugguuuggugaa

SEQ ID NO: 756117 - RNA, 19 nt, Artificial Sequence
  Description of Artificial Sequence: Synthetic oligonucleotide
  Antisense strand to SEQ ID NO: 756116
uucaccaaaccacucucuc

SEQ ID NO: 756118 - RNA, 19 nt, Artificial Sequence
  Description of Artificial Sequence: Synthetic oligonucleotide
  Sense strand starting at position 1356 of SEQ ID NO: 586951
gcaggaaugcuuugaaacu

SEQ ID NO: 756119 - RNA, 19 nt, Artificial Sequence
  Description of Artificial Sequence: Synthetic oligonucleotide
  Antisense strand to SEQ ID NO: 756118
aguuucaaagcauuccugc

SEQ ID NO: 756120 - RNA, 19 nt, Artificial Sequence
  Description of Artificial Sequence: Synthetic oligonucleotide
  Sense strand starting at position 1604 of SEQ ID NO: 586951
ccaggagcucuaggaagau

SEQ ID NO: 756121 - RNA, 19 nt, Artificial Sequence
  Description of Artificial Sequence: Synthetic oligonucleotide
  Antisense strand to SEQ ID NO: 756120
aucuuccuagagcuccugg

SEQ ID NO: 756122 - RNA, 19 nt, Artificial Sequence
  Description of Artificial Sequence: Synthetic oligonucleotide
  Sense strand starting at position 1616 of SEQ ID NO: 586951
ggaagaucacguuacugca

SEQ ID NO: 756123 - RNA, 19 nt, Artificial Sequence
  Description of Artificial Sequence: Synthetic oligonucleotide
  Antisense strand to SEQ ID NO: 756122
ugcaguaacgugaucuucc

SEQ ID NO: 756124 - RNA, 19 nt, Artificial Sequence
  Description of Artificial Sequence: Synthetic oligonucleotide
  Sense strand starting at position 1860 of SEQ ID NO: 586951
uguaguucgcagucagcuu

SEQ ID NO: 756125 - RNA, 19 nt, Artificial Sequence
  Description of Artificial Sequence: Synthetic oligonucleotide
  Antisense strand to SEQ ID NO: 756124
aagcugacugcgaacuaca

SEQ ID NO: 756126 - RNA, 19 nt, Artificial Sequence
  Description of Artificial Sequence: Synthetic oligonucleotide
  Sense strand starting at position 2236 of SEQ ID NO: 586951
auauauguaucuuugguga

SEQ ID NO: 756127 - RNA, 19 nt, Artificial Sequence
  Description of Artificial Sequence: Synthetic oligonucleotide
  Antisense strand to SEQ ID NO: 756126
ucaccaaagauacauauau

SEQ ID NO: 756128 - RNA, 19 nt, Artificial Sequence
  Description of Artificial Sequence: Synthetic oligonucleotide
  Sense strand starting at position 2241 of SEQ ID NO: 586951
uguaucuuuggugacucua

SEQ ID NO: 756129 - RNA, 19 nt, Artificial Sequence
  Description of Artificial Sequence: Synthetic oligonucleotide
  Antisense strand to SEQ ID NO: 756128
uagagucaccaaagauaca

SEQ ID NO: 756130 - RNA, 19 nt, Artificial Sequence
  Description of Artificial Sequence: Synthetic oligonucleotide
  Sense strand starting at position 2410 of SEQ ID NO: 586951
agccuuaaaggugaucuau

SEQ ID NO: 756131 - RNA, 19 nt, Artificial Sequence
  Description of Artificial Sequence: Synthetic oligonucleotide
  Antisense strand to SEQ ID NO: 756130
auagaucaccuuuaaggcu

SEQ ID NO: 756132 - RNA, 19 nt, Artificial Sequence
  Description of Artificial Sequence: Synthetic oligonucleotide
  Sense strand starting at position 2412 of SEQ ID NO: 586951
ccuuaaaggugaucuauug

SEQ ID NO: 756133 - RNA, 19 nt, Artificial Sequence
  Description of Artificial Sequence: Synthetic oligonucleotide
  Antisense strand to SEQ ID NO: 756132
caauagaucaccuuuaagg

SEQ ID NO: 756134 - RNA, 19 nt, Artificial Sequence
  Description of Artificial Sequence: Synthetic oligonucleotide
  Sense strand starting at position 2443 of SEQ ID NO: 586951
auccuagcucuuuaaggua

SEQ ID NO: 756135 - RNA, 19 nt, Artificial Sequence
  Description of Artificial Sequence: Synthetic oligonucleotide
  Antisense strand to SEQ ID NO: 756134
uaccuuaaagagcuaggau

SEQ ID NO: 756136 - RNA, 19 nt, Artificial Sequence
  Description of Artificial Sequence: Synthetic oligonucleotide
  Sense strand starting at position 2492 of SEQ ID NO: 586951
cuuagcugcgcagucaaau

SEQ ID NO: 756137 - RNA, 19 nt, Artificial Sequence
  Description of Artificial Sequence: Synthetic oligonucleotide
  Antisense strand to SEQ ID NO: 756136
auuugacugcgcagcuaag

SEQ ID NO: 756138 - RNA, 19 nt, Artificial Sequence
  Description of Artificial Sequence: Synthetic oligonucleotide
  Sense strand starting at position 2682 of SEQ ID NO: 586951
ugaacaaauguuuguuaag

SEQ ID NO: 756139 - RNA, 19 nt, Artificial Sequence
  Description of Artificial Sequence: Synthetic oligonucleotide
  Antisense strand to SEQ ID NO: 756138
cuuaacaaacauuuguuca

SEQ ID NO: 756140 - RNA, 19 nt, Artificial Sequence
  Description of Artificial Sequence: Synthetic oligonucleotide
  Sense strand starting at position 2691 of SEQ ID NO: 586951
guuuguuaagcacauauua

SEQ ID NO: 756141 - RNA, 19 nt, Artificial Sequence
  Description of Artificial Sequence: Synthetic oligonucleotide
  Antisense strand to SEQ ID NO: 756140
uaauaugugcuuaacaaac

SEQ ID NO: 756142 - RNA, 19 nt, Artificial Sequence
  Description of Artificial Sequence: Synthetic oligonucleotide
  Sense strand starting at position 2725 of SEQ ID NO: 586951
gcggcacuauucuuuauuu

SEQ ID NO: 756143 - RNA, 19 nt, Artificial Sequence
  Description of Artificial Sequence: Synthetic oligonucleotide
  Antisense strand to SEQ ID NO: 756142
aaauaaagaauagugccgc

SEQ ID NO: 756144 - RNA, 19 nt, Artificial Sequence
  Description of Artificial Sequence: Synthetic oligonucleotide
  Sense strand starting at position 2791 of SEQ ID NO: 586951
agggaaacguguuuacacu

SEQ ID NO: 756145 - RNA, 19 nt, Artificial Sequence
  Description of Artificial Sequence: Synthetic oligonucleotide
  Antisense strand to SEQ ID NO: 756144
aguguaaacacguuucccu

SEQ ID NO: 756146 - RNA, 19 nt, Artificial Sequence
  Description of Artificial Sequence: Synthetic oligonucleotide
  Sense strand starting at position 2792 of SEQ ID NO: 586951
gggaaacguguuuacacuu

SEQ ID NO: 756147 - RNA, 19 nt, Artificial Sequence
  Description of Artificial Sequence: Synthetic oligonucleotide
  Antisense strand to SEQ ID NO: 756146
aaguguaaacacguuuccc

SEQ ID NO: 756148 - RNA, 19 nt, Artificial Sequence
  Description of Artificial Sequence: Synthetic oligonucleotide
  Sense strand starting at position 2819 of SEQ ID NO: 586951
cuucccagugucuacuaua

SEQ ID NO: 756149 - RNA, 19 nt, Artificial Sequence
  Description of Artificial Sequence: Synthetic oligonucleotide
  Antisense strand to SEQ ID NO: 756148
uauaguagacacugggaag

SEQ ID NO: 756150 - RNA, 19 nt, Artificial Sequence
  Description of Artificial Sequence: Synthetic oligonucleotide
  Sense strand starting at position 2940 of SEQ ID NO: 586951
uuuggaaugcuauauuguu

SEQ ID NO: 756151 - RNA, 19 nt, Artificial Sequence
  Description of Artificial Sequence: Synthetic oligonucleotide
  Antisense strand to SEQ ID NO: 756150
aacaauauagcauuccaaa

SEQ ID NO: 756152 - RNA, 19 nt, Artificial Sequence
  Description of Artificial Sequence: Synthetic oligonucleotide
  Sense strand starting at position 2990 of SEQ ID NO: 586951
gaagucuuucucgagaucu

SEQ ID NO: 756153 - RNA, 19 nt, Artificial Sequence
  Description of Artificial Sequence: Synthetic oligonucleotide
  Antisense strand to SEQ ID NO: 756152
agaucucgagaaagacuuc

SEQ ID NO: 756154 - RNA, 19 nt, Artificial Sequence
  Description of Artificial Sequence: Synthetic oligonucleotide
  Sense strand starting at position 2992 of SEQ ID NO: 586951
agucuuucucgagaucuac

SEQ ID NO: 756155 - RNA, 19 nt, Artificial Sequence
  Description of Artificial Sequence: Synthetic oligonucleotide
  Antisense strand to SEQ ID NO: 756154
guagaucucgagaaagacu

SEQ ID NO: 756156 - RNA, 19 nt, Artificial Sequence
  Description of Artificial Sequence: Synthetic oligonucleotide
  Sense strand starting at position 3070 of SEQ ID NO: 586951
ugaaguacucguuaucgag

SEQ ID NO: 756157 - RNA, 19 nt, Artificial Sequence
  Description of Artificial Sequence: Synthetic oligonucleotide
  Antisense strand to SEQ ID NO: 756156
cucgauaacgaguacuuca

SEQ ID NO: 756158 - RNA, 19 nt, Artificial Sequence
  Description of Artificial Sequence: Synthetic oligonucleotide
  Sense strand starting at position 3194 of SEQ ID NO: 586951
auucuagaauuugagaacu

SEQ ID NO: 756159 - RNA, 19 nt, Artificial Sequence
  Description of Artificial Sequence: Synthetic oligonucleotide
  Antisense strand to SEQ ID NO: 756158
aguucucaaauucuagaau

SEQ ID NO: 756160 - RNA, 19 nt, Artificial Sequence
  Description of Artificial Sequence: Synthetic oligonucleotide
  Sense strand starting at position 3473 of SEQ ID NO: 586951
guggacuaucugggaguga

SEQ ID NO: 756161 - RNA, 19 nt, Artificial Sequence
  Description of Artificial Sequence: Synthetic oligonucleotide
  Antisense strand to SEQ ID NO: 756160
ucacucccagauaguccac

SEQ ID NO: 756162 - RNA, 19 nt, Artificial Sequence
  Description of Artificial Sequence: Synthetic oligonucleotide
  Sense strand starting at position 3567 of SEQ ID NO: 586951
uggauuucauuagagguga

SEQ ID NO: 756163 - RNA, 19 nt, Artificial Sequence
  Description of Artificial Sequence: Synthetic oligonucleotide
  Antisense strand to SEQ ID NO: 756162
ucaccucuaaugaaaucca

SEQ ID NO: 756164 - RNA, 19 nt, Artificial Sequence
  Description of Artificial Sequence: Synthetic oligonucleotide
  Sense strand starting at position 3638 of SEQ ID NO: 586951
cuuaaaggauguucuaaac

SEQ ID NO: 756165 - RNA, 19 nt, Artificial Sequence
  Description of Artificial Sequence: Synthetic oligonucleotide
  Antisense strand to SEQ ID NO: 756164
guuuagaacauccuuuaag

SEQ ID NO: 756166 - RNA, 19 nt, Artificial Sequence
  Description of Artificial Sequence: Synthetic oligonucleotide
  Sense strand starting at position 3720 of SEQ ID NO: 586951
gccugaguacuguaauauu

SEQ ID NO: 756167 - RNA, 19 nt, Artificial Sequence
  Description of Artificial Sequence: Synthetic oligonucleotide
  Antisense strand to SEQ ID NO: 756166
aauauuacaguacucaggc

SEQ ID NO: 756168 - RNA, 19 nt, Artificial Sequence
  Description of Artificial Sequence: Synthetic oligonucleotide
  Sense strand starting at position 3788 of SEQ ID NO: 586951
uacugcagugaguauuaau

SEQ ID NO: 756169 - RNA, 19 nt, Artificial Sequence
  Description of Artificial Sequence: Synthetic oligonucleotide
  Antisense strand to SEQ ID NO: 756168
auuaauacucacugcagua

SEQ ID NO: 756170 - RNA, 19 nt, Artificial Sequence
  Description of Artificial Sequence: Synthetic oligonucleotide
  Sense strand starting at position 59 of SEQ ID NO: 586952
aguuaauggucacugcagu

SEQ ID NO: 756171 - RNA, 19 nt, Artificial Sequence
  Description of Artificial Sequence: Synthetic oligonucleotide
  Antisense strand to SEQ ID NO: 756170
acugcagugaccauuaacu

SEQ ID NO: 756172 - RNA, 19 nt, Artificial Sequence
  Description of Artificial Sequence: Synthetic oligonucleotide
  Sense strand starting at position 136 of SEQ ID NO: 586952
gcaguugauccugacagcu

SEQ ID NO: 756173 - RNA, 19 nt, Artificial Sequence
  Description of Artificial Sequence: Synthetic oligonucleotide
  Antisense strand to SEQ ID NO: 756172
agcugucaggaucaacugc

SEQ ID NO: 756174 - RNA, 19 nt, Artificial Sequence
  Description of Artificial Sequence: Synthetic oligonucleotide
  Sense strand starting at position 152 of SEQ ID NO: 586952
gcuagaaagcagcaagaua

SEQ ID NO: 756175 - RNA, 19 nt, Artificial Sequence
  Description of Artificial Sequence: Synthetic oligonucleotide
  Antisense strand to SEQ ID NO: 756174
uaucuugcugcuuucuagc

SEQ ID NO: 756176 - RNA, 19 nt, Artificial Sequence
  Description of Artificial Sequence: Synthetic oligonucleotide
  Sense strand starting at position 166 of SEQ ID NO: 586952
agauacuguugacuuaacu

SEQ ID NO: 756177 - RNA, 19 nt, Artificial Sequence
  Description of Artificial Sequence: Synthetic oligonucleotide
  Antisense strand to SEQ ID NO: 756176
aguuaagucaacaguaucu

SEQ ID NO: 756178 - RNA, 19 nt, Artificial Sequence
  Description of Artificial Sequence: Synthetic oligonucleotide
  Sense strand starting at position 208 of SEQ ID NO: 586952
ucaccuucuuaggcagaga

SEQ ID NO: 756179 - RNA, 19 nt, Artificial Sequence
  Description of Artificial Sequence: Synthetic oligonucleotide
  Antisense strand to SEQ ID NO: 756178
ucucugccuaagaagguga

SEQ ID NO: 756180 - RNA, 19 nt, Artificial Sequence
  Description of Artificial Sequence: Synthetic oligonucleotide
  Sense strand starting at position 978 of SEQ ID NO: 586952
gauaauuuauauggaguuc

SEQ ID NO: 756181 - RNA, 19 nt, Artificial Sequence
  Description of Artificial Sequence: Synthetic oligonucleotide
  Antisense strand to SEQ ID NO: 756180
gaacuccauauaaauuauc

SEQ ID NO: 756182 - RNA, 19 nt, Artificial Sequence
  Description of Artificial Sequence: Synthetic oligonucleotide
  Sense strand starting at position 1276 of SEQ ID NO: 586952
gggacacauucccauuauc

SEQ ID NO: 756183 - RNA, 19 nt, Artificial Sequence
  Description of Artificial Sequence: Synthetic oligonucleotide
  Antisense strand to SEQ ID NO: 756182
gauaaugggaauguguccc

SEQ ID NO: 756184 - RNA, 19 nt, Artificial Sequence
  Description of Artificial Sequence: Synthetic oligonucleotide
  Sense strand starting at position 1383 of SEQ ID NO: 586952
ucaugcuaguuaccagaaa

SEQ ID NO: 756185 - RNA, 19 nt, Artificial Sequence
  Description of Artificial Sequence: Synthetic oligonucleotide
  Antisense strand to SEQ ID NO: 756184
uuucugguaacuagcauga

SEQ ID NO: 756186 - RNA, 19 nt, Artificial Sequence
  Description of Artificial Sequence: Synthetic oligonucleotide
  Sense strand starting at position 2111 of SEQ ID NO: 586952
ggaccuggccaguaauguu

SEQ ID NO: 756187 - RNA, 19 nt, Artificial Sequence
  Description of Artificial Sequence: Synthetic oligonucleotide
  Antisense strand to SEQ ID NO: 756186
aacauuacuggccaggucc

SEQ ID NO: 756188 - RNA, 19 nt, Artificial Sequence
  Description of Artificial Sequence: Synthetic oligonucleotide
  Sense strand starting at position 2119 of SEQ ID NO: 586952
ccaguaauguuagcugcaa

SEQ ID NO: 756189 - RNA, 19 nt, Artificial Sequence
  Description of Artificial Sequence: Synthetic oligonucleotide
  Antisense strand to SEQ ID NO: 756188
uugcagcuaacauuacugg

SEQ ID NO: 756190 - RNA, 19 nt, Artificial Sequence
  Description of Artificial Sequence: Synthetic oligonucleotide
  Sense strand starting at position 2120 of SEQ ID NO: 586952
caguaauguuagcugcaaa

SEQ ID NO: 756191 - RNA, 19 nt, Artificial Sequence
  Description of Artificial Sequence: Synthetic oligonucleotide
  Antisense strand to SEQ ID NO: 756190
uuugcagcuaacauuacug

SEQ ID NO: 756192 - RNA, 19 nt, Artificial Sequence
  Description of Artificial Sequence: Synthetic oligonucleotide
  Sense strand starting at position 2170 of SEQ ID NO: 586952
ggagaacuggugcauccuu

SEQ ID NO: 756193 - RNA, 19 nt, Artificial Sequence
  Description of Artificial Sequence: Synthetic oligonucleotide
  Antisense strand to SEQ ID NO: 756192
aaggaugcaccaguucucc

SEQ ID NO: 756194 - RNA, 19 nt, Artificial Sequence
  Description of Artificial Sequence: Synthetic oligonucleotide
  Sense strand starting at position 2220 of SEQ ID NO: 586952
agcgguauucggucuuugu

SEQ ID NO: 756195 - RNA, 19 nt, Artificial Sequence
  Description of Artificial Sequence: Synthetic oligonucleotide
  Antisense strand to SEQ ID NO: 756194
acaaagaccgaauaccgcu

SEQ ID NO: 756196 - RNA, 19 nt, Artificial Sequence
  Description of Artificial Sequence: Synthetic oligonucleotide
  Sense strand starting at position 2221 of SEQ ID NO: 586952
gcgguauucggucuuuguu

SEQ ID NO: 756197 - RNA, 19 nt, Artificial Sequence
  Description of Artificial Sequence: Synthetic oligonucleotide
  Antisense strand to SEQ ID NO: 756196
aacaaagaccgaauaccgc

SEQ ID NO: 756198 - RNA, 19 nt, Artificial Sequence
  Description of Artificial Sequence: Synthetic oligonucleotide
  Sense strand starting at position 2222 of SEQ ID NO: 586952
cgguauucggucuuuguuu

SEQ ID NO: 756199 - RNA, 19 nt, Artificial Sequence
  Description of Artificial Sequence: Synthetic oligonucleotide
  Antisense strand to SEQ ID NO: 756198
aaacaaagaccgaauaccg

SEQ ID NO: 756200 - RNA, 19 nt, Artificial Sequence
  Description of Artificial Sequence: Synthetic oligonucleotide
  Sense strand starting at position 2289 of SEQ ID NO: 586952
uuaggugucuaauuaaaug

SEQ ID NO: 756201 - RNA, 19 nt, Artificial Sequence
  Description of Artificial Sequence: Synthetic oligonucleotide
  Antisense strand to SEQ ID NO: 756200
cauuuaauuagacaccuaa

SEQ ID NO: 756202 - RNA, 19 nt, Artificial Sequence
  Description of Artificial Sequence: Synthetic oligonucleotide
  Sense strand starting at position 2525 of SEQ ID NO: 586952
gaggcuggcagcugugauu

SEQ ID NO: 756203 - RNA, 19 nt, Artificial Sequence
  Description of Artificial Sequence: Synthetic oligonucleotide
  Antisense strand to SEQ ID NO: 756202
aaucacagcugccagccuc

SEQ ID NO: 756204 - RNA, 19 nt, Artificial Sequence
  Description of Artificial Sequence: Synthetic oligonucleotide
  Sense strand starting at position 2653 of SEQ ID NO: 586952
ggagcaucauuugagaaca

SEQ ID NO: 756205 - RNA, 19 nt, Artificial Sequence
  Description of Artificial Sequence: Synthetic oligonucleotide
  Antisense strand to SEQ ID NO: 756204
uguucucaaaugaugcucc

SEQ ID NO: 756206 - RNA, 19 nt, Artificial Sequence
  Description of Artificial Sequence: Synthetic oligonucleotide
  Sense strand starting at position 2655 of SEQ ID NO: 586952
agcaucauuugagaacaag

SEQ ID NO: 756207 - RNA, 19 nt, Artificial Sequence
  Description of Artificial Sequence: Synthetic oligonucleotide
  Antisense strand to SEQ ID NO: 756206
cuuguucucaaaugaugcu

SEQ ID NO: 756208 - RNA, 19 nt, Artificial Sequence
  Description of Artificial Sequence: Synthetic oligonucleotide
  Sense strand starting at position 2732 of SEQ ID NO: 586952
gccgccaccguuucuuaaa

SEQ ID NO: 756209 - RNA, 19 nt, Artificial Sequence
  Description of Artificial Sequence: Synthetic oligonucleotide
  Antisense strand to SEQ ID NO: 756208
uuuaagaaacgguggcggc

SEQ ID NO: 756210 - RNA, 19 nt, Artificial Sequence
  Description of Artificial Sequence: Synthetic oligonucleotide
  Sense strand starting at position 2764 of SEQ ID NO: 586952
uacagacacuuguucgaau

SEQ ID NO: 756211 - RNA, 19 nt, Artificial Sequence
  Description of Artificial Sequence: Synthetic oligonucleotide
  Antisense strand to SEQ ID NO: 756210
auucgaacaagugucugua

SEQ ID NO: 756212 - RNA, 19 nt, Artificial Sequence
  Description of Artificial Sequence: Synthetic oligonucleotide
  Sense strand starting at position 2765 of SEQ ID NO: 586952
acagacacuuguucgaauu

SEQ ID NO: 756213 - RNA, 19 nt, Artificial Sequence
  Description of Artificial Sequence: Synthetic oligonucleotide
  Antisense strand to SEQ ID NO: 756212
aauucgaacaagugucugu

SEQ ID NO: 756214 - RNA, 19 nt, Artificial Sequence
  Description of Artificial Sequence: Synthetic oligonucleotide
  Sense strand starting at position 2942 of SEQ ID NO: 586952
ccacucauguuggcuuuau

SEQ ID NO: 756215 - RNA, 19 nt, Artificial Sequence
  Description of Artificial Sequence: Synthetic oligonucleotide
  Antisense strand to SEQ ID NO: 756214
auaaagccaacaugagugg

SEQ ID NO: 756216 - RNA, 19 nt, Artificial Sequence
  Description of Artificial Sequence: Synthetic oligonucleotide
  Sense strand starting at position 2952 of SEQ ID NO: 586952
uggcuuuauccagaagcaa

SEQ ID NO: 756217 - RNA, 19 nt, Artificial Sequence
  Description of Artificial Sequence: Synthetic oligonucleotide
  Antisense strand to SEQ ID NO: 756216
uugcuucuggauaaagcca

SEQ ID NO: 756218 - RNA, 19 nt, Artificial Sequence
  Description of Artificial Sequence: Synthetic oligonucleotide
  Sense strand starting at position 3339 of SEQ ID NO: 586952
uucgcauaucuuuauagca

SEQ ID NO: 756219 - RNA, 19 nt, Artificial Sequence
  Description of Artificial Sequence: Synthetic oligonucleotide
  Antisense strand to SEQ ID NO: 756218
ugcuauaaagauaugcgaa

SEQ ID NO: 756220 - RNA, 19 nt, Artificial Sequence
  Description of Artificial Sequence: Synthetic oligonucleotide
  Sense strand starting at position 3346 of SEQ ID NO: 586952
aucuuuauagcaggaggua

SEQ ID NO: 756221 - RNA, 19 nt, Artificial Sequence
  Description of Artificial Sequence: Synthetic oligonucleotide
  Antisense strand to SEQ ID NO: 756220
uaccuccugcuauaaagau

SEQ ID NO: 756222 - RNA, 19 nt, Artificial Sequence
  Description of Artificial Sequence: Synthetic oligonucleotide
  Sense strand starting at position 3488 of SEQ ID NO: 586952
aggauacauuucugaguug

SEQ ID NO: 756223 - RNA, 19 nt, Artificial Sequence
  Description of Artificial Sequence: Synthetic oligonucleotide
  Antisense strand to SEQ ID NO: 756222
caacucagaaauguauccu

SEQ ID NO: 756224 - RNA, 19 nt, Artificial Sequence
  Description of Artificial Sequence: Synthetic oligonucleotide
  Sense strand starting at position 3489 of SEQ ID NO: 586952
ggauacauuucugaguugu

SEQ ID NO: 756225 - RNA, 19 nt, Artificial Sequence
  Description of Artificial Sequence: Synthetic oligonucleotide
  Antisense strand to SEQ ID NO: 756224
acaacucagaaauguaucc

SEQ ID NO: 756226 - RNA, 19 nt, Artificial Sequence
  Description of Artificial Sequence: Synthetic oligonucleotide
  Sense strand starting at position 3502 of SEQ ID NO: 586952
aguugugauacuggcaaga

SEQ ID NO: 756227 - RNA, 19 nt, Artificial Sequence
  Description of Artificial Sequence: Synthetic oligonucleotide
  Antisense strand to SEQ ID NO: 756226
ucuugccaguaucacaacu

SEQ ID NO: 756228 - RNA, 19 nt, Artificial Sequence
  Description of Artificial Sequence: Synthetic oligonucleotide
  Sense strand starting at position 3520 of SEQ ID NO: 586952
aggcucauuucgccguuau

SEQ ID NO: 756229 - RNA, 19 nt, Artificial Sequence
  Description of Artificial Sequence: Synthetic oligonucleotide
  Antisense strand to SEQ ID NO: 756228
auaacggcgaaaugagccu

SEQ ID NO: 756230 - RNA, 19 nt, Artificial Sequence
  Description of Artificial Sequence: Synthetic oligonucleotide
  Sense strand starting at position 3521 of SEQ ID NO: 586952
ggcucauuucgccguuaua

SEQ ID NO: 756231 - RNA, 19 nt, Artificial Sequence
  Description of Artificial Sequence: Synthetic oligonucleotide
  Antisense strand to SEQ ID NO: 756230
uauaacggcgaaaugagcc

SEQ ID NO: 756232 - RNA, 19 nt, Artificial Sequence
  Description of Artificial Sequence: Synthetic oligonucleotide
  Sense strand starting at position 3524 of SEQ ID NO: 586952
ucauuucgccguuauaaag

SEQ ID NO: 756233 - RNA, 19 nt, Artificial Sequence
  Description of Artificial Sequence: Synthetic oligonucleotide
  Antisense strand to SEQ ID NO: 756232
cuuuauaacggcgaaauga

SEQ ID NO: 756234 - RNA, 19 nt, Artificial Sequence
  Description of Artificial Sequence: Synthetic oligonucleotide
  Sense strand starting at position 3530 of SEQ ID NO: 586952
cgccguuauaaagauuugu

SEQ ID NO: 756235 - RNA, 19 nt, Artificial Sequence
  Description of Artificial Sequence: Synthetic oligonucleotide
  Antisense strand to SEQ ID NO: 756234
acaaaucuuuauaacggcg

SEQ ID NO: 756236 - RNA, 19 nt, Artificial Sequence
  Description of Artificial Sequence: Synthetic oligonucleotide
  Sense strand starting at position 3625 of SEQ ID NO: 586952
aggaauuaagccuguuauu

SEQ ID NO: 756237 - RNA, 19 nt, Artificial Sequence
  Description of Artificial Sequence: Synthetic oligonucleotide
  Antisense strand to SEQ ID NO: 756236
aauaacaggcuuaauuccu

SEQ ID NO: 756238 - RNA, 19 nt, Artificial Sequence
  Description of Artificial Sequence: Synthetic oligonucleotide
  Sense strand starting at position 3658 of SEQ ID NO: 586952
gcccuuauacagugguagu

SEQ ID NO: 756239 - RNA, 19 nt, Artificial Sequence
  Description of Artificial Sequence: Synthetic oligonucleotide
  Antisense strand to SEQ ID NO: 756238
acuaccacuguauaagggc

SEQ ID NO: 756240 - RNA, 19 nt, Artificial Sequence
  Description of Artificial Sequence: Synthetic oligonucleotide
  Sense strand starting at position 3659 of SEQ ID NO: 586952
cccuuauacagugguaguu

SEQ ID NO: 756241 - RNA, 19 nt, Artificial Sequence
  Description of Artificial Sequence: Synthetic oligonucleotide
  Antisense strand to SEQ ID NO: 756240
aacuaccacuguauaaggg

SEQ ID NO: 756242 - RNA, 19 nt, Artificial Sequence
  Description of Artificial Sequence: Synthetic oligonucleotide
  Sense strand starting at position 3725 of SEQ ID NO: 586952
ggagaaauaugaugucagg

SEQ ID NO: 756243 - RNA, 19 nt, Artificial Sequence
  Description of Artificial Sequence: Synthetic oligonucleotide
  Antisense strand to SEQ ID NO: 756242
ccugacaucauauuucucc

SEQ ID NO: 756244 - RNA, 19 nt, Artificial Sequence
  Description of Artificial Sequence: Synthetic oligonucleotide
  Sense strand starting at position 3728 of SEQ ID NO: 586952
gaaauaugaugucagggug

SEQ ID NO: 756245 - RNA, 19 nt, Artificial Sequence
  Description of Artificial Sequence: Synthetic oligonucleotide
  Antisense strand to SEQ ID NO: 756244
cacccugacaucauauuuc

SEQ ID NO: 756246 - RNA, 19 nt, Artificial Sequence
  Description of Artificial Sequence: Synthetic oligonucleotide
  Sense strand starting at position 3734 of SEQ ID NO: 586952
ugaugucagggugagcaaa

SEQ ID NO: 756247 - RNA, 19 nt, Artificial Sequence
  Description of Artificial Sequence: Synthetic oligonucleotide
  Antisense strand to SEQ ID NO: 756246
uuugcucacccugacauca

SEQ ID NO: 756248 - RNA, 19 nt, Artificial Sequence
  Description of Artificial Sequence: Synthetic oligonucleotide
  Sense strand starting at position 3931 of SEQ ID NO: 586952
auaugagguagccagagua

SEQ ID NO: 756249 - RNA, 19 nt, Artificial Sequence
  Description of Artificial Sequence: Synthetic oligonucleotide
  Antisense strand to SEQ ID NO: 756248
uacucuggcuaccucauau

SEQ ID NO: 756250 - RNA, 19 nt, Artificial Sequence
  Description of Artificial Sequence: Synthetic oligonucleotide
  Sense strand starting at position 36 of SEQ ID NO: 586953
gccucucaacccggagauu

SEQ ID NO: 756251 - RNA, 19 nt, Artificial Sequence
  Description of Artificial Sequence: Synthetic oligonucleotide
  Antisense strand to SEQ ID NO: 756250
aaucuccggguugagaggc

SEQ ID NO: 756252 - RNA, 19 nt, Artificial Sequence
  Description of Artificial Sequence: Synthetic oligonucleotide
  Sense strand starting at position 808 of SEQ ID NO: 586953
cggcaccucugaguguaaa

SEQ ID NO: 756253 - RNA, 19 nt, Artificial Sequence
  Description of Artificial Sequence: Synthetic oligonucleotide
  Antisense strand to SEQ ID NO: 756252
uuuacacucagaggugccg

SEQ ID NO: 756254 - RNA, 19 nt, Artificial Sequence
  Description of Artificial Sequence: Synthetic oligonucleotide
  Sense strand starting at position 2081 of SEQ ID NO: 586953
guugcuuccugggacuuga

SEQ ID NO: 756255 - RNA, 19 nt, Artificial Sequence
  Description of Artificial Sequence: Synthetic oligonucleotide
  Antisense strand to SEQ ID NO: 756254
ucaagucccaggaagcaac

SEQ ID NO: 756256 - RNA, 19 nt, Artificial Sequence
  Description of Artificial Sequence: Synthetic oligonucleotide
  Sense strand starting at position 2092 of SEQ ID NO: 586953
ggacuugaaguccaagguu

SEQ ID NO: 756257 - RNA, 19 nt, Artificial Sequence
  Description of Artificial Sequence: Synthetic oligonucleotide
  Antisense strand to SEQ ID NO: 756256
aaccuuggacuucaagucc

SEQ ID NO: 756258 - RNA, 19 nt, Artificial Sequence
  Description of Artificial Sequence: Synthetic oligonucleotide
  Sense strand starting at position 2108 of SEQ ID NO: 586953
guuugccuccgcgguagaa

SEQ ID NO: 756259 - RNA, 19 nt, Artificial Sequence
  Description of Artificial Sequence: Synthetic oligonucleotide
  Antisense strand to SEQ ID NO: 756258
uucuaccgcggaggcaaac

SEQ ID NO: 756260 - RNA, 19 nt, Artificial Sequence
  Description of Artificial Sequence: Synthetic oligonucleotide
  Sense strand starting at position 2109 of SEQ ID NO: 586953
uuugccuccgcgguagaaa

SEQ ID NO: 756261 - RNA, 19 nt, Artificial Sequence
  Description of Artificial Sequence: Synthetic oligonucleotide
  Antisense strand to SEQ ID NO: 756260
uuucuaccgcggaggcaaa

SEQ ID NO: 756262 - RNA, 19 nt, Artificial Sequence
  Description of Artificial Sequence: Synthetic oligonucleotide
  Sense strand starting at position 2405 of SEQ ID NO: 586953
auggaaucucgagauguuc

SEQ ID NO: 756263 - RNA, 19 nt, Artificial Sequence
  Description of Artificial Sequence: Synthetic oligonucleotide
  Antisense strand to SEQ ID NO: 756262
gaacaucucgagauuccau

SEQ ID NO: 756264 - RNA, 19 nt, Artificial Sequence
  Description of Artificial Sequence: Synthetic oligonucleotide
  Sense strand starting at position 2407 of SEQ ID NO: 586953
ggaaucucgagauguuccu

SEQ ID NO: 756265 - RNA, 19 nt, Artificial Sequence
  Description of Artificial Sequence: Synthetic oligonucleotide
  Antisense strand to SEQ ID NO: 756264
aggaacaucucgagauucc

SEQ ID NO: 756266 - RNA, 19 nt, Artificial Sequence
  Description of Artificial Sequence: Synthetic oligonucleotide
  Sense strand starting at position 2413 of SEQ ID NO: 586953
ucgagauguuccugcaaga

SEQ ID NO: 756267 - RNA, 19 nt, Artificial Sequence
  Description of Artificial Sequence: Synthetic oligonucleotide
  Antisense strand to SEQ ID NO: 756266
ucuugcaggaacaucucga

SEQ ID NO: 756268 - RNA, 19 nt, Artificial Sequence
  Description of Artificial Sequence: Synthetic oligonucleotide
  Sense strand starting at position 2471 of SEQ ID NO: 586953
cucccuuaccgucagcaau

SEQ ID NO: 756269 - RNA, 19 nt, Artificial Sequence
  Description of Artificial Sequence: Synthetic oligonucleotide
  Antisense strand to SEQ ID NO: 756268
auugcugacgguaagggag

SEQ ID NO: 756270 - RNA, 19 nt, Artificial Sequence
  Description of Artificial Sequence: Synthetic oligonucleotide
  Sense strand starting at position 2634 of SEQ ID NO: 586953
ccgcgacacuuccugaaau

SEQ ID NO: 756271 - RNA, 19 nt, Artificial Sequence
  Description of Artificial Sequence: Synthetic oligonucleotide
  Antisense strand to SEQ ID NO: 756270
auuucaggaagugucgcgg

SEQ ID NO: 756272 - RNA, 19 nt, Artificial Sequence
  Description of Artificial Sequence: Synthetic oligonucleotide
  Sense strand starting at position 2635 of SEQ ID NO: 586953
cgcgacacuuccugaaauu

SEQ ID NO: 756273 - RNA, 19 nt, Artificial Sequence
  Description of Artificial Sequence: Synthetic oligonucleotide
  Antisense strand to SEQ ID NO: 756272
aauuucaggaagugucgcg

SEQ ID NO: 756274 - RNA, 19 nt, Artificial Sequence
  Description of Artificial Sequence: Synthetic oligonucleotide
  Sense strand starting at position 2703 of SEQ ID NO: 586953
ccucguuucuugcugcaga

SEQ ID NO: 756275 - RNA, 19 nt, Artificial Sequence
  Description of Artificial Sequence: Synthetic oligonucleotide
  Antisense strand to SEQ ID NO: 756274
ucugcagcaagaaacgagg

SEQ ID NO: 756276 - RNA, 19 nt, Artificial Sequence
  Description of Artificial Sequence: Synthetic oligonucleotide
  Sense strand starting at position 2986 of SEQ ID NO: 586953
ggaggcauuuccuggcuua

SEQ ID NO: 756277 - RNA, 19 nt, Artificial Sequence
  Description of Artificial Sequence: Synthetic oligonucleotide
  Antisense strand to SEQ ID NO: 756276
uaagccaggaaaugccucc

SEQ ID NO: 756278 - RNA, 19 nt, Artificial Sequence
  Description of Artificial Sequence: Synthetic oligonucleotide
  Sense strand starting at position 2987 of SEQ ID NO: 586953
gaggcauuuccuggcuuag

SEQ ID NO: 756279 - RNA, 19 nt, Artificial Sequence
  Description of Artificial Sequence: Synthetic oligonucleotide
  Antisense strand to SEQ ID NO: 756278
cuaagccaggaaaugccuc

SEQ ID NO: 756280 - RNA, 19 nt, Artificial Sequence
  Description of Artificial Sequence: Synthetic oligonucleotide
  Sense strand starting at position 3084 of SEQ ID NO: 586953
ccgggagacucaugagauc

SEQ ID NO: 756281 - RNA, 19 nt, Artificial Sequence
  Description of Artificial Sequence: Synthetic oligonucleotide
  Antisense strand to SEQ ID NO: 756280
gaucucaugagucucccgg

SEQ ID NO: 756282 - RNA, 19 nt, Artificial Sequence
  Description of Artificial Sequence: Synthetic oligonucleotide
  Sense strand starting at position 3095 of SEQ ID NO: 586953
augagaucguggcucugaa

SEQ ID NO: 756283 - RNA, 19 nt, Artificial Sequence
  Description of Artificial Sequence: Synthetic oligonucleotide
  Antisense strand to SEQ ID NO: 756282
uucagagccacgaucucau

SEQ ID NO: 756284 - RNA, 19 nt, Artificial Sequence
  Description of Artificial Sequence: Synthetic oligonucleotide
  Sense strand starting at position 3263 of SEQ ID NO: 586953
agaucugccuacucaagga

SEQ ID NO: 756285 - RNA, 19 nt, Artificial Sequence
  Description of Artificial Sequence: Synthetic oligonucleotide
  Antisense strand to SEQ ID NO: 756284
uccuugaguaggcagaucu

SEQ ID NO: 756286 - RNA, 19 nt, Artificial Sequence
  Description of Artificial Sequence: Synthetic oligonucleotide
  Sense strand starting at position 3437 of SEQ ID NO: 586953
gcgacaagaagcugacuuu

SEQ ID NO: 756287 - RNA, 19 nt, Artificial Sequence
  Description of Artificial Sequence: Synthetic oligonucleotide
  Antisense strand to SEQ ID NO: 756286
aaagucagcuucuugucgc

SEQ ID NO: 756288 - RNA, 19 nt, Artificial Sequence
  Description of Artificial Sequence: Synthetic oligonucleotide
  Sense strand starting at position 3463 of SEQ ID NO: 586953
gaauucugugaccagguga

SEQ ID NO: 756289 - RNA, 19 nt, Artificial Sequence
  Description of Artificial Sequence: Synthetic oligonucleotide
  Antisense strand to SEQ ID NO: 756288
ucaccuggucacagaauuc

SEQ ID NO: 756290 - RNA, 19 nt, Artificial Sequence
  Description of Artificial Sequence: Synthetic oligonucleotide
  Sense strand starting at position 3523 of SEQ ID NO: 586953
ggcccagauugagguuaaa

SEQ ID NO: 756291 - RNA, 19 nt, Artificial Sequence
  Description of Artificial Sequence: Synthetic oligonucleotide
  Antisense strand to SEQ ID NO: 756290
uuuaaccucaaucugggcc

SEQ ID NO: 756292 - RNA, 19 nt, Artificial Sequence
  Description of Artificial Sequence: Synthetic oligonucleotide
  Sense strand starting at position 3533 of SEQ ID NO: 586953
gagguuaaacucuguccca

SEQ ID NO: 756293 - RNA, 19 nt, Artificial Sequence
  Description of Artificial Sequence: Synthetic oligonucleotide
  Antisense strand to SEQ ID NO: 756292
ugggacagaguuuaaccuc

SEQ ID NO: 756294 - RNA, 19 nt, Artificial Sequence
  Description of Artificial Sequence: Synthetic oligonucleotide
  Sense strand starting at position 3534 of SEQ ID NO: 586953
agguuaaacucugucccau

SEQ ID NO: 756295 - RNA, 19 nt, Artificial Sequence
  Description of Artificial Sequence: Synthetic oligonucleotide
  Antisense strand to SEQ ID NO: 756294
augggacagaguuuaaccu

SEQ ID NO: 756296 - RNA, 19 nt, Artificial Sequence
  Description of Artificial Sequence: Synthetic oligonucleotide
  Sense strand starting at position 3600 of SEQ ID NO: 586953
uugcaauggugaccucgau

SEQ ID NO: 756297 - RNA, 19 nt, Artificial Sequence
  Description of Artificial Sequence: Synthetic oligonucleotide
  Antisense strand to SEQ ID NO: 756296
aucgaggucaccauugcaa

SEQ ID NO: 756298 - RNA, 19 nt, Artificial Sequence
  Description of Artificial Sequence: Synthetic oligonucleotide
  Sense strand starting at position 3609 of SEQ ID NO: 586953
ugaccucgauccugagauu

SEQ ID NO: 756299 - RNA, 19 nt, Artificial Sequence
  Description of Artificial Sequence: Synthetic oligonucleotide
  Antisense strand to SEQ ID NO: 756298
aaucucaggaucgagguca

SEQ ID NO: 756300 - RNA, 19 nt, Artificial Sequence
  Description of Artificial Sequence: Synthetic oligonucleotide
  Sense strand starting at position 3612 of SEQ ID NO: 586953
ccucgauccugagauugua

SEQ ID NO: 756301 - RNA, 19 nt, Artificial Sequence
  Description of Artificial Sequence: Synthetic oligonucleotide
  Antisense strand to SEQ ID NO: 756300
uacaaucucaggaucgagg

SEQ ID NO: 756302 - RNA, 19 nt, Artificial Sequence
  Description of Artificial Sequence: Synthetic oligonucleotide
  Sense strand starting at position 3615 of SEQ ID NO: 586953
cgauccugagauuguaaag

SEQ ID NO: 756303 - RNA, 19 nt, Artificial Sequence
  Description of Artificial Sequence: Synthetic oligonucleotide
  Antisense strand to SEQ ID NO: 756302
cuuuacaaucucaggaucg

SEQ ID NO: 756304 - RNA, 19 nt, Artificial Sequence
  Description of Artificial Sequence: Synthetic oligonucleotide
  Sense strand starting at position 3674 of SEQ ID NO: 586953
ggagucugcauucggugua

SEQ ID NO: 756305 - RNA, 19 nt, Artificial Sequence
  Description of Artificial Sequence: Synthetic oligonucleotide
  Antisense strand to SEQ ID NO: 756304
uacaccgaaugcagacucc

SEQ ID NO: 756306 - RNA, 19 nt, Artificial Sequence
  Description of Artificial Sequence: Synthetic oligonucleotide
  Sense strand starting at position 3675 of SEQ ID NO: 586953
gagucugcauucgguguaa

SEQ ID NO: 756307 - RNA, 19 nt, Artificial Sequence
  Description of Artificial Sequence: Synthetic oligonucleotide
  Antisense strand to SEQ ID NO: 756306
uuacaccgaaugcagacuc

SEQ ID NO: 756308 - RNA, 19 nt, Artificial Sequence
  Description of Artificial Sequence: Synthetic oligonucleotide
  Sense strand starting at position 3678 of SEQ ID NO: 586953
ucugcauucgguguaagca

SEQ ID NO: 756309 - RNA, 19 nt, Artificial Sequence
  Description of Artificial Sequence: Synthetic oligonucleotide
  Antisense strand to SEQ ID NO: 756308
ugcuuacaccgaaugcaga

SEQ ID NO: 756310 - RNA, 19 nt, Artificial Sequence
  Description of Artificial Sequence: Synthetic oligonucleotide
  Sense strand starting at position 3728 of SEQ ID NO: 586953
gggacacucuaggguguua

SEQ ID NO: 756311 - RNA, 19 nt, Artificial Sequence
  Description of Artificial Sequence: Synthetic oligonucleotide
  Antisense strand to SEQ ID NO: 756310
uaacacccuagaguguccc

SEQ ID NO: 756312 - RNA, 19 nt, Artificial Sequence
  Description of Artificial Sequence: Synthetic oligonucleotide
  Sense strand starting at position 3730 of SEQ ID NO: 586953
gacacucuaggguguuaga

SEQ ID NO: 756313 - RNA, 19 nt, Artificial Sequence
  Description of Artificial Sequence: Synthetic oligonucleotide
  Antisense strand to SEQ ID NO: 756312
ucuaacacccuagaguguc

SEQ ID NO: 756314 - RNA, 19 nt, Artificial Sequence
  Description of Artificial Sequence: Synthetic oligonucleotide
  Sense strand starting at position 3733 of SEQ ID NO: 586953
acucuaggguguuagagaa

SEQ ID NO: 756315 - RNA, 19 nt, Artificial Sequence
  Description of Artificial Sequence: Synthetic oligonucleotide
  Antisense strand to SEQ ID NO: 756314
uucucuaacacccuagagu

SEQ ID NO: 756316 - RNA, 19 nt, Artificial Sequence
  Description of Artificial Sequence: Synthetic oligonucleotide
  Sense strand starting at position 3824 of SEQ ID NO: 586953
cgcacagugucauucugau

SEQ ID NO: 756317 - RNA, 19 nt, Artificial Sequence
  Description of Artificial Sequence: Synthetic oligonucleotide
  Antisense strand to SEQ ID NO: 756316
aucagaaugacacugugcg

SEQ ID NO: 756318 - RNA, 19 nt, Artificial Sequence
  Description of Artificial Sequence: Synthetic oligonucleotide
  Sense strand starting at position 3828 of SEQ ID NO: 586953
cagugucauucugauguca

SEQ ID NO: 756319 - RNA, 19 nt, Artificial Sequence
  Description of Artificial Sequence: Synthetic oligonucleotide
  Antisense strand to SEQ ID NO: 756318
ugacaucagaaugacacug

SEQ ID NO: 756320 - RNA, 19 nt, Artificial Sequence
  Description of Artificial Sequence: Synthetic oligonucleotide
  Sense strand starting at position 3830 of SEQ ID NO: 586953
gugucauucugaugucagu

SEQ ID NO: 756321 - RNA, 19 nt, Artificial Sequence
  Description of Artificial Sequence: Synthetic oligonucleotide
  Antisense strand to SEQ ID NO: 756320
acugacaucagaaugacac

SEQ ID NO: 756322 - RNA, 19 nt, Artificial Sequence
  Description of Artificial Sequence: Synthetic oligonucleotide
  Sense strand starting at position 3833 of SEQ ID NO: 586953
ucauucugaugucagugau

SEQ ID NO: 756323 - RNA, 19 nt, Artificial Sequence
  Description of Artificial Sequence: Synthetic oligonucleotide
  Antisense strand to SEQ ID NO: 756322
aucacugacaucagaauga

SEQ ID NO: 756324 - RNA, 19 nt, Artificial Sequence
  Description of Artificial Sequence: Synthetic oligonucleotide
  Sense strand starting at position 3836 of SEQ ID NO: 586953
uucugaugucagugauauu

SEQ ID NO: 756325 - RNA, 19 nt, Artificial Sequence
  Description of Artificial Sequence: Synthetic oligonucleotide
  Antisense strand to SEQ ID NO: 756324
aauaucacugacaucagaa

SEQ ID NO: 756326 - RNA, 19 nt, Artificial Sequence
  Description of Artificial Sequence: Synthetic oligonucleotide
  Sense strand starting at position 3839 of SEQ ID NO: 586953
ugaugucagugauauuauu

SEQ ID NO: 756327 - RNA, 19 nt, Artificial Sequence
  Description of Artificial Sequence: Synthetic oligonucleotide
  Antisense strand to SEQ ID NO: 756326
aauaauaucacugacauca

SEQ ID NO: 756328 - RNA, 19 nt, Artificial Sequence
  Description of Artificial Sequence: Synthetic oligonucleotide
  Sense strand starting at position 3848 of SEQ ID NO: 586953
ugauauuauuuacacucga

SEQ ID NO: 756329 - RNA, 19 nt, Artificial Sequence
  Description of Artificial Sequence: Synthetic oligonucleotide
  Antisense strand to SEQ ID NO: 756328
ucgaguguaaauaauauca

SEQ ID NO: 756330 - RNA, 19 nt, Artificial Sequence
  Description of Artificial Sequence: Synthetic oligonucleotide
  Sense strand starting at position 451 of SEQ ID NO: 586954
gcagcuaucuccucuaaug

SEQ ID NO: 756331 - RNA, 19 nt, Artificial Sequence
  Description of Artificial Sequence: Synthetic oligonucleotide
  Antisense strand to SEQ ID NO: 756330
cauuagaggagauagcugc

SEQ ID NO: 756332 - RNA, 19 nt, Artificial Sequence
  Description of Artificial Sequence: Synthetic oligonucleotide
  Sense strand starting at position 1051 of SEQ ID NO: 586954
gaagaaaucccgugugucc

SEQ ID NO: 756333 - RNA, 19 nt, Artificial Sequence
  Description of Artificial Sequence: Synthetic oligonucleotide
  Antisense strand to SEQ ID NO: 756332
ggacacacgggauuucuuc

SEQ ID NO: 756334 - RNA, 19 nt, Artificial Sequence
  Description of Artificial Sequence: Synthetic oligonucleotide
  Sense strand starting at position 1095 of SEQ ID NO: 586954
gcgugugaaccgggaaguu

SEQ ID NO: 756335 - RNA, 19 nt, Artificial Sequence
  Description of Artificial Sequence: Synthetic oligonucleotide
  Antisense strand to SEQ ID NO: 756334
aacuucccgguucacacgc

SEQ ID NO: 756336 - RNA, 19 nt, Artificial Sequence
  Description of Artificial Sequence: Synthetic oligonucleotide
  Sense strand starting at position 1104 of SEQ ID NO: 586954
ccgggaaguucacaugaca

SEQ ID NO: 756337 - RNA, 19 nt, Artificial Sequence
  Description of Artificial Sequence: Synthetic oligonucleotide
  Antisense strand to SEQ ID NO: 756336
ugucaugugaacuucccgg

SEQ ID NO: 756338 - RNA, 19 nt, Artificial Sequence
  Description of Artificial Sequence: Synthetic oligonucleotide
  Sense strand starting at position 1116 of SEQ ID NO: 586954
caugacagauagugaagaa

SEQ ID NO: 756339 - RNA, 19 nt, Artificial Sequence
  Description of Artificial Sequence: Synthetic oligonucleotide
  Antisense strand to SEQ ID NO: 756338
uucuucacuaucugucaug

SEQ ID NO: 756340 - RNA, 19 nt, Artificial Sequence
  Description of Artificial Sequence: Synthetic oligonucleotide
  Sense strand starting at position 1137 of SEQ ID NO: 586954
uccaguuggccugaggaca

SEQ ID NO: 756341 - RNA, 19 nt, Artificial Sequence
  Description of Artificial Sequence: Synthetic oligonucleotide
  Antisense strand to SEQ ID NO: 756340
uguccucaggccaacugga

SEQ ID NO: 756342 - RNA, 19 nt, Artificial Sequence
  Description of Artificial Sequence: Synthetic oligonucleotide
  Sense strand starting at position 1209 of SEQ ID NO: 586954
gccuguccgagucaaacaa

SEQ ID NO: 756343 - RNA, 19 nt, Artificial Sequence
  Description of Artificial Sequence: Synthetic oligonucleotide
  Antisense strand to SEQ ID NO: 756342
uuguuugacucggacaggc

SEQ ID NO: 756344 - RNA, 19 nt, Artificial Sequence
  Description of Artificial Sequence: Synthetic oligonucleotide
  Sense strand starting at position 2214 of SEQ ID NO: 586954
cggguugcugggugagaga

SEQ ID NO: 756345 - RNA, 19 nt, Artificial Sequence
  Description of Artificial Sequence: Synthetic oligonucleotide
  Antisense strand to SEQ ID NO: 756344
ucucucacccagcaacccg

SEQ ID NO: 756346 - RNA, 19 nt, Artificial Sequence
  Description of Artificial Sequence: Synthetic oligonucleotide
  Sense strand starting at position 2231 of SEQ ID NO: 586954
gacccaggguucucaaagu

SEQ ID NO: 756347 - RNA, 19 nt, Artificial Sequence
  Description of Artificial Sequence: Synthetic oligonucleotide
  Antisense strand to SEQ ID NO: 756346
acuuugagaacccuggguc

SEQ ID NO: 756348 - RNA, 19 nt, Artificial Sequence
  Description of Artificial Sequence: Synthetic oligonucleotide
  Sense strand starting at position 2761 of SEQ ID NO: 586954
gagaguuauuuauaggaag

SEQ ID NO: 756349 - RNA, 19 nt, Artificial Sequence
  Description of Artificial Sequence: Synthetic oligonucleotide
  Antisense strand to SEQ ID NO: 756348
cuuccuauaaauaacucuc

SEQ ID NO: 756350 - RNA, 19 nt, Artificial Sequence
  Description of Artificial Sequence: Synthetic oligonucleotide
  Sense strand starting at position 3270 of SEQ ID NO: 586954
ccacucacucacugagaga

SEQ ID NO: 756351 - RNA, 19 nt, Artificial Sequence
  Description of Artificial Sequence: Synthetic oligonucleotide
  Antisense strand to SEQ ID NO: 756350
ucucucagugagugagugg

SEQ ID NO: 756352 - RNA, 19 nt, Artificial Sequence
  Description of Artificial Sequence: Synthetic oligonucleotide
  Sense strand starting at position 3317 of SEQ ID NO: 586954
ugggcagagcuuuauaaug

SEQ ID NO: 756353 - RNA, 19 nt, Artificial Sequence
  Description of Artificial Sequence: Synthetic oligonucleotide
  Antisense strand to SEQ ID NO: 756352
cauuauaaagcucugccca

SEQ ID NO: 756354 - RNA, 19 nt, Artificial Sequence
  Description of Artificial Sequence: Synthetic oligonucleotide
  Sense strand starting at position 3659 of SEQ ID NO: 586954
gugccugacuuaggaguaa

SEQ ID NO: 756355 - RNA, 19 nt, Artificial Sequence
  Description of Artificial Sequence: Synthetic oligonucleotide
  Antisense strand to SEQ ID NO: 756354
uuacuccuaagucaggcac

SEQ ID NO: 756356 - RNA, 19 nt, Artificial Sequence
  Description of Artificial Sequence: Synthetic oligonucleotide
  Sense strand starting at position 3681 of SEQ ID NO: 586954
aagucaguguagcgucaaa

SEQ ID NO: 756357 - RNA, 19 nt, Artificial Sequence
  Description of Artificial Sequence: Synthetic oligonucleotide
  Antisense strand to SEQ ID NO: 756356
uuugacgcuacacugacuu

SEQ ID NO: 756358 - RNA, 19 nt, Artificial Sequence
  Description of Artificial Sequence: Synthetic oligonucleotide
  Sense strand starting at position 556 of SEQ ID NO: 586955
gcagcuaucuccucuaaug

SEQ ID NO: 756359 - RNA, 19 nt, Artificial Sequence
  Description of Artificial Sequence: Synthetic oligonucleotide
  Antisense strand to SEQ ID NO: 756358
cauuagaggagauagcugc

SEQ ID NO: 756360 - RNA, 19 nt, Artificial Sequence
  Description of Artificial Sequence: Synthetic oligonucleotide
  Sense strand starting at position 1156 of SEQ ID NO: 586955
gaagaaaucccgugugucc

SEQ ID NO: 756361 - RNA, 19 nt, Artificial Sequence
  Description of Artificial Sequence: Synthetic oligonucleotide
  Antisense strand to SEQ ID NO: 756360
ggacacacgggauuucuuc

SEQ ID NO: 756362 - RNA, 19 nt, Artificial Sequence
  Description of Artificial Sequence: Synthetic oligonucleotide
  Sense strand starting at position 1200 of SEQ ID NO: 586955
gcgugugaaccgggaaguu

SEQ ID NO: 756363 - RNA, 19 nt, Artificial Sequence
  Description of Artificial Sequence: Synthetic oligonucleotide
  Antisense strand to SEQ ID NO: 756362
aacuucccgguucacacgc

SEQ ID NO: 756364 - RNA, 19 nt, Artificial Sequence
  Description of Artificial Sequence: Synthetic oligonucleotide
  Sense strand starting at position 1209 of SEQ ID NO: 586955
ccgggaaguucacaugaca

SEQ ID NO: 756365 - RNA, 19 nt, Artificial Sequence
  Description of Artificial Sequence: Synthetic oligonucleotide
  Antisense strand to SEQ ID NO: 756364
ugucaugugaacuucccgg

SEQ ID NO: 756366 - RNA, 19 nt, Artificial Sequence
  Description of Artificial Sequence: Synthetic oligonucleotide
  Sense strand starting at position 1221 of SEQ ID NO: 586955
caugacagauagugaagaa

SEQ ID NO: 756367 - RNA, 19 nt, Artificial Sequence
  Description of Artificial Sequence: Synthetic oligonucleotide
  Antisense strand to SEQ ID NO: 756366
uucuucacuaucugucaug

SEQ ID NO: 756368 - RNA, 19 nt, Artificial Sequence
  Description of Artificial Sequence: Synthetic oligonucleotide
  Sense strand starting at position 1242 of SEQ ID NO: 586955
uccaguuggccugaggaca

SEQ ID NO: 756369 - RNA, 19 nt, Artificial Sequence
  Description of Artificial Sequence: Synthetic oligonucleotide
  Antisense strand to SEQ ID NO: 756368
uguccucaggccaacugga

SEQ ID NO: 756370 - RNA, 19 nt, Artificial Sequence
  Description of Artificial Sequence: Synthetic oligonucleotide
  Sense strand starting at position 1314 of SEQ ID NO: 586955
gccuguccgagucaaacaa

SEQ ID NO: 756371 - RNA, 19 nt, Artificial Sequence
  Description of Artificial Sequence: Synthetic oligonucleotide
  Antisense strand to SEQ ID NO: 756370
uuguuugacucggacaggc

SEQ ID NO: 756372 - RNA, 19 nt, Artificial Sequence
  Description of Artificial Sequence: Synthetic oligonucleotide
  Sense strand starting at position 2319 of SEQ ID NO: 586955
cggguugcugggugagaga

SEQ ID NO: 756373 - RNA, 19 nt, Artificial Sequence
  Description of Artificial Sequence: Synthetic oligonucleotide
  Antisense strand to SEQ ID NO: 756372
ucucucacccagcaacccg

SEQ ID NO: 756374 - RNA, 19 nt, Artificial Sequence
  Description of Artificial Sequence: Synthetic oligonucleotide
  Sense strand starting at position 2336 of SEQ ID NO: 586955
gacccaggguucucaaagu

SEQ ID NO: 756375 - RNA, 19 nt, Artificial Sequence
  Description of Artificial Sequence: Synthetic oligonucleotide
  Antisense strand to SEQ ID NO: 756374
acuuugagaacccuggguc

SEQ ID NO: 756376 - RNA, 19 nt, Artificial Sequence
  Description of Artificial Sequence: Synthetic oligonucleotide
  Sense strand starting at position 2866 of SEQ ID NO: 586955
gagaguuauuuauaggaag

SEQ ID NO: 756377 - RNA, 19 nt, Artificial Sequence
  Description of Artificial Sequence: Synthetic oligonucleotide
  Antisense strand to SEQ ID NO: 756376
cuuccuauaaauaacucuc

SEQ ID NO: 756378 - RNA, 19 nt, Artificial Sequence
  Description of Artificial Sequence: Synthetic oligonucleotide
  Sense strand starting at position 3375 of SEQ ID NO: 586955
ccacucacucacugagaga

SEQ ID NO: 756379 - RNA, 19 nt, Artificial Sequence
  Description of Artificial Sequence: Synthetic oligonucleotide
  Antisense strand to SEQ ID NO: 756378
ucucucagugagugagugg

SEQ ID NO: 756380 - RNA, 19 nt, Artificial Sequence
  Description of Artificial Sequence: Synthetic oligonucleotide
  Sense strand starting at position 3422 of SEQ ID NO: 586955
ugggcagagcuuuauaaug

SEQ ID NO: 756381 - RNA, 19 nt, Artificial Sequence
  Description of Artificial Sequence: Synthetic oligonucleotide
  Antisense strand to SEQ ID NO: 756380
cauuauaaagcucugccca

SEQ ID NO: 756382 - RNA, 19 nt, Artificial Sequence
  Description of Artificial Sequence: Synthetic oligonucleotide
  Sense strand starting at position 3764 of SEQ ID NO: 586955
gugccugacuuaggaguaa

SEQ ID NO: 756383 - RNA, 19 nt, Artificial Sequence
  Description of Artificial Sequence: Synthetic oligonucleotide
  Antisense strand to SEQ ID NO: 756382
uuacuccuaagucaggcac

SEQ ID NO: 756384 - RNA, 19 nt, Artificial Sequence
  Description of Artificial Sequence: Synthetic oligonucleotide
  Sense strand starting at position 3786 of SEQ ID NO: 586955
aagucaguguagcgucaaa

SEQ ID NO: 756385 - RNA, 19 nt, Artificial Sequence
  Description of Artificial Sequence: Synthetic oligonucleotide
  Antisense strand to SEQ ID NO: 756384
uuugacgcuacacugacuu

SEQ ID NO: 756386 - RNA, 19 nt, Artificial Sequence
  Description of Artificial Sequence: Synthetic oligonucleotide
  Sense strand starting at position 293 of SEQ ID NO: 586956
ccacucacucacugagaga

SEQ ID NO: 756387 - RNA, 19 nt, Artificial Sequence
  Description of Artificial Sequence: Synthetic oligonucleotide
  Antisense strand to SEQ ID NO: 756386
ucucucagugagugagugg

SEQ ID NO: 756388 - RNA, 19 nt, Artificial Sequence
  Description of Artificial Sequence: Synthetic oligonucleotide
  Sense strand starting at position 340 of SEQ ID NO: 586956
ugggcagagcuuuauaaug

SEQ ID NO: 756389 - RNA, 19 nt, Artificial Sequence
  Description of Artificial Sequence: Synthetic oligonucleotide
  Antisense strand to SEQ ID NO: 756388
cauuauaaagcucugccca

SEQ ID NO: 756390 - RNA, 19 nt, Artificial Sequence
  Description of Artificial Sequence: Synthetic oligonucleotide
  Sense strand starting at position 682 of SEQ ID NO: 586956
gugccugacuuaggaguaa

SEQ ID NO: 756391 - RNA, 19 nt, Artificial Sequence
  Description of Artificial Sequence: Synthetic oligonucleotide
  Antisense strand to SEQ ID NO: 756390
uuacuccuaagucaggcac

SEQ ID NO: 756392 - RNA, 19 nt, Artificial Sequence
  Description of Artificial Sequence: Synthetic oligonucleotide
  Sense strand starting at position 704 of SEQ ID NO: 586956
aagucaguguagcgucaaa

SEQ ID NO: 756393 - RNA, 19 nt, Artificial Sequence
  Description of Artificial Sequence: Synthetic oligonucleotide
  Antisense strand to SEQ ID NO: 756392
uuugacgcuacacugacuu

SEQ ID NO: 756394 - RNA, 19 nt, Artificial Sequence
  Description of Artificial Sequence: Synthetic oligonucleotide
  Sense strand starting at position 1013 of SEQ ID NO: 586956
gagcaucggugccgauaau

SEQ ID NO: 756395 - RNA, 19 nt, Artificial Sequence
  Description of Artificial Sequence: Synthetic oligonucleotide
  Antisense strand to SEQ ID NO: 756394
auuaucggcaccgaugcuc

SEQ ID NO: 756396 - RNA, 19 nt, Artificial Sequence
  Description of Artificial Sequence: Synthetic oligonucleotide
  Sense strand starting at position 1394 of SEQ ID NO: 586956
gccucucaacccggagauu

SEQ ID NO: 756397 - RNA, 19 nt, Artificial Sequence
  Description of Artificial Sequence: Synthetic oligonucleotide
  Antisense strand to SEQ ID NO: 756396
aaucuccggguugagaggc

SEQ ID NO: 756398 - RNA, 19 nt, Artificial Sequence
  Description of Artificial Sequence: Synthetic oligonucleotide
  Sense strand starting at position 2166 of SEQ ID NO: 586956
cggcaccucugaguguaaa

SEQ ID NO: 756399 - RNA, 19 nt, Artificial Sequence
  Description of Artificial Sequence: Synthetic oligonucleotide
  Antisense strand to SEQ ID NO: 756398
uuuacacucagaggugccg

SEQ ID NO: 756400 - RNA, 19 nt, Artificial Sequence
  Description of Artificial Sequence: Synthetic oligonucleotide
  Sense strand starting at position 3439 of SEQ ID NO: 586956
guugcuuccugggacuuga

SEQ ID NO: 756401 - RNA, 19 nt, Artificial Sequence
  Description of Artificial Sequence: Synthetic oligonucleotide
  Antisense strand to SEQ ID NO: 756400
ucaagucccaggaagcaac

SEQ ID NO: 756402 - RNA, 19 nt, Artificial Sequence
  Description of Artificial Sequence: Synthetic oligonucleotide
  Sense strand starting at position 3450 of SEQ ID NO: 586956
ggacuugaaguccaagguu

SEQ ID NO: 756403 - RNA, 19 nt, Artificial Sequence
  Description of Artificial Sequence: Synthetic oligonucleotide
  Antisense strand to SEQ ID NO: 756402
aaccuuggacuucaagucc

SEQ ID NO: 756404 - RNA, 19 nt, Artificial Sequence
  Description of Artificial Sequence: Synthetic oligonucleotide
  Sense strand starting at position 3466 of SEQ ID NO: 586956
guuugccuccgcgguagaa

SEQ ID NO: 756405 - RNA, 19 nt, Artificial Sequence
  Description of Artificial Sequence: Synthetic oligonucleotide
  Antisense strand to SEQ ID NO: 756404
uucuaccgcggaggcaaac

SEQ ID NO: 756406 - RNA, 19 nt, Artificial Sequence
  Description of Artificial Sequence: Synthetic oligonucleotide
  Sense strand starting at position 3467 of SEQ ID NO: 586956
uuugccuccgcgguagaaa

SEQ ID NO: 756407 - RNA, 19 nt, Artificial Sequence
  Description of Artificial Sequence: Synthetic oligonucleotide
  Antisense strand to SEQ ID NO: 756406
uuucuaccgcggaggcaaa

SEQ ID NO: 756408 - RNA, 19 nt, Artificial Sequence
  Description of Artificial Sequence: Synthetic oligonucleotide
  Sense strand starting at position 3763 of SEQ ID NO: 586956
auggaaucucgagauguuc

SEQ ID NO: 756409 - RNA, 19 nt, Artificial Sequence
  Description of Artificial Sequence: Synthetic oligonucleotide
  Antisense strand to SEQ ID NO: 756408
gaacaucucgagauuccau

SEQ ID NO: 756410 - RNA, 19 nt, Artificial Sequence
  Description of Artificial Sequence: Synthetic oligonucleotide
  Sense strand starting at position 3765 of SEQ ID NO: 586956
ggaaucucgagauguuccu

SEQ ID NO: 756411 - RNA, 19 nt, Artificial Sequence
  Description of Artificial Sequence: Synthetic oligonucleotide
  Antisense strand to SEQ ID NO: 756410
aggaacaucucgagauucc

SEQ ID NO: 756412 - RNA, 19 nt, Artificial Sequence
  Description of Artificial Sequence: Synthetic oligonucleotide
  Sense strand starting at position 3771 of SEQ ID NO: 586956
ucgagauguuccugcaaga

SEQ ID NO: 756413 - RNA, 19 nt, Artificial Sequence
  Description of Artificial Sequence: Synthetic oligonucleotide
  Antisense strand to SEQ ID NO: 756412
ucuugcaggaacaucucga

SEQ ID NO: 756414 - RNA, 19 nt, Artificial Sequence
  Description of Artificial Sequence: Synthetic oligonucleotide
  Sense strand starting at position 3829 of SEQ ID NO: 586956
cucccuuaccgucagcaau

SEQ ID NO: 756415 - RNA, 19 nt, Artificial Sequence
  Description of Artificial Sequence: Synthetic oligonucleotide
  Antisense strand to SEQ ID NO: 756414
auugcugacgguaagggag

SEQ ID NO: 756416 - RNA, 19 nt, Artificial Sequence
  Description of Artificial Sequence: Synthetic oligonucleotide
  Sense strand starting at position 47 of SEQ ID NO: 586957
ggguguaaaugagaugcaa

SEQ ID NO: 756417 - RNA, 19 nt, Artificial Sequence
  Description of Artificial Sequence: Synthetic oligonucleotide
  Antisense strand to SEQ ID NO: 756416
uugcaucucauuuacaccc

SEQ ID NO: 756418 - RNA, 19 nt, Artificial Sequence
  Description of Artificial Sequence: Synthetic oligonucleotide
  Sense strand starting at position 49 of SEQ ID NO: 586957
guguaaaugagaugcaaau

SEQ ID NO: 756419 - RNA, 19 nt, Artificial Sequence
  Description of Artificial Sequence: Synthetic oligonucleotide
  Antisense strand to SEQ ID NO: 756418
auuugcaucucauuuacac

SEQ ID NO: 756420 - RNA, 19 nt, Artificial Sequence
  Description of Artificial Sequence: Synthetic oligonucleotide
  Sense strand starting at position 61 of SEQ ID NO: 586957
ugcaaaugcaucgagcgaa

SEQ ID NO: 756421 - RNA, 19 nt, Artificial Sequence
  Description of Artificial Sequence: Synthetic oligonucleotide
  Antisense strand to SEQ ID NO: 756420
uucgcucgaugcauuugca

SEQ ID NO: 756422 - RNA, 19 nt, Artificial Sequence
  Description of Artificial Sequence: Synthetic oligonucleotide
  Sense strand starting at position 342 of SEQ ID NO: 586957
cucugugucuaacccuaau

SEQ ID NO: 756423 - RNA, 19 nt, Artificial Sequence
  Description of Artificial Sequence: Synthetic oligonucleotide
  Antisense strand to SEQ ID NO: 756422
auuaggguuagacacagag

SEQ ID NO: 756424 - RNA, 19 nt, Artificial Sequence
  Description of Artificial Sequence: Synthetic oligonucleotide
  Sense strand starting at position 394 of SEQ ID NO: 586957
cuaucucuccugcagugaa

SEQ ID NO: 756425 - RNA, 19 nt, Artificial Sequence
  Description of Artificial Sequence: Synthetic oligonucleotide
  Antisense strand to SEQ ID NO: 756424
uucacugcaggagagauag

SEQ ID NO: 756426 - RNA, 19 nt, Artificial Sequence
  Description of Artificial Sequence: Synthetic oligonucleotide
  Sense strand starting at position 408 of SEQ ID NO: 586957
gugaaaccugccuguccau

SEQ ID NO: 756427 - RNA, 19 nt, Artificial Sequence
  Description of Artificial Sequence: Synthetic oligonucleotide
  Antisense strand to SEQ ID NO: 756426
auggacaggcagguuucac

SEQ ID NO: 756428 - RNA, 19 nt, Artificial Sequence
  Description of Artificial Sequence: Synthetic oligonucleotide
  Sense strand starting at position 553 of SEQ ID NO: 586957
gcuguaaguugaccagauu

SEQ ID NO: 756429 - RNA, 19 nt, Artificial Sequence
  Description of Artificial Sequence: Synthetic oligonucleotide
  Antisense strand to SEQ ID NO: 756428
aaucuggucaacuuacagc

SEQ ID NO: 756430 - RNA, 19 nt, Artificial Sequence
  Description of Artificial Sequence: Synthetic oligonucleotide
  Sense strand starting at position 554 of SEQ ID NO: 586957
cuguaaguugaccagauua

SEQ ID NO: 756431 - RNA, 19 nt, Artificial Sequence
  Description of Artificial Sequence: Synthetic oligonucleotide
  Antisense strand to SEQ ID NO: 756430
uaaucuggucaacuuacag

SEQ ID NO: 756432 - RNA, 19 nt, Artificial Sequence
  Description of Artificial Sequence: Synthetic oligonucleotide
  Sense strand starting at position 642 of SEQ ID NO: 586957
cagguuaggacugguaacu

SEQ ID NO: 756433 - RNA, 19 nt, Artificial Sequence
  Description of Artificial Sequence: Synthetic oligonucleotide
  Antisense strand to SEQ ID NO: 756432
aguuaccaguccuaaccug

SEQ ID NO: 756434 - RNA, 19 nt, Artificial Sequence
  Description of Artificial Sequence: Synthetic oligonucleotide
  Sense strand starting at position 1177 of SEQ ID NO: 586957
ucacauguucgaggaguua

SEQ ID NO: 756435 - RNA, 19 nt, Artificial Sequence
  Description of Artificial Sequence: Synthetic oligonucleotide
  Antisense strand to SEQ ID NO: 756434
uaacuccucgaacauguga

SEQ ID NO: 756436 - RNA, 19 nt, Artificial Sequence
  Description of Artificial Sequence: Synthetic oligonucleotide
  Sense strand starting at position 1340 of SEQ ID NO: 586957
gcgagcuucccgcuacagu

SEQ ID NO: 756437 - RNA, 19 nt, Artificial Sequence
  Description of Artificial Sequence: Synthetic oligonucleotide
  Antisense strand to SEQ ID NO: 756436
acuguagcgggaagcucgc

SEQ ID NO: 756438 - RNA, 19 nt, Artificial Sequence
  Description of Artificial Sequence: Synthetic oligonucleotide
  Sense strand starting at position 2118 of SEQ ID NO: 586957
gccgcauuccugcacugau

SEQ ID NO: 756439 - RNA, 19 nt, Artificial Sequence
  Description of Artificial Sequence: Synthetic oligonucleotide
  Antisense strand to SEQ ID NO: 756438
aucagugcaggaaugcggc

SEQ ID NO: 756440 - RNA, 19 nt, Artificial Sequence
  Description of Artificial Sequence: Synthetic oligonucleotide
  Sense strand starting at position 2121 of SEQ ID NO: 586957
gcauuccugcacugauaag

SEQ ID NO: 756441 - RNA, 19 nt, Artificial Sequence
  Description of Artificial Sequence: Synthetic oligonucleotide
  Antisense strand to SEQ ID NO: 756440
cuuaucagugcaggaaugc

SEQ ID NO: 756442 - RNA, 19 nt, Artificial Sequence
  Description of Artificial Sequence: Synthetic oligonucleotide
  Sense strand starting at position 2363 of SEQ ID NO: 586957
accggcucucgccacaaau

SEQ ID NO: 756443 - RNA, 19 nt, Artificial Sequence
  Description of Artificial Sequence: Synthetic oligonucleotide
  Antisense strand to SEQ ID NO: 756442
auuuguggcgagagccggu

SEQ ID NO: 756444 - RNA, 19 nt, Artificial Sequence
  Description of Artificial Sequence: Synthetic oligonucleotide
  Sense strand starting at position 2376 of SEQ ID NO: 586957
acaaauaguuucuccguca

SEQ ID NO: 756445 - RNA, 19 nt, Artificial Sequence
  Description of Artificial Sequence: Synthetic oligonucleotide
  Antisense strand to SEQ ID NO: 756444
ugacggagaaacuauuugu

SEQ ID NO: 756446 - RNA, 19 nt, Artificial Sequence
  Description of Artificial Sequence: Synthetic oligonucleotide
  Sense strand starting at position 2381 of SEQ ID NO: 586957
uaguuucuccgucagggaa

SEQ ID NO: 756447 - RNA, 19 nt, Artificial Sequence
  Description of Artificial Sequence: Synthetic oligonucleotide
  Antisense strand to SEQ ID NO: 756446
uucccugacggagaaacua

SEQ ID NO: 756448 - RNA, 19 nt, Artificial Sequence
  Description of Artificial Sequence: Synthetic oligonucleotide
  Sense strand starting at position 2419 of SEQ ID NO: 586957
agggaacagucaguuccaa

SEQ ID NO: 756449 - RNA, 19 nt, Artificial Sequence
  Description of Artificial Sequence: Synthetic oligonucleotide
  Antisense strand to SEQ ID NO: 756448
uuggaacugacuguucccu

SEQ ID NO: 756450 - RNA, 19 nt, Artificial Sequence
  Description of Artificial Sequence: Synthetic oligonucleotide
  Sense strand starting at position 2506 of SEQ ID NO: 586957
gaaacauucgcuggcagga

SEQ ID NO: 756451 - RNA, 19 nt, Artificial Sequence
  Description of Artificial Sequence: Synthetic oligonucleotide
  Antisense strand to SEQ ID NO: 756450
uccugccagcgaauguuuc

SEQ ID NO: 756452 - RNA, 19 nt, Artificial Sequence
  Description of Artificial Sequence: Synthetic oligonucleotide
  Sense strand starting at position 2671 of SEQ ID NO: 586957
cagcuuaugugcgugcaga

SEQ ID NO: 756453 - RNA, 19 nt, Artificial Sequence
  Description of Artificial Sequence: Synthetic oligonucleotide
  Antisense strand to SEQ ID NO: 756452
ucugcacgcacauaagcug

SEQ ID NO: 756454 - RNA, 19 nt, Artificial Sequence
  Description of Artificial Sequence: Synthetic oligonucleotide
  Sense strand starting at position 2673 of SEQ ID NO: 586957
gcuuaugugcgugcagaca

SEQ ID NO: 756455 - RNA, 19 nt, Artificial Sequence
  Description of Artificial Sequence: Synthetic oligonucleotide
  Antisense strand to SEQ ID NO: 756454
ugucugcacgcacauaagc

SEQ ID NO: 756456 - RNA, 19 nt, Artificial Sequence
  Description of Artificial Sequence: Synthetic oligonucleotide
  Sense strand starting at position 2776 of SEQ ID NO: 586957
agcucugugagaggcuauu

SEQ ID NO: 756457 - RNA, 19 nt, Artificial Sequence
  Description of Artificial Sequence: Synthetic oligonucleotide
  Antisense strand to SEQ ID NO: 756456
aauagccucucacagagcu

SEQ ID NO: 756458 - RNA, 19 nt, Artificial Sequence
  Description of Artificial Sequence: Synthetic oligonucleotide
  Sense strand starting at position 2785 of SEQ ID NO: 586957
agaggcuauuucuggguau

SEQ ID NO: 756459 - RNA, 19 nt, Artificial Sequence
  Description of Artificial Sequence: Synthetic oligonucleotide
  Antisense strand to SEQ ID NO: 756458
auacccagaaauagccucu

SEQ ID NO: 756460 - RNA, 19 nt, Artificial Sequence
  Description of Artificial Sequence: Synthetic oligonucleotide
  Sense strand starting at position 2786 of SEQ ID NO: 586957
gaggcuauuucuggguaug

SEQ ID NO: 756461 - RNA, 19 nt, Artificial Sequence
  Description of Artificial Sequence: Synthetic oligonucleotide
  Antisense strand to SEQ ID NO: 756460
cauacccagaaauagccuc

SEQ ID NO: 756462 - RNA, 19 nt, Artificial Sequence
  Description of Artificial Sequence: Synthetic oligonucleotide
  Sense strand starting at position 2787 of SEQ ID NO: 586957
aggcuauuucuggguaugu

SEQ ID NO: 756463 - RNA, 19 nt, Artificial Sequence
  Description of Artificial Sequence: Synthetic oligonucleotide
  Antisense strand to SEQ ID NO: 756462
acauacccagaaauagccu

SEQ ID NO: 756464 - RNA, 19 nt, Artificial Sequence
  Description of Artificial Sequence: Synthetic oligonucleotide
  Sense strand starting at position 2788 of SEQ ID NO: 586957
ggcuauuucuggguaugug

SEQ ID NO: 756465 - RNA, 19 nt, Artificial Sequence
  Description of Artificial Sequence: Synthetic oligonucleotide
  Antisense strand to SEQ ID NO: 756464
cacauacccagaaauagcc

SEQ ID NO: 756466 - RNA, 19 nt, Artificial Sequence
  Description of Artificial Sequence: Synthetic oligonucleotide
  Sense strand starting at position 2791 of SEQ ID NO: 586957
uauuucuggguaugugagu

SEQ ID NO: 756467 - RNA, 19 nt, Artificial Sequence
  Description of Artificial Sequence: Synthetic oligonucleotide
  Antisense strand to SEQ ID NO: 756466
acucacauacccagaaaua

SEQ ID NO: 756468 - RNA, 19 nt, Artificial Sequence
  Description of Artificial Sequence: Synthetic oligonucleotide
  Sense strand starting at position 2811 of SEQ ID NO: 586957
uuuguuugccgcucuguga

SEQ ID NO: 756469 - RNA, 19 nt, Artificial Sequence
  Description of Artificial Sequence: Synthetic oligonucleotide
  Antisense strand to SEQ ID NO: 756468
ucacagagcggcaaacaaa

SEQ ID NO: 756470 - RNA, 19 nt, Artificial Sequence
  Description of Artificial Sequence: Synthetic oligonucleotide
  Sense strand starting at position 2814 of SEQ ID NO: 586957
guuugccgcucugugagaa

SEQ ID NO: 756471 - RNA, 19 nt, Artificial Sequence
  Description of Artificial Sequence: Synthetic oligonucleotide
  Antisense strand to SEQ ID NO: 756470
uucucacagagcggcaaac

SEQ ID NO: 756472 - RNA, 19 nt, Artificial Sequence
  Description of Artificial Sequence: Synthetic oligonucleotide
  Sense strand starting at position 2815 of SEQ ID NO: 586957
uuugccgcucugugagaaa

SEQ ID NO: 756473 - RNA, 19 nt, Artificial Sequence
  Description of Artificial Sequence: Synthetic oligonucleotide
  Antisense strand to SEQ ID NO: 756472
uuucucacagagcggcaaa

SEQ ID NO: 756474 - RNA, 19 nt, Artificial Sequence
  Description of Artificial Sequence: Synthetic oligonucleotide
  Sense strand starting at position 2871 of SEQ ID NO: 586957
agggauugugcucaugaga

SEQ ID NO: 756475 - RNA, 19 nt, Artificial Sequence
  Description of Artificial Sequence: Synthetic oligonucleotide
  Antisense strand to SEQ ID NO: 756474
ucucaugagcacaaucccu

SEQ ID NO: 756476 - RNA, 19 nt, Artificial Sequence
  Description of Artificial Sequence: Synthetic oligonucleotide
  Sense strand starting at position 2874 of SEQ ID NO: 586957
gauugugcucaugagaaca

SEQ ID NO: 756477 - RNA, 19 nt, Artificial Sequence
  Description of Artificial Sequence: Synthetic oligonucleotide
  Antisense strand to SEQ ID NO: 756476
uguucucaugagcacaauc

SEQ ID NO: 756478 - RNA, 19 nt, Artificial Sequence
  Description of Artificial Sequence: Synthetic oligonucleotide
  Sense strand starting at position 3037 of SEQ ID NO: 586957
cuggguauaguggguauau

SEQ ID NO: 756479 - RNA, 19 nt, Artificial Sequence
  Description of Artificial Sequence: Synthetic oligonucleotide
  Antisense strand to SEQ ID NO: 756478
auauacccacuauacccag

SEQ ID NO: 756480 - RNA, 19 nt, Artificial Sequence
  Description of Artificial Sequence: Synthetic oligonucleotide
  Sense strand starting at position 3038 of SEQ ID NO: 586957
uggguauaguggguauauu

SEQ ID NO: 756481 - RNA, 19 nt, Artificial Sequence
  Description of Artificial Sequence: Synthetic oligonucleotide
  Antisense strand to SEQ ID NO: 756480
aauauacccacuauaccca

SEQ ID NO: 756482 - RNA, 19 nt, Artificial Sequence
  Description of Artificial Sequence: Synthetic oligonucleotide
  Sense strand starting at position 3327 of SEQ ID NO: 586957
gggccucacugugagaauc

SEQ ID NO: 756483 - RNA, 19 nt, Artificial Sequence
  Description of Artificial Sequence: Synthetic oligonucleotide
  Antisense strand to SEQ ID NO: 756482
gauucucacagugaggccc

SEQ ID NO: 756484 - RNA, 19 nt, Artificial Sequence
  Description of Artificial Sequence: Synthetic oligonucleotide
  Sense strand starting at position 3389 of SEQ ID NO: 586957
ugaaacacuuacuugaagu

SEQ ID NO: 756485 - RNA, 19 nt, Artificial Sequence
  Description of Artificial Sequence: Synthetic oligonucleotide
  Antisense strand to SEQ ID NO: 756484
acuucaaguaaguguuuca

SEQ ID NO: 756486 - RNA, 19 nt, Artificial Sequence
  Description of Artificial Sequence: Synthetic oligonucleotide
  Sense strand starting at position 3532 of SEQ ID NO: 586957
uuaggugcccacugucaau

SEQ ID NO: 756487 - RNA, 19 nt, Artificial Sequence
  Description of Artificial Sequence: Synthetic oligonucleotide
  Antisense strand to SEQ ID NO: 756486
auugacagugggcaccuaa

SEQ ID NO: 756488 - RNA, 19 nt, Artificial Sequence
  Description of Artificial Sequence: Synthetic oligonucleotide
  Sense strand starting at position 3550 of SEQ ID NO: 586957
ucugaaaugucagggagga

SEQ ID NO: 756489 - RNA, 19 nt, Artificial Sequence
  Description of Artificial Sequence: Synthetic oligonucleotide
  Antisense strand to SEQ ID NO: 756488
uccucccugacauuucaga

SEQ ID NO: 756490 - RNA, 19 nt, Artificial Sequence
  Description of Artificial Sequence: Synthetic oligonucleotide
  Sense strand starting at position 3647 of SEQ ID NO: 586957
agggcuuuagccuagacua

SEQ ID NO: 756491 - RNA, 19 nt, Artificial Sequence
  Description of Artificial Sequence: Synthetic oligonucleotide
  Antisense strand to SEQ ID NO: 756490
uagucuaggcuaaagcccu

SEQ ID NO: 756492 - RNA, 19 nt, Artificial Sequence
  Description of Artificial Sequence: Synthetic oligonucleotide
  Sense strand starting at position 3956 of SEQ ID NO: 586957
guccuacuuguaugcaaag

SEQ ID NO: 756493 - RNA, 19 nt, Artificial Sequence
  Description of Artificial Sequence: Synthetic oligonucleotide
  Antisense strand to SEQ ID NO: 756492
cuuugcauacaaguaggac

SEQ ID NO: 756494 - RNA, 19 nt, Artificial Sequence
  Description of Artificial Sequence: Synthetic oligonucleotide
  Sense strand starting at position 3957 of SEQ ID NO: 586957
uccuacuuguaugcaaaga

SEQ ID NO: 756495 - RNA, 19 nt, Artificial Sequence
  Description of Artificial Sequence: Synthetic oligonucleotide
  Antisense strand to SEQ ID NO: 756494
ucuuugcauacaaguagga

SEQ ID NO: 756496 - RNA, 19 nt, Artificial Sequence
  Description of Artificial Sequence: Synthetic oligonucleotide
  Sense strand starting at position 3 of SEQ ID NO: 586958
gguguugucuggcugucua

SEQ ID NO: 756497 - RNA, 19 nt, Artificial Sequence
  Description of Artificial Sequence: Synthetic oligonucleotide
  Antisense strand to SEQ ID NO: 756496
uagacagccagacaacacc

SEQ ID NO: 756498 - RNA, 19 nt, Artificial Sequence
  Description of Artificial Sequence: Synthetic oligonucleotide
  Sense strand starting at position 92 of SEQ ID NO: 586958
gcuugucccuggcucagaa

SEQ ID NO: 756499 - RNA, 19 nt, Artificial Sequence
  Description of Artificial Sequence: Synthetic oligonucleotide
  Antisense strand to SEQ ID NO: 756498
uucugagccagggacaagc

SEQ ID NO: 756500 - RNA, 19 nt, Artificial Sequence
  Description of Artificial Sequence: Synthetic oligonucleotide
  Sense strand starting at position 400 of SEQ ID NO: 586958
gcugaagaccuggagucau

SEQ ID NO: 756501 - RNA, 19 nt, Artificial Sequence
  Description of Artificial Sequence: Synthetic oligonucleotide
  Antisense strand to SEQ ID NO: 756500
augacuccaggucuucagc

SEQ ID NO: 756502 - RNA, 19 nt, Artificial Sequence
  Description of Artificial Sequence: Synthetic oligonucleotide
  Sense strand starting at position 503 of SEQ ID NO: 586958
ggccauucugaggaucuga

SEQ ID NO: 756503 - RNA, 19 nt, Artificial Sequence
  Description of Artificial Sequence: Synthetic oligonucleotide
  Antisense strand to SEQ ID NO: 756502
ucagauccucagaauggcc

SEQ ID NO: 756504 - RNA, 19 nt, Artificial Sequence
  Description of Artificial Sequence: Synthetic oligonucleotide
  Sense strand starting at position 597 of SEQ ID NO: 586958
ggaguggaggucugaggaa

SEQ ID NO: 756505 - RNA, 19 nt, Artificial Sequence
  Description of Artificial Sequence: Synthetic oligonucleotide
  Antisense strand to SEQ ID NO: 756504
uuccucagaccuccacucc

SEQ ID NO: 756506 - RNA, 19 nt, Artificial Sequence
  Description of Artificial Sequence: Synthetic oligonucleotide
  Sense strand starting at position 707 of SEQ ID NO: 586958
ggagcaguaugugugggaa

SEQ ID NO: 756507 - RNA, 19 nt, Artificial Sequence
  Description of Artificial Sequence: Synthetic oligonucleotide
  Antisense strand to SEQ ID NO: 756506
uucccacacauacugcucc

SEQ ID NO: 756508 - RNA, 19 nt, Artificial Sequence
  Description of Artificial Sequence: Synthetic oligonucleotide
  Sense strand starting at position 710 of SEQ ID NO: 586958
gcaguaugugugggaagca

SEQ ID NO: 756509 - RNA, 19 nt, Artificial Sequence
  Description of Artificial Sequence: Synthetic oligonucleotide
  Antisense strand to SEQ ID NO: 756508
ugcuucccacacauacugc

SEQ ID NO: 756510 - RNA, 19 nt, Artificial Sequence
  Description of Artificial Sequence: Synthetic oligonucleotide
  Sense strand starting at position 1043 of SEQ ID NO: 586958
uuccuuccuugcuggaaga

SEQ ID NO: 756511 - RNA, 19 nt, Artificial Sequence
  Description of Artificial Sequence: Synthetic oligonucleotide
  Antisense strand to SEQ ID NO: 756510
ucuuccagcaaggaaggaa

SEQ ID NO: 756512 - RNA, 19 nt, Artificial Sequence
  Description of Artificial Sequence: Synthetic oligonucleotide
  Sense strand starting at position 1090 of SEQ ID NO: 586958
ggacccaacuuaugaaaug

SEQ ID NO: 756513 - RNA, 19 nt, Artificial Sequence
  Description of Artificial Sequence: Synthetic oligonucleotide
  Antisense strand to SEQ ID NO: 756512
cauuucauaaguugggucc

SEQ ID NO: 756514 - RNA, 19 nt, Artificial Sequence
  Description of Artificial Sequence: Synthetic oligonucleotide
  Sense strand starting at position 1104 of SEQ ID NO: 586958
aaaugaagucccugagcag

SEQ ID NO: 756515 - RNA, 19 nt, Artificial Sequence
  Description of Artificial Sequence: Synthetic oligonucleotide
  Antisense strand to SEQ ID NO: 756514
cugcucagggacuucauuu

SEQ ID NO: 756516 - RNA, 19 nt, Artificial Sequence
  Description of Artificial Sequence: Synthetic oligonucleotide
  Sense strand starting at position 1212 of SEQ ID NO: 586958
gguuaagccaugugagcaa

SEQ ID NO: 756517 - RNA, 19 nt, Artificial Sequence
  Description of Artificial Sequence: Synthetic oligonucleotide
  Antisense strand to SEQ ID NO: 756516
uugcucacauggcuuaacc

SEQ ID NO: 756518 - RNA, 19 nt, Artificial Sequence
  Description of Artificial Sequence: Synthetic oligonucleotide
  Sense strand starting at position 1249 of SEQ ID NO: 586958
gaucaauccugagcagggu

SEQ ID NO: 756519 - RNA, 19 nt, Artificial Sequence
  Description of Artificial Sequence: Synthetic oligonucleotide
  Antisense strand to SEQ ID NO: 756518
acccugcucaggauugauc

SEQ ID NO: 756520 - RNA, 19 nt, Artificial Sequence
  Description of Artificial Sequence: Synthetic oligonucleotide
  Sense strand starting at position 2463 of SEQ ID NO: 586958
gagcgaggagcuuaauaau

SEQ ID NO: 756521 - RNA, 19 nt, Artificial Sequence
  Description of Artificial Sequence: Synthetic oligonucleotide
  Antisense strand to SEQ ID NO: 756520
auuauuaagcuccucgcuc

SEQ ID NO: 756522 - RNA, 19 nt, Artificial Sequence
  Description of Artificial Sequence: Synthetic oligonucleotide
  Sense strand starting at position 2469 of SEQ ID NO: 586958
ggagcuuaauaaugaguua

SEQ ID NO: 756523 - RNA, 19 nt, Artificial Sequence
  Description of Artificial Sequence: Synthetic oligonucleotide
  Antisense strand to SEQ ID NO: 756522
uaacucauuauuaagcucc

SEQ ID NO: 756524 - RNA, 19 nt, Artificial Sequence
  Description of Artificial Sequence: Synthetic oligonucleotide
  Sense strand starting at position 2777 of SEQ ID NO: 586958
gcagacauuaccuagacga

SEQ ID NO: 756525 - RNA, 19 nt, Artificial Sequence
  Description of Artificial Sequence: Synthetic oligonucleotide
  Antisense strand to SEQ ID NO: 756524
ucgucuagguaaugucugc

SEQ ID NO: 756526 - RNA, 19 nt, Artificial Sequence
  Description of Artificial Sequence: Synthetic oligonucleotide
  Sense strand starting at position 2873 of SEQ ID NO: 586958
agggccauguucucacuaa

SEQ ID NO: 756527 - RNA, 19 nt, Artificial Sequence
  Description of Artificial Sequence: Synthetic oligonucleotide
  Antisense strand to SEQ ID NO: 756526
uuagugagaacauggcccu

SEQ ID NO: 756528 - RNA, 19 nt, Artificial Sequence
  Description of Artificial Sequence: Synthetic oligonucleotide
  Sense strand starting at position 2874 of SEQ ID NO: 586958
gggccauguucucacuaau

SEQ ID NO: 756529 - RNA, 19 nt, Artificial Sequence
  Description of Artificial Sequence: Synthetic oligonucleotide
  Antisense strand to SEQ ID NO: 756528
auuagugagaacauggccc

SEQ ID NO: 756530 - RNA, 19 nt, Artificial Sequence
  Description of Artificial Sequence: Synthetic oligonucleotide
  Sense strand starting at position 3357 of SEQ ID NO: 586958
cuggguuugucucuguuau

SEQ ID NO: 756531 - RNA, 19 nt, Artificial Sequence
  Description of Artificial Sequence: Synthetic oligonucleotide
  Antisense strand to SEQ ID NO: 756530
auaacagagacaaacccag

SEQ ID NO: 756532 - RNA, 19 nt, Artificial Sequence
  Description of Artificial Sequence: Synthetic oligonucleotide
  Sense strand starting at position 3358 of SEQ ID NO: 586958
uggguuugucucuguuaug

SEQ ID NO: 756533 - RNA, 19 nt, Artificial Sequence
  Description of Artificial Sequence: Synthetic oligonucleotide
  Antisense strand to SEQ ID NO: 756532
cauaacagagacaaaccca

SEQ ID NO: 756534 - RNA, 19 nt, Artificial Sequence
  Description of Artificial Sequence: Synthetic oligonucleotide
  Sense strand starting at position 3910 of SEQ ID NO: 586958
acuggagcucuguauccau

SEQ ID NO: 756535 - RNA, 19 nt, Artificial Sequence
  Description of Artificial Sequence: Synthetic oligonucleotide
  Antisense strand to SEQ ID NO: 756534
auggauacagagcuccagu

SEQ ID NO: 756536 - RNA, 19 nt, Artificial Sequence
  Description of Artificial Sequence: Synthetic oligonucleotide
  Sense strand starting at position 3913 of SEQ ID NO: 586958
ggagcucuguauccaucua

SEQ ID NO: 756537 - RNA, 19 nt, Artificial Sequence
  Description of Artificial Sequence: Synthetic oligonucleotide
  Antisense strand to SEQ ID NO: 756536
uagauggauacagagcucc

SEQ ID NO: 756538 - RNA, 19 nt, Artificial Sequence
  Description of Artificial Sequence: Synthetic oligonucleotide
  Sense strand starting at position 92 of SEQ ID NO: 586959
ggccauucugaggaucuga

SEQ ID NO: 756539 - RNA, 19 nt, Artificial Sequence
  Description of Artificial Sequence: Synthetic oligonucleotide
  Antisense strand to SEQ ID NO: 756538
ucagauccucagaauggcc

SEQ ID NO: 756540 - RNA, 19 nt, Artificial Sequence
  Description of Artificial Sequence: Synthetic oligonucleotide
  Sense strand starting at position 186 of SEQ ID NO: 586959
ggaguggaggucugaggaa

SEQ ID NO: 756541 - RNA, 19 nt, Artificial Sequence
  Description of Artificial Sequence: Synthetic oligonucleotide
  Antisense strand to SEQ ID NO: 756540
uuccucagaccuccacucc

SEQ ID NO: 756542 - RNA, 19 nt, Artificial Sequence
  Description of Artificial Sequence: Synthetic oligonucleotide
  Sense strand starting at position 296 of SEQ ID NO: 586959
ggagcaguaugugugggaa

SEQ ID NO: 756543 - RNA, 19 nt, Artificial Sequence
  Description of Artificial Sequence: Synthetic oligonucleotide
  Antisense strand to SEQ ID NO: 756542
uucccacacauacugcucc

SEQ ID NO: 756544 - RNA, 19 nt, Artificial Sequence
  Description of Artificial Sequence: Synthetic oligonucleotide
  Sense strand starting at position 299 of SEQ ID NO: 586959
gcaguaugugugggaagca

SEQ ID NO: 756545 - RNA, 19 nt, Artificial Sequence
  Description of Artificial Sequence: Synthetic oligonucleotide
  Antisense strand to SEQ ID NO: 756544
ugcuucccacacauacugc

SEQ ID NO: 756546 - RNA, 19 nt, Artificial Sequence
  Description of Artificial Sequence: Synthetic oligonucleotide
  Sense strand starting at position 632 of SEQ ID NO: 586959
uuccuuccuugcuggaaga

SEQ ID NO: 756547 - RNA, 19 nt, Artificial Sequence
  Description of Artificial Sequence: Synthetic oligonucleotide
  Antisense strand to SEQ ID NO: 756546
ucuuccagcaaggaaggaa

SEQ ID NO: 756548 - RNA, 19 nt, Artificial Sequence
  Description of Artificial Sequence: Synthetic oligonucleotide
  Sense strand starting at position 679 of SEQ ID NO: 586959
ggacccaacuuaugaaaug

SEQ ID NO: 756549 - RNA, 19 nt, Artificial Sequence
  Description of Artificial Sequence: Synthetic oligonucleotide
  Antisense strand to SEQ ID NO: 756548
cauuucauaaguugggucc

SEQ ID NO: 756550 - RNA, 19 nt, Artificial Sequence
  Description of Artificial Sequence: Synthetic oligonucleotide
  Sense strand starting at position 693 of SEQ ID NO: 586959
aaaugaagucccugagcag

SEQ ID NO: 756551 - RNA, 19 nt, Artificial Sequence
  Description of Artificial Sequence: Synthetic oligonucleotide
  Antisense strand to SEQ ID NO: 756550
cugcucagggacuucauuu

SEQ ID NO: 756552 - RNA, 19 nt, Artificial Sequence
  Description of Artificial Sequence: Synthetic oligonucleotide
  Sense strand starting at position 801 of SEQ ID NO: 586959
gguuaagccaugugagcaa

SEQ ID NO: 756553 - RNA, 19 nt, Artificial Sequence
  Description of Artificial Sequence: Synthetic oligonucleotide
  Antisense strand to SEQ ID NO: 756552
uugcucacauggcuuaacc

SEQ ID NO: 756554 - RNA, 19 nt, Artificial Sequence
  Description of Artificial Sequence: Synthetic oligonucleotide
  Sense strand starting at position 838 of SEQ ID NO: 586959
gaucaauccugagcagggu

SEQ ID NO: 756555 - RNA, 19 nt, Artificial Sequence
  Description of Artificial Sequence: Synthetic oligonucleotide
  Antisense strand to SEQ ID NO: 756554
acccugcucaggauugauc

SEQ ID NO: 756556 - RNA, 19 nt, Artificial Sequence
  Description of Artificial Sequence: Synthetic oligonucleotide
  Sense strand starting at position 2052 of SEQ ID NO: 586959
gagcgaggagcuuaauaau

SEQ ID NO: 756557 - RNA, 19 nt, Artificial Sequence
  Description of Artificial Sequence: Synthetic oligonucleotide
  Antisense strand to SEQ ID NO: 756556
auuauuaagcuccucgcuc

SEQ ID NO: 756558 - RNA, 19 nt, Artificial Sequence
  Description of Artificial Sequence: Synthetic oligonucleotide
  Sense strand starting at position 2058 of SEQ ID NO: 586959
ggagcuuaauaaugaguua

SEQ ID NO: 756559 - RNA, 19 nt, Artificial Sequence
  Description of Artificial Sequence: Synthetic oligonucleotide
  Antisense strand to SEQ ID NO: 756558
uaacucauuauuaagcucc

SEQ ID NO: 756560 - RNA, 19 nt, Artificial Sequence
  Description of Artificial Sequence: Synthetic oligonucleotide
  Sense strand starting at position 2366 of SEQ ID NO: 586959
gcagacauuaccuagacga

SEQ ID NO: 756561 - RNA, 19 nt, Artificial Sequence
  Description of Artificial Sequence: Synthetic oligonucleotide
  Antisense strand to SEQ ID NO: 756560
ucgucuagguaaugucugc

SEQ ID NO: 756562 - RNA, 19 nt, Artificial Sequence
  Description of Artificial Sequence: Synthetic oligonucleotide
  Sense strand starting at position 2462 of SEQ ID NO: 586959
agggccauguucucacuaa

SEQ ID NO: 756563 - RNA, 19 nt, Artificial Sequence
  Description of Artificial Sequence: Synthetic oligonucleotide
  Antisense strand to SEQ ID NO: 756562
uuagugagaacauggcccu

SEQ ID NO: 756564 - RNA, 19 nt, Artificial Sequence
  Description of Artificial Sequence: Synthetic oligonucleotide
  Sense strand starting at position 2463 of SEQ ID NO: 586959
gggccauguucucacuaau

SEQ ID NO: 756565 - RNA, 19 nt, Artificial Sequence
  Description of Artificial Sequence: Synthetic oligonucleotide
  Antisense strand to SEQ ID NO: 756564
auuagugagaacauggccc

SEQ ID NO: 756566 - RNA, 19 nt, Artificial Sequence
  Description of Artificial Sequence: Synthetic oligonucleotide
  Sense strand starting at position 2946 of SEQ ID NO: 586959
cuggguuugucucuguuau

SEQ ID NO: 756567 - RNA, 19 nt, Artificial Sequence
  Description of Artificial Sequence: Synthetic oligonucleotide
  Antisense strand to SEQ ID NO: 756566
auaacagagacaaacccag

SEQ ID NO: 756568 - RNA, 19 nt, Artificial Sequence
  Description of Artificial Sequence: Synthetic oligonucleotide
  Sense strand starting at position 2947 of SEQ ID NO: 586959
uggguuugucucuguuaug

SEQ ID NO: 756569 - RNA, 19 nt, Artificial Sequence
  Description of Artificial Sequence: Synthetic oligonucleotide
  Antisense strand to SEQ ID NO: 756568
cauaacagagacaaaccca

SEQ ID NO: 756570 - RNA, 19 nt, Artificial Sequence
  Description of Artificial Sequence: Synthetic oligonucleotide
  Sense strand starting at position 3499 of SEQ ID NO: 586959
acuggagcucuguauccau

SEQ ID NO: 756571 - RNA, 19 nt, Artificial Sequence
  Description of Artificial Sequence: Synthetic oligonucleotide
  Antisense strand to SEQ ID NO: 756570
auggauacagagcuccagu

SEQ ID NO: 756572 - RNA, 19 nt, Artificial Sequence
  Description of Artificial Sequence: Synthetic oligonucleotide
  Sense strand starting at position 3502 of SEQ ID NO: 586959
ggagcucuguauccaucua

SEQ ID NO: 756573 - RNA, 19 nt, Artificial Sequence
  Description of Artificial Sequence: Synthetic oligonucleotide
  Antisense strand to SEQ ID NO: 756572
uagauggauacagagcucc

SEQ ID NO: 756574 - RNA, 19 nt, Artificial Sequence
  Description of Artificial Sequence: Synthetic oligonucleotide
  Sense strand starting at position 3667 of SEQ ID NO: 586959
uguaacacgagucaggauu

SEQ ID NO: 756575 - RNA, 19 nt, Artificial Sequence
  Description of Artificial Sequence: Synthetic oligonucleotide
  Antisense strand to SEQ ID NO: 756574
aauccugacucguguuaca

SEQ ID NO: 756576 - RNA, 19 nt, Artificial Sequence
  Description of Artificial Sequence: Synthetic oligonucleotide
  Sense strand starting at position 3701 of SEQ ID NO: 586959
gccgaaauguauuccacug

SEQ ID NO: 756577 - RNA, 19 nt, Artificial Sequence
  Description of Artificial Sequence: Synthetic oligonucleotide
  Antisense strand to SEQ ID NO: 756576
caguggaauacauuucggc

SEQ ID NO: 756578 - RNA, 19 nt, Artificial Sequence
  Description of Artificial Sequence: Synthetic oligonucleotide
  Sense strand starting at position 3706 of SEQ ID NO: 586959
aauguauuccacugugugu

SEQ ID NO: 756579 - RNA, 19 nt, Artificial Sequence
  Description of Artificial Sequence: Synthetic oligonucleotide
  Antisense strand to SEQ ID NO: 756578
acacacaguggaauacauu

SEQ ID NO: 756580 - RNA, 19 nt, Artificial Sequence
  Description of Artificial Sequence: Synthetic oligonucleotide
  Sense strand starting at position 3708 of SEQ ID NO: 586959
uguauuccacuguguguau

SEQ ID NO: 756581 - RNA, 19 nt, Artificial Sequence
  Description of Artificial Sequence: Synthetic oligonucleotide
  Antisense strand to SEQ ID NO: 756580
auacacacaguggaauaca

SEQ ID NO: 756582 - RNA, 19 nt, Artificial Sequence
  Description of Artificial Sequence: Synthetic oligonucleotide
  Sense strand starting at position 3731 of SEQ ID NO: 586959
cccuguuguuguuauugua

SEQ ID NO: 756583 - RNA, 19 nt, Artificial Sequence
  Description of Artificial Sequence: Synthetic oligonucleotide
  Antisense strand to SEQ ID NO: 756582
uacaauaacaacaacaggg

SEQ ID NO: 756584 - RNA, 19 nt, Artificial Sequence
  Description of Artificial Sequence: Synthetic oligonucleotide
  Sense strand starting at position 3747 of SEQ ID NO: 586959
guauuagagaugggaucuu

SEQ ID NO: 756585 - RNA, 19 nt, Artificial Sequence
  Description of Artificial Sequence: Synthetic oligonucleotide
  Antisense strand to SEQ ID NO: 756584
aagaucccaucucuaauac

SEQ ID NO: 756586 - RNA, 19 nt, Artificial Sequence
  Description of Artificial Sequence: Synthetic oligonucleotide
  Sense strand starting at position 651 of SEQ ID NO: 586960
gguaauagcucuuuaccuu

SEQ ID NO: 756587 - RNA, 19 nt, Artificial Sequence
  Description of Artificial Sequence: Synthetic oligonucleotide
  Antisense strand to SEQ ID NO: 756586
aagguaaagagcuauuacc

SEQ ID NO: 756588 - RNA, 19 nt, Artificial Sequence
  Description of Artificial Sequence: Synthetic oligonucleotide
  Sense strand starting at position 666 of SEQ ID NO: 586960
ccuuuaauagcucauggaa

SEQ ID NO: 756589 - RNA, 19 nt, Artificial Sequence
  Description of Artificial Sequence: Synthetic oligonucleotide
  Antisense strand to SEQ ID NO: 756588
uuccaugagcuauuaaagg

SEQ ID NO: 756590 - RNA, 19 nt, Artificial Sequence
  Description of Artificial Sequence: Synthetic oligonucleotide
  Sense strand starting at position 669 of SEQ ID NO: 586960
uuaauagcucauggaauga

SEQ ID NO: 756591 - RNA, 19 nt, Artificial Sequence
  Description of Artificial Sequence: Synthetic oligonucleotide
  Antisense strand to SEQ ID NO: 756590
ucauuccaugagcuauuaa

SEQ ID NO: 756592 - RNA, 19 nt, Artificial Sequence
  Description of Artificial Sequence: Synthetic oligonucleotide
  Sense strand starting at position 680 of SEQ ID NO: 586960
uggaaugacucucaaacca

SEQ ID NO: 756593 - RNA, 19 nt, Artificial Sequence
  Description of Artificial Sequence: Synthetic oligonucleotide
  Antisense strand to SEQ ID NO: 756592
ugguuugagagucauucca

SEQ ID NO: 756594 - RNA, 19 nt, Artificial Sequence
  Description of Artificial Sequence: Synthetic oligonucleotide
  Sense strand starting at position 783 of SEQ ID NO: 586960
gaauaaggcuuuccaagga

SEQ ID NO: 756595 - RNA, 19 nt, Artificial Sequence
  Description of Artificial Sequence: Synthetic oligonucleotide
  Antisense strand to SEQ ID NO: 756594
uccuuggaaagccuuauuc

SEQ ID NO: 756596 - RNA, 19 nt, Artificial Sequence
  Description of Artificial Sequence: Synthetic oligonucleotide
  Sense strand starting at position 870 of SEQ ID NO: 586960
gaggcaggguccuucugau

SEQ ID NO: 756597 - RNA, 19 nt, Artificial Sequence
  Description of Artificial Sequence: Synthetic oligonucleotide
  Antisense strand to SEQ ID NO: 756596
aucagaaggacccugccuc

SEQ ID NO: 756598 - RNA, 19 nt, Artificial Sequence
  Description of Artificial Sequence: Synthetic oligonucleotide
  Sense strand starting at position 949 of SEQ ID NO: 586960
ggguuuagugugggaugca

SEQ ID NO: 756599 - RNA, 19 nt, Artificial Sequence
  Description of Artificial Sequence: Synthetic oligonucleotide
  Antisense strand to SEQ ID NO: 756598
ugcaucccacacuaaaccc

SEQ ID NO: 756600 - RNA, 19 nt, Artificial Sequence
  Description of Artificial Sequence: Synthetic oligonucleotide
  Sense strand starting at position 986 of SEQ ID NO: 586960
uuuguuguuguuuagcaga

SEQ ID NO: 756601 - RNA, 19 nt, Artificial Sequence
  Description of Artificial Sequence: Synthetic oligonucleotide
  Antisense strand to SEQ ID NO: 756600
ucugcuaaacaacaacaaa

SEQ ID NO: 756602 - RNA, 19 nt, Artificial Sequence
  Description of Artificial Sequence: Synthetic oligonucleotide
  Sense strand starting at position 991 of SEQ ID NO: 586960
uguuguuuagcagagaaga

SEQ ID NO: 756603 - RNA, 19 nt, Artificial Sequence
  Description of Artificial Sequence: Synthetic oligonucleotide
  Antisense strand to SEQ ID NO: 756602
ucuucucugcuaaacaaca

SEQ ID NO: 756604 - RNA, 19 nt, Artificial Sequence
  Description of Artificial Sequence: Synthetic oligonucleotide
  Sense strand starting at position 1016 of SEQ ID NO: 586960
agagaaagcucgagguuga

SEQ ID NO: 756605 - RNA, 19 nt, Artificial Sequence
  Description of Artificial Sequence: Synthetic oligonucleotide
  Antisense strand to SEQ ID NO: 756604
ucaaccucgagcuuucucu

SEQ ID NO: 756606 - RNA, 19 nt, Artificial Sequence
  Description of Artificial Sequence: Synthetic oligonucleotide
  Sense strand starting at position 1076 of SEQ ID NO: 586960
caguacuuaguuuagcaga

SEQ ID NO: 756607 - RNA, 19 nt, Artificial Sequence
  Description of Artificial Sequence: Synthetic oligonucleotide
  Antisense strand to SEQ ID NO: 756606
ucugcuaaacuaaguacug

SEQ ID NO: 756608 - RNA, 19 nt, Artificial Sequence
  Description of Artificial Sequence: Synthetic oligonucleotide
  Sense strand starting at position 1078 of SEQ ID NO: 586960
guacuuaguuuagcagaca

SEQ ID NO: 756609 - RNA, 19 nt, Artificial Sequence
  Description of Artificial Sequence: Synthetic oligonucleotide
  Antisense strand to SEQ ID NO: 756608
ugucugcuaaacuaaguac

SEQ ID NO: 756610 - RNA, 19 nt, Artificial Sequence
  Description of Artificial Sequence: Synthetic oligonucleotide
  Sense strand starting at position 1081 of SEQ ID NO: 586960
cuuaguuuagcagacaaug

SEQ ID NO: 756611 - RNA, 19 nt, Artificial Sequence
  Description of Artificial Sequence: Synthetic oligonucleotide
  Antisense strand to SEQ ID NO: 756610
cauugucugcuaaacuaag

SEQ ID NO: 756612 - RNA, 19 nt, Artificial Sequence
  Description of Artificial Sequence: Synthetic oligonucleotide
  Sense strand starting at position 1096 of SEQ ID NO: 586960
aaugaugccucccugagga

SEQ ID NO: 756613 - RNA, 19 nt, Artificial Sequence
  Description of Artificial Sequence: Synthetic oligonucleotide
  Antisense strand to SEQ ID NO: 756612
uccucagggaggcaucauu

SEQ ID NO: 756614 - RNA, 19 nt, Artificial Sequence
  Description of Artificial Sequence: Synthetic oligonucleotide
  Sense strand starting at position 1176 of SEQ ID NO: 586960
gucguaagugacuggauga

SEQ ID NO: 756615 - RNA, 19 nt, Artificial Sequence
  Description of Artificial Sequence: Synthetic oligonucleotide
  Antisense strand to SEQ ID NO: 756614
ucauccagucacuuacgac

SEQ ID NO: 756616 - RNA, 19 nt, Artificial Sequence
  Description of Artificial Sequence: Synthetic oligonucleotide
  Sense strand starting at position 2364 of SEQ ID NO: 586960
gggagaauaucaugggaaa

SEQ ID NO: 756617 - RNA, 19 nt, Artificial Sequence
  Description of Artificial Sequence: Synthetic oligonucleotide
  Antisense strand to SEQ ID NO: 756616
uuucccaugauauucuccc

SEQ ID NO: 756618 - RNA, 19 nt, Artificial Sequence
  Description of Artificial Sequence: Synthetic oligonucleotide
  Sense strand starting at position 2367 of SEQ ID NO: 586960
agaauaucaugggaaaugu

SEQ ID NO: 756619 - RNA, 19 nt, Artificial Sequence
  Description of Artificial Sequence: Synthetic oligonucleotide
  Antisense strand to SEQ ID NO: 756618
acauuucccaugauauucu

SEQ ID NO: 756620 - RNA, 19 nt, Artificial Sequence
  Description of Artificial Sequence: Synthetic oligonucleotide
  Sense strand starting at position 2441 of SEQ ID NO: 586960
gggaguucaugugcaggua

SEQ ID NO: 756621 - RNA, 19 nt, Artificial Sequence
  Description of Artificial Sequence: Synthetic oligonucleotide
  Antisense strand to SEQ ID NO: 756620
uaccugcacaugaacuccc

SEQ ID NO: 756622 - RNA, 19 nt, Artificial Sequence
  Description of Artificial Sequence: Synthetic oligonucleotide
  Sense strand starting at position 2456 of SEQ ID NO: 586960
gguaggauugggcgagaaa

SEQ ID NO: 756623 - RNA, 19 nt, Artificial Sequence
  Description of Artificial Sequence: Synthetic oligonucleotide
  Antisense strand to SEQ ID NO: 756622
uuucucgcccaauccuacc

SEQ ID NO: 756624 - RNA, 19 nt, Artificial Sequence
  Description of Artificial Sequence: Synthetic oligonucleotide
  Sense strand starting at position 2529 of SEQ ID NO: 586960
gcaggugaagucuacacuu

SEQ ID NO: 756625 - RNA, 19 nt, Artificial Sequence
  Description of Artificial Sequence: Synthetic oligonucleotide
  Antisense strand to SEQ ID NO: 756624
aaguguagacuucaccugc

SEQ ID NO: 756626 - RNA, 19 nt, Artificial Sequence
  Description of Artificial Sequence: Synthetic oligonucleotide
  Sense strand starting at position 2550 of SEQ ID NO: 586960
ggugguacgacucauucuu

SEQ ID NO: 756627 - RNA, 19 nt, Artificial Sequence
  Description of Artificial Sequence: Synthetic oligonucleotide
  Antisense strand to SEQ ID NO: 756626
aagaaugagucguaccacc

SEQ ID NO: 756628 - RNA, 19 nt, Artificial Sequence
  Description of Artificial Sequence: Synthetic oligonucleotide
  Sense strand starting at position 2935 of SEQ ID NO: 586960
cuuccaggcccuggaaauu

SEQ ID NO: 756629 - RNA, 19 nt, Artificial Sequence
  Description of Artificial Sequence: Synthetic oligonucleotide
  Antisense strand to SEQ ID NO: 756628
aauuuccagggccuggaag

SEQ ID NO: 756630 - RNA, 19 nt, Artificial Sequence
  Description of Artificial Sequence: Synthetic oligonucleotide
  Sense strand starting at position 2944 of SEQ ID NO: 586960
ccuggaaauugagcucuga

SEQ ID NO: 756631 - RNA, 19 nt, Artificial Sequence
  Description of Artificial Sequence: Synthetic oligonucleotide
  Antisense strand to SEQ ID NO: 756630
ucagagcucaauuuccagg

SEQ ID NO: 756632 - RNA, 19 nt, Artificial Sequence
  Description of Artificial Sequence: Synthetic oligonucleotide
  Sense strand starting at position 2948 of SEQ ID NO: 586960
gaaauugagcucugaauga

SEQ ID NO: 756633 - RNA, 19 nt, Artificial Sequence
  Description of Artificial Sequence: Synthetic oligonucleotide
  Antisense strand to SEQ ID NO: 756632
ucauucagagcucaauuuc

SEQ ID NO: 756634 - RNA, 19 nt, Artificial Sequence
  Description of Artificial Sequence: Synthetic oligonucleotide
  Sense strand starting at position 2965 of SEQ ID NO: 586960
gaggcaaaguccuuguucu

SEQ ID NO: 756635 - RNA, 19 nt, Artificial Sequence
  Description of Artificial Sequence: Synthetic oligonucleotide
  Antisense strand to SEQ ID NO: 756634
agaacaaggacuuugccuc

SEQ ID NO: 756636 - RNA, 19 nt, Artificial Sequence
  Description of Artificial Sequence: Synthetic oligonucleotide
  Sense strand starting at position 2966 of SEQ ID NO: 586960
aggcaaaguccuuguucuu

SEQ ID NO: 756637 - RNA, 19 nt, Artificial Sequence
  Description of Artificial Sequence: Synthetic oligonucleotide
  Antisense strand to SEQ ID NO: 756636
aagaacaaggacuuugccu

SEQ ID NO: 756638 - RNA, 19 nt, Artificial Sequence
  Description of Artificial Sequence: Synthetic oligonucleotide
  Sense strand starting at position 3054 of SEQ ID NO: 586960
gacaguauggcauauugca

SEQ ID NO: 756639 - RNA, 19 nt, Artificial Sequence
  Description of Artificial Sequence: Synthetic oligonucleotide
  Antisense strand to SEQ ID NO: 756638
ugcaauaugccauacuguc

SEQ ID NO: 756640 - RNA, 19 nt, Artificial Sequence
  Description of Artificial Sequence: Synthetic oligonucleotide
  Sense strand starting at position 3062 of SEQ ID NO: 586960
ggcauauugcauuaaauug

SEQ ID NO: 756641 - RNA, 19 nt, Artificial Sequence
  Description of Artificial Sequence: Synthetic oligonucleotide
  Antisense strand to SEQ ID NO: 756640
caauuuaaugcaauaugcc

SEQ ID NO: 756642 - RNA, 19 nt, Artificial Sequence
  Description of Artificial Sequence: Synthetic oligonucleotide
  Sense strand starting at position 3165 of SEQ ID NO: 586960
ggagcagucaauuaugcca

SEQ ID NO: 756643 - RNA, 19 nt, Artificial Sequence
  Description of Artificial Sequence: Synthetic oligonucleotide
  Antisense strand to SEQ ID NO: 756642
uggcauaauugacugcucc

SEQ ID NO: 756644 - RNA, 19 nt, Artificial Sequence
  Description of Artificial Sequence: Synthetic oligonucleotide
  Sense strand starting at position 3265 of SEQ ID NO: 586960
uugcuuucucuugaaagac

SEQ ID NO: 756645 - RNA, 19 nt, Artificial Sequence
  Description of Artificial Sequence: Synthetic oligonucleotide
  Antisense strand to SEQ ID NO: 756644
gucuuucaagagaaagcaa

SEQ ID NO: 756646 - RNA, 19 nt, Artificial Sequence
  Description of Artificial Sequence: Synthetic oligonucleotide
  Sense strand starting at position 3302 of SEQ ID NO: 586960
gacuguuuauguucuaggu

SEQ ID NO: 756647 - RNA, 19 nt, Artificial Sequence
  Description of Artificial Sequence: Synthetic oligonucleotide
  Antisense strand to SEQ ID NO: 756646
accuagaacauaaacaguc

SEQ ID NO: 756648 - RNA, 19 nt, Artificial Sequence
  Description of Artificial Sequence: Synthetic oligonucleotide
  Sense strand starting at position 3311 of SEQ ID NO: 586960
uguucuagguucucuuaca

SEQ ID NO: 756649 - RNA, 19 nt, Artificial Sequence
  Description of Artificial Sequence: Synthetic oligonucleotide
  Antisense strand to SEQ ID NO: 756648
uguaagagaaccuagaaca

SEQ ID NO: 756650 - RNA, 19 nt, Artificial Sequence
  Description of Artificial Sequence: Synthetic oligonucleotide
  Sense strand starting at position 3312 of SEQ ID NO: 586960
guucuagguucucuuacau

SEQ ID NO: 756651 - RNA, 19 nt, Artificial Sequence
  Description of Artificial Sequence: Synthetic oligonucleotide
  Antisense strand to SEQ ID NO: 756650
auguaagagaaccuagaac

SEQ ID NO: 756652 - RNA, 19 nt, Artificial Sequence
  Description of Artificial Sequence: Synthetic oligonucleotide
  Sense strand starting at position 3381 of SEQ ID NO: 586960
uuuaauaugucugugaguu

SEQ ID NO: 756653 - RNA, 19 nt, Artificial Sequence
  Description of Artificial Sequence: Synthetic oligonucleotide
  Antisense strand to SEQ ID NO: 756652
aacucacagacauauuaaa

SEQ ID NO: 756654 - RNA, 19 nt, Artificial Sequence
  Description of Artificial Sequence: Synthetic oligonucleotide
  Sense strand starting at position 3410 of SEQ ID NO: 586960
guccauaugcccuggauau

SEQ ID NO: 756655 - RNA, 19 nt, Artificial Sequence
  Description of Artificial Sequence: Synthetic oligonucleotide
  Antisense strand to SEQ ID NO: 756654
auauccagggcauauggac

SEQ ID NO: 756656 - RNA, 19 nt, Artificial Sequence
  Description of Artificial Sequence: Synthetic oligonucleotide
  Sense strand starting at position 3411 of SEQ ID NO: 586960
uccauaugcccuggauaug

SEQ ID NO: 756657 - RNA, 19 nt, Artificial Sequence
  Description of Artificial Sequence: Synthetic oligonucleotide
  Antisense strand to SEQ ID NO: 756656
cauauccagggcauaugga

SEQ ID NO: 756658 - RNA, 19 nt, Artificial Sequence
  Description of Artificial Sequence: Synthetic oligonucleotide
  Sense strand starting at position 3514 of SEQ ID NO: 586960
cuuacacuucucuggguua

SEQ ID NO: 756659 - RNA, 19 nt, Artificial Sequence
  Description of Artificial Sequence: Synthetic oligonucleotide
  Antisense strand to SEQ ID NO: 756658
uaacccagagaaguguaag

SEQ ID NO: 756660 - RNA, 19 nt, Artificial Sequence
  Description of Artificial Sequence: Synthetic oligonucleotide
  Sense strand starting at position 3517 of SEQ ID NO: 586960
acacuucucuggguuaucu

SEQ ID NO: 756661 - RNA, 19 nt, Artificial Sequence
  Description of Artificial Sequence: Synthetic oligonucleotide
  Antisense strand to SEQ ID NO: 756660
agauaacccagagaagugu

SEQ ID NO: 756662 - RNA, 19 nt, Artificial Sequence
  Description of Artificial Sequence: Synthetic oligonucleotide
  Sense strand starting at position 3594 of SEQ ID NO: 586960
uccugagcuccagaucaga

SEQ ID NO: 756663 - RNA, 19 nt, Artificial Sequence
  Description of Artificial Sequence: Synthetic oligonucleotide
  Antisense strand to SEQ ID NO: 756662
ucugaucuggagcucagga

SEQ ID NO: 756664 - RNA, 19 nt, Artificial Sequence
  Description of Artificial Sequence: Synthetic oligonucleotide
  Sense strand starting at position 3983 of SEQ ID NO: 586960
cucagcugucuugaaagua

SEQ ID NO: 756665 - RNA, 19 nt, Artificial Sequence
  Description of Artificial Sequence: Synthetic oligonucleotide
  Antisense strand to SEQ ID NO: 756664
uacuuucaagacagcugag

SEQ ID NO: 756666 - RNA, 19 nt, Artificial Sequence
  Description of Artificial Sequence: Synthetic oligonucleotide
  Sense strand starting at position 50 of SEQ ID NO: 586961
uaugguaaucugcagaguu

SEQ ID NO: 756667 - RNA, 19 nt, Artificial Sequence
  Description of Artificial Sequence: Synthetic oligonucleotide
  Antisense strand to SEQ ID NO: 756666
aacucugcagauuaccaua

SEQ ID NO: 756668 - RNA, 19 nt, Artificial Sequence
  Description of Artificial Sequence: Synthetic oligonucleotide
  Sense strand starting at position 75 of SEQ ID NO: 586961
gccacuguuguuuacacau

SEQ ID NO: 756669 - RNA, 19 nt, Artificial Sequence
  Description of Artificial Sequence: Synthetic oligonucleotide
  Antisense strand to SEQ ID NO: 756668
auguguaaacaacaguggc

SEQ ID NO: 756670 - RNA, 19 nt, Artificial Sequence
  Description of Artificial Sequence: Synthetic oligonucleotide
  Sense strand starting at position 101 of SEQ ID NO: 586961
gucuaaugugcugugcuga

SEQ ID NO: 756671 - RNA, 19 nt, Artificial Sequence
  Description of Artificial Sequence: Synthetic oligonucleotide
  Antisense strand to SEQ ID NO: 756670
ucagcacagcacauuagac

SEQ ID NO: 756672 - RNA, 19 nt, Artificial Sequence
  Description of Artificial Sequence: Synthetic oligonucleotide
  Sense strand starting at position 219 of SEQ ID NO: 586961
accuuauggccuuguccaa

SEQ ID NO: 756673 - RNA, 19 nt, Artificial Sequence
  Description of Artificial Sequence: Synthetic oligonucleotide
  Antisense strand to SEQ ID NO: 756672
uuggacaaggccauaaggu

SEQ ID NO: 756674 - RNA, 19 nt, Artificial Sequence
  Description of Artificial Sequence: Synthetic oligonucleotide
  Sense strand starting at position 226 of SEQ ID NO: 586961
ggccuuguccaacaucuga

SEQ ID NO: 756675 - RNA, 19 nt, Artificial Sequence
  Description of Artificial Sequence: Synthetic oligonucleotide
  Antisense strand to SEQ ID NO: 756674
ucagauguuggacaaggcc

SEQ ID NO: 756676 - RNA, 19 nt, Artificial Sequence
  Description of Artificial Sequence: Synthetic oligonucleotide
  Sense strand starting at position 421 of SEQ ID NO: 586961
gaaucauacuggcuagaag

SEQ ID NO: 756677 - RNA, 19 nt, Artificial Sequence
  Description of Artificial Sequence: Synthetic oligonucleotide
  Antisense strand to SEQ ID NO: 756676
cuucuagccaguaugauuc

SEQ ID NO: 756678 - RNA, 19 nt, Artificial Sequence
  Description of Artificial Sequence: Synthetic oligonucleotide
  Sense strand starting at position 643 of SEQ ID NO: 586961
acuuaagcguccuuccaca

SEQ ID NO: 756679 - RNA, 19 nt, Artificial Sequence
  Description of Artificial Sequence: Synthetic oligonucleotide
  Antisense strand to SEQ ID NO: 756678
uguggaaggacgcuuaagu

SEQ ID NO: 756680 - RNA, 19 nt, Artificial Sequence
  Description of Artificial Sequence: Synthetic oligonucleotide
  Sense strand starting at position 784 of SEQ ID NO: 586961
ugaaaucucccgugaaagc

SEQ ID NO: 756681 - RNA, 19 nt, Artificial Sequence
  Description of Artificial Sequence: Synthetic oligonucleotide
  Antisense strand to SEQ ID NO: 756680
gcuuucacgggagauuuca

SEQ ID NO: 756682 - RNA, 19 nt, Artificial Sequence
  Description of Artificial Sequence: Synthetic oligonucleotide
  Sense strand starting at position 793 of SEQ ID NO: 586961
ccgugaaagccagacaaga

SEQ ID NO: 756683 - RNA, 19 nt, Artificial Sequence
  Description of Artificial Sequence: Synthetic oligonucleotide
  Antisense strand to SEQ ID NO: 756682
ucuugucuggcuuucacgg

SEQ ID NO: 756684 - RNA, 19 nt, Artificial Sequence
  Description of Artificial Sequence: Synthetic oligonucleotide
  Sense strand starting at position 858 of SEQ ID NO: 586961
agaacuuucugguuaccuu

SEQ ID NO: 756685 - RNA, 19 nt, Artificial Sequence
  Description of Artificial Sequence: Synthetic oligonucleotide
  Antisense strand to SEQ ID NO: 756684
aagguaaccagaaaguucu

SEQ ID NO: 756686 - RNA, 19 nt, Artificial Sequence
  Description of Artificial Sequence: Synthetic oligonucleotide
  Sense strand starting at position 2432 of SEQ ID NO: 586961
agagaugaguggaaaucgu

SEQ ID NO: 756687 - RNA, 19 nt, Artificial Sequence
  Description of Artificial Sequence: Synthetic oligonucleotide
  Antisense strand to SEQ ID NO: 756686
acgauuuccacucaucucu

SEQ ID NO: 756688 - RNA, 19 nt, Artificial Sequence
  Description of Artificial Sequence: Synthetic oligonucleotide
  Sense strand starting at position 2614 of SEQ ID NO: 586961
uuuccugcuuugguuagau

SEQ ID NO: 756689 - RNA, 19 nt, Artificial Sequence
  Description of Artificial Sequence: Synthetic oligonucleotide
  Antisense strand to SEQ ID NO: 756688
aucuaaccaaagcaggaaa

SEQ ID NO: 756690 - RNA, 19 nt, Artificial Sequence
  Description of Artificial Sequence: Synthetic oligonucleotide
  Sense strand starting at position 2657 of SEQ ID NO: 586961
uggagaagaaccuggguuu

SEQ ID NO: 756691 - RNA, 19 nt, Artificial Sequence
  Description of Artificial Sequence: Synthetic oligonucleotide
  Antisense strand to SEQ ID NO: 756690
aaacccagguucuucucca

SEQ ID NO: 756692 - RNA, 19 nt, Artificial Sequence
  Description of Artificial Sequence: Synthetic oligonucleotide
  Sense strand starting at position 2773 of SEQ ID NO: 586961
ggaacaggugucugggaaa

SEQ ID NO: 756693 - RNA, 19 nt, Artificial Sequence
  Description of Artificial Sequence: Synthetic oligonucleotide
  Antisense strand to SEQ ID NO: 756692
uuucccagacaccuguucc

SEQ ID NO: 756694 - RNA, 19 nt, Artificial Sequence
  Description of Artificial Sequence: Synthetic oligonucleotide
  Sense strand starting at position 2831 of SEQ ID NO: 586961
ugaagucugaacugugguu

SEQ ID NO: 756695 - RNA, 19 nt, Artificial Sequence
  Description of Artificial Sequence: Synthetic oligonucleotide
  Antisense strand to SEQ ID NO: 756694
aaccacaguucagacuuca

SEQ ID NO: 756696 - RNA, 19 nt, Artificial Sequence
  Description of Artificial Sequence: Synthetic oligonucleotide
  Sense strand starting at position 2853 of SEQ ID NO: 586961
agggacuggccuugguuau

SEQ ID NO: 756697 - RNA, 19 nt, Artificial Sequence
  Description of Artificial Sequence: Synthetic oligonucleotide
  Antisense strand to SEQ ID NO: 756696
auaaccaaggccagucccu

SEQ ID NO: 756698 - RNA, 19 nt, Artificial Sequence
  Description of Artificial Sequence: Synthetic oligonucleotide
  Sense strand starting at position 2860 of SEQ ID NO: 586961
ggccuugguuaugugagaa

SEQ ID NO: 756699 - RNA, 19 nt, Artificial Sequence
  Description of Artificial Sequence: Synthetic oligonucleotide
  Antisense strand to SEQ ID NO: 756698
uucucacauaaccaaggcc

SEQ ID NO: 756700 - RNA, 19 nt, Artificial Sequence
  Description of Artificial Sequence: Synthetic oligonucleotide
  Sense strand starting at position 3084 of SEQ ID NO: 586961
guagacuugcacugagcaa

SEQ ID NO: 756701 - RNA, 19 nt, Artificial Sequence
  Description of Artificial Sequence: Synthetic oligonucleotide
  Antisense strand to SEQ ID NO: 756700
uugcucagugcaagucuac

SEQ ID NO: 756702 - RNA, 19 nt, Artificial Sequence
  Description of Artificial Sequence: Synthetic oligonucleotide
  Sense strand starting at position 3189 of SEQ ID NO: 586961
uggacuaguucuguuacuu

SEQ ID NO: 756703 - RNA, 19 nt, Artificial Sequence
  Description of Artificial Sequence: Synthetic oligonucleotide
  Antisense strand to SEQ ID NO: 756702
aaguaacagaacuagucca

SEQ ID NO: 756704 - RNA, 19 nt, Artificial Sequence
  Description of Artificial Sequence: Synthetic oligonucleotide
  Sense strand starting at position 3200 of SEQ ID NO: 586961
uguuacuuuggacaguuua

SEQ ID NO: 756705 - RNA, 19 nt, Artificial Sequence
  Description of Artificial Sequence: Synthetic oligonucleotide
  Antisense strand to SEQ ID NO: 756704
uaaacuguccaaaguaaca

SEQ ID NO: 756706 - RNA, 19 nt, Artificial Sequence
  Description of Artificial Sequence: Synthetic oligonucleotide
  Sense strand starting at position 3208 of SEQ ID NO: 586961
uggacaguuuaagugcaua

SEQ ID NO: 756707 - RNA, 19 nt, Artificial Sequence
  Description of Artificial Sequence: Synthetic oligonucleotide
  Antisense strand to SEQ ID NO: 756706
uaugcacuuaaacugucca

SEQ ID NO: 756708 - RNA, 19 nt, Artificial Sequence
  Description of Artificial Sequence: Synthetic oligonucleotide
  Sense strand starting at position 3211 of SEQ ID NO: 586961
acaguuuaagugcauauua

SEQ ID NO: 756709 - RNA, 19 nt, Artificial Sequence
  Description of Artificial Sequence: Synthetic oligonucleotide
  Antisense strand to SEQ ID NO: 756708
uaauaugcacuuaaacugu

SEQ ID NO: 756710 - RNA, 19 nt, Artificial Sequence
  Description of Artificial Sequence: Synthetic oligonucleotide
  Sense strand starting at position 3213 of SEQ ID NO: 586961
aguuuaagugcauauuagu

SEQ ID NO: 756711 - RNA, 19 nt, Artificial Sequence
  Description of Artificial Sequence: Synthetic oligonucleotide
  Antisense strand to SEQ ID NO: 756710
acuaauaugcacuuaaacu

SEQ ID NO: 756712 - RNA, 19 nt, Artificial Sequence
  Description of Artificial Sequence: Synthetic oligonucleotide
  Sense strand starting at position 3296 of SEQ ID NO: 586961
cugaaauuccagcauguac

SEQ ID NO: 756713 - RNA, 19 nt, Artificial Sequence
  Description of Artificial Sequence: Synthetic oligonucleotide
  Antisense strand to SEQ ID NO: 756712
guacaugcuggaauuucag

SEQ ID NO: 756714 - RNA, 19 nt, Artificial Sequence
  Description of Artificial Sequence: Synthetic oligonucleotide
  Sense strand starting at position 3372 of SEQ ID NO: 586961
gcuugcucucaggaaacau

SEQ ID NO: 756715 - RNA, 19 nt, Artificial Sequence
  Description of Artificial Sequence: Synthetic oligonucleotide
  Antisense strand to SEQ ID NO: 756714
auguuuccugagagcaagc

SEQ ID NO: 756716 - RNA, 19 nt, Artificial Sequence
  Description of Artificial Sequence: Synthetic oligonucleotide
  Sense strand starting at position 3516 of SEQ ID NO: 586961
ugagauguaccgugaguau

SEQ ID NO: 756717 - RNA, 19 nt, Artificial Sequence
  Description of Artificial Sequence: Synthetic oligonucleotide
  Antisense strand to SEQ ID NO: 756716
auacucacgguacaucuca

SEQ ID NO: 756718 - RNA, 19 nt, Artificial Sequence
  Description of Artificial Sequence: Synthetic oligonucleotide
  Sense strand starting at position 3527 of SEQ ID NO: 586961
gugaguaugcuauaggaau

SEQ ID NO: 756719 - RNA, 19 nt, Artificial Sequence
  Description of Artificial Sequence: Synthetic oligonucleotide
  Antisense strand to SEQ ID NO: 756718
auuccuauagcauacucac

SEQ ID NO: 756720 - RNA, 19 nt, Artificial Sequence
  Description of Artificial Sequence: Synthetic oligonucleotide
  Sense strand starting at position 3550 of SEQ ID NO: 586961
gacagaggucaguguggau

SEQ ID NO: 756721 - RNA, 19 nt, Artificial Sequence
  Description of Artificial Sequence: Synthetic oligonucleotide
  Antisense strand to SEQ ID NO: 756720
auccacacugaccucuguc

SEQ ID NO: 756722 - RNA, 19 nt, Artificial Sequence
  Description of Artificial Sequence: Synthetic oligonucleotide
  Sense strand starting at position 3606 of SEQ ID NO: 586961
gugugaguaggaggaguua

SEQ ID NO: 756723 - RNA, 19 nt, Artificial Sequence
  Description of Artificial Sequence: Synthetic oligonucleotide
  Antisense strand to SEQ ID NO: 756722
uaacuccuccuacucacac

SEQ ID NO: 756724 - RNA, 19 nt, Artificial Sequence
  Description of Artificial Sequence: Synthetic oligonucleotide
  Sense strand starting at position 3648 of SEQ ID NO: 586961
gaaacugauugguaagaag

SEQ ID NO: 756725 - RNA, 19 nt, Artificial Sequence
  Description of Artificial Sequence: Synthetic oligonucleotide
  Antisense strand to SEQ ID NO: 756724
cuucuuaccaaucaguuuc

SEQ ID NO: 756726 - RNA, 19 nt, Artificial Sequence
  Description of Artificial Sequence: Synthetic oligonucleotide
  Sense strand starting at position 3688 of SEQ ID NO: 586961
aagggucaauucucuugau

SEQ ID NO: 756727 - RNA, 19 nt, Artificial Sequence
  Description of Artificial Sequence: Synthetic oligonucleotide
  Antisense strand to SEQ ID NO: 756726
aucaagagaauugacccuu

SEQ ID NO: 756728 - RNA, 19 nt, Artificial Sequence
  Description of Artificial Sequence: Synthetic oligonucleotide
  Sense strand starting at position 3689 of SEQ ID NO: 586961
agggucaauucucuugaua

SEQ ID NO: 756729 - RNA, 19 nt, Artificial Sequence
  Description of Artificial Sequence: Synthetic oligonucleotide
  Antisense strand to SEQ ID NO: 756728
uaucaagagaauugacccu

SEQ ID NO: 756730 - RNA, 19 nt, Artificial Sequence
  Description of Artificial Sequence: Synthetic oligonucleotide
  Sense strand starting at position 3692 of SEQ ID NO: 586961
gucaauucucuugauagua

SEQ ID NO: 756731 - RNA, 19 nt, Artificial Sequence
  Description of Artificial Sequence: Synthetic oligonucleotide
  Antisense strand to SEQ ID NO: 756730
uacuaucaagagaauugac

SEQ ID NO: 756732 - RNA, 19 nt, Artificial Sequence
  Description of Artificial Sequence: Synthetic oligonucleotide
  Sense strand starting at position 3758 of SEQ ID NO: 586961
guuaauauuaggugauaug

SEQ ID NO: 756733 - RNA, 19 nt, Artificial Sequence
  Description of Artificial Sequence: Synthetic oligonucleotide
  Antisense strand to SEQ ID NO: 756732
cauaucaccuaauauuaac

SEQ ID NO: 756734 - RNA, 19 nt, Artificial Sequence
  Description of Artificial Sequence: Synthetic oligonucleotide
  Sense strand starting at position 3925 of SEQ ID NO: 586961
gugaguucucacgaggauu

SEQ ID NO: 756735 - RNA, 19 nt, Artificial Sequence
  Description of Artificial Sequence: Synthetic oligonucleotide
  Antisense strand to SEQ ID NO: 756734
aauccucgugagaacucac

SEQ ID NO: 756736 - RNA, 19 nt, Artificial Sequence
  Description of Artificial Sequence: Synthetic oligonucleotide
  Sense strand starting at position 3927 of SEQ ID NO: 586961
gaguucucacgaggauugu

SEQ ID NO: 756737 - RNA, 19 nt, Artificial Sequence
  Description of Artificial Sequence: Synthetic oligonucleotide
  Antisense strand to SEQ ID NO: 756736
acaauccucgugagaacuc

SEQ ID NO: 756738 - RNA, 19 nt, Artificial Sequence
  Description of Artificial Sequence: Synthetic oligonucleotide
  Sense strand starting at position 3928 of SEQ ID NO: 586961
aguucucacgaggauuguu

SEQ ID NO: 756739 - RNA, 19 nt, Artificial Sequence
  Description of Artificial Sequence: Synthetic oligonucleotide
  Antisense strand to SEQ ID NO: 756738
aacaauccucgugagaacu

SEQ ID NO: 756740 - RNA, 19 nt, Artificial Sequence
  Description of Artificial Sequence: Synthetic oligonucleotide
  Sense strand starting at position 3931 of SEQ ID NO: 586961
ucucacgaggauuguuuaa

SEQ ID NO: 756741 - RNA, 19 nt, Artificial Sequence
  Description of Artificial Sequence: Synthetic oligonucleotide
  Antisense strand to SEQ ID NO: 756740
uuaaacaauccucgugaga

SEQ ID NO: 756742 - RNA, 19 nt, Artificial Sequence
  Description of Artificial Sequence: Synthetic oligonucleotide
  Sense strand starting at position 3933 of SEQ ID NO: 586961
ucacgaggauuguuuaaag

SEQ ID NO: 756743 - RNA, 19 nt, Artificial Sequence
  Description of Artificial Sequence: Synthetic oligonucleotide
  Antisense strand to SEQ ID NO: 756742
cuuuaaacaauccucguga

SEQ ID NO: 756744 - RNA, 19 nt, Artificial Sequence
  Description of Artificial Sequence: Synthetic oligonucleotide
  Sense strand starting at position 3936 of SEQ ID NO: 586961
cgaggauuguuuaaagggu

SEQ ID NO: 756745 - RNA, 19 nt, Artificial Sequence
  Description of Artificial Sequence: Synthetic oligonucleotide
  Antisense strand to SEQ ID NO: 756744
acccuuuaaacaauccucg

SEQ ID NO: 756746 - RNA, 19 nt, Artificial Sequence
  Description of Artificial Sequence: Synthetic oligonucleotide
  Sense strand starting at position 277 of SEQ ID NO: 586962
agcggucuggccuaagaga

SEQ ID NO: 756747 - RNA, 19 nt, Artificial Sequence
  Description of Artificial Sequence: Synthetic oligonucleotide
  Antisense strand to SEQ ID NO: 756746
ucucuuaggccagaccgcu

SEQ ID NO: 756748 - RNA, 19 nt, Artificial Sequence
  Description of Artificial Sequence: Synthetic oligonucleotide
  Sense strand starting at position 364 of SEQ ID NO: 586962
gcagcuacaagauaggauu

SEQ ID NO: 756749 - RNA, 19 nt, Artificial Sequence
  Description of Artificial Sequence: Synthetic oligonucleotide
  Antisense strand to SEQ ID NO: 756748
aauccuaucuuguagcugc

SEQ ID NO: 756750 - RNA, 19 nt, Artificial Sequence
  Description of Artificial Sequence: Synthetic oligonucleotide
  Sense strand starting at position 704 of SEQ ID NO: 586962
ggaaaguggugagaaguga

SEQ ID NO: 756751 - RNA, 19 nt, Artificial Sequence
  Description of Artificial Sequence: Synthetic oligonucleotide
  Antisense strand to SEQ ID NO: 756750
ucacuucucaccacuuucc

SEQ ID NO: 756752 - RNA, 19 nt, Artificial Sequence
  Description of Artificial Sequence: Synthetic oligonucleotide
  Sense strand starting at position 880 of SEQ ID NO: 586962
ggccgaugcuaggaaagaa

SEQ ID NO: 756753 - RNA, 19 nt, Artificial Sequence
  Description of Artificial Sequence: Synthetic oligonucleotide
  Antisense strand to SEQ ID NO: 756752
uucuuuccuagcaucggcc

SEQ ID NO: 756754 - RNA, 19 nt, Artificial Sequence
  Description of Artificial Sequence: Synthetic oligonucleotide
  Sense strand starting at position 1309 of SEQ ID NO: 586962
cguggccaugaauggaaau

SEQ ID NO: 756755 - RNA, 19 nt, Artificial Sequence
  Description of Artificial Sequence: Synthetic oligonucleotide
  Antisense strand to SEQ ID NO: 756754
auuuccauucauggccacg

SEQ ID NO: 756756 - RNA, 19 nt, Artificial Sequence
  Description of Artificial Sequence: Synthetic oligonucleotide
  Sense strand starting at position 1656 of SEQ ID NO: 586962
gacaucucccgccaacgau

SEQ ID NO: 756757 - RNA, 19 nt, Artificial Sequence
  Description of Artificial Sequence: Synthetic oligonucleotide
  Antisense strand to SEQ ID NO: 756756
aucguuggcgggagauguc

SEQ ID NO: 756758 - RNA, 19 nt, Artificial Sequence
  Description of Artificial Sequence: Synthetic oligonucleotide
  Sense strand starting at position 2286 of SEQ ID NO: 586962
uccugagugacugaagagu

SEQ ID NO: 756759 - RNA, 19 nt, Artificial Sequence
  Description of Artificial Sequence: Synthetic oligonucleotide
  Antisense strand to SEQ ID NO: 756758
acucuucagucacucagga

SEQ ID NO: 756760 - RNA, 19 nt, Artificial Sequence
  Description of Artificial Sequence: Synthetic oligonucleotide
  Sense strand starting at position 2295 of SEQ ID NO: 586962
acugaagagugguuugcau

SEQ ID NO: 756761 - RNA, 19 nt, Artificial Sequence
  Description of Artificial Sequence: Synthetic oligonucleotide
  Antisense strand to SEQ ID NO: 756760
augcaaaccacucuucagu

SEQ ID NO: 756762 - RNA, 19 nt, Artificial Sequence
  Description of Artificial Sequence: Synthetic oligonucleotide
  Sense strand starting at position 2297 of SEQ ID NO: 586962
ugaagagugguuugcauga

SEQ ID NO: 756763 - RNA, 19 nt, Artificial Sequence
  Description of Artificial Sequence: Synthetic oligonucleotide
  Antisense strand to SEQ ID NO: 756762
ucaugcaaaccacucuuca

SEQ ID NO: 756764 - RNA, 19 nt, Artificial Sequence
  Description of Artificial Sequence: Synthetic oligonucleotide
  Sense strand starting at position 2299 of SEQ ID NO: 586962
aagagugguuugcaugaaa

SEQ ID NO: 756765 - RNA, 19 nt, Artificial Sequence
  Description of Artificial Sequence: Synthetic oligonucleotide
  Antisense strand to SEQ ID NO: 756764
uuucaugcaaaccacucuu

SEQ ID NO: 756766 - RNA, 19 nt, Artificial Sequence
  Description of Artificial Sequence: Synthetic oligonucleotide
  Sense strand starting at position 2382 of SEQ ID NO: 586962
agagcuuucgaucgugcaa

SEQ ID NO: 756767 - RNA, 19 nt, Artificial Sequence
  Description of Artificial Sequence: Synthetic oligonucleotide
  Antisense strand to SEQ ID NO: 756766
uugcacgaucgaaagcucu

SEQ ID NO: 756768 - RNA, 19 nt, Artificial Sequence
  Description of Artificial Sequence: Synthetic oligonucleotide
  Sense strand starting at position 2385 of SEQ ID NO: 586962
gcuuucgaucgugcaaguu

SEQ ID NO: 756769 - RNA, 19 nt, Artificial Sequence
  Description of Artificial Sequence: Synthetic oligonucleotide
  Antisense strand to SEQ ID NO: 756768
aacuugcacgaucgaaagc

SEQ ID NO: 756770 - RNA, 19 nt, Artificial Sequence
  Description of Artificial Sequence: Synthetic oligonucleotide
  Sense strand starting at position 2475 of SEQ ID NO: 586962
auaacaaaguugccagaau

SEQ ID NO: 756771 - RNA, 19 nt, Artificial Sequence
  Description of Artificial Sequence: Synthetic oligonucleotide
  Antisense strand to SEQ ID NO: 756770
auucuggcaacuuuguuau

SEQ ID NO: 756772 - RNA, 19 nt, Artificial Sequence
  Description of Artificial Sequence: Synthetic oligonucleotide
  Sense strand starting at position 2545 of SEQ ID NO: 586962
aguugagaggcggauguuu

SEQ ID NO: 756773 - RNA, 19 nt, Artificial Sequence
  Description of Artificial Sequence: Synthetic oligonucleotide
  Antisense strand to SEQ ID NO: 756772
aaacauccgccucucaacu

SEQ ID NO: 756774 - RNA, 19 nt, Artificial Sequence
  Description of Artificial Sequence: Synthetic oligonucleotide
  Sense strand starting at position 2553 of SEQ ID NO: 586962
ggcggauguuuguuauuau

SEQ ID NO: 756775 - RNA, 19 nt, Artificial Sequence
  Description of Artificial Sequence: Synthetic oligonucleotide
  Antisense strand to SEQ ID NO: 756774
auaauaacaaacauccgcc

SEQ ID NO: 756776 - RNA, 19 nt, Artificial Sequence
  Description of Artificial Sequence: Synthetic oligonucleotide
  Sense strand starting at position 2556 of SEQ ID NO: 586962
ggauguuuguuauuaucca

SEQ ID NO: 756777 - RNA, 19 nt, Artificial Sequence
  Description of Artificial Sequence: Synthetic oligonucleotide
  Antisense strand to SEQ ID NO: 756776
uggauaauaacaaacaucc

SEQ ID NO: 756778 - RNA, 19 nt, Artificial Sequence
  Description of Artificial Sequence: Synthetic oligonucleotide
  Sense strand starting at position 2560 of SEQ ID NO: 586962
guuuguuauuauccauucu

SEQ ID NO: 756779 - RNA, 19 nt, Artificial Sequence
  Description of Artificial Sequence: Synthetic oligonucleotide
  Antisense strand to SEQ ID NO: 756778
agaauggauaauaacaaac

SEQ ID NO: 756780 - RNA, 19 nt, Artificial Sequence
  Description of Artificial Sequence: Synthetic oligonucleotide
  Sense strand starting at position 2621 of SEQ ID NO: 586962
guucccaugucuucugcua

SEQ ID NO: 756781 - RNA, 19 nt, Artificial Sequence
  Description of Artificial Sequence: Synthetic oligonucleotide
  Antisense strand to SEQ ID NO: 756780
uagcagaagacaugggaac

SEQ ID NO: 756782 - RNA, 19 nt, Artificial Sequence
  Description of Artificial Sequence: Synthetic oligonucleotide
  Sense strand starting at position 3013 of SEQ ID NO: 586962
augcgcuuucuccagcaaa

SEQ ID NO: 756783 - RNA, 19 nt, Artificial Sequence
  Description of Artificial Sequence: Synthetic oligonucleotide
  Antisense strand to SEQ ID NO: 756782
uuugcuggagaaagcgcau

SEQ ID NO: 756784 - RNA, 19 nt, Artificial Sequence
  Description of Artificial Sequence: Synthetic oligonucleotide
  Sense strand starting at position 3067 of SEQ ID NO: 586962
cugguauuauuagaaagag

SEQ ID NO: 756785 - RNA, 19 nt, Artificial Sequence
  Description of Artificial Sequence: Synthetic oligonucleotide
  Antisense strand to SEQ ID NO: 756784
cucuuucuaauaauaccag

SEQ ID NO: 756786 - RNA, 19 nt, Artificial Sequence
  Description of Artificial Sequence: Synthetic oligonucleotide
  Sense strand starting at position 3536 of SEQ ID NO: 586962
gugugucccaaggaaagua

SEQ ID NO: 756787 - RNA, 19 nt, Artificial Sequence
  Description of Artificial Sequence: Synthetic oligonucleotide
  Antisense strand to SEQ ID NO: 756786
uacuuuccuugggacacac

SEQ ID NO: 756788 - RNA, 19 nt, Artificial Sequence
  Description of Artificial Sequence: Synthetic oligonucleotide
  Sense strand starting at position 3583 of SEQ ID NO: 586962
cagccuugugccuguccua

SEQ ID NO: 756789 - RNA, 19 nt, Artificial Sequence
  Description of Artificial Sequence: Synthetic oligonucleotide
  Antisense strand to SEQ ID NO: 756788
uaggacaggcacaaggcug

SEQ ID NO: 756790 - RNA, 19 nt, Artificial Sequence
  Description of Artificial Sequence: Synthetic oligonucleotide
  Sense strand starting at position 3584 of SEQ ID NO: 586962
agccuugugccuguccuaa

SEQ ID NO: 756791 - RNA, 19 nt, Artificial Sequence
  Description of Artificial Sequence: Synthetic oligonucleotide
  Antisense strand to SEQ ID NO: 756790
uuaggacaggcacaaggcu

SEQ ID NO: 756792 - RNA, 19 nt, Artificial Sequence
  Description of Artificial Sequence: Synthetic oligonucleotide
  Sense strand starting at position 3603 of SEQ ID NO: 586962
ggucacagucuucggaaca

SEQ ID NO: 756793 - RNA, 19 nt, Artificial Sequence
  Description of Artificial Sequence: Synthetic oligonucleotide
  Antisense strand to SEQ ID NO: 756792
uguuccgaagacugugacc

SEQ ID NO: 756794 - RNA, 19 nt, Artificial Sequence
  Description of Artificial Sequence: Synthetic oligonucleotide
  Sense strand starting at position 3688 of SEQ ID NO: 586962
cucggaugacccuagugaa

SEQ ID NO: 756795 - RNA, 19 nt, Artificial Sequence
  Description of Artificial Sequence: Synthetic oligonucleotide
  Antisense strand to SEQ ID NO: 756794
uucacuagggucauccgag

SEQ ID NO: 756796 - RNA, 19 nt, Artificial Sequence
  Description of Artificial Sequence: Synthetic oligonucleotide
  Sense strand starting at position 3735 of SEQ ID NO: 586962
ggcaucacaucugucaaau

SEQ ID NO: 756797 - RNA, 19 nt, Artificial Sequence
  Description of Artificial Sequence: Synthetic oligonucleotide
  Antisense strand to SEQ ID NO: 756796
auuugacagaugugaugcc

SEQ ID NO: 756798 - RNA, 19 nt, Artificial Sequence
  Description of Artificial Sequence: Synthetic oligonucleotide
  Sense strand starting at position 3755 of SEQ ID NO: 586962
aaaggaugguccuagguca

SEQ ID NO: 756799 - RNA, 19 nt, Artificial Sequence
  Description of Artificial Sequence: Synthetic oligonucleotide
  Antisense strand to SEQ ID NO: 756798
ugaccuaggaccauccuuu

SEQ ID NO: 756800 - RNA, 19 nt, Artificial Sequence
  Description of Artificial Sequence: Synthetic oligonucleotide
  Sense strand starting at position 3766 of SEQ ID NO: 586962
cuaggucauuucuauggca

SEQ ID NO: 756801 - RNA, 19 nt, Artificial Sequence
  Description of Artificial Sequence: Synthetic oligonucleotide
  Antisense strand to SEQ ID NO: 756800
ugccauagaaaugaccuag

SEQ ID NO: 756802 - RNA, 19 nt, Artificial Sequence
  Description of Artificial Sequence: Synthetic oligonucleotide
  Sense strand starting at position 3819 of SEQ ID NO: 586962
ccaagaauauaagcaaugu

SEQ ID NO: 756803 - RNA, 19 nt, Artificial Sequence
  Description of Artificial Sequence: Synthetic oligonucleotide
  Antisense strand to SEQ ID NO: 756802
acauugcuuauauucuugg

SEQ ID NO: 756804 - RNA, 19 nt, Artificial Sequence
  Description of Artificial Sequence: Synthetic oligonucleotide
  Sense strand starting at position 3827 of SEQ ID NO: 586962
auaagcaauguuuaagcaa

SEQ ID NO: 756805 - RNA, 19 nt, Artificial Sequence
  Description of Artificial Sequence: Synthetic oligonucleotide
  Antisense strand to SEQ ID NO: 756804
uugcuuaaacauugcuuau

SEQ ID NO: 756806 - RNA, 19 nt, Artificial Sequence
  Description of Artificial Sequence: Synthetic oligonucleotide
  Sense strand starting at position 3834 of SEQ ID NO: 586962
auguuuaagcaauagcagu

SEQ ID NO: 756807 - RNA, 19 nt, Artificial Sequence
  Description of Artificial Sequence: Synthetic oligonucleotide
  Antisense strand to SEQ ID NO: 756806
acugcuauugcuuaaacau

SEQ ID NO: 756808 - RNA, 19 nt, Artificial Sequence
  Description of Artificial Sequence: Synthetic oligonucleotide
  Sense strand starting at position 3869 of SEQ ID NO: 586962
uguuuccauuuguagauga

SEQ ID NO: 756809 - RNA, 19 nt, Artificial Sequence
  Description of Artificial Sequence: Synthetic oligonucleotide
  Antisense strand to SEQ ID NO: 756808
ucaucuacaaauggaaaca

SEQ ID NO: 756810 - RNA, 19 nt, Artificial Sequence
  Description of Artificial Sequence: Synthetic oligonucleotide
  Sense strand starting at position 3877 of SEQ ID NO: 586962
uuuguagaugauugucaca

SEQ ID NO: 756811 - RNA, 19 nt, Artificial Sequence
  Description of Artificial Sequence: Synthetic oligonucleotide
  Antisense strand to SEQ ID NO: 756810
ugugacaaucaucuacaaa

SEQ ID NO: 756812 - RNA, 19 nt, Artificial Sequence
  Description of Artificial Sequence: Synthetic oligonucleotide
  Sense strand starting at position 3879 of SEQ ID NO: 586962
uguagaugauugucacaga

SEQ ID NO: 756813 - RNA, 19 nt, Artificial Sequence
  Description of Artificial Sequence: Synthetic oligonucleotide
  Antisense strand to SEQ ID NO: 756812
ucugugacaaucaucuaca

SEQ ID NO: 756814 - RNA, 19 nt, Artificial Sequence
  Description of Artificial Sequence: Synthetic oligonucleotide
  Sense strand starting at position 3880 of SEQ ID NO: 586962
guagaugauugucacagag

SEQ ID NO: 756815 - RNA, 19 nt, Artificial Sequence
  Description of Artificial Sequence: Synthetic oligonucleotide
  Antisense strand to SEQ ID NO: 756814
cucugugacaaucaucuac

SEQ ID NO: 756816 - RNA, 19 nt, Artificial Sequence
  Description of Artificial Sequence: Synthetic oligonucleotide
  Sense strand starting at position 3882 of SEQ ID NO: 586962
agaugauugucacagagag

SEQ ID NO: 756817 - RNA, 19 nt, Artificial Sequence
  Description of Artificial Sequence: Synthetic oligonucleotide
  Antisense strand to SEQ ID NO: 756816
cucucugugacaaucaucu

SEQ ID NO: 756818 - RNA, 19 nt, Artificial Sequence
  Description of Artificial Sequence: Synthetic oligonucleotide
  Sense strand starting at position 3899 of SEQ ID NO: 586962
agugaaugccugggucuga

SEQ ID NO: 756819 - RNA, 19 nt, Artificial Sequence
  Description of Artificial Sequence: Synthetic oligonucleotide
  Antisense strand to SEQ ID NO: 756818
ucagacccaggcauucacu

SEQ ID NO: 756820 - RNA, 19 nt, Artificial Sequence
  Description of Artificial Sequence: Synthetic oligonucleotide
  Sense strand starting at position 3900 of SEQ ID NO: 586962
gugaaugccugggucugaa

SEQ ID NO: 756821 - RNA, 19 nt, Artificial Sequence
  Description of Artificial Sequence: Synthetic oligonucleotide
  Antisense strand to SEQ ID NO: 756820
uucagacccaggcauucac

SEQ ID NO: 756822 - RNA, 19 nt, Artificial Sequence
  Description of Artificial Sequence: Synthetic oligonucleotide
  Sense strand starting at position 3903 of SEQ ID NO: 586962
aaugccugggucugaauua

SEQ ID NO: 756823 - RNA, 19 nt, Artificial Sequence
  Description of Artificial Sequence: Synthetic oligonucleotide
  Antisense strand to SEQ ID NO: 756822
uaauucagacccaggcauu

SEQ ID NO: 756824 - RNA, 19 nt, Artificial Sequence
  Description of Artificial Sequence: Synthetic oligonucleotide
  Sense strand starting at position 3964 of SEQ ID NO: 586962
ugccaaucccguuaguauu

SEQ ID NO: 756825 - RNA, 19 nt, Artificial Sequence
  Description of Artificial Sequence: Synthetic oligonucleotide
  Antisense strand to SEQ ID NO: 756824
aauacuaacgggauuggca

SEQ ID NO: 756826 - RNA, 19 nt, Artificial Sequence
  Description of Artificial Sequence: Synthetic oligonucleotide
  Sense strand starting at position 50 of SEQ ID NO: 586963
agagaccuuuaagaacaau

SEQ ID NO: 756827 - RNA, 19 nt, Artificial Sequence
  Description of Artificial Sequence: Synthetic oligonucleotide
  Antisense strand to SEQ ID NO: 756826
auuguucuuaaaggucucu

SEQ ID NO: 756828 - RNA, 19 nt, Artificial Sequence
  Description of Artificial Sequence: Synthetic oligonucleotide
  Sense strand starting at position 83 of SEQ ID NO: 586963
ggagaaaucucagaaagau

SEQ ID NO: 756829 - RNA, 19 nt, Artificial Sequence
  Description of Artificial Sequence: Synthetic oligonucleotide
  Antisense strand to SEQ ID NO: 756828
aucuuucugagauuucucc

SEQ ID NO: 756830 - RNA, 19 nt, Artificial Sequence
  Description of Artificial Sequence: Synthetic oligonucleotide
  Sense strand starting at position 152 of SEQ ID NO: 586963
uguuccuauggugaagaga

SEQ ID NO: 756831 - RNA, 19 nt, Artificial Sequence
  Description of Artificial Sequence: Synthetic oligonucleotide
  Antisense strand to SEQ ID NO: 756830
ucucuucaccauaggaaca

SEQ ID NO: 756832 - RNA, 19 nt, Artificial Sequence
  Description of Artificial Sequence: Synthetic oligonucleotide
  Sense strand starting at position 166 of SEQ ID NO: 586963
agagaagaucagugcaaau

SEQ ID NO: 756833 - RNA, 19 nt, Artificial Sequence
  Description of Artificial Sequence: Synthetic oligonucleotide
  Antisense strand to SEQ ID NO: 756832
auuugcacugaucuucucu

SEQ ID NO: 756834 - RNA, 19 nt, Artificial Sequence
  Description of Artificial Sequence: Synthetic oligonucleotide
  Sense strand starting at position 235 of SEQ ID NO: 586963
aggucaguauuucagagga

SEQ ID NO: 756835 - RNA, 19 nt, Artificial Sequence
  Description of Artificial Sequence: Synthetic oligonucleotide
  Antisense strand to SEQ ID NO: 756834
uccucugaaauacugaccu

SEQ ID NO: 756836 - RNA, 19 nt, Artificial Sequence
  Description of Artificial Sequence: Synthetic oligonucleotide
  Sense strand starting at position 373 of SEQ ID NO: 586963
ggcagacuauuaccuuaag

SEQ ID NO: 756837 - RNA, 19 nt, Artificial Sequence
  Description of Artificial Sequence: Synthetic oligonucleotide
  Antisense strand to SEQ ID NO: 756836
cuuaagguaauagucugcc

SEQ ID NO: 756838 - RNA, 19 nt, Artificial Sequence
  Description of Artificial Sequence: Synthetic oligonucleotide
  Sense strand starting at position 374 of SEQ ID NO: 586963
gcagacuauuaccuuaaga

SEQ ID NO: 756839 - RNA, 19 nt, Artificial Sequence
  Description of Artificial Sequence: Synthetic oligonucleotide
  Antisense strand to SEQ ID NO: 756838
ucuuaagguaauagucugc

SEQ ID NO: 756840 - RNA, 19 nt, Artificial Sequence
  Description of Artificial Sequence: Synthetic oligonucleotide
  Sense strand starting at position 444 of SEQ ID NO: 586963
acauaagcugcagaacauu

SEQ ID NO: 756841 - RNA, 19 nt, Artificial Sequence
  Description of Artificial Sequence: Synthetic oligonucleotide
  Antisense strand to SEQ ID NO: 756840
aauguucugcagcuuaugu

SEQ ID NO: 756842 - RNA, 19 nt, Artificial Sequence
  Description of Artificial Sequence: Synthetic oligonucleotide
  Sense strand starting at position 696 of SEQ ID NO: 586963
uuugcuguugcagauacaa

SEQ ID NO: 756843 - RNA, 19 nt, Artificial Sequence
  Description of Artificial Sequence: Synthetic oligonucleotide
  Antisense strand to SEQ ID NO: 756842
uuguaucugcaacagcaaa

SEQ ID NO: 756844 - RNA, 19 nt, Artificial Sequence
  Description of Artificial Sequence: Synthetic oligonucleotide
  Sense strand starting at position 748 of SEQ ID NO: 586963
aguuuacagucaucauaaa

SEQ ID NO: 756845 - RNA, 19 nt, Artificial Sequence
  Description of Artificial Sequence: Synthetic oligonucleotide
  Antisense strand to SEQ ID NO: 756844
uuuaugaugacuguaaacu

SEQ ID NO: 756846 - RNA, 19 nt, Artificial Sequence
  Description of Artificial Sequence: Synthetic oligonucleotide
  Sense strand starting at position 749 of SEQ ID NO: 586963
guuuacagucaucauaaac

SEQ ID NO: 756847 - RNA, 19 nt, Artificial Sequence
  Description of Artificial Sequence: Synthetic oligonucleotide
  Antisense strand to SEQ ID NO: 756846
guuuaugaugacuguaaac

SEQ ID NO: 756848 - RNA, 19 nt, Artificial Sequence
  Description of Artificial Sequence: Synthetic oligonucleotide
  Sense strand starting at position 864 of SEQ ID NO: 586963
ucaaauuaucauggagcua

SEQ ID NO: 756849 - RNA, 19 nt, Artificial Sequence
  Description of Artificial Sequence: Synthetic oligonucleotide
  Antisense strand to SEQ ID NO: 756848
uagcuccaugauaauuuga

SEQ ID NO: 756850 - RNA, 19 nt, Artificial Sequence
  Description of Artificial Sequence: Synthetic oligonucleotide
  Sense strand starting at position 869 of SEQ ID NO: 586963
uuaucauggagcuaggagu

SEQ ID NO: 756851 - RNA, 19 nt, Artificial Sequence
  Description of Artificial Sequence: Synthetic oligonucleotide
  Antisense strand to SEQ ID NO: 756850
acuccuagcuccaugauaa

SEQ ID NO: 756852 - RNA, 19 nt, Artificial Sequence
  Description of Artificial Sequence: Synthetic oligonucleotide
  Sense strand starting at position 975 of SEQ ID NO: 586963
uagugcuaugagcacuaga

SEQ ID NO: 756853 - RNA, 19 nt, Artificial Sequence
  Description of Artificial Sequence: Synthetic oligonucleotide
  Antisense strand to SEQ ID NO: 756852
ucuagugcucauagcacua

SEQ ID NO: 756854 - RNA, 19 nt, Artificial Sequence
  Description of Artificial Sequence: Synthetic oligonucleotide
  Sense strand starting at position 1382 of SEQ ID NO: 586963
gaggacagauaucaacgaa

SEQ ID NO: 756855 - RNA, 19 nt, Artificial Sequence
  Description of Artificial Sequence: Synthetic oligonucleotide
  Antisense strand to SEQ ID NO: 756854
uucguugauaucuguccuc

SEQ ID NO: 756856 - RNA, 19 nt, Artificial Sequence
  Description of Artificial Sequence: Synthetic oligonucleotide
  Sense strand starting at position 1395 of SEQ ID NO: 586963
aacgaauugucucuguuaa

SEQ ID NO: 756857 - RNA, 19 nt, Artificial Sequence
  Description of Artificial Sequence: Synthetic oligonucleotide
  Antisense strand to SEQ ID NO: 756856
uuaacagagacaauucguu

SEQ ID NO: 756858 - RNA, 19 nt, Artificial Sequence
  Description of Artificial Sequence: Synthetic oligonucleotide
  Sense strand starting at position 1396 of SEQ ID NO: 586963
acgaauugucucuguuaau

SEQ ID NO: 756859 - RNA, 19 nt, Artificial Sequence
  Description of Artificial Sequence: Synthetic oligonucleotide
  Antisense strand to SEQ ID NO: 756858
auuaacagagacaauucgu

SEQ ID NO: 756860 - RNA, 19 nt, Artificial Sequence
  Description of Artificial Sequence: Synthetic oligonucleotide
  Sense strand starting at position 1402 of SEQ ID NO: 586963
ugucucuguuaaucaauca

SEQ ID NO: 756861 - RNA, 19 nt, Artificial Sequence
  Description of Artificial Sequence: Synthetic oligonucleotide
  Antisense strand to SEQ ID NO: 756860
ugauugauuaacagagaca

SEQ ID NO: 756862 - RNA, 19 nt, Artificial Sequence
  Description of Artificial Sequence: Synthetic oligonucleotide
  Sense strand starting at position 1425 of SEQ ID NO: 586963
ucgaucuguccugguaaac

SEQ ID NO: 756863 - RNA, 19 nt, Artificial Sequence
  Description of Artificial Sequence: Synthetic oligonucleotide
  Antisense strand to SEQ ID NO: 756862
guuuaccaggacagaucga

SEQ ID NO: 756864 - RNA, 19 nt, Artificial Sequence
  Description of Artificial Sequence: Synthetic oligonucleotide
  Sense strand starting at position 1496 of SEQ ID NO: 586963
caagguguccgggaggcaa

SEQ ID NO: 756865 - RNA, 19 nt, Artificial Sequence
  Description of Artificial Sequence: Synthetic oligonucleotide
  Antisense strand to SEQ ID NO: 756864
uugccucccggacaccuug

SEQ ID NO: 756866 - RNA, 19 nt, Artificial Sequence
  Description of Artificial Sequence: Synthetic oligonucleotide
  Sense strand starting at position 1533 of SEQ ID NO: 586963
gucugcuuccgucuaguga

SEQ ID NO: 756867 - RNA, 19 nt, Artificial Sequence
  Description of Artificial Sequence: Synthetic oligonucleotide
  Antisense strand to SEQ ID NO: 756866
ucacuagacggaagcagac

SEQ ID NO: 756868 - RNA, 19 nt, Artificial Sequence
  Description of Artificial Sequence: Synthetic oligonucleotide
  Sense strand starting at position 2131 of SEQ ID NO: 586963
agaguugauuugcaaggau

SEQ ID NO: 756869 - RNA, 19 nt, Artificial Sequence
  Description of Artificial Sequence: Synthetic oligonucleotide
  Antisense strand to SEQ ID NO: 756868
auccuugcaaaucaacucu

SEQ ID NO: 756870 - RNA, 19 nt, Artificial Sequence
  Description of Artificial Sequence: Synthetic oligonucleotide
  Sense strand starting at position 2140 of SEQ ID NO: 586963
uugcaaggaugggcuaaau

SEQ ID NO: 756871 - RNA, 19 nt, Artificial Sequence
  Description of Artificial Sequence: Synthetic oligonucleotide
  Antisense strand to SEQ ID NO: 756870
auuuagcccauccuugcaa

SEQ ID NO: 756872 - RNA, 19 nt, Artificial Sequence
  Description of Artificial Sequence: Synthetic oligonucleotide
  Sense strand starting at position 2189 of SEQ ID NO: 586963
agguaaugucgggaggugu

SEQ ID NO: 756873 - RNA, 19 nt, Artificial Sequence
  Description of Artificial Sequence: Synthetic oligonucleotide
  Antisense strand to SEQ ID NO: 756872
acaccucccgacauuaccu

SEQ ID NO: 756874 - RNA, 19 nt, Artificial Sequence
  Description of Artificial Sequence: Synthetic oligonucleotide
  Sense strand starting at position 2633 of SEQ ID NO: 586963
uguuuguuggugggaggaa

SEQ ID NO: 756875 - RNA, 19 nt, Artificial Sequence
  Description of Artificial Sequence: Synthetic oligonucleotide
  Antisense strand to SEQ ID NO: 756874
uuccucccaccaacaaaca

SEQ ID NO: 756876 - RNA, 19 nt, Artificial Sequence
  Description of Artificial Sequence: Synthetic oligonucleotide
  Sense strand starting at position 2649 of SEQ ID NO: 586963
gaauaaaugucucagagga

SEQ ID NO: 756877 - RNA, 19 nt, Artificial Sequence
  Description of Artificial Sequence: Synthetic oligonucleotide
  Antisense strand to SEQ ID NO: 756876
uccucugagacauuuauuc

SEQ ID NO: 756878 - RNA, 19 nt, Artificial Sequence
  Description of Artificial Sequence: Synthetic oligonucleotide
  Sense strand starting at position 2866 of SEQ ID NO: 586963
agugacuguuuagcgagaa

SEQ ID NO: 756879 - RNA, 19 nt, Artificial Sequence
  Description of Artificial Sequence: Synthetic oligonucleotide
  Antisense strand to SEQ ID NO: 756878
uucucgcuaaacagucacu

SEQ ID NO: 756880 - RNA, 19 nt, Artificial Sequence
  Description of Artificial Sequence: Synthetic oligonucleotide
  Sense strand starting at position 2870 of SEQ ID NO: 586963
acuguuuagcgagaacuaa

SEQ ID NO: 756881 - RNA, 19 nt, Artificial Sequence
  Description of Artificial Sequence: Synthetic oligonucleotide
  Antisense strand to SEQ ID NO: 756880
uuaguucucgcuaaacagu

SEQ ID NO: 756882 - RNA, 19 nt, Artificial Sequence
  Description of Artificial Sequence: Synthetic oligonucleotide
  Sense strand starting at position 2880 of SEQ ID NO: 586963
gagaacuaauauucguuga

SEQ ID NO: 756883 - RNA, 19 nt, Artificial Sequence
  Description of Artificial Sequence: Synthetic oligonucleotide
  Antisense strand to SEQ ID NO: 756882
ucaacgaauauuaguucuc

SEQ ID NO: 756884 - RNA, 19 nt, Artificial Sequence
  Description of Artificial Sequence: Synthetic oligonucleotide
  Sense strand starting at position 2882 of SEQ ID NO: 586963
gaacuaauauucguugagu

SEQ ID NO: 756885 - RNA, 19 nt, Artificial Sequence
  Description of Artificial Sequence: Synthetic oligonucleotide
  Antisense strand to SEQ ID NO: 756884
acucaacgaauauuaguuc

SEQ ID NO: 756886 - RNA, 19 nt, Artificial Sequence
  Description of Artificial Sequence: Synthetic oligonucleotide
  Sense strand starting at position 2883 of SEQ ID NO: 586963
aacuaauauucguugagug

SEQ ID NO: 756887 - RNA, 19 nt, Artificial Sequence
  Description of Artificial Sequence: Synthetic oligonucleotide
  Antisense strand to SEQ ID NO: 756886
cacucaacgaauauuaguu

SEQ ID NO: 756888 - RNA, 19 nt, Artificial Sequence
  Description of Artificial Sequence: Synthetic oligonucleotide
  Sense strand starting at position 2918 of SEQ ID NO: 586963
aaggaccuugcauguguua

SEQ ID NO: 756889 - RNA, 19 nt, Artificial Sequence
  Description of Artificial Sequence: Synthetic oligonucleotide
  Antisense strand to SEQ ID NO: 756888
uaacacaugcaagguccuu

SEQ ID NO: 756890 - RNA, 19 nt, Artificial Sequence
  Description of Artificial Sequence: Synthetic oligonucleotide
  Sense strand starting at position 2932 of SEQ ID NO: 586963
uguuaugucauuuaaucgu

SEQ ID NO: 756891 - RNA, 19 nt, Artificial Sequence
  Description of Artificial Sequence: Synthetic oligonucleotide
  Antisense strand to SEQ ID NO: 756890
acgauuaaaugacauaaca

SEQ ID NO: 756892 - RNA, 19 nt, Artificial Sequence
  Description of Artificial Sequence: Synthetic oligonucleotide
  Sense strand starting at position 3323 of SEQ ID NO: 586963
guaaguuuauucucccaca

SEQ ID NO: 756893 - RNA, 19 nt, Artificial Sequence
  Description of Artificial Sequence: Synthetic oligonucleotide
  Antisense strand to SEQ ID NO: 756892
ugugggagaauaaacuuac

SEQ ID NO: 756894 - RNA, 19 nt, Artificial Sequence
  Description of Artificial Sequence: Synthetic oligonucleotide
  Sense strand starting at position 3345 of SEQ ID NO: 586963
aacauaucccaggguuaag

SEQ ID NO: 756895 - RNA, 19 nt, Artificial Sequence
  Description of Artificial Sequence: Synthetic oligonucleotide
  Antisense strand to SEQ ID NO: 756894
cuuaacccugggauauguu

SEQ ID NO: 756896 - RNA, 19 nt, Artificial Sequence
  Description of Artificial Sequence: Synthetic oligonucleotide
  Sense strand starting at position 3368 of SEQ ID NO: 586963
gaggucaccuucuuagauc

SEQ ID NO: 756897 - RNA, 19 nt, Artificial Sequence
  Description of Artificial Sequence: Synthetic oligonucleotide
  Antisense strand to SEQ ID NO: 756896
gaucuaagaaggugaccuc

SEQ ID NO: 756898 - RNA, 19 nt, Artificial Sequence
  Description of Artificial Sequence: Synthetic oligonucleotide
  Sense strand starting at position 3502 of SEQ ID NO: 586963
cuauuucuaccgugucauu

SEQ ID NO: 756899 - RNA, 19 nt, Artificial Sequence
  Description of Artificial Sequence: Synthetic oligonucleotide
  Antisense strand to SEQ ID NO: 756898
aaugacacgguagaaauag

SEQ ID NO: 756900 - RNA, 19 nt, Artificial Sequence
  Description of Artificial Sequence: Synthetic oligonucleotide
  Sense strand starting at position 3580 of SEQ ID NO: 586963
uaucuacgagcaugacuua

SEQ ID NO: 756901 - RNA, 19 nt, Artificial Sequence
  Description of Artificial Sequence: Synthetic oligonucleotide
  Antisense strand to SEQ ID NO: 756900
uaagucaugcucguagaua

SEQ ID NO: 756902 - RNA, 19 nt, Artificial Sequence
  Description of Artificial Sequence: Synthetic oligonucleotide
  Sense strand starting at position 3665 of SEQ ID NO: 586963
ggacguucuccagacagau

SEQ ID NO: 756903 - RNA, 19 nt, Artificial Sequence
  Description of Artificial Sequence: Synthetic oligonucleotide
  Antisense strand to SEQ ID NO: 756902
aucugucuggagaacgucc

SEQ ID NO: 756904 - RNA, 19 nt, Artificial Sequence
  Description of Artificial Sequence: Synthetic oligonucleotide
  Sense strand starting at position 3722 of SEQ ID NO: 586963
acacuuugucuuugaucau

SEQ ID NO: 756905 - RNA, 19 nt, Artificial Sequence
  Description of Artificial Sequence: Synthetic oligonucleotide
  Antisense strand to SEQ ID NO: 756904
augaucaaagacaaagugu

SEQ ID NO: 756906 - RNA, 19 nt, Artificial Sequence
  Description of Artificial Sequence: Synthetic oligonucleotide
  Sense strand starting at position 34 of SEQ ID NO: 586964
uaaugaacgugcuuauuuc

SEQ ID NO: 756907 - RNA, 19 nt, Artificial Sequence
  Description of Artificial Sequence: Synthetic oligonucleotide
  Antisense strand to SEQ ID NO: 756906
gaaauaagcacguucauua

SEQ ID NO: 756908 - RNA, 19 nt, Artificial Sequence
  Description of Artificial Sequence: Synthetic oligonucleotide
  Sense strand starting at position 38 of SEQ ID NO: 586964
gaacgugcuuauuucuauu

SEQ ID NO: 756909 - RNA, 19 nt, Artificial Sequence
  Description of Artificial Sequence: Synthetic oligonucleotide
  Antisense strand to SEQ ID NO: 756908
aauagaaauaagcacguuc

SEQ ID NO: 756910 - RNA, 19 nt, Artificial Sequence
  Description of Artificial Sequence: Synthetic oligonucleotide
  Sense strand starting at position 79 of SEQ ID NO: 586964
gguccuucccauuaguaaa

SEQ ID NO: 756911 - RNA, 19 nt, Artificial Sequence
  Description of Artificial Sequence: Synthetic oligonucleotide
  Antisense strand to SEQ ID NO: 756910
uuuacuaaugggaaggacc

SEQ ID NO: 756912 - RNA, 19 nt, Artificial Sequence
  Description of Artificial Sequence: Synthetic oligonucleotide
  Sense strand starting at position 249 of SEQ ID NO: 586964
accaguugaguccaugcua

SEQ ID NO: 756913 - RNA, 19 nt, Artificial Sequence
  Description of Artificial Sequence: Synthetic oligonucleotide
  Antisense strand to SEQ ID NO: 756912
uagcauggacucaacuggu

SEQ ID NO: 756914 - RNA, 19 nt, Artificial Sequence
  Description of Artificial Sequence: Synthetic oligonucleotide
  Sense strand starting at position 823 of SEQ ID NO: 586964
ugcagaagcuggucaacua

SEQ ID NO: 756915 - RNA, 19 nt, Artificial Sequence
  Description of Artificial Sequence: Synthetic oligonucleotide
  Antisense strand to SEQ ID NO: 756914
uaguugaccagcuucugca

SEQ ID NO: 756916 - RNA, 19 nt, Artificial Sequence
  Description of Artificial Sequence: Synthetic oligonucleotide
  Sense strand starting at position 824 of SEQ ID NO: 586964
gcagaagcuggucaacuau

SEQ ID NO: 756917 - RNA, 19 nt, Artificial Sequence
  Description of Artificial Sequence: Synthetic oligonucleotide
  Antisense strand to SEQ ID NO: 756916
auaguugaccagcuucugc

SEQ ID NO: 756918 - RNA, 19 nt, Artificial Sequence
  Description of Artificial Sequence: Synthetic oligonucleotide
  Sense strand starting at position 1010 of SEQ ID NO: 586964
cucccaucuggcugaauga

SEQ ID NO: 756919 - RNA, 19 nt, Artificial Sequence
  Description of Artificial Sequence: Synthetic oligonucleotide
  Antisense strand to SEQ ID NO: 756918
ucauucagccagaugggag

SEQ ID NO: 756920 - RNA, 19 nt, Artificial Sequence
  Description of Artificial Sequence: Synthetic oligonucleotide
  Sense strand starting at position 1011 of SEQ ID NO: 586964
ucccaucuggcugaaugau

SEQ ID NO: 756921 - RNA, 19 nt, Artificial Sequence
  Description of Artificial Sequence: Synthetic oligonucleotide
  Antisense strand to SEQ ID NO: 756920
aucauucagccagauggga

SEQ ID NO: 756922 - RNA, 19 nt, Artificial Sequence
  Description of Artificial Sequence: Synthetic oligonucleotide
  Sense strand starting at position 1021 of SEQ ID NO: 586964
cugaaugauccugguccca

SEQ ID NO: 756923 - RNA, 19 nt, Artificial Sequence
  Description of Artificial Sequence: Synthetic oligonucleotide
  Antisense strand to SEQ ID NO: 756922
ugggaccaggaucauucag

SEQ ID NO: 756924 - RNA, 19 nt, Artificial Sequence
  Description of Artificial Sequence: Synthetic oligonucleotide
  Sense strand starting at position 1023 of SEQ ID NO: 586964
gaaugauccuggucccaac

SEQ ID NO: 756925 - RNA, 19 nt, Artificial Sequence
  Description of Artificial Sequence: Synthetic oligonucleotide
  Antisense strand to SEQ ID NO: 756924
guugggaccaggaucauuc

SEQ ID NO: 756926 - RNA, 19 nt, Artificial Sequence
  Description of Artificial Sequence: Synthetic oligonucleotide
  Sense strand starting at position 1149 of SEQ ID NO: 586964
acgugucuuguagagauag

SEQ ID NO: 756927 - RNA, 19 nt, Artificial Sequence
  Description of Artificial Sequence: Synthetic oligonucleotide
  Antisense strand to SEQ ID NO: 756926
cuaucucuacaagacacgu

SEQ ID NO: 756928 - RNA, 19 nt, Artificial Sequence
  Description of Artificial Sequence: Synthetic oligonucleotide
  Sense strand starting at position 1151 of SEQ ID NO: 586964
gugucuuguagagauagaa

SEQ ID NO: 756929 - RNA, 19 nt, Artificial Sequence
  Description of Artificial Sequence: Synthetic oligonucleotide
  Antisense strand to SEQ ID NO: 756928
uucuaucucuacaagacac

SEQ ID NO: 756930 - RNA, 19 nt, Artificial Sequence
  Description of Artificial Sequence: Synthetic oligonucleotide
  Sense strand starting at position 1246 of SEQ ID NO: 586964
guaugaugcaucggaacug

SEQ ID NO: 756931 - RNA, 19 nt, Artificial Sequence
  Description of Artificial Sequence: Synthetic oligonucleotide
  Antisense strand to SEQ ID NO: 756930
caguuccgaugcaucauac

SEQ ID NO: 756932 - RNA, 19 nt, Artificial Sequence
  Description of Artificial Sequence: Synthetic oligonucleotide
  Sense strand starting at position 1278 of SEQ ID NO: 586964
ugcuuuccuggucaccaaa

SEQ ID NO: 756933 - RNA, 19 nt, Artificial Sequence
  Description of Artificial Sequence: Synthetic oligonucleotide
  Antisense strand to SEQ ID NO: 756932
uuuggugaccaggaaagca

SEQ ID NO: 756934 - RNA, 19 nt, Artificial Sequence
  Description of Artificial Sequence: Synthetic oligonucleotide
  Sense strand starting at position 1397 of SEQ ID NO: 586964
aaggcuacccguuaaugaa

SEQ ID NO: 756935 - RNA, 19 nt, Artificial Sequence
  Description of Artificial Sequence: Synthetic oligonucleotide
  Antisense strand to SEQ ID NO: 756934
uucauuaacggguagccuu

SEQ ID NO: 756936 - RNA, 19 nt, Artificial Sequence
  Description of Artificial Sequence: Synthetic oligonucleotide
  Sense strand starting at position 1404 of SEQ ID NO: 586964
cccguuaaugaaugaauaa

SEQ ID NO: 756937 - RNA, 19 nt, Artificial Sequence
  Description of Artificial Sequence: Synthetic oligonucleotide
  Antisense strand to SEQ ID NO: 756936
uuauucauucauuaacggg

SEQ ID NO: 756938 - RNA, 19 nt, Artificial Sequence
  Description of Artificial Sequence: Synthetic oligonucleotide
  Sense strand starting at position 1497 of SEQ ID NO: 586964
cuucuuccguaaucuagaa

SEQ ID NO: 756939 - RNA, 19 nt, Artificial Sequence
  Description of Artificial Sequence: Synthetic oligonucleotide
  Antisense strand to SEQ ID NO: 756938
uucuagauuacggaagaag

SEQ ID NO: 756940 - RNA, 19 nt, Artificial Sequence
  Description of Artificial Sequence: Synthetic oligonucleotide
  Sense strand starting at position 1501 of SEQ ID NO: 586964
uuccguaaucuagaaucca

SEQ ID NO: 756941 - RNA, 19 nt, Artificial Sequence
  Description of Artificial Sequence: Synthetic oligonucleotide
  Antisense strand to SEQ ID NO: 756940
uggauucuagauuacggaa

SEQ ID NO: 756942 - RNA, 19 nt, Artificial Sequence
  Description of Artificial Sequence: Synthetic oligonucleotide
  Sense strand starting at position 1556 of SEQ ID NO: 586964
ccaagaaucccuggaucga

SEQ ID NO: 756943 - RNA, 19 nt, Artificial Sequence
  Description of Artificial Sequence: Synthetic oligonucleotide
  Antisense strand to SEQ ID NO: 756942
ucgauccagggauucuugg

SEQ ID NO: 756944 - RNA, 19 nt, Artificial Sequence
  Description of Artificial Sequence: Synthetic oligonucleotide
  Sense strand starting at position 2313 of SEQ ID NO: 586964
ggcuaugguguuuauauaa

SEQ ID NO: 756945 - RNA, 19 nt, Artificial Sequence
  Description of Artificial Sequence: Synthetic oligonucleotide
  Antisense strand to SEQ ID NO: 756944
uuauauaaacaccauagcc

SEQ ID NO: 756946 - RNA, 19 nt, Artificial Sequence
  Description of Artificial Sequence: Synthetic oligonucleotide
  Sense strand starting at position 2345 of SEQ ID NO: 586964
uuugucuauguuugaaaug

SEQ ID NO: 756947 - RNA, 19 nt, Artificial Sequence
  Description of Artificial Sequence: Synthetic oligonucleotide
  Antisense strand to SEQ ID NO: 756946
cauuucaaacauagacaaa

SEQ ID NO: 756948 - RNA, 19 nt, Artificial Sequence
  Description of Artificial Sequence: Synthetic oligonucleotide
  Sense strand starting at position 2461 of SEQ ID NO: 586964
accuguuugcaugggaaac

SEQ ID NO: 756949 - RNA, 19 nt, Artificial Sequence
  Description of Artificial Sequence: Synthetic oligonucleotide
  Antisense strand to SEQ ID NO: 756948
guuucccaugcaaacaggu

SEQ ID NO: 756950 - RNA, 19 nt, Artificial Sequence
  Description of Artificial Sequence: Synthetic oligonucleotide
  Sense strand starting at position 2499 of SEQ ID NO: 586964
gcuaauaagugacugaaug

SEQ ID NO: 756951 - RNA, 19 nt, Artificial Sequence
  Description of Artificial Sequence: Synthetic oligonucleotide
  Antisense strand to SEQ ID NO: 756950
cauucagucacuuauuagc

SEQ ID NO: 756952 - RNA, 19 nt, Artificial Sequence
  Description of Artificial Sequence: Synthetic oligonucleotide
  Sense strand starting at position 2679 of SEQ ID NO: 586964
auacaauguugugucuuaa

SEQ ID NO: 756953 - RNA, 19 nt, Artificial Sequence
  Description of Artificial Sequence: Synthetic oligonucleotide
  Antisense strand to SEQ ID NO: 756952
uuaagacacaacauuguau

SEQ ID NO: 756954 - RNA, 19 nt, Artificial Sequence
  Description of Artificial Sequence: Synthetic oligonucleotide
  Sense strand starting at position 3150 of SEQ ID NO: 586964
cccuaugcuccgcaaagaa

SEQ ID NO: 756955 - RNA, 19 nt, Artificial Sequence
  Description of Artificial Sequence: Synthetic oligonucleotide
  Antisense strand to SEQ ID NO: 756954
uucuuugcggagcauaggg

SEQ ID NO: 756956 - RNA, 19 nt, Artificial Sequence
  Description of Artificial Sequence: Synthetic oligonucleotide
  Sense strand starting at position 3244 of SEQ ID NO: 586964
acuuauugucaagagcaug

SEQ ID NO: 756957 - RNA, 19 nt, Artificial Sequence
  Description of Artificial Sequence: Synthetic oligonucleotide
  Antisense strand to SEQ ID NO: 756956
caugcucuugacaauaagu

SEQ ID NO: 756958 - RNA, 19 nt, Artificial Sequence
  Description of Artificial Sequence: Synthetic oligonucleotide
  Sense strand starting at position 3249 of SEQ ID NO: 586964
uugucaagagcaugacuuu

SEQ ID NO: 756959 - RNA, 19 nt, Artificial Sequence
  Description of Artificial Sequence: Synthetic oligonucleotide
  Antisense strand to SEQ ID NO: 756958
aaagucaugcucuugacaa

SEQ ID NO: 756960 - RNA, 19 nt, Artificial Sequence
  Description of Artificial Sequence: Synthetic oligonucleotide
  Sense strand starting at position 3250 of SEQ ID NO: 586964
ugucaagagcaugacuuua

SEQ ID NO: 756961 - RNA, 19 nt, Artificial Sequence
  Description of Artificial Sequence: Synthetic oligonucleotide
  Antisense strand to SEQ ID NO: 756960
uaaagucaugcucuugaca

SEQ ID NO: 756962 - RNA, 19 nt, Artificial Sequence
  Description of Artificial Sequence: Synthetic oligonucleotide
  Sense strand starting at position 3252 of SEQ ID NO: 586964
ucaagagcaugacuuuaca

SEQ ID NO: 756963 - RNA, 19 nt, Artificial Sequence
  Description of Artificial Sequence: Synthetic oligonucleotide
  Antisense strand to SEQ ID NO: 756962
uguaaagucaugcucuuga

SEQ ID NO: 756964 - RNA, 19 nt, Artificial Sequence
  Description of Artificial Sequence: Synthetic oligonucleotide
  Sense strand starting at position 3263 of SEQ ID NO: 586964
acuuuacagcuguagacaa

SEQ ID NO: 756965 - RNA, 19 nt, Artificial Sequence
  Description of Artificial Sequence: Synthetic oligonucleotide
  Antisense strand to SEQ ID NO: 756964
uugucuacagcuguaaagu

SEQ ID NO: 756966 - RNA, 19 nt, Artificial Sequence
  Description of Artificial Sequence: Synthetic oligonucleotide
  Sense strand starting at position 3287 of SEQ ID NO: 586964
caacaaacccuuggagagu

SEQ ID NO: 756967 - RNA, 19 nt, Artificial Sequence
  Description of Artificial Sequence: Synthetic oligonucleotide
  Antisense strand to SEQ ID NO: 756966
acucuccaaggguuuguug

SEQ ID NO: 756968 - RNA, 19 nt, Artificial Sequence
  Description of Artificial Sequence: Synthetic oligonucleotide
  Sense strand starting at position 3343 of SEQ ID NO: 586964
cccuauuaagacugguaac

SEQ ID NO: 756969 - RNA, 19 nt, Artificial Sequence
  Description of Artificial Sequence: Synthetic oligonucleotide
  Antisense strand to SEQ ID NO: 756968
guuaccagucuuaauaggg

SEQ ID NO: 756970 - RNA, 19 nt, Artificial Sequence
  Description of Artificial Sequence: Synthetic oligonucleotide
  Sense strand starting at position 3697 of SEQ ID NO: 586964
aggaaacuuaagugauggu

SEQ ID NO: 756971 - RNA, 19 nt, Artificial Sequence
  Description of Artificial Sequence: Synthetic oligonucleotide
  Antisense strand to SEQ ID NO: 756970
accaucacuuaaguuuccu

SEQ ID NO: 756972 - RNA, 19 nt, Artificial Sequence
  Description of Artificial Sequence: Synthetic oligonucleotide
  Sense strand starting at position 3704 of SEQ ID NO: 586964
uuaagugauggucaccuuu

SEQ ID NO: 756973 - RNA, 19 nt, Artificial Sequence
  Description of Artificial Sequence: Synthetic oligonucleotide
  Antisense strand to SEQ ID NO: 756972
aaaggugaccaucacuuaa

SEQ ID NO: 756974 - RNA, 19 nt, Artificial Sequence
  Description of Artificial Sequence: Synthetic oligonucleotide
  Sense strand starting at position 3742 of SEQ ID NO: 586964
guuauaccaucagugggau

SEQ ID NO: 756975 - RNA, 19 nt, Artificial Sequence
  Description of Artificial Sequence: Synthetic oligonucleotide
  Antisense strand to SEQ ID NO: 756974
aucccacugaugguauaac

SEQ ID NO: 756976 - RNA, 19 nt, Artificial Sequence
  Description of Artificial Sequence: Synthetic oligonucleotide
  Sense strand starting at position 3743 of SEQ ID NO: 586964
uuauaccaucagugggauu

SEQ ID NO: 756977 - RNA, 19 nt, Artificial Sequence
  Description of Artificial Sequence: Synthetic oligonucleotide
  Antisense strand to SEQ ID NO: 756976
aaucccacugaugguauaa

SEQ ID NO: 756978 - RNA, 19 nt, Artificial Sequence
  Description of Artificial Sequence: Synthetic oligonucleotide
  Sense strand starting at position 3750 of SEQ ID NO: 586964
aucagugggauuggguaaa

SEQ ID NO: 756979 - RNA, 19 nt, Artificial Sequence
  Description of Artificial Sequence: Synthetic oligonucleotide
  Antisense strand to SEQ ID NO: 756978
uuuacccaaucccacugau

SEQ ID NO: 756980 - RNA, 19 nt, Artificial Sequence
  Description of Artificial Sequence: Synthetic oligonucleotide
  Sense strand starting at position 3773 of SEQ ID NO: 586964
gggacucuacggugguuaa

SEQ ID NO: 756981 - RNA, 19 nt, Artificial Sequence
  Description of Artificial Sequence: Synthetic oligonucleotide
  Antisense strand to SEQ ID NO: 756980
uuaaccaccguagaguccc

SEQ ID NO: 756982 - RNA, 19 nt, Artificial Sequence
  Description of Artificial Sequence: Synthetic oligonucleotide
  Sense strand starting at position 3776 of SEQ ID NO: 586964
acucuacggugguuaagaa

SEQ ID NO: 756983 - RNA, 19 nt, Artificial Sequence
  Description of Artificial Sequence: Synthetic oligonucleotide
  Antisense strand to SEQ ID NO: 756982
uucuuaaccaccguagagu

SEQ ID NO: 756984 - RNA, 19 nt, Artificial Sequence
  Description of Artificial Sequence: Synthetic oligonucleotide
  Sense strand starting at position 3777 of SEQ ID NO: 586964
cucuacggugguuaagaaa

SEQ ID NO: 756985 - RNA, 19 nt, Artificial Sequence
  Description of Artificial Sequence: Synthetic oligonucleotide
  Antisense strand to SEQ ID NO: 756984
uuucuuaaccaccguagag

SEQ ID NO: 756986 - RNA, 19 nt, Artificial Sequence
  Description of Artificial Sequence: Synthetic oligonucleotide
  Sense strand starting at position 56 of SEQ ID NO: 586965
agcucuagggucuacuaau

SEQ ID NO: 756987 - RNA, 19 nt, Artificial Sequence
  Description of Artificial Sequence: Synthetic oligonucleotide
  Antisense strand to SEQ ID NO: 756986
auuaguagacccuagagcu

SEQ ID NO: 756988 - RNA, 19 nt, Artificial Sequence
  Description of Artificial Sequence: Synthetic oligonucleotide
  Sense strand starting at position 112 of SEQ ID NO: 586965
gugacaucaucucccuuga

SEQ ID NO: 756989 - RNA, 19 nt, Artificial Sequence
  Description of Artificial Sequence: Synthetic oligonucleotide
  Antisense strand to SEQ ID NO: 756988
ucaagggagaugaugucac

SEQ ID NO: 756990 - RNA, 19 nt, Artificial Sequence
  Description of Artificial Sequence: Synthetic oligonucleotide
  Sense strand starting at position 117 of SEQ ID NO: 586965
aucaucucccuugagguua

SEQ ID NO: 756991 - RNA, 19 nt, Artificial Sequence
  Description of Artificial Sequence: Synthetic oligonucleotide
  Antisense strand to SEQ ID NO: 756990
uaaccucaagggagaugau

SEQ ID NO: 756992 - RNA, 19 nt, Artificial Sequence
  Description of Artificial Sequence: Synthetic oligonucleotide
  Sense strand starting at position 171 of SEQ ID NO: 586965
aaagcucuauggguuaaca

SEQ ID NO: 756993 - RNA, 19 nt, Artificial Sequence
  Description of Artificial Sequence: Synthetic oligonucleotide
  Antisense strand to SEQ ID NO: 756992
uguuaacccauagagcuuu

SEQ ID NO: 756994 - RNA, 19 nt, Artificial Sequence
  Description of Artificial Sequence: Synthetic oligonucleotide
  Sense strand starting at position 173 of SEQ ID NO: 586965
agcucuauggguuaacaac

SEQ ID NO: 756995 - RNA, 19 nt, Artificial Sequence
  Description of Artificial Sequence: Synthetic oligonucleotide
  Antisense strand to SEQ ID NO: 756994
guuguuaacccauagagcu

SEQ ID NO: 756996 - RNA, 19 nt, Artificial Sequence
  Description of Artificial Sequence: Synthetic oligonucleotide
  Sense strand starting at position 238 of SEQ ID NO: 586965
uuguaugacagguggaagu

SEQ ID NO: 756997 - RNA, 19 nt, Artificial Sequence
  Description of Artificial Sequence: Synthetic oligonucleotide
  Antisense strand to SEQ ID NO: 756996
acuuccaccugucauacaa

SEQ ID NO: 756998 - RNA, 19 nt, Artificial Sequence
  Description of Artificial Sequence: Synthetic oligonucleotide
  Sense strand starting at position 493 of SEQ ID NO: 586965
ucauuaauuccugggaaua

SEQ ID NO: 756999 - RNA, 19 nt, Artificial Sequence
  Description of Artificial Sequence: Synthetic oligonucleotide
  Antisense strand to SEQ ID NO: 756998
uauucccaggaauuaauga

SEQ ID NO: 757000 - RNA, 19 nt, Artificial Sequence
  Description of Artificial Sequence: Synthetic oligonucleotide
  Sense strand starting at position 527 of SEQ ID NO: 586965
uaucaugaagugugugaua

SEQ ID NO: 757001 - RNA, 19 nt, Artificial Sequence
  Description of Artificial Sequence: Synthetic oligonucleotide
  Antisense strand to SEQ ID NO: 757000
uaucacacacuucaugaua

SEQ ID NO: 757002 - RNA, 19 nt, Artificial Sequence
  Description of Artificial Sequence: Synthetic oligonucleotide
  Sense strand starting at position 529 of SEQ ID NO: 586965
ucaugaagugugugauaag

SEQ ID NO: 757003 - RNA, 19 nt, Artificial Sequence
  Description of Artificial Sequence: Synthetic oligonucleotide
  Antisense strand to SEQ ID NO: 757002
cuuaucacacacuucauga

SEQ ID NO: 757004 - RNA, 19 nt, Artificial Sequence
  Description of Artificial Sequence: Synthetic oligonucleotide
  Sense strand starting at position 540 of SEQ ID NO: 586965
gugauaaggacgcacaauu

SEQ ID NO: 757005 - RNA, 19 nt, Artificial Sequence
  Description of Artificial Sequence: Synthetic oligonucleotide
  Antisense strand to SEQ ID NO: 757004
aauugugcguccuuaucac

SEQ ID NO: 757006 - RNA, 19 nt, Artificial Sequence
  Description of Artificial Sequence: Synthetic oligonucleotide
  Sense strand starting at position 836 of SEQ ID NO: 586965
uuggguguccaauauacca

SEQ ID NO: 757007 - RNA, 19 nt, Artificial Sequence
  Description of Artificial Sequence: Synthetic oligonucleotide
  Antisense strand to SEQ ID NO: 757006
ugguauauuggacacccaa

SEQ ID NO: 757008 - RNA, 19 nt, Artificial Sequence
  Description of Artificial Sequence: Synthetic oligonucleotide
  Sense strand starting at position 911 of SEQ ID NO: 586965
cuaugaagucacggauaca

SEQ ID NO: 757009 - RNA, 19 nt, Artificial Sequence
  Description of Artificial Sequence: Synthetic oligonucleotide
  Antisense strand to SEQ ID NO: 757008
uguauccgugacuucauag

SEQ ID NO: 757010 - RNA, 19 nt, Artificial Sequence
  Description of Artificial Sequence: Synthetic oligonucleotide
  Sense strand starting at position 923 of SEQ ID NO: 586965
ggauacaaucugggucaau

SEQ ID NO: 757011 - RNA, 19 nt, Artificial Sequence
  Description of Artificial Sequence: Synthetic oligonucleotide
  Antisense strand to SEQ ID NO: 757010
auugacccagauuguaucc

SEQ ID NO: 757012 - RNA, 19 nt, Artificial Sequence
  Description of Artificial Sequence: Synthetic oligonucleotide
  Sense strand starting at position 924 of SEQ ID NO: 586965
gauacaaucugggucaauu

SEQ ID NO: 757013 - RNA, 19 nt, Artificial Sequence
  Description of Artificial Sequence: Synthetic oligonucleotide
  Antisense strand to SEQ ID NO: 757012
aauugacccagauuguauc

SEQ ID NO: 757014 - RNA, 19 nt, Artificial Sequence
  Description of Artificial Sequence: Synthetic oligonucleotide
  Sense strand starting at position 981 of SEQ ID NO: 586965
auaugcaucugguuuagau

SEQ ID NO: 757015 - RNA, 19 nt, Artificial Sequence
  Description of Artificial Sequence: Synthetic oligonucleotide
  Antisense strand to SEQ ID NO: 757014
aucuaaaccagaugcauau

SEQ ID NO: 757016 - RNA, 19 nt, Artificial Sequence
  Description of Artificial Sequence: Synthetic oligonucleotide
  Sense strand starting at position 1048 of SEQ ID NO: 586965
ggccaaaucuggucugaca

SEQ ID NO: 757017 - RNA, 19 nt, Artificial Sequence
  Description of Artificial Sequence: Synthetic oligonucleotide
  Antisense strand to SEQ ID NO: 757016
ugucagaccagauuuggcc

SEQ ID NO: 757018 - RNA, 19 nt, Artificial Sequence
  Description of Artificial Sequence: Synthetic oligonucleotide
  Sense strand starting at position 1158 of SEQ ID NO: 586965
augaguagucucgacagaa

SEQ ID NO: 757019 - RNA, 19 nt, Artificial Sequence
  Description of Artificial Sequence: Synthetic oligonucleotide
  Antisense strand to SEQ ID NO: 757018
uucugucgagacuacucau

SEQ ID NO: 757020 - RNA, 19 nt, Artificial Sequence
  Description of Artificial Sequence: Synthetic oligonucleotide
  Sense strand starting at position 1234 of SEQ ID NO: 586965
cuuguuuaagauggucaca

SEQ ID NO: 757021 - RNA, 19 nt, Artificial Sequence
  Description of Artificial Sequence: Synthetic oligonucleotide
  Antisense strand to SEQ ID NO: 757020
ugugaccaucuuaaacaag

SEQ ID NO: 757022 - RNA, 19 nt, Artificial Sequence
  Description of Artificial Sequence: Synthetic oligonucleotide
  Sense strand starting at position 1236 of SEQ ID NO: 586965
uguuuaagauggucacaga

SEQ ID NO: 757023 - RNA, 19 nt, Artificial Sequence
  Description of Artificial Sequence: Synthetic oligonucleotide
  Antisense strand to SEQ ID NO: 757022
ucugugaccaucuuaaaca

SEQ ID NO: 757024 - RNA, 19 nt, Artificial Sequence
  Description of Artificial Sequence: Synthetic oligonucleotide
  Sense strand starting at position 1463 of SEQ ID NO: 586965
acuugaagguuaucaggca

SEQ ID NO: 757025 - RNA, 19 nt, Artificial Sequence
  Description of Artificial Sequence: Synthetic oligonucleotide
  Antisense strand to SEQ ID NO: 757024
ugccugauaaccuucaagu

SEQ ID NO: 757026 - RNA, 19 nt, Artificial Sequence
  Description of Artificial Sequence: Synthetic oligonucleotide
  Sense strand starting at position 1471 of SEQ ID NO: 586965
guuaucaggcauuauauua

SEQ ID NO: 757027 - RNA, 19 nt, Artificial Sequence
  Description of Artificial Sequence: Synthetic oligonucleotide
  Antisense strand to SEQ ID NO: 757026
uaauauaaugccugauaac

SEQ ID NO: 757028 - RNA, 19 nt, Artificial Sequence
  Description of Artificial Sequence: Synthetic oligonucleotide
  Sense strand starting at position 1478 of SEQ ID NO: 586965
ggcauuauauuauccagaa

SEQ ID NO: 757029 - RNA, 19 nt, Artificial Sequence
  Description of Artificial Sequence: Synthetic oligonucleotide
  Antisense strand to SEQ ID NO: 757028
uucuggauaauauaaugcc

SEQ ID NO: 757030 - RNA, 19 nt, Artificial Sequence
  Description of Artificial Sequence: Synthetic oligonucleotide
  Sense strand starting at position 1501 of SEQ ID NO: 586965
gcuauagcagaucauaaga

SEQ ID NO: 757031 - RNA, 19 nt, Artificial Sequence
  Description of Artificial Sequence: Synthetic oligonucleotide
  Antisense strand to SEQ ID NO: 757030
ucuuaugaucugcuauagc

SEQ ID NO: 757032 - RNA, 19 nt, Artificial Sequence
  Description of Artificial Sequence: Synthetic oligonucleotide
  Sense strand starting at position 1522 of SEQ ID NO: 586965
ugccauuaaugagcuauaa

SEQ ID NO: 757033 - RNA, 19 nt, Artificial Sequence
  Description of Artificial Sequence: Synthetic oligonucleotide
  Antisense strand to SEQ ID NO: 757032
uuauagcucauuaauggca

SEQ ID NO: 757034 - RNA, 19 nt, Artificial Sequence
  Description of Artificial Sequence: Synthetic oligonucleotide
  Sense strand starting at position 1526 of SEQ ID NO: 586965
auuaaugagcuauaaguac

SEQ ID NO: 757035 - RNA, 19 nt, Artificial Sequence
  Description of Artificial Sequence: Synthetic oligonucleotide
  Antisense strand to SEQ ID NO: 757034
guacuuauagcucauuaau

SEQ ID NO: 757036 - RNA, 19 nt, Artificial Sequence
  Description of Artificial Sequence: Synthetic oligonucleotide
  Sense strand starting at position 2141 of SEQ ID NO: 586965
ggagcacuucuggauaguu

SEQ ID NO: 757037 - RNA, 19 nt, Artificial Sequence
  Description of Artificial Sequence: Synthetic oligonucleotide
  Antisense strand to SEQ ID NO: 757036
aacuauccagaagugcucc

SEQ ID NO: 757038 - RNA, 19 nt, Artificial Sequence
  Description of Artificial Sequence: Synthetic oligonucleotide
  Sense strand starting at position 2159 of SEQ ID NO: 586965
uuuacugguuaucugaaga

SEQ ID NO: 757039 - RNA, 19 nt, Artificial Sequence
  Description of Artificial Sequence: Synthetic oligonucleotide
  Antisense strand to SEQ ID NO: 757038
ucuucagauaaccaguaaa

SEQ ID NO: 757040 - RNA, 19 nt, Artificial Sequence
  Description of Artificial Sequence: Synthetic oligonucleotide
  Sense strand starting at position 2310 of SEQ ID NO: 586965
aggugcuuccuaggacaca

SEQ ID NO: 757041 - RNA, 19 nt, Artificial Sequence
  Description of Artificial Sequence: Synthetic oligonucleotide
  Antisense strand to SEQ ID NO: 757040
uguguccuaggaagcaccu

SEQ ID NO: 757042 - RNA, 19 nt, Artificial Sequence
  Description of Artificial Sequence: Synthetic oligonucleotide
  Sense strand starting at position 2658 of SEQ ID NO: 586965
agcaaagaggguugaaguu

SEQ ID NO: 757043 - RNA, 19 nt, Artificial Sequence
  Description of Artificial Sequence: Synthetic oligonucleotide
  Antisense strand to SEQ ID NO: 757042
aacuucaacccucuuugcu

SEQ ID NO: 757044 - RNA, 19 nt, Artificial Sequence
  Description of Artificial Sequence: Synthetic oligonucleotide
  Sense strand starting at position 2664 of SEQ ID NO: 586965
gaggguugaaguugacuuu

SEQ ID NO: 757045 - RNA, 19 nt, Artificial Sequence
  Description of Artificial Sequence: Synthetic oligonucleotide
  Antisense strand to SEQ ID NO: 757044
aaagucaacuucaacccuc

SEQ ID NO: 757046 - RNA, 19 nt, Artificial Sequence
  Description of Artificial Sequence: Synthetic oligonucleotide
  Sense strand starting at position 2820 of SEQ ID NO: 586965
uuguguuauacauagaagu

SEQ ID NO: 757047 - RNA, 19 nt, Artificial Sequence
  Description of Artificial Sequence: Synthetic oligonucleotide
  Antisense strand to SEQ ID NO: 757046
acuucuauguauaacacaa

SEQ ID NO: 757048 - RNA, 19 nt, Artificial Sequence
  Description of Artificial Sequence: Synthetic oligonucleotide
  Sense strand starting at position 2822 of SEQ ID NO: 586965
guguuauacauagaaguua

SEQ ID NO: 757049 - RNA, 19 nt, Artificial Sequence
  Description of Artificial Sequence: Synthetic oligonucleotide
  Antisense strand to SEQ ID NO: 757048
uaacuucuauguauaacac

SEQ ID NO: 757050 - RNA, 19 nt, Artificial Sequence
  Description of Artificial Sequence: Synthetic oligonucleotide
  Sense strand starting at position 3235 of SEQ ID NO: 586965
acaggugcucuuuacuaaa

SEQ ID NO: 757051 - RNA, 19 nt, Artificial Sequence
  Description of Artificial Sequence: Synthetic oligonucleotide
  Antisense strand to SEQ ID NO: 757050
uuuaguaaagagcaccugu

SEQ ID NO: 757052 - RNA, 19 nt, Artificial Sequence
  Description of Artificial Sequence: Synthetic oligonucleotide
  Sense strand starting at position 3237 of SEQ ID NO: 586965
aggugcucuuuacuaaaua

SEQ ID NO: 757053 - RNA, 19 nt, Artificial Sequence
  Description of Artificial Sequence: Synthetic oligonucleotide
  Antisense strand to SEQ ID NO: 757052
uauuuaguaaagagcaccu

SEQ ID NO: 757054 - RNA, 19 nt, Artificial Sequence
  Description of Artificial Sequence: Synthetic oligonucleotide
  Sense strand starting at position 3384 of SEQ ID NO: 586965
uuugauaagauugggaguu

SEQ ID NO: 757055 - RNA, 19 nt, Artificial Sequence
  Description of Artificial Sequence: Synthetic oligonucleotide
  Antisense strand to SEQ ID NO: 757054
aacucccaaucuuaucaaa

SEQ ID NO: 757056 - RNA, 19 nt, Artificial Sequence
  Description of Artificial Sequence: Synthetic oligonucleotide
  Sense strand starting at position 3394 of SEQ ID NO: 586965
uugggaguucaaugcugga

SEQ ID NO: 757057 - RNA, 19 nt, Artificial Sequence
  Description of Artificial Sequence: Synthetic oligonucleotide
  Antisense strand to SEQ ID NO: 757056
uccagcauugaacucccaa

SEQ ID NO: 757058 - RNA, 19 nt, Artificial Sequence
  Description of Artificial Sequence: Synthetic oligonucleotide
  Sense strand starting at position 3459 of SEQ ID NO: 586965
cuaugaacgcuugagagca

SEQ ID NO: 757059 - RNA, 19 nt, Artificial Sequence
  Description of Artificial Sequence: Synthetic oligonucleotide
  Antisense strand to SEQ ID NO: 757058
ugcucucaagcguucauag

SEQ ID NO: 757060 - RNA, 19 nt, Artificial Sequence
  Description of Artificial Sequence: Synthetic oligonucleotide
  Sense strand starting at position 3497 of SEQ ID NO: 586965
gggcuuucuggacaaagca

SEQ ID NO: 757061 - RNA, 19 nt, Artificial Sequence
  Description of Artificial Sequence: Synthetic oligonucleotide
  Antisense strand to SEQ ID NO: 757060
ugcuuuguccagaaagccc

SEQ ID NO: 757062 - RNA, 19 nt, Artificial Sequence
  Description of Artificial Sequence: Synthetic oligonucleotide
  Sense strand starting at position 3673 of SEQ ID NO: 586965
acuacuugucuuuaguaga

SEQ ID NO: 757063 - RNA, 19 nt, Artificial Sequence
  Description of Artificial Sequence: Synthetic oligonucleotide
  Antisense strand to SEQ ID NO: 757062
ucuacuaaagacaaguagu

SEQ ID NO: 757064 - RNA, 19 nt, Artificial Sequence
  Description of Artificial Sequence: Synthetic oligonucleotide
  Sense strand starting at position 3680 of SEQ ID NO: 586965
gucuuuaguagacagggau

SEQ ID NO: 757065 - RNA, 19 nt, Artificial Sequence
  Description of Artificial Sequence: Synthetic oligonucleotide
  Antisense strand to SEQ ID NO: 757064
aucccugucuacuaaagac

SEQ ID NO: 757066 - RNA, 19 nt, Artificial Sequence
  Description of Artificial Sequence: Synthetic oligonucleotide
  Sense strand starting at position 203 of SEQ ID NO: 586966
guaacuaguagucauauga

SEQ ID NO: 757067 - RNA, 19 nt, Artificial Sequence
  Description of Artificial Sequence: Synthetic oligonucleotide
  Antisense strand to SEQ ID NO: 757066
ucauaugacuacuaguuac

SEQ ID NO: 757068 - RNA, 19 nt, Artificial Sequence
  Description of Artificial Sequence: Synthetic oligonucleotide
  Sense strand starting at position 279 of SEQ ID NO: 586966
gucuaagugcauuaagaua

SEQ ID NO: 757069 - RNA, 19 nt, Artificial Sequence
  Description of Artificial Sequence: Synthetic oligonucleotide
  Antisense strand to SEQ ID NO: 757068
uaucuuaaugcacuuagac

SEQ ID NO: 757070 - RNA, 19 nt, Artificial Sequence
  Description of Artificial Sequence: Synthetic oligonucleotide
  Sense strand starting at position 448 of SEQ ID NO: 586966
gguaaaugaucugcccaag

SEQ ID NO: 757071 - RNA, 19 nt, Artificial Sequence
  Description of Artificial Sequence: Synthetic oligonucleotide
  Antisense strand to SEQ ID NO: 757070
cuugggcagaucauuuacc

SEQ ID NO: 757072 - RNA, 19 nt, Artificial Sequence
  Description of Artificial Sequence: Synthetic oligonucleotide
  Sense strand starting at position 520 of SEQ ID NO: 586966
ggagucuagguguaaauca

SEQ ID NO: 757073 - RNA, 19 nt, Artificial Sequence
  Description of Artificial Sequence: Synthetic oligonucleotide
  Antisense strand to SEQ ID NO: 757072
ugauuuacaccuagacucc

SEQ ID NO: 757074 - RNA, 19 nt, Artificial Sequence
  Description of Artificial Sequence: Synthetic oligonucleotide
  Sense strand starting at position 529 of SEQ ID NO: 586966
guguaaaucagcgugcuau

SEQ ID NO: 757075 - RNA, 19 nt, Artificial Sequence
  Description of Artificial Sequence: Synthetic oligonucleotide
  Antisense strand to SEQ ID NO: 757074
auagcacgcugauuuacac

SEQ ID NO: 757076 - RNA, 19 nt, Artificial Sequence
  Description of Artificial Sequence: Synthetic oligonucleotide
  Sense strand starting at position 556 of SEQ ID NO: 586966
uagcauucuggguauucca

SEQ ID NO: 757077 - RNA, 19 nt, Artificial Sequence
  Description of Artificial Sequence: Synthetic oligonucleotide
  Antisense strand to SEQ ID NO: 757076
uggaauacccagaaugcua

SEQ ID NO: 757078 - RNA, 19 nt, Artificial Sequence
  Description of Artificial Sequence: Synthetic oligonucleotide
  Sense strand starting at position 564 of SEQ ID NO: 586966
uggguauuccagcauucca

SEQ ID NO: 757079 - RNA, 19 nt, Artificial Sequence
  Description of Artificial Sequence: Synthetic oligonucleotide
  Antisense strand to SEQ ID NO: 757078
uggaaugcuggaauaccca

SEQ ID NO: 757080 - RNA, 19 nt, Artificial Sequence
  Description of Artificial Sequence: Synthetic oligonucleotide
  Sense strand starting at position 598 of SEQ ID NO: 586966
gagggaaaucacugguagu

SEQ ID NO: 757081 - RNA, 19 nt, Artificial Sequence
  Description of Artificial Sequence: Synthetic oligonucleotide
  Antisense strand to SEQ ID NO: 757080
acuaccagugauuucccuc

SEQ ID NO: 757082 - RNA, 19 nt, Artificial Sequence
  Description of Artificial Sequence: Synthetic oligonucleotide
  Sense strand starting at position 599 of SEQ ID NO: 586966
agggaaaucacugguagug

SEQ ID NO: 757083 - RNA, 19 nt, Artificial Sequence
  Description of Artificial Sequence: Synthetic oligonucleotide
  Antisense strand to SEQ ID NO: 757082
cacuaccagugauuucccu

SEQ ID NO: 757084 - RNA, 19 nt, Artificial Sequence
  Description of Artificial Sequence: Synthetic oligonucleotide
  Sense strand starting at position 669 of SEQ ID NO: 586966
guuaauaacucacugagac

SEQ ID NO: 757085 - RNA, 19 nt, Artificial Sequence
  Description of Artificial Sequence: Synthetic oligonucleotide
  Antisense strand to SEQ ID NO: 757084
gucucagugaguuauuaac

SEQ ID NO: 757086 - RNA, 19 nt, Artificial Sequence
  Description of Artificial Sequence: Synthetic oligonucleotide
  Sense strand starting at position 730 of SEQ ID NO: 586966
aaagaucagcguuaaacua

SEQ ID NO: 757087 - RNA, 19 nt, Artificial Sequence
  Description of Artificial Sequence: Synthetic oligonucleotide
  Antisense strand to SEQ ID NO: 757086
uaguuuaacgcugaucuuu

SEQ ID NO: 757088 - RNA, 19 nt, Artificial Sequence
  Description of Artificial Sequence: Synthetic oligonucleotide
  Sense strand starting at position 848 of SEQ ID NO: 586966
uuugaugauuaggcauauu

SEQ ID NO: 757089 - RNA, 19 nt, Artificial Sequence
  Description of Artificial Sequence: Synthetic oligonucleotide
  Antisense strand to SEQ ID NO: 757088
aauaugccuaaucaucaaa

SEQ ID NO: 757090 - RNA, 19 nt, Artificial Sequence
  Description of Artificial Sequence: Synthetic oligonucleotide
  Sense strand starting at position 860 of SEQ ID NO: 586966
gcauauuuguuuccuggca

SEQ ID NO: 757091 - RNA, 19 nt, Artificial Sequence
  Description of Artificial Sequence: Synthetic oligonucleotide
  Antisense strand to SEQ ID NO: 757090
ugccaggaaacaaauaugc

SEQ ID NO: 757092 - RNA, 19 nt, Artificial Sequence
  Description of Artificial Sequence: Synthetic oligonucleotide
  Sense strand starting at position 976 of SEQ ID NO: 586966
cuagaagacuuggucccaa

SEQ ID NO: 757093 - RNA, 19 nt, Artificial Sequence
  Description of Artificial Sequence: Synthetic oligonucleotide
  Antisense strand to SEQ ID NO: 757092
uugggaccaagucuucuag

SEQ ID NO: 757094 - RNA, 19 nt, Artificial Sequence
  Description of Artificial Sequence: Synthetic oligonucleotide
  Sense strand starting at position 988 of SEQ ID NO: 586966
gucccaaauauguacgaga

SEQ ID NO: 757095 - RNA, 19 nt, Artificial Sequence
  Description of Artificial Sequence: Synthetic oligonucleotide
  Antisense strand to SEQ ID NO: 757094
ucucguacauauuugggac

SEQ ID NO: 757096 - RNA, 19 nt, Artificial Sequence
  Description of Artificial Sequence: Synthetic oligonucleotide
  Sense strand starting at position 990 of SEQ ID NO: 586966
cccaaauauguacgagaug

SEQ ID NO: 757097 - RNA, 19 nt, Artificial Sequence
  Description of Artificial Sequence: Synthetic oligonucleotide
  Antisense strand to SEQ ID NO: 757096
caucucguacauauuuggg

SEQ ID NO: 757098 - RNA, 19 nt, Artificial Sequence
  Description of Artificial Sequence: Synthetic oligonucleotide
  Sense strand starting at position 1018 of SEQ ID NO: 586966
acaagauggugcucuaaua

SEQ ID NO: 757099 - RNA, 19 nt, Artificial Sequence
  Description of Artificial Sequence: Synthetic oligonucleotide
  Antisense strand to SEQ ID NO: 757098
uauuagagcaccaucuugu

SEQ ID NO: 757100 - RNA, 19 nt, Artificial Sequence
  Description of Artificial Sequence: Synthetic oligonucleotide
  Sense strand starting at position 1065 of SEQ ID NO: 586966
agugcagauuauuugcauu

SEQ ID NO: 757101 - RNA, 19 nt, Artificial Sequence
  Description of Artificial Sequence: Synthetic oligonucleotide
  Antisense strand to SEQ ID NO: 757100
aaugcaaauaaucugcacu

SEQ ID NO: 757102 - RNA, 19 nt, Artificial Sequence
  Description of Artificial Sequence: Synthetic oligonucleotide
  Sense strand starting at position 1354 of SEQ ID NO: 586966
aaggcaaauuauguaugau

SEQ ID NO: 757103 - RNA, 19 nt, Artificial Sequence
  Description of Artificial Sequence: Synthetic oligonucleotide
  Antisense strand to SEQ ID NO: 757102
aucauacauaauuugccuu

SEQ ID NO: 757104 - RNA, 19 nt, Artificial Sequence
  Description of Artificial Sequence: Synthetic oligonucleotide
  Sense strand starting at position 1366 of SEQ ID NO: 586966
guaugaugauuauuaucac

SEQ ID NO: 757105 - RNA, 19 nt, Artificial Sequence
  Description of Artificial Sequence: Synthetic oligonucleotide
  Antisense strand to SEQ ID NO: 757104
gugauaauaaucaucauac

SEQ ID NO: 757106 - RNA, 19 nt, Artificial Sequence
  Description of Artificial Sequence: Synthetic oligonucleotide
  Sense strand starting at position 1500 of SEQ ID NO: 586966
cccaucaaaguuggugaaa

SEQ ID NO: 757107 - RNA, 19 nt, Artificial Sequence
  Description of Artificial Sequence: Synthetic oligonucleotide
  Antisense strand to SEQ ID NO: 757106
uuucaccaacuuugauggg

SEQ ID NO: 757108 - RNA, 19 nt, Artificial Sequence
  Description of Artificial Sequence: Synthetic oligonucleotide
  Sense strand starting at position 1501 of SEQ ID NO: 586966
ccaucaaaguuggugaaau

SEQ ID NO: 757109 - RNA, 19 nt, Artificial Sequence
  Description of Artificial Sequence: Synthetic oligonucleotide
  Antisense strand to SEQ ID NO: 757108
auuucaccaacuuugaugg

SEQ ID NO: 757110 - RNA, 19 nt, Artificial Sequence
  Description of Artificial Sequence: Synthetic oligonucleotide
  Sense strand starting at position 1542 of SEQ ID NO: 586966
agaugcaguagcuaagaaa

SEQ ID NO: 757111 - RNA, 19 nt, Artificial Sequence
  Description of Artificial Sequence: Synthetic oligonucleotide
  Antisense strand to SEQ ID NO: 757110
uuucuuagcuacugcaucu

SEQ ID NO: 757112 - RNA, 19 nt, Artificial Sequence
  Description of Artificial Sequence: Synthetic oligonucleotide
  Sense strand starting at position 1654 of SEQ ID NO: 586966
augacaaagucuccacagu

SEQ ID NO: 757113 - RNA, 19 nt, Artificial Sequence
  Description of Artificial Sequence: Synthetic oligonucleotide
  Antisense strand to SEQ ID NO: 757112
acuguggagacuuugucau

SEQ ID NO: 757114 - RNA, 19 nt, Artificial Sequence
  Description of Artificial Sequence: Synthetic oligonucleotide
  Sense strand starting at position 1655 of SEQ ID NO: 586966
ugacaaagucuccacagua

SEQ ID NO: 757115 - RNA, 19 nt, Artificial Sequence
  Description of Artificial Sequence: Synthetic oligonucleotide
  Antisense strand to SEQ ID NO: 757114
uacuguggagacuuuguca

SEQ ID NO: 757116 - RNA, 19 nt, Artificial Sequence
  Description of Artificial Sequence: Synthetic oligonucleotide
  Sense strand starting at position 1783 of SEQ ID NO: 586966
gcuauuagucuguacagag

SEQ ID NO: 757117 - RNA, 19 nt, Artificial Sequence
  Description of Artificial Sequence: Synthetic oligonucleotide
  Antisense strand to SEQ ID NO: 757116
cucuguacagacuaauagc

SEQ ID NO: 757118 - RNA, 19 nt, Artificial Sequence
  Description of Artificial Sequence: Synthetic oligonucleotide
  Sense strand starting at position 1813 of SEQ ID NO: 586966
augagucuuaccugaggaa

SEQ ID NO: 757119 - RNA, 19 nt, Artificial Sequence
  Description of Artificial Sequence: Synthetic oligonucleotide
  Antisense strand to SEQ ID NO: 757118
uuccucagguaagacucau

SEQ ID NO: 757120 - RNA, 19 nt, Artificial Sequence
  Description of Artificial Sequence: Synthetic oligonucleotide
  Sense strand starting at position 2162 of SEQ ID NO: 586966
ccacguaagcuggaggaaa

SEQ ID NO: 757121 - RNA, 19 nt, Artificial Sequence
  Description of Artificial Sequence: Synthetic oligonucleotide
  Antisense strand to SEQ ID NO: 757120
uuuccuccagcuuacgugg

SEQ ID NO: 757122 - RNA, 19 nt, Artificial Sequence
  Description of Artificial Sequence: Synthetic oligonucleotide
  Sense strand starting at position 2365 of SEQ ID NO: 586966
gggauaaacaucuggcaua

SEQ ID NO: 757123 - RNA, 19 nt, Artificial Sequence
  Description of Artificial Sequence: Synthetic oligonucleotide
  Antisense strand to SEQ ID NO: 757122
uaugccagauguuuauccc

SEQ ID NO: 757124 - RNA, 19 nt, Artificial Sequence
  Description of Artificial Sequence: Synthetic oligonucleotide
  Sense strand starting at position 2498 of SEQ ID NO: 586966
gguugugaggauugauaau

SEQ ID NO: 757125 - RNA, 19 nt, Artificial Sequence
  Description of Artificial Sequence: Synthetic oligonucleotide
  Antisense strand to SEQ ID NO: 757124
auuaucaauccucacaacc

SEQ ID NO: 757126 - RNA, 19 nt, Artificial Sequence
  Description of Artificial Sequence: Synthetic oligonucleotide
  Sense strand starting at position 2646 of SEQ ID NO: 586966
uucuccuuuggguaaacau

SEQ ID NO: 757127 - RNA, 19 nt, Artificial Sequence
  Description of Artificial Sequence: Synthetic oligonucleotide
  Antisense strand to SEQ ID NO: 757126
auguuuacccaaaggagaa

SEQ ID NO: 757128 - RNA, 19 nt, Artificial Sequence
  Description of Artificial Sequence: Synthetic oligonucleotide
  Sense strand starting at position 2817 of SEQ ID NO: 586966
aucucuagucucuguauuu

SEQ ID NO: 757129 - RNA, 19 nt, Artificial Sequence
  Description of Artificial Sequence: Synthetic oligonucleotide
  Antisense strand to SEQ ID NO: 757128
aaauacagagacuagagau

SEQ ID NO: 757130 - RNA, 19 nt, Artificial Sequence
  Description of Artificial Sequence: Synthetic oligonucleotide
  Sense strand starting at position 3218 of SEQ ID NO: 586966
agguuugcagaccauguua

SEQ ID NO: 757131 - RNA, 19 nt, Artificial Sequence
  Description of Artificial Sequence: Synthetic oligonucleotide
  Antisense strand to SEQ ID NO: 757130
uaacauggucugcaaaccu

SEQ ID NO: 757132 - RNA, 19 nt, Artificial Sequence
  Description of Artificial Sequence: Synthetic oligonucleotide
  Sense strand starting at position 3282 of SEQ ID NO: 586966
gguacccucucccuaaaga

SEQ ID NO: 757133 - RNA, 19 nt, Artificial Sequence
  Description of Artificial Sequence: Synthetic oligonucleotide
  Antisense strand to SEQ ID NO: 757132
ucuuuagggagaggguacc

SEQ ID NO: 757134 - RNA, 19 nt, Artificial Sequence
  Description of Artificial Sequence: Synthetic oligonucleotide
  Sense strand starting at position 3497 of SEQ ID NO: 586966
agcucuagggucuacuaau

SEQ ID NO: 757135 - RNA, 19 nt, Artificial Sequence
  Description of Artificial Sequence: Synthetic oligonucleotide
  Antisense strand to SEQ ID NO: 757134
auuaguagacccuagagcu

SEQ ID NO: 757136 - RNA, 19 nt, Artificial Sequence
  Description of Artificial Sequence: Synthetic oligonucleotide
  Sense strand starting at position 3558 of SEQ ID NO: 586966
aucaucucccuugagguua

SEQ ID NO: 757137 - RNA, 19 nt, Artificial Sequence
  Description of Artificial Sequence: Synthetic oligonucleotide
  Antisense strand to SEQ ID NO: 757136
uaaccucaagggagaugau

SEQ ID NO: 757138 - RNA, 19 nt, Artificial Sequence
  Description of Artificial Sequence: Synthetic oligonucleotide
  Sense strand starting at position 3612 of SEQ ID NO: 586966
aaagcucuauggguuaaca

SEQ ID NO: 757139 - RNA, 19 nt, Artificial Sequence
  Description of Artificial Sequence: Synthetic oligonucleotide
  Antisense strand to SEQ ID NO: 757138
uguuaacccauagagcuuu

SEQ ID NO: 757140 - RNA, 19 nt, Artificial Sequence
  Description of Artificial Sequence: Synthetic oligonucleotide
  Sense strand starting at position 3614 of SEQ ID NO: 586966
agcucuauggguuaacaac

SEQ ID NO: 757141 - RNA, 19 nt, Artificial Sequence
  Description of Artificial Sequence: Synthetic oligonucleotide
  Antisense strand to SEQ ID NO: 757140
guuguuaacccauagagcu

SEQ ID NO: 757142 - RNA, 19 nt, Artificial Sequence
  Description of Artificial Sequence: Synthetic oligonucleotide
  Sense strand starting at position 3934 of SEQ ID NO: 586966
ucauuaauuccugggaaua

SEQ ID NO: 757143 - RNA, 19 nt, Artificial Sequence
  Description of Artificial Sequence: Synthetic oligonucleotide
  Antisense strand to SEQ ID NO: 757142
uauucccaggaauuaauga

SEQ ID NO: 757144 - RNA, 19 nt, Artificial Sequence
  Description of Artificial Sequence: Synthetic oligonucleotide
  Sense strand starting at position 3981 of SEQ ID NO: 586966
gugauaaggacgcacaauu

SEQ ID NO: 757145 - RNA, 19 nt, Artificial Sequence
  Description of Artificial Sequence: Synthetic oligonucleotide
  Antisense strand to SEQ ID NO: 757144
aauugugcguccuuaucac

SEQ ID NO: 757146 - RNA, 19 nt, Artificial Sequence
  Description of Artificial Sequence: Synthetic oligonucleotide
  Sense strand starting at position 165 of SEQ ID NO: 586967
cugagaaagcuccaucuuu

SEQ ID NO: 757147 - RNA, 19 nt, Artificial Sequence
  Description of Artificial Sequence: Synthetic oligonucleotide
  Antisense strand to SEQ ID NO: 757146
aaagauggagcuuucucag

SEQ ID NO: 757148 - RNA, 19 nt, Artificial Sequence
  Description of Artificial Sequence: Synthetic oligonucleotide
  Sense strand starting at position 327 of SEQ ID NO: 586967
ggcuaacuguucccacuaa

SEQ ID NO: 757149 - RNA, 19 nt, Artificial Sequence
  Description of Artificial Sequence: Synthetic oligonucleotide
  Antisense strand to SEQ ID NO: 757148
uuagugggaacaguuagcc

SEQ ID NO: 757150 - RNA, 19 nt, Artificial Sequence
  Description of Artificial Sequence: Synthetic oligonucleotide
  Sense strand starting at position 514 of SEQ ID NO: 586967
aaauacguacuguagaagu

SEQ ID NO: 757151 - RNA, 19 nt, Artificial Sequence
  Description of Artificial Sequence: Synthetic oligonucleotide
  Antisense strand to SEQ ID NO: 757150
acuucuacaguacguauuu

SEQ ID NO: 757152 - RNA, 19 nt, Artificial Sequence
  Description of Artificial Sequence: Synthetic oligonucleotide
  Sense strand starting at position 516 of SEQ ID NO: 586967
auacguacuguagaaguua

SEQ ID NO: 757153 - RNA, 19 nt, Artificial Sequence
  Description of Artificial Sequence: Synthetic oligonucleotide
  Antisense strand to SEQ ID NO: 757152
uaacuucuacaguacguau

SEQ ID NO: 757154 - RNA, 19 nt, Artificial Sequence
  Description of Artificial Sequence: Synthetic oligonucleotide
  Sense strand starting at position 565 of SEQ ID NO: 586967
aggcucugugcuuagauua

SEQ ID NO: 757155 - RNA, 19 nt, Artificial Sequence
  Description of Artificial Sequence: Synthetic oligonucleotide
  Antisense strand to SEQ ID NO: 757154
uaaucuaagcacagagccu

SEQ ID NO: 757156 - RNA, 19 nt, Artificial Sequence
  Description of Artificial Sequence: Synthetic oligonucleotide
  Sense strand starting at position 598 of SEQ ID NO: 586967
aguauaaaguuccucaaag

SEQ ID NO: 757157 - RNA, 19 nt, Artificial Sequence
  Description of Artificial Sequence: Synthetic oligonucleotide
  Antisense strand to SEQ ID NO: 757156
cuuugaggaacuuuauacu

SEQ ID NO: 757158 - RNA, 19 nt, Artificial Sequence
  Description of Artificial Sequence: Synthetic oligonucleotide
  Sense strand starting at position 599 of SEQ ID NO: 586967
guauaaaguuccucaaagu

SEQ ID NO: 757159 - RNA, 19 nt, Artificial Sequence
  Description of Artificial Sequence: Synthetic oligonucleotide
  Antisense strand to SEQ ID NO: 757158
acuuugaggaacuuuauac

SEQ ID NO: 757160 - RNA, 19 nt, Artificial Sequence
  Description of Artificial Sequence: Synthetic oligonucleotide
  Sense strand starting at position 1056 of SEQ ID NO: 586967
gggaaauugauugguucgu

SEQ ID NO: 757161 - RNA, 19 nt, Artificial Sequence
  Description of Artificial Sequence: Synthetic oligonucleotide
  Antisense strand to SEQ ID NO: 757160
acgaaccaaucaauuuccc

SEQ ID NO: 757162 - RNA, 19 nt, Artificial Sequence
  Description of Artificial Sequence: Synthetic oligonucleotide
  Sense strand starting at position 1058 of SEQ ID NO: 586967
gaaauugauugguucguca

SEQ ID NO: 757163 - RNA, 19 nt, Artificial Sequence
  Description of Artificial Sequence: Synthetic oligonucleotide
  Antisense strand to SEQ ID NO: 757162
ugacgaaccaaucaauuuc

SEQ ID NO: 757164 - RNA, 19 nt, Artificial Sequence
  Description of Artificial Sequence: Synthetic oligonucleotide
  Sense strand starting at position 1177 of SEQ ID NO: 586967
cuuugugaugaccacgauu

SEQ ID NO: 757165 - RNA, 19 nt, Artificial Sequence
  Description of Artificial Sequence: Synthetic oligonucleotide
  Antisense strand to SEQ ID NO: 757164
aaucguggucaucacaaag

SEQ ID NO: 757166 - RNA, 19 nt, Artificial Sequence
  Description of Artificial Sequence: Synthetic oligonucleotide
  Sense strand starting at position 1696 of SEQ ID NO: 586967
uacagaugauguucucuga

SEQ ID NO: 757167 - RNA, 19 nt, Artificial Sequence
  Description of Artificial Sequence: Synthetic oligonucleotide
  Antisense strand to SEQ ID NO: 757166
ucagagaacaucaucugua

SEQ ID NO: 757168 - RNA, 19 nt, Artificial Sequence
  Description of Artificial Sequence: Synthetic oligonucleotide
  Sense strand starting at position 2189 of SEQ ID NO: 586967
cgagccuuccgggaaugga

SEQ ID NO: 757169 - RNA, 19 nt, Artificial Sequence
  Description of Artificial Sequence: Synthetic oligonucleotide
  Antisense strand to SEQ ID NO: 757168
uccauucccggaaggcucg

SEQ ID NO: 757170 - RNA, 19 nt, Artificial Sequence
  Description of Artificial Sequence: Synthetic oligonucleotide
  Sense strand starting at position 2338 of SEQ ID NO: 586967
gcggcagauuuccuuuaga

SEQ ID NO: 757171 - RNA, 19 nt, Artificial Sequence
  Description of Artificial Sequence: Synthetic oligonucleotide
  Antisense strand to SEQ ID NO: 757170
ucuaaaggaaaucugccgc

SEQ ID NO: 757172 - RNA, 19 nt, Artificial Sequence
  Description of Artificial Sequence: Synthetic oligonucleotide
  Sense strand starting at position 2415 of SEQ ID NO: 586967
uucuucuccugggauuuaa

SEQ ID NO: 757173 - RNA, 19 nt, Artificial Sequence
  Description of Artificial Sequence: Synthetic oligonucleotide
  Antisense strand to SEQ ID NO: 757172
uuaaaucccaggagaagaa

SEQ ID NO: 757174 - RNA, 19 nt, Artificial Sequence
  Description of Artificial Sequence: Synthetic oligonucleotide
  Sense strand starting at position 2511 of SEQ ID NO: 586967
cucagugaguucuuuacag

SEQ ID NO: 757175 - RNA, 19 nt, Artificial Sequence
  Description of Artificial Sequence: Synthetic oligonucleotide
  Antisense strand to SEQ ID NO: 757174
cuguaaagaacucacugag

SEQ ID NO: 757176 - RNA, 19 nt, Artificial Sequence
  Description of Artificial Sequence: Synthetic oligonucleotide
  Sense strand starting at position 2591 of SEQ ID NO: 586967
uuaggacuugcugauguaa

SEQ ID NO: 757177 - RNA, 19 nt, Artificial Sequence
  Description of Artificial Sequence: Synthetic oligonucleotide
  Antisense strand to SEQ ID NO: 757176
uuacaucagcaaguccuaa

SEQ ID NO: 757178 - RNA, 19 nt, Artificial Sequence
  Description of Artificial Sequence: Synthetic oligonucleotide
  Sense strand starting at position 2639 of SEQ ID NO: 586967
uuaguuaugcuacaaguaa

SEQ ID NO: 757179 - RNA, 19 nt, Artificial Sequence
  Description of Artificial Sequence: Synthetic oligonucleotide
  Antisense strand to SEQ ID NO: 757178
uuacuuguagcauaacuaa

SEQ ID NO: 757180 - RNA, 19 nt, Artificial Sequence
  Description of Artificial Sequence: Synthetic oligonucleotide
  Sense strand starting at position 2698 of SEQ ID NO: 586967
cugcuaucuccacagguuu

SEQ ID NO: 757181 - RNA, 19 nt, Artificial Sequence
  Description of Artificial Sequence: Synthetic oligonucleotide
  Antisense strand to SEQ ID NO: 757180
aaaccuguggagauagcag

SEQ ID NO: 757182 - RNA, 19 nt, Artificial Sequence
  Description of Artificial Sequence: Synthetic oligonucleotide
  Sense strand starting at position 2741 of SEQ ID NO: 586967
uguauaucaaggugagcaa

SEQ ID NO: 757183 - RNA, 19 nt, Artificial Sequence
  Description of Artificial Sequence: Synthetic oligonucleotide
  Antisense strand to SEQ ID NO: 757182
uugcucaccuugauauaca

SEQ ID NO: 757184 - RNA, 19 nt, Artificial Sequence
  Description of Artificial Sequence: Synthetic oligonucleotide
  Sense strand starting at position 2742 of SEQ ID NO: 586967
guauaucaaggugagcaaa

SEQ ID NO: 757185 - RNA, 19 nt, Artificial Sequence
  Description of Artificial Sequence: Synthetic oligonucleotide
  Antisense strand to SEQ ID NO: 757184
uuugcucaccuugauauac

SEQ ID NO: 757186 - RNA, 19 nt, Artificial Sequence
  Description of Artificial Sequence: Synthetic oligonucleotide
  Sense strand starting at position 2744 of SEQ ID NO: 586967
auaucaaggugagcaaauu

SEQ ID NO: 757187 - RNA, 19 nt, Artificial Sequence
  Description of Artificial Sequence: Synthetic oligonucleotide
  Antisense strand to SEQ ID NO: 757186
aauuugcucaccuugauau

SEQ ID NO: 757188 - RNA, 19 nt, Artificial Sequence
  Description of Artificial Sequence: Synthetic oligonucleotide
  Sense strand starting at position 2765 of SEQ ID NO: 586967
agcaaaugucauuguaaau

SEQ ID NO: 757189 - RNA, 19 nt, Artificial Sequence
  Description of Artificial Sequence: Synthetic oligonucleotide
  Antisense strand to SEQ ID NO: 757188
auuuacaaugacauuugcu

SEQ ID NO: 757190 - RNA, 19 nt, Artificial Sequence
  Description of Artificial Sequence: Synthetic oligonucleotide
  Sense strand starting at position 2809 of SEQ ID NO: 586967
ucuggaacucaaugugcau

SEQ ID NO: 757191 - RNA, 19 nt, Artificial Sequence
  Description of Artificial Sequence: Synthetic oligonucleotide
  Antisense strand to SEQ ID NO: 757190
augcacauugaguuccaga

SEQ ID NO: 757192 - RNA, 19 nt, Artificial Sequence
  Description of Artificial Sequence: Synthetic oligonucleotide
  Sense strand starting at position 2815 of SEQ ID NO: 586967
acucaaugugcauagaagu

SEQ ID NO: 757193 - RNA, 19 nt, Artificial Sequence
  Description of Artificial Sequence: Synthetic oligonucleotide
  Antisense strand to SEQ ID NO: 757192
acuucuaugcacauugagu

SEQ ID NO: 757194 - RNA, 19 nt, Artificial Sequence
  Description of Artificial Sequence: Synthetic oligonucleotide
  Sense strand starting at position 2825 of SEQ ID NO: 586967
cauagaagucccugagacu

SEQ ID NO: 757195 - RNA, 19 nt, Artificial Sequence
  Description of Artificial Sequence: Synthetic oligonucleotide
  Antisense strand to SEQ ID NO: 757194
agucucagggacuucuaug

SEQ ID NO: 757196 - RNA, 19 nt, Artificial Sequence
  Description of Artificial Sequence: Synthetic oligonucleotide
  Sense strand starting at position 2874 of SEQ ID NO: 586967
uugcgauguacggaauuaa

SEQ ID NO: 757197 - RNA, 19 nt, Artificial Sequence
  Description of Artificial Sequence: Synthetic oligonucleotide
  Antisense strand to SEQ ID NO: 757196
uuaauuccguacaucgcaa

SEQ ID NO: 757198 - RNA, 19 nt, Artificial Sequence
  Description of Artificial Sequence: Synthetic oligonucleotide
  Sense strand starting at position 2917 of SEQ ID NO: 586967
ugaugaaaguaguuuaccu

SEQ ID NO: 757199 - RNA, 19 nt, Artificial Sequence
  Description of Artificial Sequence: Synthetic oligonucleotide
  Antisense strand to SEQ ID NO: 757198
agguaaacuacuuucauca

SEQ ID NO: 757200 - RNA, 19 nt, Artificial Sequence
  Description of Artificial Sequence: Synthetic oligonucleotide
  Sense strand starting at position 2921 of SEQ ID NO: 586967
gaaaguaguuuaccugaac

SEQ ID NO: 757201 - RNA, 19 nt, Artificial Sequence
  Description of Artificial Sequence: Synthetic oligonucleotide
  Antisense strand to SEQ ID NO: 757200
guucagguaaacuacuuuc

SEQ ID NO: 757202 - RNA, 19 nt, Artificial Sequence
  Description of Artificial Sequence: Synthetic oligonucleotide
  Sense strand starting at position 2924 of SEQ ID NO: 586967
aguaguuuaccugaacaug

SEQ ID NO: 757203 - RNA, 19 nt, Artificial Sequence
  Description of Artificial Sequence: Synthetic oligonucleotide
  Antisense strand to SEQ ID NO: 757202
cauguucagguaaacuacu

SEQ ID NO: 757204 - RNA, 19 nt, Artificial Sequence
  Description of Artificial Sequence: Synthetic oligonucleotide
  Sense strand starting at position 3071 of SEQ ID NO: 586967
aaacuaaagccaggaguuu

SEQ ID NO: 757205 - RNA, 19 nt, Artificial Sequence
  Description of Artificial Sequence: Synthetic oligonucleotide
  Antisense strand to SEQ ID NO: 757204
aaacuccuggcuuuaguuu

SEQ ID NO: 757206 - RNA, 19 nt, Artificial Sequence
  Description of Artificial Sequence: Synthetic oligonucleotide
  Sense strand starting at position 3402 of SEQ ID NO: 586967
guuacugguauugacagau

SEQ ID NO: 757207 - RNA, 19 nt, Artificial Sequence
  Description of Artificial Sequence: Synthetic oligonucleotide
  Antisense strand to SEQ ID NO: 757206
aucugucaauaccaguaac

SEQ ID NO: 757208 - RNA, 19 nt, Artificial Sequence
  Description of Artificial Sequence: Synthetic oligonucleotide
  Sense strand starting at position 3445 of SEQ ID NO: 586967
uggaaauccuaccuggacu

SEQ ID NO: 757209 - RNA, 19 nt, Artificial Sequence
  Description of Artificial Sequence: Synthetic oligonucleotide
  Antisense strand to SEQ ID NO: 757208
aguccagguaggauuucca

SEQ ID NO: 757210 - RNA, 19 nt, Artificial Sequence
  Description of Artificial Sequence: Synthetic oligonucleotide
  Sense strand starting at position 3666 of SEQ ID NO: 586967
gcauuaaguguugacacuu

SEQ ID NO: 757211 - RNA, 19 nt, Artificial Sequence
  Description of Artificial Sequence: Synthetic oligonucleotide
  Antisense strand to SEQ ID NO: 757210
aagugucaacacuuaaugc

SEQ ID NO: 757212 - RNA, 19 nt, Artificial Sequence
  Description of Artificial Sequence: Synthetic oligonucleotide
  Sense strand starting at position 3675 of SEQ ID NO: 586967
guugacacuugaguauuga

SEQ ID NO: 757213 - RNA, 19 nt, Artificial Sequence
  Description of Artificial Sequence: Synthetic oligonucleotide
  Antisense strand to SEQ ID NO: 757212
ucaauacucaagugucaac

SEQ ID NO: 757214 - RNA, 19 nt, Artificial Sequence
  Description of Artificial Sequence: Synthetic oligonucleotide
  Sense strand starting at position 3690 of SEQ ID NO: 586967
uugaaccaaucugugauau

SEQ ID NO: 757215 - RNA, 19 nt, Artificial Sequence
  Description of Artificial Sequence: Synthetic oligonucleotide
  Antisense strand to SEQ ID NO: 757214
auaucacagauugguucaa

SEQ ID NO: 757216 - RNA, 19 nt, Artificial Sequence
  Description of Artificial Sequence: Synthetic oligonucleotide
  Sense strand starting at position 3691 of SEQ ID NO: 586967
ugaaccaaucugugauaug

SEQ ID NO: 757217 - RNA, 19 nt, Artificial Sequence
  Description of Artificial Sequence: Synthetic oligonucleotide
  Antisense strand to SEQ ID NO: 757216
cauaucacagauugguuca

SEQ ID NO: 757218 - RNA, 19 nt, Artificial Sequence
  Description of Artificial Sequence: Synthetic oligonucleotide
  Sense strand starting at position 3708 of SEQ ID NO: 586967
ugacaugaauaugccuuua

SEQ ID NO: 757219 - RNA, 19 nt, Artificial Sequence
  Description of Artificial Sequence: Synthetic oligonucleotide
  Antisense strand to SEQ ID NO: 757218
uaaaggcauauucauguca

SEQ ID NO: 757220 - RNA, 19 nt, Artificial Sequence
  Description of Artificial Sequence: Synthetic oligonucleotide
  Sense strand starting at position 3731 of SEQ ID NO: 586967
ucagaaguuugucuacaga

SEQ ID NO: 757221 - RNA, 19 nt, Artificial Sequence
  Description of Artificial Sequence: Synthetic oligonucleotide
  Antisense strand to SEQ ID NO: 757220
ucuguagacaaacuucuga

SEQ ID NO: 757222 - RNA, 19 nt, Artificial Sequence
  Description of Artificial Sequence: Synthetic oligonucleotide
  Sense strand starting at position 3734 of SEQ ID NO: 586967
gaaguuugucuacagacuu

SEQ ID NO: 757223 - RNA, 19 nt, Artificial Sequence
  Description of Artificial Sequence: Synthetic oligonucleotide
  Antisense strand to SEQ ID NO: 757222
aagucuguagacaaacuuc

SEQ ID NO: 757224 - RNA, 19 nt, Artificial Sequence
  Description of Artificial Sequence: Synthetic oligonucleotide
  Sense strand starting at position 3979 of SEQ ID NO: 586967
aguuucuaucugcaaagau

SEQ ID NO: 757225 - RNA, 19 nt, Artificial Sequence
  Description of Artificial Sequence: Synthetic oligonucleotide
  Antisense strand to SEQ ID NO: 757224
aucuuugcagauagaaacu

SEQ ID NO: 757226 - RNA, 19 nt, Artificial Sequence
  Description of Artificial Sequence: Synthetic oligonucleotide
  Sense strand starting at position 6 of SEQ ID NO: 586968
auguucuaaucagcgagaa

SEQ ID NO: 757227 - RNA, 19 nt, Artificial Sequence
  Description of Artificial Sequence: Synthetic oligonucleotide
  Antisense strand to SEQ ID NO: 757226
uucucgcugauuagaacau

SEQ ID NO: 757228 - RNA, 19 nt, Artificial Sequence
  Description of Artificial Sequence: Synthetic oligonucleotide
  Sense strand starting at position 7 of SEQ ID NO: 586968
uguucuaaucagcgagaac

SEQ ID NO: 757229 - RNA, 19 nt, Artificial Sequence
  Description of Artificial Sequence: Synthetic oligonucleotide
  Antisense strand to SEQ ID NO: 757228
guucucgcugauuagaaca

SEQ ID NO: 757230 - RNA, 19 nt, Artificial Sequence
  Description of Artificial Sequence: Synthetic oligonucleotide
  Sense strand starting at position 8 of SEQ ID NO: 586968
guucuaaucagcgagaacu

SEQ ID NO: 757231 - RNA, 19 nt, Artificial Sequence
  Description of Artificial Sequence: Synthetic oligonucleotide
  Antisense strand to SEQ ID NO: 757230
aguucucgcugauuagaac

SEQ ID NO: 757232 - RNA, 19 nt, Artificial Sequence
  Description of Artificial Sequence: Synthetic oligonucleotide
  Sense strand starting at position 10 of SEQ ID NO: 586968
ucuaaucagcgagaacuau

SEQ ID NO: 757233 - RNA, 19 nt, Artificial Sequence
  Description of Artificial Sequence: Synthetic oligonucleotide
  Antisense strand to SEQ ID NO: 757232
auaguucucgcugauuaga

SEQ ID NO: 757234 - RNA, 19 nt, Artificial Sequence
  Description of Artificial Sequence: Synthetic oligonucleotide
  Sense strand starting at position 91 of SEQ ID NO: 586968
aggcccuucuuucuagaca

SEQ ID NO: 757235 - RNA, 19 nt, Artificial Sequence
  Description of Artificial Sequence: Synthetic oligonucleotide
  Antisense strand to SEQ ID NO: 757234
ugucuagaaagaagggccu

SEQ ID NO: 757236 - RNA, 19 nt, Artificial Sequence
  Description of Artificial Sequence: Synthetic oligonucleotide
  Sense strand starting at position 167 of SEQ ID NO: 586968
gccguuucucgccgacgaa

SEQ ID NO: 757237 - RNA, 19 nt, Artificial Sequence
  Description of Artificial Sequence: Synthetic oligonucleotide
  Antisense strand to SEQ ID NO: 757236
uucgucggcgagaaacggc

SEQ ID NO: 757238 - RNA, 19 nt, Artificial Sequence
  Description of Artificial Sequence: Synthetic oligonucleotide
  Sense strand starting at position 170 of SEQ ID NO: 586968
guuucucgccgacgaagaa

SEQ ID NO: 757239 - RNA, 19 nt, Artificial Sequence
  Description of Artificial Sequence: Synthetic oligonucleotide
  Antisense strand to SEQ ID NO: 757238
uucuucgucggcgagaaac

SEQ ID NO: 757240 - RNA, 19 nt, Artificial Sequence
  Description of Artificial Sequence: Synthetic oligonucleotide
  Sense strand starting at position 182 of SEQ ID NO: 586968
cgaagaaacugucuaccaa

SEQ ID NO: 757241 - RNA, 19 nt, Artificial Sequence
  Description of Artificial Sequence: Synthetic oligonucleotide
  Antisense strand to SEQ ID NO: 757240
uugguagacaguuucuucg

SEQ ID NO: 757242 - RNA, 19 nt, Artificial Sequence
  Description of Artificial Sequence: Synthetic oligonucleotide
  Sense strand starting at position 387 of SEQ ID NO: 586968
cuguauuccuucuaauguu

SEQ ID NO: 757243 - RNA, 19 nt, Artificial Sequence
  Description of Artificial Sequence: Synthetic oligonucleotide
  Antisense strand to SEQ ID NO: 757242
aacauuagaaggaauacag

SEQ ID NO: 757244 - RNA, 19 nt, Artificial Sequence
  Description of Artificial Sequence: Synthetic oligonucleotide
  Sense strand starting at position 402 of SEQ ID NO: 586968
uguuuagccucguuuguuu

SEQ ID NO: 757245 - RNA, 19 nt, Artificial Sequence
  Description of Artificial Sequence: Synthetic oligonucleotide
  Antisense strand to SEQ ID NO: 757244
aaacaaacgaggcuaaaca

SEQ ID NO: 757246 - RNA, 19 nt, Artificial Sequence
  Description of Artificial Sequence: Synthetic oligonucleotide
  Sense strand starting at position 720 of SEQ ID NO: 586968
agccauguuuagccucauu

SEQ ID NO: 757247 - RNA, 19 nt, Artificial Sequence
  Description of Artificial Sequence: Synthetic oligonucleotide
  Antisense strand to SEQ ID NO: 757246
aaugaggcuaaacauggcu

SEQ ID NO: 757248 - RNA, 19 nt, Artificial Sequence
  Description of Artificial Sequence: Synthetic oligonucleotide
  Sense strand starting at position 899 of SEQ ID NO: 586968
aauuuagccgagugucaug

SEQ ID NO: 757249 - RNA, 19 nt, Artificial Sequence
  Description of Artificial Sequence: Synthetic oligonucleotide
  Antisense strand to SEQ ID NO: 757248
caugacacucggcuaaauu

SEQ ID NO: 757250 - RNA, 19 nt, Artificial Sequence
  Description of Artificial Sequence: Synthetic oligonucleotide
  Sense strand starting at position 904 of SEQ ID NO: 586968
agccgagugucauggugga

SEQ ID NO: 757251 - RNA, 19 nt, Artificial Sequence
  Description of Artificial Sequence: Synthetic oligonucleotide
  Antisense strand to SEQ ID NO: 757250
uccaccaugacacucggcu

SEQ ID NO: 757252 - RNA, 19 nt, Artificial Sequence
  Description of Artificial Sequence: Synthetic oligonucleotide
  Sense strand starting at position 905 of SEQ ID NO: 586968
gccgagugucaugguggau

SEQ ID NO: 757253 - RNA, 19 nt, Artificial Sequence
  Description of Artificial Sequence: Synthetic oligonucleotide
  Antisense strand to SEQ ID NO: 757252
auccaccaugacacucggc

SEQ ID NO: 757254 - RNA, 19 nt, Artificial Sequence
  Description of Artificial Sequence: Synthetic oligonucleotide
  Sense strand starting at position 1290 of SEQ ID NO: 586968
ggcggaggaucacuugaaa

SEQ ID NO: 757255 - RNA, 19 nt, Artificial Sequence
  Description of Artificial Sequence: Synthetic oligonucleotide
  Antisense strand to SEQ ID NO: 757254
uuucaagugauccuccgcc

SEQ ID NO: 757256 - RNA, 19 nt, Artificial Sequence
  Description of Artificial Sequence: Synthetic oligonucleotide
  Sense strand starting at position 1336 of SEQ ID NO: 586968
agauucgguucacagauga

SEQ ID NO: 757257 - RNA, 19 nt, Artificial Sequence
  Description of Artificial Sequence: Synthetic oligonucleotide
  Antisense strand to SEQ ID NO: 757256
ucaucugugaaccgaaucu

SEQ ID NO: 757258 - RNA, 19 nt, Artificial Sequence
  Description of Artificial Sequence: Synthetic oligonucleotide
  Sense strand starting at position 1364 of SEQ ID NO: 586968
ggucccgagaggugaaauu

SEQ ID NO: 757259 - RNA, 19 nt, Artificial Sequence
  Description of Artificial Sequence: Synthetic oligonucleotide
  Antisense strand to SEQ ID NO: 757258
aauuucaccucucgggacc

SEQ ID NO: 757260 - RNA, 19 nt, Artificial Sequence
  Description of Artificial Sequence: Synthetic oligonucleotide
  Sense strand starting at position 1374 of SEQ ID NO: 586968
ggugaaauuacuggcccaa

SEQ ID NO: 757261 - RNA, 19 nt, Artificial Sequence
  Description of Artificial Sequence: Synthetic oligonucleotide
  Antisense strand to SEQ ID NO: 757260
uugggccaguaauuucacc

SEQ ID NO: 757262 - RNA, 19 nt, Artificial Sequence
  Description of Artificial Sequence: Synthetic oligonucleotide
  Sense strand starting at position 1376 of SEQ ID NO: 586968
ugaaauuacuggcccaaga

SEQ ID NO: 757263 - RNA, 19 nt, Artificial Sequence
  Description of Artificial Sequence: Synthetic oligonucleotide
  Antisense strand to SEQ ID NO: 757262
ucuugggccaguaauuuca

SEQ ID NO: 757264 - RNA, 19 nt, Artificial Sequence
  Description of Artificial Sequence: Synthetic oligonucleotide
  Sense strand starting at position 85 of SEQ ID NO: 586969
guuaucuaaacuugaggag

SEQ ID NO: 757265 - RNA, 19 nt, Artificial Sequence
  Description of Artificial Sequence: Synthetic oligonucleotide
  Antisense strand to SEQ ID NO: 757264
cuccucaaguuuagauaac

SEQ ID NO: 757266 - RNA, 19 nt, Artificial Sequence
  Description of Artificial Sequence: Synthetic oligonucleotide
  Sense strand starting at position 97 of SEQ ID NO: 586969
ugaggagaauugccuauaa

SEQ ID NO: 757267 - RNA, 19 nt, Artificial Sequence
  Description of Artificial Sequence: Synthetic oligonucleotide
  Antisense strand to SEQ ID NO: 757266
uuauaggcaauucuccuca

SEQ ID NO: 757268 - RNA, 19 nt, Artificial Sequence
  Description of Artificial Sequence: Synthetic oligonucleotide
  Sense strand starting at position 242 of SEQ ID NO: 586969
gaaagauacgucgaaguag

SEQ ID NO: 757269 - RNA, 19 nt, Artificial Sequence
  Description of Artificial Sequence: Synthetic oligonucleotide
  Antisense strand to SEQ ID NO: 757268
cuacuucgacguaucuuuc

SEQ ID NO: 757270 - RNA, 19 nt, Artificial Sequence
  Description of Artificial Sequence: Synthetic oligonucleotide
  Sense strand starting at position 382 of SEQ ID NO: 586969
ucuagaauugugggauuaa

SEQ ID NO: 757271 - RNA, 19 nt, Artificial Sequence
  Description of Artificial Sequence: Synthetic oligonucleotide
  Antisense strand to SEQ ID NO: 757270
uuaaucccacaauucuaga

SEQ ID NO: 757272 - RNA, 19 nt, Artificial Sequence
  Description of Artificial Sequence: Synthetic oligonucleotide
  Sense strand starting at position 412 of SEQ ID NO: 586969
uaaauuguuugguuggaca

SEQ ID NO: 757273 - RNA, 19 nt, Artificial Sequence
  Description of Artificial Sequence: Synthetic oligonucleotide
  Antisense strand to SEQ ID NO: 757272
uguccaaccaaacaauuua

SEQ ID NO: 757274 - RNA, 19 nt, Artificial Sequence
  Description of Artificial Sequence: Synthetic oligonucleotide
  Sense strand starting at position 741 of SEQ ID NO: 586969
cguaguugaauggagugaa

SEQ ID NO: 757275 - RNA, 19 nt, Artificial Sequence
  Description of Artificial Sequence: Synthetic oligonucleotide
  Antisense strand to SEQ ID NO: 757274
uucacuccauucaacuacg

SEQ ID NO: 757276 - RNA, 19 nt, Artificial Sequence
  Description of Artificial Sequence: Synthetic oligonucleotide
  Sense strand starting at position 831 of SEQ ID NO: 586969
accugauuauuagcauaug

SEQ ID NO: 757277 - RNA, 19 nt, Artificial Sequence
  Description of Artificial Sequence: Synthetic oligonucleotide
  Antisense strand to SEQ ID NO: 757276
cauaugcuaauaaucaggu

SEQ ID NO: 757278 - RNA, 19 nt, Artificial Sequence
  Description of Artificial Sequence: Synthetic oligonucleotide
  Sense strand starting at position 1185 of SEQ ID NO: 586969
auauuuauuuguggauggu

SEQ ID NO: 757279 - RNA, 19 nt, Artificial Sequence
  Description of Artificial Sequence: Synthetic oligonucleotide
  Antisense strand to SEQ ID NO: 757278
accauccacaaauaaauau

SEQ ID NO: 757280 - RNA, 19 nt, Artificial Sequence
  Description of Artificial Sequence: Synthetic oligonucleotide
  Sense strand starting at position 1194 of SEQ ID NO: 586969
uguggaugguaacuaauaa

SEQ ID NO: 757281 - RNA, 19 nt, Artificial Sequence
  Description of Artificial Sequence: Synthetic oligonucleotide
  Antisense strand to SEQ ID NO: 757280
uuauuaguuaccauccaca

SEQ ID NO: 757282 - RNA, 19 nt, Artificial Sequence
  Description of Artificial Sequence: Synthetic oligonucleotide
  Sense strand starting at position 1248 of SEQ ID NO: 586969
ugcauaugcccugaaauaa

SEQ ID NO: 757283 - RNA, 19 nt, Artificial Sequence
  Description of Artificial Sequence: Synthetic oligonucleotide
  Antisense strand to SEQ ID NO: 757282
uuauuucagggcauaugca

SEQ ID NO: 757284 - RNA, 19 nt, Artificial Sequence
  Description of Artificial Sequence: Synthetic oligonucleotide
  Sense strand starting at position 1346 of SEQ ID NO: 586969
auaguuuaauuccuggaaa

SEQ ID NO: 757285 - RNA, 19 nt, Artificial Sequence
  Description of Artificial Sequence: Synthetic oligonucleotide
  Antisense strand to SEQ ID NO: 757284
uuuccaggaauuaaacuau

SEQ ID NO: 757286 - RNA, 19 nt, Artificial Sequence
  Description of Artificial Sequence: Synthetic oligonucleotide
  Sense strand starting at position 1348 of SEQ ID NO: 586969
aguuuaauuccuggaaaug

SEQ ID NO: 757287 - RNA, 19 nt, Artificial Sequence
  Description of Artificial Sequence: Synthetic oligonucleotide
  Antisense strand to SEQ ID NO: 757286
cauuuccaggaauuaaacu

SEQ ID NO: 757288 - RNA, 19 nt, Artificial Sequence
  Description of Artificial Sequence: Synthetic oligonucleotide
  Sense strand starting at position 1349 of SEQ ID NO: 586969
guuuaauuccuggaaaugu

SEQ ID NO: 757289 - RNA, 19 nt, Artificial Sequence
  Description of Artificial Sequence: Synthetic oligonucleotide
  Antisense strand to SEQ ID NO: 757288
acauuuccaggaauuaaac

SEQ ID NO: 757290 - RNA, 19 nt, Artificial Sequence
  Description of Artificial Sequence: Synthetic oligonucleotide
  Sense strand starting at position 1395 of SEQ ID NO: 586969
cagucugugcuugcacuau

SEQ ID NO: 757291 - RNA, 19 nt, Artificial Sequence
  Description of Artificial Sequence: Synthetic oligonucleotide
  Antisense strand to SEQ ID NO: 757290
auagugcaagcacagacug

SEQ ID NO: 757292 - RNA, 19 nt, Artificial Sequence
  Description of Artificial Sequence: Synthetic oligonucleotide
  Sense strand starting at position 1522 of SEQ ID NO: 586969
ucagguuaguuaccaauaa

SEQ ID NO: 757293 - RNA, 19 nt, Artificial Sequence
  Description of Artificial Sequence: Synthetic oligonucleotide
  Antisense strand to SEQ ID NO: 757292
uuauugguaacuaaccuga

SEQ ID NO: 757294 - RNA, 19 nt, Artificial Sequence
  Description of Artificial Sequence: Synthetic oligonucleotide
  Sense strand starting at position 1550 of SEQ ID NO: 586969
acaggaaugugagcuaaug

SEQ ID NO: 757295 - RNA, 19 nt, Artificial Sequence
  Description of Artificial Sequence: Synthetic oligonucleotide
  Antisense strand to SEQ ID NO: 757294
cauuagcucacauuccugu

SEQ ID NO: 757296 - RNA, 19 nt, Artificial Sequence
  Description of Artificial Sequence: Synthetic oligonucleotide
  Sense strand starting at position 1552 of SEQ ID NO: 586969
aggaaugugagcuaaugcu

SEQ ID NO: 757297 - RNA, 19 nt, Artificial Sequence
  Description of Artificial Sequence: Synthetic oligonucleotide
  Antisense strand to SEQ ID NO: 757296
agcauuagcucacauuccu

SEQ ID NO: 757298 - RNA, 19 nt, Artificial Sequence
  Description of Artificial Sequence: Synthetic oligonucleotide
  Sense strand starting at position 1651 of SEQ ID NO: 586969
cuccauuucuggcuugauu

SEQ ID NO: 757299 - RNA, 19 nt, Artificial Sequence
  Description of Artificial Sequence: Synthetic oligonucleotide
  Antisense strand to SEQ ID NO: 757298
aaucaagccagaaauggag

SEQ ID NO: 757300 - RNA, 19 nt, Artificial Sequence
  Description of Artificial Sequence: Synthetic oligonucleotide
  Sense strand starting at position 1702 of SEQ ID NO: 586969
cagguuuaaccacauguga

SEQ ID NO: 757301 - RNA, 19 nt, Artificial Sequence
  Description of Artificial Sequence: Synthetic oligonucleotide
  Antisense strand to SEQ ID NO: 757300
ucacaugugguuaaaccug

SEQ ID NO: 757302 - RNA, 19 nt, Artificial Sequence
  Description of Artificial Sequence: Synthetic oligonucleotide
  Sense strand starting at position 1840 of SEQ ID NO: 586969
gacugaagagcugguuaau

SEQ ID NO: 757303 - RNA, 19 nt, Artificial Sequence
  Description of Artificial Sequence: Synthetic oligonucleotide
  Antisense strand to SEQ ID NO: 757302
auuaaccagcucuucaguc

SEQ ID NO: 757304 - RNA, 19 nt, Artificial Sequence
  Description of Artificial Sequence: Synthetic oligonucleotide
  Sense strand starting at position 1843 of SEQ ID NO: 586969
ugaagagcugguuaauucu

SEQ ID NO: 757305 - RNA, 19 nt, Artificial Sequence
  Description of Artificial Sequence: Synthetic oligonucleotide
  Antisense strand to SEQ ID NO: 757304
agaauuaaccagcucuuca

SEQ ID NO: 757306 - RNA, 19 nt, Artificial Sequence
  Description of Artificial Sequence: Synthetic oligonucleotide
  Sense strand starting at position 2048 of SEQ ID NO: 586969
aaaggaggagcuugguaua

SEQ ID NO: 757307 - RNA, 19 nt, Artificial Sequence
  Description of Artificial Sequence: Synthetic oligonucleotide
  Antisense strand to SEQ ID NO: 757306
uauaccaagcuccuccuuu

SEQ ID NO: 757308 - RNA, 19 nt, Artificial Sequence
  Description of Artificial Sequence: Synthetic oligonucleotide
  Sense strand starting at position 2062 of SEQ ID NO: 586969
guauacaaauugccugaaa

SEQ ID NO: 757309 - RNA, 19 nt, Artificial Sequence
  Description of Artificial Sequence: Synthetic oligonucleotide
  Antisense strand to SEQ ID NO: 757308
uuucaggcaauuuguauac

SEQ ID NO: 757310 - RNA, 19 nt, Artificial Sequence
  Description of Artificial Sequence: Synthetic oligonucleotide
  Sense strand starting at position 2131 of SEQ ID NO: 586969
auucuauaucaacgacaga

SEQ ID NO: 757311 - RNA, 19 nt, Artificial Sequence
  Description of Artificial Sequence: Synthetic oligonucleotide
  Antisense strand to SEQ ID NO: 757310
ucugucguugauauagaau

SEQ ID NO: 757312 - RNA, 19 nt, Artificial Sequence
  Description of Artificial Sequence: Synthetic oligonucleotide
  Sense strand starting at position 2379 of SEQ ID NO: 586969
gcuuucucucaagaagcaa

SEQ ID NO: 757313 - RNA, 19 nt, Artificial Sequence
  Description of Artificial Sequence: Synthetic oligonucleotide
  Antisense strand to SEQ ID NO: 757312
uugcuucuugagagaaagc

SEQ ID NO: 757314 - RNA, 19 nt, Artificial Sequence
  Description of Artificial Sequence: Synthetic oligonucleotide
  Sense strand starting at position 2530 of SEQ ID NO: 586969
ggagaauaaugagcauagu

SEQ ID NO: 757315 - RNA, 19 nt, Artificial Sequence
  Description of Artificial Sequence: Synthetic oligonucleotide
  Antisense strand to SEQ ID NO: 757314
acuaugcucauuauucucc

SEQ ID NO: 757316 - RNA, 19 nt, Artificial Sequence
  Description of Artificial Sequence: Synthetic oligonucleotide
  Sense strand starting at position 2533 of SEQ ID NO: 586969
gaauaaugagcauaguucu

SEQ ID NO: 757317 - RNA, 19 nt, Artificial Sequence
  Description of Artificial Sequence: Synthetic oligonucleotide
  Antisense strand to SEQ ID NO: 757316
agaacuaugcucauuauuc

SEQ ID NO: 757318 - RNA, 19 nt, Artificial Sequence
  Description of Artificial Sequence: Synthetic oligonucleotide
  Sense strand starting at position 2548 of SEQ ID NO: 586969
uucugucuacauuaaagua

SEQ ID NO: 757319 - RNA, 19 nt, Artificial Sequence
  Description of Artificial Sequence: Synthetic oligonucleotide
  Antisense strand to SEQ ID NO: 757318
uacuuuaauguagacagaa

SEQ ID NO: 757320 - RNA, 19 nt, Artificial Sequence
  Description of Artificial Sequence: Synthetic oligonucleotide
  Sense strand starting at position 2815 of SEQ ID NO: 586969
uuaauuauaggccacugau

SEQ ID NO: 757321 - RNA, 19 nt, Artificial Sequence
  Description of Artificial Sequence: Synthetic oligonucleotide
  Antisense strand to SEQ ID NO: 757320
aucaguggccuauaauuaa

SEQ ID NO: 757322 - RNA, 19 nt, Artificial Sequence
  Description of Artificial Sequence: Synthetic oligonucleotide
  Sense strand starting at position 2818 of SEQ ID NO: 586969
auuauaggccacugaugau

SEQ ID NO: 757323 - RNA, 19 nt, Artificial Sequence
  Description of Artificial Sequence: Synthetic oligonucleotide
  Antisense strand to SEQ ID NO: 757322
aucaucaguggccuauaau

SEQ ID NO: 757324 - RNA, 19 nt, Artificial Sequence
  Description of Artificial Sequence: Synthetic oligonucleotide
  Sense strand starting at position 3001 of SEQ ID NO: 586969
cugccauuugccuauaugu

SEQ ID NO: 757325 - RNA, 19 nt, Artificial Sequence
  Description of Artificial Sequence: Synthetic oligonucleotide
  Antisense strand to SEQ ID NO: 757324
acauauaggcaaauggcag

SEQ ID NO: 757326 - RNA, 19 nt, Artificial Sequence
  Description of Artificial Sequence: Synthetic oligonucleotide
  Sense strand starting at position 3003 of SEQ ID NO: 586969
gccauuugccuauaugucu

SEQ ID NO: 757327 - RNA, 19 nt, Artificial Sequence
  Description of Artificial Sequence: Synthetic oligonucleotide
  Antisense strand to SEQ ID NO: 757326
agacauauaggcaaauggc

SEQ ID NO: 757328 - RNA, 19 nt, Artificial Sequence
  Description of Artificial Sequence: Synthetic oligonucleotide
  Sense strand starting at position 3065 of SEQ ID NO: 586969
agagacaguucuuuauuau

SEQ ID NO: 757329 - RNA, 19 nt, Artificial Sequence
  Description of Artificial Sequence: Synthetic oligonucleotide
  Antisense strand to SEQ ID NO: 757328
auaauaaagaacugucucu

SEQ ID NO: 757330 - RNA, 19 nt, Artificial Sequence
  Description of Artificial Sequence: Synthetic oligonucleotide
  Sense strand starting at position 3116 of SEQ ID NO: 586969
cuggcuucuaacgacuaga

SEQ ID NO: 757331 - RNA, 19 nt, Artificial Sequence
  Description of Artificial Sequence: Synthetic oligonucleotide
  Antisense strand to SEQ ID NO: 757330
ucuagucguuagaagccag

SEQ ID NO: 757332 - RNA, 19 nt, Artificial Sequence
  Description of Artificial Sequence: Synthetic oligonucleotide
  Sense strand starting at position 3514 of SEQ ID NO: 586969
guuacaguaggaugguaaa

SEQ ID NO: 757333 - RNA, 19 nt, Artificial Sequence
  Description of Artificial Sequence: Synthetic oligonucleotide
  Antisense strand to SEQ ID NO: 757332
uuuaccauccuacuguaac

SEQ ID NO: 757334 - RNA, 19 nt, Artificial Sequence
  Description of Artificial Sequence: Synthetic oligonucleotide
  Sense strand starting at position 3599 of SEQ ID NO: 586969
gucagacaaucaguuuaau

SEQ ID NO: 757335 - RNA, 19 nt, Artificial Sequence
  Description of Artificial Sequence: Synthetic oligonucleotide
  Antisense strand to SEQ ID NO: 757334
auuaaacugauugucugac

SEQ ID NO: 757336 - RNA, 19 nt, Artificial Sequence
  Description of Artificial Sequence: Synthetic oligonucleotide
  Sense strand starting at position 3607 of SEQ ID NO: 586969
aucaguuuaauggacguau

SEQ ID NO: 757337 - RNA, 19 nt, Artificial Sequence
  Description of Artificial Sequence: Synthetic oligonucleotide
  Antisense strand to SEQ ID NO: 757336
auacguccauuaaacugau

SEQ ID NO: 757338 - RNA, 19 nt, Artificial Sequence
  Description of Artificial Sequence: Synthetic oligonucleotide
  Sense strand starting at position 3906 of SEQ ID NO: 586969
gugucagaagcaggagaua

SEQ ID NO: 757339 - RNA, 19 nt, Artificial Sequence
  Description of Artificial Sequence: Synthetic oligonucleotide
  Antisense strand to SEQ ID NO: 757338
uaucuccugcuucugacac

SEQ ID NO: 757340 - RNA, 19 nt, Artificial Sequence
  Description of Artificial Sequence: Synthetic oligonucleotide
  Sense strand starting at position 3953 of SEQ ID NO: 586969
ggcuaaugagguugaccaa

SEQ ID NO: 757341 - RNA, 19 nt, Artificial Sequence
  Description of Artificial Sequence: Synthetic oligonucleotide
  Antisense strand to SEQ ID NO: 757340
uuggucaaccucauuagcc

SEQ ID NO: 757342 - RNA, 19 nt, Artificial Sequence
  Description of Artificial Sequence: Synthetic oligonucleotide
  Sense strand starting at position 3956 of SEQ ID NO: 586969
uaaugagguugaccaaauu

SEQ ID NO: 757343 - RNA, 19 nt, Artificial Sequence
  Description of Artificial Sequence: Synthetic oligonucleotide
  Antisense strand to SEQ ID NO: 757342
aauuuggucaaccucauua

SEQ ID NO: 757344 - RNA, 19 nt, Artificial Sequence
  Description of Artificial Sequence: Synthetic oligonucleotide
  Sense strand starting at position 773 of SEQ ID NO: 586970
ggcugagaguccuacccaa

SEQ ID NO: 757345 - RNA, 19 nt, Artificial Sequence
  Description of Artificial Sequence: Synthetic oligonucleotide
  Antisense strand to SEQ ID NO: 757344
uuggguaggacucucagcc

SEQ ID NO: 757346 - RNA, 19 nt, Artificial Sequence
  Description of Artificial Sequence: Synthetic oligonucleotide
  Sense strand starting at position 958 of SEQ ID NO: 586970
ggaagcaaguccuauaaua

SEQ ID NO: 757347 - RNA, 19 nt, Artificial Sequence
  Description of Artificial Sequence: Synthetic oligonucleotide
  Antisense strand to SEQ ID NO: 757346
uauuauaggacuugcuucc

SEQ ID NO: 757348 - RNA, 19 nt, Artificial Sequence
  Description of Artificial Sequence: Synthetic oligonucleotide
  Sense strand starting at position 1001 of SEQ ID NO: 586970
cuuuacaacuuuguaaagu

SEQ ID NO: 757349 - RNA, 19 nt, Artificial Sequence
  Description of Artificial Sequence: Synthetic oligonucleotide
  Antisense strand to SEQ ID NO: 757348
acuuuacaaaguuguaaag

SEQ ID NO: 757350 - RNA, 19 nt, Artificial Sequence
  Description of Artificial Sequence: Synthetic oligonucleotide
  Sense strand starting at position 1017 of SEQ ID NO: 586970
aguguuauguuccuaaacu

SEQ ID NO: 757351 - RNA, 19 nt, Artificial Sequence
  Description of Artificial Sequence: Synthetic oligonucleotide
  Antisense strand to SEQ ID NO: 757350
aguuuaggaacauaacacu

SEQ ID NO: 757352 - RNA, 19 nt, Artificial Sequence
  Description of Artificial Sequence: Synthetic oligonucleotide
  Sense strand starting at position 1074 of SEQ ID NO: 586970
gucugaauuccugauguaa

SEQ ID NO: 757353 - RNA, 19 nt, Artificial Sequence
  Description of Artificial Sequence: Synthetic oligonucleotide
  Antisense strand to SEQ ID NO: 757352
uuacaucaggaauucagac

SEQ ID NO: 757354 - RNA, 19 nt, Artificial Sequence
  Description of Artificial Sequence: Synthetic oligonucleotide
  Sense strand starting at position 1076 of SEQ ID NO: 586970
cugaauuccugauguaauu

SEQ ID NO: 757355 - RNA, 19 nt, Artificial Sequence
  Description of Artificial Sequence: Synthetic oligonucleotide
  Antisense strand to SEQ ID NO: 757354
aauuacaucaggaauucag

SEQ ID NO: 757356 - RNA, 19 nt, Artificial Sequence
  Description of Artificial Sequence: Synthetic oligonucleotide
  Sense strand starting at position 1102 of SEQ ID NO: 586970
gcguuauacccucaaagag

SEQ ID NO: 757357 - RNA, 19 nt, Artificial Sequence
  Description of Artificial Sequence: Synthetic oligonucleotide
  Antisense strand to SEQ ID NO: 757356
cucuuugaggguauaacgc

SEQ ID NO: 757358 - RNA, 19 nt, Artificial Sequence
  Description of Artificial Sequence: Synthetic oligonucleotide
  Sense strand starting at position 1160 of SEQ ID NO: 586970
ucagaaagaugcuuugagu

SEQ ID NO: 757359 - RNA, 19 nt, Artificial Sequence
  Description of Artificial Sequence: Synthetic oligonucleotide
  Antisense strand to SEQ ID NO: 757358
acucaaagcaucuuucuga

SEQ ID NO: 757360 - RNA, 19 nt, Artificial Sequence
  Description of Artificial Sequence: Synthetic oligonucleotide
  Sense strand starting at position 1163 of SEQ ID NO: 586970
gaaagaugcuuugagugga

SEQ ID NO: 757361 - RNA, 19 nt, Artificial Sequence
  Description of Artificial Sequence: Synthetic oligonucleotide
  Antisense strand to SEQ ID NO: 757360
uccacucaaagcaucuuuc

SEQ ID NO: 757362 - RNA, 19 nt, Artificial Sequence
  Description of Artificial Sequence: Synthetic oligonucleotide
  Sense strand starting at position 1166 of SEQ ID NO: 586970
agaugcuuugaguggauaa

SEQ ID NO: 757363 - RNA, 19 nt, Artificial Sequence
  Description of Artificial Sequence: Synthetic oligonucleotide
  Antisense strand to SEQ ID NO: 757362
uuauccacucaaagcaucu

SEQ ID NO: 757364 - RNA, 19 nt, Artificial Sequence
  Description of Artificial Sequence: Synthetic oligonucleotide
  Sense strand starting at position 1168 of SEQ ID NO: 586970
augcuuugaguggauaaac

SEQ ID NO: 757365 - RNA, 19 nt, Artificial Sequence
  Description of Artificial Sequence: Synthetic oligonucleotide
  Antisense strand to SEQ ID NO: 757364
guuuauccacucaaagcau

SEQ ID NO: 757366 - RNA, 19 nt, Artificial Sequence
  Description of Artificial Sequence: Synthetic oligonucleotide
  Sense strand starting at position 1427 of SEQ ID NO: 586970
acaacagguuauuaggauu

SEQ ID NO: 757367 - RNA, 19 nt, Artificial Sequence
  Description of Artificial Sequence: Synthetic oligonucleotide
  Antisense strand to SEQ ID NO: 757366
aauccuaauaaccuguugu

SEQ ID NO: 757368 - RNA, 19 nt, Artificial Sequence
  Description of Artificial Sequence: Synthetic oligonucleotide
  Sense strand starting at position 2023 of SEQ ID NO: 586970
cugacucgcccuugauuga

SEQ ID NO: 757369 - RNA, 19 nt, Artificial Sequence
  Description of Artificial Sequence: Synthetic oligonucleotide
  Antisense strand to SEQ ID NO: 757368
ucaaucaagggcgagucag

SEQ ID NO: 757370 - RNA, 19 nt, Artificial Sequence
  Description of Artificial Sequence: Synthetic oligonucleotide
  Sense strand starting at position 2238 of SEQ ID NO: 586970
ggguuauuccuuuagcagc

SEQ ID NO: 757371 - RNA, 19 nt, Artificial Sequence
  Description of Artificial Sequence: Synthetic oligonucleotide
  Antisense strand to SEQ ID NO: 757370
gcugcuaaaggaauaaccc

SEQ ID NO: 757372 - RNA, 19 nt, Artificial Sequence
  Description of Artificial Sequence: Synthetic oligonucleotide
  Sense strand starting at position 2341 of SEQ ID NO: 586970
caaacuuguugucucagga

SEQ ID NO: 757373 - RNA, 19 nt, Artificial Sequence
  Description of Artificial Sequence: Synthetic oligonucleotide
  Antisense strand to SEQ ID NO: 757372
uccugagacaacaaguuug

SEQ ID NO: 757374 - RNA, 19 nt, Artificial Sequence
  Description of Artificial Sequence: Synthetic oligonucleotide
  Sense strand starting at position 2629 of SEQ ID NO: 586970
gcgcugaguggugggagaa

SEQ ID NO: 757375 - RNA, 19 nt, Artificial Sequence
  Description of Artificial Sequence: Synthetic oligonucleotide
  Antisense strand to SEQ ID NO: 757374
uucucccaccacucagcgc

SEQ ID NO: 757376 - RNA, 19 nt, Artificial Sequence
  Description of Artificial Sequence: Synthetic oligonucleotide
  Sense strand starting at position 2630 of SEQ ID NO: 586970
cgcugaguggugggagaaa

SEQ ID NO: 757377 - RNA, 19 nt, Artificial Sequence
  Description of Artificial Sequence: Synthetic oligonucleotide
  Antisense strand to SEQ ID NO: 757376
uuucucccaccacucagcg

SEQ ID NO: 757378 - RNA, 19 nt, Artificial Sequence
  Description of Artificial Sequence: Synthetic oligonucleotide
  Sense strand starting at position 2847 of SEQ ID NO: 586970
uguuguuugccugggccua

SEQ ID NO: 757379 - RNA, 19 nt, Artificial Sequence
  Description of Artificial Sequence: Synthetic oligonucleotide
  Antisense strand to SEQ ID NO: 757378
uaggcccaggcaaacaaca

SEQ ID NO: 757380 - RNA, 19 nt, Artificial Sequence
  Description of Artificial Sequence: Synthetic oligonucleotide
  Sense strand starting at position 3217 of SEQ ID NO: 586970
agugguuggcggaguucua

SEQ ID NO: 757381 - RNA, 19 nt, Artificial Sequence
  Description of Artificial Sequence: Synthetic oligonucleotide
  Antisense strand to SEQ ID NO: 757380
uagaacuccgccaaccacu

SEQ ID NO: 757382 - RNA, 19 nt, Artificial Sequence
  Description of Artificial Sequence: Synthetic oligonucleotide
  Sense strand starting at position 3229 of SEQ ID NO: 586970
aguucuaagccuuaucuga

SEQ ID NO: 757383 - RNA, 19 nt, Artificial Sequence
  Description of Artificial Sequence: Synthetic oligonucleotide
  Antisense strand to SEQ ID NO: 757382
ucagauaaggcuuagaacu

SEQ ID NO: 757384 - RNA, 19 nt, Artificial Sequence
  Description of Artificial Sequence: Synthetic oligonucleotide
  Sense strand starting at position 3236 of SEQ ID NO: 586970
agccuuaucugacaagagu

SEQ ID NO: 757385 - RNA, 19 nt, Artificial Sequence
  Description of Artificial Sequence: Synthetic oligonucleotide
  Antisense strand to SEQ ID NO: 757384
acucuugucagauaaggcu

SEQ ID NO: 757386 - RNA, 19 nt, Artificial Sequence
  Description of Artificial Sequence: Synthetic oligonucleotide
  Sense strand starting at position 3250 of SEQ ID NO: 586970
agagucuccgggcgaagaa

SEQ ID NO: 757387 - RNA, 19 nt, Artificial Sequence
  Description of Artificial Sequence: Synthetic oligonucleotide
  Antisense strand to SEQ ID NO: 757386
uucuucgcccggagacucu

SEQ ID NO: 757388 - RNA, 19 nt, Artificial Sequence
  Description of Artificial Sequence: Synthetic oligonucleotide
  Sense strand starting at position 3336 of SEQ ID NO: 586970
uuaacaucuggcugcacaa

SEQ ID NO: 757389 - RNA, 19 nt, Artificial Sequence
  Description of Artificial Sequence: Synthetic oligonucleotide
  Antisense strand to SEQ ID NO: 757388
uugugcagccagauguuaa

SEQ ID NO: 757390 - RNA, 19 nt, Artificial Sequence
  Description of Artificial Sequence: Synthetic oligonucleotide
  Sense strand starting at position 3403 of SEQ ID NO: 586970
cuacaaaguccugaaguca

SEQ ID NO: 757391 - RNA, 19 nt, Artificial Sequence
  Description of Artificial Sequence: Synthetic oligonucleotide
  Antisense strand to SEQ ID NO: 757390
ugacuucaggacuuuguag

SEQ ID NO: 757392 - RNA, 19 nt, Artificial Sequence
  Description of Artificial Sequence: Synthetic oligonucleotide
  Sense strand starting at position 3419 of SEQ ID NO: 586970
ucaggaugaugccauggaa

SEQ ID NO: 757393 - RNA, 19 nt, Artificial Sequence
  Description of Artificial Sequence: Synthetic oligonucleotide
  Antisense strand to SEQ ID NO: 757392
uuccauggcaucauccuga

SEQ ID NO: 757394 - RNA, 19 nt, Artificial Sequence
  Description of Artificial Sequence: Synthetic oligonucleotide
  Sense strand starting at position 3422 of SEQ ID NO: 586970
ggaugaugccauggaacgu

SEQ ID NO: 757395 - RNA, 19 nt, Artificial Sequence
  Description of Artificial Sequence: Synthetic oligonucleotide
  Antisense strand to SEQ ID NO: 757394
acguuccauggcaucaucc

SEQ ID NO: 757396 - RNA, 19 nt, Artificial Sequence
  Description of Artificial Sequence: Synthetic oligonucleotide
  Sense strand starting at position 3435 of SEQ ID NO: 586970
gaacguaaucagcgccuga

SEQ ID NO: 757397 - RNA, 19 nt, Artificial Sequence
  Description of Artificial Sequence: Synthetic oligonucleotide
  Antisense strand to SEQ ID NO: 757396
ucaggcgcugauuacguuc

SEQ ID NO: 757398 - RNA, 19 nt, Artificial Sequence
  Description of Artificial Sequence: Synthetic oligonucleotide
  Sense strand starting at position 3437 of SEQ ID NO: 586970
acguaaucagcgccugauu

SEQ ID NO: 757399 - RNA, 19 nt, Artificial Sequence
  Description of Artificial Sequence: Synthetic oligonucleotide
  Antisense strand to SEQ ID NO: 757398
aaucaggcgcugauuacgu

SEQ ID NO: 757400 - RNA, 19 nt, Artificial Sequence
  Description of Artificial Sequence: Synthetic oligonucleotide
  Sense strand starting at position 3438 of SEQ ID NO: 586970
cguaaucagcgccugauua

SEQ ID NO: 757401 - RNA, 19 nt, Artificial Sequence
  Description of Artificial Sequence: Synthetic oligonucleotide
  Antisense strand to SEQ ID NO: 757400
uaaucaggcgcugauuacg

SEQ ID NO: 757402 - RNA, 19 nt, Artificial Sequence
  Description of Artificial Sequence: Synthetic oligonucleotide
  Sense strand starting at position 3439 of SEQ ID NO: 586970
guaaucagcgccugauuaa

SEQ ID NO: 757403 - RNA, 19 nt, Artificial Sequence
  Description of Artificial Sequence: Synthetic oligonucleotide
  Antisense strand to SEQ ID NO: 757402
uuaaucaggcgcugauuac

SEQ ID NO: 757404 - RNA, 19 nt, Artificial Sequence
  Description of Artificial Sequence: Synthetic oligonucleotide
  Sense strand starting at position 3452 of SEQ ID NO: 586970
gauuaacuguaccaaaggu

SEQ ID NO: 757405 - RNA, 19 nt, Artificial Sequence
  Description of Artificial Sequence: Synthetic oligonucleotide
  Antisense strand to SEQ ID NO: 757404
accuuugguacaguuaauc

SEQ ID NO: 757406 - RNA, 19 nt, Artificial Sequence
  Description of Artificial Sequence: Synthetic oligonucleotide
  Sense strand starting at position 3528 of SEQ ID NO: 586970
gcucaaagccauugucuca

SEQ ID NO: 757407 - RNA, 19 nt, Artificial Sequence
  Description of Artificial Sequence: Synthetic oligonucleotide
  Antisense strand to SEQ ID NO: 757406
ugagacaauggcuuugagc

SEQ ID NO: 757408 - RNA, 19 nt, Artificial Sequence
  Description of Artificial Sequence: Synthetic oligonucleotide
  Sense strand starting at position 3535 of SEQ ID NO: 586970
gccauugucucacuucuua

SEQ ID NO: 757409 - RNA, 19 nt, Artificial Sequence
  Description of Artificial Sequence: Synthetic oligonucleotide
  Antisense strand to SEQ ID NO: 757408
uaagaagugagacaauggc

SEQ ID NO: 757410 - RNA, 19 nt, Artificial Sequence
  Description of Artificial Sequence: Synthetic oligonucleotide
  Sense strand starting at position 3635 of SEQ ID NO: 586970
gcugaacuugacuggcauu

SEQ ID NO: 757411 - RNA, 19 nt, Artificial Sequence
  Description of Artificial Sequence: Synthetic oligonucleotide
  Antisense strand to SEQ ID NO: 757410
aaugccagucaaguucagc

SEQ ID NO: 757412 - RNA, 19 nt, Artificial Sequence
  Description of Artificial Sequence: Synthetic oligonucleotide
  Sense strand starting at position 3649 of SEQ ID NO: 586970
gcauuuccuuugcuuguua

SEQ ID NO: 757413 - RNA, 19 nt, Artificial Sequence
  Description of Artificial Sequence: Synthetic oligonucleotide
  Antisense strand to SEQ ID NO: 757412
uaacaagcaaaggaaaugc

SEQ ID NO: 757414 - RNA, 19 nt, Artificial Sequence
  Description of Artificial Sequence: Synthetic oligonucleotide
  Sense strand starting at position 3662 of SEQ ID NO: 586970
uuguuaagguaauugcaaa

SEQ ID NO: 757415 - RNA, 19 nt, Artificial Sequence
  Description of Artificial Sequence: Synthetic oligonucleotide
  Antisense strand to SEQ ID NO: 757414
uuugcaauuaccuuaacaa

SEQ ID NO: 757416 - RNA, 19 nt, Artificial Sequence
  Description of Artificial Sequence: Synthetic oligonucleotide
  Sense strand starting at position 3767 of SEQ ID NO: 586970
gccagagaucccugaacaa

SEQ ID NO: 757417 - RNA, 19 nt, Artificial Sequence
  Description of Artificial Sequence: Synthetic oligonucleotide
  Antisense strand to SEQ ID NO: 757416
uuguucagggaucucuggc

SEQ ID NO: 757418 - RNA, 19 nt, Artificial Sequence
  Description of Artificial Sequence: Synthetic oligonucleotide
  Sense strand starting at position 3799 of SEQ ID NO: 586970
caucguguacaauauagaa

SEQ ID NO: 757419 - RNA, 19 nt, Artificial Sequence
  Description of Artificial Sequence: Synthetic oligonucleotide
  Antisense strand to SEQ ID NO: 757418
uucuauauuguacacgaug

SEQ ID NO: 757420 - RNA, 19 nt, Artificial Sequence
  Description of Artificial Sequence: Synthetic oligonucleotide
  Sense strand starting at position 3843 of SEQ ID NO: 586970
cguauauacugucucuauc

SEQ ID NO: 757421 - RNA, 19 nt, Artificial Sequence
  Description of Artificial Sequence: Synthetic oligonucleotide
  Antisense strand to SEQ ID NO: 757420
gauagagacaguauauacg

SEQ ID NO: 757422 - RNA, 19 nt, Artificial Sequence
  Description of Artificial Sequence: Synthetic oligonucleotide
  Sense strand starting at position 3976 of SEQ ID NO: 586970
gucacugacucugaaccau

SEQ ID NO: 757423 - RNA, 19 nt, Artificial Sequence
  Description of Artificial Sequence: Synthetic oligonucleotide
  Antisense strand to SEQ ID NO: 757422
augguucagagucagugac

SEQ ID NO: 757424 - RNA, 19 nt, Artificial Sequence
  Description of Artificial Sequence: Synthetic oligonucleotide
  Sense strand starting at position 95 of SEQ ID NO: 586971
ugacucaggcccgaguaau

SEQ ID NO: 757425 - RNA, 19 nt, Artificial Sequence
  Description of Artificial Sequence: Synthetic oligonucleotide
  Antisense strand to SEQ ID NO: 757424
auuacucgggccugaguca

SEQ ID NO: 757426 - RNA, 19 nt, Artificial Sequence
  Description of Artificial Sequence: Synthetic oligonucleotide
  Sense strand starting at position 784 of SEQ ID NO: 586971
gaagccuuugccgaaggaa

SEQ ID NO: 757427 - RNA, 19 nt, Artificial Sequence
  Description of Artificial Sequence: Synthetic oligonucleotide
  Antisense strand to SEQ ID NO: 757426
uuccuucggcaaaggcuuc

SEQ ID NO: 757428 - RNA, 19 nt, Artificial Sequence
  Description of Artificial Sequence: Synthetic oligonucleotide
  Sense strand starting at position 972 of SEQ ID NO: 586971
ggaagaaaugugcaucagu

SEQ ID NO: 757429 - RNA, 19 nt, Artificial Sequence
  Description of Artificial Sequence: Synthetic oligonucleotide
  Antisense strand to SEQ ID NO: 757428
acugaugcacauuucuucc

SEQ ID NO: 757430 - RNA, 19 nt, Artificial Sequence
  Description of Artificial Sequence: Synthetic oligonucleotide
  Sense strand starting at position 1213 of SEQ ID NO: 586971
cccagacacuucguaacaa

SEQ ID NO: 757431 - RNA, 19 nt, Artificial Sequence
  Description of Artificial Sequence: Synthetic oligonucleotide
  Antisense strand to SEQ ID NO: 757430
uuguuacgaagugucuggg

SEQ ID NO: 757432 - RNA, 19 nt, Artificial Sequence
  Description of Artificial Sequence: Synthetic oligonucleotide
  Sense strand starting at position 1321 of SEQ ID NO: 586971
cccuguaauccggagagcu

SEQ ID NO: 757433 - RNA, 19 nt, Artificial Sequence
  Description of Artificial Sequence: Synthetic oligonucleotide
  Antisense strand to SEQ ID NO: 757432
agcucuccggauuacaggg

SEQ ID NO: 757434 - RNA, 19 nt, Artificial Sequence
  Description of Artificial Sequence: Synthetic oligonucleotide
  Sense strand starting at position 1323 of SEQ ID NO: 586971
cuguaauccggagagcuuu

SEQ ID NO: 757435 - RNA, 19 nt, Artificial Sequence
  Description of Artificial Sequence: Synthetic oligonucleotide
  Antisense strand to SEQ ID NO: 757434
aaagcucuccggauuacag

SEQ ID NO: 757436 - RNA, 19 nt, Artificial Sequence
  Description of Artificial Sequence: Synthetic oligonucleotide
  Sense strand starting at position 1458 of SEQ ID NO: 586971
gcauaucuacaguaguaaa

SEQ ID NO: 757437 - RNA, 19 nt, Artificial Sequence
  Description of Artificial Sequence: Synthetic oligonucleotide
  Antisense strand to SEQ ID NO: 757436
uuuacuacuguagauaugc

SEQ ID NO: 757438 - RNA, 19 nt, Artificial Sequence
  Description of Artificial Sequence: Synthetic oligonucleotide
  Sense strand starting at position 1478 of SEQ ID NO: 586971
acgagacgaguucaacgua

SEQ ID NO: 757439 - RNA, 19 nt, Artificial Sequence
  Description of Artificial Sequence: Synthetic oligonucleotide
  Antisense strand to SEQ ID NO: 757438
uacguugaacucgucucgu

SEQ ID NO: 757440 - RNA, 19 nt, Artificial Sequence
  Description of Artificial Sequence: Synthetic oligonucleotide
  Sense strand starting at position 1654 of SEQ ID NO: 586971
gcgcgguggcuugucuaaa

SEQ ID NO: 757441 - RNA, 19 nt, Artificial Sequence
  Description of Artificial Sequence: Synthetic oligonucleotide
  Antisense strand to SEQ ID NO: 757440
uuuagacaagccaccgcgc

SEQ ID NO: 757442 - RNA, 19 nt, Artificial Sequence
  Description of Artificial Sequence: Synthetic oligonucleotide
  Sense strand starting at position 1828 of SEQ ID NO: 586971
cccuccaaucggcaauaaa

SEQ ID NO: 757443 - RNA, 19 nt, Artificial Sequence
  Description of Artificial Sequence: Synthetic oligonucleotide
  Antisense strand to SEQ ID NO: 757442
uuuauugccgauuggaggg

SEQ ID NO: 757444 - RNA, 19 nt, Artificial Sequence
  Description of Artificial Sequence: Synthetic oligonucleotide
  Sense strand starting at position 1898 of SEQ ID NO: 586971
ugaaguugccaucacacaa

SEQ ID NO: 757445 - RNA, 19 nt, Artificial Sequence
  Description of Artificial Sequence: Synthetic oligonucleotide
  Antisense strand to SEQ ID NO: 757444
uugugugauggcaacuuca

SEQ ID NO: 757446 - RNA, 19 nt, Artificial Sequence
  Description of Artificial Sequence: Synthetic oligonucleotide
  Sense strand starting at position 1977 of SEQ ID NO: 586971
uuuagaggugugcaauaca

SEQ ID NO: 757447 - RNA, 19 nt, Artificial Sequence
  Description of Artificial Sequence: Synthetic oligonucleotide
  Antisense strand to SEQ ID NO: 757446
uguauugcacaccucuaaa

SEQ ID NO: 757448 - RNA, 19 nt, Artificial Sequence
  Description of Artificial Sequence: Synthetic oligonucleotide
  Sense strand starting at position 1980 of SEQ ID NO: 586971
agaggugugcaauacaaug

SEQ ID NO: 757449 - RNA, 19 nt, Artificial Sequence
  Description of Artificial Sequence: Synthetic oligonucleotide
  Antisense strand to SEQ ID NO: 757448
cauuguauugcacaccucu

SEQ ID NO: 757450 - RNA, 19 nt, Artificial Sequence
  Description of Artificial Sequence: Synthetic oligonucleotide
  Sense strand starting at position 2365 of SEQ ID NO: 586971
agggaggguugugugauaa

SEQ ID NO: 757451 - RNA, 19 nt, Artificial Sequence
  Description of Artificial Sequence: Synthetic oligonucleotide
  Antisense strand to SEQ ID NO: 757450
uuaucacacaacccucccu

SEQ ID NO: 757452 - RNA, 19 nt, Artificial Sequence
  Description of Artificial Sequence: Synthetic oligonucleotide
  Sense strand starting at position 2366 of SEQ ID NO: 586971
gggaggguugugugauaag

SEQ ID NO: 757453 - RNA, 19 nt, Artificial Sequence
  Description of Artificial Sequence: Synthetic oligonucleotide
  Antisense strand to SEQ ID NO: 757452
cuuaucacacaacccuccc

SEQ ID NO: 757454 - RNA, 19 nt, Artificial Sequence
  Description of Artificial Sequence: Synthetic oligonucleotide
  Sense strand starting at position 2455 of SEQ ID NO: 586971
gguaguguaacugacaaac

SEQ ID NO: 757455 - RNA, 19 nt, Artificial Sequence
  Description of Artificial Sequence: Synthetic oligonucleotide
  Antisense strand to SEQ ID NO: 757454
guuugucaguuacacuacc

SEQ ID NO: 757456 - RNA, 19 nt, Artificial Sequence
  Description of Artificial Sequence: Synthetic oligonucleotide
  Sense strand starting at position 2550 of SEQ ID NO: 586971
uguguauuugugcgacaga

SEQ ID NO: 757457 - RNA, 19 nt, Artificial Sequence
  Description of Artificial Sequence: Synthetic oligonucleotide
  Antisense strand to SEQ ID NO: 757456
ucugucgcacaaauacaca

SEQ ID NO: 757458 - RNA, 19 nt, Artificial Sequence
  Description of Artificial Sequence: Synthetic oligonucleotide
  Sense strand starting at position 2705 of SEQ ID NO: 586971
gauggaggcugagugaaua

SEQ ID NO: 757459 - RNA, 19 nt, Artificial Sequence
  Description of Artificial Sequence: Synthetic oligonucleotide
  Antisense strand to SEQ ID NO: 757458
uauucacucagccuccauc

SEQ ID NO: 757460 - RNA, 19 nt, Artificial Sequence
  Description of Artificial Sequence: Synthetic oligonucleotide
  Sense strand starting at position 3011 of SEQ ID NO: 586971
guggaauucugcuuuagaa

SEQ ID NO: 757461 - RNA, 19 nt, Artificial Sequence
  Description of Artificial Sequence: Synthetic oligonucleotide
  Antisense strand to SEQ ID NO: 757460
uucuaaagcagaauuccac

SEQ ID NO: 757462 - RNA, 19 nt, Artificial Sequence
  Description of Artificial Sequence: Synthetic oligonucleotide
  Sense strand starting at position 3013 of SEQ ID NO: 586971
ggaauucugcuuuagaagu

SEQ ID NO: 757463 - RNA, 19 nt, Artificial Sequence
  Description of Artificial Sequence: Synthetic oligonucleotide
  Antisense strand to SEQ ID NO: 757462
acuucuaaagcagaauucc

SEQ ID NO: 757464 - RNA, 19 nt, Artificial Sequence
  Description of Artificial Sequence: Synthetic oligonucleotide
  Sense strand starting at position 3068 of SEQ ID NO: 586971
cgugguguugaguaaauuu

SEQ ID NO: 757465 - RNA, 19 nt, Artificial Sequence
  Description of Artificial Sequence: Synthetic oligonucleotide
  Antisense strand to SEQ ID NO: 757464
aaauuuacucaacaccacg

SEQ ID NO: 757466 - RNA, 19 nt, Artificial Sequence
  Description of Artificial Sequence: Synthetic oligonucleotide
  Sense strand starting at position 3215 of SEQ ID NO: 586971
gaaucaggacuuugaucga

SEQ ID NO: 757467 - RNA, 19 nt, Artificial Sequence
  Description of Artificial Sequence: Synthetic oligonucleotide
  Antisense strand to SEQ ID NO: 757466
ucgaucaaaguccugauuc

SEQ ID NO: 757468 - RNA, 19 nt, Artificial Sequence
  Description of Artificial Sequence: Synthetic oligonucleotide
  Sense strand starting at position 3218 of SEQ ID NO: 586971
ucaggacuuugaucgaaau

SEQ ID NO: 757469 - RNA, 19 nt, Artificial Sequence
  Description of Artificial Sequence: Synthetic oligonucleotide
  Antisense strand to SEQ ID NO: 757468
auuucgaucaaaguccuga

SEQ ID NO: 757470 - RNA, 19 nt, Artificial Sequence
  Description of Artificial Sequence: Synthetic oligonucleotide
  Sense strand starting at position 3219 of SEQ ID NO: 586971
caggacuuugaucgaaaua

SEQ ID NO: 757471 - RNA, 19 nt, Artificial Sequence
  Description of Artificial Sequence: Synthetic oligonucleotide
  Antisense strand to SEQ ID NO: 757470
uauuucgaucaaaguccug

SEQ ID NO: 757472 - RNA, 19 nt, Artificial Sequence
  Description of Artificial Sequence: Synthetic oligonucleotide
  Sense strand starting at position 3230 of SEQ ID NO: 586971
ucgaaauauauggguucua

SEQ ID NO: 757473 - RNA, 19 nt, Artificial Sequence
  Description of Artificial Sequence: Synthetic oligonucleotide
  Antisense strand to SEQ ID NO: 757472
uagaacccauauauuucga

SEQ ID NO: 757474 - RNA, 19 nt, Artificial Sequence
  Description of Artificial Sequence: Synthetic oligonucleotide
  Sense strand starting at position 3231 of SEQ ID NO: 586971
cgaaauauauggguucuau

SEQ ID NO: 757475 - RNA, 19 nt, Artificial Sequence
  Description of Artificial Sequence: Synthetic oligonucleotide
  Antisense strand to SEQ ID NO: 757474
auagaacccauauauuucg

SEQ ID NO: 757476 - RNA, 19 nt, Artificial Sequence
  Description of Artificial Sequence: Synthetic oligonucleotide
  Sense strand starting at position 3274 of SEQ ID NO: 586971
uugacaaaucuuggacauu

SEQ ID NO: 757477 - RNA, 19 nt, Artificial Sequence
  Description of Artificial Sequence: Synthetic oligonucleotide
  Antisense strand to SEQ ID NO: 757476
aauguccaagauuugucaa

SEQ ID NO: 757478 - RNA, 19 nt, Artificial Sequence
  Description of Artificial Sequence: Synthetic oligonucleotide
  Sense strand starting at position 3275 of SEQ ID NO: 586971
ugacaaaucuuggacauuu

SEQ ID NO: 757479 - RNA, 19 nt, Artificial Sequence
  Description of Artificial Sequence: Synthetic oligonucleotide
  Antisense strand to SEQ ID NO: 757478
aaauguccaagauuuguca

SEQ ID NO: 757480 - RNA, 19 nt, Artificial Sequence
  Description of Artificial Sequence: Synthetic oligonucleotide
  Sense strand starting at position 3287 of SEQ ID NO: 586971
gacauuuauccaggcguca

SEQ ID NO: 757481 - RNA, 19 nt, Artificial Sequence
  Description of Artificial Sequence: Synthetic oligonucleotide
  Antisense strand to SEQ ID NO: 757480
ugacgccuggauaaauguc

SEQ ID NO: 757482 - RNA, 19 nt, Artificial Sequence
  Description of Artificial Sequence: Synthetic oligonucleotide
  Sense strand starting at position 3314 of SEQ ID NO: 586971
uggcgauugggccagagau

SEQ ID NO: 757483 - RNA, 19 nt, Artificial Sequence
  Description of Artificial Sequence: Synthetic oligonucleotide
  Antisense strand to SEQ ID NO: 757482
aucucuggcccaaucgcca

SEQ ID NO: 757484 - RNA, 19 nt, Artificial Sequence
  Description of Artificial Sequence: Synthetic oligonucleotide
  Sense strand starting at position 3316 of SEQ ID NO: 586971
gcgauugggccagagaucu

SEQ ID NO: 757485 - RNA, 19 nt, Artificial Sequence
  Description of Artificial Sequence: Synthetic oligonucleotide
  Antisense strand to SEQ ID NO: 757484
agaucucuggcccaaucgc

SEQ ID NO: 757486 - RNA, 19 nt, Artificial Sequence
  Description of Artificial Sequence: Synthetic oligonucleotide
  Sense strand starting at position 3326 of SEQ ID NO: 586971
cagagaucugucuaugagu

SEQ ID NO: 757487 - RNA, 19 nt, Artificial Sequence
  Description of Artificial Sequence: Synthetic oligonucleotide
  Antisense strand to SEQ ID NO: 757486
acucauagacagaucucug

SEQ ID NO: 757488 - RNA, 19 nt, Artificial Sequence
  Description of Artificial Sequence: Synthetic oligonucleotide
  Sense strand starting at position 3401 of SEQ ID NO: 586971
cuugccauuuguguuauua

SEQ ID NO: 757489 - RNA, 19 nt, Artificial Sequence
  Description of Artificial Sequence: Synthetic oligonucleotide
  Antisense strand to SEQ ID NO: 757488
uaauaacacaaauggcaag

SEQ ID NO: 757490 - RNA, 19 nt, Artificial Sequence
  Description of Artificial Sequence: Synthetic oligonucleotide
  Sense strand starting at position 3405 of SEQ ID NO: 586971
ccauuuguguuauuaguug

SEQ ID NO: 757491 - RNA, 19 nt, Artificial Sequence
  Description of Artificial Sequence: Synthetic oligonucleotide
  Antisense strand to SEQ ID NO: 757490
caacuaauaacacaaaugg

SEQ ID NO: 757492 - RNA, 19 nt, Artificial Sequence
  Description of Artificial Sequence: Synthetic oligonucleotide
  Sense strand starting at position 3703 of SEQ ID NO: 586971
agcuucuagggaugucaaa

SEQ ID NO: 757493 - RNA, 19 nt, Artificial Sequence
  Description of Artificial Sequence: Synthetic oligonucleotide
  Antisense strand to SEQ ID NO: 757492
uuugacaucccuagaagcu

SEQ ID NO: 757494 - RNA, 19 nt, Artificial Sequence
  Description of Artificial Sequence: Synthetic oligonucleotide
  Sense strand starting at position 3756 of SEQ ID NO: 586971
aguuguaucguguaaauuu

SEQ ID NO: 757495 - RNA, 19 nt, Artificial Sequence
  Description of Artificial Sequence: Synthetic oligonucleotide
  Antisense strand to SEQ ID NO: 757494
aaauuuacacgauacaacu

SEQ ID NO: 757496 - RNA, 19 nt, Artificial Sequence
  Description of Artificial Sequence: Synthetic oligonucleotide
  Sense strand starting at position 3857 of SEQ ID NO: 586971
uguacaucauaucuauuga

SEQ ID NO: 757497 - RNA, 19 nt, Artificial Sequence
  Description of Artificial Sequence: Synthetic oligonucleotide
  Antisense strand to SEQ ID NO: 757496
ucaauagauaugauguaca

SEQ ID NO: 757498 - RNA, 19 nt, Artificial Sequence
  Description of Artificial Sequence: Synthetic oligonucleotide
  Sense strand starting at position 3909 of SEQ ID NO: 586971
guaagugugaaguaaauua

SEQ ID NO: 757499 - RNA, 19 nt, Artificial Sequence
  Description of Artificial Sequence: Synthetic oligonucleotide
  Antisense strand to SEQ ID NO: 757498
uaauuuacuucacacuuac

SEQ ID NO: 757500 - RNA, 19 nt, Artificial Sequence
  Description of Artificial Sequence: Synthetic oligonucleotide
  Sense strand starting at position 3949 of SEQ ID NO: 586971
agggcugacgcuuaccaua

SEQ ID NO: 757501 - RNA, 19 nt, Artificial Sequence
  Description of Artificial Sequence: Synthetic oligonucleotide
  Antisense strand to SEQ ID NO: 757500
uaugguaagcgucagcccu

SEQ ID NO: 757502 - RNA, 19 nt, Artificial Sequence
  Description of Artificial Sequence: Synthetic oligonucleotide
  Sense strand starting at position 3954 of SEQ ID NO: 586971
ugacgcuuaccauaaaugu

SEQ ID NO: 757503 - RNA, 19 nt, Artificial Sequence
  Description of Artificial Sequence: Synthetic oligonucleotide
  Antisense strand to SEQ ID NO: 757502
acauuuaugguaagcguca

SEQ ID NO: 757504 - RNA, 19 nt, Artificial Sequence
  Description of Artificial Sequence: Synthetic oligonucleotide
  Sense strand starting at position 136 of SEQ ID NO: 586972
aucugacuggcauaauauu

SEQ ID NO: 757505 - RNA, 19 nt, Artificial Sequence
  Description of Artificial Sequence: Synthetic oligonucleotide
  Antisense strand to SEQ ID NO: 757504
aauauuaugccagucagau

SEQ ID NO: 757506 - RNA, 19 nt, Artificial Sequence
  Description of Artificial Sequence: Synthetic oligonucleotide
  Sense strand starting at position 685 of SEQ ID NO: 586972
gggccauaaucacucauau

SEQ ID NO: 757507 - RNA, 19 nt, Artificial Sequence
  Description of Artificial Sequence: Synthetic oligonucleotide
  Antisense strand to SEQ ID NO: 757506
auaugagugauuauggccc

SEQ ID NO: 757508 - RNA, 19 nt, Artificial Sequence
  Description of Artificial Sequence: Synthetic oligonucleotide
  Sense strand starting at position 760 of SEQ ID NO: 586972
agguauguccuauacuaua

SEQ ID NO: 757509 - RNA, 19 nt, Artificial Sequence
  Description of Artificial Sequence: Synthetic oligonucleotide
  Antisense strand to SEQ ID NO: 757508
uauaguauaggacauaccu

SEQ ID NO: 757510 - RNA, 19 nt, Artificial Sequence
  Description of Artificial Sequence: Synthetic oligonucleotide
  Sense strand starting at position 919 of SEQ ID NO: 586972
auuugagggccucgguauu

SEQ ID NO: 757511 - RNA, 19 nt, Artificial Sequence
  Description of Artificial Sequence: Synthetic oligonucleotide
  Antisense strand to SEQ ID NO: 757510
aauaccgaggcccucaaau

SEQ ID NO: 757512 - RNA, 19 nt, Artificial Sequence
  Description of Artificial Sequence: Synthetic oligonucleotide
  Sense strand starting at position 972 of SEQ ID NO: 586972
aggguaugauaauccacau

SEQ ID NO: 757513 - RNA, 19 nt, Artificial Sequence
  Description of Artificial Sequence: Synthetic oligonucleotide
  Antisense strand to SEQ ID NO: 757512
auguggauuaucauacccu

SEQ ID NO: 757514 - RNA, 19 nt, Artificial Sequence
  Description of Artificial Sequence: Synthetic oligonucleotide
  Sense strand starting at position 1036 of SEQ ID NO: 586972
ucauccagugcucaguaaa

SEQ ID NO: 757515 - RNA, 19 nt, Artificial Sequence
  Description of Artificial Sequence: Synthetic oligonucleotide
  Antisense strand to SEQ ID NO: 757514
uuuacugagcacuggauga

SEQ ID NO: 757516 - RNA, 19 nt, Artificial Sequence
  Description of Artificial Sequence: Synthetic oligonucleotide
  Sense strand starting at position 1089 of SEQ ID NO: 586972
uaacuaccuguggaguuaa

SEQ ID NO: 757517 - RNA, 19 nt, Artificial Sequence
  Description of Artificial Sequence: Synthetic oligonucleotide
  Antisense strand to SEQ ID NO: 757516
uuaacuccacagguaguua

SEQ ID NO: 757518 - RNA, 19 nt, Artificial Sequence
  Description of Artificial Sequence: Synthetic oligonucleotide
  Sense strand starting at position 1603 of SEQ ID NO: 586972
gaaauuaacgacugagguu

SEQ ID NO: 757519 - RNA, 19 nt, Artificial Sequence
  Description of Artificial Sequence: Synthetic oligonucleotide
  Antisense strand to SEQ ID NO: 757518
aaccucagucguuaauuuc

SEQ ID NO: 757520 - RNA, 19 nt, Artificial Sequence
  Description of Artificial Sequence: Synthetic oligonucleotide
  Sense strand starting at position 1612 of SEQ ID NO: 586972
gacugagguuauuccucau

SEQ ID NO: 757521 - RNA, 19 nt, Artificial Sequence
  Description of Artificial Sequence: Synthetic oligonucleotide
  Antisense strand to SEQ ID NO: 757520
augaggaauaaccucaguc

SEQ ID NO: 757522 - RNA, 19 nt, Artificial Sequence
  Description of Artificial Sequence: Synthetic oligonucleotide
  Sense strand starting at position 2214 of SEQ ID NO: 586972
ggagauuacuugucucaau

SEQ ID NO: 757523 - RNA, 19 nt, Artificial Sequence
  Description of Artificial Sequence: Synthetic oligonucleotide
  Antisense strand to SEQ ID NO: 757522
auugagacaaguaaucucc

SEQ ID NO: 757524 - RNA, 19 nt, Artificial Sequence
  Description of Artificial Sequence: Synthetic oligonucleotide
  Sense strand starting at position 2394 of SEQ ID NO: 586972
ugcuuaugucaacaucuga

SEQ ID NO: 757525 - RNA, 19 nt, Artificial Sequence
  Description of Artificial Sequence: Synthetic oligonucleotide
  Antisense strand to SEQ ID NO: 757524
ucagauguugacauaagca

SEQ ID NO: 757526 - RNA, 19 nt, Artificial Sequence
  Description of Artificial Sequence: Synthetic oligonucleotide
  Sense strand starting at position 2498 of SEQ ID NO: 586972
uaugguauccauggucaga

SEQ ID NO: 757527 - RNA, 19 nt, Artificial Sequence
  Description of Artificial Sequence: Synthetic oligonucleotide
  Antisense strand to SEQ ID NO: 757526
ucugaccauggauaccaua

SEQ ID NO: 757528 - RNA, 19 nt, Artificial Sequence
  Description of Artificial Sequence: Synthetic oligonucleotide
  Sense strand starting at position 2500 of SEQ ID NO: 586972
ugguauccauggucagaaa

SEQ ID NO: 757529 - RNA, 19 nt, Artificial Sequence
  Description of Artificial Sequence: Synthetic oligonucleotide
  Antisense strand to SEQ ID NO: 757528
uuucugaccauggauacca

SEQ ID NO: 757530 - RNA, 19 nt, Artificial Sequence
  Description of Artificial Sequence: Synthetic oligonucleotide
  Sense strand starting at position 2547 of SEQ ID NO: 586972
ugaguucacugggcaagga

SEQ ID NO: 757531 - RNA, 19 nt, Artificial Sequence
  Description of Artificial Sequence: Synthetic oligonucleotide
  Antisense strand to SEQ ID NO: 757530
uccuugcccagugaacuca

SEQ ID NO: 757532 - RNA, 19 nt, Artificial Sequence
  Description of Artificial Sequence: Synthetic oligonucleotide
  Sense strand starting at position 2575 of SEQ ID NO: 586972
auguaagcucaagaauugu

SEQ ID NO: 757533 - RNA, 19 nt, Artificial Sequence
  Description of Artificial Sequence: Synthetic oligonucleotide
  Antisense strand to SEQ ID NO: 757532
acaauucuugagcuuacau

SEQ ID NO: 757534 - RNA, 19 nt, Artificial Sequence
  Description of Artificial Sequence: Synthetic oligonucleotide
  Sense strand starting at position 2704 of SEQ ID NO: 586972
guaguuugacuccauacac

SEQ ID NO: 757535 - RNA, 19 nt, Artificial Sequence
  Description of Artificial Sequence: Synthetic oligonucleotide
  Antisense strand to SEQ ID NO: 757534
guguauggagucaaacuac

SEQ ID NO: 757536 - RNA, 19 nt, Artificial Sequence
  Description of Artificial Sequence: Synthetic oligonucleotide
  Sense strand starting at position 2734 of SEQ ID NO: 586972
acccaucauggaggucaua

SEQ ID NO: 757537 - RNA, 19 nt, Artificial Sequence
  Description of Artificial Sequence: Synthetic oligonucleotide
  Antisense strand to SEQ ID NO: 757536
uaugaccuccaugaugggu

SEQ ID NO: 757538 - RNA, 19 nt, Artificial Sequence
  Description of Artificial Sequence: Synthetic oligonucleotide
  Sense strand starting at position 2791 of SEQ ID NO: 586972
aggacaaauuggcugacuu

SEQ ID NO: 757539 - RNA, 19 nt, Artificial Sequence
  Description of Artificial Sequence: Synthetic oligonucleotide
  Antisense strand to SEQ ID NO: 757538
aagucagccaauuuguccu

SEQ ID NO: 757540 - RNA, 19 nt, Artificial Sequence
  Description of Artificial Sequence: Synthetic oligonucleotide
  Sense strand starting at position 2792 of SEQ ID NO: 586972
ggacaaauuggcugacuuc

SEQ ID NO: 757541 - RNA, 19 nt, Artificial Sequence
  Description of Artificial Sequence: Synthetic oligonucleotide
  Antisense strand to SEQ ID NO: 757540
gaagucagccaauuugucc

SEQ ID NO: 757542 - RNA, 19 nt, Artificial Sequence
  Description of Artificial Sequence: Synthetic oligonucleotide
  Sense strand starting at position 2801 of SEQ ID NO: 586972
ggcugacuucuuggaauug

SEQ ID NO: 757543 - RNA, 19 nt, Artificial Sequence
  Description of Artificial Sequence: Synthetic oligonucleotide
  Antisense strand to SEQ ID NO: 757542
caauuccaagaagucagcc

SEQ ID NO: 757544 - RNA, 19 nt, Artificial Sequence
  Description of Artificial Sequence: Synthetic oligonucleotide
  Sense strand starting at position 2899 of SEQ ID NO: 586972
cuaccucacgaacgagaaa

SEQ ID NO: 757545 - RNA, 19 nt, Artificial Sequence
  Description of Artificial Sequence: Synthetic oligonucleotide
  Antisense strand to SEQ ID NO: 757544
uuucucguucgugagguag

SEQ ID NO: 757546 - RNA, 19 nt, Artificial Sequence
  Description of Artificial Sequence: Synthetic oligonucleotide
  Sense strand starting at position 2912 of SEQ ID NO: 586972
gagaaaugccucugacugg

SEQ ID NO: 757547 - RNA, 19 nt, Artificial Sequence
  Description of Artificial Sequence: Synthetic oligonucleotide
  Antisense strand to SEQ ID NO: 757546
ccagucagaggcauuucuc

SEQ ID NO: 757548 - RNA, 19 nt, Artificial Sequence
  Description of Artificial Sequence: Synthetic oligonucleotide
  Sense strand starting at position 3352 of SEQ ID NO: 586972
uuucuauccggugacaaua

SEQ ID NO: 757549 - RNA, 19 nt, Artificial Sequence
  Description of Artificial Sequence: Synthetic oligonucleotide
  Antisense strand to SEQ ID NO: 757548
uauugucaccggauagaaa

SEQ ID NO: 757550 - RNA, 19 nt, Artificial Sequence
  Description of Artificial Sequence: Synthetic oligonucleotide
  Sense strand starting at position 3361 of SEQ ID NO: 586972
ggugacaauaagugauucu

SEQ ID NO: 757551 - RNA, 19 nt, Artificial Sequence
  Description of Artificial Sequence: Synthetic oligonucleotide
  Antisense strand to SEQ ID NO: 757550
agaaucacuuauugucacc

SEQ ID NO: 757552 - RNA, 19 nt, Artificial Sequence
  Description of Artificial Sequence: Synthetic oligonucleotide
  Sense strand starting at position 3491 of SEQ ID NO: 586972
gcuccuuagcaccagaaau

SEQ ID NO: 757553 - RNA, 19 nt, Artificial Sequence
  Description of Artificial Sequence: Synthetic oligonucleotide
  Antisense strand to SEQ ID NO: 757552
auuucuggugcuaaggagc

SEQ ID NO: 757554 - RNA, 19 nt, Artificial Sequence
  Description of Artificial Sequence: Synthetic oligonucleotide
  Sense strand starting at position 3533 of SEQ ID NO: 586972
uggauuaacuuggucaggu

SEQ ID NO: 757555 - RNA, 19 nt, Artificial Sequence
  Description of Artificial Sequence: Synthetic oligonucleotide
  Antisense strand to SEQ ID NO: 757554
accugaccaaguuaaucca

SEQ ID NO: 757556 - RNA, 19 nt, Artificial Sequence
  Description of Artificial Sequence: Synthetic oligonucleotide
  Sense strand starting at position 3534 of SEQ ID NO: 586972
ggauuaacuuggucaggug

SEQ ID NO: 757557 - RNA, 19 nt, Artificial Sequence
  Description of Artificial Sequence: Synthetic oligonucleotide
  Antisense strand to SEQ ID NO: 757556
caccugaccaaguuaaucc

SEQ ID NO: 757558 - RNA, 19 nt, Artificial Sequence
  Description of Artificial Sequence: Synthetic oligonucleotide
  Sense strand starting at position 3535 of SEQ ID NO: 586972
gauuaacuuggucagguga

SEQ ID NO: 757559 - RNA, 19 nt, Artificial Sequence
  Description of Artificial Sequence: Synthetic oligonucleotide
  Antisense strand to SEQ ID NO: 757558
ucaccugaccaaguuaauc

SEQ ID NO: 757560 - RNA, 19 nt, Artificial Sequence
  Description of Artificial Sequence: Synthetic oligonucleotide
  Sense strand starting at position 3713 of SEQ ID NO: 586972
uugggaauuacagguucca

SEQ ID NO: 757561 - RNA, 19 nt, Artificial Sequence
  Description of Artificial Sequence: Synthetic oligonucleotide
  Antisense strand to SEQ ID NO: 757560
uggaaccuguaauucccaa

SEQ ID NO: 757562 - RNA, 19 nt, Artificial Sequence
  Description of Artificial Sequence: Synthetic oligonucleotide
  Sense strand starting at position 3764 of SEQ ID NO: 586972
ucuugugugguugaugaaa

SEQ ID NO: 757563 - RNA, 19 nt, Artificial Sequence
  Description of Artificial Sequence: Synthetic oligonucleotide
  Antisense strand to SEQ ID NO: 757562
uuucaucaaccacacaaga

SEQ ID NO: 757564 - RNA, 19 nt, Artificial Sequence
  Description of Artificial Sequence: Synthetic oligonucleotide
  Sense strand starting at position 3792 of SEQ ID NO: 586972
cuuugugaaucaguuggga

SEQ ID NO: 757565 - RNA, 19 nt, Artificial Sequence
  Description of Artificial Sequence: Synthetic oligonucleotide
  Antisense strand to SEQ ID NO: 757564
ucccaacugauucacaaag

SEQ ID NO: 757566 - RNA, 19 nt, Artificial Sequence
  Description of Artificial Sequence: Synthetic oligonucleotide
  Sense strand starting at position 3794 of SEQ ID NO: 586972
uugugaaucaguugggaca

SEQ ID NO: 757567 - RNA, 19 nt, Artificial Sequence
  Description of Artificial Sequence: Synthetic oligonucleotide
  Antisense strand to SEQ ID NO: 757566
ugucccaacugauucacaa

SEQ ID NO: 757568 - RNA, 19 nt, Artificial Sequence
  Description of Artificial Sequence: Synthetic oligonucleotide
  Sense strand starting at position 3795 of SEQ ID NO: 586972
ugugaaucaguugggacaa

SEQ ID NO: 757569 - RNA, 19 nt, Artificial Sequence
  Description of Artificial Sequence: Synthetic oligonucleotide
  Antisense strand to SEQ ID NO: 757568
uugucccaacugauucaca

SEQ ID NO: 757570 - RNA, 19 nt, Artificial Sequence
  Description of Artificial Sequence: Synthetic oligonucleotide
  Sense strand starting at position 3808 of SEQ ID NO: 586972
ggacaaacguuaucugauu

SEQ ID NO: 757571 - RNA, 19 nt, Artificial Sequence
  Description of Artificial Sequence: Synthetic oligonucleotide
  Antisense strand to SEQ ID NO: 757570
aaucagauaacguuugucc

SEQ ID NO: 757572 - RNA, 19 nt, Artificial Sequence
  Description of Artificial Sequence: Synthetic oligonucleotide
  Sense strand starting at position 3884 of SEQ ID NO: 586972
ugauuagacugaccuauuc

SEQ ID NO: 757573 - RNA, 19 nt, Artificial Sequence
  Description of Artificial Sequence: Synthetic oligonucleotide
  Antisense strand to SEQ ID NO: 757572
gaauaggucagucuaauca

SEQ ID NO: 757574 - RNA, 19 nt, Artificial Sequence
  Description of Artificial Sequence: Synthetic oligonucleotide
  Sense strand starting at position 3909 of SEQ ID NO: 586972
uugggagauugguuuaaug

SEQ ID NO: 757575 - RNA, 19 nt, Artificial Sequence
  Description of Artificial Sequence: Synthetic oligonucleotide
  Antisense strand to SEQ ID NO: 757574
cauuaaaccaaucucccaa

SEQ ID NO: 757576 - RNA, 19 nt, Artificial Sequence
  Description of Artificial Sequence: Synthetic oligonucleotide
  Sense strand starting at position 3912 of SEQ ID NO: 586972
ggagauugguuuaauggga

SEQ ID NO: 757577 - RNA, 19 nt, Artificial Sequence
  Description of Artificial Sequence: Synthetic oligonucleotide
  Antisense strand to SEQ ID NO: 757576
ucccauuaaaccaaucucc

SEQ ID NO: 757578 - RNA, 19 nt, Artificial Sequence
  Description of Artificial Sequence: Synthetic oligonucleotide
  Sense strand starting at position 3916 of SEQ ID NO: 586972
auugguuuaaugggauaug

SEQ ID NO: 757579 - RNA, 19 nt, Artificial Sequence
  Description of Artificial Sequence: Synthetic oligonucleotide
  Antisense strand to SEQ ID NO: 757578
cauaucccauuaaaccaau

SEQ ID NO: 757580 - RNA, 19 nt, Artificial Sequence
  Description of Artificial Sequence: Synthetic oligonucleotide
  Sense strand starting at position 3934 of SEQ ID NO: 586972
ggagaaaugugcuuagauu

SEQ ID NO: 757581 - RNA, 19 nt, Artificial Sequence
  Description of Artificial Sequence: Synthetic oligonucleotide
  Antisense strand to SEQ ID NO: 757580
aaucuaagcacauuucucc

SEQ ID NO: 757582 - RNA, 19 nt, Artificial Sequence
  Description of Artificial Sequence: Synthetic oligonucleotide
  Sense strand starting at position 3942 of SEQ ID NO: 586972
gugcuuagauuugcacuuu

SEQ ID NO: 757583 - RNA, 19 nt, Artificial Sequence
  Description of Artificial Sequence: Synthetic oligonucleotide
  Antisense strand to SEQ ID NO: 757582
aaagugcaaaucuaagcac

SEQ ID NO: 757584 - RNA, 19 nt, Artificial Sequence
  Description of Artificial Sequence: Synthetic oligonucleotide
  Sense strand starting at position 154 of SEQ ID NO: 586973
uaaacagggugcucuuaua

SEQ ID NO: 757585 - RNA, 19 nt, Artificial Sequence
  Description of Artificial Sequence: Synthetic oligonucleotide
  Antisense strand to SEQ ID NO: 757584
uauaagagcacccuguuua

SEQ ID NO: 757586 - RNA, 19 nt, Artificial Sequence
  Description of Artificial Sequence: Synthetic oligonucleotide
  Sense strand starting at position 272 of SEQ ID NO: 586973
gagauaucucagggcacua

SEQ ID NO: 757587 - RNA, 19 nt, Artificial Sequence
  Description of Artificial Sequence: Synthetic oligonucleotide
  Antisense strand to SEQ ID NO: 757586
uagugcccugagauaucuc

SEQ ID NO: 757588 - RNA, 19 nt, Artificial Sequence
  Description of Artificial Sequence: Synthetic oligonucleotide
  Sense strand starting at position 352 of SEQ ID NO: 586973
cugcauaaauuccuaggga

SEQ ID NO: 757589 - RNA, 19 nt, Artificial Sequence
  Description of Artificial Sequence: Synthetic oligonucleotide
  Antisense strand to SEQ ID NO: 757588
ucccuaggaauuuaugcag

SEQ ID NO: 757590 - RNA, 19 nt, Artificial Sequence
  Description of Artificial Sequence: Synthetic oligonucleotide
  Sense strand starting at position 382 of SEQ ID NO: 586973
ugucaucaaugaguuccua

SEQ ID NO: 757591 - RNA, 19 nt, Artificial Sequence
  Description of Artificial Sequence: Synthetic oligonucleotide
  Antisense strand to SEQ ID NO: 757590
uaggaacucauugaugaca

SEQ ID NO: 757592 - RNA, 19 nt, Artificial Sequence
  Description of Artificial Sequence: Synthetic oligonucleotide
  Sense strand starting at position 413 of SEQ ID NO: 586973
augcuaaaucgcuauagau

SEQ ID NO: 757593 - RNA, 19 nt, Artificial Sequence
  Description of Artificial Sequence: Synthetic oligonucleotide
  Antisense strand to SEQ ID NO: 757592
aucuauagcgauuuagcau

SEQ ID NO: 757594 - RNA, 19 nt, Artificial Sequence
  Description of Artificial Sequence: Synthetic oligonucleotide
  Sense strand starting at position 468 of SEQ ID NO: 586973
agcucuuggagccauugaa

SEQ ID NO: 757595 - RNA, 19 nt, Artificial Sequence
  Description of Artificial Sequence: Synthetic oligonucleotide
  Antisense strand to SEQ ID NO: 757594
uucaauggcuccaagagcu

SEQ ID NO: 757596 - RNA, 19 nt, Artificial Sequence
  Description of Artificial Sequence: Synthetic oligonucleotide
  Sense strand starting at position 759 of SEQ ID NO: 586973
aucugacuggcauaauauu

SEQ ID NO: 757597 - RNA, 19 nt, Artificial Sequence
  Description of Artificial Sequence: Synthetic oligonucleotide
  Antisense strand to SEQ ID NO: 757596
aauauuaugccagucagau

SEQ ID NO: 757598 - RNA, 19 nt, Artificial Sequence
  Description of Artificial Sequence: Synthetic oligonucleotide
  Sense strand starting at position 1308 of SEQ ID NO: 586973
gggccauaaucacucauau

SEQ ID NO: 757599 - RNA, 19 nt, Artificial Sequence
  Description of Artificial Sequence: Synthetic oligonucleotide
  Antisense strand to SEQ ID NO: 757598
auaugagugauuauggccc

SEQ ID NO: 757600 - RNA, 19 nt, Artificial Sequence
  Description of Artificial Sequence: Synthetic oligonucleotide
  Sense strand starting at position 1383 of SEQ ID NO: 586973
agguauguccuauacuaua

SEQ ID NO: 757601 - RNA, 19 nt, Artificial Sequence
  Description of Artificial Sequence: Synthetic oligonucleotide
  Antisense strand to SEQ ID NO: 757600
uauaguauaggacauaccu

SEQ ID NO: 757602 - RNA, 19 nt, Artificial Sequence
  Description of Artificial Sequence: Synthetic oligonucleotide
  Sense strand starting at position 1542 of SEQ ID NO: 586973
auuugagggccucgguauu

SEQ ID NO: 757603 - RNA, 19 nt, Artificial Sequence
  Description of Artificial Sequence: Synthetic oligonucleotide
  Antisense strand to SEQ ID NO: 757602
aauaccgaggcccucaaau

SEQ ID NO: 757604 - RNA, 19 nt, Artificial Sequence
  Description of Artificial Sequence: Synthetic oligonucleotide
  Sense strand starting at position 1595 of SEQ ID NO: 586973
aggguaugauaauccacau

SEQ ID NO: 757605 - RNA, 19 nt, Artificial Sequence
  Description of Artificial Sequence: Synthetic oligonucleotide
  Antisense strand to SEQ ID NO: 757604
auguggauuaucauacccu

SEQ ID NO: 757606 - RNA, 19 nt, Artificial Sequence
  Description of Artificial Sequence: Synthetic oligonucleotide
  Sense strand starting at position 1659 of SEQ ID NO: 586973
ucauccagugcucaguaaa

SEQ ID NO: 757607 - RNA, 19 nt, Artificial Sequence
  Description of Artificial Sequence: Synthetic oligonucleotide
  Antisense strand to SEQ ID NO: 757606
uuuacugagcacuggauga

SEQ ID NO: 757608 - RNA, 19 nt, Artificial Sequence
  Description of Artificial Sequence: Synthetic oligonucleotide
  Sense strand starting at position 1662 of SEQ ID NO: 586973
uccagugcucaguaaaucu

SEQ ID NO: 757609 - RNA, 19 nt, Artificial Sequence
  Description of Artificial Sequence: Synthetic oligonucleotide
  Antisense strand to SEQ ID NO: 757608
agauuuacugagcacugga

SEQ ID NO: 757610 - RNA, 19 nt, Artificial Sequence
  Description of Artificial Sequence: Synthetic oligonucleotide
  Sense strand starting at position 1712 of SEQ ID NO: 586973
uaacuaccuguggaguuaa

SEQ ID NO: 757611 - RNA, 19 nt, Artificial Sequence
  Description of Artificial Sequence: Synthetic oligonucleotide
  Antisense strand to SEQ ID NO: 757610
uuaacuccacagguaguua

SEQ ID NO: 757612 - RNA, 19 nt, Artificial Sequence
  Description of Artificial Sequence: Synthetic oligonucleotide
  Sense strand starting at position 2226 of SEQ ID NO: 586973
gaaauuaacgacugagguu

SEQ ID NO: 757613 - RNA, 19 nt, Artificial Sequence
  Description of Artificial Sequence: Synthetic oligonucleotide
  Antisense strand to SEQ ID NO: 757612
aaccucagucguuaauuuc

SEQ ID NO: 757614 - RNA, 19 nt, Artificial Sequence
  Description of Artificial Sequence: Synthetic oligonucleotide
  Sense strand starting at position 2235 of SEQ ID NO: 586973
gacugagguuauuccucau

SEQ ID NO: 757615 - RNA, 19 nt, Artificial Sequence
  Description of Artificial Sequence: Synthetic oligonucleotide
  Antisense strand to SEQ ID NO: 757614
augaggaauaaccucaguc

SEQ ID NO: 757616 - RNA, 19 nt, Artificial Sequence
  Description of Artificial Sequence: Synthetic oligonucleotide
  Sense strand starting at position 2257 of SEQ ID NO: 586973
ggcauuucuuuauagauug

SEQ ID NO: 757617 - RNA, 19 nt, Artificial Sequence
  Description of Artificial Sequence: Synthetic oligonucleotide
  Antisense strand to SEQ ID NO: 757616
caaucuauaaagaaaugcc

SEQ ID NO: 757618 - RNA, 19 nt, Artificial Sequence
  Description of Artificial Sequence: Synthetic oligonucleotide
  Sense strand starting at position 2837 of SEQ ID NO: 586973
ggagauuacuugucucaau

SEQ ID NO: 757619 - RNA, 19 nt, Artificial Sequence
  Description of Artificial Sequence: Synthetic oligonucleotide
  Antisense strand to SEQ ID NO: 757618
auugagacaaguaaucucc

SEQ ID NO: 757620 - RNA, 19 nt, Artificial Sequence
  Description of Artificial Sequence: Synthetic oligonucleotide
  Sense strand starting at position 3017 of SEQ ID NO: 586973
ugcuuaugucaacaucuga

SEQ ID NO: 757621 - RNA, 19 nt, Artificial Sequence
  Description of Artificial Sequence: Synthetic oligonucleotide
  Antisense strand to SEQ ID NO: 757620
ucagauguugacauaagca

SEQ ID NO: 757622 - RNA, 19 nt, Artificial Sequence
  Description of Artificial Sequence: Synthetic oligonucleotide
  Sense strand starting at position 3117 of SEQ ID NO: 586973
agaguaugguauccauggu

SEQ ID NO: 757623 - RNA, 19 nt, Artificial Sequence
  Description of Artificial Sequence: Synthetic oligonucleotide
  Antisense strand to SEQ ID NO: 757622
accauggauaccauacucu

SEQ ID NO: 757624 - RNA, 19 nt, Artificial Sequence
  Description of Artificial Sequence: Synthetic oligonucleotide
  Sense strand starting at position 3121 of SEQ ID NO: 586973
uaugguauccauggucaga

SEQ ID NO: 757625 - RNA, 19 nt, Artificial Sequence
  Description of Artificial Sequence: Synthetic oligonucleotide
  Antisense strand to SEQ ID NO: 757624
ucugaccauggauaccaua

SEQ ID NO: 757626 - RNA, 19 nt, Artificial Sequence
  Description of Artificial Sequence: Synthetic oligonucleotide
  Sense strand starting at position 3123 of SEQ ID NO: 586973
ugguauccauggucagaaa

SEQ ID NO: 757627 - RNA, 19 nt, Artificial Sequence
  Description of Artificial Sequence: Synthetic oligonucleotide
  Antisense strand to SEQ ID NO: 757626
uuucugaccauggauacca

SEQ ID NO: 757628 - RNA, 19 nt, Artificial Sequence
  Description of Artificial Sequence: Synthetic oligonucleotide
  Sense strand starting at position 3167 of SEQ ID NO: 586973
uggugaguucacugggcaa

SEQ ID NO: 757629 - RNA, 19 nt, Artificial Sequence
  Description of Artificial Sequence: Synthetic oligonucleotide
  Antisense strand to SEQ ID NO: 757628
uugcccagugaacucacca

SEQ ID NO: 757630 - RNA, 19 nt, Artificial Sequence
  Description of Artificial Sequence: Synthetic oligonucleotide
  Sense strand starting at position 3170 of SEQ ID NO: 586973
ugaguucacugggcaagga

SEQ ID NO: 757631 - RNA, 19 nt, Artificial Sequence
  Description of Artificial Sequence: Synthetic oligonucleotide
  Antisense strand to SEQ ID NO: 757630
uccuugcccagugaacuca

SEQ ID NO: 757632 - RNA, 19 nt, Artificial Sequence
  Description of Artificial Sequence: Synthetic oligonucleotide
  Sense strand starting at position 3198 of SEQ ID NO: 586973
auguaagcucaagaauugu

SEQ ID NO: 757633 - RNA, 19 nt, Artificial Sequence
  Description of Artificial Sequence: Synthetic oligonucleotide
  Antisense strand to SEQ ID NO: 757632
acaauucuugagcuuacau

SEQ ID NO: 757634 - RNA, 19 nt, Artificial Sequence
  Description of Artificial Sequence: Synthetic oligonucleotide
  Sense strand starting at position 3209 of SEQ ID NO: 586973
agaauugucccuugcucaa

SEQ ID NO: 757635 - RNA, 19 nt, Artificial Sequence
  Description of Artificial Sequence: Synthetic oligonucleotide
  Antisense strand to SEQ ID NO: 757634
uugagcaagggacaauucu

SEQ ID NO: 757636 - RNA, 19 nt, Artificial Sequence
  Description of Artificial Sequence: Synthetic oligonucleotide
  Sense strand starting at position 3324 of SEQ ID NO: 586973
ccuguaguuugacuccaua

SEQ ID NO: 757637 - RNA, 19 nt, Artificial Sequence
  Description of Artificial Sequence: Synthetic oligonucleotide
  Antisense strand to SEQ ID NO: 757636
uauggagucaaacuacagg

SEQ ID NO: 757638 - RNA, 19 nt, Artificial Sequence
  Description of Artificial Sequence: Synthetic oligonucleotide
  Sense strand starting at position 3327 of SEQ ID NO: 586973
guaguuugacuccauacac

SEQ ID NO: 757639 - RNA, 19 nt, Artificial Sequence
  Description of Artificial Sequence: Synthetic oligonucleotide
  Antisense strand to SEQ ID NO: 757638
guguauggagucaaacuac

SEQ ID NO: 757640 - RNA, 19 nt, Artificial Sequence
  Description of Artificial Sequence: Synthetic oligonucleotide
  Sense strand starting at position 3357 of SEQ ID NO: 586973
acccaucauggaggucaua

SEQ ID NO: 757641 - RNA, 19 nt, Artificial Sequence
  Description of Artificial Sequence: Synthetic oligonucleotide
  Antisense strand to SEQ ID NO: 757640
uaugaccuccaugaugggu

SEQ ID NO: 757642 - RNA, 19 nt, Artificial Sequence
  Description of Artificial Sequence: Synthetic oligonucleotide
  Sense strand starting at position 3414 of SEQ ID NO: 586973
aggacaaauuggcugacuu

SEQ ID NO: 757643 - RNA, 19 nt, Artificial Sequence
  Description of Artificial Sequence: Synthetic oligonucleotide
  Antisense strand to SEQ ID NO: 757642
aagucagccaauuuguccu

SEQ ID NO: 757644 - RNA, 19 nt, Artificial Sequence
  Description of Artificial Sequence: Synthetic oligonucleotide
  Sense strand starting at position 3415 of SEQ ID NO: 586973
ggacaaauuggcugacuuc

SEQ ID NO: 757645 - RNA, 19 nt, Artificial Sequence
  Description of Artificial Sequence: Synthetic oligonucleotide
  Antisense strand to SEQ ID NO: 757644
gaagucagccaauuugucc

SEQ ID NO: 757646 - RNA, 19 nt, Artificial Sequence
  Description of Artificial Sequence: Synthetic oligonucleotide
  Sense strand starting at position 3422 of SEQ ID NO: 586973
uuggcugacuucuuggaau

SEQ ID NO: 757647 - RNA, 19 nt, Artificial Sequence
  Description of Artificial Sequence: Synthetic oligonucleotide
  Antisense strand to SEQ ID NO: 757646
auuccaagaagucagccaa

SEQ ID NO: 757648 - RNA, 19 nt, Artificial Sequence
  Description of Artificial Sequence: Synthetic oligonucleotide
  Sense strand starting at position 3424 of SEQ ID NO: 586973
ggcugacuucuuggaauug

SEQ ID NO: 757649 - RNA, 19 nt, Artificial Sequence
  Description of Artificial Sequence: Synthetic oligonucleotide
  Antisense strand to SEQ ID NO: 757648
caauuccaagaagucagcc

SEQ ID NO: 757650 - RNA, 19 nt, Artificial Sequence
  Description of Artificial Sequence: Synthetic oligonucleotide
  Sense strand starting at position 3522 of SEQ ID NO: 586973
cuaccucacgaacgagaaa

SEQ ID NO: 757651 - RNA, 19 nt, Artificial Sequence
  Description of Artificial Sequence: Synthetic oligonucleotide
  Antisense strand to SEQ ID NO: 757650
uuucucguucgugagguag

SEQ ID NO: 757652 - RNA, 19 nt, Artificial Sequence
  Description of Artificial Sequence: Synthetic oligonucleotide
  Sense strand starting at position 3535 of SEQ ID NO: 586973
gagaaaugccucugacugg

SEQ ID NO: 757653 - RNA, 19 nt, Artificial Sequence
  Description of Artificial Sequence: Synthetic oligonucleotide
  Antisense strand to SEQ ID NO: 757652
ccagucagaggcauuucuc

SEQ ID NO: 757654 - RNA, 19 nt, Artificial Sequence
  Description of Artificial Sequence: Synthetic oligonucleotide
  Sense strand starting at position 3646 of SEQ ID NO: 586973
gccucugauuggucucaaa

SEQ ID NO: 757655 - RNA, 19 nt, Artificial Sequence
  Description of Artificial Sequence: Synthetic oligonucleotide
  Antisense strand to SEQ ID NO: 757654
uuugagaccaaucagaggc

SEQ ID NO: 757656 - RNA, 19 nt, Artificial Sequence
  Description of Artificial Sequence: Synthetic oligonucleotide
  Sense strand starting at position 3720 of SEQ ID NO: 586973
gguguaaccaauuggaggu

SEQ ID NO: 757657 - RNA, 19 nt, Artificial Sequence
  Description of Artificial Sequence: Synthetic oligonucleotide
  Antisense strand to SEQ ID NO: 757656
accuccaauugguuacacc

SEQ ID NO: 757658 - RNA, 19 nt, Artificial Sequence
  Description of Artificial Sequence: Synthetic oligonucleotide
  Sense strand starting at position 3970 of SEQ ID NO: 586973
aggacuuucuauccgguga

SEQ ID NO: 757659 - RNA, 19 nt, Artificial Sequence
  Description of Artificial Sequence: Synthetic oligonucleotide
  Antisense strand to SEQ ID NO: 757658
ucaccggauagaaaguccu

SEQ ID NO: 757660 - RNA, 19 nt, Artificial Sequence
  Description of Artificial Sequence: Synthetic oligonucleotide
  Sense strand starting at position 3974 of SEQ ID NO: 586973
cuuucuauccggugacaau

SEQ ID NO: 757661 - RNA, 19 nt, Artificial Sequence
  Description of Artificial Sequence: Synthetic oligonucleotide
  Antisense strand to SEQ ID NO: 757660
auugucaccggauagaaag

SEQ ID NO: 757662 - RNA, 19 nt, Artificial Sequence
  Description of Artificial Sequence: Synthetic oligonucleotide
  Sense strand starting at position 3975 of SEQ ID NO: 586973
uuucuauccggugacaaua

SEQ ID NO: 757663 - RNA, 19 nt, Artificial Sequence
  Description of Artificial Sequence: Synthetic oligonucleotide
  Antisense strand to SEQ ID NO: 757662
uauugucaccggauagaaa

SEQ ID NO: 757664 - RNA, 19 nt, Artificial Sequence
  Description of Artificial Sequence: Synthetic oligonucleotide
  Sense strand starting at position 992 of SEQ ID NO: 586974
ggcacuaucuuggcucaaa

SEQ ID NO: 757665 - RNA, 19 nt, Artificial Sequence
  Description of Artificial Sequence: Synthetic oligonucleotide
  Antisense strand to SEQ ID NO: 757664
uuugagccaagauagugcc

SEQ ID NO: 757666 - RNA, 19 nt, Artificial Sequence
  Description of Artificial Sequence: Synthetic oligonucleotide
  Sense strand starting at position 1101 of SEQ ID NO: 586974
guuaguauaaaugacguuu

SEQ ID NO: 757667 - RNA, 19 nt, Artificial Sequence
  Description of Artificial Sequence: Synthetic oligonucleotide
  Antisense strand to SEQ ID NO: 757666
aaacgucauuuauacuaac

SEQ ID NO: 757668 - RNA, 19 nt, Artificial Sequence
  Description of Artificial Sequence: Synthetic oligonucleotide
  Sense strand starting at position 1109 of SEQ ID NO: 586974
aaaugacguuucgcuauau

SEQ ID NO: 757669 - RNA, 19 nt, Artificial Sequence
  Description of Artificial Sequence: Synthetic oligonucleotide
  Antisense strand to SEQ ID NO: 757668
auauagcgaaacgucauuu

SEQ ID NO: 757670 - RNA, 19 nt, Artificial Sequence
  Description of Artificial Sequence: Synthetic oligonucleotide
  Sense strand starting at position 1110 of SEQ ID NO: 586974
aaugacguuucgcuauauu

SEQ ID NO: 757671 - RNA, 19 nt, Artificial Sequence
  Description of Artificial Sequence: Synthetic oligonucleotide
  Antisense strand to SEQ ID NO: 757670
aauauagcgaaacgucauu

SEQ ID NO: 757672 - RNA, 19 nt, Artificial Sequence
  Description of Artificial Sequence: Synthetic oligonucleotide
  Sense strand starting at position 1113 of SEQ ID NO: 586974
gacguuucgcuauauuggu

SEQ ID NO: 757673 - RNA, 19 nt, Artificial Sequence
  Description of Artificial Sequence: Synthetic oligonucleotide
  Antisense strand to SEQ ID NO: 757672
accaauauagcgaaacguc

SEQ ID NO: 757674 - RNA, 19 nt, Artificial Sequence
  Description of Artificial Sequence: Synthetic oligonucleotide
  Sense strand starting at position 1436 of SEQ ID NO: 586974
guccucuauugucuccuaa

SEQ ID NO: 757675 - RNA, 19 nt, Artificial Sequence
  Description of Artificial Sequence: Synthetic oligonucleotide
  Antisense strand to SEQ ID NO: 757674
uuaggagacaauagaggac

SEQ ID NO: 757676 - RNA, 19 nt, Artificial Sequence
  Description of Artificial Sequence: Synthetic oligonucleotide
  Sense strand starting at position 1438 of SEQ ID NO: 586974
ccucuauugucuccuaagu

SEQ ID NO: 757677 - RNA, 19 nt, Artificial Sequence
  Description of Artificial Sequence: Synthetic oligonucleotide
  Antisense strand to SEQ ID NO: 757676
acuuaggagacaauagagg

SEQ ID NO: 757678 - RNA, 19 nt, Artificial Sequence
  Description of Artificial Sequence: Synthetic oligonucleotide
  Sense strand starting at position 1440 of SEQ ID NO: 586974
ucuauugucuccuaagugu

SEQ ID NO: 757679 - RNA, 19 nt, Artificial Sequence
  Description of Artificial Sequence: Synthetic oligonucleotide
  Antisense strand to SEQ ID NO: 757678
acacuuaggagacaauaga

SEQ ID NO: 757680 - RNA, 19 nt, Artificial Sequence
  Description of Artificial Sequence: Synthetic oligonucleotide
  Sense strand starting at position 1481 of SEQ ID NO: 586974
aguccuccugcguggagau

SEQ ID NO: 757681 - RNA, 19 nt, Artificial Sequence
  Description of Artificial Sequence: Synthetic oligonucleotide
  Antisense strand to SEQ ID NO: 757680
aucuccacgcaggaggacu

SEQ ID NO: 757682 - RNA, 19 nt, Artificial Sequence
  Description of Artificial Sequence: Synthetic oligonucleotide
  Sense strand starting at position 3559 of SEQ ID NO: 586974
gcugaauguuuacucacau

SEQ ID NO: 757683 - RNA, 19 nt, Artificial Sequence
  Description of Artificial Sequence: Synthetic oligonucleotide
  Antisense strand to SEQ ID NO: 757682
augugaguaaacauucagc

SEQ ID NO: 757684 - RNA, 19 nt, Artificial Sequence
  Description of Artificial Sequence: Synthetic oligonucleotide
  Sense strand starting at position 1934 of SEQ ID NO: 586976
ggcugagucagcugcauuu

SEQ ID NO: 757685 - RNA, 19 nt, Artificial Sequence
  Description of Artificial Sequence: Synthetic oligonucleotide
  Antisense strand to SEQ ID NO: 757684
aaaugcagcugacucagcc

SEQ ID NO: 757686 - RNA, 19 nt, Artificial Sequence
  Description of Artificial Sequence: Synthetic oligonucleotide
  Sense strand starting at position 1934 of SEQ ID NO: 586978
ggcugagucagcugcauuu

SEQ ID NO: 757687 - RNA, 19 nt, Artificial Sequence
  Description of Artificial Sequence: Synthetic oligonucleotide
  Antisense strand to SEQ ID NO: 757686
aaaugcagcugacucagcc

SEQ ID NO: 757688 - RNA, 19 nt, Artificial Sequence
  Description of Artificial Sequence: Synthetic oligonucleotide
  Sense strand starting at position 925 of SEQ ID NO: 586979
cucagaacacugcgucaua

SEQ ID NO: 757689 - RNA, 19 nt, Artificial Sequence
  Description of Artificial Sequence: Synthetic oligonucleotide
  Antisense strand to SEQ ID NO: 757688
uaugacgcaguguucugag

SEQ ID NO: 757690 - RNA, 19 nt, Artificial Sequence
  Description of Artificial Sequence: Synthetic oligonucleotide
  Sense strand starting at position 926 of SEQ ID NO: 586979
ucagaacacugcgucauau

SEQ ID NO: 757691 - RNA, 19 nt, Artificial Sequence
  Description of Artificial Sequence: Synthetic oligonucleotide
  Antisense strand to SEQ ID NO: 757690
auaugacgcaguguucuga

SEQ ID NO: 757692 - RNA, 19 nt, Artificial Sequence
  Description of Artificial Sequence: Synthetic oligonucleotide
  Sense strand starting at position 1710 of SEQ ID NO: 586979
accugauggucccgacacu

SEQ ID NO: 757693 - RNA, 19 nt, Artificial Sequence
  Description of Artificial Sequence: Synthetic oligonucleotide
  Antisense strand to SEQ ID NO: 757692
agugucgggaccaucaggu

SEQ ID NO: 757694 - RNA, 19 nt, Artificial Sequence
  Description of Artificial Sequence: Synthetic oligonucleotide
  Sense strand starting at position 2038 of SEQ ID NO: 586979
ugucauaggucauuccaac

SEQ ID NO: 757695 - RNA, 19 nt, Artificial Sequence
  Description of Artificial Sequence: Synthetic oligonucleotide
  Antisense strand to SEQ ID NO: 757694
guuggaaugaccuaugaca

SEQ ID NO: 757696 - RNA, 19 nt, Artificial Sequence
  Description of Artificial Sequence: Synthetic oligonucleotide
  Sense strand starting at position 2448 of SEQ ID NO: 586979
gccgaauguuuacugauau

SEQ ID NO: 757697 - RNA, 19 nt, Artificial Sequence
  Description of Artificial Sequence: Synthetic oligonucleotide
  Antisense strand to SEQ ID NO: 757696
auaucaguaaacauucggc

SEQ ID NO: 757698 - RNA, 19 nt, Artificial Sequence
  Description of Artificial Sequence: Synthetic oligonucleotide
  Sense strand starting at position 2449 of SEQ ID NO: 586979
ccgaauguuuacugauauu

SEQ ID NO: 757699 - RNA, 19 nt, Artificial Sequence
  Description of Artificial Sequence: Synthetic oligonucleotide
  Antisense strand to SEQ ID NO: 757698
aauaucaguaaacauucgg

SEQ ID NO: 757700 - RNA, 19 nt, Artificial Sequence
  Description of Artificial Sequence: Synthetic oligonucleotide
  Sense strand starting at position 2478 of SEQ ID NO: 586979
gauucuguacuggguguaa

SEQ ID NO: 757701 - RNA, 19 nt, Artificial Sequence
  Description of Artificial Sequence: Synthetic oligonucleotide
  Antisense strand to SEQ ID NO: 757700
uuacacccaguacagaauc

SEQ ID NO: 757702 - RNA, 19 nt, Artificial Sequence
  Description of Artificial Sequence: Synthetic oligonucleotide
  Sense strand starting at position 2494 of SEQ ID NO: 586979
uaacguguccucugcccua

SEQ ID NO: 757703 - RNA, 19 nt, Artificial Sequence
  Description of Artificial Sequence: Synthetic oligonucleotide
  Antisense strand to SEQ ID NO: 757702
uagggcagaggacacguua

SEQ ID NO: 757704 - RNA, 19 nt, Artificial Sequence
  Description of Artificial Sequence: Synthetic oligonucleotide
  Sense strand starting at position 2547 of SEQ ID NO: 586979
uggaaaucaucggaaacug

SEQ ID NO: 757705 - RNA, 19 nt, Artificial Sequence
  Description of Artificial Sequence: Synthetic oligonucleotide
  Antisense strand to SEQ ID NO: 757704
caguuuccgaugauuucca

SEQ ID NO: 757706 - RNA, 19 nt, Artificial Sequence
  Description of Artificial Sequence: Synthetic oligonucleotide
  Sense strand starting at position 2933 of SEQ ID NO: 586980
uggccuucuucugaucacu

SEQ ID NO: 757707 - RNA, 19 nt, Artificial Sequence
  Description of Artificial Sequence: Synthetic oligonucleotide
  Antisense strand to SEQ ID NO: 757706
agugaucagaagaaggcca

SEQ ID NO: 757708 - RNA, 19 nt, Artificial Sequence
  Description of Artificial Sequence: Synthetic oligonucleotide
  Sense strand starting at position 1418 of SEQ ID NO: 586981
accugauggucccaacauu

SEQ ID NO: 757709 - RNA, 19 nt, Artificial Sequence
  Description of Artificial Sequence: Synthetic oligonucleotide
  Antisense strand to SEQ ID NO: 757708
aauguugggaccaucaggu

SEQ ID NO: 757710 - RNA, 19 nt, Artificial Sequence
  Description of Artificial Sequence: Synthetic oligonucleotide
  Sense strand starting at position 1580 of SEQ ID NO: 586981
ggccuucuucuggacacuu

SEQ ID NO: 757711 - RNA, 19 nt, Artificial Sequence
  Description of Artificial Sequence: Synthetic oligonucleotide
  Antisense strand to SEQ ID NO: 757710
aaguguccagaagaaggcc

SEQ ID NO: 757712 - RNA, 19 nt, Artificial Sequence
  Description of Artificial Sequence: Synthetic oligonucleotide
  Sense strand starting at position 2057 of SEQ ID NO: 586981
accuuauaagagugagagu

SEQ ID NO: 757713 - RNA, 19 nt, Artificial Sequence
  Description of Artificial Sequence: Synthetic oligonucleotide
  Antisense strand to SEQ ID NO: 757712
acucucacucuuauaaggu

SEQ ID NO: 757714 - RNA, 19 nt, Artificial Sequence
  Description of Artificial Sequence: Synthetic oligonucleotide
  Sense strand starting at position 2060 of SEQ ID NO: 586981
uuauaagagugagaguauc

SEQ ID NO: 757715 - RNA, 19 nt, Artificial Sequence
  Description of Artificial Sequence: Synthetic oligonucleotide
  Antisense strand to SEQ ID NO: 757714
gauacucucacucuuauaa

SEQ ID NO: 757716 - RNA, 19 nt, Artificial Sequence
  Description of Artificial Sequence: Synthetic oligonucleotide
  Sense strand starting at position 2066 of SEQ ID NO: 586981
gagugagaguaucauguac

SEQ ID NO: 757717 - RNA, 19 nt, Artificial Sequence
  Description of Artificial Sequence: Synthetic oligonucleotide
  Antisense strand to SEQ ID NO: 757716
guacaugauacucucacuc

SEQ ID NO: 757718 - RNA, 19 nt, Artificial Sequence
  Description of Artificial Sequence: Synthetic oligonucleotide
  Sense strand starting at position 2068 of SEQ ID NO: 586981
gugagaguaucauguacaa

SEQ ID NO: 757719 - RNA, 19 nt, Artificial Sequence
  Description of Artificial Sequence: Synthetic oligonucleotide
  Antisense strand to SEQ ID NO: 757718
uuguacaugauacucucac

SEQ ID NO: 757720 - RNA, 19 nt, Artificial Sequence
  Description of Artificial Sequence: Synthetic oligonucleotide
  Sense strand starting at position 2072 of SEQ ID NO: 586981
gaguaucauguacaagagu

SEQ ID NO: 757721 - RNA, 19 nt, Artificial Sequence
  Description of Artificial Sequence: Synthetic oligonucleotide
  Antisense strand to SEQ ID NO: 757720
acucuuguacaugauacuc

SEQ ID NO: 757722 - RNA, 19 nt, Artificial Sequence
  Description of Artificial Sequence: Synthetic oligonucleotide
  Sense strand starting at position 2600 of SEQ ID NO: 586981
gcaguucgagaccaguaua

SEQ ID NO: 757723 - RNA, 19 nt, Artificial Sequence
  Description of Artificial Sequence: Synthetic oligonucleotide
  Antisense strand to SEQ ID NO: 757722
uauacuggucucgaacugc

SEQ ID NO: 757724 - RNA, 19 nt, Artificial Sequence
  Description of Artificial Sequence: Synthetic oligonucleotide
  Sense strand starting at position 3570 of SEQ ID NO: 586981
ggccaugcccaucacaaau

SEQ ID NO: 757725 - RNA, 19 nt, Artificial Sequence
  Description of Artificial Sequence: Synthetic oligonucleotide
  Antisense strand to SEQ ID NO: 757724
auuugugaugggcauggcc

SEQ ID NO: 757726 - RNA, 19 nt, Artificial Sequence
  Description of Artificial Sequence: Synthetic oligonucleotide
  Sense strand starting at position 3582 of SEQ ID NO: 586981
cacaaaugaugucgauaca

SEQ ID NO: 757727 - RNA, 19 nt, Artificial Sequence
  Description of Artificial Sequence: Synthetic oligonucleotide
  Antisense strand to SEQ ID NO: 757726
uguaucgacaucauuugug

SEQ ID NO: 757728 - RNA, 19 nt, Artificial Sequence
  Description of Artificial Sequence: Synthetic oligonucleotide
  Sense strand starting at position 46 of SEQ ID NO: 586982
acgugucuggguuauacca

SEQ ID NO: 757729 - RNA, 19 nt, Artificial Sequence
  Description of Artificial Sequence: Synthetic oligonucleotide
  Antisense strand to SEQ ID NO: 757728
ugguauaacccagacacgu

SEQ ID NO: 757730 - RNA, 19 nt, Artificial Sequence
  Description of Artificial Sequence: Synthetic oligonucleotide
  Sense strand starting at position 101 of SEQ ID NO: 586982
agggaaguguccucucuca

SEQ ID NO: 757731 - RNA, 19 nt, Artificial Sequence
  Description of Artificial Sequence: Synthetic oligonucleotide
  Antisense strand to SEQ ID NO: 757730
ugagagaggacacuucccu

SEQ ID NO: 757732 - RNA, 19 nt, Artificial Sequence
  Description of Artificial Sequence: Synthetic oligonucleotide
  Sense strand starting at position 109 of SEQ ID NO: 586982
guccucucucaauguaaga

SEQ ID NO: 757733 - RNA, 19 nt, Artificial Sequence
  Description of Artificial Sequence: Synthetic oligonucleotide
  Antisense strand to SEQ ID NO: 757732
ucuuacauugagagaggac

SEQ ID NO: 757734 - RNA, 19 nt, Artificial Sequence
  Description of Artificial Sequence: Synthetic oligonucleotide
  Sense strand starting at position 129 of SEQ ID NO: 586982
agcaccugucaauguaaga

SEQ ID NO: 757735 - RNA, 19 nt, Artificial Sequence
  Description of Artificial Sequence: Synthetic oligonucleotide
  Antisense strand to SEQ ID NO: 757734
ucuuacauugacaggugcu

SEQ ID NO: 757736 - RNA, 19 nt, Artificial Sequence
  Description of Artificial Sequence: Synthetic oligonucleotide
  Sense strand starting at position 316 of SEQ ID NO: 586982
uucugauacuaagaaggga

SEQ ID NO: 757737 - RNA, 19 nt, Artificial Sequence
  Description of Artificial Sequence: Synthetic oligonucleotide
  Antisense strand to SEQ ID NO: 757736
ucccuucuuaguaucagaa

SEQ ID NO: 757738 - RNA, 19 nt, Artificial Sequence
  Description of Artificial Sequence: Synthetic oligonucleotide
  Sense strand starting at position 388 of SEQ ID NO: 586982
ggugaaugauuagcaauca

SEQ ID NO: 757739 - RNA, 19 nt, Artificial Sequence
  Description of Artificial Sequence: Synthetic oligonucleotide
  Antisense strand to SEQ ID NO: 757738
ugauugcuaaucauucacc

SEQ ID NO: 757740 - RNA, 19 nt, Artificial Sequence
  Description of Artificial Sequence: Synthetic oligonucleotide
  Sense strand starting at position 420 of SEQ ID NO: 586982
gaaagugcccauuagaauc

SEQ ID NO: 757741 - RNA, 19 nt, Artificial Sequence
  Description of Artificial Sequence: Synthetic oligonucleotide
  Antisense strand to SEQ ID NO: 757740
gauucuaaugggcacuuuc

SEQ ID NO: 757742 - RNA, 19 nt, Artificial Sequence
  Description of Artificial Sequence: Synthetic oligonucleotide
  Sense strand starting at position 431 of SEQ ID NO: 586982
uuagaaucgagcuauguaa

SEQ ID NO: 757743 - RNA, 19 nt, Artificial Sequence
  Description of Artificial Sequence: Synthetic oligonucleotide
  Antisense strand to SEQ ID NO: 757742
uuacauagcucgauucuaa

SEQ ID NO: 757744 - RNA, 19 nt, Artificial Sequence
  Description of Artificial Sequence: Synthetic oligonucleotide
  Sense strand starting at position 433 of SEQ ID NO: 586982
agaaucgagcuauguaauu

SEQ ID NO: 757745 - RNA, 19 nt, Artificial Sequence
  Description of Artificial Sequence: Synthetic oligonucleotide
  Antisense strand to SEQ ID NO: 757744
aauuacauagcucgauucu

SEQ ID NO: 757746 - RNA, 19 nt, Artificial Sequence
  Description of Artificial Sequence: Synthetic oligonucleotide
  Sense strand starting at position 438 of SEQ ID NO: 586982
cgagcuauguaauuacuaa

SEQ ID NO: 757747 - RNA, 19 nt, Artificial Sequence
  Description of Artificial Sequence: Synthetic oligonucleotide
  Antisense strand to SEQ ID NO: 757746
uuaguaauuacauagcucg

SEQ ID NO: 757748 - RNA, 19 nt, Artificial Sequence
  Description of Artificial Sequence: Synthetic oligonucleotide
  Sense strand starting at position 485 of SEQ ID NO: 586982
guuuauauuuaccagaucu

SEQ ID NO: 757749 - RNA, 19 nt, Artificial Sequence
  Description of Artificial Sequence: Synthetic oligonucleotide
  Antisense strand to SEQ ID NO: 757748
agaucugguaaauauaaac

SEQ ID NO: 757750 - RNA, 19 nt, Artificial Sequence
  Description of Artificial Sequence: Synthetic oligonucleotide
  Sense strand starting at position 585 of SEQ ID NO: 586982
guaacacuuuguccucauu

SEQ ID NO: 757751 - RNA, 19 nt, Artificial Sequence
  Description of Artificial Sequence: Synthetic oligonucleotide
  Antisense strand to SEQ ID NO: 757750
aaugaggacaaaguguuac

SEQ ID NO: 757752 - RNA, 19 nt, Artificial Sequence
  Description of Artificial Sequence: Synthetic oligonucleotide
  Sense strand starting at position 1269 of SEQ ID NO: 586982
ggguguagccuagggaaga

SEQ ID NO: 757753 - RNA, 19 nt, Artificial Sequence
  Description of Artificial Sequence: Synthetic oligonucleotide
  Antisense strand to SEQ ID NO: 757752
ucuucccuaggcuacaccc

SEQ ID NO: 757754 - RNA, 19 nt, Artificial Sequence
  Description of Artificial Sequence: Synthetic oligonucleotide
  Sense strand starting at position 1503 of SEQ ID NO: 586982
gaagguauaucauucuaga

SEQ ID NO: 757755 - RNA, 19 nt, Artificial Sequence
  Description of Artificial Sequence: Synthetic oligonucleotide
  Antisense strand to SEQ ID NO: 757754
ucuagaaugauauaccuuc

SEQ ID NO: 757756 - RNA, 19 nt, Artificial Sequence
  Description of Artificial Sequence: Synthetic oligonucleotide
  Sense strand starting at position 2522 of SEQ ID NO: 586982
gguugcagaguucacugaa

SEQ ID NO: 757757 - RNA, 19 nt, Artificial Sequence
  Description of Artificial Sequence: Synthetic oligonucleotide
  Antisense strand to SEQ ID NO: 757756
uucagugaacucugcaacc

SEQ ID NO: 757758 - RNA, 19 nt, Artificial Sequence
  Description of Artificial Sequence: Synthetic oligonucleotide
  Sense strand starting at position 2525 of SEQ ID NO: 586982
ugcagaguucacugaacga

SEQ ID NO: 757759 - RNA, 19 nt, Artificial Sequence
  Description of Artificial Sequence: Synthetic oligonucleotide
  Antisense strand to SEQ ID NO: 757758
ucguucagugaacucugca

SEQ ID NO: 757760 - RNA, 19 nt, Artificial Sequence
  Description of Artificial Sequence: Synthetic oligonucleotide
  Sense strand starting at position 2566 of SEQ ID NO: 586982
gggacaauuccuugccugu

SEQ ID NO: 757761 - RNA, 19 nt, Artificial Sequence
  Description of Artificial Sequence: Synthetic oligonucleotide
  Antisense strand to SEQ ID NO: 757760
acaggcaaggaauuguccc

SEQ ID NO: 757762 - RNA, 19 nt, Artificial Sequence
  Description of Artificial Sequence: Synthetic oligonucleotide
  Sense strand starting at position 2594 of SEQ ID NO: 586982
gcgugacuuguguccugag

SEQ ID NO: 757763 - RNA, 19 nt, Artificial Sequence
  Description of Artificial Sequence: Synthetic oligonucleotide
  Antisense strand to SEQ ID NO: 757762
cucaggacacaagucacgc

SEQ ID NO: 757764 - RNA, 19 nt, Artificial Sequence
  Description of Artificial Sequence: Synthetic oligonucleotide
  Sense strand starting at position 2601 of SEQ ID NO: 586982
uuguguccugaguaggaca

SEQ ID NO: 757765 - RNA, 19 nt, Artificial Sequence
  Description of Artificial Sequence: Synthetic oligonucleotide
  Antisense strand to SEQ ID NO: 757764
uguccuacucaggacacaa

SEQ ID NO: 757766 - RNA, 19 nt, Artificial Sequence
  Description of Artificial Sequence: Synthetic oligonucleotide
  Sense strand starting at position 2649 of SEQ ID NO: 586982
cacauaucguucuuaggaa

SEQ ID NO: 757767 - RNA, 19 nt, Artificial Sequence
  Description of Artificial Sequence: Synthetic oligonucleotide
  Antisense strand to SEQ ID NO: 757766
uuccuaagaacgauaugug

SEQ ID NO: 757768 - RNA, 19 nt, Artificial Sequence
  Description of Artificial Sequence: Synthetic oligonucleotide
  Sense strand starting at position 2674 of SEQ ID NO: 586982
uuguuugaauuaucuggau

SEQ ID NO: 757769 - RNA, 19 nt, Artificial Sequence
  Description of Artificial Sequence: Synthetic oligonucleotide
  Antisense strand to SEQ ID NO: 757768
auccagauaauucaaacaa

SEQ ID NO: 757770 - RNA, 19 nt, Artificial Sequence
  Description of Artificial Sequence: Synthetic oligonucleotide
  Sense strand starting at position 2676 of SEQ ID NO: 586982
guuugaauuaucuggauga

SEQ ID NO: 757771 - RNA, 19 nt, Artificial Sequence
  Description of Artificial Sequence: Synthetic oligonucleotide
  Antisense strand to SEQ ID NO: 757770
ucauccagauaauucaaac

SEQ ID NO: 757772 - RNA, 19 nt, Artificial Sequence
  Description of Artificial Sequence: Synthetic oligonucleotide
  Sense strand starting at position 2804 of SEQ ID NO: 586982
ggaacuucuauguagguua

SEQ ID NO: 757773 - RNA, 19 nt, Artificial Sequence
  Description of Artificial Sequence: Synthetic oligonucleotide
  Antisense strand to SEQ ID NO: 757772
uaaccuacauagaaguucc

SEQ ID NO: 757774 - RNA, 19 nt, Artificial Sequence
  Description of Artificial Sequence: Synthetic oligonucleotide
  Sense strand starting at position 2817 of SEQ ID NO: 586982
agguuauucuucuuuacuu

SEQ ID NO: 757775 - RNA, 19 nt, Artificial Sequence
  Description of Artificial Sequence: Synthetic oligonucleotide
  Antisense strand to SEQ ID NO: 757774
aaguaaagaagaauaaccu

SEQ ID NO: 757776 - RNA, 19 nt, Artificial Sequence
  Description of Artificial Sequence: Synthetic oligonucleotide
  Sense strand starting at position 2856 of SEQ ID NO: 586982
aguugaauaguccgaagca

SEQ ID NO: 757777 - RNA, 19 nt, Artificial Sequence
  Description of Artificial Sequence: Synthetic oligonucleotide
  Antisense strand to SEQ ID NO: 757776
ugcuucggacuauucaacu

SEQ ID NO: 757778 - RNA, 19 nt, Artificial Sequence
  Description of Artificial Sequence: Synthetic oligonucleotide
  Sense strand starting at position 2989 of SEQ ID NO: 586982
acgcauuaauaagcaagau

SEQ ID NO: 757779 - RNA, 19 nt, Artificial Sequence
  Description of Artificial Sequence: Synthetic oligonucleotide
  Antisense strand to SEQ ID NO: 757778
aucuugcuuauuaaugcgu

SEQ ID NO: 757780 - RNA, 19 nt, Artificial Sequence
  Description of Artificial Sequence: Synthetic oligonucleotide
  Sense strand starting at position 3042 of SEQ ID NO: 586982
uuuaaagggucaucaacau

SEQ ID NO: 757781 - RNA, 19 nt, Artificial Sequence
  Description of Artificial Sequence: Synthetic oligonucleotide
  Antisense strand to SEQ ID NO: 757780
auguugaugacccuuuaaa

SEQ ID NO: 757782 - RNA, 19 nt, Artificial Sequence
  Description of Artificial Sequence: Synthetic oligonucleotide
  Sense strand starting at position 3247 of SEQ ID NO: 586982
ccuguuguggcauagcaaa

SEQ ID NO: 757783 - RNA, 19 nt, Artificial Sequence
  Description of Artificial Sequence: Synthetic oligonucleotide
  Antisense strand to SEQ ID NO: 757782
uuugcuaugccacaacagg

SEQ ID NO: 757784 - RNA, 19 nt, Artificial Sequence
  Description of Artificial Sequence: Synthetic oligonucleotide
  Sense strand starting at position 3329 of SEQ ID NO: 586982
gguagcaaucaucaaggua

SEQ ID NO: 757785 - RNA, 19 nt, Artificial Sequence
  Description of Artificial Sequence: Synthetic oligonucleotide
  Antisense strand to SEQ ID NO: 757784
uaccuugaugauugcuacc

SEQ ID NO: 757786 - RNA, 19 nt, Artificial Sequence
  Description of Artificial Sequence: Synthetic oligonucleotide
  Sense strand starting at position 3332 of SEQ ID NO: 586982
agcaaucaucaagguagau

SEQ ID NO: 757787 - RNA, 19 nt, Artificial Sequence
  Description of Artificial Sequence: Synthetic oligonucleotide
  Antisense strand to SEQ ID NO: 757786
aucuaccuugaugauugcu

SEQ ID NO: 757788 - RNA, 19 nt, Artificial Sequence
  Description of Artificial Sequence: Synthetic oligonucleotide
  Sense strand starting at position 3423 of SEQ ID NO: 586982
aguagaugucagggccgaa

SEQ ID NO: 757789 - RNA, 19 nt, Artificial Sequence
  Description of Artificial Sequence: Synthetic oligonucleotide
  Antisense strand to SEQ ID NO: 757788
uucggcccugacaucuacu

SEQ ID NO: 757790 - RNA, 19 nt, Artificial Sequence
  Description of Artificial Sequence: Synthetic oligonucleotide
  Sense strand starting at position 3441 of SEQ ID NO: 586982
acucgauguugaguacaag

SEQ ID NO: 757791 - RNA, 19 nt, Artificial Sequence
  Description of Artificial Sequence: Synthetic oligonucleotide
  Antisense strand to SEQ ID NO: 757790
cuuguacucaacaucgagu

SEQ ID NO: 757792 - RNA, 19 nt, Artificial Sequence
  Description of Artificial Sequence: Synthetic oligonucleotide
  Sense strand starting at position 3515 of SEQ ID NO: 586982
cagaauuagcuucguggau

SEQ ID NO: 757793 - RNA, 19 nt, Artificial Sequence
  Description of Artificial Sequence: Synthetic oligonucleotide
  Antisense strand to SEQ ID NO: 757792
auccacgaagcuaauucug

SEQ ID NO: 757794 - RNA, 19 nt, Artificial Sequence
  Description of Artificial Sequence: Synthetic oligonucleotide
  Sense strand starting at position 3516 of SEQ ID NO: 586982
agaauuagcuucguggaua

SEQ ID NO: 757795 - RNA, 19 nt, Artificial Sequence
  Description of Artificial Sequence: Synthetic oligonucleotide
  Antisense strand to SEQ ID NO: 757794
uauccacgaagcuaauucu

SEQ ID NO: 757796 - RNA, 19 nt, Artificial Sequence
  Description of Artificial Sequence: Synthetic oligonucleotide
  Sense strand starting at position 3519 of SEQ ID NO: 586982
auuagcuucguggauaaac

SEQ ID NO: 757797 - RNA, 19 nt, Artificial Sequence
  Description of Artificial Sequence: Synthetic oligonucleotide
  Antisense strand to SEQ ID NO: 757796
guuuauccacgaagcuaau

SEQ ID NO: 757798 - RNA, 19 nt, Artificial Sequence
  Description of Artificial Sequence: Synthetic oligonucleotide
  Sense strand starting at position 3529 of SEQ ID NO: 586982
uggauaaacggcuauacga

SEQ ID NO: 757799 - RNA, 19 nt, Artificial Sequence
  Description of Artificial Sequence: Synthetic oligonucleotide
  Antisense strand to SEQ ID NO: 757798
ucguauagccguuuaucca

SEQ ID NO: 757800 - RNA, 19 nt, Artificial Sequence
  Description of Artificial Sequence: Synthetic oligonucleotide
  Sense strand starting at position 3531 of SEQ ID NO: 586982
gauaaacggcuauacgaau

SEQ ID NO: 757801 - RNA, 19 nt, Artificial Sequence
  Description of Artificial Sequence: Synthetic oligonucleotide
  Antisense strand to SEQ ID NO: 757800
auucguauagccguuuauc

SEQ ID NO: 757802 - RNA, 19 nt, Artificial Sequence
  Description of Artificial Sequence: Synthetic oligonucleotide
  Sense strand starting at position 3538 of SEQ ID NO: 586982
ggcuauacgaauuggcaua

SEQ ID NO: 757803 - RNA, 19 nt, Artificial Sequence
  Description of Artificial Sequence: Synthetic oligonucleotide
  Antisense strand to SEQ ID NO: 757802
uaugccaauucguauagcc

SEQ ID NO: 757804 - RNA, 19 nt, Artificial Sequence
  Description of Artificial Sequence: Synthetic oligonucleotide
  Sense strand starting at position 3543 of SEQ ID NO: 586982
uacgaauuggcauaucagu

SEQ ID NO: 757805 - RNA, 19 nt, Artificial Sequence
  Description of Artificial Sequence: Synthetic oligonucleotide
  Antisense strand to SEQ ID NO: 757804
acugauaugccaauucgua

SEQ ID NO: 757806 - RNA, 19 nt, Artificial Sequence
  Description of Artificial Sequence: Synthetic oligonucleotide
  Sense strand starting at position 3556 of SEQ ID NO: 586982
aucaguuguccuuagacau

SEQ ID NO: 757807 - RNA, 19 nt, Artificial Sequence
  Description of Artificial Sequence: Synthetic oligonucleotide
  Antisense strand to SEQ ID NO: 757806
augucuaaggacaacugau

SEQ ID NO: 757808 - RNA, 19 nt, Artificial Sequence
  Description of Artificial Sequence: Synthetic oligonucleotide
  Sense strand starting at position 49 of SEQ ID NO: 586983
auucuacuugccuggaaua

SEQ ID NO: 757809 - RNA, 19 nt, Artificial Sequence
  Description of Artificial Sequence: Synthetic oligonucleotide
  Antisense strand to SEQ ID NO: 757808
uauuccaggcaaguagaau

SEQ ID NO: 757810 - RNA, 19 nt, Artificial Sequence
  Description of Artificial Sequence: Synthetic oligonucleotide
  Sense strand starting at position 246 of SEQ ID NO: 586983
ggaggaauuuauuauggcu

SEQ ID NO: 757811 - RNA, 19 nt, Artificial Sequence
  Description of Artificial Sequence: Synthetic oligonucleotide
  Antisense strand to SEQ ID NO: 757810
agccauaauaaauuccucc

SEQ ID NO: 757812 - RNA, 19 nt, Artificial Sequence
  Description of Artificial Sequence: Synthetic oligonucleotide
  Sense strand starting at position 495 of SEQ ID NO: 586983
gaguuaaugcucuauggac

SEQ ID NO: 757813 - RNA, 19 nt, Artificial Sequence
  Description of Artificial Sequence: Synthetic oligonucleotide
  Antisense strand to SEQ ID NO: 757812
guccauagagcauuaacuc

SEQ ID NO: 757814 - RNA, 19 nt, Artificial Sequence
  Description of Artificial Sequence: Synthetic oligonucleotide
  Sense strand starting at position 601 of SEQ ID NO: 586983
cucugacuugcugaagguu

SEQ ID NO: 757815 - RNA, 19 nt, Artificial Sequence
  Description of Artificial Sequence: Synthetic oligonucleotide
  Antisense strand to SEQ ID NO: 757814
aaccuucagcaagucagag

SEQ ID NO: 757816 - RNA, 19 nt, Artificial Sequence
  Description of Artificial Sequence: Synthetic oligonucleotide
  Sense strand starting at position 734 of SEQ ID NO: 586983
gaucaagaauuuggagaca

SEQ ID NO: 757817 - RNA, 19 nt, Artificial Sequence
  Description of Artificial Sequence: Synthetic oligonucleotide
  Antisense strand to SEQ ID NO: 757816
ugucuccaaauucuugauc

SEQ ID NO: 757818 - RNA, 19 nt, Artificial Sequence
  Description of Artificial Sequence: Synthetic oligonucleotide
  Sense strand starting at position 825 of SEQ ID NO: 586983
aauguacaucuagguaaug

SEQ ID NO: 757819 - RNA, 19 nt, Artificial Sequence
  Description of Artificial Sequence: Synthetic oligonucleotide
  Antisense strand to SEQ ID NO: 757818
cauuaccuagauguacauu

SEQ ID NO: 757820 - RNA, 19 nt, Artificial Sequence
  Description of Artificial Sequence: Synthetic oligonucleotide
  Sense strand starting at position 989 of SEQ ID NO: 586983
gcuuguacugauuaucaag

SEQ ID NO: 757821 - RNA, 19 nt, Artificial Sequence
  Description of Artificial Sequence: Synthetic oligonucleotide
  Antisense strand to SEQ ID NO: 757820
cuugauaaucaguacaagc

SEQ ID NO: 757822 - RNA, 19 nt, Artificial Sequence
  Description of Artificial Sequence: Synthetic oligonucleotide
  Sense strand starting at position 1216 of SEQ ID NO: 586983
ucauaaaggucacuuuaug

SEQ ID NO: 757823 - RNA, 19 nt, Artificial Sequence
  Description of Artificial Sequence: Synthetic oligonucleotide
  Antisense strand to SEQ ID NO: 757822
cauaaagugaccuuuauga

SEQ ID NO: 757824 - RNA, 19 nt, Artificial Sequence
  Description of Artificial Sequence: Synthetic oligonucleotide
  Sense strand starting at position 1253 of SEQ ID NO: 586983
ccucgaaaguucuuuaaag

SEQ ID NO: 757825 - RNA, 19 nt, Artificial Sequence
  Description of Artificial Sequence: Synthetic oligonucleotide
  Antisense strand to SEQ ID NO: 757824
cuuuaaagaacuuucgagg

SEQ ID NO: 757826 - RNA, 19 nt, Artificial Sequence
  Description of Artificial Sequence: Synthetic oligonucleotide
  Sense strand starting at position 1562 of SEQ ID NO: 586983
aagaaugacuguucuugag

SEQ ID NO: 757827 - RNA, 19 nt, Artificial Sequence
  Description of Artificial Sequence: Synthetic oligonucleotide
  Antisense strand to SEQ ID NO: 757826
cucaagaacagucauucuu

SEQ ID NO: 757828 - RNA, 19 nt, Artificial Sequence
  Description of Artificial Sequence: Synthetic oligonucleotide
  Sense strand starting at position 1599 of SEQ ID NO: 586983
aguagauauuuccagaaug

SEQ ID NO: 757829 - RNA, 19 nt, Artificial Sequence
  Description of Artificial Sequence: Synthetic oligonucleotide
  Antisense strand to SEQ ID NO: 757828
cauucuggaaauaucuacu

SEQ ID NO: 757830 - RNA, 19 nt, Artificial Sequence
  Description of Artificial Sequence: Synthetic oligonucleotide
  Sense strand starting at position 1641 of SEQ ID NO: 586983
auaagucagcuacauguaa

SEQ ID NO: 757831 - RNA, 19 nt, Artificial Sequence
  Description of Artificial Sequence: Synthetic oligonucleotide
  Antisense strand to SEQ ID NO: 757830
uuacauguagcugacuuau

SEQ ID NO: 757832 - RNA, 19 nt, Artificial Sequence
  Description of Artificial Sequence: Synthetic oligonucleotide
  Sense strand starting at position 1732 of SEQ ID NO: 586983
uuuccauagcugggaaauc

SEQ ID NO: 757833 - RNA, 19 nt, Artificial Sequence
  Description of Artificial Sequence: Synthetic oligonucleotide
  Antisense strand to SEQ ID NO: 757832
gauuucccagcuauggaaa

SEQ ID NO: 757834 - RNA, 19 nt, Artificial Sequence
  Description of Artificial Sequence: Synthetic oligonucleotide
  Sense strand starting at position 1741 of SEQ ID NO: 586983
cugggaaaucaguggcaaa

SEQ ID NO: 757835 - RNA, 19 nt, Artificial Sequence
  Description of Artificial Sequence: Synthetic oligonucleotide
  Antisense strand to SEQ ID NO: 757834
uuugccacugauuucccag

SEQ ID NO: 757836 - RNA, 19 nt, Artificial Sequence
  Description of Artificial Sequence: Synthetic oligonucleotide
  Sense strand starting at position 1742 of SEQ ID NO: 586983
ugggaaaucaguggcaaag

SEQ ID NO: 757837 - RNA, 19 nt, Artificial Sequence
  Description of Artificial Sequence: Synthetic oligonucleotide
  Antisense strand to SEQ ID NO: 757836
cuuugccacugauuuccca

SEQ ID NO: 757838 - RNA, 19 nt, Artificial Sequence
  Description of Artificial Sequence: Synthetic oligonucleotide
  Sense strand starting at position 1784 of SEQ ID NO: 586983
ugauucucagcuuggaaac

SEQ ID NO: 757839 - RNA, 19 nt, Artificial Sequence
  Description of Artificial Sequence: Synthetic oligonucleotide
  Antisense strand to SEQ ID NO: 757838
guuuccaagcugagaauca

SEQ ID NO: 757840 - RNA, 19 nt, Artificial Sequence
  Description of Artificial Sequence: Synthetic oligonucleotide
  Sense strand starting at position 1831 of SEQ ID NO: 586983
ggaacuuucuuauuccuga

SEQ ID NO: 757841 - RNA, 19 nt, Artificial Sequence
  Description of Artificial Sequence: Synthetic oligonucleotide
  Antisense strand to SEQ ID NO: 757840
ucaggaauaagaaaguucc

SEQ ID NO: 757842 - RNA, 19 nt, Artificial Sequence
  Description of Artificial Sequence: Synthetic oligonucleotide
  Sense strand starting at position 1836 of SEQ ID NO: 586983
uuucuuauuccugauuagu

SEQ ID NO: 757843 - RNA, 19 nt, Artificial Sequence
  Description of Artificial Sequence: Synthetic oligonucleotide
  Antisense strand to SEQ ID NO: 757842
acuaaucaggaauaagaaa

SEQ ID NO: 757844 - RNA, 19 nt, Artificial Sequence
  Description of Artificial Sequence: Synthetic oligonucleotide
  Sense strand starting at position 1838 of SEQ ID NO: 586983
ucuuauuccugauuaguag

SEQ ID NO: 757845 - RNA, 19 nt, Artificial Sequence
  Description of Artificial Sequence: Synthetic oligonucleotide
  Antisense strand to SEQ ID NO: 757844
cuacuaaucaggaauaaga

SEQ ID NO: 757846 - RNA, 19 nt, Artificial Sequence
  Description of Artificial Sequence: Synthetic oligonucleotide
  Sense strand starting at position 1839 of SEQ ID NO: 586983
cuuauuccugauuaguaga

SEQ ID NO: 757847 - RNA, 19 nt, Artificial Sequence
  Description of Artificial Sequence: Synthetic oligonucleotide
  Antisense strand to SEQ ID NO: 757846
ucuacuaaucaggaauaag

SEQ ID NO: 757848 - RNA, 19 nt, Artificial Sequence
  Description of Artificial Sequence: Synthetic oligonucleotide
  Sense strand starting at position 1866 of SEQ ID NO: 586983
auuggagcugcauggaaua

SEQ ID NO: 757849 - RNA, 19 nt, Artificial Sequence
  Description of Artificial Sequence: Synthetic oligonucleotide
  Antisense strand to SEQ ID NO: 757848
uauuccaugcagcuccaau

SEQ ID NO: 757850 - RNA, 19 nt, Artificial Sequence
  Description of Artificial Sequence: Synthetic oligonucleotide
  Sense strand starting at position 1929 of SEQ ID NO: 586983
ugaagucuuauagguagaa

SEQ ID NO: 757851 - RNA, 19 nt, Artificial Sequence
  Description of Artificial Sequence: Synthetic oligonucleotide
  Antisense strand to SEQ ID NO: 757850
uucuaccuauaagacuuca

SEQ ID NO: 757852 - RNA, 19 nt, Artificial Sequence
  Description of Artificial Sequence: Synthetic oligonucleotide
  Sense strand starting at position 1930 of SEQ ID NO: 586983
gaagucuuauagguagaag

SEQ ID NO: 757853 - RNA, 19 nt, Artificial Sequence
  Description of Artificial Sequence: Synthetic oligonucleotide
  Antisense strand to SEQ ID NO: 757852
cuucuaccuauaagacuuc

SEQ ID NO: 757854 - RNA, 19 nt, Artificial Sequence
  Description of Artificial Sequence: Synthetic oligonucleotide
  Sense strand starting at position 1948 of SEQ ID NO: 586983
gcuggugauccuuagagga

SEQ ID NO: 757855 - RNA, 19 nt, Artificial Sequence
  Description of Artificial Sequence: Synthetic oligonucleotide
  Antisense strand to SEQ ID NO: 757854
uccucuaaggaucaccagc

SEQ ID NO: 757856 - RNA, 19 nt, Artificial Sequence
  Description of Artificial Sequence: Synthetic oligonucleotide
  Sense strand starting at position 2039 of SEQ ID NO: 586983
ccucuugaccucuggaaau

SEQ ID NO: 757857 - RNA, 19 nt, Artificial Sequence
  Description of Artificial Sequence: Synthetic oligonucleotide
  Antisense strand to SEQ ID NO: 757856
auuuccagaggucaagagg

SEQ ID NO: 757858 - RNA, 19 nt, Artificial Sequence
  Description of Artificial Sequence: Synthetic oligonucleotide
  Sense strand starting at position 2100 of SEQ ID NO: 586983
uccaauuagcccuauagag

SEQ ID NO: 757859 - RNA, 19 nt, Artificial Sequence
  Description of Artificial Sequence: Synthetic oligonucleotide
  Antisense strand to SEQ ID NO: 757858
cucuauagggcuaauugga

SEQ ID NO: 757860 - RNA, 19 nt, Artificial Sequence
  Description of Artificial Sequence: Synthetic oligonucleotide
  Sense strand starting at position 2115 of SEQ ID NO: 586983
agaggcccucuaugaaaua

SEQ ID NO: 757861 - RNA, 19 nt, Artificial Sequence
  Description of Artificial Sequence: Synthetic oligonucleotide
  Antisense strand to SEQ ID NO: 757860
uauuucauagagggccucu

SEQ ID NO: 757862 - RNA, 19 nt, Artificial Sequence
  Description of Artificial Sequence: Synthetic oligonucleotide
  Sense strand starting at position 2232 of SEQ ID NO: 586983
ucaggauuauuaucucugu

SEQ ID NO: 757863 - RNA, 19 nt, Artificial Sequence
  Description of Artificial Sequence: Synthetic oligonucleotide
  Antisense strand to SEQ ID NO: 757862
acagagauaauaauccuga

SEQ ID NO: 757864 - RNA, 19 nt, Artificial Sequence
  Description of Artificial Sequence: Synthetic oligonucleotide
  Sense strand starting at position 2240 of SEQ ID NO: 586983
auuaucucugucugagaau

SEQ ID NO: 757865 - RNA, 19 nt, Artificial Sequence
  Description of Artificial Sequence: Synthetic oligonucleotide
  Antisense strand to SEQ ID NO: 757864
auucucagacagagauaau

SEQ ID NO: 757866 - RNA, 19 nt, Artificial Sequence
  Description of Artificial Sequence: Synthetic oligonucleotide
  Sense strand starting at position 2285 of SEQ ID NO: 586983
ggaacagucauauguggga

SEQ ID NO: 757867 - RNA, 19 nt, Artificial Sequence
  Description of Artificial Sequence: Synthetic oligonucleotide
  Antisense strand to SEQ ID NO: 757866
ucccacauaugacuguucc

SEQ ID NO: 757868 - RNA, 19 nt, Artificial Sequence
  Description of Artificial Sequence: Synthetic oligonucleotide
  Sense strand starting at position 2668 of SEQ ID NO: 586983
cugccaaucguauaauuag

SEQ ID NO: 757869 - RNA, 19 nt, Artificial Sequence
  Description of Artificial Sequence: Synthetic oligonucleotide
  Antisense strand to SEQ ID NO: 757868
cuaauuauacgauuggcag

SEQ ID NO: 757870 - RNA, 19 nt, Artificial Sequence
  Description of Artificial Sequence: Synthetic oligonucleotide
  Sense strand starting at position 2671 of SEQ ID NO: 586983
ccaaucguauaauuagaaa

SEQ ID NO: 757871 - RNA, 19 nt, Artificial Sequence
  Description of Artificial Sequence: Synthetic oligonucleotide
  Antisense strand to SEQ ID NO: 757870
uuucuaauuauacgauugg

SEQ ID NO: 757872 - RNA, 19 nt, Artificial Sequence
  Description of Artificial Sequence: Synthetic oligonucleotide
  Sense strand starting at position 2751 of SEQ ID NO: 586983
uuucuauauggguaguaug

SEQ ID NO: 757873 - RNA, 19 nt, Artificial Sequence
  Description of Artificial Sequence: Synthetic oligonucleotide
  Antisense strand to SEQ ID NO: 757872
cauacuacccauauagaaa

SEQ ID NO: 757874 - RNA, 19 nt, Artificial Sequence
  Description of Artificial Sequence: Synthetic oligonucleotide
  Sense strand starting at position 2782 of SEQ ID NO: 586983
guuggauguuaauucucaa

SEQ ID NO: 757875 - RNA, 19 nt, Artificial Sequence
  Description of Artificial Sequence: Synthetic oligonucleotide
  Antisense strand to SEQ ID NO: 757874
uugagaauuaacauccaac

SEQ ID NO: 757876 - RNA, 19 nt, Artificial Sequence
  Description of Artificial Sequence: Synthetic oligonucleotide
  Sense strand starting at position 2785 of SEQ ID NO: 586983
ggauguuaauucucaauuc

SEQ ID NO: 757877 - RNA, 19 nt, Artificial Sequence
  Description of Artificial Sequence: Synthetic oligonucleotide
  Antisense strand to SEQ ID NO: 757876
gaauugagaauuaacaucc

SEQ ID NO: 757878 - RNA, 19 nt, Artificial Sequence
  Description of Artificial Sequence: Synthetic oligonucleotide
  Sense strand starting at position 2826 of SEQ ID NO: 586983
guaguuugaauuugcgaaa

SEQ ID NO: 757879 - RNA, 19 nt, Artificial Sequence
  Description of Artificial Sequence: Synthetic oligonucleotide
  Antisense strand to SEQ ID NO: 757878
uuucgcaaauucaaacuac

SEQ ID NO: 757880 - RNA, 19 nt, Artificial Sequence
  Description of Artificial Sequence: Synthetic oligonucleotide
  Sense strand starting at position 2852 of SEQ ID NO: 586983
aguuuauuccacuauguug

SEQ ID NO: 757881 - RNA, 19 nt, Artificial Sequence
  Description of Artificial Sequence: Synthetic oligonucleotide
  Antisense strand to SEQ ID NO: 757880
caacauaguggaauaaacu

SEQ ID NO: 757882 - RNA, 19 nt, Artificial Sequence
  Description of Artificial Sequence: Synthetic oligonucleotide
  Sense strand starting at position 2858 of SEQ ID NO: 586983
uuccacuauguugggaaua

SEQ ID NO: 757883 - RNA, 19 nt, Artificial Sequence
  Description of Artificial Sequence: Synthetic oligonucleotide
  Antisense strand to SEQ ID NO: 757882
uauucccaacauaguggaa

SEQ ID NO: 757884 - RNA, 19 nt, Artificial Sequence
  Description of Artificial Sequence: Synthetic oligonucleotide
  Sense strand starting at position 3352 of SEQ ID NO: 586983
uugugaauugcaugaacag

SEQ ID NO: 757885 - RNA, 19 nt, Artificial Sequence
  Description of Artificial Sequence: Synthetic oligonucleotide
  Antisense strand to SEQ ID NO: 757884
cuguucaugcaauucacaa

SEQ ID NO: 757886 - RNA, 19 nt, Artificial Sequence
  Description of Artificial Sequence: Synthetic oligonucleotide
  Sense strand starting at position 3353 of SEQ ID NO: 586983
ugugaauugcaugaacagu

SEQ ID NO: 757887 - RNA, 19 nt, Artificial Sequence
  Description of Artificial Sequence: Synthetic oligonucleotide
  Antisense strand to SEQ ID NO: 757886
acuguucaugcaauucaca

SEQ ID NO: 757888 - RNA, 19 nt, Artificial Sequence
  Description of Artificial Sequence: Synthetic oligonucleotide
  Sense strand starting at position 38 of SEQ ID NO: 586984
uggaguagacacugucauu

SEQ ID NO: 757889 - RNA, 19 nt, Artificial Sequence
  Description of Artificial Sequence: Synthetic oligonucleotide
  Antisense strand to SEQ ID NO: 757888
aaugacagugucuacucca

SEQ ID NO: 757890 - RNA, 19 nt, Artificial Sequence
  Description of Artificial Sequence: Synthetic oligonucleotide
  Sense strand starting at position 541 of SEQ ID NO: 586984
gacacagaucuguggucca

SEQ ID NO: 757891 - RNA, 19 nt, Artificial Sequence
  Description of Artificial Sequence: Synthetic oligonucleotide
  Antisense strand to SEQ ID NO: 757890
uggaccacagaucuguguc

SEQ ID NO: 757892 - RNA, 19 nt, Artificial Sequence
  Description of Artificial Sequence: Synthetic oligonucleotide
  Sense strand starting at position 544 of SEQ ID NO: 586984
acagaucugugguccauaa

SEQ ID NO: 757893 - RNA, 19 nt, Artificial Sequence
  Description of Artificial Sequence: Synthetic oligonucleotide
  Antisense strand to SEQ ID NO: 757892
uuauggaccacagaucugu

SEQ ID NO: 757894 - RNA, 19 nt, Artificial Sequence
  Description of Artificial Sequence: Synthetic oligonucleotide
  Sense strand starting at position 546 of SEQ ID NO: 586984
agaucugugguccauaaau

SEQ ID NO: 757895 - RNA, 19 nt, Artificial Sequence
  Description of Artificial Sequence: Synthetic oligonucleotide
  Antisense strand to SEQ ID NO: 757894
auuuauggaccacagaucu

SEQ ID NO: 757896 - RNA, 19 nt, Artificial Sequence
  Description of Artificial Sequence: Synthetic oligonucleotide
  Sense strand starting at position 548 of SEQ ID NO: 586984
aucugugguccauaaauca

SEQ ID NO: 757897 - RNA, 19 nt, Artificial Sequence
  Description of Artificial Sequence: Synthetic oligonucleotide
  Antisense strand to SEQ ID NO: 757896
ugauuuauggaccacagau

SEQ ID NO: 757898 - RNA, 19 nt, Artificial Sequence
  Description of Artificial Sequence: Synthetic oligonucleotide
  Sense strand starting at position 572 of SEQ ID NO: 586984
aucacaagugcuggaaaca

SEQ ID NO: 757899 - RNA, 19 nt, Artificial Sequence
  Description of Artificial Sequence: Synthetic oligonucleotide
  Antisense strand to SEQ ID NO: 757898
uguuuccagcacuugugau

SEQ ID NO: 757900 - RNA, 19 nt, Artificial Sequence
  Description of Artificial Sequence: Synthetic oligonucleotide
  Sense strand starting at position 674 of SEQ ID NO: 586984
auuggcuuucccugauaug

SEQ ID NO: 757901 - RNA, 19 nt, Artificial Sequence
  Description of Artificial Sequence: Synthetic oligonucleotide
  Antisense strand to SEQ ID NO: 757900
cauaucagggaaagccaau

SEQ ID NO: 757902 - RNA, 19 nt, Artificial Sequence
  Description of Artificial Sequence: Synthetic oligonucleotide
  Sense strand starting at position 797 of SEQ ID NO: 586984
gaagguccacgcuacaauu

SEQ ID NO: 757903 - RNA, 19 nt, Artificial Sequence
  Description of Artificial Sequence: Synthetic oligonucleotide
  Antisense strand to SEQ ID NO: 757902
aauuguagcguggaccuuc

SEQ ID NO: 757904 - RNA, 19 nt, Artificial Sequence
  Description of Artificial Sequence: Synthetic oligonucleotide
  Sense strand starting at position 822 of SEQ ID NO: 586984
aaggucuuccgagauuauc

SEQ ID NO: 757905 - RNA, 19 nt, Artificial Sequence
  Description of Artificial Sequence: Synthetic oligonucleotide
  Antisense strand to SEQ ID NO: 757904
gauaaucucggaagaccuu

SEQ ID NO: 757906 - RNA, 19 nt, Artificial Sequence
  Description of Artificial Sequence: Synthetic oligonucleotide
  Sense strand starting at position 825 of SEQ ID NO: 586984
gucuuccgagauuaucaca

SEQ ID NO: 757907 - RNA, 19 nt, Artificial Sequence
  Description of Artificial Sequence: Synthetic oligonucleotide
  Antisense strand to SEQ ID NO: 757906
ugugauaaucucggaagac

SEQ ID NO: 757908 - RNA, 19 nt, Artificial Sequence
  Description of Artificial Sequence: Synthetic oligonucleotide
  Sense strand starting at position 1436 of SEQ ID NO: 586984
auguguuucccagagucug

SEQ ID NO: 757909 - RNA, 19 nt, Artificial Sequence
  Description of Artificial Sequence: Synthetic oligonucleotide
  Antisense strand to SEQ ID NO: 757908
cagacucugggaaacacau

SEQ ID NO: 757910 - RNA, 19 nt, Artificial Sequence
  Description of Artificial Sequence: Synthetic oligonucleotide
  Sense strand starting at position 1555 of SEQ ID NO: 586984
aguauuccauuguuaugga

SEQ ID NO: 757911 - RNA, 19 nt, Artificial Sequence
  Description of Artificial Sequence: Synthetic oligonucleotide
  Antisense strand to SEQ ID NO: 757910
uccauaacaauggaauacu

SEQ ID NO: 757912 - RNA, 19 nt, Artificial Sequence
  Description of Artificial Sequence: Synthetic oligonucleotide
  Sense strand starting at position 1562 of SEQ ID NO: 586984
cauuguuauggauguauca

SEQ ID NO: 757913 - RNA, 19 nt, Artificial Sequence
  Description of Artificial Sequence: Synthetic oligonucleotide
  Antisense strand to SEQ ID NO: 757912
ugauacauccauaacaaug

SEQ ID NO: 757914 - RNA, 19 nt, Artificial Sequence
  Description of Artificial Sequence: Synthetic oligonucleotide
  Sense strand starting at position 1564 of SEQ ID NO: 586984
uuguuauggauguaucaga

SEQ ID NO: 757915 - RNA, 19 nt, Artificial Sequence
  Description of Artificial Sequence: Synthetic oligonucleotide
  Antisense strand to SEQ ID NO: 757914
ucugauacauccauaacaa

SEQ ID NO: 757916 - RNA, 19 nt, Artificial Sequence
  Description of Artificial Sequence: Synthetic oligonucleotide
  Sense strand starting at position 1736 of SEQ ID NO: 586984
uauagugucugacucuaag

SEQ ID NO: 757917 - RNA, 19 nt, Artificial Sequence
  Description of Artificial Sequence: Synthetic oligonucleotide
  Antisense strand to SEQ ID NO: 757916
cuuagagucagacacuaua

SEQ ID NO: 757918 - RNA, 19 nt, Artificial Sequence
  Description of Artificial Sequence: Synthetic oligonucleotide
  Sense strand starting at position 1766 of SEQ ID NO: 586984
uugugagaugacugcuuga

SEQ ID NO: 757919 - RNA, 19 nt, Artificial Sequence
  Description of Artificial Sequence: Synthetic oligonucleotide
  Antisense strand to SEQ ID NO: 757918
ucaagcagucaucucacaa

SEQ ID NO: 757920 - RNA, 19 nt, Artificial Sequence
  Description of Artificial Sequence: Synthetic oligonucleotide
  Sense strand starting at position 1769 of SEQ ID NO: 586984
ugagaugacugcuugagac

SEQ ID NO: 757921 - RNA, 19 nt, Artificial Sequence
  Description of Artificial Sequence: Synthetic oligonucleotide
  Antisense strand to SEQ ID NO: 757920
gucucaagcagucaucuca

SEQ ID NO: 757922 - RNA, 19 nt, Artificial Sequence
  Description of Artificial Sequence: Synthetic oligonucleotide
  Sense strand starting at position 1818 of SEQ ID NO: 586984
gcaagaugguaucucuuac

SEQ ID NO: 757923 - RNA, 19 nt, Artificial Sequence
  Description of Artificial Sequence: Synthetic oligonucleotide
  Antisense strand to SEQ ID NO: 757922
guaagagauaccaucuugc

SEQ ID NO: 757924 - RNA, 19 nt, Artificial Sequence
  Description of Artificial Sequence: Synthetic oligonucleotide
  Sense strand starting at position 1880 of SEQ ID NO: 586984
aggauagcauggcucagau

SEQ ID NO: 757925 - RNA, 19 nt, Artificial Sequence
  Description of Artificial Sequence: Synthetic oligonucleotide
  Antisense strand to SEQ ID NO: 757924
aucugagccaugcuauccu

SEQ ID NO: 757926 - RNA, 19 nt, Artificial Sequence
  Description of Artificial Sequence: Synthetic oligonucleotide
  Sense strand starting at position 1882 of SEQ ID NO: 586984
gauagcauggcucagauua

SEQ ID NO: 757927 - RNA, 19 nt, Artificial Sequence
  Description of Artificial Sequence: Synthetic oligonucleotide
  Antisense strand to SEQ ID NO: 757926
uaaucugagccaugcuauc

SEQ ID NO: 757928 - RNA, 19 nt, Artificial Sequence
  Description of Artificial Sequence: Synthetic oligonucleotide
  Sense strand starting at position 1955 of SEQ ID NO: 586984
ucacguuagcaguaggaga

SEQ ID NO: 757929 - RNA, 19 nt, Artificial Sequence
  Description of Artificial Sequence: Synthetic oligonucleotide
  Antisense strand to SEQ ID NO: 757928
ucuccuacugcuaacguga

SEQ ID NO: 757930 - RNA, 19 nt, Artificial Sequence
  Description of Artificial Sequence: Synthetic oligonucleotide
  Sense strand starting at position 2045 of SEQ ID NO: 586984
ucacaaugccagcaagaga

SEQ ID NO: 757931 - RNA, 19 nt, Artificial Sequence
  Description of Artificial Sequence: Synthetic oligonucleotide
  Antisense strand to SEQ ID NO: 757930
ucucuugcuggcauuguga

SEQ ID NO: 757932 - RNA, 19 nt, Artificial Sequence
  Description of Artificial Sequence: Synthetic oligonucleotide
  Sense strand starting at position 2074 of SEQ ID NO: 586984
gcagucuuuccagggagac

SEQ ID NO: 757933 - RNA, 19 nt, Artificial Sequence
  Description of Artificial Sequence: Synthetic oligonucleotide
  Antisense strand to SEQ ID NO: 757932
gucucccuggaaagacugc

SEQ ID NO: 757934 - RNA, 19 nt, Artificial Sequence
  Description of Artificial Sequence: Synthetic oligonucleotide
  Sense strand starting at position 2075 of SEQ ID NO: 586984
cagucuuuccagggagaca

SEQ ID NO: 757935 - RNA, 19 nt, Artificial Sequence
  Description of Artificial Sequence: Synthetic oligonucleotide
  Antisense strand to SEQ ID NO: 757934
ugucucccuggaaagacug

SEQ ID NO: 757936 - RNA, 19 nt, Artificial Sequence
  Description of Artificial Sequence: Synthetic oligonucleotide
  Sense strand starting at position 2332 of SEQ ID NO: 586984
uccuguuggaacugagaau

SEQ ID NO: 757937 - RNA, 19 nt, Artificial Sequence
  Description of Artificial Sequence: Synthetic oligonucleotide
  Antisense strand to SEQ ID NO: 757936
auucucaguuccaacagga

SEQ ID NO: 757938 - RNA, 19 nt, Artificial Sequence
  Description of Artificial Sequence: Synthetic oligonucleotide
  Sense strand starting at position 2435 of SEQ ID NO: 586984
cugggaaguuaucuuccua

SEQ ID NO: 757939 - RNA, 19 nt, Artificial Sequence
  Description of Artificial Sequence: Synthetic oligonucleotide
  Antisense strand to SEQ ID NO: 757938
uaggaagauaacuucccag

SEQ ID NO: 757940 - RNA, 19 nt, Artificial Sequence
  Description of Artificial Sequence: Synthetic oligonucleotide
  Sense strand starting at position 2456 of SEQ ID NO: 586984
ccugcaaagcucuaucaag

SEQ ID NO: 757941 - RNA, 19 nt, Artificial Sequence
  Description of Artificial Sequence: Synthetic oligonucleotide
  Antisense strand to SEQ ID NO: 757940
cuugauagagcuuugcagg

SEQ ID NO: 757942 - RNA, 19 nt, Artificial Sequence
  Description of Artificial Sequence: Synthetic oligonucleotide
  Sense strand starting at position 2523 of SEQ ID NO: 586984
uuuauuaugaguggaguca

SEQ ID NO: 757943 - RNA, 19 nt, Artificial Sequence
  Description of Artificial Sequence: Synthetic oligonucleotide
  Antisense strand to SEQ ID NO: 757942
ugacuccacucauaauaaa

SEQ ID NO: 757944 - RNA, 19 nt, Artificial Sequence
  Description of Artificial Sequence: Synthetic oligonucleotide
  Sense strand starting at position 2532 of SEQ ID NO: 586984
aguggagucagguggaaga

SEQ ID NO: 757945 - RNA, 19 nt, Artificial Sequence
  Description of Artificial Sequence: Synthetic oligonucleotide
  Antisense strand to SEQ ID NO: 757944
ucuuccaccugacuccacu

SEQ ID NO: 757946 - RNA, 19 nt, Artificial Sequence
  Description of Artificial Sequence: Synthetic oligonucleotide
  Sense strand starting at position 2542 of SEQ ID NO: 586984
gguggaagagccugauacu

SEQ ID NO: 757947 - RNA, 19 nt, Artificial Sequence
  Description of Artificial Sequence: Synthetic oligonucleotide
  Antisense strand to SEQ ID NO: 757946
aguaucaggcucuuccacc

SEQ ID NO: 757948 - RNA, 19 nt, Artificial Sequence
  Description of Artificial Sequence: Synthetic oligonucleotide
  Sense strand starting at position 2543 of SEQ ID NO: 586984
guggaagagccugauacuu

SEQ ID NO: 757949 - RNA, 19 nt, Artificial Sequence
  Description of Artificial Sequence: Synthetic oligonucleotide
  Antisense strand to SEQ ID NO: 757948
aaguaucaggcucuuccac

SEQ ID NO: 757950 - RNA, 19 nt, Artificial Sequence
  Description of Artificial Sequence: Synthetic oligonucleotide
  Sense strand starting at position 2592 of SEQ ID NO: 586984
ucggauauccuuuaucuuc

SEQ ID NO: 757951 - RNA, 19 nt, Artificial Sequence
  Description of Artificial Sequence: Synthetic oligonucleotide
  Antisense strand to SEQ ID NO: 757950
gaagauaaaggauauccga

SEQ ID NO: 757952 - RNA, 19 nt, Artificial Sequence
  Description of Artificial Sequence: Synthetic oligonucleotide
  Sense strand starting at position 2669 of SEQ ID NO: 586984
auauauugcuagcuaagga

SEQ ID NO: 757953 - RNA, 19 nt, Artificial Sequence
  Description of Artificial Sequence: Synthetic oligonucleotide
  Antisense strand to SEQ ID NO: 757952
uccuuagcuagcaauauau

SEQ ID NO: 757954 - RNA, 19 nt, Artificial Sequence
  Description of Artificial Sequence: Synthetic oligonucleotide
  Sense strand starting at position 3191 of SEQ ID NO: 586984
auaugaagugcccaucaaa

SEQ ID NO: 757955 - RNA, 19 nt, Artificial Sequence
  Description of Artificial Sequence: Synthetic oligonucleotide
  Antisense strand to SEQ ID NO: 757954
uuugaugggcacuucauau

SEQ ID NO: 757956 - RNA, 19 nt, Artificial Sequence
  Description of Artificial Sequence: Synthetic oligonucleotide
  Sense strand starting at position 3234 of SEQ ID NO: 586984
agagaaauucuuuaugcuu

SEQ ID NO: 757957 - RNA, 19 nt, Artificial Sequence
  Description of Artificial Sequence: Synthetic oligonucleotide
  Antisense strand to SEQ ID NO: 757956
aagcauaaagaauuucucu

SEQ ID NO: 757958 - RNA, 19 nt, Artificial Sequence
  Description of Artificial Sequence: Synthetic oligonucleotide
  Sense strand starting at position 3521 of SEQ ID NO: 586984
acacuaugugcacauagaa

SEQ ID NO: 757959 - RNA, 19 nt, Artificial Sequence
  Description of Artificial Sequence: Synthetic oligonucleotide
  Antisense strand to SEQ ID NO: 757958
uucuaugugcacauagugu

SEQ ID NO: 757960 - RNA, 19 nt, Artificial Sequence
  Description of Artificial Sequence: Synthetic oligonucleotide
  Sense strand starting at position 3548 of SEQ ID NO: 586984
ugacuuguauaguuauaca

SEQ ID NO: 757961 - RNA, 19 nt, Artificial Sequence
  Description of Artificial Sequence: Synthetic oligonucleotide
  Antisense strand to SEQ ID NO: 757960
uguauaacuauacaaguca

SEQ ID NO: 757962 - RNA, 19 nt, Artificial Sequence
  Description of Artificial Sequence: Synthetic oligonucleotide
  Sense strand starting at position 3569 of SEQ ID NO: 586984
ugacaucauggcugggaua

SEQ ID NO: 757963 - RNA, 19 nt, Artificial Sequence
  Description of Artificial Sequence: Synthetic oligonucleotide
  Antisense strand to SEQ ID NO: 757962
uaucccagccaugauguca

SEQ ID NO: 757964 - RNA, 19 nt, Artificial Sequence
  Description of Artificial Sequence: Synthetic oligonucleotide
  Sense strand starting at position 3570 of SEQ ID NO: 586984
gacaucauggcugggauau

SEQ ID NO: 757965 - RNA, 19 nt, Artificial Sequence
  Description of Artificial Sequence: Synthetic oligonucleotide
  Antisense strand to SEQ ID NO: 757964
auaucccagccaugauguc

SEQ ID NO: 757966 - RNA, 19 nt, Artificial Sequence
  Description of Artificial Sequence: Synthetic oligonucleotide
  Sense strand starting at position 3571 of SEQ ID NO: 586984
acaucauggcugggauaua

SEQ ID NO: 757967 - RNA, 19 nt, Artificial Sequence
  Description of Artificial Sequence: Synthetic oligonucleotide
  Antisense strand to SEQ ID NO: 757966
uauaucccagccaugaugu

SEQ ID NO: 757968 - RNA, 19 nt, Artificial Sequence
  Description of Artificial Sequence: Synthetic oligonucleotide
  Sense strand starting at position 5 of SEQ ID NO: 586985
guggcugauuucuaaacuu

SEQ ID NO: 757969 - RNA, 19 nt, Artificial Sequence
  Description of Artificial Sequence: Synthetic oligonucleotide
  Antisense strand to SEQ ID NO: 757968
aaguuuagaaaucagccac

SEQ ID NO: 757970 - RNA, 19 nt, Artificial Sequence
  Description of Artificial Sequence: Synthetic oligonucleotide
  Sense strand starting at position 67 of SEQ ID NO: 586985
accagaguguagguaagua

SEQ ID NO: 757971 - RNA, 19 nt, Artificial Sequence
  Description of Artificial Sequence: Synthetic oligonucleotide
  Antisense strand to SEQ ID NO: 757970
uacuuaccuacacucuggu

SEQ ID NO: 757972 - RNA, 19 nt, Artificial Sequence
  Description of Artificial Sequence: Synthetic oligonucleotide
  Sense strand starting at position 71 of SEQ ID NO: 586985
gaguguagguaaguaaaua

SEQ ID NO: 757973 - RNA, 19 nt, Artificial Sequence
  Description of Artificial Sequence: Synthetic oligonucleotide
  Antisense strand to SEQ ID NO: 757972
uauuuacuuaccuacacuc

SEQ ID NO: 757974 - RNA, 19 nt, Artificial Sequence
  Description of Artificial Sequence: Synthetic oligonucleotide
  Sense strand starting at position 72 of SEQ ID NO: 586985
aguguagguaaguaaauaa

SEQ ID NO: 757975 - RNA, 19 nt, Artificial Sequence
  Description of Artificial Sequence: Synthetic oligonucleotide
  Antisense strand to SEQ ID NO: 757974
uuauuuacuuaccuacacu

SEQ ID NO: 757976 - RNA, 19 nt, Artificial Sequence
  Description of Artificial Sequence: Synthetic oligonucleotide
  Sense strand starting at position 257 of SEQ ID NO: 586985
acugucaucucauuaagug

SEQ ID NO: 757977 - RNA, 19 nt, Artificial Sequence
  Description of Artificial Sequence: Synthetic oligonucleotide
  Antisense strand to SEQ ID NO: 757976
cacuuaaugagaugacagu

SEQ ID NO: 757978 - RNA, 19 nt, Artificial Sequence
  Description of Artificial Sequence: Synthetic oligonucleotide
  Sense strand starting at position 258 of SEQ ID NO: 586985
cugucaucucauuaagugu

SEQ ID NO: 757979 - RNA, 19 nt, Artificial Sequence
  Description of Artificial Sequence: Synthetic oligonucleotide
  Antisense strand to SEQ ID NO: 757978
acacuuaaugagaugacag

SEQ ID NO: 757980 - RNA, 19 nt, Artificial Sequence
  Description of Artificial Sequence: Synthetic oligonucleotide
  Sense strand starting at position 392 of SEQ ID NO: 586985
gcugaagacuguuucucau

SEQ ID NO: 757981 - RNA, 19 nt, Artificial Sequence
  Description of Artificial Sequence: Synthetic oligonucleotide
  Antisense strand to SEQ ID NO: 757980
augagaaacagucuucagc

SEQ ID NO: 757982 - RNA, 19 nt, Artificial Sequence
  Description of Artificial Sequence: Synthetic oligonucleotide
  Sense strand starting at position 394 of SEQ ID NO: 586985
ugaagacuguuucucaucu

SEQ ID NO: 757983 - RNA, 19 nt, Artificial Sequence
  Description of Artificial Sequence: Synthetic oligonucleotide
  Antisense strand to SEQ ID NO: 757982
agaugagaaacagucuuca

SEQ ID NO: 757984 - RNA, 19 nt, Artificial Sequence
  Description of Artificial Sequence: Synthetic oligonucleotide
  Sense strand starting at position 885 of SEQ ID NO: 586985
acuguaugcccaggaaucu

SEQ ID NO: 757985 - RNA, 19 nt, Artificial Sequence
  Description of Artificial Sequence: Synthetic oligonucleotide
  Antisense strand to SEQ ID NO: 757984
agauuccugggcauacagu

SEQ ID NO: 757986 - RNA, 19 nt, Artificial Sequence
  Description of Artificial Sequence: Synthetic oligonucleotide
  Sense strand starting at position 1075 of SEQ ID NO: 586985
ucauaugauugacagauaa

SEQ ID NO: 757987 - RNA, 19 nt, Artificial Sequence
  Description of Artificial Sequence: Synthetic oligonucleotide
  Antisense strand to SEQ ID NO: 757986
uuaucugucaaucauauga

SEQ ID NO: 757988 - RNA, 19 nt, Artificial Sequence
  Description of Artificial Sequence: Synthetic oligonucleotide
  Sense strand starting at position 1160 of SEQ ID NO: 586985
ugcagugacuguuccauuu

SEQ ID NO: 757989 - RNA, 19 nt, Artificial Sequence
  Description of Artificial Sequence: Synthetic oligonucleotide
  Antisense strand to SEQ ID NO: 757988
aaauggaacagucacugca

SEQ ID NO: 757990 - RNA, 19 nt, Artificial Sequence
  Description of Artificial Sequence: Synthetic oligonucleotide
  Sense strand starting at position 1221 of SEQ ID NO: 586985
ugugacuaaucuguggguu

SEQ ID NO: 757991 - RNA, 19 nt, Artificial Sequence
  Description of Artificial Sequence: Synthetic oligonucleotide
  Antisense strand to SEQ ID NO: 757990
aacccacagauuagucaca

SEQ ID NO: 757992 - RNA, 19 nt, Artificial Sequence
  Description of Artificial Sequence: Synthetic oligonucleotide
  Sense strand starting at position 1222 of SEQ ID NO: 586985
gugacuaaucuguggguuu

SEQ ID NO: 757993 - RNA, 19 nt, Artificial Sequence
  Description of Artificial Sequence: Synthetic oligonucleotide
  Antisense strand to SEQ ID NO: 757992
aaacccacagauuagucac

SEQ ID NO: 757994 - RNA, 19 nt, Artificial Sequence
  Description of Artificial Sequence: Synthetic oligonucleotide
  Sense strand starting at position 1345 of SEQ ID NO: 586985
uucguaauucuguagagca

SEQ ID NO: 757995 - RNA, 19 nt, Artificial Sequence
  Description of Artificial Sequence: Synthetic oligonucleotide
  Antisense strand to SEQ ID NO: 757994
ugcucuacagaauuacgaa

SEQ ID NO: 757996 - RNA, 19 nt, Artificial Sequence
  Description of Artificial Sequence: Synthetic oligonucleotide
  Sense strand starting at position 1620 of SEQ ID NO: 586985
gcaggacaauacguuauau

SEQ ID NO: 757997 - RNA, 19 nt, Artificial Sequence
  Description of Artificial Sequence: Synthetic oligonucleotide
  Antisense strand to SEQ ID NO: 757996
auauaacguauuguccugc

SEQ ID NO: 757998 - RNA, 19 nt, Artificial Sequence
  Description of Artificial Sequence: Synthetic oligonucleotide
  Sense strand starting at position 1676 of SEQ ID NO: 586985
guuucuuagcaaugcuaca

SEQ ID NO: 757999 - RNA, 19 nt, Artificial Sequence
  Description of Artificial Sequence: Synthetic oligonucleotide
  Antisense strand to SEQ ID NO: 757998
uguagcauugcuaagaaac

SEQ ID NO: 758000 - RNA, 19 nt, Artificial Sequence
  Description of Artificial Sequence: Synthetic oligonucleotide
  Sense strand starting at position 1721 of SEQ ID NO: 586985
agcuguaccuuucugaaga

SEQ ID NO: 758001 - RNA, 19 nt, Artificial Sequence
  Description of Artificial Sequence: Synthetic oligonucleotide
  Antisense strand to SEQ ID NO: 758000
ucuucagaaagguacagcu

SEQ ID NO: 758002 - RNA, 19 nt, Artificial Sequence
  Description of Artificial Sequence: Synthetic oligonucleotide
  Sense strand starting at position 1738 of SEQ ID NO: 586985
gaggacgacuucucagagu

SEQ ID NO: 758003 - RNA, 19 nt, Artificial Sequence
  Description of Artificial Sequence: Synthetic oligonucleotide
  Antisense strand to SEQ ID NO: 758002
acucugagaagucguccuc

SEQ ID NO: 758004 - RNA, 19 nt, Artificial Sequence
  Description of Artificial Sequence: Synthetic oligonucleotide
  Sense strand starting at position 1772 of SEQ ID NO: 586985
gcucaaucuucugcuugau

SEQ ID NO: 758005 - RNA, 19 nt, Artificial Sequence
  Description of Artificial Sequence: Synthetic oligonucleotide
  Antisense strand to SEQ ID NO: 758004
aucaagcagaagauugagc

SEQ ID NO: 758006 - RNA, 19 nt, Artificial Sequence
  Description of Artificial Sequence: Synthetic oligonucleotide
  Sense strand starting at position 1899 of SEQ ID NO: 586985
caagauucgcaguacuucu

SEQ ID NO: 758007 - RNA, 19 nt, Artificial Sequence
  Description of Artificial Sequence: Synthetic oligonucleotide
  Antisense strand to SEQ ID NO: 758006
agaaguacugcgaaucuug

SEQ ID NO: 758008 - RNA, 19 nt, Artificial Sequence
  Description of Artificial Sequence: Synthetic oligonucleotide
  Sense strand starting at position 1914 of SEQ ID NO: 586985
uucuguuaggacugggauu

SEQ ID NO: 758009 - RNA, 19 nt, Artificial Sequence
  Description of Artificial Sequence: Synthetic oligonucleotide
  Antisense strand to SEQ ID NO: 758008
aaucccaguccuaacagaa

SEQ ID NO: 758010 - RNA, 19 nt, Artificial Sequence
  Description of Artificial Sequence: Synthetic oligonucleotide
  Sense strand starting at position 1987 of SEQ ID NO: 586985
gcacaugacuguuuaugaa

SEQ ID NO: 758011 - RNA, 19 nt, Artificial Sequence
  Description of Artificial Sequence: Synthetic oligonucleotide
  Antisense strand to SEQ ID NO: 758010
uucauaaacagucaugugc

SEQ ID NO: 758012 - RNA, 19 nt, Artificial Sequence
  Description of Artificial Sequence: Synthetic oligonucleotide
  Sense strand starting at position 2056 of SEQ ID NO: 586985
uagaacuagcaugguucua

SEQ ID NO: 758013 - RNA, 19 nt, Artificial Sequence
  Description of Artificial Sequence: Synthetic oligonucleotide
  Antisense strand to SEQ ID NO: 758012
uagaaccaugcuaguucua

SEQ ID NO: 758014 - RNA, 19 nt, Artificial Sequence
  Description of Artificial Sequence: Synthetic oligonucleotide
  Sense strand starting at position 2058 of SEQ ID NO: 586985
gaacuagcaugguucuaca

SEQ ID NO: 758015 - RNA, 19 nt, Artificial Sequence
  Description of Artificial Sequence: Synthetic oligonucleotide
  Antisense strand to SEQ ID NO: 758014
uguagaaccaugcuaguuc

SEQ ID NO: 758016 - RNA, 19 nt, Artificial Sequence
  Description of Artificial Sequence: Synthetic oligonucleotide
  Sense strand starting at position 2151 of SEQ ID NO: 586985
uugagaagccuggguaauc

SEQ ID NO: 758017 - RNA, 19 nt, Artificial Sequence
  Description of Artificial Sequence: Synthetic oligonucleotide
  Antisense strand to SEQ ID NO: 758016
gauuacccaggcuucucaa

SEQ ID NO: 758018 - RNA, 19 nt, Artificial Sequence
  Description of Artificial Sequence: Synthetic oligonucleotide
  Sense strand starting at position 2152 of SEQ ID NO: 586985
ugagaagccuggguaauca

SEQ ID NO: 758019 - RNA, 19 nt, Artificial Sequence
  Description of Artificial Sequence: Synthetic oligonucleotide
  Antisense strand to SEQ ID NO: 758018
ugauuacccaggcuucuca

SEQ ID NO: 758020 - RNA, 19 nt, Artificial Sequence
  Description of Artificial Sequence: Synthetic oligonucleotide
  Sense strand starting at position 2169 of SEQ ID NO: 586985
cacgucacaggcuguaaua

SEQ ID NO: 758021 - RNA, 19 nt, Artificial Sequence
  Description of Artificial Sequence: Synthetic oligonucleotide
  Antisense strand to SEQ ID NO: 758020
uauuacagccugugacgug

SEQ ID NO: 758022 - RNA, 19 nt, Artificial Sequence
  Description of Artificial Sequence: Synthetic oligonucleotide
  Sense strand starting at position 2171 of SEQ ID NO: 586985
cgucacaggcuguaauaaa

SEQ ID NO: 758023 - RNA, 19 nt, Artificial Sequence
  Description of Artificial Sequence: Synthetic oligonucleotide
  Antisense strand to SEQ ID NO: 758022
uuuauuacagccugugacg

SEQ ID NO: 758024 - RNA, 19 nt, Artificial Sequence
  Description of Artificial Sequence: Synthetic oligonucleotide
  Sense strand starting at position 2233 of SEQ ID NO: 586985
aaauauggcucagugaauc

SEQ ID NO: 758025 - RNA, 19 nt, Artificial Sequence
  Description of Artificial Sequence: Synthetic oligonucleotide
  Antisense strand to SEQ ID NO: 758024
gauucacugagccauauuu

SEQ ID NO: 758026 - RNA, 19 nt, Artificial Sequence
  Description of Artificial Sequence: Synthetic oligonucleotide
  Sense strand starting at position 2948 of SEQ ID NO: 586985
aaaguugaauaugagaaga

SEQ ID NO: 758027 - RNA, 19 nt, Artificial Sequence
  Description of Artificial Sequence: Synthetic oligonucleotide
  Antisense strand to SEQ ID NO: 758026
ucuucucauauucaacuuu

SEQ ID NO: 758028 - RNA, 19 nt, Artificial Sequence
  Description of Artificial Sequence: Synthetic oligonucleotide
  Sense strand starting at position 2950 of SEQ ID NO: 586985
aguugaauaugagaagaug

SEQ ID NO: 758029 - RNA, 19 nt, Artificial Sequence
  Description of Artificial Sequence: Synthetic oligonucleotide
  Antisense strand to SEQ ID NO: 758028
caucuucucauauucaacu

SEQ ID NO: 758030 - RNA, 19 nt, Artificial Sequence
  Description of Artificial Sequence: Synthetic oligonucleotide
  Sense strand starting at position 3104 of SEQ ID NO: 586985
augaauaccugaugagaga

SEQ ID NO: 758031 - RNA, 19 nt, Artificial Sequence
  Description of Artificial Sequence: Synthetic oligonucleotide
  Antisense strand to SEQ ID NO: 758030
ucucucaucagguauucau

SEQ ID NO: 758032 - RNA, 19 nt, Artificial Sequence
  Description of Artificial Sequence: Synthetic oligonucleotide
  Sense strand starting at position 3293 of SEQ ID NO: 586985
cucagacucugccuuggau

SEQ ID NO: 758033 - RNA, 19 nt, Artificial Sequence
  Description of Artificial Sequence: Synthetic oligonucleotide
  Antisense strand to SEQ ID NO: 758032
auccaaggcagagucugag

SEQ ID NO: 758034 - RNA, 19 nt, Artificial Sequence
  Description of Artificial Sequence: Synthetic oligonucleotide
  Sense strand starting at position 3651 of SEQ ID NO: 586985
gcuguaugaccuuggagaa

SEQ ID NO: 758035 - RNA, 19 nt, Artificial Sequence
  Description of Artificial Sequence: Synthetic oligonucleotide
  Antisense strand to SEQ ID NO: 758034
uucuccaaggucauacagc

SEQ ID NO: 758036 - RNA, 19 nt, Artificial Sequence
  Description of Artificial Sequence: Synthetic oligonucleotide
  Sense strand starting at position 3780 of SEQ ID NO: 586985
uaguauugugccugggaug

SEQ ID NO: 758037 - RNA, 19 nt, Artificial Sequence
  Description of Artificial Sequence: Synthetic oligonucleotide
  Antisense strand to SEQ ID NO: 758036
caucccaggcacaauacua

SEQ ID NO: 758038 - RNA, 19 nt, Artificial Sequence
  Description of Artificial Sequence: Synthetic oligonucleotide
  Sense strand starting at position 3862 of SEQ ID NO: 586985
aggccuguccaauguuaaa

SEQ ID NO: 758039 - RNA, 19 nt, Artificial Sequence
  Description of Artificial Sequence: Synthetic oligonucleotide
  Antisense strand to SEQ ID NO: 758038
uuuaacauuggacaggccu

SEQ ID NO: 758040 - RNA, 19 nt, Artificial Sequence
  Description of Artificial Sequence: Synthetic oligonucleotide
  Sense strand starting at position 3953 of SEQ ID NO: 586985
aguguuauuguagguggga

SEQ ID NO: 758041 - RNA, 19 nt, Artificial Sequence
  Description of Artificial Sequence: Synthetic oligonucleotide
  Antisense strand to SEQ ID NO: 758040
ucccaccuacaauaacacu

SEQ ID NO: 758042 - RNA, 19 nt, Artificial Sequence
  Description of Artificial Sequence: Synthetic oligonucleotide
  Sense strand starting at position 3954 of SEQ ID NO: 586985
guguuauuguaggugggaa

SEQ ID NO: 758043 - RNA, 19 nt, Artificial Sequence
  Description of Artificial Sequence: Synthetic oligonucleotide
  Antisense strand to SEQ ID NO: 758042
uucccaccuacaauaacac

SEQ ID NO: 758044 - RNA, 19 nt, Artificial Sequence
  Description of Artificial Sequence: Synthetic oligonucleotide
  Sense strand starting at position 3955 of SEQ ID NO: 586985
uguuauuguaggugggaac

SEQ ID NO: 758045 - RNA, 19 nt, Artificial Sequence
  Description of Artificial Sequence: Synthetic oligonucleotide
  Antisense strand to SEQ ID NO: 758044
guucccaccuacaauaaca

SEQ ID NO: 758046 - RNA, 19 nt, Artificial Sequence
  Description of Artificial Sequence: Synthetic oligonucleotide
  Sense strand starting at position 3966 of SEQ ID NO: 586985
gugggaacuuaacuuuaau

SEQ ID NO: 758047 - RNA, 19 nt, Artificial Sequence
  Description of Artificial Sequence: Synthetic oligonucleotide
  Antisense strand to SEQ ID NO: 758046
auuaaaguuaaguucccac

SEQ ID NO: 758048 - RNA, 19 nt, Artificial Sequence
  Description of Artificial Sequence: Synthetic oligonucleotide
  Sense strand starting at position 78 of SEQ ID NO: 586986
gcccucgaccauuaggaaa

SEQ ID NO: 758049 - RNA, 19 nt, Artificial Sequence
  Description of Artificial Sequence: Synthetic oligonucleotide
  Antisense strand to SEQ ID NO: 758048
uuuccuaauggucgagggc

SEQ ID NO: 758050 - RNA, 19 nt, Artificial Sequence
  Description of Artificial Sequence: Synthetic oligonucleotide
  Sense strand starting at position 154 of SEQ ID NO: 586986
uccacauguacguaaaggu

SEQ ID NO: 758051 - RNA, 19 nt, Artificial Sequence
  Description of Artificial Sequence: Synthetic oligonucleotide
  Antisense strand to SEQ ID NO: 758050
accuuuacguacaugugga

SEQ ID NO: 758052 - RNA, 19 nt, Artificial Sequence
  Description of Artificial Sequence: Synthetic oligonucleotide
  Sense strand starting at position 181 of SEQ ID NO: 586986
cauauacgugucuauuugu

SEQ ID NO: 758053 - RNA, 19 nt, Artificial Sequence
  Description of Artificial Sequence: Synthetic oligonucleotide
  Antisense strand to SEQ ID NO: 758052
acaaauagacacguauaug

SEQ ID NO: 758054 - RNA, 19 nt, Artificial Sequence
  Description of Artificial Sequence: Synthetic oligonucleotide
  Sense strand starting at position 184 of SEQ ID NO: 586986
auacgugucuauuuguaua

SEQ ID NO: 758055 - RNA, 19 nt, Artificial Sequence
  Description of Artificial Sequence: Synthetic oligonucleotide
  Antisense strand to SEQ ID NO: 758054
uauacaaauagacacguau

SEQ ID NO: 758056 - RNA, 19 nt, Artificial Sequence
  Description of Artificial Sequence: Synthetic oligonucleotide
  Sense strand starting at position 186 of SEQ ID NO: 586986
acgugucuauuuguauaua

SEQ ID NO: 758057 - RNA, 19 nt, Artificial Sequence
  Description of Artificial Sequence: Synthetic oligonucleotide
  Antisense strand to SEQ ID NO: 758056
uauauacaaauagacacgu

SEQ ID NO: 758058 - RNA, 19 nt, Artificial Sequence
  Description of Artificial Sequence: Synthetic oligonucleotide
  Sense strand starting at position 257 of SEQ ID NO: 586986
uuauguuucugaguauaac

SEQ ID NO: 758059 - RNA, 19 nt, Artificial Sequence
  Description of Artificial Sequence: Synthetic oligonucleotide
  Antisense strand to SEQ ID NO: 758058
guuauacucagaaacauaa

SEQ ID NO: 758060 - RNA, 19 nt, Artificial Sequence
  Description of Artificial Sequence: Synthetic oligonucleotide
  Sense strand starting at position 260 of SEQ ID NO: 586986
uguuucugaguauaacaga

SEQ ID NO: 758061 - RNA, 19 nt, Artificial Sequence
  Description of Artificial Sequence: Synthetic oligonucleotide
  Antisense strand to SEQ ID NO: 758060
ucuguuauacucagaaaca

SEQ ID NO: 758062 - RNA, 19 nt, Artificial Sequence
  Description of Artificial Sequence: Synthetic oligonucleotide
  Sense strand starting at position 273 of SEQ ID NO: 586986
aacagacuacguggaauua

SEQ ID NO: 758063 - RNA, 19 nt, Artificial Sequence
  Description of Artificial Sequence: Synthetic oligonucleotide
  Antisense strand to SEQ ID NO: 758062
uaauuccacguagucuguu

SEQ ID NO: 758064 - RNA, 19 nt, Artificial Sequence
  Description of Artificial Sequence: Synthetic oligonucleotide
  Sense strand starting at position 303 of SEQ ID NO: 586986
ugaauuaagagcugugauu

SEQ ID NO: 758065 - RNA, 19 nt, Artificial Sequence
  Description of Artificial Sequence: Synthetic oligonucleotide
  Antisense strand to SEQ ID NO: 758064
aaucacagcucuuaauuca

SEQ ID NO: 758066 - RNA, 19 nt, Artificial Sequence
  Description of Artificial Sequence: Synthetic oligonucleotide
  Sense strand starting at position 360 of SEQ ID NO: 586986
ucuccuuaccacuggguaa

SEQ ID NO: 758067 - RNA, 19 nt, Artificial Sequence
  Description of Artificial Sequence: Synthetic oligonucleotide
  Antisense strand to SEQ ID NO: 758066
uuacccagugguaaggaga

SEQ ID NO: 758068 - RNA, 19 nt, Artificial Sequence
  Description of Artificial Sequence: Synthetic oligonucleotide
  Sense strand starting at position 817 of SEQ ID NO: 586986
aagagauaacgaugucgaa

SEQ ID NO: 758069 - RNA, 19 nt, Artificial Sequence
  Description of Artificial Sequence: Synthetic oligonucleotide
  Antisense strand to SEQ ID NO: 758068
uucgacaucguuaucucuu

SEQ ID NO: 758070 - RNA, 19 nt, Artificial Sequence
  Description of Artificial Sequence: Synthetic oligonucleotide
  Sense strand starting at position 827 of SEQ ID NO: 586986
gaugucgaacgcugguaaa

SEQ ID NO: 758071 - RNA, 19 nt, Artificial Sequence
  Description of Artificial Sequence: Synthetic oligonucleotide
  Antisense strand to SEQ ID NO: 758070
uuuaccagcguucgacauc

SEQ ID NO: 758072 - RNA, 19 nt, Artificial Sequence
  Description of Artificial Sequence: Synthetic oligonucleotide
  Sense strand starting at position 906 of SEQ ID NO: 586986
ggagcagcucuccaggaaa

SEQ ID NO: 758073 - RNA, 19 nt, Artificial Sequence
  Description of Artificial Sequence: Synthetic oligonucleotide
  Antisense strand to SEQ ID NO: 758072
uuuccuggagagcugcucc

SEQ ID NO: 758074 - RNA, 19 nt, Artificial Sequence
  Description of Artificial Sequence: Synthetic oligonucleotide
  Sense strand starting at position 1187 of SEQ ID NO: 586986
uuagguucucagcagaaag

SEQ ID NO: 758075 - RNA, 19 nt, Artificial Sequence
  Description of Artificial Sequence: Synthetic oligonucleotide
  Antisense strand to SEQ ID NO: 758074
cuuucugcugagaaccuaa

SEQ ID NO: 758076 - RNA, 19 nt, Artificial Sequence
  Description of Artificial Sequence: Synthetic oligonucleotide
  Sense strand starting at position 1746 of SEQ ID NO: 586986
uccgcuuucgggccugaau

SEQ ID NO: 758077 - RNA, 19 nt, Artificial Sequence
  Description of Artificial Sequence: Synthetic oligonucleotide
  Antisense strand to SEQ ID NO: 758076
auucaggcccgaaagcgga

SEQ ID NO: 758078 - RNA, 19 nt, Artificial Sequence
  Description of Artificial Sequence: Synthetic oligonucleotide
  Sense strand starting at position 1857 of SEQ ID NO: 586986
ucaccuuuccgggagcuca

SEQ ID NO: 758079 - RNA, 19 nt, Artificial Sequence
  Description of Artificial Sequence: Synthetic oligonucleotide
  Antisense strand to SEQ ID NO: 758078
ugagcucccggaaagguga

SEQ ID NO: 758080 - RNA, 19 nt, Artificial Sequence
  Description of Artificial Sequence: Synthetic oligonucleotide
  Sense strand starting at position 2498 of SEQ ID NO: 586986
aaaccuggguccgcgauua

SEQ ID NO: 758081 - RNA, 19 nt, Artificial Sequence
  Description of Artificial Sequence: Synthetic oligonucleotide
  Antisense strand to SEQ ID NO: 758080
uaaucgcggacccagguuu

SEQ ID NO: 758082 - RNA, 19 nt, Artificial Sequence
  Description of Artificial Sequence: Synthetic oligonucleotide
  Sense strand starting at position 2517 of SEQ ID NO: 586986
gcggugugaccuuggagaa

SEQ ID NO: 758083 - RNA, 19 nt, Artificial Sequence
  Description of Artificial Sequence: Synthetic oligonucleotide
  Antisense strand to SEQ ID NO: 758082
uucuccaaggucacaccgc

SEQ ID NO: 758084 - RNA, 19 nt, Artificial Sequence
  Description of Artificial Sequence: Synthetic oligonucleotide
  Sense strand starting at position 2518 of SEQ ID NO: 586986
cggugugaccuuggagaag

SEQ ID NO: 758085 - RNA, 19 nt, Artificial Sequence
  Description of Artificial Sequence: Synthetic oligonucleotide
  Antisense strand to SEQ ID NO: 758084
cuucuccaaggucacaccg

SEQ ID NO: 758086 - RNA, 19 nt, Artificial Sequence
  Description of Artificial Sequence: Synthetic oligonucleotide
  Sense strand starting at position 2555 of SEQ ID NO: 586986
cuaagugcccuccaggauu

SEQ ID NO: 758087 - RNA, 19 nt, Artificial Sequence
  Description of Artificial Sequence: Synthetic oligonucleotide
  Antisense strand to SEQ ID NO: 758086
aauccuggagggcacuuag

SEQ ID NO: 758088 - RNA, 19 nt, Artificial Sequence
  Description of Artificial Sequence: Synthetic oligonucleotide
  Sense strand starting at position 2566 of SEQ ID NO: 586986
ccaggauugcaugaguuua

SEQ ID NO: 758089 - RNA, 19 nt, Artificial Sequence
  Description of Artificial Sequence: Synthetic oligonucleotide
  Antisense strand to SEQ ID NO: 758088
uaaacucaugcaauccugg

SEQ ID NO: 758090 - RNA, 19 nt, Artificial Sequence
  Description of Artificial Sequence: Synthetic oligonucleotide
  Sense strand starting at position 2568 of SEQ ID NO: 586986
aggauugcaugaguuuaau

SEQ ID NO: 758091 - RNA, 19 nt, Artificial Sequence
  Description of Artificial Sequence: Synthetic oligonucleotide
  Antisense strand to SEQ ID NO: 758090
auuaaacucaugcaauccu

SEQ ID NO: 758092 - RNA, 19 nt, Artificial Sequence
  Description of Artificial Sequence: Synthetic oligonucleotide
  Sense strand starting at position 2571 of SEQ ID NO: 586986
auugcaugaguuuaaugaa

SEQ ID NO: 758093 - RNA, 19 nt, Artificial Sequence
  Description of Artificial Sequence: Synthetic oligonucleotide
  Antisense strand to SEQ ID NO: 758092
uucauuaaacucaugcaau

SEQ ID NO: 758094 - RNA, 19 nt, Artificial Sequence
  Description of Artificial Sequence: Synthetic oligonucleotide
  Sense strand starting at position 2653 of SEQ ID NO: 586986
ccguaaacaccagguguau

SEQ ID NO: 758095 - RNA, 19 nt, Artificial Sequence
  Description of Artificial Sequence: Synthetic oligonucleotide
  Antisense strand to SEQ ID NO: 758094
auacaccugguguuuacgg

SEQ ID NO: 758096 - RNA, 19 nt, Artificial Sequence
  Description of Artificial Sequence: Synthetic oligonucleotide
  Sense strand starting at position 2825 of SEQ ID NO: 586986
ugugaaucaaguugauagu

SEQ ID NO: 758097 - RNA, 19 nt, Artificial Sequence
  Description of Artificial Sequence: Synthetic oligonucleotide
  Antisense strand to SEQ ID NO: 758096
acuaucaacuugauucaca

SEQ ID NO: 758098 - RNA, 19 nt, Artificial Sequence
  Description of Artificial Sequence: Synthetic oligonucleotide
  Sense strand starting at position 2909 of SEQ ID NO: 586986
acgcauucugacuauuaac

SEQ ID NO: 758099 - RNA, 19 nt, Artificial Sequence
  Description of Artificial Sequence: Synthetic oligonucleotide
  Antisense strand to SEQ ID NO: 758098
guuaauagucagaaugcgu

SEQ ID NO: 758100 - RNA, 19 nt, Artificial Sequence
  Description of Artificial Sequence: Synthetic oligonucleotide
  Sense strand starting at position 2962 of SEQ ID NO: 586986
gguggcuuacacuaaggau

SEQ ID NO: 758101 - RNA, 19 nt, Artificial Sequence
  Description of Artificial Sequence: Synthetic oligonucleotide
  Antisense strand to SEQ ID NO: 758100
auccuuaguguaagccacc

SEQ ID NO: 758102 - RNA, 19 nt, Artificial Sequence
  Description of Artificial Sequence: Synthetic oligonucleotide
  Sense strand starting at position 2992 of SEQ ID NO: 586986
acgggaaacucugcuugga

SEQ ID NO: 758103 - RNA, 19 nt, Artificial Sequence
  Description of Artificial Sequence: Synthetic oligonucleotide
  Antisense strand to SEQ ID NO: 758102
uccaagcagaguuucccgu

SEQ ID NO: 758104 - RNA, 19 nt, Artificial Sequence
  Description of Artificial Sequence: Synthetic oligonucleotide
  Sense strand starting at position 2994 of SEQ ID NO: 586986
gggaaacucugcuuggauu

SEQ ID NO: 758105 - RNA, 19 nt, Artificial Sequence
  Description of Artificial Sequence: Synthetic oligonucleotide
  Antisense strand to SEQ ID NO: 758104
aauccaagcagaguuuccc

SEQ ID NO: 758106 - RNA, 19 nt, Artificial Sequence
  Description of Artificial Sequence: Synthetic oligonucleotide
  Sense strand starting at position 3012 of SEQ ID NO: 586986
uuugaagaguccuuaacuu

SEQ ID NO: 758107 - RNA, 19 nt, Artificial Sequence
  Description of Artificial Sequence: Synthetic oligonucleotide
  Antisense strand to SEQ ID NO: 758106
aaguuaaggacucuucaaa

SEQ ID NO: 758108 - RNA, 19 nt, Artificial Sequence
  Description of Artificial Sequence: Synthetic oligonucleotide
  Sense strand starting at position 3145 of SEQ ID NO: 586986
gugucuguguguaugguuu

SEQ ID NO: 758109 - RNA, 19 nt, Artificial Sequence
  Description of Artificial Sequence: Synthetic oligonucleotide
  Antisense strand to SEQ ID NO: 758108
aaaccauacacacagacac

SEQ ID NO: 758110 - RNA, 19 nt, Artificial Sequence
  Description of Artificial Sequence: Synthetic oligonucleotide
  Sense strand starting at position 3149 of SEQ ID NO: 586986
cuguguguaugguuuauuu

SEQ ID NO: 758111 - RNA, 19 nt, Artificial Sequence
  Description of Artificial Sequence: Synthetic oligonucleotide
  Antisense strand to SEQ ID NO: 758110
aaauaaaccauacacacag

SEQ ID NO: 758112 - RNA, 19 nt, Artificial Sequence
  Description of Artificial Sequence: Synthetic oligonucleotide
  Sense strand starting at position 3306 of SEQ ID NO: 586986
auguaaucaucuguaacau

SEQ ID NO: 758113 - RNA, 19 nt, Artificial Sequence
  Description of Artificial Sequence: Synthetic oligonucleotide
  Antisense strand to SEQ ID NO: 758112
auguuacagaugauuacau

SEQ ID NO: 758114 - RNA, 19 nt, Artificial Sequence
  Description of Artificial Sequence: Synthetic oligonucleotide
  Sense strand starting at position 3307 of SEQ ID NO: 586986
uguaaucaucuguaacaua

SEQ ID NO: 758115 - RNA, 19 nt, Artificial Sequence
  Description of Artificial Sequence: Synthetic oligonucleotide
  Antisense strand to SEQ ID NO: 758114
uauguuacagaugauuaca

SEQ ID NO: 758116 - RNA, 19 nt, Artificial Sequence
  Description of Artificial Sequence: Synthetic oligonucleotide
  Sense strand starting at position 3410 of SEQ ID NO: 586986
uaaggaucauccguugcau

SEQ ID NO: 758117 - RNA, 19 nt, Artificial Sequence
  Description of Artificial Sequence: Synthetic oligonucleotide
  Antisense strand to SEQ ID NO: 758116
augcaacggaugauccuua

SEQ ID NO: 758118 - RNA, 19 nt, Artificial Sequence
  Description of Artificial Sequence: Synthetic oligonucleotide
  Sense strand starting at position 3412 of SEQ ID NO: 586986
aggaucauccguugcauuu

SEQ ID NO: 758119 - RNA, 19 nt, Artificial Sequence
  Description of Artificial Sequence: Synthetic oligonucleotide
  Antisense strand to SEQ ID NO: 758118
aaaugcaacggaugauccu

SEQ ID NO: 758120 - RNA, 19 nt, Artificial Sequence
  Description of Artificial Sequence: Synthetic oligonucleotide
  Sense strand starting at position 3421 of SEQ ID NO: 586986
cguugcauuuaauugucau

SEQ ID NO: 758121 - RNA, 19 nt, Artificial Sequence
  Description of Artificial Sequence: Synthetic oligonucleotide
  Antisense strand to SEQ ID NO: 758120
augacaauuaaaugcaacg

SEQ ID NO: 758122 - RNA, 19 nt, Artificial Sequence
  Description of Artificial Sequence: Synthetic oligonucleotide
  Sense strand starting at position 3461 of SEQ ID NO: 586986
cuagaaucauucuugguuu

SEQ ID NO: 758123 - RNA, 19 nt, Artificial Sequence
  Description of Artificial Sequence: Synthetic oligonucleotide
  Antisense strand to SEQ ID NO: 758122
aaaccaagaaugauucuag

SEQ ID NO: 758124 - RNA, 19 nt, Artificial Sequence
  Description of Artificial Sequence: Synthetic oligonucleotide
  Sense strand starting at position 3911 of SEQ ID NO: 586986
ggauuugucuguuucccua

SEQ ID NO: 758125 - RNA, 19 nt, Artificial Sequence
  Description of Artificial Sequence: Synthetic oligonucleotide
  Antisense strand to SEQ ID NO: 758124
uagggaaacagacaaaucc

SEQ ID NO: 758126 - RNA, 19 nt, Artificial Sequence
  Description of Artificial Sequence: Synthetic oligonucleotide
  Sense strand starting at position 3915 of SEQ ID NO: 586986
uugucuguuucccuaugau

SEQ ID NO: 758127 - RNA, 19 nt, Artificial Sequence
  Description of Artificial Sequence: Synthetic oligonucleotide
  Antisense strand to SEQ ID NO: 758126
aucauagggaaacagacaa

SEQ ID NO: 758128 - RNA, 19 nt, Artificial Sequence
  Description of Artificial Sequence: Synthetic oligonucleotide
  Sense strand starting at position 57 of SEQ ID NO: 586987
ugaacugggccuugauacu

SEQ ID NO: 758129 - RNA, 19 nt, Artificial Sequence
  Description of Artificial Sequence: Synthetic oligonucleotide
  Antisense strand to SEQ ID NO: 758128
aguaucaaggcccaguuca

SEQ ID NO: 758130 - RNA, 19 nt, Artificial Sequence
  Description of Artificial Sequence: Synthetic oligonucleotide
  Sense strand starting at position 66 of SEQ ID NO: 586987
ccuugauacucagaggaug

SEQ ID NO: 758131 - RNA, 19 nt, Artificial Sequence
  Description of Artificial Sequence: Synthetic oligonucleotide
  Antisense strand to SEQ ID NO: 758130
cauccucugaguaucaagg

SEQ ID NO: 758132 - RNA, 19 nt, Artificial Sequence
  Description of Artificial Sequence: Synthetic oligonucleotide
  Sense strand starting at position 83 of SEQ ID NO: 586987
ugggacaggucaucaguaa

SEQ ID NO: 758133 - RNA, 19 nt, Artificial Sequence
  Description of Artificial Sequence: Synthetic oligonucleotide
  Antisense strand to SEQ ID NO: 758132
uuacugaugaccuguccca

SEQ ID NO: 758134 - RNA, 19 nt, Artificial Sequence
  Description of Artificial Sequence: Synthetic oligonucleotide
  Sense strand starting at position 124 of SEQ ID NO: 586987
gcgcgaguggcuucaugac

SEQ ID NO: 758135 - RNA, 19 nt, Artificial Sequence
  Description of Artificial Sequence: Synthetic oligonucleotide
  Antisense strand to SEQ ID NO: 758134
gucaugaagccacucgcgc

SEQ ID NO: 758136 - RNA, 19 nt, Artificial Sequence
  Description of Artificial Sequence: Synthetic oligonucleotide
  Sense strand starting at position 146 of SEQ ID NO: 586987
gggaaagucacucaagcuu

SEQ ID NO: 758137 - RNA, 19 nt, Artificial Sequence
  Description of Artificial Sequence: Synthetic oligonucleotide
  Antisense strand to SEQ ID NO: 758136
aagcuugagugacuuuccc

SEQ ID NO: 758138 - RNA, 19 nt, Artificial Sequence
  Description of Artificial Sequence: Synthetic oligonucleotide
  Sense strand starting at position 204 of SEQ ID NO: 586987
caugaagcuucugugagga

SEQ ID NO: 758139 - RNA, 19 nt, Artificial Sequence
  Description of Artificial Sequence: Synthetic oligonucleotide
  Antisense strand to SEQ ID NO: 758138
uccucacagaagcuucaug

SEQ ID NO: 758140 - RNA, 19 nt, Artificial Sequence
  Description of Artificial Sequence: Synthetic oligonucleotide
  Sense strand starting at position 212 of SEQ ID NO: 586987
uucugugaggauuagcuga

SEQ ID NO: 758141 - RNA, 19 nt, Artificial Sequence
  Description of Artificial Sequence: Synthetic oligonucleotide
  Antisense strand to SEQ ID NO: 758140
ucagcuaauccucacagaa

SEQ ID NO: 758142 - RNA, 19 nt, Artificial Sequence
  Description of Artificial Sequence: Synthetic oligonucleotide
  Sense strand starting at position 513 of SEQ ID NO: 586987
cagaaaggucaauggcuua

SEQ ID NO: 758143 - RNA, 19 nt, Artificial Sequence
  Description of Artificial Sequence: Synthetic oligonucleotide
  Antisense strand to SEQ ID NO: 758142
uaagccauugaccuuucug

SEQ ID NO: 758144 - RNA, 19 nt, Artificial Sequence
  Description of Artificial Sequence: Synthetic oligonucleotide
  Sense strand starting at position 518 of SEQ ID NO: 586987
aggucaauggcuuaccuga

SEQ ID NO: 758145 - RNA, 19 nt, Artificial Sequence
  Description of Artificial Sequence: Synthetic oligonucleotide
  Antisense strand to SEQ ID NO: 758144
ucagguaagccauugaccu

SEQ ID NO: 758146 - RNA, 19 nt, Artificial Sequence
  Description of Artificial Sequence: Synthetic oligonucleotide
  Sense strand starting at position 621 of SEQ ID NO: 586987
ccaguugacucuuuaguca

SEQ ID NO: 758147 - RNA, 19 nt, Artificial Sequence
  Description of Artificial Sequence: Synthetic oligonucleotide
  Antisense strand to SEQ ID NO: 758146
ugacuaaagagucaacugg

SEQ ID NO: 758148 - RNA, 19 nt, Artificial Sequence
  Description of Artificial Sequence: Synthetic oligonucleotide
  Sense strand starting at position 721 of SEQ ID NO: 586987
ggaacaauuuccuagccag

SEQ ID NO: 758149 - RNA, 19 nt, Artificial Sequence
  Description of Artificial Sequence: Synthetic oligonucleotide
  Antisense strand to SEQ ID NO: 758148
cuggcuaggaaauuguucc

SEQ ID NO: 758150 - RNA, 19 nt, Artificial Sequence
  Description of Artificial Sequence: Synthetic oligonucleotide
  Sense strand starting at position 793 of SEQ ID NO: 586987
uuaagaugcucccuggaca

SEQ ID NO: 758151 - RNA, 19 nt, Artificial Sequence
  Description of Artificial Sequence: Synthetic oligonucleotide
  Antisense strand to SEQ ID NO: 758150
uguccagggagcaucuuaa

SEQ ID NO: 758152 - RNA, 19 nt, Artificial Sequence
  Description of Artificial Sequence: Synthetic oligonucleotide
  Sense strand starting at position 856 of SEQ ID NO: 586987
uuucucuugccaugggaca

SEQ ID NO: 758153 - RNA, 19 nt, Artificial Sequence
  Description of Artificial Sequence: Synthetic oligonucleotide
  Antisense strand to SEQ ID NO: 758152
ugucccauggcaagagaaa

SEQ ID NO: 758154 - RNA, 19 nt, Artificial Sequence
  Description of Artificial Sequence: Synthetic oligonucleotide
  Sense strand starting at position 857 of SEQ ID NO: 586987
uucucuugccaugggacaa

SEQ ID NO: 758155 - RNA, 19 nt, Artificial Sequence
  Description of Artificial Sequence: Synthetic oligonucleotide
  Antisense strand to SEQ ID NO: 758154
uugucccauggcaagagaa

SEQ ID NO: 758156 - RNA, 19 nt, Artificial Sequence
  Description of Artificial Sequence: Synthetic oligonucleotide
  Sense strand starting at position 916 of SEQ ID NO: 586987
uuaggacagcgagaaguua

SEQ ID NO: 758157 - RNA, 19 nt, Artificial Sequence
  Description of Artificial Sequence: Synthetic oligonucleotide
  Antisense strand to SEQ ID NO: 758156
uaacuucucgcuguccuaa

SEQ ID NO: 758158 - RNA, 19 nt, Artificial Sequence
  Description of Artificial Sequence: Synthetic oligonucleotide
  Sense strand starting at position 927 of SEQ ID NO: 586987
agaaguuauggcugggaua

SEQ ID NO: 758159 - RNA, 19 nt, Artificial Sequence
  Description of Artificial Sequence: Synthetic oligonucleotide
  Antisense strand to SEQ ID NO: 758158
uaucccagccauaacuucu

SEQ ID NO: 758160 - RNA, 19 nt, Artificial Sequence
  Description of Artificial Sequence: Synthetic oligonucleotide
  Sense strand starting at position 928 of SEQ ID NO: 586987
gaaguuauggcugggauag

SEQ ID NO: 758161 - RNA, 19 nt, Artificial Sequence
  Description of Artificial Sequence: Synthetic oligonucleotide
  Antisense strand to SEQ ID NO: 758160
cuaucccagccauaacuuc

SEQ ID NO: 758162 - RNA, 19 nt, Artificial Sequence
  Description of Artificial Sequence: Synthetic oligonucleotide
  Sense strand starting at position 946 of SEQ ID NO: 586987
gggcacaggcauugaagua

SEQ ID NO: 758163 - RNA, 19 nt, Artificial Sequence
  Description of Artificial Sequence: Synthetic oligonucleotide
  Antisense strand to SEQ ID NO: 758162
uacuucaaugccugugccc

SEQ ID NO: 758164 - RNA, 19 nt, Artificial Sequence
  Description of Artificial Sequence: Synthetic oligonucleotide
  Sense strand starting at position 967 of SEQ ID NO: 586987
acgucagaccuugguacaa

SEQ ID NO: 758165 - RNA, 19 nt, Artificial Sequence
  Description of Artificial Sequence: Synthetic oligonucleotide
  Antisense strand to SEQ ID NO: 758164
uuguaccaaggucugacgu

SEQ ID NO: 758166 - RNA, 19 nt, Artificial Sequence
  Description of Artificial Sequence: Synthetic oligonucleotide
  Sense strand starting at position 1163 of SEQ ID NO: 586987
ggucuaacucugggcuaga

SEQ ID NO: 758167 - RNA, 19 nt, Artificial Sequence
  Description of Artificial Sequence: Synthetic oligonucleotide
  Antisense strand to SEQ ID NO: 758166
ucuagcccagaguuagacc

SEQ ID NO: 758168 - RNA, 19 nt, Artificial Sequence
  Description of Artificial Sequence: Synthetic oligonucleotide
  Sense strand starting at position 1164 of SEQ ID NO: 586987
gucuaacucugggcuagaa

SEQ ID NO: 758169 - RNA, 19 nt, Artificial Sequence
  Description of Artificial Sequence: Synthetic oligonucleotide
  Antisense strand to SEQ ID NO: 758168
uucuagcccagaguuagac

SEQ ID NO: 758170 - RNA, 19 nt, Artificial Sequence
  Description of Artificial Sequence: Synthetic oligonucleotide
  Sense strand starting at position 1276 of SEQ ID NO: 586987
uccucuucccagugcaaga

SEQ ID NO: 758171 - RNA, 19 nt, Artificial Sequence
  Description of Artificial Sequence: Synthetic oligonucleotide
  Antisense strand to SEQ ID NO: 758170
ucuugcacugggaagagga

SEQ ID NO: 758172 - RNA, 19 nt, Artificial Sequence
  Description of Artificial Sequence: Synthetic oligonucleotide
  Sense strand starting at position 1281 of SEQ ID NO: 586987
uucccagugcaagaguaaa

SEQ ID NO: 758173 - RNA, 19 nt, Artificial Sequence
  Description of Artificial Sequence: Synthetic oligonucleotide
  Antisense strand to SEQ ID NO: 758172
uuuacucuugcacugggaa

SEQ ID NO: 758174 - RNA, 19 nt, Artificial Sequence
  Description of Artificial Sequence: Synthetic oligonucleotide
  Sense strand starting at position 1638 of SEQ ID NO: 586987
cagugaaaugaauguuccu

SEQ ID NO: 758175 - RNA, 19 nt, Artificial Sequence
  Description of Artificial Sequence: Synthetic oligonucleotide
  Antisense strand to SEQ ID NO: 758174
aggaacauucauuucacug

SEQ ID NO: 758176 - RNA, 19 nt, Artificial Sequence
  Description of Artificial Sequence: Synthetic oligonucleotide
  Sense strand starting at position 1641 of SEQ ID NO: 586987
ugaaaugaauguuccucau

SEQ ID NO: 758177 - RNA, 19 nt, Artificial Sequence
  Description of Artificial Sequence: Synthetic oligonucleotide
  Antisense strand to SEQ ID NO: 758176
augaggaacauucauuuca

SEQ ID NO: 758178 - RNA, 19 nt, Artificial Sequence
  Description of Artificial Sequence: Synthetic oligonucleotide
  Sense strand starting at position 2299 of SEQ ID NO: 586987
ggagguuauuaguuuggau

SEQ ID NO: 758179 - RNA, 19 nt, Artificial Sequence
  Description of Artificial Sequence: Synthetic oligonucleotide
  Antisense strand to SEQ ID NO: 758178
auccaaacuaauaaccucc

SEQ ID NO: 758180 - RNA, 19 nt, Artificial Sequence
  Description of Artificial Sequence: Synthetic oligonucleotide
  Sense strand starting at position 2301 of SEQ ID NO: 586987
agguuauuaguuuggaucu

SEQ ID NO: 758181 - RNA, 19 nt, Artificial Sequence
  Description of Artificial Sequence: Synthetic oligonucleotide
  Antisense strand to SEQ ID NO: 758180
agauccaaacuaauaaccu

SEQ ID NO: 758182 - RNA, 19 nt, Artificial Sequence
  Description of Artificial Sequence: Synthetic oligonucleotide
  Sense strand starting at position 2307 of SEQ ID NO: 586987
uuaguuuggaucugggaaa

SEQ ID NO: 758183 - RNA, 19 nt, Artificial Sequence
  Description of Artificial Sequence: Synthetic oligonucleotide
  Antisense strand to SEQ ID NO: 758182
uuucccagauccaaacuaa

SEQ ID NO: 758184 - RNA, 19 nt, Artificial Sequence
  Description of Artificial Sequence: Synthetic oligonucleotide
  Sense strand starting at position 2362 of SEQ ID NO: 586987
cuucccacccaguguuaaa

SEQ ID NO: 758185 - RNA, 19 nt, Artificial Sequence
  Description of Artificial Sequence: Synthetic oligonucleotide
  Antisense strand to SEQ ID NO: 758184
uuuaacacugggugggaag

SEQ ID NO: 758186 - RNA, 19 nt, Artificial Sequence
  Description of Artificial Sequence: Synthetic oligonucleotide
  Sense strand starting at position 2858 of SEQ ID NO: 586987
gaggguguagugugagaga

SEQ ID NO: 758187 - RNA, 19 nt, Artificial Sequence
  Description of Artificial Sequence: Synthetic oligonucleotide
  Antisense strand to SEQ ID NO: 758186
ucucucacacuacacccuc

SEQ ID NO: 758188 - RNA, 19 nt, Artificial Sequence
  Description of Artificial Sequence: Synthetic oligonucleotide
  Sense strand starting at position 2873 of SEQ ID NO: 586987
gagacauccuaauggagac

SEQ ID NO: 758189 - RNA, 19 nt, Artificial Sequence
  Description of Artificial Sequence: Synthetic oligonucleotide
  Antisense strand to SEQ ID NO: 758188
gucuccauuaggaugucuc

SEQ ID NO: 758190 - RNA, 19 nt, Artificial Sequence
  Description of Artificial Sequence: Synthetic oligonucleotide
  Sense strand starting at position 3126 of SEQ ID NO: 586987
aaggcuugagccugagaag

SEQ ID NO: 758191 - RNA, 19 nt, Artificial Sequence
  Description of Artificial Sequence: Synthetic oligonucleotide
  Antisense strand to SEQ ID NO: 758190
cuucucaggcucaagccuu

SEQ ID NO: 758192 - RNA, 19 nt, Artificial Sequence
  Description of Artificial Sequence: Synthetic oligonucleotide
  Sense strand starting at position 3276 of SEQ ID NO: 586987
gagauaggguuugauuaug

SEQ ID NO: 758193 - RNA, 19 nt, Artificial Sequence
  Description of Artificial Sequence: Synthetic oligonucleotide
  Antisense strand to SEQ ID NO: 758192
cauaaucaaacccuaucuc

SEQ ID NO: 758194 - RNA, 19 nt, Artificial Sequence
  Description of Artificial Sequence: Synthetic oligonucleotide
  Sense strand starting at position 3287 of SEQ ID NO: 586987
ugauuauguugccuaggcu

SEQ ID NO: 758195 - RNA, 19 nt, Artificial Sequence
  Description of Artificial Sequence: Synthetic oligonucleotide
  Antisense strand to SEQ ID NO: 758194
agccuaggcaacauaauca

SEQ ID NO: 758196 - RNA, 19 nt, Artificial Sequence
  Description of Artificial Sequence: Synthetic oligonucleotide
  Sense strand starting at position 3641 of SEQ ID NO: 586987
ucaagucaccauuggguua

SEQ ID NO: 758197 - RNA, 19 nt, Artificial Sequence
  Description of Artificial Sequence: Synthetic oligonucleotide
  Antisense strand to SEQ ID NO: 758196
uaacccaauggugacuuga

SEQ ID NO: 758198 - RNA, 19 nt, Artificial Sequence
  Description of Artificial Sequence: Synthetic oligonucleotide
  Sense strand starting at position 3653 of SEQ ID NO: 586987
uggguuacucucuguguga

SEQ ID NO: 758199 - RNA, 19 nt, Artificial Sequence
  Description of Artificial Sequence: Synthetic oligonucleotide
  Antisense strand to SEQ ID NO: 758198
ucacacagagaguaaccca

SEQ ID NO: 758200 - RNA, 19 nt, Artificial Sequence
  Description of Artificial Sequence: Synthetic oligonucleotide
  Sense strand starting at position 3717 of SEQ ID NO: 586987
aggcuaagugaaggaaauu

SEQ ID NO: 758201 - RNA, 19 nt, Artificial Sequence
  Description of Artificial Sequence: Synthetic oligonucleotide
  Antisense strand to SEQ ID NO: 758200
aauuuccuucacuuagccu

SEQ ID NO: 758202 - RNA, 19 nt, Artificial Sequence
  Description of Artificial Sequence: Synthetic oligonucleotide
  Sense strand starting at position 3739 of SEQ ID NO: 586987
aguuagagacguugggaga

SEQ ID NO: 758203 - RNA, 19 nt, Artificial Sequence
  Description of Artificial Sequence: Synthetic oligonucleotide
  Antisense strand to SEQ ID NO: 758202
ucucccaacgucucuaacu

SEQ ID NO: 758204 - RNA, 19 nt, Artificial Sequence
  Description of Artificial Sequence: Synthetic oligonucleotide
  Sense strand starting at position 3955 of SEQ ID NO: 586987
gaggcaucccuuggucuga

SEQ ID NO: 758205 - RNA, 19 nt, Artificial Sequence
  Description of Artificial Sequence: Synthetic oligonucleotide
  Antisense strand to SEQ ID NO: 758204
ucagaccaagggaugccuc

SEQ ID NO: 758206 - RNA, 19 nt, Artificial Sequence
  Description of Artificial Sequence: Synthetic oligonucleotide
  Sense strand starting at position 3980 of SEQ ID NO: 586987
guuuguugugagucuuugu

SEQ ID NO: 758207 - RNA, 19 nt, Artificial Sequence
  Description of Artificial Sequence: Synthetic oligonucleotide
  Antisense strand to SEQ ID NO: 758206
acaaagacucacaacaaac

SEQ ID NO: 758208 - RNA, 19 nt, Artificial Sequence
  Description of Artificial Sequence: Synthetic oligonucleotide
  Sense strand starting at position 87 of SEQ ID NO: 586988
cccuauggucuguggacau

SEQ ID NO: 758209 - RNA, 19 nt, Artificial Sequence
  Description of Artificial Sequence: Synthetic oligonucleotide
  Antisense strand to SEQ ID NO: 758208
auguccacagaccauaggg

SEQ ID NO: 758210 - RNA, 19 nt, Artificial Sequence
  Description of Artificial Sequence: Synthetic oligonucleotide
  Sense strand starting at position 149 of SEQ ID NO: 586988
acacguuauguccacaacu

SEQ ID NO: 758211 - RNA, 19 nt, Artificial Sequence
  Description of Artificial Sequence: Synthetic oligonucleotide
  Antisense strand to SEQ ID NO: 758210
aguuguggacauaacgugu

SEQ ID NO: 758212 - RNA, 19 nt, Artificial Sequence
  Description of Artificial Sequence: Synthetic oligonucleotide
  Sense strand starting at position 285 of SEQ ID NO: 586988
agagaucuguucccucaau

SEQ ID NO: 758213 - RNA, 19 nt, Artificial Sequence
  Description of Artificial Sequence: Synthetic oligonucleotide
  Antisense strand to SEQ ID NO: 758212
auugagggaacagaucucu

SEQ ID NO: 758214 - RNA, 19 nt, Artificial Sequence
  Description of Artificial Sequence: Synthetic oligonucleotide
  Sense strand starting at position 286 of SEQ ID NO: 586988
gagaucuguucccucaaug

SEQ ID NO: 758215 - RNA, 19 nt, Artificial Sequence
  Description of Artificial Sequence: Synthetic oligonucleotide
  Antisense strand to SEQ ID NO: 758214
cauugagggaacagaucuc

SEQ ID NO: 758216 - RNA, 19 nt, Artificial Sequence
  Description of Artificial Sequence: Synthetic oligonucleotide
  Sense strand starting at position 441 of SEQ ID NO: 586988
cccuaugaacucugagauu

SEQ ID NO: 758217 - RNA, 19 nt, Artificial Sequence
  Description of Artificial Sequence: Synthetic oligonucleotide
  Antisense strand to SEQ ID NO: 758216
aaucucagaguucauaggg

SEQ ID NO: 758218 - RNA, 19 nt, Artificial Sequence
  Description of Artificial Sequence: Synthetic oligonucleotide
  Sense strand starting at position 486 of SEQ ID NO: 586988
aaucauauauugucaggga

SEQ ID NO: 758219 - RNA, 19 nt, Artificial Sequence
  Description of Artificial Sequence: Synthetic oligonucleotide
  Antisense strand to SEQ ID NO: 758218
ucccugacaauauaugauu

SEQ ID NO: 758220 - RNA, 19 nt, Artificial Sequence
  Description of Artificial Sequence: Synthetic oligonucleotide
  Sense strand starting at position 487 of SEQ ID NO: 586988
aucauauauugucagggaa

SEQ ID NO: 758221 - RNA, 19 nt, Artificial Sequence
  Description of Artificial Sequence: Synthetic oligonucleotide
  Antisense strand to SEQ ID NO: 758220
uucccugacaauauaugau

SEQ ID NO: 758222 - RNA, 19 nt, Artificial Sequence
  Description of Artificial Sequence: Synthetic oligonucleotide
  Sense strand starting at position 489 of SEQ ID NO: 586988
cauauauugucagggaaau

SEQ ID NO: 758223 - RNA, 19 nt, Artificial Sequence
  Description of Artificial Sequence: Synthetic oligonucleotide
  Antisense strand to SEQ ID NO: 758222
auuucccugacaauauaug

SEQ ID NO: 758224 - RNA, 19 nt, Artificial Sequence
  Description of Artificial Sequence: Synthetic oligonucleotide
  Sense strand starting at position 673 of SEQ ID NO: 586988
ggucgagcuggguggauua

SEQ ID NO: 758225 - RNA, 19 nt, Artificial Sequence
  Description of Artificial Sequence: Synthetic oligonucleotide
  Antisense strand to SEQ ID NO: 758224
uaauccacccagcucgacc

SEQ ID NO: 758226 - RNA, 19 nt, Artificial Sequence
  Description of Artificial Sequence: Synthetic oligonucleotide
  Sense strand starting at position 689 of SEQ ID NO: 586988
uuaccuaaagucgagaguu

SEQ ID NO: 758227 - RNA, 19 nt, Artificial Sequence
  Description of Artificial Sequence: Synthetic oligonucleotide
  Antisense strand to SEQ ID NO: 758226
aacucucgacuuuagguaa

SEQ ID NO: 758228 - RNA, 19 nt, Artificial Sequence
  Description of Artificial Sequence: Synthetic oligonucleotide
  Sense strand starting at position 697 of SEQ ID NO: 586988
agucgagaguuccaaacca

SEQ ID NO: 758229 - RNA, 19 nt, Artificial Sequence
  Description of Artificial Sequence: Synthetic oligonucleotide
  Antisense strand to SEQ ID NO: 758228
ugguuuggaacucucgacu

SEQ ID NO: 758230 - RNA, 19 nt, Artificial Sequence
  Description of Artificial Sequence: Synthetic oligonucleotide
  Sense strand starting at position 1157 of SEQ ID NO: 586988
gcucuauagcucugaucug

SEQ ID NO: 758231 - RNA, 19 nt, Artificial Sequence
  Description of Artificial Sequence: Synthetic oligonucleotide
  Antisense strand to SEQ ID NO: 758230
cagaucagagcuauagagc

SEQ ID NO: 758232 - RNA, 19 nt, Artificial Sequence
  Description of Artificial Sequence: Synthetic oligonucleotide
  Sense strand starting at position 1163 of SEQ ID NO: 586988
uagcucugaucugcagaga

SEQ ID NO: 758233 - RNA, 19 nt, Artificial Sequence
  Description of Artificial Sequence: Synthetic oligonucleotide
  Antisense strand to SEQ ID NO: 758232
ucucugcagaucagagcua

SEQ ID NO: 758234 - RNA, 19 nt, Artificial Sequence
  Description of Artificial Sequence: Synthetic oligonucleotide
  Sense strand starting at position 1164 of SEQ ID NO: 586988
agcucugaucugcagagaa

SEQ ID NO: 758235 - RNA, 19 nt, Artificial Sequence
  Description of Artificial Sequence: Synthetic oligonucleotide
  Antisense strand to SEQ ID NO: 758234
uucucugcagaucagagcu

SEQ ID NO: 758236 - RNA, 19 nt, Artificial Sequence
  Description of Artificial Sequence: Synthetic oligonucleotide
  Sense strand starting at position 1166 of SEQ ID NO: 586988
cucugaucugcagagaauu

SEQ ID NO: 758237 - RNA, 19 nt, Artificial Sequence
  Description of Artificial Sequence: Synthetic oligonucleotide
  Antisense strand to SEQ ID NO: 758236
aauucucugcagaucagag

SEQ ID NO: 758238 - RNA, 19 nt, Artificial Sequence
  Description of Artificial Sequence: Synthetic oligonucleotide
  Sense strand starting at position 2095 of SEQ ID NO: 586988
gcucgagcguuaggaacua

SEQ ID NO: 758239 - RNA, 19 nt, Artificial Sequence
  Description of Artificial Sequence: Synthetic oligonucleotide
  Antisense strand to SEQ ID NO: 758238
uaguuccuaacgcucgagc

SEQ ID NO: 758240 - RNA, 19 nt, Artificial Sequence
  Description of Artificial Sequence: Synthetic oligonucleotide
  Sense strand starting at position 2508 of SEQ ID NO: 586988
ccgcucaguauuuggauga

SEQ ID NO: 758241 - RNA, 19 nt, Artificial Sequence
  Description of Artificial Sequence: Synthetic oligonucleotide
  Antisense strand to SEQ ID NO: 758240
ucauccaaauacugagcgg

SEQ ID NO: 758242 - RNA, 19 nt, Artificial Sequence
  Description of Artificial Sequence: Synthetic oligonucleotide
  Sense strand starting at position 2509 of SEQ ID NO: 586988
cgcucaguauuuggaugaa

SEQ ID NO: 758243 - RNA, 19 nt, Artificial Sequence
  Description of Artificial Sequence: Synthetic oligonucleotide
  Antisense strand to SEQ ID NO: 758242
uucauccaaauacugagcg

SEQ ID NO: 758244 - RNA, 19 nt, Artificial Sequence
  Description of Artificial Sequence: Synthetic oligonucleotide
  Sense strand starting at position 2522 of SEQ ID NO: 586988
gaugaaauaggcuguaagu

SEQ ID NO: 758245 - RNA, 19 nt, Artificial Sequence
  Description of Artificial Sequence: Synthetic oligonucleotide
  Antisense strand to SEQ ID NO: 758244
acuuacagccuauuucauc

SEQ ID NO: 758246 - RNA, 19 nt, Artificial Sequence
  Description of Artificial Sequence: Synthetic oligonucleotide
  Sense strand starting at position 2524 of SEQ ID NO: 586988
ugaaauaggcuguaaguua

SEQ ID NO: 758247 - RNA, 19 nt, Artificial Sequence
  Description of Artificial Sequence: Synthetic oligonucleotide
  Antisense strand to SEQ ID NO: 758246
uaacuuacagccuauuuca

SEQ ID NO: 758248 - RNA, 19 nt, Artificial Sequence
  Description of Artificial Sequence: Synthetic oligonucleotide
  Sense strand starting at position 2616 of SEQ ID NO: 586988
cagugaauugagugugaga

SEQ ID NO: 758249 - RNA, 19 nt, Artificial Sequence
  Description of Artificial Sequence: Synthetic oligonucleotide
  Antisense strand to SEQ ID NO: 758248
ucucacacucaauucacug

SEQ ID NO: 758250 - RNA, 19 nt, Artificial Sequence
  Description of Artificial Sequence: Synthetic oligonucleotide
  Sense strand starting at position 2618 of SEQ ID NO: 586988
gugaauugagugugagacu

SEQ ID NO: 758251 - RNA, 19 nt, Artificial Sequence
  Description of Artificial Sequence: Synthetic oligonucleotide
  Antisense strand to SEQ ID NO: 758250
agucucacacucaauucac

SEQ ID NO: 758252 - RNA, 19 nt, Artificial Sequence
  Description of Artificial Sequence: Synthetic oligonucleotide
  Sense strand starting at position 2619 of SEQ ID NO: 586988
ugaauugagugugagacuu

SEQ ID NO: 758253 - RNA, 19 nt, Artificial Sequence
  Description of Artificial Sequence: Synthetic oligonucleotide
  Antisense strand to SEQ ID NO: 758252
aagucucacacucaauuca

SEQ ID NO: 758254 - RNA, 19 nt, Artificial Sequence
  Description of Artificial Sequence: Synthetic oligonucleotide
  Sense strand starting at position 2621 of SEQ ID NO: 586988
aauugagugugagacuuaa

SEQ ID NO: 758255 - RNA, 19 nt, Artificial Sequence
  Description of Artificial Sequence: Synthetic oligonucleotide
  Antisense strand to SEQ ID NO: 758254
uuaagucucacacucaauu

SEQ ID NO: 758256 - RNA, 19 nt, Artificial Sequence
  Description of Artificial Sequence: Synthetic oligonucleotide
  Sense strand starting at position 3112 of SEQ ID NO: 586988
ggaggguagugacggauua

SEQ ID NO: 758257 - RNA, 19 nt, Artificial Sequence
  Description of Artificial Sequence: Synthetic oligonucleotide
  Antisense strand to SEQ ID NO: 758256
uaauccgucacuacccucc

SEQ ID NO: 758258 - RNA, 19 nt, Artificial Sequence
  Description of Artificial Sequence: Synthetic oligonucleotide
  Sense strand starting at position 3114 of SEQ ID NO: 586988
aggguagugacggauuaca

SEQ ID NO: 758259 - RNA, 19 nt, Artificial Sequence
  Description of Artificial Sequence: Synthetic oligonucleotide
  Antisense strand to SEQ ID NO: 758258
uguaauccgucacuacccu

SEQ ID NO: 758260 - RNA, 19 nt, Artificial Sequence
  Description of Artificial Sequence: Synthetic oligonucleotide
  Sense strand starting at position 3122 of SEQ ID NO: 586988
gacggauuacaagaguugu

SEQ ID NO: 758261 - RNA, 19 nt, Artificial Sequence
  Description of Artificial Sequence: Synthetic oligonucleotide
  Antisense strand to SEQ ID NO: 758260
acaacucuuguaauccguc

SEQ ID NO: 758262 - RNA, 19 nt, Artificial Sequence
  Description of Artificial Sequence: Synthetic oligonucleotide
  Sense strand starting at position 3287 of SEQ ID NO: 586988
agcacuuugguugggugaa

SEQ ID NO: 758263 - RNA, 19 nt, Artificial Sequence
  Description of Artificial Sequence: Synthetic oligonucleotide
  Antisense strand to SEQ ID NO: 758262
uucacccaaccaaagugcu

SEQ ID NO: 758264 - RNA, 19 nt, Artificial Sequence
  Description of Artificial Sequence: Synthetic oligonucleotide
  Sense strand starting at position 3592 of SEQ ID NO: 586988
cugggagaaucagaugaga

SEQ ID NO: 758265 - RNA, 19 nt, Artificial Sequence
  Description of Artificial Sequence: Synthetic oligonucleotide
  Antisense strand to SEQ ID NO: 758264
ucucaucugauucucccag

SEQ ID NO: 758266 - RNA, 19 nt, Artificial Sequence
  Description of Artificial Sequence: Synthetic oligonucleotide
  Sense strand starting at position 3898 of SEQ ID NO: 586988
agcccacacuccuguugaa

SEQ ID NO: 758267 - RNA, 19 nt, Artificial Sequence
  Description of Artificial Sequence: Synthetic oligonucleotide
  Antisense strand to SEQ ID NO: 758266
uucaacaggagugugggcu

SEQ ID NO: 758268 - RNA, 19 nt, Artificial Sequence
  Description of Artificial Sequence: Synthetic oligonucleotide
  Sense strand starting at position 124 of SEQ ID NO: 586989
aagugaucucaaggaccca

SEQ ID NO: 758269 - RNA, 19 nt, Artificial Sequence
  Description of Artificial Sequence: Synthetic oligonucleotide
  Antisense strand to SEQ ID NO: 758268
uggguccuugagaucacuu

SEQ ID NO: 758270 - RNA, 19 nt, Artificial Sequence
  Description of Artificial Sequence: Synthetic oligonucleotide
  Sense strand starting at position 207 of SEQ ID NO: 586989
uccuguaaagaugggagua

SEQ ID NO: 758271 - RNA, 19 nt, Artificial Sequence
  Description of Artificial Sequence: Synthetic oligonucleotide
  Antisense strand to SEQ ID NO: 758270
uacucccaucuuuacagga

SEQ ID NO: 758272 - RNA, 19 nt, Artificial Sequence
  Description of Artificial Sequence: Synthetic oligonucleotide
  Sense strand starting at position 309 of SEQ ID NO: 586989
gcagaaguccaccaaucaa

SEQ ID NO: 758273 - RNA, 19 nt, Artificial Sequence
  Description of Artificial Sequence: Synthetic oligonucleotide
  Antisense strand to SEQ ID NO: 758272
uugauugguggacuucugc

SEQ ID NO: 758274 - RNA, 19 nt, Artificial Sequence
  Description of Artificial Sequence: Synthetic oligonucleotide
  Sense strand starting at position 445 of SEQ ID NO: 586989
augagaaccugugucauga

SEQ ID NO: 758275 - RNA, 19 nt, Artificial Sequence
  Description of Artificial Sequence: Synthetic oligonucleotide
  Antisense strand to SEQ ID NO: 758274
ucaugacacagguucucau

SEQ ID NO: 758276 - RNA, 19 nt, Artificial Sequence
  Description of Artificial Sequence: Synthetic oligonucleotide
  Sense strand starting at position 471 of SEQ ID NO: 586989
aaugucauuugagugcuca

SEQ ID NO: 758277 - RNA, 19 nt, Artificial Sequence
  Description of Artificial Sequence: Synthetic oligonucleotide
  Antisense strand to SEQ ID NO: 758276
ugagcacucaaaugacauu

SEQ ID NO: 758278 - RNA, 19 nt, Artificial Sequence
  Description of Artificial Sequence: Synthetic oligonucleotide
  Sense strand starting at position 472 of SEQ ID NO: 586989
augucauuugagugcucag

SEQ ID NO: 758279 - RNA, 19 nt, Artificial Sequence
  Description of Artificial Sequence: Synthetic oligonucleotide
  Antisense strand to SEQ ID NO: 758278
cugagcacucaaaugacau

SEQ ID NO: 758280 - RNA, 19 nt, Artificial Sequence
  Description of Artificial Sequence: Synthetic oligonucleotide
  Sense strand starting at position 744 of SEQ ID NO: 586989
ccaagaauauaggauuaag

SEQ ID NO: 758281 - RNA, 19 nt, Artificial Sequence
  Description of Artificial Sequence: Synthetic oligonucleotide
  Antisense strand to SEQ ID NO: 758280
cuuaauccuauauucuugg

SEQ ID NO: 758282 - RNA, 19 nt, Artificial Sequence
  Description of Artificial Sequence: Synthetic oligonucleotide
  Sense strand starting at position 866 of SEQ ID NO: 586989
gaaugugguaagugaggaa

SEQ ID NO: 758283 - RNA, 19 nt, Artificial Sequence
  Description of Artificial Sequence: Synthetic oligonucleotide
  Antisense strand to SEQ ID NO: 758282
uuccucacuuaccacauuc

SEQ ID NO: 758284 - RNA, 19 nt, Artificial Sequence
  Description of Artificial Sequence: Synthetic oligonucleotide
  Sense strand starting at position 935 of SEQ ID NO: 586989
gacccauacuaaguggaau

SEQ ID NO: 758285 - RNA, 19 nt, Artificial Sequence
  Description of Artificial Sequence: Synthetic oligonucleotide
  Antisense strand to SEQ ID NO: 758284
auuccacuuaguauggguc

SEQ ID NO: 758286 - RNA, 19 nt, Artificial Sequence
  Description of Artificial Sequence: Synthetic oligonucleotide
  Sense strand starting at position 972 of SEQ ID NO: 586989
uagugaaaucucuggugac

SEQ ID NO: 758287 - RNA, 19 nt, Artificial Sequence
  Description of Artificial Sequence: Synthetic oligonucleotide
  Antisense strand to SEQ ID NO: 758286
gucaccagagauuucacua

SEQ ID NO: 758288 - RNA, 19 nt, Artificial Sequence
  Description of Artificial Sequence: Synthetic oligonucleotide
  Sense strand starting at position 1076 of SEQ ID NO: 586989
gcaacuacaugccuuaaga

SEQ ID NO: 758289 - RNA, 19 nt, Artificial Sequence
  Description of Artificial Sequence: Synthetic oligonucleotide
  Antisense strand to SEQ ID NO: 758288
ucuuaaggcauguaguugc

SEQ ID NO: 758290 - RNA, 19 nt, Artificial Sequence
  Description of Artificial Sequence: Synthetic oligonucleotide
  Sense strand starting at position 1121 of SEQ ID NO: 586989
gucuuuaggucacuaaaga

SEQ ID NO: 758291 - RNA, 19 nt, Artificial Sequence
  Description of Artificial Sequence: Synthetic oligonucleotide
  Antisense strand to SEQ ID NO: 758290
ucuuuagugaccuaaagac

SEQ ID NO: 758292 - RNA, 19 nt, Artificial Sequence
  Description of Artificial Sequence: Synthetic oligonucleotide
  Sense strand starting at position 1146 of SEQ ID NO: 586989
auguccucucacugguuaa

SEQ ID NO: 758293 - RNA, 19 nt, Artificial Sequence
  Description of Artificial Sequence: Synthetic oligonucleotide
  Antisense strand to SEQ ID NO: 758292
uuaaccagugagaggacau

SEQ ID NO: 758294 - RNA, 19 nt, Artificial Sequence
  Description of Artificial Sequence: Synthetic oligonucleotide
  Sense strand starting at position 1199 of SEQ ID NO: 586989
gauuccuauuacgugugaa

SEQ ID NO: 758295 - RNA, 19 nt, Artificial Sequence
  Description of Artificial Sequence: Synthetic oligonucleotide
  Antisense strand to SEQ ID NO: 758294
uucacacguaauaggaauc

SEQ ID NO: 758296 - RNA, 19 nt, Artificial Sequence
  Description of Artificial Sequence: Synthetic oligonucleotide
  Sense strand starting at position 1202 of SEQ ID NO: 586989
uccuauuacgugugaauaa

SEQ ID NO: 758297 - RNA, 19 nt, Artificial Sequence
  Description of Artificial Sequence: Synthetic oligonucleotide
  Antisense strand to SEQ ID NO: 758296
uuauucacacguaauagga

SEQ ID NO: 758298 - RNA, 19 nt, Artificial Sequence
  Description of Artificial Sequence: Synthetic oligonucleotide
  Sense strand starting at position 1354 of SEQ ID NO: 586989
gaagucuucugaucacugu

SEQ ID NO: 758299 - RNA, 19 nt, Artificial Sequence
  Description of Artificial Sequence: Synthetic oligonucleotide
  Antisense strand to SEQ ID NO: 758298
acagugaucagaagacuuc

SEQ ID NO: 758300 - RNA, 19 nt, Artificial Sequence
  Description of Artificial Sequence: Synthetic oligonucleotide
  Sense strand starting at position 1360 of SEQ ID NO: 586989
uucugaucacuguggcuga

SEQ ID NO: 758301 - RNA, 19 nt, Artificial Sequence
  Description of Artificial Sequence: Synthetic oligonucleotide
  Antisense strand to SEQ ID NO: 758300
ucagccacagugaucagaa

SEQ ID NO: 758302 - RNA, 19 nt, Artificial Sequence
  Description of Artificial Sequence: Synthetic oligonucleotide
  Sense strand starting at position 1365 of SEQ ID NO: 586989
aucacuguggcugauagua

SEQ ID NO: 758303 - RNA, 19 nt, Artificial Sequence
  Description of Artificial Sequence: Synthetic oligonucleotide
  Antisense strand to SEQ ID NO: 758302
uacuaucagccacagugau

SEQ ID NO: 758304 - RNA, 19 nt, Artificial Sequence
  Description of Artificial Sequence: Synthetic oligonucleotide
  Sense strand starting at position 1406 of SEQ ID NO: 586989
acaagugacuaccuguaau

SEQ ID NO: 758305 - RNA, 19 nt, Artificial Sequence
  Description of Artificial Sequence: Synthetic oligonucleotide
  Antisense strand to SEQ ID NO: 758304
auuacagguagucacuugu

SEQ ID NO: 758306 - RNA, 19 nt, Artificial Sequence
  Description of Artificial Sequence: Synthetic oligonucleotide
  Sense strand starting at position 1409 of SEQ ID NO: 586989
agugacuaccuguaauaca

SEQ ID NO: 758307 - RNA, 19 nt, Artificial Sequence
  Description of Artificial Sequence: Synthetic oligonucleotide
  Antisense strand to SEQ ID NO: 758306
uguauuacagguagucacu

SEQ ID NO: 758308 - RNA, 19 nt, Artificial Sequence
  Description of Artificial Sequence: Synthetic oligonucleotide
  Sense strand starting at position 2409 of SEQ ID NO: 586989
uggugaguuuggaagguuu

SEQ ID NO: 758309 - RNA, 19 nt, Artificial Sequence
  Description of Artificial Sequence: Synthetic oligonucleotide
  Antisense strand to SEQ ID NO: 758308
aaaccuuccaaacucacca

SEQ ID NO: 758310 - RNA, 19 nt, Artificial Sequence
  Description of Artificial Sequence: Synthetic oligonucleotide
  Sense strand starting at position 2411 of SEQ ID NO: 586989
gugaguuuggaagguuuca

SEQ ID NO: 758311 - RNA, 19 nt, Artificial Sequence
  Description of Artificial Sequence: Synthetic oligonucleotide
  Antisense strand to SEQ ID NO: 758310
ugaaaccuuccaaacucac

SEQ ID NO: 758312 - RNA, 19 nt, Artificial Sequence
  Description of Artificial Sequence: Synthetic oligonucleotide
  Sense strand starting at position 2454 of SEQ ID NO: 586989
agguuucaaguuuggaaag

SEQ ID NO: 758313 - RNA, 19 nt, Artificial Sequence
  Description of Artificial Sequence: Synthetic oligonucleotide
  Antisense strand to SEQ ID NO: 758312
cuuuccaaacuugaaaccu

SEQ ID NO: 758314 - RNA, 19 nt, Artificial Sequence
  Description of Artificial Sequence: Synthetic oligonucleotide
  Sense strand starting at position 2990 of SEQ ID NO: 586989
gcaggaaauccgggaggaa

SEQ ID NO: 758315 - RNA, 19 nt, Artificial Sequence
  Description of Artificial Sequence: Synthetic oligonucleotide
  Antisense strand to SEQ ID NO: 758314
uuccucccggauuuccugc

SEQ ID NO: 758316 - RNA, 19 nt, Artificial Sequence
  Description of Artificial Sequence: Synthetic oligonucleotide
  Sense strand starting at position 3013 of SEQ ID NO: 586989
auaagagucauguguaccu

SEQ ID NO: 758317 - RNA, 19 nt, Artificial Sequence
  Description of Artificial Sequence: Synthetic oligonucleotide
  Antisense strand to SEQ ID NO: 758316
agguacacaugacucuuau

SEQ ID NO: 758318 - RNA, 19 nt, Artificial Sequence
  Description of Artificial Sequence: Synthetic oligonucleotide
  Sense strand starting at position 3015 of SEQ ID NO: 586989
aagagucauguguaccuua

SEQ ID NO: 758319 - RNA, 19 nt, Artificial Sequence
  Description of Artificial Sequence: Synthetic oligonucleotide
  Antisense strand to SEQ ID NO: 758318
uaagguacacaugacucuu

SEQ ID NO: 758320 - RNA, 19 nt, Artificial Sequence
  Description of Artificial Sequence: Synthetic oligonucleotide
  Sense strand starting at position 3018 of SEQ ID NO: 586989
agucauguguaccuuaaca

SEQ ID NO: 758321 - RNA, 19 nt, Artificial Sequence
  Description of Artificial Sequence: Synthetic oligonucleotide
  Antisense strand to SEQ ID NO: 758320
uguuaagguacacaugacu

SEQ ID NO: 758322 - RNA, 19 nt, Artificial Sequence
  Description of Artificial Sequence: Synthetic oligonucleotide
  Sense strand starting at position 3020 of SEQ ID NO: 586989
ucauguguaccuuaacaac

SEQ ID NO: 758323 - RNA, 19 nt, Artificial Sequence
  Description of Artificial Sequence: Synthetic oligonucleotide
  Antisense strand to SEQ ID NO: 758322
guuguuaagguacacauga

SEQ ID NO: 758324 - RNA, 19 nt, Artificial Sequence
  Description of Artificial Sequence: Synthetic oligonucleotide
  Sense strand starting at position 3038 of SEQ ID NO: 586989
caggguaaggucugaggau

SEQ ID NO: 758325 - RNA, 19 nt, Artificial Sequence
  Description of Artificial Sequence: Synthetic oligonucleotide
  Antisense strand to SEQ ID NO: 758324
auccucagaccuuacccug

SEQ ID NO: 758326 - RNA, 19 nt, Artificial Sequence
  Description of Artificial Sequence: Synthetic oligonucleotide
  Sense strand starting at position 3050 of SEQ ID NO: 586989
ugaggauugcgucauuagg

SEQ ID NO: 758327 - RNA, 19 nt, Artificial Sequence
  Description of Artificial Sequence: Synthetic oligonucleotide
  Antisense strand to SEQ ID NO: 758326
ccuaaugacgcaauccuca

SEQ ID NO: 758328 - RNA, 19 nt, Artificial Sequence
  Description of Artificial Sequence: Synthetic oligonucleotide
  Sense strand starting at position 3158 of SEQ ID NO: 586989
gcugcuuccaggcugcaaa

SEQ ID NO: 758329 - RNA, 19 nt, Artificial Sequence
  Description of Artificial Sequence: Synthetic oligonucleotide
  Antisense strand to SEQ ID NO: 758328
uuugcagccuggaagcagc

SEQ ID NO: 758330 - RNA, 19 nt, Artificial Sequence
  Description of Artificial Sequence: Synthetic oligonucleotide
  Sense strand starting at position 3350 of SEQ ID NO: 586989
guugcugugggugaguaaa

SEQ ID NO: 758331 - RNA, 19 nt, Artificial Sequence
  Description of Artificial Sequence: Synthetic oligonucleotide
  Antisense strand to SEQ ID NO: 758330
uuuacucacccacagcaac

SEQ ID NO: 758332 - RNA, 19 nt, Artificial Sequence
  Description of Artificial Sequence: Synthetic oligonucleotide
  Sense strand starting at position 3388 of SEQ ID NO: 586989
caugaaggucuaggacauu

SEQ ID NO: 758333 - RNA, 19 nt, Artificial Sequence
  Description of Artificial Sequence: Synthetic oligonucleotide
  Antisense strand to SEQ ID NO: 758332
aauguccuagaccuucaug

SEQ ID NO: 758334 - RNA, 19 nt, Artificial Sequence
  Description of Artificial Sequence: Synthetic oligonucleotide
  Sense strand starting at position 3445 of SEQ ID NO: 586989
aggcuacacucaguuuaua

SEQ ID NO: 758335 - RNA, 19 nt, Artificial Sequence
  Description of Artificial Sequence: Synthetic oligonucleotide
  Antisense strand to SEQ ID NO: 758334
uauaaacugaguguagccu

SEQ ID NO: 758336 - RNA, 19 nt, Artificial Sequence
  Description of Artificial Sequence: Synthetic oligonucleotide
  Sense strand starting at position 3715 of SEQ ID NO: 586989
uacacagggucauuaugau

SEQ ID NO: 758337 - RNA, 19 nt, Artificial Sequence
  Description of Artificial Sequence: Synthetic oligonucleotide
  Antisense strand to SEQ ID NO: 758336
aucauaaugacccugugua

SEQ ID NO: 758338 - RNA, 19 nt, Artificial Sequence
  Description of Artificial Sequence: Synthetic oligonucleotide
  Sense strand starting at position 3721 of SEQ ID NO: 586989
gggucauuaugaucaaucu

SEQ ID NO: 758339 - RNA, 19 nt, Artificial Sequence
  Description of Artificial Sequence: Synthetic oligonucleotide
  Antisense strand to SEQ ID NO: 758338
agauugaucauaaugaccc

SEQ ID NO: 758340 - RNA, 19 nt, Artificial Sequence
  Description of Artificial Sequence: Synthetic oligonucleotide
  Sense strand starting at position 3722 of SEQ ID NO: 586989
ggucauuaugaucaaucuc

SEQ ID NO: 758341 - RNA, 19 nt, Artificial Sequence
  Description of Artificial Sequence: Synthetic oligonucleotide
  Antisense strand to SEQ ID NO: 758340
gagauugaucauaaugacc

SEQ ID NO: 758342 - RNA, 19 nt, Artificial Sequence
  Description of Artificial Sequence: Synthetic oligonucleotide
  Sense strand starting at position 3804 of SEQ ID NO: 586989
ugucaucuccuauaacagu

SEQ ID NO: 758343 - RNA, 19 nt, Artificial Sequence
  Description of Artificial Sequence: Synthetic oligonucleotide
  Antisense strand to SEQ ID NO: 758342
acuguuauaggagaugaca

SEQ ID NO: 758344 - RNA, 19 nt, Artificial Sequence
  Description of Artificial Sequence: Synthetic oligonucleotide
  Sense strand starting at position 3935 of SEQ ID NO: 586989
gugacauagucauuauuaa

SEQ ID NO: 758345 - RNA, 19 nt, Artificial Sequence
  Description of Artificial Sequence: Synthetic oligonucleotide
  Antisense strand to SEQ ID NO: 758344
uuaauaaugacuaugucac

SEQ ID NO: 758346 - RNA, 19 nt, Artificial Sequence
  Description of Artificial Sequence: Synthetic oligonucleotide
  Sense strand starting at position 3968 of SEQ ID NO: 586989
ugaguaauacauugcauuc

SEQ ID NO: 758347 - RNA, 19 nt, Artificial Sequence
  Description of Artificial Sequence: Synthetic oligonucleotide
  Antisense strand to SEQ ID NO: 758346
gaaugcaauguauuacuca

SEQ ID NO: 758348 - RNA, 19 nt, Artificial Sequence
  Description of Artificial Sequence: Synthetic oligonucleotide
  Sense strand starting at position 23 of SEQ ID NO: 586990
gcagaaguccaccaaucaa

SEQ ID NO: 758349 - RNA, 19 nt, Artificial Sequence
  Description of Artificial Sequence: Synthetic oligonucleotide
  Antisense strand to SEQ ID NO: 758348
uugauugguggacuucugc

SEQ ID NO: 758350 - RNA, 19 nt, Artificial Sequence
  Description of Artificial Sequence: Synthetic oligonucleotide
  Sense strand starting at position 159 of SEQ ID NO: 586990
augagaaccugugucauga

SEQ ID NO: 758351 - RNA, 19 nt, Artificial Sequence
  Description of Artificial Sequence: Synthetic oligonucleotide
  Antisense strand to SEQ ID NO: 758350
ucaugacacagguucucau

SEQ ID NO: 758352 - RNA, 19 nt, Artificial Sequence
  Description of Artificial Sequence: Synthetic oligonucleotide
  Sense strand starting at position 185 of SEQ ID NO: 586990
aaugucauuugagugcuca

SEQ ID NO: 758353 - RNA, 19 nt, Artificial Sequence
  Description of Artificial Sequence: Synthetic oligonucleotide
  Antisense strand to SEQ ID NO: 758352
ugagcacucaaaugacauu

SEQ ID NO: 758354 - RNA, 19 nt, Artificial Sequence
  Description of Artificial Sequence: Synthetic oligonucleotide
  Sense strand starting at position 186 of SEQ ID NO: 586990
augucauuugagugcucag

SEQ ID NO: 758355 - RNA, 19 nt, Artificial Sequence
  Description of Artificial Sequence: Synthetic oligonucleotide
  Antisense strand to SEQ ID NO: 758354
cugagcacucaaaugacau

SEQ ID NO: 758356 - RNA, 19 nt, Artificial Sequence
  Description of Artificial Sequence: Synthetic oligonucleotide
  Sense strand starting at position 458 of SEQ ID NO: 586990
ccaagaauauaggauuaag

SEQ ID NO: 758357 - RNA, 19 nt, Artificial Sequence
  Description of Artificial Sequence: Synthetic oligonucleotide
  Antisense strand to SEQ ID NO: 758356
cuuaauccuauauucuugg

SEQ ID NO: 758358 - RNA, 19 nt, Artificial Sequence
  Description of Artificial Sequence: Synthetic oligonucleotide
  Sense strand starting at position 580 of SEQ ID NO: 586990
gaaugugguaagugaggaa

SEQ ID NO: 758359 - RNA, 19 nt, Artificial Sequence
  Description of Artificial Sequence: Synthetic oligonucleotide
  Antisense strand to SEQ ID NO: 758358
uuccucacuuaccacauuc

SEQ ID NO: 758360 - RNA, 19 nt, Artificial Sequence
  Description of Artificial Sequence: Synthetic oligonucleotide
  Sense strand starting at position 649 of SEQ ID NO: 586990
gacccauacuaaguggaau

SEQ ID NO: 758361 - RNA, 19 nt, Artificial Sequence
  Description of Artificial Sequence: Synthetic oligonucleotide
  Antisense strand to SEQ ID NO: 758360
auuccacuuaguauggguc

SEQ ID NO: 758362 - RNA, 19 nt, Artificial Sequence
  Description of Artificial Sequence: Synthetic oligonucleotide
  Sense strand starting at position 686 of SEQ ID NO: 586990
uagugaaaucucuggugac

SEQ ID NO: 758363 - RNA, 19 nt, Artificial Sequence
  Description of Artificial Sequence: Synthetic oligonucleotide
  Antisense strand to SEQ ID NO: 758362
gucaccagagauuucacua

SEQ ID NO: 758364 - RNA, 19 nt, Artificial Sequence
  Description of Artificial Sequence: Synthetic oligonucleotide
  Sense strand starting at position 790 of SEQ ID NO: 586990
gcaacuacaugccuuaaga

SEQ ID NO: 758365 - RNA, 19 nt, Artificial Sequence
  Description of Artificial Sequence: Synthetic oligonucleotide
  Antisense strand to SEQ ID NO: 758364
ucuuaaggcauguaguugc

SEQ ID NO: 758366 - RNA, 19 nt, Artificial Sequence
  Description of Artificial Sequence: Synthetic oligonucleotide
  Sense strand starting at position 835 of SEQ ID NO: 586990
gucuuuaggucacuaaaga

SEQ ID NO: 758367 - RNA, 19 nt, Artificial Sequence
  Description of Artificial Sequence: Synthetic oligonucleotide
  Antisense strand to SEQ ID NO: 758366
ucuuuagugaccuaaagac

SEQ ID NO: 758368 - RNA, 19 nt, Artificial Sequence
  Description of Artificial Sequence: Synthetic oligonucleotide
  Sense strand starting at position 860 of SEQ ID NO: 586990
auguccucucacugguuaa

SEQ ID NO: 758369 - RNA, 19 nt, Artificial Sequence
  Description of Artificial Sequence: Synthetic oligonucleotide
  Antisense strand to SEQ ID NO: 758368
uuaaccagugagaggacau

SEQ ID NO: 758370 - RNA, 19 nt, Artificial Sequence
  Description of Artificial Sequence: Synthetic oligonucleotide
  Sense strand starting at position 913 of SEQ ID NO: 586990
gauuccuauuacgugugaa

SEQ ID NO: 758371 - RNA, 19 nt, Artificial Sequence
  Description of Artificial Sequence: Synthetic oligonucleotide
  Antisense strand to SEQ ID NO: 758370
uucacacguaauaggaauc

SEQ ID NO: 758372 - RNA, 19 nt, Artificial Sequence
  Description of Artificial Sequence: Synthetic oligonucleotide
  Sense strand starting at position 916 of SEQ ID NO: 586990
uccuauuacgugugaauaa

SEQ ID NO: 758373 - RNA, 19 nt, Artificial Sequence
  Description of Artificial Sequence: Synthetic oligonucleotide
  Antisense strand to SEQ ID NO: 758372
uuauucacacguaauagga

SEQ ID NO: 758374 - RNA, 19 nt, Artificial Sequence
  Description of Artificial Sequence: Synthetic oligonucleotide
  Sense strand starting at position 1068 of SEQ ID NO: 586990
gaagucuucugaucacugu

SEQ ID NO: 758375 - RNA, 19 nt, Artificial Sequence
  Description of Artificial Sequence: Synthetic oligonucleotide
  Antisense strand to SEQ ID NO: 758374
acagugaucagaagacuuc

SEQ ID NO: 758376 - RNA, 19 nt, Artificial Sequence
  Description of Artificial Sequence: Synthetic oligonucleotide
  Sense strand starting at position 1074 of SEQ ID NO: 586990
uucugaucacuguggcuga

SEQ ID NO: 758377 - RNA, 19 nt, Artificial Sequence
  Description of Artificial Sequence: Synthetic oligonucleotide
  Antisense strand to SEQ ID NO: 758376
ucagccacagugaucagaa

SEQ ID NO: 758378 - RNA, 19 nt, Artificial Sequence
  Description of Artificial Sequence: Synthetic oligonucleotide
  Sense strand starting at position 1079 of SEQ ID NO: 586990
aucacuguggcugauagua

SEQ ID NO: 758379 - RNA, 19 nt, Artificial Sequence
  Description of Artificial Sequence: Synthetic oligonucleotide
  Antisense strand to SEQ ID NO: 758378
uacuaucagccacagugau

SEQ ID NO: 758380 - RNA, 19 nt, Artificial Sequence
  Description of Artificial Sequence: Synthetic oligonucleotide
  Sense strand starting at position 1120 of SEQ ID NO: 586990
acaagugacuaccuguaau

SEQ ID NO: 758381 - RNA, 19 nt, Artificial Sequence
  Description of Artificial Sequence: Synthetic oligonucleotide
  Antisense strand to SEQ ID NO: 758380
auuacagguagucacuugu

SEQ ID NO: 758382 - RNA, 19 nt, Artificial Sequence
  Description of Artificial Sequence: Synthetic oligonucleotide
  Sense strand starting at position 1123 of SEQ ID NO: 586990
agugacuaccuguaauaca

SEQ ID NO: 758383 - RNA, 19 nt, Artificial Sequence
  Description of Artificial Sequence: Synthetic oligonucleotide
  Antisense strand to SEQ ID NO: 758382
uguauuacagguagucacu

SEQ ID NO: 758384 - RNA, 19 nt, Artificial Sequence
  Description of Artificial Sequence: Synthetic oligonucleotide
  Sense strand starting at position 2123 of SEQ ID NO: 586990
uggugaguuuggaagguuu

SEQ ID NO: 758385 - RNA, 19 nt, Artificial Sequence
  Description of Artificial Sequence: Synthetic oligonucleotide
  Antisense strand to SEQ ID NO: 758384
aaaccuuccaaacucacca

SEQ ID NO: 758386 - RNA, 19 nt, Artificial Sequence
  Description of Artificial Sequence: Synthetic oligonucleotide
  Sense strand starting at position 2125 of SEQ ID NO: 586990
gugaguuuggaagguuuca

SEQ ID NO: 758387 - RNA, 19 nt, Artificial Sequence
  Description of Artificial Sequence: Synthetic oligonucleotide
  Antisense strand to SEQ ID NO: 758386
ugaaaccuuccaaacucac

SEQ ID NO: 758388 - RNA, 19 nt, Artificial Sequence
  Description of Artificial Sequence: Synthetic oligonucleotide
  Sense strand starting at position 2168 of SEQ ID NO: 586990
agguuucaaguuuggaaag

SEQ ID NO: 758389 - RNA, 19 nt, Artificial Sequence
  Description of Artificial Sequence: Synthetic oligonucleotide
  Antisense strand to SEQ ID NO: 758388
cuuuccaaacuugaaaccu

SEQ ID NO: 758390 - RNA, 19 nt, Artificial Sequence
  Description of Artificial Sequence: Synthetic oligonucleotide
  Sense strand starting at position 2704 of SEQ ID NO: 586990
gcaggaaauccgggaggaa

SEQ ID NO: 758391 - RNA, 19 nt, Artificial Sequence
  Description of Artificial Sequence: Synthetic oligonucleotide
  Antisense strand to SEQ ID NO: 758390
uuccucccggauuuccugc

SEQ ID NO: 758392 - RNA, 19 nt, Artificial Sequence
  Description of Artificial Sequence: Synthetic oligonucleotide
  Sense strand starting at position 2727 of SEQ ID NO: 586990
auaagagucauguguaccu

SEQ ID NO: 758393 - RNA, 19 nt, Artificial Sequence
  Description of Artificial Sequence: Synthetic oligonucleotide
  Antisense strand to SEQ ID NO: 758392
agguacacaugacucuuau

SEQ ID NO: 758394 - RNA, 19 nt, Artificial Sequence
  Description of Artificial Sequence: Synthetic oligonucleotide
  Sense strand starting at position 2729 of SEQ ID NO: 586990
aagagucauguguaccuua

SEQ ID NO: 758395 - RNA, 19 nt, Artificial Sequence
  Description of Artificial Sequence: Synthetic oligonucleotide
  Antisense strand to SEQ ID NO: 758394
uaagguacacaugacucuu

SEQ ID NO: 758396 - RNA, 19 nt, Artificial Sequence
  Description of Artificial Sequence: Synthetic oligonucleotide
  Sense strand starting at position 2732 of SEQ ID NO: 586990
agucauguguaccuuaaca

SEQ ID NO: 758397 - RNA, 19 nt, Artificial Sequence
  Description of Artificial Sequence: Synthetic oligonucleotide
  Antisense strand to SEQ ID NO: 758396
uguuaagguacacaugacu

SEQ ID NO: 758398 - RNA, 19 nt, Artificial Sequence
  Description of Artificial Sequence: Synthetic oligonucleotide
  Sense strand starting at position 2734 of SEQ ID NO: 586990
ucauguguaccuuaacaac

SEQ ID NO: 758399 - RNA, 19 nt, Artificial Sequence
  Description of Artificial Sequence: Synthetic oligonucleotide
  Antisense strand to SEQ ID NO: 758398
guuguuaagguacacauga

SEQ ID NO: 758400 - RNA, 19 nt, Artificial Sequence
  Description of Artificial Sequence: Synthetic oligonucleotide
  Sense strand starting at position 2752 of SEQ ID NO: 586990
caggguaaggucugaggau

SEQ ID NO: 758401 - RNA, 19 nt, Artificial Sequence
  Description of Artificial Sequence: Synthetic oligonucleotide
  Antisense strand to SEQ ID NO: 758400
auccucagaccuuacccug

SEQ ID NO: 758402 - RNA, 19 nt, Artificial Sequence
  Description of Artificial Sequence: Synthetic oligonucleotide
  Sense strand starting at position 2764 of SEQ ID NO: 586990
ugaggauugcgucauuagg

SEQ ID NO: 758403 - RNA, 19 nt, Artificial Sequence
  Description of Artificial Sequence: Synthetic oligonucleotide
  Antisense strand to SEQ ID NO: 758402
ccuaaugacgcaauccuca

SEQ ID NO: 758404 - RNA, 19 nt, Artificial Sequence
  Description of Artificial Sequence: Synthetic oligonucleotide
  Sense strand starting at position 2872 of SEQ ID NO: 586990
gcugcuuccaggcugcaaa

SEQ ID NO: 758405 - RNA, 19 nt, Artificial Sequence
  Description of Artificial Sequence: Synthetic oligonucleotide
  Antisense strand to SEQ ID NO: 758404
uuugcagccuggaagcagc

SEQ ID NO: 758406 - RNA, 19 nt, Artificial Sequence
  Description of Artificial Sequence: Synthetic oligonucleotide
  Sense strand starting at position 3102 of SEQ ID NO: 586990
caugaaggucuaggacauu

SEQ ID NO: 758407 - RNA, 19 nt, Artificial Sequence
  Description of Artificial Sequence: Synthetic oligonucleotide
  Antisense strand to SEQ ID NO: 758406
aauguccuagaccuucaug

SEQ ID NO: 758408 - RNA, 19 nt, Artificial Sequence
  Description of Artificial Sequence: Synthetic oligonucleotide
  Sense strand starting at position 3159 of SEQ ID NO: 586990
aggcuacacucaguuuaua

SEQ ID NO: 758409 - RNA, 19 nt, Artificial Sequence
  Description of Artificial Sequence: Synthetic oligonucleotide
  Antisense strand to SEQ ID NO: 758408
uauaaacugaguguagccu

SEQ ID NO: 758410 - RNA, 19 nt, Artificial Sequence
  Description of Artificial Sequence: Synthetic oligonucleotide
  Sense strand starting at position 3429 of SEQ ID NO: 586990
uacacagggucauuaugau

SEQ ID NO: 758411 - RNA, 19 nt, Artificial Sequence
  Description of Artificial Sequence: Synthetic oligonucleotide
  Antisense strand to SEQ ID NO: 758410
aucauaaugacccugugua

SEQ ID NO: 758412 - RNA, 19 nt, Artificial Sequence
  Description of Artificial Sequence: Synthetic oligonucleotide
  Sense strand starting at position 3435 of SEQ ID NO: 586990
gggucauuaugaucaaucu

SEQ ID NO: 758413 - RNA, 19 nt, Artificial Sequence
  Description of Artificial Sequence: Synthetic oligonucleotide
  Antisense strand to SEQ ID NO: 758412
agauugaucauaaugaccc

SEQ ID NO: 758414 - RNA, 19 nt, Artificial Sequence
  Description of Artificial Sequence: Synthetic oligonucleotide
  Sense strand starting at position 3436 of SEQ ID NO: 586990
ggucauuaugaucaaucuc

SEQ ID NO: 758415 - RNA, 19 nt, Artificial Sequence
  Description of Artificial Sequence: Synthetic oligonucleotide
  Antisense strand to SEQ ID NO: 758414
gagauugaucauaaugacc

SEQ ID NO: 758416 - RNA, 19 nt, Artificial Sequence
  Description of Artificial Sequence: Synthetic oligonucleotide
  Sense strand starting at position 3518 of SEQ ID NO: 586990
ugucaucuccuauaacagu

SEQ ID NO: 758417 - RNA, 19 nt, Artificial Sequence
  Description of Artificial Sequence: Synthetic oligonucleotide
  Antisense strand to SEQ ID NO: 758416
acuguuauaggagaugaca

SEQ ID NO: 758418 - RNA, 19 nt, Artificial Sequence
  Description of Artificial Sequence: Synthetic oligonucleotide
  Sense strand starting at position 3649 of SEQ ID NO: 586990
gugacauagucauuauuaa

SEQ ID NO: 758419 - RNA, 19 nt, Artificial Sequence
  Description of Artificial Sequence: Synthetic oligonucleotide
  Antisense strand to SEQ ID NO: 758418
uuaauaaugacuaugucac

SEQ ID NO: 758420 - RNA, 19 nt, Artificial Sequence
  Description of Artificial Sequence: Synthetic oligonucleotide
  Sense strand starting at position 3682 of SEQ ID NO: 586990
ugaguaauacauugcauuc

SEQ ID NO: 758421 - RNA, 19 nt, Artificial Sequence
  Description of Artificial Sequence: Synthetic oligonucleotide
  Antisense strand to SEQ ID NO: 758420
gaaugcaauguauuacuca

SEQ ID NO: 758422 - RNA, 19 nt, Artificial Sequence
  Description of Artificial Sequence: Synthetic oligonucleotide
  Sense strand starting at position 3715 of SEQ ID NO: 586990
guaugaugucacuagacga

SEQ ID NO: 758423 - RNA, 19 nt, Artificial Sequence
  Description of Artificial Sequence: Synthetic oligonucleotide
  Antisense strand to SEQ ID NO: 758422
ucgucuagugacaucauac

SEQ ID NO: 758424 - RNA, 19 nt, Artificial Sequence
  Description of Artificial Sequence: Synthetic oligonucleotide
  Sense strand starting at position 3825 of SEQ ID NO: 586990
agugcaugacuguauuaaa

SEQ ID NO: 758425 - RNA, 19 nt, Artificial Sequence
  Description of Artificial Sequence: Synthetic oligonucleotide
  Antisense strand to SEQ ID NO: 758424
uuuaauacagucaugcacu

SEQ ID NO: 758426 - RNA, 19 nt, Artificial Sequence
  Description of Artificial Sequence: Synthetic oligonucleotide
  Sense strand starting at position 3909 of SEQ ID NO: 586990
uguguauauguguacuuau

SEQ ID NO: 758427 - RNA, 19 nt, Artificial Sequence
  Description of Artificial Sequence: Synthetic oligonucleotide
  Antisense strand to SEQ ID NO: 758426
auaaguacacauauacaca

SEQ ID NO: 758428 - RNA, 19 nt, Artificial Sequence
  Description of Artificial Sequence: Synthetic oligonucleotide
  Sense strand starting at position 7 of SEQ ID NO: 586991
caacuugaaugacagagua

SEQ ID NO: 758429 - RNA, 19 nt, Artificial Sequence
  Description of Artificial Sequence: Synthetic oligonucleotide
  Antisense strand to SEQ ID NO: 758428
uacucugucauucaaguug

SEQ ID NO: 758430 - RNA, 19 nt, Artificial Sequence
  Description of Artificial Sequence: Synthetic oligonucleotide
  Sense strand starting at position 58 of SEQ ID NO: 586991
gugcauaaaccaugagcuu

SEQ ID NO: 758431 - RNA, 19 nt, Artificial Sequence
  Description of Artificial Sequence: Synthetic oligonucleotide
  Antisense strand to SEQ ID NO: 758430
aagcucaugguuuaugcac

SEQ ID NO: 758432 - RNA, 19 nt, Artificial Sequence
  Description of Artificial Sequence: Synthetic oligonucleotide
  Sense strand starting at position 59 of SEQ ID NO: 586991
ugcauaaaccaugagcuua

SEQ ID NO: 758433 - RNA, 19 nt, Artificial Sequence
  Description of Artificial Sequence: Synthetic oligonucleotide
  Antisense strand to SEQ ID NO: 758432
uaagcucaugguuuaugca

SEQ ID NO: 758434 - RNA, 19 nt, Artificial Sequence
  Description of Artificial Sequence: Synthetic oligonucleotide
  Sense strand starting at position 98 of SEQ ID NO: 586991
ccauguaaccaguguccca

SEQ ID NO: 758435 - RNA, 19 nt, Artificial Sequence
  Description of Artificial Sequence: Synthetic oligonucleotide
  Antisense strand to SEQ ID NO: 758434
ugggacacugguuacaugg

SEQ ID NO: 758436 - RNA, 19 nt, Artificial Sequence
  Description of Artificial Sequence: Synthetic oligonucleotide
  Sense strand starting at position 229 of SEQ ID NO: 586991
ugcaguuguccagacucua

SEQ ID NO: 758437 - RNA, 19 nt, Artificial Sequence
  Description of Artificial Sequence: Synthetic oligonucleotide
  Antisense strand to SEQ ID NO: 758436
uagagucuggacaacugca

SEQ ID NO: 758438 - RNA, 19 nt, Artificial Sequence
  Description of Artificial Sequence: Synthetic oligonucleotide
  Sense strand starting at position 271 of SEQ ID NO: 586991
gagagaugcgaaggauaug

SEQ ID NO: 758439 - RNA, 19 nt, Artificial Sequence
  Description of Artificial Sequence: Synthetic oligonucleotide
  Antisense strand to SEQ ID NO: 758438
cauauccuucgcaucucuc

SEQ ID NO: 758440 - RNA, 19 nt, Artificial Sequence
  Description of Artificial Sequence: Synthetic oligonucleotide
  Sense strand starting at position 408 of SEQ ID NO: 586991
gaugguucuguuugggcua

SEQ ID NO: 758441 - RNA, 19 nt, Artificial Sequence
  Description of Artificial Sequence: Synthetic oligonucleotide
  Antisense strand to SEQ ID NO: 758440
uagcccaaacagaaccauc

SEQ ID NO: 758442 - RNA, 19 nt, Artificial Sequence
  Description of Artificial Sequence: Synthetic oligonucleotide
  Sense strand starting at position 450 of SEQ ID NO: 586991
augggugcuugucccagaa

SEQ ID NO: 758443 - RNA, 19 nt, Artificial Sequence
  Description of Artificial Sequence: Synthetic oligonucleotide
  Antisense strand to SEQ ID NO: 758442
uucugggacaagcacccau

SEQ ID NO: 758444 - RNA, 19 nt, Artificial Sequence
  Description of Artificial Sequence: Synthetic oligonucleotide
  Sense strand starting at position 454 of SEQ ID NO: 586991
gugcuugucccagaaggag

SEQ ID NO: 758445 - RNA, 19 nt, Artificial Sequence
  Description of Artificial Sequence: Synthetic oligonucleotide
  Antisense strand to SEQ ID NO: 758444
cuccuucugggacaagcac

SEQ ID NO: 758446 - RNA, 19 nt, Artificial Sequence
  Description of Artificial Sequence: Synthetic oligonucleotide
  Sense strand starting at position 1082 of SEQ ID NO: 586991
cucccuguccuuggugauu

SEQ ID NO: 758447 - RNA, 19 nt, Artificial Sequence
  Description of Artificial Sequence: Synthetic oligonucleotide
  Antisense strand to SEQ ID NO: 758446
aaucaccaaggacagggag

SEQ ID NO: 758448 - RNA, 19 nt, Artificial Sequence
  Description of Artificial Sequence: Synthetic oligonucleotide
  Sense strand starting at position 1278 of SEQ ID NO: 586991
uggcuuucgugauccacuu

SEQ ID NO: 758449 - RNA, 19 nt, Artificial Sequence
  Description of Artificial Sequence: Synthetic oligonucleotide
  Antisense strand to SEQ ID NO: 758448
aaguggaucacgaaagcca

SEQ ID NO: 758450 - RNA, 19 nt, Artificial Sequence
  Description of Artificial Sequence: Synthetic oligonucleotide
  Sense strand starting at position 1370 of SEQ ID NO: 586991
aggugugguagcuauuguu

SEQ ID NO: 758451 - RNA, 19 nt, Artificial Sequence
  Description of Artificial Sequence: Synthetic oligonucleotide
  Antisense strand to SEQ ID NO: 758450
aacaauagcuaccacaccu

SEQ ID NO: 758452 - RNA, 19 nt, Artificial Sequence
  Description of Artificial Sequence: Synthetic oligonucleotide
  Sense strand starting at position 1376 of SEQ ID NO: 586991
gguagcuauuguuaucauu

SEQ ID NO: 758453 - RNA, 19 nt, Artificial Sequence
  Description of Artificial Sequence: Synthetic oligonucleotide
  Antisense strand to SEQ ID NO: 758452
aaugauaacaauagcuacc

SEQ ID NO: 758454 - RNA, 19 nt, Artificial Sequence
  Description of Artificial Sequence: Synthetic oligonucleotide
  Sense strand starting at position 1379 of SEQ ID NO: 586991
agcuauuguuaucauuacu

SEQ ID NO: 758455 - RNA, 19 nt, Artificial Sequence
  Description of Artificial Sequence: Synthetic oligonucleotide
  Antisense strand to SEQ ID NO: 758454
aguaaugauaacaauagcu

SEQ ID NO: 758456 - RNA, 19 nt, Artificial Sequence
  Description of Artificial Sequence: Synthetic oligonucleotide
  Sense strand starting at position 1396 of SEQ ID NO: 586991
cuguuucuccaucgagacu

SEQ ID NO: 758457 - RNA, 19 nt, Artificial Sequence
  Description of Artificial Sequence: Synthetic oligonucleotide
  Antisense strand to SEQ ID NO: 758456
agucucgauggagaaacag

SEQ ID NO: 758458 - RNA, 19 nt, Artificial Sequence
  Description of Artificial Sequence: Synthetic oligonucleotide
  Sense strand starting at position 1469 of SEQ ID NO: 586991
gguggauacucaggaaaug

SEQ ID NO: 758459 - RNA, 19 nt, Artificial Sequence
  Description of Artificial Sequence: Synthetic oligonucleotide
  Antisense strand to SEQ ID NO: 758458
cauuuccugaguauccacc

SEQ ID NO: 758460 - RNA, 19 nt, Artificial Sequence
  Description of Artificial Sequence: Synthetic oligonucleotide
  Sense strand starting at position 1478 of SEQ ID NO: 586991
ucaggaaauguuuguugag

SEQ ID NO: 758461 - RNA, 19 nt, Artificial Sequence
  Description of Artificial Sequence: Synthetic oligonucleotide
  Antisense strand to SEQ ID NO: 758460
cucaacaaacauuuccuga

SEQ ID NO: 758462 - RNA, 19 nt, Artificial Sequence
  Description of Artificial Sequence: Synthetic oligonucleotide
  Sense strand starting at position 1479 of SEQ ID NO: 586991
caggaaauguuuguugagu

SEQ ID NO: 758463 - RNA, 19 nt, Artificial Sequence
  Description of Artificial Sequence: Synthetic oligonucleotide
  Antisense strand to SEQ ID NO: 758462
acucaacaaacauuuccug

SEQ ID NO: 758464 - RNA, 19 nt, Artificial Sequence
  Description of Artificial Sequence: Synthetic oligonucleotide
  Sense strand starting at position 1577 of SEQ ID NO: 586991
ccaucugaccagugggaaa

SEQ ID NO: 758465 - RNA, 19 nt, Artificial Sequence
  Description of Artificial Sequence: Synthetic oligonucleotide
  Antisense strand to SEQ ID NO: 758464
uuucccacuggucagaugg

SEQ ID NO: 758466 - RNA, 19 nt, Artificial Sequence
  Description of Artificial Sequence: Synthetic oligonucleotide
  Sense strand starting at position 1588 of SEQ ID NO: 586991
gugggaaaugguugccucu

SEQ ID NO: 758467 - RNA, 19 nt, Artificial Sequence
  Description of Artificial Sequence: Synthetic oligonucleotide
  Antisense strand to SEQ ID NO: 758466
agaggcaaccauuucccac

SEQ ID NO: 758468 - RNA, 19 nt, Artificial Sequence
  Description of Artificial Sequence: Synthetic oligonucleotide
  Sense strand starting at position 1590 of SEQ ID NO: 586991
gggaaaugguugccucucu

SEQ ID NO: 758469 - RNA, 19 nt, Artificial Sequence
  Description of Artificial Sequence: Synthetic oligonucleotide
  Antisense strand to SEQ ID NO: 758468
agagaggcaaccauuuccc

SEQ ID NO: 758470 - RNA, 19 nt, Artificial Sequence
  Description of Artificial Sequence: Synthetic oligonucleotide
  Sense strand starting at position 1723 of SEQ ID NO: 586991
gggaauguucugggcucuu

SEQ ID NO: 758471 - RNA, 19 nt, Artificial Sequence
  Description of Artificial Sequence: Synthetic oligonucleotide
  Antisense strand to SEQ ID NO: 758470
aagagcccagaacauuccc

SEQ ID NO: 758472 - RNA, 19 nt, Artificial Sequence
  Description of Artificial Sequence: Synthetic oligonucleotide
  Sense strand starting at position 1879 of SEQ ID NO: 586991
aggcaaagucccuguccau

SEQ ID NO: 758473 - RNA, 19 nt, Artificial Sequence
  Description of Artificial Sequence: Synthetic oligonucleotide
  Antisense strand to SEQ ID NO: 758472
auggacagggacuuugccu

SEQ ID NO: 758474 - RNA, 19 nt, Artificial Sequence
  Description of Artificial Sequence: Synthetic oligonucleotide
  Sense strand starting at position 2146 of SEQ ID NO: 586991
agccaagcauccugaucuu

SEQ ID NO: 758475 - RNA, 19 nt, Artificial Sequence
  Description of Artificial Sequence: Synthetic oligonucleotide
  Antisense strand to SEQ ID NO: 758474
aagaucaggaugcuuggcu

SEQ ID NO: 758476 - RNA, 19 nt, Artificial Sequence
  Description of Artificial Sequence: Synthetic oligonucleotide
  Sense strand starting at position 2188 of SEQ ID NO: 586991
aggagucccgccugaugau

SEQ ID NO: 758477 - RNA, 19 nt, Artificial Sequence
  Description of Artificial Sequence: Synthetic oligonucleotide
  Antisense strand to SEQ ID NO: 758476
aucaucaggcgggacuccu

SEQ ID NO: 758478 - RNA, 19 nt, Artificial Sequence
  Description of Artificial Sequence: Synthetic oligonucleotide
  Sense strand starting at position 2267 of SEQ ID NO: 586991
guggguuucccacauagac

SEQ ID NO: 758479 - RNA, 19 nt, Artificial Sequence
  Description of Artificial Sequence: Synthetic oligonucleotide
  Antisense strand to SEQ ID NO: 758478
gucuaugugggaaacccac

SEQ ID NO: 758480 - RNA, 19 nt, Artificial Sequence
  Description of Artificial Sequence: Synthetic oligonucleotide
  Sense strand starting at position 2836 of SEQ ID NO: 586991
uugagaagcuccugaggau

SEQ ID NO: 758481 - RNA, 19 nt, Artificial Sequence
  Description of Artificial Sequence: Synthetic oligonucleotide
  Antisense strand to SEQ ID NO: 758480
auccucaggagcuucucaa

SEQ ID NO: 758482 - RNA, 19 nt, Artificial Sequence
  Description of Artificial Sequence: Synthetic oligonucleotide
  Sense strand starting at position 2958 of SEQ ID NO: 586991
uuuccugacuccuggucau

SEQ ID NO: 758483 - RNA, 19 nt, Artificial Sequence
  Description of Artificial Sequence: Synthetic oligonucleotide
  Antisense strand to SEQ ID NO: 758482
augaccaggagucaggaaa

SEQ ID NO: 758484 - RNA, 19 nt, Artificial Sequence
  Description of Artificial Sequence: Synthetic oligonucleotide
  Sense strand starting at position 2961 of SEQ ID NO: 586991
ccugacuccuggucaugau

SEQ ID NO: 758485 - RNA, 19 nt, Artificial Sequence
  Description of Artificial Sequence: Synthetic oligonucleotide
  Antisense strand to SEQ ID NO: 758484
aucaugaccaggagucagg

SEQ ID NO: 758486 - RNA, 19 nt, Artificial Sequence
  Description of Artificial Sequence: Synthetic oligonucleotide
  Sense strand starting at position 2973 of SEQ ID NO: 586991
ucaugaugcuguuuccuau

SEQ ID NO: 758487 - RNA, 19 nt, Artificial Sequence
  Description of Artificial Sequence: Synthetic oligonucleotide
  Antisense strand to SEQ ID NO: 758486
auaggaaacagcaucauga

SEQ ID NO: 758488 - RNA, 19 nt, Artificial Sequence
  Description of Artificial Sequence: Synthetic oligonucleotide
  Sense strand starting at position 3560 of SEQ ID NO: 586991
gcucucgucuuucccauua

SEQ ID NO: 758489 - RNA, 19 nt, Artificial Sequence
  Description of Artificial Sequence: Synthetic oligonucleotide
  Antisense strand to SEQ ID NO: 758488
uaaugggaaagacgagagc

SEQ ID NO: 758490 - RNA, 19 nt, Artificial Sequence
  Description of Artificial Sequence: Synthetic oligonucleotide
  Sense strand starting at position 3565 of SEQ ID NO: 586991
cgucuuucccauuaaagca

SEQ ID NO: 758491 - RNA, 19 nt, Artificial Sequence
  Description of Artificial Sequence: Synthetic oligonucleotide
  Antisense strand to SEQ ID NO: 758490
ugcuuuaaugggaaagacg

SEQ ID NO: 758492 - RNA, 19 nt, Artificial Sequence
  Description of Artificial Sequence: Synthetic oligonucleotide
  Sense strand starting at position 3620 of SEQ ID NO: 586991
ccaacacuuccggaagcaa

SEQ ID NO: 758493 - RNA, 19 nt, Artificial Sequence
  Description of Artificial Sequence: Synthetic oligonucleotide
  Antisense strand to SEQ ID NO: 758492
uugcuuccggaaguguugg

SEQ ID NO: 758494 - RNA, 19 nt, Artificial Sequence
  Description of Artificial Sequence: Synthetic oligonucleotide
  Sense strand starting at position 3752 of SEQ ID NO: 586991
uguagucaguuacuugcaa

SEQ ID NO: 758495 - RNA, 19 nt, Artificial Sequence
  Description of Artificial Sequence: Synthetic oligonucleotide
  Antisense strand to SEQ ID NO: 758494
uugcaaguaacugacuaca

SEQ ID NO: 758496 - RNA, 19 nt, Artificial Sequence
  Description of Artificial Sequence: Synthetic oligonucleotide
  Sense strand starting at position 3885 of SEQ ID NO: 586991
aaagaacgaugaugaguua

SEQ ID NO: 758497 - RNA, 19 nt, Artificial Sequence
  Description of Artificial Sequence: Synthetic oligonucleotide
  Antisense strand to SEQ ID NO: 758496
uaacucaucaucguucuuu

SEQ ID NO: 758498 - RNA, 19 nt, Artificial Sequence
  Description of Artificial Sequence: Synthetic oligonucleotide
  Sense strand starting at position 3888 of SEQ ID NO: 586991
gaacgaugaugaguuauug

SEQ ID NO: 758499 - RNA, 19 nt, Artificial Sequence
  Description of Artificial Sequence: Synthetic oligonucleotide
  Antisense strand to SEQ ID NO: 758498
caauaacucaucaucguuc

SEQ ID NO: 758500 - RNA, 19 nt, Artificial Sequence
  Description of Artificial Sequence: Synthetic oligonucleotide
  Sense strand starting at position 3906 of SEQ ID NO: 586991
gccacccaccuaugagaau

SEQ ID NO: 758501 - RNA, 19 nt, Artificial Sequence
  Description of Artificial Sequence: Synthetic oligonucleotide
  Antisense strand to SEQ ID NO: 758500
auucucauagguggguggc

SEQ ID NO: 758502 - RNA, 19 nt, Artificial Sequence
  Description of Artificial Sequence: Synthetic oligonucleotide
  Sense strand starting at position 3912 of SEQ ID NO: 586991
caccuaugagaaugguuga

SEQ ID NO: 758503 - RNA, 19 nt, Artificial Sequence
  Description of Artificial Sequence: Synthetic oligonucleotide
  Antisense strand to SEQ ID NO: 758502
ucaaccauucucauaggug

SEQ ID NO: 758504 - RNA, 19 nt, Artificial Sequence
  Description of Artificial Sequence: Synthetic oligonucleotide
  Sense strand starting at position 3937 of SEQ ID NO: 586991
aauaguuggugauaucaaa

SEQ ID NO: 758505 - RNA, 19 nt, Artificial Sequence
  Description of Artificial Sequence: Synthetic oligonucleotide
  Antisense strand to SEQ ID NO: 758504
uuugauaucaccaacuauu

SEQ ID NO: 758506 - RNA, 19 nt, Artificial Sequence
  Description of Artificial Sequence: Synthetic oligonucleotide
  Sense strand starting at position 3944 of SEQ ID NO: 586991
ggugauaucaaaugcuagu

SEQ ID NO: 758507 - RNA, 19 nt, Artificial Sequence
  Description of Artificial Sequence: Synthetic oligonucleotide
  Antisense strand to SEQ ID NO: 758506
acuagcauuugauaucacc

SEQ ID NO: 758508 - RNA, 19 nt, Artificial Sequence
  Description of Artificial Sequence: Synthetic oligonucleotide
  Sense strand starting at position 480 of SEQ ID NO: 586992
ggagguggugguuaucaaa

SEQ ID NO: 758509 - RNA, 19 nt, Artificial Sequence
  Description of Artificial Sequence: Synthetic oligonucleotide
  Antisense strand to SEQ ID NO: 758508
uuugauaaccaccaccucc

SEQ ID NO: 758510 - RNA, 19 nt, Artificial Sequence
  Description of Artificial Sequence: Synthetic oligonucleotide
  Sense strand starting at position 487 of SEQ ID NO: 586992
gugguuaucaaagagucuu

SEQ ID NO: 758511 - RNA, 19 nt, Artificial Sequence
  Description of Artificial Sequence: Synthetic oligonucleotide
  Antisense strand to SEQ ID NO: 758510
aagacucuuugauaaccac

SEQ ID NO: 758512 - RNA, 19 nt, Artificial Sequence
  Description of Artificial Sequence: Synthetic oligonucleotide
  Sense strand starting at position 493 of SEQ ID NO: 586992
aucaaagagucuuugauua

SEQ ID NO: 758513 - RNA, 19 nt, Artificial Sequence
  Description of Artificial Sequence: Synthetic oligonucleotide
  Antisense strand to SEQ ID NO: 758512
uaaucaaagacucuuugau

SEQ ID NO: 758514 - RNA, 19 nt, Artificial Sequence
  Description of Artificial Sequence: Synthetic oligonucleotide
  Sense strand starting at position 497 of SEQ ID NO: 586992
aagagucuuugauuagaau

SEQ ID NO: 758515 - RNA, 19 nt, Artificial Sequence
  Description of Artificial Sequence: Synthetic oligonucleotide
  Antisense strand to SEQ ID NO: 758514
auucuaaucaaagacucuu

SEQ ID NO: 758516 - RNA, 19 nt, Artificial Sequence
  Description of Artificial Sequence: Synthetic oligonucleotide
  Sense strand starting at position 564 of SEQ ID NO: 586992
cucauagagcauuaagucu

SEQ ID NO: 758517 - RNA, 19 nt, Artificial Sequence
  Description of Artificial Sequence: Synthetic oligonucleotide
  Antisense strand to SEQ ID NO: 758516
agacuuaaugcucuaugag

SEQ ID NO: 758518 - RNA, 19 nt, Artificial Sequence
  Description of Artificial Sequence: Synthetic oligonucleotide
  Sense strand starting at position 684 of SEQ ID NO: 586992
auuauaagagcuugguuac

SEQ ID NO: 758519 - RNA, 19 nt, Artificial Sequence
  Description of Artificial Sequence: Synthetic oligonucleotide
  Antisense strand to SEQ ID NO: 758518
guaaccaagcucuuauaau

SEQ ID NO: 758520 - RNA, 19 nt, Artificial Sequence
  Description of Artificial Sequence: Synthetic oligonucleotide
  Sense strand starting at position 999 of SEQ ID NO: 586992
agagcuugguuacucauaa

SEQ ID NO: 758521 - RNA, 19 nt, Artificial Sequence
  Description of Artificial Sequence: Synthetic oligonucleotide
  Antisense strand to SEQ ID NO: 758520
uuaugaguaaccaagcucu

SEQ ID NO: 758522 - RNA, 19 nt, Artificial Sequence
  Description of Artificial Sequence: Synthetic oligonucleotide
  Sense strand starting at position 1000 of SEQ ID NO: 586992
gagcuugguuacucauaau

SEQ ID NO: 758523 - RNA, 19 nt, Artificial Sequence
  Description of Artificial Sequence: Synthetic oligonucleotide
  Antisense strand to SEQ ID NO: 758522
auuaugaguaaccaagcuc

SEQ ID NO: 758524 - RNA, 19 nt, Artificial Sequence
  Description of Artificial Sequence: Synthetic oligonucleotide
  Sense strand starting at position 1012 of SEQ ID NO: 586992
ucauaauauguuggaagca

SEQ ID NO: 758525 - RNA, 19 nt, Artificial Sequence
  Description of Artificial Sequence: Synthetic oligonucleotide
  Antisense strand to SEQ ID NO: 758524
ugcuuccaacauauuauga

SEQ ID NO: 758526 - RNA, 19 nt, Artificial Sequence
  Description of Artificial Sequence: Synthetic oligonucleotide
  Sense strand starting at position 1037 of SEQ ID NO: 586992
uccugauaaagugggauau

SEQ ID NO: 758527 - RNA, 19 nt, Artificial Sequence
  Description of Artificial Sequence: Synthetic oligonucleotide
  Antisense strand to SEQ ID NO: 758526
auaucccacuuuaucagga

SEQ ID NO: 758528 - RNA, 19 nt, Artificial Sequence
  Description of Artificial Sequence: Synthetic oligonucleotide
  Sense strand starting at position 1208 of SEQ ID NO: 586992
uuagaaucacauggcuaga

SEQ ID NO: 758529 - RNA, 19 nt, Artificial Sequence
  Description of Artificial Sequence: Synthetic oligonucleotide
  Antisense strand to SEQ ID NO: 758528
ucuagccaugugauucuaa

SEQ ID NO: 758530 - RNA, 19 nt, Artificial Sequence
  Description of Artificial Sequence: Synthetic oligonucleotide
  Sense strand starting at position 1561 of SEQ ID NO: 586992
ugguuaucucugggaaaga

SEQ ID NO: 758531 - RNA, 19 nt, Artificial Sequence
  Description of Artificial Sequence: Synthetic oligonucleotide
  Antisense strand to SEQ ID NO: 758530
ucuuucccagagauaacca

SEQ ID NO: 758532 - RNA, 19 nt, Artificial Sequence
  Description of Artificial Sequence: Synthetic oligonucleotide
  Sense strand starting at position 1577 of SEQ ID NO: 586992
agaggauaacuguagcuuu

SEQ ID NO: 758533 - RNA, 19 nt, Artificial Sequence
  Description of Artificial Sequence: Synthetic oligonucleotide
  Antisense strand to SEQ ID NO: 758532
aaagcuacaguuauccucu

SEQ ID NO: 758534 - RNA, 19 nt, Artificial Sequence
  Description of Artificial Sequence: Synthetic oligonucleotide
  Sense strand starting at position 1580 of SEQ ID NO: 586992
ggauaacuguagcuuuaua

SEQ ID NO: 758535 - RNA, 19 nt, Artificial Sequence
  Description of Artificial Sequence: Synthetic oligonucleotide
  Antisense strand to SEQ ID NO: 758534
uauaaagcuacaguuaucc

SEQ ID NO: 758536 - RNA, 19 nt, Artificial Sequence
  Description of Artificial Sequence: Synthetic oligonucleotide
  Sense strand starting at position 1622 of SEQ ID NO: 586992
auuccuggauucuccagaa

SEQ ID NO: 758537 - RNA, 19 nt, Artificial Sequence
  Description of Artificial Sequence: Synthetic oligonucleotide
  Antisense strand to SEQ ID NO: 758536
uucuggagaauccaggaau

SEQ ID NO: 758538 - RNA, 19 nt, Artificial Sequence
  Description of Artificial Sequence: Synthetic oligonucleotide
  Sense strand starting at position 1635 of SEQ ID NO: 586992
ccagaauaagauugcauua

SEQ ID NO: 758539 - RNA, 19 nt, Artificial Sequence
  Description of Artificial Sequence: Synthetic oligonucleotide
  Antisense strand to SEQ ID NO: 758538
uaaugcaaucuuauucugg

SEQ ID NO: 758540 - RNA, 19 nt, Artificial Sequence
  Description of Artificial Sequence: Synthetic oligonucleotide
  Sense strand starting at position 1720 of SEQ ID NO: 586992
uuuccuaguguacaguaaa

SEQ ID NO: 758541 - RNA, 19 nt, Artificial Sequence
  Description of Artificial Sequence: Synthetic oligonucleotide
  Antisense strand to SEQ ID NO: 758540
uuuacuguacacuaggaaa

SEQ ID NO: 758542 - RNA, 19 nt, Artificial Sequence
  Description of Artificial Sequence: Synthetic oligonucleotide
  Sense strand starting at position 1723 of SEQ ID NO: 586992
ccuaguguacaguaaacau

SEQ ID NO: 758543 - RNA, 19 nt, Artificial Sequence
  Description of Artificial Sequence: Synthetic oligonucleotide
  Antisense strand to SEQ ID NO: 758542
auguuuacuguacacuagg

SEQ ID NO: 758544 - RNA, 19 nt, Artificial Sequence
  Description of Artificial Sequence: Synthetic oligonucleotide
  Sense strand starting at position 2016 of SEQ ID NO: 586992
ucacucccucuaugaugua

SEQ ID NO: 758545 - RNA, 19 nt, Artificial Sequence
  Description of Artificial Sequence: Synthetic oligonucleotide
  Antisense strand to SEQ ID NO: 758544
uacaucauagagggaguga

SEQ ID NO: 758546 - RNA, 19 nt, Artificial Sequence
  Description of Artificial Sequence: Synthetic oligonucleotide
  Sense strand starting at position 2023 of SEQ ID NO: 586992
cucuaugauguaugacaau

SEQ ID NO: 758547 - RNA, 19 nt, Artificial Sequence
  Description of Artificial Sequence: Synthetic oligonucleotide
  Antisense strand to SEQ ID NO: 758546
auugucauacaucauagag

SEQ ID NO: 758548 - RNA, 19 nt, Artificial Sequence
  Description of Artificial Sequence: Synthetic oligonucleotide
  Sense strand starting at position 2070 of SEQ ID NO: 586992
uuaagcaacuguucuagga

SEQ ID NO: 758549 - RNA, 19 nt, Artificial Sequence
  Description of Artificial Sequence: Synthetic oligonucleotide
  Antisense strand to SEQ ID NO: 758548
uccuagaacaguugcuuaa

SEQ ID NO: 758550 - RNA, 19 nt, Artificial Sequence
  Description of Artificial Sequence: Synthetic oligonucleotide
  Sense strand starting at position 2107 of SEQ ID NO: 586992
gacuucuaaguuuguggaa

SEQ ID NO: 758551 - RNA, 19 nt, Artificial Sequence
  Description of Artificial Sequence: Synthetic oligonucleotide
  Antisense strand to SEQ ID NO: 758550
uuccacaaacuuagaaguc

SEQ ID NO: 758552 - RNA, 19 nt, Artificial Sequence
  Description of Artificial Sequence: Synthetic oligonucleotide
  Sense strand starting at position 2114 of SEQ ID NO: 586992
aaguuuguggaagguuauu

SEQ ID NO: 758553 - RNA, 19 nt, Artificial Sequence
  Description of Artificial Sequence: Synthetic oligonucleotide
  Antisense strand to SEQ ID NO: 758552
aauaaccuuccacaaacuu

SEQ ID NO: 758554 - RNA, 19 nt, Artificial Sequence
  Description of Artificial Sequence: Synthetic oligonucleotide
  Sense strand starting at position 2325 of SEQ ID NO: 586992
ucuaauguauuaccgauca

SEQ ID NO: 758555 - RNA, 19 nt, Artificial Sequence
  Description of Artificial Sequence: Synthetic oligonucleotide
  Antisense strand to SEQ ID NO: 758554
ugaucgguaauacauuaga

SEQ ID NO: 758556 - RNA, 19 nt, Artificial Sequence
  Description of Artificial Sequence: Synthetic oligonucleotide
  Sense strand starting at position 2330 of SEQ ID NO: 586992
uguauuaccgaucaaacug

SEQ ID NO: 758557 - RNA, 19 nt, Artificial Sequence
  Description of Artificial Sequence: Synthetic oligonucleotide
  Antisense strand to SEQ ID NO: 758556
caguuugaucgguaauaca

SEQ ID NO: 758558 - RNA, 19 nt, Artificial Sequence
  Description of Artificial Sequence: Synthetic oligonucleotide
  Sense strand starting at position 2340 of SEQ ID NO: 586992
aucaaacuguguucccuaa

SEQ ID NO: 758559 - RNA, 19 nt, Artificial Sequence
  Description of Artificial Sequence: Synthetic oligonucleotide
  Antisense strand to SEQ ID NO: 758558
uuagggaacacaguuugau

SEQ ID NO: 758560 - RNA, 19 nt, Artificial Sequence
  Description of Artificial Sequence: Synthetic oligonucleotide
  Sense strand starting at position 2645 of SEQ ID NO: 586992
gucugugauauugcguuau

SEQ ID NO: 758561 - RNA, 19 nt, Artificial Sequence
  Description of Artificial Sequence: Synthetic oligonucleotide
  Antisense strand to SEQ ID NO: 758560
auaacgcaauaucacagac

SEQ ID NO: 758562 - RNA, 19 nt, Artificial Sequence
  Description of Artificial Sequence: Synthetic oligonucleotide
  Sense strand starting at position 2656 of SEQ ID NO: 586992
ugcguuauggcagcccuaa

SEQ ID NO: 758563 - RNA, 19 nt, Artificial Sequence
  Description of Artificial Sequence: Synthetic oligonucleotide
  Antisense strand to SEQ ID NO: 758562
uuagggcugccauaacgca

SEQ ID NO: 758564 - RNA, 19 nt, Artificial Sequence
  Description of Artificial Sequence: Synthetic oligonucleotide
  Sense strand starting at position 2657 of SEQ ID NO: 586992
gcguuauggcagcccuaau

SEQ ID NO: 758565 - RNA, 19 nt, Artificial Sequence
  Description of Artificial Sequence: Synthetic oligonucleotide
  Antisense strand to SEQ ID NO: 758564
auuagggcugccauaacgc

SEQ ID NO: 758566 - RNA, 19 nt, Artificial Sequence
  Description of Artificial Sequence: Synthetic oligonucleotide
  Sense strand starting at position 2686 of SEQ ID NO: 586992
gucauuuggucaguggugu

SEQ ID NO: 758567 - RNA, 19 nt, Artificial Sequence
  Description of Artificial Sequence: Synthetic oligonucleotide
  Antisense strand to SEQ ID NO: 758566
acaccacugaccaaaugac

SEQ ID NO: 758568 - RNA, 19 nt, Artificial Sequence
  Description of Artificial Sequence: Synthetic oligonucleotide
  Sense strand starting at position 2687 of SEQ ID NO: 586992
ucauuuggucagugguguu

SEQ ID NO: 758569 - RNA, 19 nt, Artificial Sequence
  Description of Artificial Sequence: Synthetic oligonucleotide
  Antisense strand to SEQ ID NO: 758568
aacaccacugaccaaauga

SEQ ID NO: 758570 - RNA, 19 nt, Artificial Sequence
  Description of Artificial Sequence: Synthetic oligonucleotide
  Sense strand starting at position 2727 of SEQ ID NO: 586992
ugcacaacagcuuauagau

SEQ ID NO: 758571 - RNA, 19 nt, Artificial Sequence
  Description of Artificial Sequence: Synthetic oligonucleotide
  Antisense strand to SEQ ID NO: 758570
aucuauaagcuguugugca

SEQ ID NO: 758572 - RNA, 19 nt, Artificial Sequence
  Description of Artificial Sequence: Synthetic oligonucleotide
  Sense strand starting at position 2842 of SEQ ID NO: 586992
gugggaaaccgguauucua

SEQ ID NO: 758573 - RNA, 19 nt, Artificial Sequence
  Description of Artificial Sequence: Synthetic oligonucleotide
  Antisense strand to SEQ ID NO: 758572
uagaauaccgguuucccac

SEQ ID NO: 758574 - RNA, 19 nt, Artificial Sequence
  Description of Artificial Sequence: Synthetic oligonucleotide
  Sense strand starting at position 2845 of SEQ ID NO: 586992
ggaaaccgguauucuaauu

SEQ ID NO: 758575 - RNA, 19 nt, Artificial Sequence
  Description of Artificial Sequence: Synthetic oligonucleotide
  Antisense strand to SEQ ID NO: 758574
aauuagaauaccgguuucc

SEQ ID NO: 758576 - RNA, 19 nt, Artificial Sequence
  Description of Artificial Sequence: Synthetic oligonucleotide
  Sense strand starting at position 3334 of SEQ ID NO: 586992
acaauaccacgugguauua

SEQ ID NO: 758577 - RNA, 19 nt, Artificial Sequence
  Description of Artificial Sequence: Synthetic oligonucleotide
  Antisense strand to SEQ ID NO: 758576
uaauaccacgugguauugu

SEQ ID NO: 758578 - RNA, 19 nt, Artificial Sequence
  Description of Artificial Sequence: Synthetic oligonucleotide
  Sense strand starting at position 3619 of SEQ ID NO: 586992
gagcuccucuggguaauaa

SEQ ID NO: 758579 - RNA, 19 nt, Artificial Sequence
  Description of Artificial Sequence: Synthetic oligonucleotide
  Antisense strand to SEQ ID NO: 758578
uuauuacccagaggagcuc

SEQ ID NO: 758580 - RNA, 19 nt, Artificial Sequence
  Description of Artificial Sequence: Synthetic oligonucleotide
  Sense strand starting at position 3629 of SEQ ID NO: 586992
ggguaauaaccaggaaggu

SEQ ID NO: 758581 - RNA, 19 nt, Artificial Sequence
  Description of Artificial Sequence: Synthetic oligonucleotide
  Antisense strand to SEQ ID NO: 758580
accuuccugguuauuaccc

SEQ ID NO: 758582 - RNA, 19 nt, Artificial Sequence
  Description of Artificial Sequence: Synthetic oligonucleotide
  Sense strand starting at position 3680 of SEQ ID NO: 586992
ggcacacuuguagguauuu

SEQ ID NO: 758583 - RNA, 19 nt, Artificial Sequence
  Description of Artificial Sequence: Synthetic oligonucleotide
  Antisense strand to SEQ ID NO: 758582
aaauaccuacaagugugcc

SEQ ID NO: 758584 - RNA, 19 nt, Artificial Sequence
  Description of Artificial Sequence: Synthetic oligonucleotide
  Sense strand starting at position 3686 of SEQ ID NO: 586992
cuuguagguauuugugcua

SEQ ID NO: 758585 - RNA, 19 nt, Artificial Sequence
  Description of Artificial Sequence: Synthetic oligonucleotide
  Antisense strand to SEQ ID NO: 758584
uagcacaaauaccuacaag

SEQ ID NO: 758586 - RNA, 19 nt, Artificial Sequence
  Description of Artificial Sequence: Synthetic oligonucleotide
  Sense strand starting at position 3689 of SEQ ID NO: 586992
guagguauuugugcuaaau

SEQ ID NO: 758587 - RNA, 19 nt, Artificial Sequence
  Description of Artificial Sequence: Synthetic oligonucleotide
  Antisense strand to SEQ ID NO: 758586
auuuagcacaaauaccuac

SEQ ID NO: 758588 - RNA, 19 nt, Artificial Sequence
  Description of Artificial Sequence: Synthetic oligonucleotide
  Sense strand starting at position 529 of SEQ ID NO: 586993
aggacauggucacucuagu

SEQ ID NO: 758589 - RNA, 19 nt, Artificial Sequence
  Description of Artificial Sequence: Synthetic oligonucleotide
  Antisense strand to SEQ ID NO: 758588
acuagagugaccauguccu

SEQ ID NO: 758590 - RNA, 19 nt, Artificial Sequence
  Description of Artificial Sequence: Synthetic oligonucleotide
  Sense strand starting at position 560 of SEQ ID NO: 586993
caguaugggcccuguagaa

SEQ ID NO: 758591 - RNA, 19 nt, Artificial Sequence
  Description of Artificial Sequence: Synthetic oligonucleotide
  Antisense strand to SEQ ID NO: 758590
uucuacagggcccauacug

SEQ ID NO: 758592 - RNA, 19 nt, Artificial Sequence
  Description of Artificial Sequence: Synthetic oligonucleotide
  Sense strand starting at position 628 of SEQ ID NO: 586993
gggugauggccaggacugu

SEQ ID NO: 758593 - RNA, 19 nt, Artificial Sequence
  Description of Artificial Sequence: Synthetic oligonucleotide
  Antisense strand to SEQ ID NO: 758592
acaguccuggccaucaccc

SEQ ID NO: 758594 - RNA, 19 nt, Artificial Sequence
  Description of Artificial Sequence: Synthetic oligonucleotide
  Sense strand starting at position 934 of SEQ ID NO: 586993
gguucucugccugaaacca

SEQ ID NO: 758595 - RNA, 19 nt, Artificial Sequence
  Description of Artificial Sequence: Synthetic oligonucleotide
  Antisense strand to SEQ ID NO: 758594
ugguuucaggcagagaacc

SEQ ID NO: 758596 - RNA, 19 nt, Artificial Sequence
  Description of Artificial Sequence: Synthetic oligonucleotide
  Sense strand starting at position 1138 of SEQ ID NO: 586993
aggagauguuagcguucag

SEQ ID NO: 758597 - RNA, 19 nt, Artificial Sequence
  Description of Artificial Sequence: Synthetic oligonucleotide
  Antisense strand to SEQ ID NO: 758596
cugaacgcuaacaucuccu

SEQ ID NO: 758598 - RNA, 19 nt, Artificial Sequence
  Description of Artificial Sequence: Synthetic oligonucleotide
  Sense strand starting at position 1254 of SEQ ID NO: 586993
gaauaauguugggagggca

SEQ ID NO: 758599 - RNA, 19 nt, Artificial Sequence
  Description of Artificial Sequence: Synthetic oligonucleotide
  Antisense strand to SEQ ID NO: 758598
ugcccucccaacauuauuc

SEQ ID NO: 758600 - RNA, 19 nt, Artificial Sequence
  Description of Artificial Sequence: Synthetic oligonucleotide
  Sense strand starting at position 2037 of SEQ ID NO: 586993
gaggcuugggcucaagaga

SEQ ID NO: 758601 - RNA, 19 nt, Artificial Sequence
  Description of Artificial Sequence: Synthetic oligonucleotide
  Antisense strand to SEQ ID NO: 758600
ucucuugagcccaagccuc

SEQ ID NO: 758602 - RNA, 19 nt, Artificial Sequence
  Description of Artificial Sequence: Synthetic oligonucleotide
  Sense strand starting at position 2230 of SEQ ID NO: 586993
ccagcucucccuggaaaca

SEQ ID NO: 758603 - RNA, 19 nt, Artificial Sequence
  Description of Artificial Sequence: Synthetic oligonucleotide
  Antisense strand to SEQ ID NO: 758602
uguuuccagggagagcugg

SEQ ID NO: 758604 - RNA, 19 nt, Artificial Sequence
  Description of Artificial Sequence: Synthetic oligonucleotide
  Sense strand starting at position 2433 of SEQ ID NO: 586993
gggacuucccagggaugca

SEQ ID NO: 758605 - RNA, 19 nt, Artificial Sequence
  Description of Artificial Sequence: Synthetic oligonucleotide
  Antisense strand to SEQ ID NO: 758604
ugcaucccugggaaguccc

SEQ ID NO: 758606 - RNA, 19 nt, Artificial Sequence
  Description of Artificial Sequence: Synthetic oligonucleotide
  Sense strand starting at position 2458 of SEQ ID NO: 586993
ggucucagacuccaguaau

SEQ ID NO: 758607 - RNA, 19 nt, Artificial Sequence
  Description of Artificial Sequence: Synthetic oligonucleotide
  Antisense strand to SEQ ID NO: 758606
auuacuggagucugagacc

SEQ ID NO: 758608 - RNA, 19 nt, Artificial Sequence
  Description of Artificial Sequence: Synthetic oligonucleotide
  Sense strand starting at position 2480 of SEQ ID NO: 586993
uugaaauuguaugugcaca

SEQ ID NO: 758609 - RNA, 19 nt, Artificial Sequence
  Description of Artificial Sequence: Synthetic oligonucleotide
  Antisense strand to SEQ ID NO: 758608
ugugcacauacaauuucaa

SEQ ID NO: 758610 - RNA, 19 nt, Artificial Sequence
  Description of Artificial Sequence: Synthetic oligonucleotide
  Sense strand starting at position 2482 of SEQ ID NO: 586993
gaaauuguaugugcacauu

SEQ ID NO: 758611 - RNA, 19 nt, Artificial Sequence
  Description of Artificial Sequence: Synthetic oligonucleotide
  Antisense strand to SEQ ID NO: 758610
aaugugcacauacaauuuc

SEQ ID NO: 758612 - RNA, 19 nt, Artificial Sequence
  Description of Artificial Sequence: Synthetic oligonucleotide
  Sense strand starting at position 2505 of SEQ ID NO: 586993
ugaagacaguucuauacuu

SEQ ID NO: 758613 - RNA, 19 nt, Artificial Sequence
  Description of Artificial Sequence: Synthetic oligonucleotide
  Antisense strand to SEQ ID NO: 758612
aaguauagaacugucuuca

SEQ ID NO: 758614 - RNA, 19 nt, Artificial Sequence
  Description of Artificial Sequence: Synthetic oligonucleotide
  Sense strand starting at position 2524 of SEQ ID NO: 586993
uuauuagauucucaagagg

SEQ ID NO: 758615 - RNA, 19 nt, Artificial Sequence
  Description of Artificial Sequence: Synthetic oligonucleotide
  Antisense strand to SEQ ID NO: 758614
ccucuugagaaucuaauaa

SEQ ID NO: 758616 - RNA, 19 nt, Artificial Sequence
  Description of Artificial Sequence: Synthetic oligonucleotide
  Sense strand starting at position 2563 of SEQ ID NO: 586993
uuaagagcuccugggcuaa

SEQ ID NO: 758617 - RNA, 19 nt, Artificial Sequence
  Description of Artificial Sequence: Synthetic oligonucleotide
  Antisense strand to SEQ ID NO: 758616
uuagcccaggagcucuuaa

SEQ ID NO: 758618 - RNA, 19 nt, Artificial Sequence
  Description of Artificial Sequence: Synthetic oligonucleotide
  Sense strand starting at position 2606 of SEQ ID NO: 586993
ugaacuucugccuggauga

SEQ ID NO: 758619 - RNA, 19 nt, Artificial Sequence
  Description of Artificial Sequence: Synthetic oligonucleotide
  Antisense strand to SEQ ID NO: 758618
ucauccaggcagaaguuca

SEQ ID NO: 758620 - RNA, 19 nt, Artificial Sequence
  Description of Artificial Sequence: Synthetic oligonucleotide
  Sense strand starting at position 2607 of SEQ ID NO: 586993
gaacuucugccuggaugau

SEQ ID NO: 758621 - RNA, 19 nt, Artificial Sequence
  Description of Artificial Sequence: Synthetic oligonucleotide
  Antisense strand to SEQ ID NO: 758620
aucauccaggcagaaguuc

SEQ ID NO: 758622 - RNA, 19 nt, Artificial Sequence
  Description of Artificial Sequence: Synthetic oligonucleotide
  Sense strand starting at position 2853 of SEQ ID NO: 586993
ggagccuaugcugaggaau

SEQ ID NO: 758623 - RNA, 19 nt, Artificial Sequence
  Description of Artificial Sequence: Synthetic oligonucleotide
  Antisense strand to SEQ ID NO: 758622
auuccucagcauaggcucc

SEQ ID NO: 758624 - RNA, 19 nt, Artificial Sequence
  Description of Artificial Sequence: Synthetic oligonucleotide
  Sense strand starting at position 2927 of SEQ ID NO: 586993
agagcuaagccggaugaaa

SEQ ID NO: 758625 - RNA, 19 nt, Artificial Sequence
  Description of Artificial Sequence: Synthetic oligonucleotide
  Antisense strand to SEQ ID NO: 758624
uuucauccggcuuagcucu

SEQ ID NO: 758626 - RNA, 19 nt, Artificial Sequence
  Description of Artificial Sequence: Synthetic oligonucleotide
  Sense strand starting at position 2929 of SEQ ID NO: 586993
agcuaagccggaugaaaua

SEQ ID NO: 758627 - RNA, 19 nt, Artificial Sequence
  Description of Artificial Sequence: Synthetic oligonucleotide
  Antisense strand to SEQ ID NO: 758626
uauuucauccggcuuagcu

SEQ ID NO: 758628 - RNA, 19 nt, Artificial Sequence
  Description of Artificial Sequence: Synthetic oligonucleotide
  Sense strand starting at position 2940 of SEQ ID NO: 586993
augaaauaauccgagaauc

SEQ ID NO: 758629 - RNA, 19 nt, Artificial Sequence
  Description of Artificial Sequence: Synthetic oligonucleotide
  Antisense strand to SEQ ID NO: 758628
gauucucggauuauuucau

SEQ ID NO: 758630 - RNA, 19 nt, Artificial Sequence
  Description of Artificial Sequence: Synthetic oligonucleotide
  Sense strand starting at position 3095 of SEQ ID NO: 586993
cugauaucccuccgaguau

SEQ ID NO: 758631 - RNA, 19 nt, Artificial Sequence
  Description of Artificial Sequence: Synthetic oligonucleotide
  Antisense strand to SEQ ID NO: 758630
auacucggagggauaucag

SEQ ID NO: 758632 - RNA, 19 nt, Artificial Sequence
  Description of Artificial Sequence: Synthetic oligonucleotide
  Sense strand starting at position 3096 of SEQ ID NO: 586993
ugauaucccuccgaguauc

SEQ ID NO: 758633 - RNA, 19 nt, Artificial Sequence
  Description of Artificial Sequence: Synthetic oligonucleotide
  Antisense strand to SEQ ID NO: 758632
gauacucggagggauauca

SEQ ID NO: 758634 - RNA, 19 nt, Artificial Sequence
  Description of Artificial Sequence: Synthetic oligonucleotide
  Sense strand starting at position 3104 of SEQ ID NO: 586993
cuccgaguauccuguagag

SEQ ID NO: 758635 - RNA, 19 nt, Artificial Sequence
  Description of Artificial Sequence: Synthetic oligonucleotide
  Antisense strand to SEQ ID NO: 758634
cucuacaggauacucggag

SEQ ID NO: 758636 - RNA, 19 nt, Artificial Sequence
  Description of Artificial Sequence: Synthetic oligonucleotide
  Sense strand starting at position 3106 of SEQ ID NO: 586993
ccgaguauccuguagaguc

SEQ ID NO: 758637 - RNA, 19 nt, Artificial Sequence
  Description of Artificial Sequence: Synthetic oligonucleotide
  Antisense strand to SEQ ID NO: 758636
gacucuacaggauacucgg

SEQ ID NO: 758638 - RNA, 19 nt, Artificial Sequence
  Description of Artificial Sequence: Synthetic oligonucleotide
  Sense strand starting at position 3108 of SEQ ID NO: 586993
gaguauccuguagagucau

SEQ ID NO: 758639 - RNA, 19 nt, Artificial Sequence
  Description of Artificial Sequence: Synthetic oligonucleotide
  Antisense strand to SEQ ID NO: 758638
augacucuacaggauacuc

SEQ ID NO: 758640 - RNA, 19 nt, Artificial Sequence
  Description of Artificial Sequence: Synthetic oligonucleotide
  Sense strand starting at position 3452 of SEQ ID NO: 586993
acagcugagcccgagugau

SEQ ID NO: 758641 - RNA, 19 nt, Artificial Sequence
  Description of Artificial Sequence: Synthetic oligonucleotide
  Antisense strand to SEQ ID NO: 758640
aucacucgggcucagcugu

SEQ ID NO: 758642 - RNA, 19 nt, Artificial Sequence
  Description of Artificial Sequence: Synthetic oligonucleotide
  Sense strand starting at position 3676 of SEQ ID NO: 586993
ggagaaaguucauggagag

SEQ ID NO: 758643 - RNA, 19 nt, Artificial Sequence
  Description of Artificial Sequence: Synthetic oligonucleotide
  Antisense strand to SEQ ID NO: 758642
cucuccaugaacuuucucc

SEQ ID NO: 758644 - RNA, 19 nt, Artificial Sequence
  Description of Artificial Sequence: Synthetic oligonucleotide
  Sense strand starting at position 3770 of SEQ ID NO: 586993
ggagaaaccucguaaccug

SEQ ID NO: 758645 - RNA, 19 nt, Artificial Sequence
  Description of Artificial Sequence: Synthetic oligonucleotide
  Antisense strand to SEQ ID NO: 758644
cagguuacgagguuucucc

SEQ ID NO: 758646 - RNA, 19 nt, Artificial Sequence
  Description of Artificial Sequence: Synthetic oligonucleotide
  Sense strand starting at position 137 of SEQ ID NO: 586994
auagaacuuugagaccaga

SEQ ID NO: 758647 - RNA, 19 nt, Artificial Sequence
  Description of Artificial Sequence: Synthetic oligonucleotide
  Antisense strand to SEQ ID NO: 758646
ucuggucucaaaguucuau

SEQ ID NO: 758648 - RNA, 19 nt, Artificial Sequence
  Description of Artificial Sequence: Synthetic oligonucleotide
  Sense strand starting at position 166 of SEQ ID NO: 586994
gagacauacuugucuaaag

SEQ ID NO: 758649 - RNA, 19 nt, Artificial Sequence
  Description of Artificial Sequence: Synthetic oligonucleotide
  Antisense strand to SEQ ID NO: 758648
cuuuagacaaguaugucuc

SEQ ID NO: 758650 - RNA, 19 nt, Artificial Sequence
  Description of Artificial Sequence: Synthetic oligonucleotide
  Sense strand starting at position 173 of SEQ ID NO: 586994
acuugucuaaagcgaagaa

SEQ ID NO: 758651 - RNA, 19 nt, Artificial Sequence
  Description of Artificial Sequence: Synthetic oligonucleotide
  Antisense strand to SEQ ID NO: 758650
uucuucgcuuuagacaagu

SEQ ID NO: 758652 - RNA, 19 nt, Artificial Sequence
  Description of Artificial Sequence: Synthetic oligonucleotide
  Sense strand starting at position 407 of SEQ ID NO: 586994
uuaaguuaguaucugaaag

SEQ ID NO: 758653 - RNA, 19 nt, Artificial Sequence
  Description of Artificial Sequence: Synthetic oligonucleotide
  Antisense strand to SEQ ID NO: 758652
cuuucagauacuaacuuaa

SEQ ID NO: 758654 - RNA, 19 nt, Artificial Sequence
  Description of Artificial Sequence: Synthetic oligonucleotide
  Sense strand starting at position 415 of SEQ ID NO: 586994
guaucugaaagguacaagu

SEQ ID NO: 758655 - RNA, 19 nt, Artificial Sequence
  Description of Artificial Sequence: Synthetic oligonucleotide
  Antisense strand to SEQ ID NO: 758654
acuuguaccuuucagauac

SEQ ID NO: 758656 - RNA, 19 nt, Artificial Sequence
  Description of Artificial Sequence: Synthetic oligonucleotide
  Sense strand starting at position 424 of SEQ ID NO: 586994
agguacaaguuuccuaaca

SEQ ID NO: 758657 - RNA, 19 nt, Artificial Sequence
  Description of Artificial Sequence: Synthetic oligonucleotide
  Antisense strand to SEQ ID NO: 758656
uguuaggaaacuuguaccu

SEQ ID NO: 758658 - RNA, 19 nt, Artificial Sequence
  Description of Artificial Sequence: Synthetic oligonucleotide
  Sense strand starting at position 425 of SEQ ID NO: 586994
gguacaaguuuccuaacaa

SEQ ID NO: 758659 - RNA, 19 nt, Artificial Sequence
  Description of Artificial Sequence: Synthetic oligonucleotide
  Antisense strand to SEQ ID NO: 758658
uuguuaggaaacuuguacc

SEQ ID NO: 758660 - RNA, 19 nt, Artificial Sequence
  Description of Artificial Sequence: Synthetic oligonucleotide
  Sense strand starting at position 445 of SEQ ID NO: 586994
augaguacauuaucucaag

SEQ ID NO: 758661 - RNA, 19 nt, Artificial Sequence
  Description of Artificial Sequence: Synthetic oligonucleotide
  Antisense strand to SEQ ID NO: 758660
cuugagauaauguacucau

SEQ ID NO: 758662 - RNA, 19 nt, Artificial Sequence
  Description of Artificial Sequence: Synthetic oligonucleotide
  Sense strand starting at position 591 of SEQ ID NO: 586994
guaagaauuucccaguacu

SEQ ID NO: 758663 - RNA, 19 nt, Artificial Sequence
  Description of Artificial Sequence: Synthetic oligonucleotide
  Antisense strand to SEQ ID NO: 758662
aguacugggaaauucuuac

SEQ ID NO: 758664 - RNA, 19 nt, Artificial Sequence
  Description of Artificial Sequence: Synthetic oligonucleotide
  Sense strand starting at position 599 of SEQ ID NO: 586994
uucccaguacugugaaauu

SEQ ID NO: 758665 - RNA, 19 nt, Artificial Sequence
  Description of Artificial Sequence: Synthetic oligonucleotide
  Antisense strand to SEQ ID NO: 758664
aauuucacaguacugggaa

SEQ ID NO: 758666 - RNA, 19 nt, Artificial Sequence
  Description of Artificial Sequence: Synthetic oligonucleotide
  Sense strand starting at position 1568 of SEQ ID NO: 586994
gcgcgaguugcacuaacuu

SEQ ID NO: 758667 - RNA, 19 nt, Artificial Sequence
  Description of Artificial Sequence: Synthetic oligonucleotide
  Antisense strand to SEQ ID NO: 758666
aaguuagugcaacucgcgc

SEQ ID NO: 758668 - RNA, 19 nt, Artificial Sequence
  Description of Artificial Sequence: Synthetic oligonucleotide
  Sense strand starting at position 1990 of SEQ ID NO: 586994
ucuaaaggucccuacaagu

SEQ ID NO: 758669 - RNA, 19 nt, Artificial Sequence
  Description of Artificial Sequence: Synthetic oligonucleotide
  Antisense strand to SEQ ID NO: 758668
acuuguagggaccuuuaga

SEQ ID NO: 758670 - RNA, 19 nt, Artificial Sequence
  Description of Artificial Sequence: Synthetic oligonucleotide
  Sense strand starting at position 2046 of SEQ ID NO: 586994
gcguucuggguccauuuau

SEQ ID NO: 758671 - RNA, 19 nt, Artificial Sequence
  Description of Artificial Sequence: Synthetic oligonucleotide
  Antisense strand to SEQ ID NO: 758670
auaaauggacccagaacgc

SEQ ID NO: 758672 - RNA, 19 nt, Artificial Sequence
  Description of Artificial Sequence: Synthetic oligonucleotide
  Sense strand starting at position 2073 of SEQ ID NO: 586994
ugcuaauauuuagaaagag

SEQ ID NO: 758673 - RNA, 19 nt, Artificial Sequence
  Description of Artificial Sequence: Synthetic oligonucleotide
  Antisense strand to SEQ ID NO: 758672
cucuuucuaaauauuagca

SEQ ID NO: 758674 - RNA, 19 nt, Artificial Sequence
  Description of Artificial Sequence: Synthetic oligonucleotide
  Sense strand starting at position 2128 of SEQ ID NO: 586994
aguuacaacccgcauaagu

SEQ ID NO: 758675 - RNA, 19 nt, Artificial Sequence
  Description of Artificial Sequence: Synthetic oligonucleotide
  Antisense strand to SEQ ID NO: 758674
acuuaugcggguuguaacu

SEQ ID NO: 758676 - RNA, 19 nt, Artificial Sequence
  Description of Artificial Sequence: Synthetic oligonucleotide
  Sense strand starting at position 2427 of SEQ ID NO: 586994
gcuaguaggccugaagaua

SEQ ID NO: 758677 - RNA, 19 nt, Artificial Sequence
  Description of Artificial Sequence: Synthetic oligonucleotide
  Antisense strand to SEQ ID NO: 758676
uaucuucaggccuacuagc

SEQ ID NO: 758678 - RNA, 19 nt, Artificial Sequence
  Description of Artificial Sequence: Synthetic oligonucleotide
  Sense strand starting at position 2473 of SEQ ID NO: 586994
ggcagaugcuauuuaccuu

SEQ ID NO: 758679 - RNA, 19 nt, Artificial Sequence
  Description of Artificial Sequence: Synthetic oligonucleotide
  Antisense strand to SEQ ID NO: 758678
aagguaaauagcaucugcc

SEQ ID NO: 758680 - RNA, 19 nt, Artificial Sequence
  Description of Artificial Sequence: Synthetic oligonucleotide
  Sense strand starting at position 2528 of SEQ ID NO: 586994
gagaaaucuugacagauga

SEQ ID NO: 758681 - RNA, 19 nt, Artificial Sequence
  Description of Artificial Sequence: Synthetic oligonucleotide
  Antisense strand to SEQ ID NO: 758680
ucaucugucaagauuucuc

SEQ ID NO: 758682 - RNA, 19 nt, Artificial Sequence
  Description of Artificial Sequence: Synthetic oligonucleotide
  Sense strand starting at position 2536 of SEQ ID NO: 586994
uugacagaugaauguuuau

SEQ ID NO: 758683 - RNA, 19 nt, Artificial Sequence
  Description of Artificial Sequence: Synthetic oligonucleotide
  Antisense strand to SEQ ID NO: 758682
auaaacauucaucugucaa

SEQ ID NO: 758684 - RNA, 19 nt, Artificial Sequence
  Description of Artificial Sequence: Synthetic oligonucleotide
  Sense strand starting at position 2545 of SEQ ID NO: 586994
gaauguuuauccuccaggu

SEQ ID NO: 758685 - RNA, 19 nt, Artificial Sequence
  Description of Artificial Sequence: Synthetic oligonucleotide
  Antisense strand to SEQ ID NO: 758684
accuggaggauaaacauuc

SEQ ID NO: 758686 - RNA, 19 nt, Artificial Sequence
  Description of Artificial Sequence: Synthetic oligonucleotide
  Sense strand starting at position 2547 of SEQ ID NO: 586994
auguuuauccuccagguuu

SEQ ID NO: 758687 - RNA, 19 nt, Artificial Sequence
  Description of Artificial Sequence: Synthetic oligonucleotide
  Antisense strand to SEQ ID NO: 758686
aaaccuggaggauaaacau

SEQ ID NO: 758688 - RNA, 19 nt, Artificial Sequence
  Description of Artificial Sequence: Synthetic oligonucleotide
  Sense strand starting at position 2699 of SEQ ID NO: 586994
uuugacugugcugaauaaa

SEQ ID NO: 758689 - RNA, 19 nt, Artificial Sequence
  Description of Artificial Sequence: Synthetic oligonucleotide
  Antisense strand to SEQ ID NO: 758688
uuuauucagcacagucaaa

SEQ ID NO: 758690 - RNA, 19 nt, Artificial Sequence
  Description of Artificial Sequence: Synthetic oligonucleotide
  Sense strand starting at position 2768 of SEQ ID NO: 586994
uucuguccguaagugauuu

SEQ ID NO: 758691 - RNA, 19 nt, Artificial Sequence
  Description of Artificial Sequence: Synthetic oligonucleotide
  Antisense strand to SEQ ID NO: 758690
aaaucacuuacggacagaa

SEQ ID NO: 758692 - RNA, 19 nt, Artificial Sequence
  Description of Artificial Sequence: Synthetic oligonucleotide
  Sense strand starting at position 2772 of SEQ ID NO: 586994
guccguaagugauuugacu

SEQ ID NO: 758693 - RNA, 19 nt, Artificial Sequence
  Description of Artificial Sequence: Synthetic oligonucleotide
  Antisense strand to SEQ ID NO: 758692
agucaaaucacuuacggac

SEQ ID NO: 758694 - RNA, 19 nt, Artificial Sequence
  Description of Artificial Sequence: Synthetic oligonucleotide
  Sense strand starting at position 2774 of SEQ ID NO: 586994
ccguaagugauuugacuuu

SEQ ID NO: 758695 - RNA, 19 nt, Artificial Sequence
  Description of Artificial Sequence: Synthetic oligonucleotide
  Antisense strand to SEQ ID NO: 758694
aaagucaaaucacuuacgg

SEQ ID NO: 758696 - RNA, 19 nt, Artificial Sequence
  Description of Artificial Sequence: Synthetic oligonucleotide
  Sense strand starting at position 2794 of SEQ ID NO: 586994
uauguauuagaugguaaug

SEQ ID NO: 758697 - RNA, 19 nt, Artificial Sequence
  Description of Artificial Sequence: Synthetic oligonucleotide
  Antisense strand to SEQ ID NO: 758696
cauuaccaucuaauacaua

SEQ ID NO: 758698 - RNA, 19 nt, Artificial Sequence
  Description of Artificial Sequence: Synthetic oligonucleotide
  Sense strand starting at position 2889 of SEQ ID NO: 586994
ugcuuacuuguauaauagu

SEQ ID NO: 758699 - RNA, 19 nt, Artificial Sequence
  Description of Artificial Sequence: Synthetic oligonucleotide
  Antisense strand to SEQ ID NO: 758698
acuauuauacaaguaagca

SEQ ID NO: 758700 - RNA, 19 nt, Artificial Sequence
  Description of Artificial Sequence: Synthetic oligonucleotide
  Sense strand starting at position 2951 of SEQ ID NO: 586994
ggccuauuacggcauacau

SEQ ID NO: 758701 - RNA, 19 nt, Artificial Sequence
  Description of Artificial Sequence: Synthetic oligonucleotide
  Antisense strand to SEQ ID NO: 758700
auguaugccguaauaggcc

SEQ ID NO: 758702 - RNA, 19 nt, Artificial Sequence
  Description of Artificial Sequence: Synthetic oligonucleotide
  Sense strand starting at position 2953 of SEQ ID NO: 586994
ccuauuacggcauacauaa

SEQ ID NO: 758703 - RNA, 19 nt, Artificial Sequence
  Description of Artificial Sequence: Synthetic oligonucleotide
  Antisense strand to SEQ ID NO: 758702
uuauguaugccguaauagg

SEQ ID NO: 758704 - RNA, 19 nt, Artificial Sequence
  Description of Artificial Sequence: Synthetic oligonucleotide
  Sense strand starting at position 3040 of SEQ ID NO: 586994
gaucuacuacagugagauc

SEQ ID NO: 758705 - RNA, 19 nt, Artificial Sequence
  Description of Artificial Sequence: Synthetic oligonucleotide
  Antisense strand to SEQ ID NO: 758704
gaucucacuguaguagauc

SEQ ID NO: 758706 - RNA, 19 nt, Artificial Sequence
  Description of Artificial Sequence: Synthetic oligonucleotide
  Sense strand starting at position 3049 of SEQ ID NO: 586994
cagugagauccaggccaga

SEQ ID NO: 758707 - RNA, 19 nt, Artificial Sequence
  Description of Artificial Sequence: Synthetic oligonucleotide
  Antisense strand to SEQ ID NO: 758706
ucuggccuggaucucacug

SEQ ID NO: 758708 - RNA, 19 nt, Artificial Sequence
  Description of Artificial Sequence: Synthetic oligonucleotide
  Sense strand starting at position 3060 of SEQ ID NO: 586994
aggccagaauaagugaaau

SEQ ID NO: 758709 - RNA, 19 nt, Artificial Sequence
  Description of Artificial Sequence: Synthetic oligonucleotide
  Antisense strand to SEQ ID NO: 758708
auuucacuuauucuggccu

SEQ ID NO: 758710 - RNA, 19 nt, Artificial Sequence
  Description of Artificial Sequence: Synthetic oligonucleotide
  Sense strand starting at position 3136 of SEQ ID NO: 586994
ugugucuaacacugauaca

SEQ ID NO: 758711 - RNA, 19 nt, Artificial Sequence
  Description of Artificial Sequence: Synthetic oligonucleotide
  Antisense strand to SEQ ID NO: 758710
uguaucaguguuagacaca

SEQ ID NO: 758712 - RNA, 19 nt, Artificial Sequence
  Description of Artificial Sequence: Synthetic oligonucleotide
  Sense strand starting at position 3175 of SEQ ID NO: 586994
acaauauugucaccaguaa

SEQ ID NO: 758713 - RNA, 19 nt, Artificial Sequence
  Description of Artificial Sequence: Synthetic oligonucleotide
  Antisense strand to SEQ ID NO: 758712
uuacuggugacaauauugu

SEQ ID NO: 758714 - RNA, 19 nt, Artificial Sequence
  Description of Artificial Sequence: Synthetic oligonucleotide
  Sense strand starting at position 3187 of SEQ ID NO: 586994
ccaguaaaggaucgugacu

SEQ ID NO: 758715 - RNA, 19 nt, Artificial Sequence
  Description of Artificial Sequence: Synthetic oligonucleotide
  Antisense strand to SEQ ID NO: 758714
agucacgauccuuuacugg

SEQ ID NO: 758716 - RNA, 19 nt, Artificial Sequence
  Description of Artificial Sequence: Synthetic oligonucleotide
  Sense strand starting at position 3385 of SEQ ID NO: 586994
gaaguuucccuuuggcaac

SEQ ID NO: 758717 - RNA, 19 nt, Artificial Sequence
  Description of Artificial Sequence: Synthetic oligonucleotide
  Antisense strand to SEQ ID NO: 758716
guugccaaagggaaacuuc

SEQ ID NO: 758718 - RNA, 19 nt, Artificial Sequence
  Description of Artificial Sequence: Synthetic oligonucleotide
  Sense strand starting at position 3547 of SEQ ID NO: 586994
gaggcugggauguacuuaa

SEQ ID NO: 758719 - RNA, 19 nt, Artificial Sequence
  Description of Artificial Sequence: Synthetic oligonucleotide
  Antisense strand to SEQ ID NO: 758718
uuaaguacaucccagccuc

SEQ ID NO: 758720 - RNA, 19 nt, Artificial Sequence
  Description of Artificial Sequence: Synthetic oligonucleotide
  Sense strand starting at position 3712 of SEQ ID NO: 586994
cccaucuacuaggcagaaa

SEQ ID NO: 758721 - RNA, 19 nt, Artificial Sequence
  Description of Artificial Sequence: Synthetic oligonucleotide
  Antisense strand to SEQ ID NO: 758720
uuucugccuaguagauggg

SEQ ID NO: 758722 - RNA, 19 nt, Artificial Sequence
  Description of Artificial Sequence: Synthetic oligonucleotide
  Sense strand starting at position 3802 of SEQ ID NO: 586994
caaggaaguccuuaguuuc

SEQ ID NO: 758723 - RNA, 19 nt, Artificial Sequence
  Description of Artificial Sequence: Synthetic oligonucleotide
  Antisense strand to SEQ ID NO: 758722
gaaacuaaggacuuccuug

SEQ ID NO: 758724 - RNA, 19 nt, Artificial Sequence
  Description of Artificial Sequence: Synthetic oligonucleotide
  Sense strand starting at position 3907 of SEQ ID NO: 586994
cugcgagucacugaauuag

SEQ ID NO: 758725 - RNA, 19 nt, Artificial Sequence
  Description of Artificial Sequence: Synthetic oligonucleotide
  Antisense strand to SEQ ID NO: 758724
cuaauucagugacucgcag

SEQ ID NO: 758726 - RNA, 19 nt, Artificial Sequence
  Description of Artificial Sequence: Synthetic oligonucleotide
  Sense strand starting at position 145 of SEQ ID NO: 586995
ugccuacugcaaggaaauu

SEQ ID NO: 758727 - RNA, 19 nt, Artificial Sequence
  Description of Artificial Sequence: Synthetic oligonucleotide
  Antisense strand to SEQ ID NO: 758726
aauuuccuugcaguaggca

SEQ ID NO: 758728 - RNA, 19 nt, Artificial Sequence
  Description of Artificial Sequence: Synthetic oligonucleotide
  Sense strand starting at position 208 of SEQ ID NO: 586995
ugugguagaucauacuugu

SEQ ID NO: 758729 - RNA, 19 nt, Artificial Sequence
  Description of Artificial Sequence: Synthetic oligonucleotide
  Antisense strand to SEQ ID NO: 758728
acaaguaugaucuaccaca

SEQ ID NO: 758730 - RNA, 19 nt, Artificial Sequence
  Description of Artificial Sequence: Synthetic oligonucleotide
  Sense strand starting at position 211 of SEQ ID NO: 586995
gguagaucauacuuguaau

SEQ ID NO: 758731 - RNA, 19 nt, Artificial Sequence
  Description of Artificial Sequence: Synthetic oligonucleotide
  Antisense strand to SEQ ID NO: 758730
auuacaaguaugaucuacc

SEQ ID NO: 758732 - RNA, 19 nt, Artificial Sequence
  Description of Artificial Sequence: Synthetic oligonucleotide
  Sense strand starting at position 423 of SEQ ID NO: 586995
cagccuuggcaacaugaga

SEQ ID NO: 758733 - RNA, 19 nt, Artificial Sequence
  Description of Artificial Sequence: Synthetic oligonucleotide
  Antisense strand to SEQ ID NO: 758732
ucucauguugccaaggcug

SEQ ID NO: 758734 - RNA, 19 nt, Artificial Sequence
  Description of Artificial Sequence: Synthetic oligonucleotide
  Sense strand starting at position 964 of SEQ ID NO: 586995
gggcaguggguuuggaauu

SEQ ID NO: 758735 - RNA, 19 nt, Artificial Sequence
  Description of Artificial Sequence: Synthetic oligonucleotide
  Antisense strand to SEQ ID NO: 758734
aauuccaaacccacugccc

SEQ ID NO: 758736 - RNA, 19 nt, Artificial Sequence
  Description of Artificial Sequence: Synthetic oligonucleotide
  Sense strand starting at position 1059 of SEQ ID NO: 586995
aucgcuuggguccaggaau

SEQ ID NO: 758737 - RNA, 19 nt, Artificial Sequence
  Description of Artificial Sequence: Synthetic oligonucleotide
  Antisense strand to SEQ ID NO: 758736
auuccuggacccaagcgau

SEQ ID NO: 758738 - RNA, 19 nt, Artificial Sequence
  Description of Artificial Sequence: Synthetic oligonucleotide
  Sense strand starting at position 1194 of SEQ ID NO: 586995
ucuggaggcuucggaagua

SEQ ID NO: 758739 - RNA, 19 nt, Artificial Sequence
  Description of Artificial Sequence: Synthetic oligonucleotide
  Antisense strand to SEQ ID NO: 758738
uacuuccgaagccuccaga

SEQ ID NO: 758740 - RNA, 19 nt, Artificial Sequence
  Description of Artificial Sequence: Synthetic oligonucleotide
  Sense strand starting at position 1199 of SEQ ID NO: 586995
aggcuucggaaguauaaac

SEQ ID NO: 758741 - RNA, 19 nt, Artificial Sequence
  Description of Artificial Sequence: Synthetic oligonucleotide
  Antisense strand to SEQ ID NO: 758740
guuuauacuuccgaagccu

SEQ ID NO: 758742 - RNA, 19 nt, Artificial Sequence
  Description of Artificial Sequence: Synthetic oligonucleotide
  Sense strand starting at position 1306 of SEQ ID NO: 586995
ggcuuucguuuccagagga

SEQ ID NO: 758743 - RNA, 19 nt, Artificial Sequence
  Description of Artificial Sequence: Synthetic oligonucleotide
  Antisense strand to SEQ ID NO: 758742
uccucuggaaacgaaagcc

SEQ ID NO: 758744 - RNA, 19 nt, Artificial Sequence
  Description of Artificial Sequence: Synthetic oligonucleotide
  Sense strand starting at position 1352 of SEQ ID NO: 586995
acaggaggcucuuaaggau

SEQ ID NO: 758745 - RNA, 19 nt, Artificial Sequence
  Description of Artificial Sequence: Synthetic oligonucleotide
  Antisense strand to SEQ ID NO: 758744
auccuuaagagccuccugu

SEQ ID NO: 758746 - RNA, 19 nt, Artificial Sequence
  Description of Artificial Sequence: Synthetic oligonucleotide
  Sense strand starting at position 1504 of SEQ ID NO: 586995
cuuccaagcgcuuaagaga

SEQ ID NO: 758747 - RNA, 19 nt, Artificial Sequence
  Description of Artificial Sequence: Synthetic oligonucleotide
  Antisense strand to SEQ ID NO: 758746
ucucuuaagcgcuuggaag

SEQ ID NO: 758748 - RNA, 19 nt, Artificial Sequence
  Description of Artificial Sequence: Synthetic oligonucleotide
  Sense strand starting at position 1636 of SEQ ID NO: 586995
gggccuauucuugggucaa

SEQ ID NO: 758749 - RNA, 19 nt, Artificial Sequence
  Description of Artificial Sequence: Synthetic oligonucleotide
  Antisense strand to SEQ ID NO: 758748
uugacccaagaauaggccc

SEQ ID NO: 758750 - RNA, 19 nt, Artificial Sequence
  Description of Artificial Sequence: Synthetic oligonucleotide
  Sense strand starting at position 1637 of SEQ ID NO: 586995
ggccuauucuugggucaag

SEQ ID NO: 758751 - RNA, 19 nt, Artificial Sequence
  Description of Artificial Sequence: Synthetic oligonucleotide
  Antisense strand to SEQ ID NO: 758750
cuugacccaagaauaggcc

SEQ ID NO: 758752 - RNA, 19 nt, Artificial Sequence
  Description of Artificial Sequence: Synthetic oligonucleotide
  Sense strand starting at position 1677 of SEQ ID NO: 586995
aagagugacuucuggccga

SEQ ID NO: 758753 - RNA, 19 nt, Artificial Sequence
  Description of Artificial Sequence: Synthetic oligonucleotide
  Antisense strand to SEQ ID NO: 758752
ucggccagaagucacucuu

SEQ ID NO: 758754 - RNA, 19 nt, Artificial Sequence
  Description of Artificial Sequence: Synthetic oligonucleotide
  Sense strand starting at position 2071 of SEQ ID NO: 586995
ggaccagacugcuaguaac

SEQ ID NO: 758755 - RNA, 19 nt, Artificial Sequence
  Description of Artificial Sequence: Synthetic oligonucleotide
  Antisense strand to SEQ ID NO: 758754
guuacuagcagucuggucc

SEQ ID NO: 758756 - RNA, 19 nt, Artificial Sequence
  Description of Artificial Sequence: Synthetic oligonucleotide
  Sense strand starting at position 2105 of SEQ ID NO: 586995
ucucaauugccauaggcua

SEQ ID NO: 758757 - RNA, 19 nt, Artificial Sequence
  Description of Artificial Sequence: Synthetic oligonucleotide
  Antisense strand to SEQ ID NO: 758756
uagccuauggcaauugaga

SEQ ID NO: 758758 - RNA, 19 nt, Artificial Sequence
  Description of Artificial Sequence: Synthetic oligonucleotide
  Sense strand starting at position 2231 of SEQ ID NO: 586995
cgagcuuccgcgcuacauu

SEQ ID NO: 758759 - RNA, 19 nt, Artificial Sequence
  Description of Artificial Sequence: Synthetic oligonucleotide
  Antisense strand to SEQ ID NO: 758758
aauguagcgcggaagcucg

SEQ ID NO: 758760 - RNA, 19 nt, Artificial Sequence
  Description of Artificial Sequence: Synthetic oligonucleotide
  Sense strand starting at position 2240 of SEQ ID NO: 586995
gcgcuacauuggcuuaauu

SEQ ID NO: 758761 - RNA, 19 nt, Artificial Sequence
  Description of Artificial Sequence: Synthetic oligonucleotide
  Antisense strand to SEQ ID NO: 758760
aauuaagccaauguagcgc

SEQ ID NO: 758762 - RNA, 19 nt, Artificial Sequence
  Description of Artificial Sequence: Synthetic oligonucleotide
  Sense strand starting at position 2283 of SEQ ID NO: 586995
ccggcuccgagccauuauu

SEQ ID NO: 758763 - RNA, 19 nt, Artificial Sequence
  Description of Artificial Sequence: Synthetic oligonucleotide
  Antisense strand to SEQ ID NO: 758762
aauaauggcucggagccgg

SEQ ID NO: 758764 - RNA, 19 nt, Artificial Sequence
  Description of Artificial Sequence: Synthetic oligonucleotide
  Sense strand starting at position 2345 of SEQ ID NO: 586995
cucccauugucucggcaga

SEQ ID NO: 758765 - RNA, 19 nt, Artificial Sequence
  Description of Artificial Sequence: Synthetic oligonucleotide
  Antisense strand to SEQ ID NO: 758764
ucugccgagacaaugggag

SEQ ID NO: 758766 - RNA, 19 nt, Artificial Sequence
  Description of Artificial Sequence: Synthetic oligonucleotide
  Sense strand starting at position 2346 of SEQ ID NO: 586995
ucccauugucucggcagau

SEQ ID NO: 758767 - RNA, 19 nt, Artificial Sequence
  Description of Artificial Sequence: Synthetic oligonucleotide
  Antisense strand to SEQ ID NO: 758766
aucugccgagacaauggga

SEQ ID NO: 758768 - RNA, 19 nt, Artificial Sequence
  Description of Artificial Sequence: Synthetic oligonucleotide
  Sense strand starting at position 2347 of SEQ ID NO: 586995
cccauugucucggcagaug

SEQ ID NO: 758769 - RNA, 19 nt, Artificial Sequence
  Description of Artificial Sequence: Synthetic oligonucleotide
  Antisense strand to SEQ ID NO: 758768
caucugccgagacaauggg

SEQ ID NO: 758770 - RNA, 19 nt, Artificial Sequence
  Description of Artificial Sequence: Synthetic oligonucleotide
  Sense strand starting at position 2375 of SEQ ID NO: 586995
ccagcuaucgugcucggua

SEQ ID NO: 758771 - RNA, 19 nt, Artificial Sequence
  Description of Artificial Sequence: Synthetic oligonucleotide
  Antisense strand to SEQ ID NO: 758770
uaccgagcacgauagcugg

SEQ ID NO: 758772 - RNA, 19 nt, Artificial Sequence
  Description of Artificial Sequence: Synthetic oligonucleotide
  Sense strand starting at position 2376 of SEQ ID NO: 586995
cagcuaucgugcucgguau

SEQ ID NO: 758773 - RNA, 19 nt, Artificial Sequence
  Description of Artificial Sequence: Synthetic oligonucleotide
  Antisense strand to SEQ ID NO: 758772
auaccgagcacgauagcug

SEQ ID NO: 758774 - RNA, 19 nt, Artificial Sequence
  Description of Artificial Sequence: Synthetic oligonucleotide
  Sense strand starting at position 2377 of SEQ ID NO: 586995
agcuaucgugcucgguauu

SEQ ID NO: 758775 - RNA, 19 nt, Artificial Sequence
  Description of Artificial Sequence: Synthetic oligonucleotide
  Antisense strand to SEQ ID NO: 758774
aauaccgagcacgauagcu

SEQ ID NO: 758776 - RNA, 19 nt, Artificial Sequence
  Description of Artificial Sequence: Synthetic oligonucleotide
  Sense strand starting at position 2776 of SEQ ID NO: 586995
cagagugaccguuauacua

SEQ ID NO: 758777 - RNA, 19 nt, Artificial Sequence
  Description of Artificial Sequence: Synthetic oligonucleotide
  Antisense strand to SEQ ID NO: 758776
uaguauaacggucacucug

SEQ ID NO: 758778 - RNA, 19 nt, Artificial Sequence
  Description of Artificial Sequence: Synthetic oligonucleotide
  Sense strand starting at position 2778 of SEQ ID NO: 586995
gagugaccguuauacuaau

SEQ ID NO: 758779 - RNA, 19 nt, Artificial Sequence
  Description of Artificial Sequence: Synthetic oligonucleotide
  Antisense strand to SEQ ID NO: 758778
auuaguauaacggucacuc

SEQ ID NO: 758780 - RNA, 19 nt, Artificial Sequence
  Description of Artificial Sequence: Synthetic oligonucleotide
  Sense strand starting at position 2818 of SEQ ID NO: 586995
cuguucuccuccuguaacu

SEQ ID NO: 758781 - RNA, 19 nt, Artificial Sequence
  Description of Artificial Sequence: Synthetic oligonucleotide
  Antisense strand to SEQ ID NO: 758780
aguuacaggaggagaacag

SEQ ID NO: 758782 - RNA, 19 nt, Artificial Sequence
  Description of Artificial Sequence: Synthetic oligonucleotide
  Sense strand starting at position 2835 of SEQ ID NO: 586995
cuuccuuaccgggaucaca

SEQ ID NO: 758783 - RNA, 19 nt, Artificial Sequence
  Description of Artificial Sequence: Synthetic oligonucleotide
  Antisense strand to SEQ ID NO: 758782
ugugaucccgguaaggaag

SEQ ID NO: 758784 - RNA, 19 nt, Artificial Sequence
  Description of Artificial Sequence: Synthetic oligonucleotide
  Sense strand starting at position 3046 of SEQ ID NO: 586995
ccuagaagcuguucuccaa

SEQ ID NO: 758785 - RNA, 19 nt, Artificial Sequence
  Description of Artificial Sequence: Synthetic oligonucleotide
  Antisense strand to SEQ ID NO: 758784
uuggagaacagcuucuagg

SEQ ID NO: 758786 - RNA, 19 nt, Artificial Sequence
  Description of Artificial Sequence: Synthetic oligonucleotide
  Sense strand starting at position 3140 of SEQ ID NO: 586995
gcagcuguuaaauagauga

SEQ ID NO: 758787 - RNA, 19 nt, Artificial Sequence
  Description of Artificial Sequence: Synthetic oligonucleotide
  Antisense strand to SEQ ID NO: 758786
ucaucuauuuaacagcugc

SEQ ID NO: 758788 - RNA, 19 nt, Artificial Sequence
  Description of Artificial Sequence: Synthetic oligonucleotide
  Sense strand starting at position 3153 of SEQ ID NO: 586995
agaugaucccguggcuaau

SEQ ID NO: 758789 - RNA, 19 nt, Artificial Sequence
  Description of Artificial Sequence: Synthetic oligonucleotide
  Antisense strand to SEQ ID NO: 758788
auuagccacgggaucaucu

SEQ ID NO: 758790 - RNA, 19 nt, Artificial Sequence
  Description of Artificial Sequence: Synthetic oligonucleotide
  Sense strand starting at position 3165 of SEQ ID NO: 586995
ggcuaaugggagugaacuu

SEQ ID NO: 758791 - RNA, 19 nt, Artificial Sequence
  Description of Artificial Sequence: Synthetic oligonucleotide
  Antisense strand to SEQ ID NO: 758790
aaguucacucccauuagcc

SEQ ID NO: 758792 - RNA, 19 nt, Artificial Sequence
  Description of Artificial Sequence: Synthetic oligonucleotide
  Sense strand starting at position 3174 of SEQ ID NO: 586995
gagugaacuugggaugggu

SEQ ID NO: 758793 - RNA, 19 nt, Artificial Sequence
  Description of Artificial Sequence: Synthetic oligonucleotide
  Antisense strand to SEQ ID NO: 758792
acccaucccaaguucacuc

SEQ ID NO: 758794 - RNA, 19 nt, Artificial Sequence
  Description of Artificial Sequence: Synthetic oligonucleotide
  Sense strand starting at position 3599 of SEQ ID NO: 586995
cuuacuccaucugugaaga

SEQ ID NO: 758795 - RNA, 19 nt, Artificial Sequence
  Description of Artificial Sequence: Synthetic oligonucleotide
  Antisense strand to SEQ ID NO: 758794
ucuucacagauggaguaag

SEQ ID NO: 758796 - RNA, 19 nt, Artificial Sequence
  Description of Artificial Sequence: Synthetic oligonucleotide
  Sense strand starting at position 3697 of SEQ ID NO: 586995
cucugagaguuacucaguu

SEQ ID NO: 758797 - RNA, 19 nt, Artificial Sequence
  Description of Artificial Sequence: Synthetic oligonucleotide
  Antisense strand to SEQ ID NO: 758796
aacugaguaacucucagag

SEQ ID NO: 758798 - RNA, 19 nt, Artificial Sequence
  Description of Artificial Sequence: Synthetic oligonucleotide
  Sense strand starting at position 3701 of SEQ ID NO: 586995
gagaguuacucaguuucug

SEQ ID NO: 758799 - RNA, 19 nt, Artificial Sequence
  Description of Artificial Sequence: Synthetic oligonucleotide
  Antisense strand to SEQ ID NO: 758798
cagaaacugaguaacucuc

SEQ ID NO: 758800 - RNA, 19 nt, Artificial Sequence
  Description of Artificial Sequence: Synthetic oligonucleotide
  Sense strand starting at position 3805 of SEQ ID NO: 586995
ccaccuguucccugcauuu

SEQ ID NO: 758801 - RNA, 19 nt, Artificial Sequence
  Description of Artificial Sequence: Synthetic oligonucleotide
  Antisense strand to SEQ ID NO: 758800
aaaugcagggaacaggugg

SEQ ID NO: 758802 - RNA, 19 nt, Artificial Sequence
  Description of Artificial Sequence: Synthetic oligonucleotide
  Sense strand starting at position 3816 of SEQ ID NO: 586995
cugcauuugcugcagaguu

SEQ ID NO: 758803 - RNA, 19 nt, Artificial Sequence
  Description of Artificial Sequence: Synthetic oligonucleotide
  Antisense strand to SEQ ID NO: 758802
aacucugcagcaaaugcag

SEQ ID NO: 758804 - RNA, 19 nt, Artificial Sequence
  Description of Artificial Sequence: Synthetic oligonucleotide
  Sense strand starting at position 3936 of SEQ ID NO: 586995
uguucucucggcugcgaga

SEQ ID NO: 758805 - RNA, 19 nt, Artificial Sequence
  Description of Artificial Sequence: Synthetic oligonucleotide
  Antisense strand to SEQ ID NO: 758804
ucucgcagccgagagaaca

SEQ ID NO: 758806 - RNA, 19 nt, Artificial Sequence
  Description of Artificial Sequence: Synthetic oligonucleotide
  Sense strand starting at position 164 of SEQ ID NO: 586996
ugccuacugcaaggaaauu

SEQ ID NO: 758807 - RNA, 19 nt, Artificial Sequence
  Description of Artificial Sequence: Synthetic oligonucleotide
  Antisense strand to SEQ ID NO: 758806
aauuuccuugcaguaggca

SEQ ID NO: 758808 - RNA, 19 nt, Artificial Sequence
  Description of Artificial Sequence: Synthetic oligonucleotide
  Sense strand starting at position 227 of SEQ ID NO: 586996
ugugguagaucauacuugu

SEQ ID NO: 758809 - RNA, 19 nt, Artificial Sequence
  Description of Artificial Sequence: Synthetic oligonucleotide
  Antisense strand to SEQ ID NO: 758808
acaaguaugaucuaccaca

SEQ ID NO: 758810 - RNA, 19 nt, Artificial Sequence
  Description of Artificial Sequence: Synthetic oligonucleotide
  Sense strand starting at position 230 of SEQ ID NO: 586996
gguagaucauacuuguaau

SEQ ID NO: 758811 - RNA, 19 nt, Artificial Sequence
  Description of Artificial Sequence: Synthetic oligonucleotide
  Antisense strand to SEQ ID NO: 758810
auuacaaguaugaucuacc

SEQ ID NO: 758812 - RNA, 19 nt, Artificial Sequence
  Description of Artificial Sequence: Synthetic oligonucleotide
  Sense strand starting at position 442 of SEQ ID NO: 586996
cagccuuggcaacaugaga

SEQ ID NO: 758813 - RNA, 19 nt, Artificial Sequence
  Description of Artificial Sequence: Synthetic oligonucleotide
  Antisense strand to SEQ ID NO: 758812
ucucauguugccaaggcug

SEQ ID NO: 758814 - RNA, 19 nt, Artificial Sequence
  Description of Artificial Sequence: Synthetic oligonucleotide
  Sense strand starting at position 983 of SEQ ID NO: 586996
gggcaguggguuuggaauu

SEQ ID NO: 758815 - RNA, 19 nt, Artificial Sequence
  Description of Artificial Sequence: Synthetic oligonucleotide
  Antisense strand to SEQ ID NO: 758814
aauuccaaacccacugccc

SEQ ID NO: 758816 - RNA, 19 nt, Artificial Sequence
  Description of Artificial Sequence: Synthetic oligonucleotide
  Sense strand starting at position 1078 of SEQ ID NO: 586996
aucgcuuggguccaggaau

SEQ ID NO: 758817 - RNA, 19 nt, Artificial Sequence
  Description of Artificial Sequence: Synthetic oligonucleotide
  Antisense strand to SEQ ID NO: 758816
auuccuggacccaagcgau

SEQ ID NO: 758818 - RNA, 19 nt, Artificial Sequence
  Description of Artificial Sequence: Synthetic oligonucleotide
  Sense strand starting at position 1213 of SEQ ID NO: 586996
ucuggaggcuucggaagua

SEQ ID NO: 758819 - RNA, 19 nt, Artificial Sequence
  Description of Artificial Sequence: Synthetic oligonucleotide
  Antisense strand to SEQ ID NO: 758818
uacuuccgaagccuccaga

SEQ ID NO: 758820 - RNA, 19 nt, Artificial Sequence
  Description of Artificial Sequence: Synthetic oligonucleotide
  Sense strand starting at position 1218 of SEQ ID NO: 586996
aggcuucggaaguauaaac

SEQ ID NO: 758821 - RNA, 19 nt, Artificial Sequence
  Description of Artificial Sequence: Synthetic oligonucleotide
  Antisense strand to SEQ ID NO: 758820
guuuauacuuccgaagccu

SEQ ID NO: 758822 - RNA, 19 nt, Artificial Sequence
  Description of Artificial Sequence: Synthetic oligonucleotide
  Sense strand starting at position 1325 of SEQ ID NO: 586996
ggcuuucguuuccagagga

SEQ ID NO: 758823 - RNA, 19 nt, Artificial Sequence
  Description of Artificial Sequence: Synthetic oligonucleotide
  Antisense strand to SEQ ID NO: 758822
uccucuggaaacgaaagcc

SEQ ID NO: 758824 - RNA, 19 nt, Artificial Sequence
  Description of Artificial Sequence: Synthetic oligonucleotide
  Sense strand starting at position 1371 of SEQ ID NO: 586996
acaggaggcucuuaaggau

SEQ ID NO: 758825 - RNA, 19 nt, Artificial Sequence
  Description of Artificial Sequence: Synthetic oligonucleotide
  Antisense strand to SEQ ID NO: 758824
auccuuaagagccuccugu

SEQ ID NO: 758826 - RNA, 19 nt, Artificial Sequence
  Description of Artificial Sequence: Synthetic oligonucleotide
  Sense strand starting at position 1523 of SEQ ID NO: 586996
cuuccaagcgcuuaagaga

SEQ ID NO: 758827 - RNA, 19 nt, Artificial Sequence
  Description of Artificial Sequence: Synthetic oligonucleotide
  Antisense strand to SEQ ID NO: 758826
ucucuuaagcgcuuggaag

SEQ ID NO: 758828 - RNA, 19 nt, Artificial Sequence
  Description of Artificial Sequence: Synthetic oligonucleotide
  Sense strand starting at position 1655 of SEQ ID NO: 586996
gggccuauucuugggucaa

SEQ ID NO: 758829 - RNA, 19 nt, Artificial Sequence
  Description of Artificial Sequence: Synthetic oligonucleotide
  Antisense strand to SEQ ID NO: 758828
uugacccaagaauaggccc

SEQ ID NO: 758830 - RNA, 19 nt, Artificial Sequence
  Description of Artificial Sequence: Synthetic oligonucleotide
  Sense strand starting at position 1656 of SEQ ID NO: 586996
ggccuauucuugggucaag

SEQ ID NO: 758831 - RNA, 19 nt, Artificial Sequence
  Description of Artificial Sequence: Synthetic oligonucleotide
  Antisense strand to SEQ ID NO: 758830
cuugacccaagaauaggcc

SEQ ID NO: 758832 - RNA, 19 nt, Artificial Sequence
  Description of Artificial Sequence: Synthetic oligonucleotide
  Sense strand starting at position 1696 of SEQ ID NO: 586996
aagagugacuucuggccga

SEQ ID NO: 758833 - RNA, 19 nt, Artificial Sequence
  Description of Artificial Sequence: Synthetic oligonucleotide
  Antisense strand to SEQ ID NO: 758832
ucggccagaagucacucuu

SEQ ID NO: 758834 - RNA, 19 nt, Artificial Sequence
  Description of Artificial Sequence: Synthetic oligonucleotide
  Sense strand starting at position 2090 of SEQ ID NO: 586996
ggaccagacugcuaguaac

SEQ ID NO: 758835 - RNA, 19 nt, Artificial Sequence
  Description of Artificial Sequence: Synthetic oligonucleotide
  Antisense strand to SEQ ID NO: 758834
guuacuagcagucuggucc

SEQ ID NO: 758836 - RNA, 19 nt, Artificial Sequence
  Description of Artificial Sequence: Synthetic oligonucleotide
  Sense strand starting at position 2124 of SEQ ID NO: 586996
ucucaauugccauaggcua

SEQ ID NO: 758837 - RNA, 19 nt, Artificial Sequence
  Description of Artificial Sequence: Synthetic oligonucleotide
  Antisense strand to SEQ ID NO: 758836
uagccuauggcaauugaga

SEQ ID NO: 758838 - RNA, 19 nt, Artificial Sequence
  Description of Artificial Sequence: Synthetic oligonucleotide
  Sense strand starting at position 2250 of SEQ ID NO: 586996
cgagcuuccgcgcuacauu

SEQ ID NO: 758839 - RNA, 19 nt, Artificial Sequence
  Description of Artificial Sequence: Synthetic oligonucleotide
  Antisense strand to SEQ ID NO: 758838
aauguagcgcggaagcucg

SEQ ID NO: 758840 - RNA, 19 nt, Artificial Sequence
  Description of Artificial Sequence: Synthetic oligonucleotide
  Sense strand starting at position 2259 of SEQ ID NO: 586996
gcgcuacauuggcuuaauu

SEQ ID NO: 758841 - RNA, 19 nt, Artificial Sequence
  Description of Artificial Sequence: Synthetic oligonucleotide
  Antisense strand to SEQ ID NO: 758840
aauuaagccaauguagcgc

SEQ ID NO: 758842 - RNA, 19 nt, Artificial Sequence
  Description of Artificial Sequence: Synthetic oligonucleotide
  Sense strand starting at position 2302 of SEQ ID NO: 586996
ccggcuccgagccauuauu

SEQ ID NO: 758843 - RNA, 19 nt, Artificial Sequence
  Description of Artificial Sequence: Synthetic oligonucleotide
  Antisense strand to SEQ ID NO: 758842
aauaauggcucggagccgg

SEQ ID NO: 758844 - RNA, 19 nt, Artificial Sequence
  Description of Artificial Sequence: Synthetic oligonucleotide
  Sense strand starting at position 2364 of SEQ ID NO: 586996
cucccauugucucggcaga

SEQ ID NO: 758845 - RNA, 19 nt, Artificial Sequence
  Description of Artificial Sequence: Synthetic oligonucleotide
  Antisense strand to SEQ ID NO: 758844
ucugccgagacaaugggag

SEQ ID NO: 758846 - RNA, 19 nt, Artificial Sequence
  Description of Artificial Sequence: Synthetic oligonucleotide
  Sense strand starting at position 2365 of SEQ ID NO: 586996
ucccauugucucggcagau

SEQ ID NO: 758847 - RNA, 19 nt, Artificial Sequence
  Description of Artificial Sequence: Synthetic oligonucleotide
  Antisense strand to SEQ ID NO: 758846
aucugccgagacaauggga

SEQ ID NO: 758848 - RNA, 19 nt, Artificial Sequence
  Description of Artificial Sequence: Synthetic oligonucleotide
  Sense strand starting at position 2366 of SEQ ID NO: 586996
cccauugucucggcagaug

SEQ ID NO: 758849 - RNA, 19 nt, Artificial Sequence
  Description of Artificial Sequence: Synthetic oligonucleotide
  Antisense strand to SEQ ID NO: 758848
caucugccgagacaauggg

SEQ ID NO: 758850 - RNA, 19 nt, Artificial Sequence
  Description of Artificial Sequence: Synthetic oligonucleotide
  Sense strand starting at position 2394 of SEQ ID NO: 586996
ccagcuaucgugcucggua

SEQ ID NO: 758851 - RNA, 19 nt, Artificial Sequence
  Description of Artificial Sequence: Synthetic oligonucleotide
  Antisense strand to SEQ ID NO: 758850
uaccgagcacgauagcugg

SEQ ID NO: 758852 - RNA, 19 nt, Artificial Sequence
  Description of Artificial Sequence: Synthetic oligonucleotide
  Sense strand starting at position 2395 of SEQ ID NO: 586996
cagcuaucgugcucgguau

SEQ ID NO: 758853 - RNA, 19 nt, Artificial Sequence
  Description of Artificial Sequence: Synthetic oligonucleotide
  Antisense strand to SEQ ID NO: 758852
auaccgagcacgauagcug

SEQ ID NO: 758854 - RNA, 19 nt, Artificial Sequence
  Description of Artificial Sequence: Synthetic oligonucleotide
  Sense strand starting at position 2396 of SEQ ID NO: 586996
agcuaucgugcucgguauu

SEQ ID NO: 758855 - RNA, 19 nt, Artificial Sequence
  Description of Artificial Sequence: Synthetic oligonucleotide
  Antisense strand to SEQ ID NO: 758854
aauaccgagcacgauagcu

SEQ ID NO: 758856 - RNA, 19 nt, Artificial Sequence
  Description of Artificial Sequence: Synthetic oligonucleotide
  Sense strand starting at position 2795 of SEQ ID NO: 586996
cagagugaccguuauacua

SEQ ID NO: 758857 - RNA, 19 nt, Artificial Sequence
  Description of Artificial Sequence: Synthetic oligonucleotide
  Antisense strand to SEQ ID NO: 758856
uaguauaacggucacucug

SEQ ID NO: 758858 - RNA, 19 nt, Artificial Sequence
  Description of Artificial Sequence: Synthetic oligonucleotide
  Sense strand starting at position 2797 of SEQ ID NO: 586996
gagugaccguuauacuaau

SEQ ID NO: 758859 - RNA, 19 nt, Artificial Sequence
  Description of Artificial Sequence: Synthetic oligonucleotide
  Antisense strand to SEQ ID NO: 758858
auuaguauaacggucacuc

SEQ ID NO: 758860 - RNA, 19 nt, Artificial Sequence
  Description of Artificial Sequence: Synthetic oligonucleotide
  Sense strand starting at position 2837 of SEQ ID NO: 586996
cuguucuccuccuguaacu

SEQ ID NO: 758861 - RNA, 19 nt, Artificial Sequence
  Description of Artificial Sequence: Synthetic oligonucleotide
  Antisense strand to SEQ ID NO: 758860
aguuacaggaggagaacag

SEQ ID NO: 758862 - RNA, 19 nt, Artificial Sequence
  Description of Artificial Sequence: Synthetic oligonucleotide
  Sense strand starting at position 2854 of SEQ ID NO: 586996
cuuccuuaccgggaucaca

SEQ ID NO: 758863 - RNA, 19 nt, Artificial Sequence
  Description of Artificial Sequence: Synthetic oligonucleotide
  Antisense strand to SEQ ID NO: 758862
ugugaucccgguaaggaag

SEQ ID NO: 758864 - RNA, 19 nt, Artificial Sequence
  Description of Artificial Sequence: Synthetic oligonucleotide
  Sense strand starting at position 3065 of SEQ ID NO: 586996
ccuagaagcuguucuccaa

SEQ ID NO: 758865 - RNA, 19 nt, Artificial Sequence
  Description of Artificial Sequence: Synthetic oligonucleotide
  Antisense strand to SEQ ID NO: 758864
uuggagaacagcuucuagg

SEQ ID NO: 758866 - RNA, 19 nt, Artificial Sequence
  Description of Artificial Sequence: Synthetic oligonucleotide
  Sense strand starting at position 3159 of SEQ ID NO: 586996
gcagcuguuaaauagauga

SEQ ID NO: 758867 - RNA, 19 nt, Artificial Sequence
  Description of Artificial Sequence: Synthetic oligonucleotide
  Antisense strand to SEQ ID NO: 758866
ucaucuauuuaacagcugc

SEQ ID NO: 758868 - RNA, 19 nt, Artificial Sequence
  Description of Artificial Sequence: Synthetic oligonucleotide
  Sense strand starting at position 3172 of SEQ ID NO: 586996
agaugaucccguggcuaau

SEQ ID NO: 758869 - RNA, 19 nt, Artificial Sequence
  Description of Artificial Sequence: Synthetic oligonucleotide
  Antisense strand to SEQ ID NO: 758868
auuagccacgggaucaucu

SEQ ID NO: 758870 - RNA, 19 nt, Artificial Sequence
  Description of Artificial Sequence: Synthetic oligonucleotide
  Sense strand starting at position 3184 of SEQ ID NO: 586996
ggcuaaugggagugaacuu

SEQ ID NO: 758871 - RNA, 19 nt, Artificial Sequence
  Description of Artificial Sequence: Synthetic oligonucleotide
  Antisense strand to SEQ ID NO: 758870
aaguucacucccauuagcc

SEQ ID NO: 758872 - RNA, 19 nt, Artificial Sequence
  Description of Artificial Sequence: Synthetic oligonucleotide
  Sense strand starting at position 3193 of SEQ ID NO: 586996
gagugaacuugggaugggu

SEQ ID NO: 758873 - RNA, 19 nt, Artificial Sequence
  Description of Artificial Sequence: Synthetic oligonucleotide
  Antisense strand to SEQ ID NO: 758872
acccaucccaaguucacuc

SEQ ID NO: 758874 - RNA, 19 nt, Artificial Sequence
  Description of Artificial Sequence: Synthetic oligonucleotide
  Sense strand starting at position 3618 of SEQ ID NO: 586996
cuuacuccaucugugaaga

SEQ ID NO: 758875 - RNA, 19 nt, Artificial Sequence
  Description of Artificial Sequence: Synthetic oligonucleotide
  Antisense strand to SEQ ID NO: 758874
ucuucacagauggaguaag

SEQ ID NO: 758876 - RNA, 19 nt, Artificial Sequence
  Description of Artificial Sequence: Synthetic oligonucleotide
  Sense strand starting at position 3716 of SEQ ID NO: 586996
cucugagaguuacucaguu

SEQ ID NO: 758877 - RNA, 19 nt, Artificial Sequence
  Description of Artificial Sequence: Synthetic oligonucleotide
  Antisense strand to SEQ ID NO: 758876
aacugaguaacucucagag

SEQ ID NO: 758878 - RNA, 19 nt, Artificial Sequence
  Description of Artificial Sequence: Synthetic oligonucleotide
  Sense strand starting at position 3720 of SEQ ID NO: 586996
gagaguuacucaguuucug

SEQ ID NO: 758879 - RNA, 19 nt, Artificial Sequence
  Description of Artificial Sequence: Synthetic oligonucleotide
  Antisense strand to SEQ ID NO: 758878
cagaaacugaguaacucuc

SEQ ID NO: 758880 - RNA, 19 nt, Artificial Sequence
  Description of Artificial Sequence: Synthetic oligonucleotide
  Sense strand starting at position 3824 of SEQ ID NO: 586996
ccaccuguucccugcauuu

SEQ ID NO: 758881 - RNA, 19 nt, Artificial Sequence
  Description of Artificial Sequence: Synthetic oligonucleotide
  Antisense strand to SEQ ID NO: 758880
aaaugcagggaacaggugg

SEQ ID NO: 758882 - RNA, 19 nt, Artificial Sequence
  Description of Artificial Sequence: Synthetic oligonucleotide
  Sense strand starting at position 3835 of SEQ ID NO: 586996
cugcauuugcugcagaguu

SEQ ID NO: 758883 - RNA, 19 nt, Artificial Sequence
  Description of Artificial Sequence: Synthetic oligonucleotide
  Antisense strand to SEQ ID NO: 758882
aacucugcagcaaaugcag

SEQ ID NO: 758884 - RNA, 19 nt, Artificial Sequence
  Description of Artificial Sequence: Synthetic oligonucleotide
  Sense strand starting at position 3955 of SEQ ID NO: 586996
uguucucucggcugcgaga

SEQ ID NO: 758885 - RNA, 19 nt, Artificial Sequence
  Description of Artificial Sequence: Synthetic oligonucleotide
  Antisense strand to SEQ ID NO: 758884
ucucgcagccgagagaaca

SEQ ID NO: 758886 - RNA, 19 nt, Artificial Sequence
  Description of Artificial Sequence: Synthetic oligonucleotide
  Sense strand starting at position 52 of SEQ ID NO: 586997
cagaaaguuggcuagaguu

SEQ ID NO: 758887 - RNA, 19 nt, Artificial Sequence
  Description of Artificial Sequence: Synthetic oligonucleotide
  Antisense strand to SEQ ID NO: 758886
aacucuagccaacuuucug

SEQ ID NO: 758888 - RNA, 19 nt, Artificial Sequence
  Description of Artificial Sequence: Synthetic oligonucleotide
  Sense strand starting at position 54 of SEQ ID NO: 586997
gaaaguuggcuagaguuua

SEQ ID NO: 758889 - RNA, 19 nt, Artificial Sequence
  Description of Artificial Sequence: Synthetic oligonucleotide
  Antisense strand to SEQ ID NO: 758888
uaaacucuagccaacuuuc

SEQ ID NO: 758890 - RNA, 19 nt, Artificial Sequence
  Description of Artificial Sequence: Synthetic oligonucleotide
  Sense strand starting at position 59 of SEQ ID NO: 586997
uuggcuagaguuuaugagu

SEQ ID NO: 758891 - RNA, 19 nt, Artificial Sequence
  Description of Artificial Sequence: Synthetic oligonucleotide
  Antisense strand to SEQ ID NO: 758890
acucauaaacucuagccaa

SEQ ID NO: 758892 - RNA, 19 nt, Artificial Sequence
  Description of Artificial Sequence: Synthetic oligonucleotide
  Sense strand starting at position 64 of SEQ ID NO: 586997
uagaguuuaugaguaucac

SEQ ID NO: 758893 - RNA, 19 nt, Artificial Sequence
  Description of Artificial Sequence: Synthetic oligonucleotide
  Antisense strand to SEQ ID NO: 758892
gugauacucauaaacucua

SEQ ID NO: 758894 - RNA, 19 nt, Artificial Sequence
  Description of Artificial Sequence: Synthetic oligonucleotide
  Sense strand starting at position 65 of SEQ ID NO: 586997
agaguuuaugaguaucacu

SEQ ID NO: 758895 - RNA, 19 nt, Artificial Sequence
  Description of Artificial Sequence: Synthetic oligonucleotide
  Antisense strand to SEQ ID NO: 758894
agugauacucauaaacucu

SEQ ID NO: 758896 - RNA, 19 nt, Artificial Sequence
  Description of Artificial Sequence: Synthetic oligonucleotide
  Sense strand starting at position 309 of SEQ ID NO: 586997
guuuauaucugccuagaaa

SEQ ID NO: 758897 - RNA, 19 nt, Artificial Sequence
  Description of Artificial Sequence: Synthetic oligonucleotide
  Antisense strand to SEQ ID NO: 758896
uuucuaggcagauauaaac

SEQ ID NO: 758898 - RNA, 19 nt, Artificial Sequence
  Description of Artificial Sequence: Synthetic oligonucleotide
  Sense strand starting at position 393 of SEQ ID NO: 586997
guguuaccuccuuagggag

SEQ ID NO: 758899 - RNA, 19 nt, Artificial Sequence
  Description of Artificial Sequence: Synthetic oligonucleotide
  Antisense strand to SEQ ID NO: 758898
cucccuaaggagguaacac

SEQ ID NO: 758900 - RNA, 19 nt, Artificial Sequence
  Description of Artificial Sequence: Synthetic oligonucleotide
  Sense strand starting at position 408 of SEQ ID NO: 586997
ggaggucuucccugaccau

SEQ ID NO: 758901 - RNA, 19 nt, Artificial Sequence
  Description of Artificial Sequence: Synthetic oligonucleotide
  Antisense strand to SEQ ID NO: 758900
auggucagggaagaccucc

SEQ ID NO: 758902 - RNA, 19 nt, Artificial Sequence
  Description of Artificial Sequence: Synthetic oligonucleotide
  Sense strand starting at position 547 of SEQ ID NO: 586997
aguuaaagucuuugagggu

SEQ ID NO: 758903 - RNA, 19 nt, Artificial Sequence
  Description of Artificial Sequence: Synthetic oligonucleotide
  Antisense strand to SEQ ID NO: 758902
acccucaaagacuuuaacu

SEQ ID NO: 758904 - RNA, 19 nt, Artificial Sequence
  Description of Artificial Sequence: Synthetic oligonucleotide
  Sense strand starting at position 562 of SEQ ID NO: 586997
ggguaugggccuuaucuaa

SEQ ID NO: 758905 - RNA, 19 nt, Artificial Sequence
  Description of Artificial Sequence: Synthetic oligonucleotide
  Antisense strand to SEQ ID NO: 758904
uuagauaaggcccauaccc

SEQ ID NO: 758906 - RNA, 19 nt, Artificial Sequence
  Description of Artificial Sequence: Synthetic oligonucleotide
  Sense strand starting at position 638 of SEQ ID NO: 586997
aggcaaacuguccauugaa

SEQ ID NO: 758907 - RNA, 19 nt, Artificial Sequence
  Description of Artificial Sequence: Synthetic oligonucleotide
  Antisense strand to SEQ ID NO: 758906
uucaauggacaguuugccu

SEQ ID NO: 758908 - RNA, 19 nt, Artificial Sequence
  Description of Artificial Sequence: Synthetic oligonucleotide
  Sense strand starting at position 682 of SEQ ID NO: 586997
uccuucugugaacauaagu

SEQ ID NO: 758909 - RNA, 19 nt, Artificial Sequence
  Description of Artificial Sequence: Synthetic oligonucleotide
  Antisense strand to SEQ ID NO: 758908
acuuauguucacagaagga

SEQ ID NO: 758910 - RNA, 19 nt, Artificial Sequence
  Description of Artificial Sequence: Synthetic oligonucleotide
  Sense strand starting at position 701 of SEQ ID NO: 586997
aagguaauaucccucagag

SEQ ID NO: 758911 - RNA, 19 nt, Artificial Sequence
  Description of Artificial Sequence: Synthetic oligonucleotide
  Antisense strand to SEQ ID NO: 758910
cucugagggauauuaccuu

SEQ ID NO: 758912 - RNA, 19 nt, Artificial Sequence
  Description of Artificial Sequence: Synthetic oligonucleotide
  Sense strand starting at position 811 of SEQ ID NO: 586997
cagugacuucuacacgaca

SEQ ID NO: 758913 - RNA, 19 nt, Artificial Sequence
  Description of Artificial Sequence: Synthetic oligonucleotide
  Antisense strand to SEQ ID NO: 758912
ugucguguagaagucacug

SEQ ID NO: 758914 - RNA, 19 nt, Artificial Sequence
  Description of Artificial Sequence: Synthetic oligonucleotide
  Sense strand starting at position 957 of SEQ ID NO: 586997
augguauacagacgggaau

SEQ ID NO: 758915 - RNA, 19 nt, Artificial Sequence
  Description of Artificial Sequence: Synthetic oligonucleotide
  Antisense strand to SEQ ID NO: 758914
auucccgucuguauaccau

SEQ ID NO: 758916 - RNA, 19 nt, Artificial Sequence
  Description of Artificial Sequence: Synthetic oligonucleotide
  Sense strand starting at position 959 of SEQ ID NO: 586997
gguauacagacgggaauua

SEQ ID NO: 758917 - RNA, 19 nt, Artificial Sequence
  Description of Artificial Sequence: Synthetic oligonucleotide
  Antisense strand to SEQ ID NO: 758916
uaauucccgucuguauacc

SEQ ID NO: 758918 - RNA, 19 nt, Artificial Sequence
  Description of Artificial Sequence: Synthetic oligonucleotide
  Sense strand starting at position 1078 of SEQ ID NO: 586997
aaacuaguacugugucaag

SEQ ID NO: 758919 - RNA, 19 nt, Artificial Sequence
  Description of Artificial Sequence: Synthetic oligonucleotide
  Antisense strand to SEQ ID NO: 758918
cuugacacaguacuaguuu

SEQ ID NO: 758920 - RNA, 19 nt, Artificial Sequence
  Description of Artificial Sequence: Synthetic oligonucleotide
  Sense strand starting at position 1108 of SEQ ID NO: 586997
gugauuccaucugugaaau

SEQ ID NO: 758921 - RNA, 19 nt, Artificial Sequence
  Description of Artificial Sequence: Synthetic oligonucleotide
  Antisense strand to SEQ ID NO: 758920
auuucacagauggaaucac

SEQ ID NO: 758922 - RNA, 19 nt, Artificial Sequence
  Description of Artificial Sequence: Synthetic oligonucleotide
  Sense strand starting at position 1253 of SEQ ID NO: 586997
uggcgagauaucuacgagu

SEQ ID NO: 758923 - RNA, 19 nt, Artificial Sequence
  Description of Artificial Sequence: Synthetic oligonucleotide
  Antisense strand to SEQ ID NO: 758922
acucguagauaucucgcca

SEQ ID NO: 758924 - RNA, 19 nt, Artificial Sequence
  Description of Artificial Sequence: Synthetic oligonucleotide
  Sense strand starting at position 1259 of SEQ ID NO: 586997
gauaucuacgaguagguga

SEQ ID NO: 758925 - RNA, 19 nt, Artificial Sequence
  Description of Artificial Sequence: Synthetic oligonucleotide
  Antisense strand to SEQ ID NO: 758924
ucaccuacucguagauauc

SEQ ID NO: 758926 - RNA, 19 nt, Artificial Sequence
  Description of Artificial Sequence: Synthetic oligonucleotide
  Sense strand starting at position 1272 of SEQ ID NO: 586997
aggugaagcaguuaacuga

SEQ ID NO: 758927 - RNA, 19 nt, Artificial Sequence
  Description of Artificial Sequence: Synthetic oligonucleotide
  Antisense strand to SEQ ID NO: 758926
ucaguuaacugcuucaccu

SEQ ID NO: 758928 - RNA, 19 nt, Artificial Sequence
  Description of Artificial Sequence: Synthetic oligonucleotide
  Sense strand starting at position 2079 of SEQ ID NO: 586997
ucuacugaccaguaaacga

SEQ ID NO: 758929 - RNA, 19 nt, Artificial Sequence
  Description of Artificial Sequence: Synthetic oligonucleotide
  Antisense strand to SEQ ID NO: 758928
ucguuuacuggucaguaga

SEQ ID NO: 758930 - RNA, 19 nt, Artificial Sequence
  Description of Artificial Sequence: Synthetic oligonucleotide
  Sense strand starting at position 2144 of SEQ ID NO: 586997
ugggaaaucugggcaucca

SEQ ID NO: 758931 - RNA, 19 nt, Artificial Sequence
  Description of Artificial Sequence: Synthetic oligonucleotide
  Antisense strand to SEQ ID NO: 758930
uggaugcccagauuuccca

SEQ ID NO: 758932 - RNA, 19 nt, Artificial Sequence
  Description of Artificial Sequence: Synthetic oligonucleotide
  Sense strand starting at position 2308 of SEQ ID NO: 586997
augucauggaaauggguuu

SEQ ID NO: 758933 - RNA, 19 nt, Artificial Sequence
  Description of Artificial Sequence: Synthetic oligonucleotide
  Antisense strand to SEQ ID NO: 758932
aaacccauuuccaugacau

SEQ ID NO: 758934 - RNA, 19 nt, Artificial Sequence
  Description of Artificial Sequence: Synthetic oligonucleotide
  Sense strand starting at position 2348 of SEQ ID NO: 586997
ugcugagcccuccaggaau

SEQ ID NO: 758935 - RNA, 19 nt, Artificial Sequence
  Description of Artificial Sequence: Synthetic oligonucleotide
  Antisense strand to SEQ ID NO: 758934
auuccuggagggcucagca

SEQ ID NO: 758936 - RNA, 19 nt, Artificial Sequence
  Description of Artificial Sequence: Synthetic oligonucleotide
  Sense strand starting at position 2350 of SEQ ID NO: 586997
cugagcccuccaggaauaa

SEQ ID NO: 758937 - RNA, 19 nt, Artificial Sequence
  Description of Artificial Sequence: Synthetic oligonucleotide
  Antisense strand to SEQ ID NO: 758936
uuauuccuggagggcucag

SEQ ID NO: 758938 - RNA, 19 nt, Artificial Sequence
  Description of Artificial Sequence: Synthetic oligonucleotide
  Sense strand starting at position 2379 of SEQ ID NO: 586997
uaccauuucuaugucggua

SEQ ID NO: 758939 - RNA, 19 nt, Artificial Sequence
  Description of Artificial Sequence: Synthetic oligonucleotide
  Antisense strand to SEQ ID NO: 758938
uaccgacauagaaauggua

SEQ ID NO: 758940 - RNA, 19 nt, Artificial Sequence
  Description of Artificial Sequence: Synthetic oligonucleotide
  Sense strand starting at position 2383 of SEQ ID NO: 586997
auuucuaugucgguacuca

SEQ ID NO: 758941 - RNA, 19 nt, Artificial Sequence
  Description of Artificial Sequence: Synthetic oligonucleotide
  Antisense strand to SEQ ID NO: 758940
ugaguaccgacauagaaau

SEQ ID NO: 758942 - RNA, 19 nt, Artificial Sequence
  Description of Artificial Sequence: Synthetic oligonucleotide
  Sense strand starting at position 2635 of SEQ ID NO: 586997
cagugaacauucuuuggau

SEQ ID NO: 758943 - RNA, 19 nt, Artificial Sequence
  Description of Artificial Sequence: Synthetic oligonucleotide
  Antisense strand to SEQ ID NO: 758942
auccaaagaauguucacug

SEQ ID NO: 758944 - RNA, 19 nt, Artificial Sequence
  Description of Artificial Sequence: Synthetic oligonucleotide
  Sense strand starting at position 2636 of SEQ ID NO: 586997
agugaacauucuuuggauc

SEQ ID NO: 758945 - RNA, 19 nt, Artificial Sequence
  Description of Artificial Sequence: Synthetic oligonucleotide
  Antisense strand to SEQ ID NO: 758944
gauccaaagaauguucacu

SEQ ID NO: 758946 - RNA, 19 nt, Artificial Sequence
  Description of Artificial Sequence: Synthetic oligonucleotide
  Sense strand starting at position 2837 of SEQ ID NO: 586997
ugcauuugcaaguguagau

SEQ ID NO: 758947 - RNA, 19 nt, Artificial Sequence
  Description of Artificial Sequence: Synthetic oligonucleotide
  Antisense strand to SEQ ID NO: 758946
aucuacacuugcaaaugca

SEQ ID NO: 758948 - RNA, 19 nt, Artificial Sequence
  Description of Artificial Sequence: Synthetic oligonucleotide
  Sense strand starting at position 3061 of SEQ ID NO: 586997
uguacuuagguccaaguau

SEQ ID NO: 758949 - RNA, 19 nt, Artificial Sequence
  Description of Artificial Sequence: Synthetic oligonucleotide
  Antisense strand to SEQ ID NO: 758948
auacuuggaccuaaguaca

SEQ ID NO: 758950 - RNA, 19 nt, Artificial Sequence
  Description of Artificial Sequence: Synthetic oligonucleotide
  Sense strand starting at position 3122 of SEQ ID NO: 586997
cagaguuugcacgauguaa

SEQ ID NO: 758951 - RNA, 19 nt, Artificial Sequence
  Description of Artificial Sequence: Synthetic oligonucleotide
  Antisense strand to SEQ ID NO: 758950
uuacaucgugcaaacucug

SEQ ID NO: 758952 - RNA, 19 nt, Artificial Sequence
  Description of Artificial Sequence: Synthetic oligonucleotide
  Sense strand starting at position 3133 of SEQ ID NO: 586997
cgauguaaauccuuaauag

SEQ ID NO: 758953 - RNA, 19 nt, Artificial Sequence
  Description of Artificial Sequence: Synthetic oligonucleotide
  Antisense strand to SEQ ID NO: 758952
cuauuaaggauuuacaucg

SEQ ID NO: 758954 - RNA, 19 nt, Artificial Sequence
  Description of Artificial Sequence: Synthetic oligonucleotide
  Sense strand starting at position 3414 of SEQ ID NO: 586997
uuuagaagcuuuccucaug

SEQ ID NO: 758955 - RNA, 19 nt, Artificial Sequence
  Description of Artificial Sequence: Synthetic oligonucleotide
  Antisense strand to SEQ ID NO: 758954
caugaggaaagcuucuaaa

SEQ ID NO: 758956 - RNA, 19 nt, Artificial Sequence
  Description of Artificial Sequence: Synthetic oligonucleotide
  Sense strand starting at position 3507 of SEQ ID NO: 586997
gcuucugaauguuuauaaa

SEQ ID NO: 758957 - RNA, 19 nt, Artificial Sequence
  Description of Artificial Sequence: Synthetic oligonucleotide
  Antisense strand to SEQ ID NO: 758956
uuuauaaacauucagaagc

SEQ ID NO: 758958 - RNA, 19 nt, Artificial Sequence
  Description of Artificial Sequence: Synthetic oligonucleotide
  Sense strand starting at position 3578 of SEQ ID NO: 586997
uuguaagauugauccauau

SEQ ID NO: 758959 - RNA, 19 nt, Artificial Sequence
  Description of Artificial Sequence: Synthetic oligonucleotide
  Antisense strand to SEQ ID NO: 758958
auauggaucaaucuuacaa

SEQ ID NO: 758960 - RNA, 19 nt, Artificial Sequence
  Description of Artificial Sequence: Synthetic oligonucleotide
  Sense strand starting at position 3663 of SEQ ID NO: 586997
guuguuugacauuagauua

SEQ ID NO: 758961 - RNA, 19 nt, Artificial Sequence
  Description of Artificial Sequence: Synthetic oligonucleotide
  Antisense strand to SEQ ID NO: 758960
uaaucuaaugucaaacaac

SEQ ID NO: 758962 - RNA, 19 nt, Artificial Sequence
  Description of Artificial Sequence: Synthetic oligonucleotide
  Sense strand starting at position 3735 of SEQ ID NO: 586997
ucuuaugaugcacauaguu

SEQ ID NO: 758963 - RNA, 19 nt, Artificial Sequence
  Description of Artificial Sequence: Synthetic oligonucleotide
  Antisense strand to SEQ ID NO: 758962
aacuaugugcaucauaaga

SEQ ID NO: 758964 - RNA, 19 nt, Artificial Sequence
  Description of Artificial Sequence: Synthetic oligonucleotide
  Sense strand starting at position 3766 of SEQ ID NO: 586997
uuggaagaucccuggaagu

SEQ ID NO: 758965 - RNA, 19 nt, Artificial Sequence
  Description of Artificial Sequence: Synthetic oligonucleotide
  Antisense strand to SEQ ID NO: 758964
acuuccagggaucuuccaa

SEQ ID NO: 758966 - RNA, 19 nt, Artificial Sequence
  Description of Artificial Sequence: Synthetic oligonucleotide
  Sense strand starting at position 137 of SEQ ID NO: 586998
auggaagugucaccuacua

SEQ ID NO: 758967 - RNA, 19 nt, Artificial Sequence
  Description of Artificial Sequence: Synthetic oligonucleotide
  Antisense strand to SEQ ID NO: 758966
uaguaggugacacuuccau

SEQ ID NO: 758968 - RNA, 19 nt, Artificial Sequence
  Description of Artificial Sequence: Synthetic oligonucleotide
  Sense strand starting at position 180 of SEQ ID NO: 586998
cuauguuuagaagaucuuu

SEQ ID NO: 758969 - RNA, 19 nt, Artificial Sequence
  Description of Artificial Sequence: Synthetic oligonucleotide
  Antisense strand to SEQ ID NO: 758968
aaagaucuucuaaacauag

SEQ ID NO: 758970 - RNA, 19 nt, Artificial Sequence
  Description of Artificial Sequence: Synthetic oligonucleotide
  Sense strand starting at position 200 of SEQ ID NO: 586998
aacuuugaggguugcagua

SEQ ID NO: 758971 - RNA, 19 nt, Artificial Sequence
  Description of Artificial Sequence: Synthetic oligonucleotide
  Antisense strand to SEQ ID NO: 758970
uacugcaacccucaaaguu

SEQ ID NO: 758972 - RNA, 19 nt, Artificial Sequence
  Description of Artificial Sequence: Synthetic oligonucleotide
  Sense strand starting at position 343 of SEQ ID NO: 586998
ccuugaggucuaggagaga

SEQ ID NO: 758973 - RNA, 19 nt, Artificial Sequence
  Description of Artificial Sequence: Synthetic oligonucleotide
  Antisense strand to SEQ ID NO: 758972
ucucuccuagaccucaagg

SEQ ID NO: 758974 - RNA, 19 nt, Artificial Sequence
  Description of Artificial Sequence: Synthetic oligonucleotide
  Sense strand starting at position 383 of SEQ ID NO: 586998
gguagagcgauguauccua

SEQ ID NO: 758975 - RNA, 19 nt, Artificial Sequence
  Description of Artificial Sequence: Synthetic oligonucleotide
  Antisense strand to SEQ ID NO: 758974
uaggauacaucgcucuacc

SEQ ID NO: 758976 - RNA, 19 nt, Artificial Sequence
  Description of Artificial Sequence: Synthetic oligonucleotide
  Sense strand starting at position 458 of SEQ ID NO: 586998
ggcucagcgcugucuucua

SEQ ID NO: 758977 - RNA, 19 nt, Artificial Sequence
  Description of Artificial Sequence: Synthetic oligonucleotide
  Antisense strand to SEQ ID NO: 758976
uagaagacagcgcugagcc

SEQ ID NO: 758978 - RNA, 19 nt, Artificial Sequence
  Description of Artificial Sequence: Synthetic oligonucleotide
  Sense strand starting at position 535 of SEQ ID NO: 586998
aacggagucuggguggaaa

SEQ ID NO: 758979 - RNA, 19 nt, Artificial Sequence
  Description of Artificial Sequence: Synthetic oligonucleotide
  Antisense strand to SEQ ID NO: 758978
uuuccacccagacuccguu

SEQ ID NO: 758980 - RNA, 19 nt, Artificial Sequence
  Description of Artificial Sequence: Synthetic oligonucleotide
  Sense strand starting at position 567 of SEQ ID NO: 586998
uggagaguuacccagccau

SEQ ID NO: 758981 - RNA, 19 nt, Artificial Sequence
  Description of Artificial Sequence: Synthetic oligonucleotide
  Antisense strand to SEQ ID NO: 758980
auggcuggguaacucucca

SEQ ID NO: 758982 - RNA, 19 nt, Artificial Sequence
  Description of Artificial Sequence: Synthetic oligonucleotide
  Sense strand starting at position 581 of SEQ ID NO: 586998
gccauuugucugcauggua

SEQ ID NO: 758983 - RNA, 19 nt, Artificial Sequence
  Description of Artificial Sequence: Synthetic oligonucleotide
  Antisense strand to SEQ ID NO: 758982
uaccaugcagacaaauggc

SEQ ID NO: 758984 - RNA, 19 nt, Artificial Sequence
  Description of Artificial Sequence: Synthetic oligonucleotide
  Sense strand starting at position 727 of SEQ ID NO: 586998
guugguuuccaucagacau

SEQ ID NO: 758985 - RNA, 19 nt, Artificial Sequence
  Description of Artificial Sequence: Synthetic oligonucleotide
  Antisense strand to SEQ ID NO: 758984
augucugauggaaaccaac

SEQ ID NO: 758986 - RNA, 19 nt, Artificial Sequence
  Description of Artificial Sequence: Synthetic oligonucleotide
  Sense strand starting at position 984 of SEQ ID NO: 586998
aguugagaauaugaagaaa

SEQ ID NO: 758987 - RNA, 19 nt, Artificial Sequence
  Description of Artificial Sequence: Synthetic oligonucleotide
  Antisense strand to SEQ ID NO: 758986
uuucuucauauucucaacu

SEQ ID NO: 758988 - RNA, 19 nt, Artificial Sequence
  Description of Artificial Sequence: Synthetic oligonucleotide
  Sense strand starting at position 1232 of SEQ ID NO: 586998
guaagaaauuuggaagugu

SEQ ID NO: 758989 - RNA, 19 nt, Artificial Sequence
  Description of Artificial Sequence: Synthetic oligonucleotide
  Antisense strand to SEQ ID NO: 758988
acacuuccaaauuucuuac

SEQ ID NO: 758990 - RNA, 19 nt, Artificial Sequence
  Description of Artificial Sequence: Synthetic oligonucleotide
  Sense strand starting at position 1658 of SEQ ID NO: 586998
gcgcauaagcggagaauug

SEQ ID NO: 758991 - RNA, 19 nt, Artificial Sequence
  Description of Artificial Sequence: Synthetic oligonucleotide
  Antisense strand to SEQ ID NO: 758990
caauucuccgcuuaugcgc

SEQ ID NO: 758992 - RNA, 19 nt, Artificial Sequence
  Description of Artificial Sequence: Synthetic oligonucleotide
  Sense strand starting at position 1659 of SEQ ID NO: 586998
cgcauaagcggagaauuga

SEQ ID NO: 758993 - RNA, 19 nt, Artificial Sequence
  Description of Artificial Sequence: Synthetic oligonucleotide
  Antisense strand to SEQ ID NO: 758992
ucaauucuccgcuuaugcg

SEQ ID NO: 758994 - RNA, 19 nt, Artificial Sequence
  Description of Artificial Sequence: Synthetic oligonucleotide
  Sense strand starting at position 2150 of SEQ ID NO: 586998
guuugugcauuucucuaga

SEQ ID NO: 758995 - RNA, 19 nt, Artificial Sequence
  Description of Artificial Sequence: Synthetic oligonucleotide
  Antisense strand to SEQ ID NO: 758994
ucuagagaaaugcacaaac

SEQ ID NO: 758996 - RNA, 19 nt, Artificial Sequence
  Description of Artificial Sequence: Synthetic oligonucleotide
  Sense strand starting at position 2182 of SEQ ID NO: 586998
gacuuuagcguguauaaga

SEQ ID NO: 758997 - RNA, 19 nt, Artificial Sequence
  Description of Artificial Sequence: Synthetic oligonucleotide
  Antisense strand to SEQ ID NO: 758996
ucuuauacacgcuaaaguc

SEQ ID NO: 758998 - RNA, 19 nt, Artificial Sequence
  Description of Artificial Sequence: Synthetic oligonucleotide
  Sense strand starting at position 2255 of SEQ ID NO: 586998
gguucaguaugucugggau

SEQ ID NO: 758999 - RNA, 19 nt, Artificial Sequence
  Description of Artificial Sequence: Synthetic oligonucleotide
  Antisense strand to SEQ ID NO: 758998
aucccagacauacugaacc

SEQ ID NO: 759000 - RNA, 19 nt, Artificial Sequence
  Description of Artificial Sequence: Synthetic oligonucleotide
  Sense strand starting at position 2348 of SEQ ID NO: 586998
ccguuuagagcuuacaaac

SEQ ID NO: 759001 - RNA, 19 nt, Artificial Sequence
  Description of Artificial Sequence: Synthetic oligonucleotide
  Antisense strand to SEQ ID NO: 759000
guuuguaagcucuaaacgg

SEQ ID NO: 759002 - RNA, 19 nt, Artificial Sequence
  Description of Artificial Sequence: Synthetic oligonucleotide
  Sense strand starting at position 2760 of SEQ ID NO: 586998
cugaauuucugagagugac

SEQ ID NO: 759003 - RNA, 19 nt, Artificial Sequence
  Description of Artificial Sequence: Synthetic oligonucleotide
  Antisense strand to SEQ ID NO: 759002
gucacucucagaaauucag

SEQ ID NO: 759004 - RNA, 19 nt, Artificial Sequence
  Description of Artificial Sequence: Synthetic oligonucleotide
  Sense strand starting at position 2775 of SEQ ID NO: 586998
ugacuugcucccugaauug

SEQ ID NO: 759005 - RNA, 19 nt, Artificial Sequence
  Description of Artificial Sequence: Synthetic oligonucleotide
  Antisense strand to SEQ ID NO: 759004
caauucagggagcaaguca

SEQ ID NO: 759006 - RNA, 19 nt, Artificial Sequence
  Description of Artificial Sequence: Synthetic oligonucleotide
  Sense strand starting at position 2914 of SEQ ID NO: 586998
auccuagcucaaugaagua

SEQ ID NO: 759007 - RNA, 19 nt, Artificial Sequence
  Description of Artificial Sequence: Synthetic oligonucleotide
  Antisense strand to SEQ ID NO: 759006
uacuucauugagcuaggau

SEQ ID NO: 759008 - RNA, 19 nt, Artificial Sequence
  Description of Artificial Sequence: Synthetic oligonucleotide
  Sense strand starting at position 2998 of SEQ ID NO: 586998
gggauuuacuucucuccgu

SEQ ID NO: 759009 - RNA, 19 nt, Artificial Sequence
  Description of Artificial Sequence: Synthetic oligonucleotide
  Antisense strand to SEQ ID NO: 759008
acggagagaaguaaauccc

SEQ ID NO: 759010 - RNA, 19 nt, Artificial Sequence
  Description of Artificial Sequence: Synthetic oligonucleotide
  Sense strand starting at position 2999 of SEQ ID NO: 586998
ggauuuacuucucuccguu

SEQ ID NO: 759011 - RNA, 19 nt, Artificial Sequence
  Description of Artificial Sequence: Synthetic oligonucleotide
  Antisense strand to SEQ ID NO: 759010
aacggagagaaguaaaucc

SEQ ID NO: 759012 - RNA, 19 nt, Artificial Sequence
  Description of Artificial Sequence: Synthetic oligonucleotide
  Sense strand starting at position 3036 of SEQ ID NO: 586998
gggucugagacaugaauug

SEQ ID NO: 759013 - RNA, 19 nt, Artificial Sequence
  Description of Artificial Sequence: Synthetic oligonucleotide
  Antisense strand to SEQ ID NO: 759012
caauucaugucucagaccc

SEQ ID NO: 759014 - RNA, 19 nt, Artificial Sequence
  Description of Artificial Sequence: Synthetic oligonucleotide
  Sense strand starting at position 3089 of SEQ ID NO: 586998
ggacuaagcugaguagaaa

SEQ ID NO: 759015 - RNA, 19 nt, Artificial Sequence
  Description of Artificial Sequence: Synthetic oligonucleotide
  Antisense strand to SEQ ID NO: 759014
uuucuacucagcuuagucc

SEQ ID NO: 759016 - RNA, 19 nt, Artificial Sequence
  Description of Artificial Sequence: Synthetic oligonucleotide
  Sense strand starting at position 3502 of SEQ ID NO: 586998
acugacuuuccuuggauua

SEQ ID NO: 759017 - RNA, 19 nt, Artificial Sequence
  Description of Artificial Sequence: Synthetic oligonucleotide
  Antisense strand to SEQ ID NO: 759016
uaauccaaggaaagucagu

SEQ ID NO: 759018 - RNA, 19 nt, Artificial Sequence
  Description of Artificial Sequence: Synthetic oligonucleotide
  Sense strand starting at position 3503 of SEQ ID NO: 586998
cugacuuuccuuggauuag

SEQ ID NO: 759019 - RNA, 19 nt, Artificial Sequence
  Description of Artificial Sequence: Synthetic oligonucleotide
  Antisense strand to SEQ ID NO: 759018
cuaauccaaggaaagucag

SEQ ID NO: 759020 - RNA, 19 nt, Artificial Sequence
  Description of Artificial Sequence: Synthetic oligonucleotide
  Sense strand starting at position 3507 of SEQ ID NO: 586998
cuuuccuuggauuaguuua

SEQ ID NO: 759021 - RNA, 19 nt, Artificial Sequence
  Description of Artificial Sequence: Synthetic oligonucleotide
  Antisense strand to SEQ ID NO: 759020
uaaacuaauccaaggaaag

SEQ ID NO: 759022 - RNA, 19 nt, Artificial Sequence
  Description of Artificial Sequence: Synthetic oligonucleotide
  Sense strand starting at position 3509 of SEQ ID NO: 586998
uuccuuggauuaguuuaaa

SEQ ID NO: 759023 - RNA, 19 nt, Artificial Sequence
  Description of Artificial Sequence: Synthetic oligonucleotide
  Antisense strand to SEQ ID NO: 759022
uuuaaacuaauccaaggaa

SEQ ID NO: 759024 - RNA, 19 nt, Artificial Sequence
  Description of Artificial Sequence: Synthetic oligonucleotide
  Sense strand starting at position 3540 of SEQ ID NO: 586998
uuaaauuaccguggacuga

SEQ ID NO: 759025 - RNA, 19 nt, Artificial Sequence
  Description of Artificial Sequence: Synthetic oligonucleotide
  Antisense strand to SEQ ID NO: 759024
ucaguccacgguaauuuaa

SEQ ID NO: 759026 - RNA, 19 nt, Artificial Sequence
  Description of Artificial Sequence: Synthetic oligonucleotide
  Sense strand starting at position 3558 of SEQ ID NO: 586998
acaccuugugguggaaaua

SEQ ID NO: 759027 - RNA, 19 nt, Artificial Sequence
  Description of Artificial Sequence: Synthetic oligonucleotide
  Antisense strand to SEQ ID NO: 759026
uauuuccaccacaaggugu

SEQ ID NO: 759028 - RNA, 19 nt, Artificial Sequence
  Description of Artificial Sequence: Synthetic oligonucleotide
  Sense strand starting at position 3653 of SEQ ID NO: 586998
guauguguagcacagacua

SEQ ID NO: 759029 - RNA, 19 nt, Artificial Sequence
  Description of Artificial Sequence: Synthetic oligonucleotide
  Antisense strand to SEQ ID NO: 759028
uagucugugcuacacauac

SEQ ID NO: 759030 - RNA, 19 nt, Artificial Sequence
  Description of Artificial Sequence: Synthetic oligonucleotide
  Sense strand starting at position 3691 of SEQ ID NO: 586998
aacuaagcauuguugaguu

SEQ ID NO: 759031 - RNA, 19 nt, Artificial Sequence
  Description of Artificial Sequence: Synthetic oligonucleotide
  Antisense strand to SEQ ID NO: 759030
aacucaacaaugcuuaguu

SEQ ID NO: 759032 - RNA, 19 nt, Artificial Sequence
  Description of Artificial Sequence: Synthetic oligonucleotide
  Sense strand starting at position 3714 of SEQ ID NO: 586998
aagugaucaugggucuuaa

SEQ ID NO: 759033 - RNA, 19 nt, Artificial Sequence
  Description of Artificial Sequence: Synthetic oligonucleotide
  Antisense strand to SEQ ID NO: 759032
uuaagacccaugaucacuu

SEQ ID NO: 759034 - RNA, 19 nt, Artificial Sequence
  Description of Artificial Sequence: Synthetic oligonucleotide
  Sense strand starting at position 3723 of SEQ ID NO: 586998
ugggucuuaaauggucaga

SEQ ID NO: 759035 - RNA, 19 nt, Artificial Sequence
  Description of Artificial Sequence: Synthetic oligonucleotide
  Antisense strand to SEQ ID NO: 759034
ucugaccauuuaagaccca

SEQ ID NO: 759036 - RNA, 19 nt, Artificial Sequence
  Description of Artificial Sequence: Synthetic oligonucleotide
  Sense strand starting at position 3725 of SEQ ID NO: 586998
ggucuuaaauggucagaca

SEQ ID NO: 759037 - RNA, 19 nt, Artificial Sequence
  Description of Artificial Sequence: Synthetic oligonucleotide
  Antisense strand to SEQ ID NO: 759036
ugucugaccauuuaagacc

SEQ ID NO: 759038 - RNA, 19 nt, Artificial Sequence
  Description of Artificial Sequence: Synthetic oligonucleotide
  Sense strand starting at position 3763 of SEQ ID NO: 586998
uuuaacauuugguagaaca

SEQ ID NO: 759039 - RNA, 19 nt, Artificial Sequence
  Description of Artificial Sequence: Synthetic oligonucleotide
  Antisense strand to SEQ ID NO: 759038
uguucuaccaaauguuaaa

SEQ ID NO: 759040 - RNA, 19 nt, Artificial Sequence
  Description of Artificial Sequence: Synthetic oligonucleotide
  Sense strand starting at position 3777 of SEQ ID NO: 586998
gaacaaaggucauucuguu

SEQ ID NO: 759041 - RNA, 19 nt, Artificial Sequence
  Description of Artificial Sequence: Synthetic oligonucleotide
  Antisense strand to SEQ ID NO: 759040
aacagaaugaccuuuguuc

SEQ ID NO: 759042 - RNA, 19 nt, Artificial Sequence
  Description of Artificial Sequence: Synthetic oligonucleotide
  Sense strand starting at position 3824 of SEQ ID NO: 586998
ggcaaagaguuauuauugu

SEQ ID NO: 759043 - RNA, 19 nt, Artificial Sequence
  Description of Artificial Sequence: Synthetic oligonucleotide
  Antisense strand to SEQ ID NO: 759042
acaauaauaacucuuugcc

SEQ ID NO: 759044 - RNA, 19 nt, Artificial Sequence
  Description of Artificial Sequence: Synthetic oligonucleotide
  Sense strand starting at position 3868 of SEQ ID NO: 586998
ugaauauggcuauauagca

SEQ ID NO: 759045 - RNA, 19 nt, Artificial Sequence
  Description of Artificial Sequence: Synthetic oligonucleotide
  Antisense strand to SEQ ID NO: 759044
ugcuauauagccauauuca

SEQ ID NO: 759046 - RNA, 19 nt, Artificial Sequence
  Description of Artificial Sequence: Synthetic oligonucleotide
  Sense strand starting at position 133 of SEQ ID NO: 586999
auggaagugucaccuacua

SEQ ID NO: 759047 - RNA, 19 nt, Artificial Sequence
  Description of Artificial Sequence: Synthetic oligonucleotide
  Antisense strand to SEQ ID NO: 759046
uaguaggugacacuuccau

SEQ ID NO: 759048 - RNA, 19 nt, Artificial Sequence
  Description of Artificial Sequence: Synthetic oligonucleotide
  Sense strand starting at position 176 of SEQ ID NO: 586999
cuauguuuagaagaucuuu

SEQ ID NO: 759049 - RNA, 19 nt, Artificial Sequence
  Description of Artificial Sequence: Synthetic oligonucleotide
  Antisense strand to SEQ ID NO: 759048
aaagaucuucuaaacauag

SEQ ID NO: 759050 - RNA, 19 nt, Artificial Sequence
  Description of Artificial Sequence: Synthetic oligonucleotide
  Sense strand starting at position 339 of SEQ ID NO: 586999
ccuugaggucuaggagaga

SEQ ID NO: 759051 - RNA, 19 nt, Artificial Sequence
  Description of Artificial Sequence: Synthetic oligonucleotide
  Antisense strand to SEQ ID NO: 759050
ucucuccuagaccucaagg

SEQ ID NO: 759052 - RNA, 19 nt, Artificial Sequence
  Description of Artificial Sequence: Synthetic oligonucleotide
  Sense strand starting at position 379 of SEQ ID NO: 586999
gguagagcgauguauccua

SEQ ID NO: 759053 - RNA, 19 nt, Artificial Sequence
  Description of Artificial Sequence: Synthetic oligonucleotide
  Antisense strand to SEQ ID NO: 759052
uaggauacaucgcucuacc

SEQ ID NO: 759054 - RNA, 19 nt, Artificial Sequence
  Description of Artificial Sequence: Synthetic oligonucleotide
  Sense strand starting at position 454 of SEQ ID NO: 586999
ggcucagcgcugucuucua

SEQ ID NO: 759055 - RNA, 19 nt, Artificial Sequence
  Description of Artificial Sequence: Synthetic oligonucleotide
  Antisense strand to SEQ ID NO: 759054
uagaagacagcgcugagcc

SEQ ID NO: 759056 - RNA, 19 nt, Artificial Sequence
  Description of Artificial Sequence: Synthetic oligonucleotide
  Sense strand starting at position 561 of SEQ ID NO: 586999
uggagaguuacccagccau

SEQ ID NO: 759057 - RNA, 19 nt, Artificial Sequence
  Description of Artificial Sequence: Synthetic oligonucleotide
  Antisense strand to SEQ ID NO: 759056
auggcuggguaacucucca

SEQ ID NO: 759058 - RNA, 19 nt, Artificial Sequence
  Description of Artificial Sequence: Synthetic oligonucleotide
  Sense strand starting at position 575 of SEQ ID NO: 586999
gccauuugucugcauggua

SEQ ID NO: 759059 - RNA, 19 nt, Artificial Sequence
  Description of Artificial Sequence: Synthetic oligonucleotide
  Antisense strand to SEQ ID NO: 759058
uaccaugcagacaaauggc

SEQ ID NO: 759060 - RNA, 19 nt, Artificial Sequence
  Description of Artificial Sequence: Synthetic oligonucleotide
  Sense strand starting at position 1231 of SEQ ID NO: 586999
guaagaaauuuggaagugu

SEQ ID NO: 759061 - RNA, 19 nt, Artificial Sequence
  Description of Artificial Sequence: Synthetic oligonucleotide
  Antisense strand to SEQ ID NO: 759060
acacuuccaaauuucuuac

SEQ ID NO: 759062 - RNA, 19 nt, Artificial Sequence
  Description of Artificial Sequence: Synthetic oligonucleotide
  Sense strand starting at position 1658 of SEQ ID NO: 586999
cgcauaagcgaagaauuga

SEQ ID NO: 759063 - RNA, 19 nt, Artificial Sequence
  Description of Artificial Sequence: Synthetic oligonucleotide
  Antisense strand to SEQ ID NO: 759062
ucaauucuucgcuuaugcg

SEQ ID NO: 759064 - RNA, 19 nt, Artificial Sequence
  Description of Artificial Sequence: Synthetic oligonucleotide
  Sense strand starting at position 2149 of SEQ ID NO: 586999
guuugugcauuucucuaga

SEQ ID NO: 759065 - RNA, 19 nt, Artificial Sequence
  Description of Artificial Sequence: Synthetic oligonucleotide
  Antisense strand to SEQ ID NO: 759064
ucuagagaaaugcacaaac

SEQ ID NO: 759066 - RNA, 19 nt, Artificial Sequence
  Description of Artificial Sequence: Synthetic oligonucleotide
  Sense strand starting at position 2257 of SEQ ID NO: 586999
ucaguaugucugggaugag

SEQ ID NO: 759067 - RNA, 19 nt, Artificial Sequence
  Description of Artificial Sequence: Synthetic oligonucleotide
  Antisense strand to SEQ ID NO: 759066
cucaucccagacauacuga

SEQ ID NO: 759068 - RNA, 19 nt, Artificial Sequence
  Description of Artificial Sequence: Synthetic oligonucleotide
  Sense strand starting at position 2347 of SEQ ID NO: 586999
ccguuuagagcuuacaaac

SEQ ID NO: 759069 - RNA, 19 nt, Artificial Sequence
  Description of Artificial Sequence: Synthetic oligonucleotide
  Antisense strand to SEQ ID NO: 759068
guuuguaagcucuaaacgg

SEQ ID NO: 759070 - RNA, 19 nt, Artificial Sequence
  Description of Artificial Sequence: Synthetic oligonucleotide
  Sense strand starting at position 2759 of SEQ ID NO: 586999
cugaauuucugagagugac

SEQ ID NO: 759071 - RNA, 19 nt, Artificial Sequence
  Description of Artificial Sequence: Synthetic oligonucleotide
  Antisense strand to SEQ ID NO: 759070
gucacucucagaaauucag

SEQ ID NO: 759072 - RNA, 19 nt, Artificial Sequence
  Description of Artificial Sequence: Synthetic oligonucleotide
  Sense strand starting at position 2774 of SEQ ID NO: 586999
ugacuugcucccugaauug

SEQ ID NO: 759073 - RNA, 19 nt, Artificial Sequence
  Description of Artificial Sequence: Synthetic oligonucleotide
  Antisense strand to SEQ ID NO: 759072
caauucagggagcaaguca

SEQ ID NO: 759074 - RNA, 19 nt, Artificial Sequence
  Description of Artificial Sequence: Synthetic oligonucleotide
  Sense strand starting at position 2914 of SEQ ID NO: 586999
auccuagcucaaugaagua

SEQ ID NO: 759075 - RNA, 19 nt, Artificial Sequence
  Description of Artificial Sequence: Synthetic oligonucleotide
  Antisense strand to SEQ ID NO: 759074
uacuucauugagcuaggau

SEQ ID NO: 759076 - RNA, 19 nt, Artificial Sequence
  Description of Artificial Sequence: Synthetic oligonucleotide
  Sense strand starting at position 2998 of SEQ ID NO: 586999
gggauuuacuucucuccgu

SEQ ID NO: 759077 - RNA, 19 nt, Artificial Sequence
  Description of Artificial Sequence: Synthetic oligonucleotide
  Antisense strand to SEQ ID NO: 759076
acggagagaaguaaauccc

SEQ ID NO: 759078 - RNA, 19 nt, Artificial Sequence
  Description of Artificial Sequence: Synthetic oligonucleotide
  Sense strand starting at position 2999 of SEQ ID NO: 586999
ggauuuacuucucuccguu

SEQ ID NO: 759079 - RNA, 19 nt, Artificial Sequence
  Description of Artificial Sequence: Synthetic oligonucleotide
  Antisense strand to SEQ ID NO: 759078
aacggagagaaguaaaucc

SEQ ID NO: 759080 - RNA, 19 nt, Artificial Sequence
  Description of Artificial Sequence: Synthetic oligonucleotide
  Sense strand starting at position 3017 of SEQ ID NO: 586999
uggaaccagccucgagaua

SEQ ID NO: 759081 - RNA, 19 nt, Artificial Sequence
  Description of Artificial Sequence: Synthetic oligonucleotide
  Antisense strand to SEQ ID NO: 759080
uaucucgaggcugguucca

SEQ ID NO: 759082 - RNA, 19 nt, Artificial Sequence
  Description of Artificial Sequence: Synthetic oligonucleotide
  Sense strand starting at position 3029 of SEQ ID NO: 586999
cgagauagggucugagaca

SEQ ID NO: 759083 - RNA, 19 nt, Artificial Sequence
  Description of Artificial Sequence: Synthetic oligonucleotide
  Antisense strand to SEQ ID NO: 759082
ugucucagacccuaucucg

SEQ ID NO: 759084 - RNA, 19 nt, Artificial Sequence
  Description of Artificial Sequence: Synthetic oligonucleotide
  Sense strand starting at position 3036 of SEQ ID NO: 586999
gggucugagacaugaauug

SEQ ID NO: 759085 - RNA, 19 nt, Artificial Sequence
  Description of Artificial Sequence: Synthetic oligonucleotide
  Antisense strand to SEQ ID NO: 759084
caauucaugucucagaccc

SEQ ID NO: 759086 - RNA, 19 nt, Artificial Sequence
  Description of Artificial Sequence: Synthetic oligonucleotide
  Sense strand starting at position 3089 of SEQ ID NO: 586999
ggacuaagcugaguagaaa

SEQ ID NO: 759087 - RNA, 19 nt, Artificial Sequence
  Description of Artificial Sequence: Synthetic oligonucleotide
  Antisense strand to SEQ ID NO: 759086
uuucuacucagcuuagucc

SEQ ID NO: 759088 - RNA, 19 nt, Artificial Sequence
  Description of Artificial Sequence: Synthetic oligonucleotide
  Sense strand starting at position 3214 of SEQ ID NO: 586999
acugacuuuccauggauua

SEQ ID NO: 759089 - RNA, 19 nt, Artificial Sequence
  Description of Artificial Sequence: Synthetic oligonucleotide
  Antisense strand to SEQ ID NO: 759088
uaauccauggaaagucagu

SEQ ID NO: 759090 - RNA, 19 nt, Artificial Sequence
  Description of Artificial Sequence: Synthetic oligonucleotide
  Sense strand starting at position 3215 of SEQ ID NO: 586999
cugacuuuccauggauuag

SEQ ID NO: 759091 - RNA, 19 nt, Artificial Sequence
  Description of Artificial Sequence: Synthetic oligonucleotide
  Antisense strand to SEQ ID NO: 759090
cuaauccauggaaagucag

SEQ ID NO: 759092 - RNA, 19 nt, Artificial Sequence
  Description of Artificial Sequence: Synthetic oligonucleotide
  Sense strand starting at position 3219 of SEQ ID NO: 586999
cuuuccauggauuaguuua

SEQ ID NO: 759093 - RNA, 19 nt, Artificial Sequence
  Description of Artificial Sequence: Synthetic oligonucleotide
  Antisense strand to SEQ ID NO: 759092
uaaacuaauccauggaaag

SEQ ID NO: 759094 - RNA, 19 nt, Artificial Sequence
  Description of Artificial Sequence: Synthetic oligonucleotide
  Sense strand starting at position 3221 of SEQ ID NO: 586999
uuccauggauuaguuuaaa

SEQ ID NO: 759095 - RNA, 19 nt, Artificial Sequence
  Description of Artificial Sequence: Synthetic oligonucleotide
  Antisense strand to SEQ ID NO: 759094
uuuaaacuaauccauggaa

SEQ ID NO: 759096 - RNA, 19 nt, Artificial Sequence
  Description of Artificial Sequence: Synthetic oligonucleotide
  Sense strand starting at position 3234 of SEQ ID NO: 586999
uuuaaagcccuuugaagau

SEQ ID NO: 759097 - RNA, 19 nt, Artificial Sequence
  Description of Artificial Sequence: Synthetic oligonucleotide
  Antisense strand to SEQ ID NO: 759096
aucuucaaagggcuuuaaa

SEQ ID NO: 759098 - RNA, 19 nt, Artificial Sequence
  Description of Artificial Sequence: Synthetic oligonucleotide
  Sense strand starting at position 3252 of SEQ ID NO: 586999
uuaaauuaccguggacuga

SEQ ID NO: 759099 - RNA, 19 nt, Artificial Sequence
  Description of Artificial Sequence: Synthetic oligonucleotide
  Antisense strand to SEQ ID NO: 759098
ucaguccacgguaauuuaa

SEQ ID NO: 759100 - RNA, 19 nt, Artificial Sequence
  Description of Artificial Sequence: Synthetic oligonucleotide
  Sense strand starting at position 3270 of SEQ ID NO: 586999
acaccuugugguggaaaua

SEQ ID NO: 759101 - RNA, 19 nt, Artificial Sequence
  Description of Artificial Sequence: Synthetic oligonucleotide
  Antisense strand to SEQ ID NO: 759100
uauuuccaccacaaggugu

SEQ ID NO: 759102 - RNA, 19 nt, Artificial Sequence
  Description of Artificial Sequence: Synthetic oligonucleotide
  Sense strand starting at position 3302 of SEQ ID NO: 586999
guuguuucuagugaaacua

SEQ ID NO: 759103 - RNA, 19 nt, Artificial Sequence
  Description of Artificial Sequence: Synthetic oligonucleotide
  Antisense strand to SEQ ID NO: 759102
uaguuucacuagaaacaac

SEQ ID NO: 759104 - RNA, 19 nt, Artificial Sequence
  Description of Artificial Sequence: Synthetic oligonucleotide
  Sense strand starting at position 3365 of SEQ ID NO: 586999
guauguguagcacagacua

SEQ ID NO: 759105 - RNA, 19 nt, Artificial Sequence
  Description of Artificial Sequence: Synthetic oligonucleotide
  Antisense strand to SEQ ID NO: 759104
uagucugugcuacacauac

SEQ ID NO: 759106 - RNA, 19 nt, Artificial Sequence
  Description of Artificial Sequence: Synthetic oligonucleotide
  Sense strand starting at position 3426 of SEQ ID NO: 586999
aagugaucaugggucuuaa

SEQ ID NO: 759107 - RNA, 19 nt, Artificial Sequence
  Description of Artificial Sequence: Synthetic oligonucleotide
  Antisense strand to SEQ ID NO: 759106
uuaagacccaugaucacuu

SEQ ID NO: 759108 - RNA, 19 nt, Artificial Sequence
  Description of Artificial Sequence: Synthetic oligonucleotide
  Sense strand starting at position 3435 of SEQ ID NO: 586999
ugggucuuaaauggucaga

SEQ ID NO: 759109 - RNA, 19 nt, Artificial Sequence
  Description of Artificial Sequence: Synthetic oligonucleotide
  Antisense strand to SEQ ID NO: 759108
ucugaccauuuaagaccca

SEQ ID NO: 759110 - RNA, 19 nt, Artificial Sequence
  Description of Artificial Sequence: Synthetic oligonucleotide
  Sense strand starting at position 3437 of SEQ ID NO: 586999
ggucuuaaauggucagaca

SEQ ID NO: 759111 - RNA, 19 nt, Artificial Sequence
  Description of Artificial Sequence: Synthetic oligonucleotide
  Antisense strand to SEQ ID NO: 759110
ugucugaccauuuaagacc

SEQ ID NO: 759112 - RNA, 19 nt, Artificial Sequence
  Description of Artificial Sequence: Synthetic oligonucleotide
  Sense strand starting at position 3475 of SEQ ID NO: 586999
uuuaacauuugguagaaca

SEQ ID NO: 759113 - RNA, 19 nt, Artificial Sequence
  Description of Artificial Sequence: Synthetic oligonucleotide
  Antisense strand to SEQ ID NO: 759112
uguucuaccaaauguuaaa

SEQ ID NO: 759114 - RNA, 19 nt, Artificial Sequence
  Description of Artificial Sequence: Synthetic oligonucleotide
  Sense strand starting at position 3536 of SEQ ID NO: 586999
ggcaaagaguuauuauugu

SEQ ID NO: 759115 - RNA, 19 nt, Artificial Sequence
  Description of Artificial Sequence: Synthetic oligonucleotide
  Antisense strand to SEQ ID NO: 759114
acaauaauaacucuuugcc

SEQ ID NO: 759116 - RNA, 19 nt, Artificial Sequence
  Description of Artificial Sequence: Synthetic oligonucleotide
  Sense strand starting at position 3580 of SEQ ID NO: 586999
ugaauauggcuauauagca

SEQ ID NO: 759117 - RNA, 19 nt, Artificial Sequence
  Description of Artificial Sequence: Synthetic oligonucleotide
  Antisense strand to SEQ ID NO: 759116
ugcuauauagccauauuca

SEQ ID NO: 759118 - RNA, 19 nt, Artificial Sequence
  Description of Artificial Sequence: Synthetic oligonucleotide
  Sense strand starting at position 3670 of SEQ ID NO: 586999
auaauuagacuuuggcaau

SEQ ID NO: 759119 - RNA, 19 nt, Artificial Sequence
  Description of Artificial Sequence: Synthetic oligonucleotide
  Antisense strand to SEQ ID NO: 759118
auugccaaagucuaauuau

SEQ ID NO: 759120 - RNA, 19 nt, Artificial Sequence
  Description of Artificial Sequence: Synthetic oligonucleotide
  Sense strand starting at position 3747 of SEQ ID NO: 586999
aauagaguauguuccaaag

SEQ ID NO: 759121 - RNA, 19 nt, Artificial Sequence
  Description of Artificial Sequence: Synthetic oligonucleotide
  Antisense strand to SEQ ID NO: 759120
cuuuggaacauacucuauu

SEQ ID NO: 759122 - RNA, 19 nt, Artificial Sequence
  Description of Artificial Sequence: Synthetic oligonucleotide
  Sense strand starting at position 3818 of SEQ ID NO: 586999
gcaacacaauauucgauua

SEQ ID NO: 759123 - RNA, 19 nt, Artificial Sequence
  Description of Artificial Sequence: Synthetic oligonucleotide
  Antisense strand to SEQ ID NO: 759122
uaaucgaauauuguguugc

SEQ ID NO: 759124 - RNA, 19 nt, Artificial Sequence
  Description of Artificial Sequence: Synthetic oligonucleotide
  Sense strand starting at position 3973 of SEQ ID NO: 586999
cggguaauacaaugccaga

SEQ ID NO: 759125 - RNA, 19 nt, Artificial Sequence
  Description of Artificial Sequence: Synthetic oligonucleotide
  Antisense strand to SEQ ID NO: 759124
ucuggcauuguauuacccg

SEQ ID NO: 759126 - RNA, 19 nt, Artificial Sequence
  Description of Artificial Sequence: Synthetic oligonucleotide
  Sense strand starting at position 141 of SEQ ID NO: 587000
gaagaaccauguuugucuu

SEQ ID NO: 759127 - RNA, 19 nt, Artificial Sequence
  Description of Artificial Sequence: Synthetic oligonucleotide
  Antisense strand to SEQ ID NO: 759126
aagacaaacaugguucuuc

SEQ ID NO: 759128 - RNA, 19 nt, Artificial Sequence
  Description of Artificial Sequence: Synthetic oligonucleotide
  Sense strand starting at position 191 of SEQ ID NO: 587000
aguguaacuaaggaugcaa

SEQ ID NO: 759129 - RNA, 19 nt, Artificial Sequence
  Description of Artificial Sequence: Synthetic oligonucleotide
  Antisense strand to SEQ ID NO: 759128
uugcauccuuaguuacacu

SEQ ID NO: 759130 - RNA, 19 nt, Artificial Sequence
  Description of Artificial Sequence: Synthetic oligonucleotide
  Sense strand starting at position 193 of SEQ ID NO: 587000
uguaacuaaggaugcaaua

SEQ ID NO: 759131 - RNA, 19 nt, Artificial Sequence
  Description of Artificial Sequence: Synthetic oligonucleotide
  Antisense strand to SEQ ID NO: 759130
uauugcauccuuaguuaca

SEQ ID NO: 759132 - RNA, 19 nt, Artificial Sequence
  Description of Artificial Sequence: Synthetic oligonucleotide
  Sense strand starting at position 354 of SEQ ID NO: 587000
augucucaguuaccucaau

SEQ ID NO: 759133 - RNA, 19 nt, Artificial Sequence
  Description of Artificial Sequence: Synthetic oligonucleotide
  Antisense strand to SEQ ID NO: 759132
auugagguaacugagacau

SEQ ID NO: 759134 - RNA, 19 nt, Artificial Sequence
  Description of Artificial Sequence: Synthetic oligonucleotide
  Sense strand starting at position 632 of SEQ ID NO: 587000
ugcacaauuugcucaaguu

SEQ ID NO: 759135 - RNA, 19 nt, Artificial Sequence
  Description of Artificial Sequence: Synthetic oligonucleotide
  Antisense strand to SEQ ID NO: 759134
aacuugagcaaauugugca

SEQ ID NO: 759136 - RNA, 19 nt, Artificial Sequence
  Description of Artificial Sequence: Synthetic oligonucleotide
  Sense strand starting at position 650 of SEQ ID NO: 587000
ugucauucucaauauuguc

SEQ ID NO: 759137 - RNA, 19 nt, Artificial Sequence
  Description of Artificial Sequence: Synthetic oligonucleotide
  Antisense strand to SEQ ID NO: 759136
gacaauauugagaaugaca

SEQ ID NO: 759138 - RNA, 19 nt, Artificial Sequence
  Description of Artificial Sequence: Synthetic oligonucleotide
  Sense strand starting at position 848 of SEQ ID NO: 587000
aagagagaaucggaguaaa

SEQ ID NO: 759139 - RNA, 19 nt, Artificial Sequence
  Description of Artificial Sequence: Synthetic oligonucleotide
  Antisense strand to SEQ ID NO: 759138
uuuacuccgauucucucuu

SEQ ID NO: 759140 - RNA, 19 nt, Artificial Sequence
  Description of Artificial Sequence: Synthetic oligonucleotide
  Sense strand starting at position 1067 of SEQ ID NO: 587000
cuauacugaugagcgauaa

SEQ ID NO: 759141 - RNA, 19 nt, Artificial Sequence
  Description of Artificial Sequence: Synthetic oligonucleotide
  Antisense strand to SEQ ID NO: 759140
uuaucgcucaucaguauag

SEQ ID NO: 759142 - RNA, 19 nt, Artificial Sequence
  Description of Artificial Sequence: Synthetic oligonucleotide
  Sense strand starting at position 1068 of SEQ ID NO: 587000
uauacugaugagcgauaau

SEQ ID NO: 759143 - RNA, 19 nt, Artificial Sequence
  Description of Artificial Sequence: Synthetic oligonucleotide
  Antisense strand to SEQ ID NO: 759142
auuaucgcucaucaguaua

SEQ ID NO: 759144 - RNA, 19 nt, Artificial Sequence
  Description of Artificial Sequence: Synthetic oligonucleotide
  Sense strand starting at position 1098 of SEQ ID NO: 587000
uggacugucuuuccaucua

SEQ ID NO: 759145 - RNA, 19 nt, Artificial Sequence
  Description of Artificial Sequence: Synthetic oligonucleotide
  Antisense strand to SEQ ID NO: 759144
uagauggaaagacagucca

SEQ ID NO: 759146 - RNA, 19 nt, Artificial Sequence
  Description of Artificial Sequence: Synthetic oligonucleotide
  Sense strand starting at position 1122 of SEQ ID NO: 587000
cuaacugcccgaggaguaa

SEQ ID NO: 759147 - RNA, 19 nt, Artificial Sequence
  Description of Artificial Sequence: Synthetic oligonucleotide
  Antisense strand to SEQ ID NO: 759146
uuacuccucgggcaguuag

SEQ ID NO: 759148 - RNA, 19 nt, Artificial Sequence
  Description of Artificial Sequence: Synthetic oligonucleotide
  Sense strand starting at position 1293 of SEQ ID NO: 587000
aaagauaauuuaggacagu

SEQ ID NO: 759149 - RNA, 19 nt, Artificial Sequence
  Description of Artificial Sequence: Synthetic oligonucleotide
  Antisense strand to SEQ ID NO: 759148
acuguccuaaauuaucuuu

SEQ ID NO: 759150 - RNA, 19 nt, Artificial Sequence
  Description of Artificial Sequence: Synthetic oligonucleotide
  Sense strand starting at position 1357 of SEQ ID NO: 587000
acgauuacauuacugggaa

SEQ ID NO: 759151 - RNA, 19 nt, Artificial Sequence
  Description of Artificial Sequence: Synthetic oligonucleotide
  Antisense strand to SEQ ID NO: 759150
uucccaguaauguaaucgu

SEQ ID NO: 759152 - RNA, 19 nt, Artificial Sequence
  Description of Artificial Sequence: Synthetic oligonucleotide
  Sense strand starting at position 1394 of SEQ ID NO: 587000
agaaauaccuguucgcaaa

SEQ ID NO: 759153 - RNA, 19 nt, Artificial Sequence
  Description of Artificial Sequence: Synthetic oligonucleotide
  Antisense strand to SEQ ID NO: 759152
uuugcgaacagguauuucu

SEQ ID NO: 759154 - RNA, 19 nt, Artificial Sequence
  Description of Artificial Sequence: Synthetic oligonucleotide
  Sense strand starting at position 1395 of SEQ ID NO: 587000
gaaauaccuguucgcaaag

SEQ ID NO: 759155 - RNA, 19 nt, Artificial Sequence
  Description of Artificial Sequence: Synthetic oligonucleotide
  Antisense strand to SEQ ID NO: 759154
cuuugcgaacagguauuuc

SEQ ID NO: 759156 - RNA, 19 nt, Artificial Sequence
  Description of Artificial Sequence: Synthetic oligonucleotide
  Sense strand starting at position 1418 of SEQ ID NO: 587000
acugcaugaucuuccauga

SEQ ID NO: 759157 - RNA, 19 nt, Artificial Sequence
  Description of Artificial Sequence: Synthetic oligonucleotide
  Antisense strand to SEQ ID NO: 759156
ucauggaagaucaugcagu

SEQ ID NO: 759158 - RNA, 19 nt, Artificial Sequence
  Description of Artificial Sequence: Synthetic oligonucleotide
  Sense strand starting at position 1516 of SEQ ID NO: 587000
acauccuaccugggacaau

SEQ ID NO: 759159 - RNA, 19 nt, Artificial Sequence
  Description of Artificial Sequence: Synthetic oligonucleotide
  Antisense strand to SEQ ID NO: 759158
auugucccagguaggaugu

SEQ ID NO: 759160 - RNA, 19 nt, Artificial Sequence
  Description of Artificial Sequence: Synthetic oligonucleotide
  Sense strand starting at position 2352 of SEQ ID NO: 587000
uggucuuccggagauucuu

SEQ ID NO: 759161 - RNA, 19 nt, Artificial Sequence
  Description of Artificial Sequence: Synthetic oligonucleotide
  Antisense strand to SEQ ID NO: 759160
aagaaucuccggaagacca

SEQ ID NO: 759162 - RNA, 19 nt, Artificial Sequence
  Description of Artificial Sequence: Synthetic oligonucleotide
  Sense strand starting at position 2358 of SEQ ID NO: 587000
uccggagauucuuucugaa

SEQ ID NO: 759163 - RNA, 19 nt, Artificial Sequence
  Description of Artificial Sequence: Synthetic oligonucleotide
  Antisense strand to SEQ ID NO: 759162
uucagaaagaaucuccgga

SEQ ID NO: 759164 - RNA, 19 nt, Artificial Sequence
  Description of Artificial Sequence: Synthetic oligonucleotide
  Sense strand starting at position 2360 of SEQ ID NO: 587000
cggagauucuuucugaagc

SEQ ID NO: 759165 - RNA, 19 nt, Artificial Sequence
  Description of Artificial Sequence: Synthetic oligonucleotide
  Antisense strand to SEQ ID NO: 759164
gcuucagaaagaaucuccg

SEQ ID NO: 759166 - RNA, 19 nt, Artificial Sequence
  Description of Artificial Sequence: Synthetic oligonucleotide
  Sense strand starting at position 2377 of SEQ ID NO: 587000
gcagcuuuagaauagucaa

SEQ ID NO: 759167 - RNA, 19 nt, Artificial Sequence
  Description of Artificial Sequence: Synthetic oligonucleotide
  Antisense strand to SEQ ID NO: 759166
uugacuauucuaaagcugc

SEQ ID NO: 759168 - RNA, 19 nt, Artificial Sequence
  Description of Artificial Sequence: Synthetic oligonucleotide
  Sense strand starting at position 2436 of SEQ ID NO: 587000
accuuuccgcucuagaaau

SEQ ID NO: 759169 - RNA, 19 nt, Artificial Sequence
  Description of Artificial Sequence: Synthetic oligonucleotide
  Antisense strand to SEQ ID NO: 759168
auuucuagagcggaaaggu

SEQ ID NO: 759170 - RNA, 19 nt, Artificial Sequence
  Description of Artificial Sequence: Synthetic oligonucleotide
  Sense strand starting at position 2611 of SEQ ID NO: 587000
uagacuguguccuuggaau

SEQ ID NO: 759171 - RNA, 19 nt, Artificial Sequence
  Description of Artificial Sequence: Synthetic oligonucleotide
  Antisense strand to SEQ ID NO: 759170
auuccaaggacacagucua

SEQ ID NO: 759172 - RNA, 19 nt, Artificial Sequence
  Description of Artificial Sequence: Synthetic oligonucleotide
  Sense strand starting at position 2613 of SEQ ID NO: 587000
gacuguguccuuggaauaa

SEQ ID NO: 759173 - RNA, 19 nt, Artificial Sequence
  Description of Artificial Sequence: Synthetic oligonucleotide
  Antisense strand to SEQ ID NO: 759172
uuauuccaaggacacaguc

SEQ ID NO: 759174 - RNA, 19 nt, Artificial Sequence
  Description of Artificial Sequence: Synthetic oligonucleotide
  Sense strand starting at position 2699 of SEQ ID NO: 587000
agagauuauucuguugacu

SEQ ID NO: 759175 - RNA, 19 nt, Artificial Sequence
  Description of Artificial Sequence: Synthetic oligonucleotide
  Antisense strand to SEQ ID NO: 759174
agucaacagaauaaucucu

SEQ ID NO: 759176 - RNA, 19 nt, Artificial Sequence
  Description of Artificial Sequence: Synthetic oligonucleotide
  Sense strand starting at position 3076 of SEQ ID NO: 587000
cccucuaggugguuuauua

SEQ ID NO: 759177 - RNA, 19 nt, Artificial Sequence
  Description of Artificial Sequence: Synthetic oligonucleotide
  Antisense strand to SEQ ID NO: 759176
uaauaaaccaccuagaggg

SEQ ID NO: 759178 - RNA, 19 nt, Artificial Sequence
  Description of Artificial Sequence: Synthetic oligonucleotide
  Sense strand starting at position 3135 of SEQ ID NO: 587000
gggucuuagaucgaucacu

SEQ ID NO: 759179 - RNA, 19 nt, Artificial Sequence
  Description of Artificial Sequence: Synthetic oligonucleotide
  Antisense strand to SEQ ID NO: 759178
agugaucgaucuaagaccc

SEQ ID NO: 759180 - RNA, 19 nt, Artificial Sequence
  Description of Artificial Sequence: Synthetic oligonucleotide
  Sense strand starting at position 3189 of SEQ ID NO: 587000
agauuaaccuuuguaaaug

SEQ ID NO: 759181 - RNA, 19 nt, Artificial Sequence
  Description of Artificial Sequence: Synthetic oligonucleotide
  Antisense strand to SEQ ID NO: 759180
cauuuacaaagguuaaucu

SEQ ID NO: 759182 - RNA, 19 nt, Artificial Sequence
  Description of Artificial Sequence: Synthetic oligonucleotide
  Sense strand starting at position 3215 of SEQ ID NO: 587000
ggaaauacauccuuuguuu

SEQ ID NO: 759183 - RNA, 19 nt, Artificial Sequence
  Description of Artificial Sequence: Synthetic oligonucleotide
  Antisense strand to SEQ ID NO: 759182
aaacaaaggauguauuucc

SEQ ID NO: 759184 - RNA, 19 nt, Artificial Sequence
  Description of Artificial Sequence: Synthetic oligonucleotide
  Sense strand starting at position 3224 of SEQ ID NO: 587000
uccuuuguuugacuugaaa

SEQ ID NO: 759185 - RNA, 19 nt, Artificial Sequence
  Description of Artificial Sequence: Synthetic oligonucleotide
  Antisense strand to SEQ ID NO: 759184
uuucaagucaaacaaagga

SEQ ID NO: 759186 - RNA, 19 nt, Artificial Sequence
  Description of Artificial Sequence: Synthetic oligonucleotide
  Sense strand starting at position 3227 of SEQ ID NO: 587000
uuuguuugacuugaaaugu

SEQ ID NO: 759187 - RNA, 19 nt, Artificial Sequence
  Description of Artificial Sequence: Synthetic oligonucleotide
  Antisense strand to SEQ ID NO: 759186
acauuucaagucaaacaaa

SEQ ID NO: 759188 - RNA, 19 nt, Artificial Sequence
  Description of Artificial Sequence: Synthetic oligonucleotide
  Sense strand starting at position 3260 of SEQ ID NO: 587000
cgccaaauauuauuaaggu

SEQ ID NO: 759189 - RNA, 19 nt, Artificial Sequence
  Description of Artificial Sequence: Synthetic oligonucleotide
  Antisense strand to SEQ ID NO: 759188
accuuaauaauauuuggcg

SEQ ID NO: 759190 - RNA, 19 nt, Artificial Sequence
  Description of Artificial Sequence: Synthetic oligonucleotide
  Sense strand starting at position 3281 of SEQ ID NO: 587000
aaaguuuaggcagaagcua

SEQ ID NO: 759191 - RNA, 19 nt, Artificial Sequence
  Description of Artificial Sequence: Synthetic oligonucleotide
  Antisense strand to SEQ ID NO: 759190
uagcuucugccuaaacuuu

SEQ ID NO: 759192 - RNA, 19 nt, Artificial Sequence
  Description of Artificial Sequence: Synthetic oligonucleotide
  Sense strand starting at position 3339 of SEQ ID NO: 587000
cugguagaauacuuuccau

SEQ ID NO: 759193 - RNA, 19 nt, Artificial Sequence
  Description of Artificial Sequence: Synthetic oligonucleotide
  Antisense strand to SEQ ID NO: 759192
auggaaaguauucuaccag

SEQ ID NO: 759194 - RNA, 19 nt, Artificial Sequence
  Description of Artificial Sequence: Synthetic oligonucleotide
  Sense strand starting at position 3455 of SEQ ID NO: 587000
guaguuccucuggagaacu

SEQ ID NO: 759195 - RNA, 19 nt, Artificial Sequence
  Description of Artificial Sequence: Synthetic oligonucleotide
  Antisense strand to SEQ ID NO: 759194
aguucuccagaggaacuac

SEQ ID NO: 759196 - RNA, 19 nt, Artificial Sequence
  Description of Artificial Sequence: Synthetic oligonucleotide
  Sense strand starting at position 3486 of SEQ ID NO: 587000
ucaugaaucuuagcaguua

SEQ ID NO: 759197 - RNA, 19 nt, Artificial Sequence
  Description of Artificial Sequence: Synthetic oligonucleotide
  Antisense strand to SEQ ID NO: 759196
uaacugcuaagauucauga

SEQ ID NO: 759198 - RNA, 19 nt, Artificial Sequence
  Description of Artificial Sequence: Synthetic oligonucleotide
  Sense strand starting at position 3731 of SEQ ID NO: 587000
gagaaucagugagucaaca

SEQ ID NO: 759199 - RNA, 19 nt, Artificial Sequence
  Description of Artificial Sequence: Synthetic oligonucleotide
  Antisense strand to SEQ ID NO: 759198
uguugacucacugauucuc

SEQ ID NO: 759200 - RNA, 19 nt, Artificial Sequence
  Description of Artificial Sequence: Synthetic oligonucleotide
  Sense strand starting at position 3848 of SEQ ID NO: 587000
agaagacuguugguguuaa

SEQ ID NO: 759201 - RNA, 19 nt, Artificial Sequence
  Description of Artificial Sequence: Synthetic oligonucleotide
  Antisense strand to SEQ ID NO: 759200
uuaacaccaacagucuucu

SEQ ID NO: 759202 - RNA, 19 nt, Artificial Sequence
  Description of Artificial Sequence: Synthetic oligonucleotide
  Sense strand starting at position 3971 of SEQ ID NO: 587000
ugaggugcucucugagaaa

SEQ ID NO: 759203 - RNA, 19 nt, Artificial Sequence
  Description of Artificial Sequence: Synthetic oligonucleotide
  Antisense strand to SEQ ID NO: 759202
uuucucagagagcaccuca

SEQ ID NO: 759204 - RNA, 19 nt, Artificial Sequence
  Description of Artificial Sequence: Synthetic oligonucleotide
  Sense strand starting at position 3983 of SEQ ID NO: 587000
ugagaaaucucuucuguuc

SEQ ID NO: 759205 - RNA, 19 nt, Artificial Sequence
  Description of Artificial Sequence: Synthetic oligonucleotide
  Antisense strand to SEQ ID NO: 759204
gaacagaagagauuucuca

SEQ ID NO: 759206 - RNA, 19 nt, Artificial Sequence
  Description of Artificial Sequence: Synthetic oligonucleotide
  Sense strand starting at position 50 of SEQ ID NO: 587001
cuaugucauuuauagaaag

SEQ ID NO: 759207 - RNA, 19 nt, Artificial Sequence
  Description of Artificial Sequence: Synthetic oligonucleotide
  Antisense strand to SEQ ID NO: 759206
cuuucuauaaaugacauag

SEQ ID NO: 759208 - RNA, 19 nt, Artificial Sequence
  Description of Artificial Sequence: Synthetic oligonucleotide
  Sense strand starting at position 118 of SEQ ID NO: 587001
ucacuuugauucucugagu

SEQ ID NO: 759209 - RNA, 19 nt, Artificial Sequence
  Description of Artificial Sequence: Synthetic oligonucleotide
  Antisense strand to SEQ ID NO: 759208
acucagagaaucaaaguga

SEQ ID NO: 759210 - RNA, 19 nt, Artificial Sequence
  Description of Artificial Sequence: Synthetic oligonucleotide
  Sense strand starting at position 123 of SEQ ID NO: 587001
uugauucucugagucucaa

SEQ ID NO: 759211 - RNA, 19 nt, Artificial Sequence
  Description of Artificial Sequence: Synthetic oligonucleotide
  Antisense strand to SEQ ID NO: 759210
uugagacucagagaaucaa

SEQ ID NO: 759212 - RNA, 19 nt, Artificial Sequence
  Description of Artificial Sequence: Synthetic oligonucleotide
  Sense strand starting at position 135 of SEQ ID NO: 587001
gucucaauuuccuuuguua

SEQ ID NO: 759213 - RNA, 19 nt, Artificial Sequence
  Description of Artificial Sequence: Synthetic oligonucleotide
  Antisense strand to SEQ ID NO: 759212
uaacaaaggaaauugagac

SEQ ID NO: 759214 - RNA, 19 nt, Artificial Sequence
  Description of Artificial Sequence: Synthetic oligonucleotide
  Sense strand starting at position 188 of SEQ ID NO: 587001
gguaguuuccaacacuaaa

SEQ ID NO: 759215 - RNA, 19 nt, Artificial Sequence
  Description of Artificial Sequence: Synthetic oligonucleotide
  Antisense strand to SEQ ID NO: 759214
uuuaguguuggaaacuacc

SEQ ID NO: 759216 - RNA, 19 nt, Artificial Sequence
  Description of Artificial Sequence: Synthetic oligonucleotide
  Sense strand starting at position 212 of SEQ ID NO: 587001
cuugaagcuguguaauaau

SEQ ID NO: 759217 - RNA, 19 nt, Artificial Sequence
  Description of Artificial Sequence: Synthetic oligonucleotide
  Antisense strand to SEQ ID NO: 759216
auuauuacacagcuucaag

SEQ ID NO: 759218 - RNA, 19 nt, Artificial Sequence
  Description of Artificial Sequence: Synthetic oligonucleotide
  Sense strand starting at position 315 of SEQ ID NO: 587001
gggcauuugacuugcugua

SEQ ID NO: 759219 - RNA, 19 nt, Artificial Sequence
  Description of Artificial Sequence: Synthetic oligonucleotide
  Antisense strand to SEQ ID NO: 759218
uacagcaagucaaaugccc

SEQ ID NO: 759220 - RNA, 19 nt, Artificial Sequence
  Description of Artificial Sequence: Synthetic oligonucleotide
  Sense strand starting at position 317 of SEQ ID NO: 587001
gcauuugacuugcuguaca

SEQ ID NO: 759221 - RNA, 19 nt, Artificial Sequence
  Description of Artificial Sequence: Synthetic oligonucleotide
  Antisense strand to SEQ ID NO: 759220
uguacagcaagucaaaugc

SEQ ID NO: 759222 - RNA, 19 nt, Artificial Sequence
  Description of Artificial Sequence: Synthetic oligonucleotide
  Sense strand starting at position 320 of SEQ ID NO: 587001
uuugacuugcuguacacau

SEQ ID NO: 759223 - RNA, 19 nt, Artificial Sequence
  Description of Artificial Sequence: Synthetic oligonucleotide
  Antisense strand to SEQ ID NO: 759222
auguguacagcaagucaaa

SEQ ID NO: 759224 - RNA, 19 nt, Artificial Sequence
  Description of Artificial Sequence: Synthetic oligonucleotide
  Sense strand starting at position 455 of SEQ ID NO: 587001
uguugugcuauguuacuuu

SEQ ID NO: 759225 - RNA, 19 nt, Artificial Sequence
  Description of Artificial Sequence: Synthetic oligonucleotide
  Antisense strand to SEQ ID NO: 759224
aaaguaacauagcacaaca

SEQ ID NO: 759226 - RNA, 19 nt, Artificial Sequence
  Description of Artificial Sequence: Synthetic oligonucleotide
  Sense strand starting at position 652 of SEQ ID NO: 587001
uuuguaagcccacaucuga

SEQ ID NO: 759227 - RNA, 19 nt, Artificial Sequence
  Description of Artificial Sequence: Synthetic oligonucleotide
  Antisense strand to SEQ ID NO: 759226
ucagaugugggcuuacaaa

SEQ ID NO: 759228 - RNA, 19 nt, Artificial Sequence
  Description of Artificial Sequence: Synthetic oligonucleotide
  Sense strand starting at position 786 of SEQ ID NO: 587001
ucuaguuuauuccuuauga

SEQ ID NO: 759229 - RNA, 19 nt, Artificial Sequence
  Description of Artificial Sequence: Synthetic oligonucleotide
  Antisense strand to SEQ ID NO: 759228
ucauaaggaauaaacuaga

SEQ ID NO: 759230 - RNA, 19 nt, Artificial Sequence
  Description of Artificial Sequence: Synthetic oligonucleotide
  Sense strand starting at position 787 of SEQ ID NO: 587001
cuaguuuauuccuuaugac

SEQ ID NO: 759231 - RNA, 19 nt, Artificial Sequence
  Description of Artificial Sequence: Synthetic oligonucleotide
  Antisense strand to SEQ ID NO: 759230
gucauaaggaauaaacuag

SEQ ID NO: 759232 - RNA, 19 nt, Artificial Sequence
  Description of Artificial Sequence: Synthetic oligonucleotide
  Sense strand starting at position 824 of SEQ ID NO: 587001
guauauacauggucauccu

SEQ ID NO: 759233 - RNA, 19 nt, Artificial Sequence
  Description of Artificial Sequence: Synthetic oligonucleotide
  Antisense strand to SEQ ID NO: 759232
aggaugaccauguauauac

SEQ ID NO: 759234 - RNA, 19 nt, Artificial Sequence
  Description of Artificial Sequence: Synthetic oligonucleotide
  Sense strand starting at position 913 of SEQ ID NO: 587001
ggcucuuauuuccuugacu

SEQ ID NO: 759235 - RNA, 19 nt, Artificial Sequence
  Description of Artificial Sequence: Synthetic oligonucleotide
  Antisense strand to SEQ ID NO: 759234
agucaaggaaauaagagcc

SEQ ID NO: 759236 - RNA, 19 nt, Artificial Sequence
  Description of Artificial Sequence: Synthetic oligonucleotide
  Sense strand starting at position 926 of SEQ ID NO: 587001
uugacuuacucauuggaga

SEQ ID NO: 759237 - RNA, 19 nt, Artificial Sequence
  Description of Artificial Sequence: Synthetic oligonucleotide
  Antisense strand to SEQ ID NO: 759236
ucuccaaugaguaagucaa

SEQ ID NO: 759238 - RNA, 19 nt, Artificial Sequence
  Description of Artificial Sequence: Synthetic oligonucleotide
  Sense strand starting at position 927 of SEQ ID NO: 587001
ugacuuacucauuggagac

SEQ ID NO: 759239 - RNA, 19 nt, Artificial Sequence
  Description of Artificial Sequence: Synthetic oligonucleotide
  Antisense strand to SEQ ID NO: 759238
gucuccaaugaguaaguca

SEQ ID NO: 759240 - RNA, 19 nt, Artificial Sequence
  Description of Artificial Sequence: Synthetic oligonucleotide
  Sense strand starting at position 984 of SEQ ID NO: 587001
gccugaaaucuccaagcac

SEQ ID NO: 759241 - RNA, 19 nt, Artificial Sequence
  Description of Artificial Sequence: Synthetic oligonucleotide
  Antisense strand to SEQ ID NO: 759240
gugcuuggagauuucaggc

SEQ ID NO: 759242 - RNA, 19 nt, Artificial Sequence
  Description of Artificial Sequence: Synthetic oligonucleotide
  Sense strand starting at position 1063 of SEQ ID NO: 587001
aaagaaaucugauccguug

SEQ ID NO: 759243 - RNA, 19 nt, Artificial Sequence
  Description of Artificial Sequence: Synthetic oligonucleotide
  Antisense strand to SEQ ID NO: 759242
caacggaucagauuucuuu

SEQ ID NO: 759244 - RNA, 19 nt, Artificial Sequence
  Description of Artificial Sequence: Synthetic oligonucleotide
  Sense strand starting at position 1140 of SEQ ID NO: 587001
ucuuuaaaccgaggcuaga

SEQ ID NO: 759245 - RNA, 19 nt, Artificial Sequence
  Description of Artificial Sequence: Synthetic oligonucleotide
  Antisense strand to SEQ ID NO: 759244
ucuagccucgguuuaaaga

SEQ ID NO: 759246 - RNA, 19 nt, Artificial Sequence
  Description of Artificial Sequence: Synthetic oligonucleotide
  Sense strand starting at position 1356 of SEQ ID NO: 587001
agaccagucuauccacuua

SEQ ID NO: 759247 - RNA, 19 nt, Artificial Sequence
  Description of Artificial Sequence: Synthetic oligonucleotide
  Antisense strand to SEQ ID NO: 759246
uaaguggauagacuggucu

SEQ ID NO: 759248 - RNA, 19 nt, Artificial Sequence
  Description of Artificial Sequence: Synthetic oligonucleotide
  Sense strand starting at position 1420 of SEQ ID NO: 587001
ugaccucuuucugugacau

SEQ ID NO: 759249 - RNA, 19 nt, Artificial Sequence
  Description of Artificial Sequence: Synthetic oligonucleotide
  Antisense strand to SEQ ID NO: 759248
augucacagaaagagguca

SEQ ID NO: 759250 - RNA, 19 nt, Artificial Sequence
  Description of Artificial Sequence: Synthetic oligonucleotide
  Sense strand starting at position 1487 of SEQ ID NO: 587001
cccauucgccuggaaaugu

SEQ ID NO: 759251 - RNA, 19 nt, Artificial Sequence
  Description of Artificial Sequence: Synthetic oligonucleotide
  Antisense strand to SEQ ID NO: 759250
acauuuccaggcgaauggg

SEQ ID NO: 759252 - RNA, 19 nt, Artificial Sequence
  Description of Artificial Sequence: Synthetic oligonucleotide
  Sense strand starting at position 1852 of SEQ ID NO: 587001
aaagguccugaaugaguua

SEQ ID NO: 759253 - RNA, 19 nt, Artificial Sequence
  Description of Artificial Sequence: Synthetic oligonucleotide
  Antisense strand to SEQ ID NO: 759252
uaacucauucaggaccuuu

SEQ ID NO: 759254 - RNA, 19 nt, Artificial Sequence
  Description of Artificial Sequence: Synthetic oligonucleotide
  Sense strand starting at position 2101 of SEQ ID NO: 587001
gaagaaccauguuugucuu

SEQ ID NO: 759255 - RNA, 19 nt, Artificial Sequence
  Description of Artificial Sequence: Synthetic oligonucleotide
  Antisense strand to SEQ ID NO: 759254
aagacaaacaugguucuuc

SEQ ID NO: 759256 - RNA, 19 nt, Artificial Sequence
  Description of Artificial Sequence: Synthetic oligonucleotide
  Sense strand starting at position 2151 of SEQ ID NO: 587001
aguguaacuaaggaugcaa

SEQ ID NO: 759257 - RNA, 19 nt, Artificial Sequence
  Description of Artificial Sequence: Synthetic oligonucleotide
  Antisense strand to SEQ ID NO: 759256
uugcauccuuaguuacacu

SEQ ID NO: 759258 - RNA, 19 nt, Artificial Sequence
  Description of Artificial Sequence: Synthetic oligonucleotide
  Sense strand starting at position 2153 of SEQ ID NO: 587001
uguaacuaaggaugcaaua

SEQ ID NO: 759259 - RNA, 19 nt, Artificial Sequence
  Description of Artificial Sequence: Synthetic oligonucleotide
  Antisense strand to SEQ ID NO: 759258
uauugcauccuuaguuaca

SEQ ID NO: 759260 - RNA, 19 nt, Artificial Sequence
  Description of Artificial Sequence: Synthetic oligonucleotide
  Sense strand starting at position 2314 of SEQ ID NO: 587001
augucucaguuaccucaau

SEQ ID NO: 759261 - RNA, 19 nt, Artificial Sequence
  Description of Artificial Sequence: Synthetic oligonucleotide
  Antisense strand to SEQ ID NO: 759260
auugagguaacugagacau

SEQ ID NO: 759262 - RNA, 19 nt, Artificial Sequence
  Description of Artificial Sequence: Synthetic oligonucleotide
  Sense strand starting at position 2592 of SEQ ID NO: 587001
ugcacaauuugcucaaguu

SEQ ID NO: 759263 - RNA, 19 nt, Artificial Sequence
  Description of Artificial Sequence: Synthetic oligonucleotide
  Antisense strand to SEQ ID NO: 759262
aacuugagcaaauugugca

SEQ ID NO: 759264 - RNA, 19 nt, Artificial Sequence
  Description of Artificial Sequence: Synthetic oligonucleotide
  Sense strand starting at position 2610 of SEQ ID NO: 587001
ugucauucucaauauuguc

SEQ ID NO: 759265 - RNA, 19 nt, Artificial Sequence
  Description of Artificial Sequence: Synthetic oligonucleotide
  Antisense strand to SEQ ID NO: 759264
gacaauauugagaaugaca

SEQ ID NO: 759266 - RNA, 19 nt, Artificial Sequence
  Description of Artificial Sequence: Synthetic oligonucleotide
  Sense strand starting at position 3027 of SEQ ID NO: 587001
cuauacugaugagcgauaa

SEQ ID NO: 759267 - RNA, 19 nt, Artificial Sequence
  Description of Artificial Sequence: Synthetic oligonucleotide
  Antisense strand to SEQ ID NO: 759266
uuaucgcucaucaguauag

SEQ ID NO: 759268 - RNA, 19 nt, Artificial Sequence
  Description of Artificial Sequence: Synthetic oligonucleotide
  Sense strand starting at position 3028 of SEQ ID NO: 587001
uauacugaugagcgauaau

SEQ ID NO: 759269 - RNA, 19 nt, Artificial Sequence
  Description of Artificial Sequence: Synthetic oligonucleotide
  Antisense strand to SEQ ID NO: 759268
auuaucgcucaucaguaua

SEQ ID NO: 759270 - RNA, 19 nt, Artificial Sequence
  Description of Artificial Sequence: Synthetic oligonucleotide
  Sense strand starting at position 3058 of SEQ ID NO: 587001
uggacugucuuuccaucua

SEQ ID NO: 759271 - RNA, 19 nt, Artificial Sequence
  Description of Artificial Sequence: Synthetic oligonucleotide
  Antisense strand to SEQ ID NO: 759270
uagauggaaagacagucca

SEQ ID NO: 759272 - RNA, 19 nt, Artificial Sequence
  Description of Artificial Sequence: Synthetic oligonucleotide
  Sense strand starting at position 3082 of SEQ ID NO: 587001
cuaacugcccgaggaguaa

SEQ ID NO: 759273 - RNA, 19 nt, Artificial Sequence
  Description of Artificial Sequence: Synthetic oligonucleotide
  Antisense strand to SEQ ID NO: 759272
uuacuccucgggcaguuag

SEQ ID NO: 759274 - RNA, 19 nt, Artificial Sequence
  Description of Artificial Sequence: Synthetic oligonucleotide
  Sense strand starting at position 3253 of SEQ ID NO: 587001
aaagauaauuuaggacagu

SEQ ID NO: 759275 - RNA, 19 nt, Artificial Sequence
  Description of Artificial Sequence: Synthetic oligonucleotide
  Antisense strand to SEQ ID NO: 759274
acuguccuaaauuaucuuu

SEQ ID NO: 759276 - RNA, 19 nt, Artificial Sequence
  Description of Artificial Sequence: Synthetic oligonucleotide
  Sense strand starting at position 3317 of SEQ ID NO: 587001
acgauuacauuacugggaa

SEQ ID NO: 759277 - RNA, 19 nt, Artificial Sequence
  Description of Artificial Sequence: Synthetic oligonucleotide
  Antisense strand to SEQ ID NO: 759276
uucccaguaauguaaucgu

SEQ ID NO: 759278 - RNA, 19 nt, Artificial Sequence
  Description of Artificial Sequence: Synthetic oligonucleotide
  Sense strand starting at position 3354 of SEQ ID NO: 587001
agaaauaccuguucgcaaa

SEQ ID NO: 759279 - RNA, 19 nt, Artificial Sequence
  Description of Artificial Sequence: Synthetic oligonucleotide
  Antisense strand to SEQ ID NO: 759278
uuugcgaacagguauuucu

SEQ ID NO: 759280 - RNA, 19 nt, Artificial Sequence
  Description of Artificial Sequence: Synthetic oligonucleotide
  Sense strand starting at position 3355 of SEQ ID NO: 587001
gaaauaccuguucgcaaag

SEQ ID NO: 759281 - RNA, 19 nt, Artificial Sequence
  Description of Artificial Sequence: Synthetic oligonucleotide
  Antisense strand to SEQ ID NO: 759280
cuuugcgaacagguauuuc

SEQ ID NO: 759282 - RNA, 19 nt, Artificial Sequence
  Description of Artificial Sequence: Synthetic oligonucleotide
  Sense strand starting at position 3378 of SEQ ID NO: 587001
acugcaugaucuuccauga

SEQ ID NO: 759283 - RNA, 19 nt, Artificial Sequence
  Description of Artificial Sequence: Synthetic oligonucleotide
  Antisense strand to SEQ ID NO: 759282
ucauggaagaucaugcagu

SEQ ID NO: 759284 - RNA, 19 nt, Artificial Sequence
  Description of Artificial Sequence: Synthetic oligonucleotide
  Sense strand starting at position 3476 of SEQ ID NO: 587001
acauccuaccugggacaau

SEQ ID NO: 759285 - RNA, 19 nt, Artificial Sequence
  Description of Artificial Sequence: Synthetic oligonucleotide
  Antisense strand to SEQ ID NO: 759284
auugucccagguaggaugu

SEQ ID NO: 759286 - RNA, 19 nt, Artificial Sequence
  Description of Artificial Sequence: Synthetic oligonucleotide
  Sense strand starting at position 17 of SEQ ID NO: 587002
aguguaacuaaggaugcaa

SEQ ID NO: 759287 - RNA, 19 nt, Artificial Sequence
  Description of Artificial Sequence: Synthetic oligonucleotide
  Antisense strand to SEQ ID NO: 759286
uugcauccuuaguuacacu

SEQ ID NO: 759288 - RNA, 19 nt, Artificial Sequence
  Description of Artificial Sequence: Synthetic oligonucleotide
  Sense strand starting at position 19 of SEQ ID NO: 587002
uguaacuaaggaugcaaua

SEQ ID NO: 759289 - RNA, 19 nt, Artificial Sequence
  Description of Artificial Sequence: Synthetic oligonucleotide
  Antisense strand to SEQ ID NO: 759288
uauugcauccuuaguuaca

SEQ ID NO: 759290 - RNA, 19 nt, Artificial Sequence
  Description of Artificial Sequence: Synthetic oligonucleotide
  Sense strand starting at position 180 of SEQ ID NO: 587002
augucucaguuaccucaau

SEQ ID NO: 759291 - RNA, 19 nt, Artificial Sequence
  Description of Artificial Sequence: Synthetic oligonucleotide
  Antisense strand to SEQ ID NO: 759290
auugagguaacugagacau

SEQ ID NO: 759292 - RNA, 19 nt, Artificial Sequence
  Description of Artificial Sequence: Synthetic oligonucleotide
  Sense strand starting at position 458 of SEQ ID NO: 587002
ugcacaauuugcucaaguu

SEQ ID NO: 759293 - RNA, 19 nt, Artificial Sequence
  Description of Artificial Sequence: Synthetic oligonucleotide
  Antisense strand to SEQ ID NO: 759292
aacuugagcaaauugugca

SEQ ID NO: 759294 - RNA, 19 nt, Artificial Sequence
  Description of Artificial Sequence: Synthetic oligonucleotide
  Sense strand starting at position 476 of SEQ ID NO: 587002
ugucauucucaauauuguc

SEQ ID NO: 759295 - RNA, 19 nt, Artificial Sequence
  Description of Artificial Sequence: Synthetic oligonucleotide
  Antisense strand to SEQ ID NO: 759294
gacaauauugagaaugaca

SEQ ID NO: 759296 - RNA, 19 nt, Artificial Sequence
  Description of Artificial Sequence: Synthetic oligonucleotide
  Sense strand starting at position 893 of SEQ ID NO: 587002
cuauacugaugagcgauaa

SEQ ID NO: 759297 - RNA, 19 nt, Artificial Sequence
  Description of Artificial Sequence: Synthetic oligonucleotide
  Antisense strand to SEQ ID NO: 759296
uuaucgcucaucaguauag

SEQ ID NO: 759298 - RNA, 19 nt, Artificial Sequence
  Description of Artificial Sequence: Synthetic oligonucleotide
  Sense strand starting at position 894 of SEQ ID NO: 587002
uauacugaugagcgauaau

SEQ ID NO: 759299 - RNA, 19 nt, Artificial Sequence
  Description of Artificial Sequence: Synthetic oligonucleotide
  Antisense strand to SEQ ID NO: 759298
auuaucgcucaucaguaua

SEQ ID NO: 759300 - RNA, 19 nt, Artificial Sequence
  Description of Artificial Sequence: Synthetic oligonucleotide
  Sense strand starting at position 924 of SEQ ID NO: 587002
uggacugucuuuccaucua

SEQ ID NO: 759301 - RNA, 19 nt, Artificial Sequence
  Description of Artificial Sequence: Synthetic oligonucleotide
  Antisense strand to SEQ ID NO: 759300
uagauggaaagacagucca

SEQ ID NO: 759302 - RNA, 19 nt, Artificial Sequence
  Description of Artificial Sequence: Synthetic oligonucleotide
  Sense strand starting at position 948 of SEQ ID NO: 587002
cuaacugcccgaggaguaa

SEQ ID NO: 759303 - RNA, 19 nt, Artificial Sequence
  Description of Artificial Sequence: Synthetic oligonucleotide
  Antisense strand to SEQ ID NO: 759302
uuacuccucgggcaguuag

SEQ ID NO: 759304 - RNA, 19 nt, Artificial Sequence
  Description of Artificial Sequence: Synthetic oligonucleotide
  Sense strand starting at position 1119 of SEQ ID NO: 587002
aaagauaauuuaggacagu

SEQ ID NO: 759305 - RNA, 19 nt, Artificial Sequence
  Description of Artificial Sequence: Synthetic oligonucleotide
  Antisense strand to SEQ ID NO: 759304
acuguccuaaauuaucuuu

SEQ ID NO: 759306 - RNA, 19 nt, Artificial Sequence
  Description of Artificial Sequence: Synthetic oligonucleotide
  Sense strand starting at position 1183 of SEQ ID NO: 587002
acgauuacauuacugggaa

SEQ ID NO: 759307 - RNA, 19 nt, Artificial Sequence
  Description of Artificial Sequence: Synthetic oligonucleotide
  Antisense strand to SEQ ID NO: 759306
uucccaguaauguaaucgu

SEQ ID NO: 759308 - RNA, 19 nt, Artificial Sequence
  Description of Artificial Sequence: Synthetic oligonucleotide
  Sense strand starting at position 1220 of SEQ ID NO: 587002
agaaauaccuguucgcaaa

SEQ ID NO: 759309 - RNA, 19 nt, Artificial Sequence
  Description of Artificial Sequence: Synthetic oligonucleotide
  Antisense strand to SEQ ID NO: 759308
uuugcgaacagguauuucu

SEQ ID NO: 759310 - RNA, 19 nt, Artificial Sequence
  Description of Artificial Sequence: Synthetic oligonucleotide
  Sense strand starting at position 1221 of SEQ ID NO: 587002
gaaauaccuguucgcaaag

SEQ ID NO: 759311 - RNA, 19 nt, Artificial Sequence
  Description of Artificial Sequence: Synthetic oligonucleotide
  Antisense strand to SEQ ID NO: 759310
cuuugcgaacagguauuuc

SEQ ID NO: 759312 - RNA, 19 nt, Artificial Sequence
  Description of Artificial Sequence: Synthetic oligonucleotide
  Sense strand starting at position 1244 of SEQ ID NO: 587002
acugcaugaucuuccauga

SEQ ID NO: 759313 - RNA, 19 nt, Artificial Sequence
  Description of Artificial Sequence: Synthetic oligonucleotide
  Antisense strand to SEQ ID NO: 759312
ucauggaagaucaugcagu

SEQ ID NO: 759314 - RNA, 19 nt, Artificial Sequence
  Description of Artificial Sequence: Synthetic oligonucleotide
  Sense strand starting at position 1342 of SEQ ID NO: 587002
acauccuaccugggacaau

SEQ ID NO: 759315 - RNA, 19 nt, Artificial Sequence
  Description of Artificial Sequence: Synthetic oligonucleotide
  Antisense strand to SEQ ID NO: 759314
auugucccagguaggaugu

SEQ ID NO: 759316 - RNA, 19 nt, Artificial Sequence
  Description of Artificial Sequence: Synthetic oligonucleotide
  Sense strand starting at position 2178 of SEQ ID NO: 587002
uggucuuccggagauucuu

SEQ ID NO: 759317 - RNA, 19 nt, Artificial Sequence
  Description of Artificial Sequence: Synthetic oligonucleotide
  Antisense strand to SEQ ID NO: 759316
aagaaucuccggaagacca

SEQ ID NO: 759318 - RNA, 19 nt, Artificial Sequence
  Description of Artificial Sequence: Synthetic oligonucleotide
  Sense strand starting at position 2184 of SEQ ID NO: 587002
uccggagauucuuucugaa

SEQ ID NO: 759319 - RNA, 19 nt, Artificial Sequence
  Description of Artificial Sequence: Synthetic oligonucleotide
  Antisense strand to SEQ ID NO: 759318
uucagaaagaaucuccgga

SEQ ID NO: 759320 - RNA, 19 nt, Artificial Sequence
  Description of Artificial Sequence: Synthetic oligonucleotide
  Sense strand starting at position 2186 of SEQ ID NO: 587002
cggagauucuuucugaagc

SEQ ID NO: 759321 - RNA, 19 nt, Artificial Sequence
  Description of Artificial Sequence: Synthetic oligonucleotide
  Antisense strand to SEQ ID NO: 759320
gcuucagaaagaaucuccg

SEQ ID NO: 759322 - RNA, 19 nt, Artificial Sequence
  Description of Artificial Sequence: Synthetic oligonucleotide
  Sense strand starting at position 2203 of SEQ ID NO: 587002
gcagcuuuagaauagucaa

SEQ ID NO: 759323 - RNA, 19 nt, Artificial Sequence
  Description of Artificial Sequence: Synthetic oligonucleotide
  Antisense strand to SEQ ID NO: 759322
uugacuauucuaaagcugc

SEQ ID NO: 759324 - RNA, 19 nt, Artificial Sequence
  Description of Artificial Sequence: Synthetic oligonucleotide
  Sense strand starting at position 2262 of SEQ ID NO: 587002
accuuuccgcucuagaaau

SEQ ID NO: 759325 - RNA, 19 nt, Artificial Sequence
  Description of Artificial Sequence: Synthetic oligonucleotide
  Antisense strand to SEQ ID NO: 759324
auuucuagagcggaaaggu

SEQ ID NO: 759326 - RNA, 19 nt, Artificial Sequence
  Description of Artificial Sequence: Synthetic oligonucleotide
  Sense strand starting at position 2437 of SEQ ID NO: 587002
uagacuguguccuuggaau

SEQ ID NO: 759327 - RNA, 19 nt, Artificial Sequence
  Description of Artificial Sequence: Synthetic oligonucleotide
  Antisense strand to SEQ ID NO: 759326
auuccaaggacacagucua

SEQ ID NO: 759328 - RNA, 19 nt, Artificial Sequence
  Description of Artificial Sequence: Synthetic oligonucleotide
  Sense strand starting at position 2439 of SEQ ID NO: 587002
gacuguguccuuggaauaa

SEQ ID NO: 759329 - RNA, 19 nt, Artificial Sequence
  Description of Artificial Sequence: Synthetic oligonucleotide
  Antisense strand to SEQ ID NO: 759328
uuauuccaaggacacaguc

SEQ ID NO: 759330 - RNA, 19 nt, Artificial Sequence
  Description of Artificial Sequence: Synthetic oligonucleotide
  Sense strand starting at position 2525 of SEQ ID NO: 587002
agagauuauucuguugacu

SEQ ID NO: 759331 - RNA, 19 nt, Artificial Sequence
  Description of Artificial Sequence: Synthetic oligonucleotide
  Antisense strand to SEQ ID NO: 759330
agucaacagaauaaucucu

SEQ ID NO: 759332 - RNA, 19 nt, Artificial Sequence
  Description of Artificial Sequence: Synthetic oligonucleotide
  Sense strand starting at position 2961 of SEQ ID NO: 587002
gggucuuagaucgaucacu

SEQ ID NO: 759333 - RNA, 19 nt, Artificial Sequence
  Description of Artificial Sequence: Synthetic oligonucleotide
  Antisense strand to SEQ ID NO: 759332
agugaucgaucuaagaccc

SEQ ID NO: 759334 - RNA, 19 nt, Artificial Sequence
  Description of Artificial Sequence: Synthetic oligonucleotide
  Sense strand starting at position 3015 of SEQ ID NO: 587002
agauuaaccuuuguaaaug

SEQ ID NO: 759335 - RNA, 19 nt, Artificial Sequence
  Description of Artificial Sequence: Synthetic oligonucleotide
  Antisense strand to SEQ ID NO: 759334
cauuuacaaagguuaaucu

SEQ ID NO: 759336 - RNA, 19 nt, Artificial Sequence
  Description of Artificial Sequence: Synthetic oligonucleotide
  Sense strand starting at position 3041 of SEQ ID NO: 587002
ggaaauacauccuuuguuu

SEQ ID NO: 759337 - RNA, 19 nt, Artificial Sequence
  Description of Artificial Sequence: Synthetic oligonucleotide
  Antisense strand to SEQ ID NO: 759336
aaacaaaggauguauuucc

SEQ ID NO: 759338 - RNA, 19 nt, Artificial Sequence
  Description of Artificial Sequence: Synthetic oligonucleotide
  Sense strand starting at position 3050 of SEQ ID NO: 587002
uccuuuguuugacuugaaa

SEQ ID NO: 759339 - RNA, 19 nt, Artificial Sequence
  Description of Artificial Sequence: Synthetic oligonucleotide
  Antisense strand to SEQ ID NO: 759338
uuucaagucaaacaaagga

SEQ ID NO: 759340 - RNA, 19 nt, Artificial Sequence
  Description of Artificial Sequence: Synthetic oligonucleotide
  Sense strand starting at position 3053 of SEQ ID NO: 587002
uuuguuugacuugaaaugu

SEQ ID NO: 759341 - RNA, 19 nt, Artificial Sequence
  Description of Artificial Sequence: Synthetic oligonucleotide
  Antisense strand to SEQ ID NO: 759340
acauuucaagucaaacaaa

SEQ ID NO: 759342 - RNA, 19 nt, Artificial Sequence
  Description of Artificial Sequence: Synthetic oligonucleotide
  Sense strand starting at position 3086 of SEQ ID NO: 587002
cgccaaauauuauuaaggu

SEQ ID NO: 759343 - RNA, 19 nt, Artificial Sequence
  Description of Artificial Sequence: Synthetic oligonucleotide
  Antisense strand to SEQ ID NO: 759342
accuuaauaauauuuggcg

SEQ ID NO: 759344 - RNA, 19 nt, Artificial Sequence
  Description of Artificial Sequence: Synthetic oligonucleotide
  Sense strand starting at position 3107 of SEQ ID NO: 587002
aaaguuuaggcagaagcua

SEQ ID NO: 759345 - RNA, 19 nt, Artificial Sequence
  Description of Artificial Sequence: Synthetic oligonucleotide
  Antisense strand to SEQ ID NO: 759344
uagcuucugccuaaacuuu

SEQ ID NO: 759346 - RNA, 19 nt, Artificial Sequence
  Description of Artificial Sequence: Synthetic oligonucleotide
  Sense strand starting at position 3165 of SEQ ID NO: 587002
cugguagaauacuuuccau

SEQ ID NO: 759347 - RNA, 19 nt, Artificial Sequence
  Description of Artificial Sequence: Synthetic oligonucleotide
  Antisense strand to SEQ ID NO: 759346
auggaaaguauucuaccag

SEQ ID NO: 759348 - RNA, 19 nt, Artificial Sequence
  Description of Artificial Sequence: Synthetic oligonucleotide
  Sense strand starting at position 3281 of SEQ ID NO: 587002
guaguuccucuggagaacu

SEQ ID NO: 759349 - RNA, 19 nt, Artificial Sequence
  Description of Artificial Sequence: Synthetic oligonucleotide
  Antisense strand to SEQ ID NO: 759348
aguucuccagaggaacuac

SEQ ID NO: 759350 - RNA, 19 nt, Artificial Sequence
  Description of Artificial Sequence: Synthetic oligonucleotide
  Sense strand starting at position 3312 of SEQ ID NO: 587002
ucaugaaucuuagcaguua

SEQ ID NO: 759351 - RNA, 19 nt, Artificial Sequence
  Description of Artificial Sequence: Synthetic oligonucleotide
  Antisense strand to SEQ ID NO: 759350
uaacugcuaagauucauga

SEQ ID NO: 759352 - RNA, 19 nt, Artificial Sequence
  Description of Artificial Sequence: Synthetic oligonucleotide
  Sense strand starting at position 3557 of SEQ ID NO: 587002
gagaaucagugagucaaca

SEQ ID NO: 759353 - RNA, 19 nt, Artificial Sequence
  Description of Artificial Sequence: Synthetic oligonucleotide
  Antisense strand to SEQ ID NO: 759352
uguugacucacugauucuc

SEQ ID NO: 759354 - RNA, 19 nt, Artificial Sequence
  Description of Artificial Sequence: Synthetic oligonucleotide
  Sense strand starting at position 3674 of SEQ ID NO: 587002
agaagacuguugguguuaa

SEQ ID NO: 759355 - RNA, 19 nt, Artificial Sequence
  Description of Artificial Sequence: Synthetic oligonucleotide
  Antisense strand to SEQ ID NO: 759354
uuaacaccaacagucuucu

SEQ ID NO: 759356 - RNA, 19 nt, Artificial Sequence
  Description of Artificial Sequence: Synthetic oligonucleotide
  Sense strand starting at position 3797 of SEQ ID NO: 587002
ugaggugcucucugagaaa

SEQ ID NO: 759357 - RNA, 19 nt, Artificial Sequence
  Description of Artificial Sequence: Synthetic oligonucleotide
  Antisense strand to SEQ ID NO: 759356
uuucucagagagcaccuca

SEQ ID NO: 759358 - RNA, 19 nt, Artificial Sequence
  Description of Artificial Sequence: Synthetic oligonucleotide
  Sense strand starting at position 3809 of SEQ ID NO: 587002
ugagaaaucucuucuguuc

SEQ ID NO: 759359 - RNA, 19 nt, Artificial Sequence
  Description of Artificial Sequence: Synthetic oligonucleotide
  Antisense strand to SEQ ID NO: 759358
gaacagaagagauuucuca

SEQ ID NO: 759360 - RNA, 19 nt, Artificial Sequence
  Description of Artificial Sequence: Synthetic oligonucleotide
  Sense strand starting at position 3818 of SEQ ID NO: 587002
ucuucuguucccuaaagua

SEQ ID NO: 759361 - RNA, 19 nt, Artificial Sequence
  Description of Artificial Sequence: Synthetic oligonucleotide
  Antisense strand to SEQ ID NO: 759360
uacuuuagggaacagaaga

SEQ ID NO: 759362 - RNA, 19 nt, Artificial Sequence
  Description of Artificial Sequence: Synthetic oligonucleotide
  Sense strand starting at position 3833 of SEQ ID NO: 587002
aguaguaagugacucaacu

SEQ ID NO: 759363 - RNA, 19 nt, Artificial Sequence
  Description of Artificial Sequence: Synthetic oligonucleotide
  Antisense strand to SEQ ID NO: 759362
aguugagucacuuacuacu

SEQ ID NO: 759364 - RNA, 19 nt, Artificial Sequence
  Description of Artificial Sequence: Synthetic oligonucleotide
  Sense strand starting at position 3938 of SEQ ID NO: 587002
auaacuuuagagugguagu

SEQ ID NO: 759365 - RNA, 19 nt, Artificial Sequence
  Description of Artificial Sequence: Synthetic oligonucleotide
  Antisense strand to SEQ ID NO: 759364
acuaccacucuaaaguuau

SEQ ID NO: 759366 - RNA, 19 nt, Artificial Sequence
  Description of Artificial Sequence: Synthetic oligonucleotide
  Sense strand starting at position 9 of SEQ ID NO: 587003
gagugaccacuccaaguuu

SEQ ID NO: 759367 - RNA, 19 nt, Artificial Sequence
  Description of Artificial Sequence: Synthetic oligonucleotide
  Antisense strand to SEQ ID NO: 759366
aaacuuggaguggucacuc

SEQ ID NO: 759368 - RNA, 19 nt, Artificial Sequence
  Description of Artificial Sequence: Synthetic oligonucleotide
  Sense strand starting at position 348 of SEQ ID NO: 587003
agccuuggagccugauaaa

SEQ ID NO: 759369 - RNA, 19 nt, Artificial Sequence
  Description of Artificial Sequence: Synthetic oligonucleotide
  Antisense strand to SEQ ID NO: 759368
uuuaucaggcuccaaggcu

SEQ ID NO: 759370 - RNA, 19 nt, Artificial Sequence
  Description of Artificial Sequence: Synthetic oligonucleotide
  Sense strand starting at position 405 of SEQ ID NO: 587003
uugccaugcagguagaaua

SEQ ID NO: 759371 - RNA, 19 nt, Artificial Sequence
  Description of Artificial Sequence: Synthetic oligonucleotide
  Antisense strand to SEQ ID NO: 759370
uauucuaccugcauggcaa

SEQ ID NO: 759372 - RNA, 19 nt, Artificial Sequence
  Description of Artificial Sequence: Synthetic oligonucleotide
  Sense strand starting at position 416 of SEQ ID NO: 587003
guagaauacaugcagguca

SEQ ID NO: 759373 - RNA, 19 nt, Artificial Sequence
  Description of Artificial Sequence: Synthetic oligonucleotide
  Antisense strand to SEQ ID NO: 759372
ugaccugcauguauucuac

SEQ ID NO: 759374 - RNA, 19 nt, Artificial Sequence
  Description of Artificial Sequence: Synthetic oligonucleotide
  Sense strand starting at position 418 of SEQ ID NO: 587003
agaauacaugcaggucaaa

SEQ ID NO: 759375 - RNA, 19 nt, Artificial Sequence
  Description of Artificial Sequence: Synthetic oligonucleotide
  Antisense strand to SEQ ID NO: 759374
uuugaccugcauguauucu

SEQ ID NO: 759376 - RNA, 19 nt, Artificial Sequence
  Description of Artificial Sequence: Synthetic oligonucleotide
  Sense strand starting at position 582 of SEQ ID NO: 587003
gagugacauuuauaugacu

SEQ ID NO: 759377 - RNA, 19 nt, Artificial Sequence
  Description of Artificial Sequence: Synthetic oligonucleotide
  Antisense strand to SEQ ID NO: 759376
agucauauaaaugucacuc

SEQ ID NO: 759378 - RNA, 19 nt, Artificial Sequence
  Description of Artificial Sequence: Synthetic oligonucleotide
  Sense strand starting at position 657 of SEQ ID NO: 587003
agcugagaguauucucuga

SEQ ID NO: 759379 - RNA, 19 nt, Artificial Sequence
  Description of Artificial Sequence: Synthetic oligonucleotide
  Antisense strand to SEQ ID NO: 759378
ucagagaauacucucagcu

SEQ ID NO: 759380 - RNA, 19 nt, Artificial Sequence
  Description of Artificial Sequence: Synthetic oligonucleotide
  Sense strand starting at position 659 of SEQ ID NO: 587003
cugagaguauucucugaau

SEQ ID NO: 759381 - RNA, 19 nt, Artificial Sequence
  Description of Artificial Sequence: Synthetic oligonucleotide
  Antisense strand to SEQ ID NO: 759380
auucagagaauacucucag

SEQ ID NO: 759382 - RNA, 19 nt, Artificial Sequence
  Description of Artificial Sequence: Synthetic oligonucleotide
  Sense strand starting at position 661 of SEQ ID NO: 587003
gagaguauucucugaauga

SEQ ID NO: 759383 - RNA, 19 nt, Artificial Sequence
  Description of Artificial Sequence: Synthetic oligonucleotide
  Antisense strand to SEQ ID NO: 759382
ucauucagagaauacucuc

SEQ ID NO: 759384 - RNA, 19 nt, Artificial Sequence
  Description of Artificial Sequence: Synthetic oligonucleotide
  Sense strand starting at position 665 of SEQ ID NO: 587003
guauucucugaaugauaaa

SEQ ID NO: 759385 - RNA, 19 nt, Artificial Sequence
  Description of Artificial Sequence: Synthetic oligonucleotide
  Antisense strand to SEQ ID NO: 759384
uuuaucauucagagaauac

SEQ ID NO: 759386 - RNA, 19 nt, Artificial Sequence
  Description of Artificial Sequence: Synthetic oligonucleotide
  Sense strand starting at position 734 of SEQ ID NO: 587003
acuggagaguuuccuuaua

SEQ ID NO: 759387 - RNA, 19 nt, Artificial Sequence
  Description of Artificial Sequence: Synthetic oligonucleotide
  Antisense strand to SEQ ID NO: 759386
uauaaggaaacucuccagu

SEQ ID NO: 759388 - RNA, 19 nt, Artificial Sequence
  Description of Artificial Sequence: Synthetic oligonucleotide
  Sense strand starting at position 736 of SEQ ID NO: 587003
uggagaguuuccuuauaaa

SEQ ID NO: 759389 - RNA, 19 nt, Artificial Sequence
  Description of Artificial Sequence: Synthetic oligonucleotide
  Antisense strand to SEQ ID NO: 759388
uuuauaaggaaacucucca

SEQ ID NO: 759390 - RNA, 19 nt, Artificial Sequence
  Description of Artificial Sequence: Synthetic oligonucleotide
  Sense strand starting at position 866 of SEQ ID NO: 587003
cuuguuagaguugaacuuu

SEQ ID NO: 759391 - RNA, 19 nt, Artificial Sequence
  Description of Artificial Sequence: Synthetic oligonucleotide
  Antisense strand to SEQ ID NO: 759390
aaaguucaacucuaacaag

SEQ ID NO: 759392 - RNA, 19 nt, Artificial Sequence
  Description of Artificial Sequence: Synthetic oligonucleotide
  Sense strand starting at position 951 of SEQ ID NO: 587003
agguucuaguuauuauaga

SEQ ID NO: 759393 - RNA, 19 nt, Artificial Sequence
  Description of Artificial Sequence: Synthetic oligonucleotide
  Antisense strand to SEQ ID NO: 759392
ucuauaauaacuagaaccu

SEQ ID NO: 759394 - RNA, 19 nt, Artificial Sequence
  Description of Artificial Sequence: Synthetic oligonucleotide
  Sense strand starting at position 1673 of SEQ ID NO: 587003
ccuuaaacuccaggaaguu

SEQ ID NO: 759395 - RNA, 19 nt, Artificial Sequence
  Description of Artificial Sequence: Synthetic oligonucleotide
  Antisense strand to SEQ ID NO: 759394
aacuuccuggaguuuaagg

SEQ ID NO: 759396 - RNA, 19 nt, Artificial Sequence
  Description of Artificial Sequence: Synthetic oligonucleotide
  Sense strand starting at position 1719 of SEQ ID NO: 587003
ucaggugacuuuccucuaa

SEQ ID NO: 759397 - RNA, 19 nt, Artificial Sequence
  Description of Artificial Sequence: Synthetic oligonucleotide
  Antisense strand to SEQ ID NO: 759396
uuagaggaaagucaccuga

SEQ ID NO: 759398 - RNA, 19 nt, Artificial Sequence
  Description of Artificial Sequence: Synthetic oligonucleotide
  Sense strand starting at position 1721 of SEQ ID NO: 587003
aggugacuuuccucuaaag

SEQ ID NO: 759399 - RNA, 19 nt, Artificial Sequence
  Description of Artificial Sequence: Synthetic oligonucleotide
  Antisense strand to SEQ ID NO: 759398
cuuuagaggaaagucaccu

SEQ ID NO: 759400 - RNA, 19 nt, Artificial Sequence
  Description of Artificial Sequence: Synthetic oligonucleotide
  Sense strand starting at position 1723 of SEQ ID NO: 587003
gugacuuuccucuaaagug

SEQ ID NO: 759401 - RNA, 19 nt, Artificial Sequence
  Description of Artificial Sequence: Synthetic oligonucleotide
  Antisense strand to SEQ ID NO: 759400
cacuuuagaggaaagucac

SEQ ID NO: 759402 - RNA, 19 nt, Artificial Sequence
  Description of Artificial Sequence: Synthetic oligonucleotide
  Sense strand starting at position 1989 of SEQ ID NO: 587003
guggcucucgcugcuauaa

SEQ ID NO: 759403 - RNA, 19 nt, Artificial Sequence
  Description of Artificial Sequence: Synthetic oligonucleotide
  Antisense strand to SEQ ID NO: 759402
uuauagcagcgagagccac

SEQ ID NO: 759404 - RNA, 19 nt, Artificial Sequence
  Description of Artificial Sequence: Synthetic oligonucleotide
  Sense strand starting at position 2063 of SEQ ID NO: 587003
acuuguuuccuggaagagu

SEQ ID NO: 759405 - RNA, 19 nt, Artificial Sequence
  Description of Artificial Sequence: Synthetic oligonucleotide
  Antisense strand to SEQ ID NO: 759404
acucuuccaggaaacaagu

SEQ ID NO: 759406 - RNA, 19 nt, Artificial Sequence
  Description of Artificial Sequence: Synthetic oligonucleotide
  Sense strand starting at position 2264 of SEQ ID NO: 587003
gaaggaucucuuugaguag

SEQ ID NO: 759407 - RNA, 19 nt, Artificial Sequence
  Description of Artificial Sequence: Synthetic oligonucleotide
  Antisense strand to SEQ ID NO: 759406
cuacucaaagagauccuuc

SEQ ID NO: 759408 - RNA, 19 nt, Artificial Sequence
  Description of Artificial Sequence: Synthetic oligonucleotide
  Sense strand starting at position 2268 of SEQ ID NO: 587003
gaucucuuugaguagcuga

SEQ ID NO: 759409 - RNA, 19 nt, Artificial Sequence
  Description of Artificial Sequence: Synthetic oligonucleotide
  Antisense strand to SEQ ID NO: 759408
ucagcuacucaaagagauc

SEQ ID NO: 759410 - RNA, 19 nt, Artificial Sequence
  Description of Artificial Sequence: Synthetic oligonucleotide
  Sense strand starting at position 2271 of SEQ ID NO: 587003
cucuuugaguagcugagaa

SEQ ID NO: 759411 - RNA, 19 nt, Artificial Sequence
  Description of Artificial Sequence: Synthetic oligonucleotide
  Antisense strand to SEQ ID NO: 759410
uucucagcuacucaaagag

SEQ ID NO: 759412 - RNA, 19 nt, Artificial Sequence
  Description of Artificial Sequence: Synthetic oligonucleotide
  Sense strand starting at position 2331 of SEQ ID NO: 587003
cuugucucaguuuauagaa

SEQ ID NO: 759413 - RNA, 19 nt, Artificial Sequence
  Description of Artificial Sequence: Synthetic oligonucleotide
  Antisense strand to SEQ ID NO: 759412
uucuauaaacugagacaag

SEQ ID NO: 759414 - RNA, 19 nt, Artificial Sequence
  Description of Artificial Sequence: Synthetic oligonucleotide
  Sense strand starting at position 2395 of SEQ ID NO: 587003
gggcucauaacuuggaaga

SEQ ID NO: 759415 - RNA, 19 nt, Artificial Sequence
  Description of Artificial Sequence: Synthetic oligonucleotide
  Antisense strand to SEQ ID NO: 759414
ucuuccaaguuaugagccc

SEQ ID NO: 759416 - RNA, 19 nt, Artificial Sequence
  Description of Artificial Sequence: Synthetic oligonucleotide
  Sense strand starting at position 2396 of SEQ ID NO: 587003
ggcucauaacuuggaagau

SEQ ID NO: 759417 - RNA, 19 nt, Artificial Sequence
  Description of Artificial Sequence: Synthetic oligonucleotide
  Antisense strand to SEQ ID NO: 759416
aucuuccaaguuaugagcc

SEQ ID NO: 759418 - RNA, 19 nt, Artificial Sequence
  Description of Artificial Sequence: Synthetic oligonucleotide
  Sense strand starting at position 2502 of SEQ ID NO: 587003
ugugucuuucuacagagaa

SEQ ID NO: 759419 - RNA, 19 nt, Artificial Sequence
  Description of Artificial Sequence: Synthetic oligonucleotide
  Antisense strand to SEQ ID NO: 759418
uucucuguagaaagacaca

SEQ ID NO: 759420 - RNA, 19 nt, Artificial Sequence
  Description of Artificial Sequence: Synthetic oligonucleotide
  Sense strand starting at position 2617 of SEQ ID NO: 587003
cccagagucuucccaauga

SEQ ID NO: 759421 - RNA, 19 nt, Artificial Sequence
  Description of Artificial Sequence: Synthetic oligonucleotide
  Antisense strand to SEQ ID NO: 759420
ucauugggaagacucuggg

SEQ ID NO: 759422 - RNA, 19 nt, Artificial Sequence
  Description of Artificial Sequence: Synthetic oligonucleotide
  Sense strand starting at position 2856 of SEQ ID NO: 587003
uucucuauacaguaguuua

SEQ ID NO: 759423 - RNA, 19 nt, Artificial Sequence
  Description of Artificial Sequence: Synthetic oligonucleotide
  Antisense strand to SEQ ID NO: 759422
uaaacuacuguauagagaa

SEQ ID NO: 759424 - RNA, 19 nt, Artificial Sequence
  Description of Artificial Sequence: Synthetic oligonucleotide
  Sense strand starting at position 2952 of SEQ ID NO: 587003
cagucuucgagggaugaca

SEQ ID NO: 759425 - RNA, 19 nt, Artificial Sequence
  Description of Artificial Sequence: Synthetic oligonucleotide
  Antisense strand to SEQ ID NO: 759424
ugucaucccucgaagacug

SEQ ID NO: 759426 - RNA, 19 nt, Artificial Sequence
  Description of Artificial Sequence: Synthetic oligonucleotide
  Sense strand starting at position 3032 of SEQ ID NO: 587003
gggauuuauucugaggaau

SEQ ID NO: 759427 - RNA, 19 nt, Artificial Sequence
  Description of Artificial Sequence: Synthetic oligonucleotide
  Antisense strand to SEQ ID NO: 759426
auuccucagaauaaauccc

SEQ ID NO: 759428 - RNA, 19 nt, Artificial Sequence
  Description of Artificial Sequence: Synthetic oligonucleotide
  Sense strand starting at position 3045 of SEQ ID NO: 587003
aggaaugccucauuaagca

SEQ ID NO: 759429 - RNA, 19 nt, Artificial Sequence
  Description of Artificial Sequence: Synthetic oligonucleotide
  Antisense strand to SEQ ID NO: 759428
ugcuuaaugaggcauuccu

SEQ ID NO: 759430 - RNA, 19 nt, Artificial Sequence
  Description of Artificial Sequence: Synthetic oligonucleotide
  Sense strand starting at position 3076 of SEQ ID NO: 587003
uauucugaggaaugucuca

SEQ ID NO: 759431 - RNA, 19 nt, Artificial Sequence
  Description of Artificial Sequence: Synthetic oligonucleotide
  Antisense strand to SEQ ID NO: 759430
ugagacauuccucagaaua

SEQ ID NO: 759432 - RNA, 19 nt, Artificial Sequence
  Description of Artificial Sequence: Synthetic oligonucleotide
  Sense strand starting at position 3083 of SEQ ID NO: 587003
aggaaugucucaucaagca

SEQ ID NO: 759433 - RNA, 19 nt, Artificial Sequence
  Description of Artificial Sequence: Synthetic oligonucleotide
  Antisense strand to SEQ ID NO: 759432
ugcuugaugagacauuccu

SEQ ID NO: 759434 - RNA, 19 nt, Artificial Sequence
  Description of Artificial Sequence: Synthetic oligonucleotide
  Sense strand starting at position 3096 of SEQ ID NO: 587003
caagcaauuucgucauugu

SEQ ID NO: 759435 - RNA, 19 nt, Artificial Sequence
  Description of Artificial Sequence: Synthetic oligonucleotide
  Antisense strand to SEQ ID NO: 759434
acaaugacgaaauugcuug

SEQ ID NO: 759436 - RNA, 19 nt, Artificial Sequence
  Description of Artificial Sequence: Synthetic oligonucleotide
  Sense strand starting at position 3188 of SEQ ID NO: 587003
agccgauugcuccuagucu

SEQ ID NO: 759437 - RNA, 19 nt, Artificial Sequence
  Description of Artificial Sequence: Synthetic oligonucleotide
  Antisense strand to SEQ ID NO: 759436
agacuaggagcaaucggcu

SEQ ID NO: 759438 - RNA, 19 nt, Artificial Sequence
  Description of Artificial Sequence: Synthetic oligonucleotide
  Sense strand starting at position 3328 of SEQ ID NO: 587003
gguauaccuguauggaaca

SEQ ID NO: 759439 - RNA, 19 nt, Artificial Sequence
  Description of Artificial Sequence: Synthetic oligonucleotide
  Antisense strand to SEQ ID NO: 759438
uguuccauacagguauacc

SEQ ID NO: 759440 - RNA, 19 nt, Artificial Sequence
  Description of Artificial Sequence: Synthetic oligonucleotide
  Sense strand starting at position 3455 of SEQ ID NO: 587003
acauuuaggcuaugcuauu

SEQ ID NO: 759441 - RNA, 19 nt, Artificial Sequence
  Description of Artificial Sequence: Synthetic oligonucleotide
  Antisense strand to SEQ ID NO: 759440
aauagcauagccuaaaugu

SEQ ID NO: 759442 - RNA, 19 nt, Artificial Sequence
  Description of Artificial Sequence: Synthetic oligonucleotide
  Sense strand starting at position 3633 of SEQ ID NO: 587003
auccuuauucgauaagcuu

SEQ ID NO: 759443 - RNA, 19 nt, Artificial Sequence
  Description of Artificial Sequence: Synthetic oligonucleotide
  Antisense strand to SEQ ID NO: 759442
aagcuuaucgaauaaggau

SEQ ID NO: 759444 - RNA, 19 nt, Artificial Sequence
  Description of Artificial Sequence: Synthetic oligonucleotide
  Sense strand starting at position 3840 of SEQ ID NO: 587003
ucuggaauaucugcugaaa

SEQ ID NO: 759445 - RNA, 19 nt, Artificial Sequence
  Description of Artificial Sequence: Synthetic oligonucleotide
  Antisense strand to SEQ ID NO: 759444
uuucagcagauauuccaga

SEQ ID NO: 759446 - RNA, 19 nt, Artificial Sequence
  Description of Artificial Sequence: Synthetic oligonucleotide
  Sense strand starting at position 215 of SEQ ID NO: 587004
gaauguuuggaaugucgac

SEQ ID NO: 759447 - RNA, 19 nt, Artificial Sequence
  Description of Artificial Sequence: Synthetic oligonucleotide
  Antisense strand to SEQ ID NO: 759446
gucgacauuccaaacauuc

SEQ ID NO: 759448 - RNA, 19 nt, Artificial Sequence
  Description of Artificial Sequence: Synthetic oligonucleotide
  Sense strand starting at position 307 of SEQ ID NO: 587004
gggccuagcagugaaguaa

SEQ ID NO: 759449 - RNA, 19 nt, Artificial Sequence
  Description of Artificial Sequence: Synthetic oligonucleotide
  Antisense strand to SEQ ID NO: 759448
uuacuucacugcuaggccc

SEQ ID NO: 759450 - RNA, 19 nt, Artificial Sequence
  Description of Artificial Sequence: Synthetic oligonucleotide
  Sense strand starting at position 321 of SEQ ID NO: 587004
aguaaaucuuguuccugaa

SEQ ID NO: 759451 - RNA, 19 nt, Artificial Sequence
  Description of Artificial Sequence: Synthetic oligonucleotide
  Antisense strand to SEQ ID NO: 759450
uucaggaacaagauuuacu

SEQ ID NO: 759452 - RNA, 19 nt, Artificial Sequence
  Description of Artificial Sequence: Synthetic oligonucleotide
  Sense strand starting at position 325 of SEQ ID NO: 587004
aaucuuguuccugaaaggu

SEQ ID NO: 759453 - RNA, 19 nt, Artificial Sequence
  Description of Artificial Sequence: Synthetic oligonucleotide
  Antisense strand to SEQ ID NO: 759452
accuuucaggaacaagauu

SEQ ID NO: 759454 - RNA, 19 nt, Artificial Sequence
  Description of Artificial Sequence: Synthetic oligonucleotide
  Sense strand starting at position 371 of SEQ ID NO: 587004
uaaguaagacuuuguuaag

SEQ ID NO: 759455 - RNA, 19 nt, Artificial Sequence
  Description of Artificial Sequence: Synthetic oligonucleotide
  Antisense strand to SEQ ID NO: 759454
cuuaacaaagucuuacuua

SEQ ID NO: 759456 - RNA, 19 nt, Artificial Sequence
  Description of Artificial Sequence: Synthetic oligonucleotide
  Sense strand starting at position 448 of SEQ ID NO: 587004
ccuuaauauguguaaggca

SEQ ID NO: 759457 - RNA, 19 nt, Artificial Sequence
  Description of Artificial Sequence: Synthetic oligonucleotide
  Antisense strand to SEQ ID NO: 759456
ugccuuacacauauuaagg

SEQ ID NO: 759458 - RNA, 19 nt, Artificial Sequence
  Description of Artificial Sequence: Synthetic oligonucleotide
  Sense strand starting at position 582 of SEQ ID NO: 587004
augacaaaugcuggcaaua

SEQ ID NO: 759459 - RNA, 19 nt, Artificial Sequence
  Description of Artificial Sequence: Synthetic oligonucleotide
  Antisense strand to SEQ ID NO: 759458
uauugccagcauuugucau

SEQ ID NO: 759460 - RNA, 19 nt, Artificial Sequence
  Description of Artificial Sequence: Synthetic oligonucleotide
  Sense strand starting at position 684 of SEQ ID NO: 587004
agguacugucaucauuaua

SEQ ID NO: 759461 - RNA, 19 nt, Artificial Sequence
  Description of Artificial Sequence: Synthetic oligonucleotide
  Antisense strand to SEQ ID NO: 759460
uauaaugaugacaguaccu

SEQ ID NO: 759462 - RNA, 19 nt, Artificial Sequence
  Description of Artificial Sequence: Synthetic oligonucleotide
  Sense strand starting at position 762 of SEQ ID NO: 587004
gcaagaagggcacgaauau

SEQ ID NO: 759463 - RNA, 19 nt, Artificial Sequence
  Description of Artificial Sequence: Synthetic oligonucleotide
  Antisense strand to SEQ ID NO: 759462
auauucgugcccuucuugc

SEQ ID NO: 759464 - RNA, 19 nt, Artificial Sequence
  Description of Artificial Sequence: Synthetic oligonucleotide
  Sense strand starting at position 1007 of SEQ ID NO: 587004
aucgguucccagcaaagua

SEQ ID NO: 759465 - RNA, 19 nt, Artificial Sequence
  Description of Artificial Sequence: Synthetic oligonucleotide
  Antisense strand to SEQ ID NO: 759464
uacuuugcugggaaccgau

SEQ ID NO: 759466 - RNA, 19 nt, Artificial Sequence
  Description of Artificial Sequence: Synthetic oligonucleotide
  Sense strand starting at position 1084 of SEQ ID NO: 587004
ggaccuaaaugcuuuagaa

SEQ ID NO: 759467 - RNA, 19 nt, Artificial Sequence
  Description of Artificial Sequence: Synthetic oligonucleotide
  Antisense strand to SEQ ID NO: 759466
uucuaaagcauuuaggucc

SEQ ID NO: 759468 - RNA, 19 nt, Artificial Sequence
  Description of Artificial Sequence: Synthetic oligonucleotide
  Sense strand starting at position 1242 of SEQ ID NO: 587004
gucgcaagaguugaaggaa

SEQ ID NO: 759469 - RNA, 19 nt, Artificial Sequence
  Description of Artificial Sequence: Synthetic oligonucleotide
  Antisense strand to SEQ ID NO: 759468
uuccuucaacucuugcgac

SEQ ID NO: 759470 - RNA, 19 nt, Artificial Sequence
  Description of Artificial Sequence: Synthetic oligonucleotide
  Sense strand starting at position 1335 of SEQ ID NO: 587004
accuucucucguuaaauag

SEQ ID NO: 759471 - RNA, 19 nt, Artificial Sequence
  Description of Artificial Sequence: Synthetic oligonucleotide
  Antisense strand to SEQ ID NO: 759470
cuauuuaacgagagaaggu

SEQ ID NO: 759472 - RNA, 19 nt, Artificial Sequence
  Description of Artificial Sequence: Synthetic oligonucleotide
  Sense strand starting at position 1343 of SEQ ID NO: 587004
ucguuaaauagccauucga

SEQ ID NO: 759473 - RNA, 19 nt, Artificial Sequence
  Description of Artificial Sequence: Synthetic oligonucleotide
  Antisense strand to SEQ ID NO: 759472
ucgaauggcuauuuaacga

SEQ ID NO: 759474 - RNA, 19 nt, Artificial Sequence
  Description of Artificial Sequence: Synthetic oligonucleotide
  Sense strand starting at position 1525 of SEQ ID NO: 587004
gcguuaucggcagcagcaa

SEQ ID NO: 759475 - RNA, 19 nt, Artificial Sequence
  Description of Artificial Sequence: Synthetic oligonucleotide
  Antisense strand to SEQ ID NO: 759474
uugcugcugccgauaacgc

SEQ ID NO: 759476 - RNA, 19 nt, Artificial Sequence
  Description of Artificial Sequence: Synthetic oligonucleotide
  Sense strand starting at position 2341 of SEQ ID NO: 587004
aaagcugaccuucgguuaa

SEQ ID NO: 759477 - RNA, 19 nt, Artificial Sequence
  Description of Artificial Sequence: Synthetic oligonucleotide
  Antisense strand to SEQ ID NO: 759476
uuaaccgaaggucagcuuu

SEQ ID NO: 759478 - RNA, 19 nt, Artificial Sequence
  Description of Artificial Sequence: Synthetic oligonucleotide
  Sense strand starting at position 2343 of SEQ ID NO: 587004
agcugaccuucgguuaaua

SEQ ID NO: 759479 - RNA, 19 nt, Artificial Sequence
  Description of Artificial Sequence: Synthetic oligonucleotide
  Antisense strand to SEQ ID NO: 759478
uauuaaccgaaggucagcu

SEQ ID NO: 759480 - RNA, 19 nt, Artificial Sequence
  Description of Artificial Sequence: Synthetic oligonucleotide
  Sense strand starting at position 2345 of SEQ ID NO: 587004
cugaccuucgguuaauaaa

SEQ ID NO: 759481 - RNA, 19 nt, Artificial Sequence
  Description of Artificial Sequence: Synthetic oligonucleotide
  Antisense strand to SEQ ID NO: 759480
uuuauuaaccgaaggucag

SEQ ID NO: 759482 - RNA, 19 nt, Artificial Sequence
  Description of Artificial Sequence: Synthetic oligonucleotide
  Sense strand starting at position 2415 of SEQ ID NO: 587004
ggaggcacuucgguuaaua

SEQ ID NO: 759483 - RNA, 19 nt, Artificial Sequence
  Description of Artificial Sequence: Synthetic oligonucleotide
  Antisense strand to SEQ ID NO: 759482
uauuaaccgaagugccucc

SEQ ID NO: 759484 - RNA, 19 nt, Artificial Sequence
  Description of Artificial Sequence: Synthetic oligonucleotide
  Sense strand starting at position 2417 of SEQ ID NO: 587004
aggcacuucgguuaauaaa

SEQ ID NO: 759485 - RNA, 19 nt, Artificial Sequence
  Description of Artificial Sequence: Synthetic oligonucleotide
  Antisense strand to SEQ ID NO: 759484
uuuauuaaccgaagugccu

SEQ ID NO: 759486 - RNA, 19 nt, Artificial Sequence
  Description of Artificial Sequence: Synthetic oligonucleotide
  Sense strand starting at position 2438 of SEQ ID NO: 587004
gcauuugagcuguaagcag

SEQ ID NO: 759487 - RNA, 19 nt, Artificial Sequence
  Description of Artificial Sequence: Synthetic oligonucleotide
  Antisense strand to SEQ ID NO: 759486
cugcuuacagcucaaaugc

SEQ ID NO: 759488 - RNA, 19 nt, Artificial Sequence
  Description of Artificial Sequence: Synthetic oligonucleotide
  Sense strand starting at position 2481 of SEQ ID NO: 587004
augagauccugaucuccgu

SEQ ID NO: 759489 - RNA, 19 nt, Artificial Sequence
  Description of Artificial Sequence: Synthetic oligonucleotide
  Antisense strand to SEQ ID NO: 759488
acggagaucaggaucucau

SEQ ID NO: 759490 - RNA, 19 nt, Artificial Sequence
  Description of Artificial Sequence: Synthetic oligonucleotide
  Sense strand starting at position 2521 of SEQ ID NO: 587004
ggcagaguuguauaaauau

SEQ ID NO: 759491 - RNA, 19 nt, Artificial Sequence
  Description of Artificial Sequence: Synthetic oligonucleotide
  Antisense strand to SEQ ID NO: 759490
auauuuauacaacucugcc

SEQ ID NO: 759492 - RNA, 19 nt, Artificial Sequence
  Description of Artificial Sequence: Synthetic oligonucleotide
  Sense strand starting at position 2585 of SEQ ID NO: 587004
gucuguagucgucucuaua

SEQ ID NO: 759493 - RNA, 19 nt, Artificial Sequence
  Description of Artificial Sequence: Synthetic oligonucleotide
  Antisense strand to SEQ ID NO: 759492
uauagagacgacuacagac

SEQ ID NO: 759494 - RNA, 19 nt, Artificial Sequence
  Description of Artificial Sequence: Synthetic oligonucleotide
  Sense strand starting at position 2588 of SEQ ID NO: 587004
uguagucgucucuauauuu

SEQ ID NO: 759495 - RNA, 19 nt, Artificial Sequence
  Description of Artificial Sequence: Synthetic oligonucleotide
  Antisense strand to SEQ ID NO: 759494
aaauauagagacgacuaca

SEQ ID NO: 759496 - RNA, 19 nt, Artificial Sequence
  Description of Artificial Sequence: Synthetic oligonucleotide
  Sense strand starting at position 2629 of SEQ ID NO: 587004
gucuuacgacuuuaauuac

SEQ ID NO: 759497 - RNA, 19 nt, Artificial Sequence
  Description of Artificial Sequence: Synthetic oligonucleotide
  Antisense strand to SEQ ID NO: 759496
guaauuaaagucguaagac

SEQ ID NO: 759498 - RNA, 19 nt, Artificial Sequence
  Description of Artificial Sequence: Synthetic oligonucleotide
  Sense strand starting at position 2653 of SEQ ID NO: 587004
auaugcucaugacuacaga

SEQ ID NO: 759499 - RNA, 19 nt, Artificial Sequence
  Description of Artificial Sequence: Synthetic oligonucleotide
  Antisense strand to SEQ ID NO: 759498
ucuguagucaugagcauau

SEQ ID NO: 759500 - RNA, 19 nt, Artificial Sequence
  Description of Artificial Sequence: Synthetic oligonucleotide
  Sense strand starting at position 2656 of SEQ ID NO: 587004
ugcucaugacuacagaauu

SEQ ID NO: 759501 - RNA, 19 nt, Artificial Sequence
  Description of Artificial Sequence: Synthetic oligonucleotide
  Antisense strand to SEQ ID NO: 759500
aauucuguagucaugagca

SEQ ID NO: 759502 - RNA, 19 nt, Artificial Sequence
  Description of Artificial Sequence: Synthetic oligonucleotide
  Sense strand starting at position 2713 of SEQ ID NO: 587004
ugguguauuugacuaugca

SEQ ID NO: 759503 - RNA, 19 nt, Artificial Sequence
  Description of Artificial Sequence: Synthetic oligonucleotide
  Antisense strand to SEQ ID NO: 759502
ugcauagucaaauacacca

SEQ ID NO: 759504 - RNA, 19 nt, Artificial Sequence
  Description of Artificial Sequence: Synthetic oligonucleotide
  Sense strand starting at position 2917 of SEQ ID NO: 587004
aucuccaguuugucaguaa

SEQ ID NO: 759505 - RNA, 19 nt, Artificial Sequence
  Description of Artificial Sequence: Synthetic oligonucleotide
  Antisense strand to SEQ ID NO: 759504
uuacugacaaacuggagau

SEQ ID NO: 759506 - RNA, 19 nt, Artificial Sequence
  Description of Artificial Sequence: Synthetic oligonucleotide
  Sense strand starting at position 3008 of SEQ ID NO: 587004
gccugagccaucguuaucu

SEQ ID NO: 759507 - RNA, 19 nt, Artificial Sequence
  Description of Artificial Sequence: Synthetic oligonucleotide
  Antisense strand to SEQ ID NO: 759506
agauaacgauggcucaggc

SEQ ID NO: 759508 - RNA, 19 nt, Artificial Sequence
  Description of Artificial Sequence: Synthetic oligonucleotide
  Sense strand starting at position 3019 of SEQ ID NO: 587004
cguuaucucuuaccuggau

SEQ ID NO: 759509 - RNA, 19 nt, Artificial Sequence
  Description of Artificial Sequence: Synthetic oligonucleotide
  Antisense strand to SEQ ID NO: 759508
auccagguaagagauaacg

SEQ ID NO: 759510 - RNA, 19 nt, Artificial Sequence
  Description of Artificial Sequence: Synthetic oligonucleotide
  Sense strand starting at position 3020 of SEQ ID NO: 587004
guuaucucuuaccuggauu

SEQ ID NO: 759511 - RNA, 19 nt, Artificial Sequence
  Description of Artificial Sequence: Synthetic oligonucleotide
  Antisense strand to SEQ ID NO: 759510
aauccagguaagagauaac

SEQ ID NO: 759512 - RNA, 19 nt, Artificial Sequence
  Description of Artificial Sequence: Synthetic oligonucleotide
  Sense strand starting at position 3112 of SEQ ID NO: 587004
aggcaaugagagugaucuu

SEQ ID NO: 759513 - RNA, 19 nt, Artificial Sequence
  Description of Artificial Sequence: Synthetic oligonucleotide
  Antisense strand to SEQ ID NO: 759512
aagaucacucucauugccu

SEQ ID NO: 759514 - RNA, 19 nt, Artificial Sequence
  Description of Artificial Sequence: Synthetic oligonucleotide
  Sense strand starting at position 3113 of SEQ ID NO: 587004
ggcaaugagagugaucuuu

SEQ ID NO: 759515 - RNA, 19 nt, Artificial Sequence
  Description of Artificial Sequence: Synthetic oligonucleotide
  Antisense strand to SEQ ID NO: 759514
aaagaucacucucauugcc

SEQ ID NO: 759516 - RNA, 19 nt, Artificial Sequence
  Description of Artificial Sequence: Synthetic oligonucleotide
  Sense strand starting at position 3169 of SEQ ID NO: 587004
gacugucucaguggaguuu

SEQ ID NO: 759517 - RNA, 19 nt, Artificial Sequence
  Description of Artificial Sequence: Synthetic oligonucleotide
  Antisense strand to SEQ ID NO: 759516
aaacuccacugagacaguc

SEQ ID NO: 759518 - RNA, 19 nt, Artificial Sequence
  Description of Artificial Sequence: Synthetic oligonucleotide
  Sense strand starting at position 3364 of SEQ ID NO: 587004
uaaagccauggcugaaaga

SEQ ID NO: 759519 - RNA, 19 nt, Artificial Sequence
  Description of Artificial Sequence: Synthetic oligonucleotide
  Antisense strand to SEQ ID NO: 759518
ucuuucagccauggcuuua

SEQ ID NO: 759520 - RNA, 19 nt, Artificial Sequence
  Description of Artificial Sequence: Synthetic oligonucleotide
  Sense strand starting at position 3525 of SEQ ID NO: 587004
uguggaugaacgggaaaua

SEQ ID NO: 759521 - RNA, 19 nt, Artificial Sequence
  Description of Artificial Sequence: Synthetic oligonucleotide
  Antisense strand to SEQ ID NO: 759520
uauuucccguucauccaca

SEQ ID NO: 759522 - RNA, 19 nt, Artificial Sequence
  Description of Artificial Sequence: Synthetic oligonucleotide
  Sense strand starting at position 3900 of SEQ ID NO: 587004
acagaauuaugggcuuaau

SEQ ID NO: 759523 - RNA, 19 nt, Artificial Sequence
  Description of Artificial Sequence: Synthetic oligonucleotide
  Antisense strand to SEQ ID NO: 759522
auuaagcccauaauucugu

SEQ ID NO: 759524 - RNA, 19 nt, Artificial Sequence
  Description of Artificial Sequence: Synthetic oligonucleotide
  Sense strand starting at position 3940 of SEQ ID NO: 587004
gcaagaauuagugaagcua

SEQ ID NO: 759525 - RNA, 19 nt, Artificial Sequence
  Description of Artificial Sequence: Synthetic oligonucleotide
  Antisense strand to SEQ ID NO: 759524
uagcuucacuaauucuugc

SEQ ID NO: 759526 - RNA, 19 nt, Artificial Sequence
  Description of Artificial Sequence: Synthetic oligonucleotide
  Sense strand starting at position 32 of SEQ ID NO: 587005
gcuauuuaccugggcccaa

SEQ ID NO: 759527 - RNA, 19 nt, Artificial Sequence
  Description of Artificial Sequence: Synthetic oligonucleotide
  Antisense strand to SEQ ID NO: 759526
uugggcccagguaaauagc

SEQ ID NO: 759528 - RNA, 19 nt, Artificial Sequence
  Description of Artificial Sequence: Synthetic oligonucleotide
  Sense strand starting at position 172 of SEQ ID NO: 587005
gugucaguaccuuuaucgu

SEQ ID NO: 759529 - RNA, 19 nt, Artificial Sequence
  Description of Artificial Sequence: Synthetic oligonucleotide
  Antisense strand to SEQ ID NO: 759528
acgauaaagguacugacac

SEQ ID NO: 759530 - RNA, 19 nt, Artificial Sequence
  Description of Artificial Sequence: Synthetic oligonucleotide
  Sense strand starting at position 175 of SEQ ID NO: 587005
ucaguaccuuuaucguaau

SEQ ID NO: 759531 - RNA, 19 nt, Artificial Sequence
  Description of Artificial Sequence: Synthetic oligonucleotide
  Antisense strand to SEQ ID NO: 759530
auuacgauaaagguacuga

SEQ ID NO: 759532 - RNA, 19 nt, Artificial Sequence
  Description of Artificial Sequence: Synthetic oligonucleotide
  Sense strand starting at position 572 of SEQ ID NO: 587005
ggacuuccacaauguaaac

SEQ ID NO: 759533 - RNA, 19 nt, Artificial Sequence
  Description of Artificial Sequence: Synthetic oligonucleotide
  Antisense strand to SEQ ID NO: 759532
guuuacauuguggaagucc

SEQ ID NO: 759534 - RNA, 19 nt, Artificial Sequence
  Description of Artificial Sequence: Synthetic oligonucleotide
  Sense strand starting at position 593 of SEQ ID NO: 587005
agagaaacauuacaaguaa

SEQ ID NO: 759535 - RNA, 19 nt, Artificial Sequence
  Description of Artificial Sequence: Synthetic oligonucleotide
  Antisense strand to SEQ ID NO: 759534
uuacuuguaauguuucucu

SEQ ID NO: 759536 - RNA, 19 nt, Artificial Sequence
  Description of Artificial Sequence: Synthetic oligonucleotide
  Sense strand starting at position 671 of SEQ ID NO: 587005
uuugaagauuccgugggau

SEQ ID NO: 759537 - RNA, 19 nt, Artificial Sequence
  Description of Artificial Sequence: Synthetic oligonucleotide
  Antisense strand to SEQ ID NO: 759536
aucccacggaaucuucaaa

SEQ ID NO: 759538 - RNA, 19 nt, Artificial Sequence
  Description of Artificial Sequence: Synthetic oligonucleotide
  Sense strand starting at position 673 of SEQ ID NO: 587005
ugaagauuccgugggauua

SEQ ID NO: 759539 - RNA, 19 nt, Artificial Sequence
  Description of Artificial Sequence: Synthetic oligonucleotide
  Antisense strand to SEQ ID NO: 759538
uaaucccacggaaucuuca

SEQ ID NO: 759540 - RNA, 19 nt, Artificial Sequence
  Description of Artificial Sequence: Synthetic oligonucleotide
  Sense strand starting at position 674 of SEQ ID NO: 587005
gaagauuccgugggauuaa

SEQ ID NO: 759541 - RNA, 19 nt, Artificial Sequence
  Description of Artificial Sequence: Synthetic oligonucleotide
  Antisense strand to SEQ ID NO: 759540
uuaaucccacggaaucuuc

SEQ ID NO: 759542 - RNA, 19 nt, Artificial Sequence
  Description of Artificial Sequence: Synthetic oligonucleotide
  Sense strand starting at position 1281 of SEQ ID NO: 587005
auggauuacuuugucacaa

SEQ ID NO: 759543 - RNA, 19 nt, Artificial Sequence
  Description of Artificial Sequence: Synthetic oligonucleotide
  Antisense strand to SEQ ID NO: 759542
uugugacaaaguaauccau

SEQ ID NO: 759544 - RNA, 19 nt, Artificial Sequence
  Description of Artificial Sequence: Synthetic oligonucleotide
  Sense strand starting at position 1282 of SEQ ID NO: 587005
uggauuacuuugucacaac

SEQ ID NO: 759545 - RNA, 19 nt, Artificial Sequence
  Description of Artificial Sequence: Synthetic oligonucleotide
  Antisense strand to SEQ ID NO: 759544
guugugacaaaguaaucca

SEQ ID NO: 759546 - RNA, 19 nt, Artificial Sequence
  Description of Artificial Sequence: Synthetic oligonucleotide
  Sense strand starting at position 1426 of SEQ ID NO: 587005
gacuauauauucccacgga

SEQ ID NO: 759547 - RNA, 19 nt, Artificial Sequence
  Description of Artificial Sequence: Synthetic oligonucleotide
  Antisense strand to SEQ ID NO: 759546
uccgugggaauauauaguc

SEQ ID NO: 759548 - RNA, 19 nt, Artificial Sequence
  Description of Artificial Sequence: Synthetic oligonucleotide
  Sense strand starting at position 1446 of SEQ ID NO: 587005
agcauuaaggcuuaaauuc

SEQ ID NO: 759549 - RNA, 19 nt, Artificial Sequence
  Description of Artificial Sequence: Synthetic oligonucleotide
  Antisense strand to SEQ ID NO: 759548
gaauuuaagccuuaaugcu

SEQ ID NO: 759550 - RNA, 19 nt, Artificial Sequence
  Description of Artificial Sequence: Synthetic oligonucleotide
  Sense strand starting at position 1505 of SEQ ID NO: 587005
ccaagaagcuacuucuaga

SEQ ID NO: 759551 - RNA, 19 nt, Artificial Sequence
  Description of Artificial Sequence: Synthetic oligonucleotide
  Antisense strand to SEQ ID NO: 759550
ucuagaaguagcuucuugg

SEQ ID NO: 759552 - RNA, 19 nt, Artificial Sequence
  Description of Artificial Sequence: Synthetic oligonucleotide
  Sense strand starting at position 1510 of SEQ ID NO: 587005
aagcuacuucuagaguagu

SEQ ID NO: 759553 - RNA, 19 nt, Artificial Sequence
  Description of Artificial Sequence: Synthetic oligonucleotide
  Antisense strand to SEQ ID NO: 759552
acuacucuagaaguagcuu

SEQ ID NO: 759554 - RNA, 19 nt, Artificial Sequence
  Description of Artificial Sequence: Synthetic oligonucleotide
  Sense strand starting at position 1548 of SEQ ID NO: 587005
augacuugcccugauuaug

SEQ ID NO: 759555 - RNA, 19 nt, Artificial Sequence
  Description of Artificial Sequence: Synthetic oligonucleotide
  Antisense strand to SEQ ID NO: 759554
cauaaucagggcaagucau

SEQ ID NO: 759556 - RNA, 19 nt, Artificial Sequence
  Description of Artificial Sequence: Synthetic oligonucleotide
  Sense strand starting at position 2323 of SEQ ID NO: 587005
ugacuuuagaggugacgua

SEQ ID NO: 759557 - RNA, 19 nt, Artificial Sequence
  Description of Artificial Sequence: Synthetic oligonucleotide
  Antisense strand to SEQ ID NO: 759556
uacgucaccucuaaaguca

SEQ ID NO: 759558 - RNA, 19 nt, Artificial Sequence
  Description of Artificial Sequence: Synthetic oligonucleotide
  Sense strand starting at position 2339 of SEQ ID NO: 587005
guaggauuucguggucuuu

SEQ ID NO: 759559 - RNA, 19 nt, Artificial Sequence
  Description of Artificial Sequence: Synthetic oligonucleotide
  Antisense strand to SEQ ID NO: 759558
aaagaccacgaaauccuac

SEQ ID NO: 759560 - RNA, 19 nt, Artificial Sequence
  Description of Artificial Sequence: Synthetic oligonucleotide
  Sense strand starting at position 2472 of SEQ ID NO: 587005
ucagauugguagcuuuaca

SEQ ID NO: 759561 - RNA, 19 nt, Artificial Sequence
  Description of Artificial Sequence: Synthetic oligonucleotide
  Antisense strand to SEQ ID NO: 759560
uguaaagcuaccaaucuga

SEQ ID NO: 759562 - RNA, 19 nt, Artificial Sequence
  Description of Artificial Sequence: Synthetic oligonucleotide
  Sense strand starting at position 2483 of SEQ ID NO: 587005
gcuuuacaagcguugguca

SEQ ID NO: 759563 - RNA, 19 nt, Artificial Sequence
  Description of Artificial Sequence: Synthetic oligonucleotide
  Antisense strand to SEQ ID NO: 759562
ugaccaacgcuuguaaagc

SEQ ID NO: 759564 - RNA, 19 nt, Artificial Sequence
  Description of Artificial Sequence: Synthetic oligonucleotide
  Sense strand starting at position 2488 of SEQ ID NO: 587005
acaagcguuggucaacuaa

SEQ ID NO: 759565 - RNA, 19 nt, Artificial Sequence
  Description of Artificial Sequence: Synthetic oligonucleotide
  Antisense strand to SEQ ID NO: 759564
uuaguugaccaacgcuugu

SEQ ID NO: 759566 - RNA, 19 nt, Artificial Sequence
  Description of Artificial Sequence: Synthetic oligonucleotide
  Sense strand starting at position 2578 of SEQ ID NO: 587005
ugcuucuuugcagauauua

SEQ ID NO: 759567 - RNA, 19 nt, Artificial Sequence
  Description of Artificial Sequence: Synthetic oligonucleotide
  Antisense strand to SEQ ID NO: 759566
uaauaucugcaaagaagca

SEQ ID NO: 759568 - RNA, 19 nt, Artificial Sequence
  Description of Artificial Sequence: Synthetic oligonucleotide
  Sense strand starting at position 2590 of SEQ ID NO: 587005
gauauuacacuuuguggca

SEQ ID NO: 759569 - RNA, 19 nt, Artificial Sequence
  Description of Artificial Sequence: Synthetic oligonucleotide
  Antisense strand to SEQ ID NO: 759568
ugccacaaaguguaauauc

SEQ ID NO: 759570 - RNA, 19 nt, Artificial Sequence
  Description of Artificial Sequence: Synthetic oligonucleotide
  Sense strand starting at position 2652 of SEQ ID NO: 587005
cagcuugaagguuaaagua

SEQ ID NO: 759571 - RNA, 19 nt, Artificial Sequence
  Description of Artificial Sequence: Synthetic oligonucleotide
  Antisense strand to SEQ ID NO: 759570
uacuuuaaccuucaagcug

SEQ ID NO: 759572 - RNA, 19 nt, Artificial Sequence
  Description of Artificial Sequence: Synthetic oligonucleotide
  Sense strand starting at position 2697 of SEQ ID NO: 587005
auaauuuguuaagggugaa

SEQ ID NO: 759573 - RNA, 19 nt, Artificial Sequence
  Description of Artificial Sequence: Synthetic oligonucleotide
  Antisense strand to SEQ ID NO: 759572
uucacccuuaacaaauuau

SEQ ID NO: 759574 - RNA, 19 nt, Artificial Sequence
  Description of Artificial Sequence: Synthetic oligonucleotide
  Sense strand starting at position 2709 of SEQ ID NO: 587005
gggugaacauauguauaca

SEQ ID NO: 759575 - RNA, 19 nt, Artificial Sequence
  Description of Artificial Sequence: Synthetic oligonucleotide
  Antisense strand to SEQ ID NO: 759574
uguauacauauguucaccc

SEQ ID NO: 759576 - RNA, 19 nt, Artificial Sequence
  Description of Artificial Sequence: Synthetic oligonucleotide
  Sense strand starting at position 2721 of SEQ ID NO: 587005
guauacacuguugaaauca

SEQ ID NO: 759577 - RNA, 19 nt, Artificial Sequence
  Description of Artificial Sequence: Synthetic oligonucleotide
  Antisense strand to SEQ ID NO: 759576
ugauuucaacaguguauac

SEQ ID NO: 759578 - RNA, 19 nt, Artificial Sequence
  Description of Artificial Sequence: Synthetic oligonucleotide
  Sense strand starting at position 2792 of SEQ ID NO: 587005
guuguaauaccugacuccu

SEQ ID NO: 759579 - RNA, 19 nt, Artificial Sequence
  Description of Artificial Sequence: Synthetic oligonucleotide
  Antisense strand to SEQ ID NO: 759578
aggagucagguauuacaac

SEQ ID NO: 759580 - RNA, 19 nt, Artificial Sequence
  Description of Artificial Sequence: Synthetic oligonucleotide
  Sense strand starting at position 2836 of SEQ ID NO: 587005
accauauauuaguuugcau

SEQ ID NO: 759581 - RNA, 19 nt, Artificial Sequence
  Description of Artificial Sequence: Synthetic oligonucleotide
  Antisense strand to SEQ ID NO: 759580
augcaaacuaauauauggu

SEQ ID NO: 759582 - RNA, 19 nt, Artificial Sequence
  Description of Artificial Sequence: Synthetic oligonucleotide
  Sense strand starting at position 2940 of SEQ ID NO: 587005
aauuucguccuauguguca

SEQ ID NO: 759583 - RNA, 19 nt, Artificial Sequence
  Description of Artificial Sequence: Synthetic oligonucleotide
  Antisense strand to SEQ ID NO: 759582
ugacacauaggacgaaauu

SEQ ID NO: 759584 - RNA, 19 nt, Artificial Sequence
  Description of Artificial Sequence: Synthetic oligonucleotide
  Sense strand starting at position 3116 of SEQ ID NO: 587005
cauaucucauggguuagua

SEQ ID NO: 759585 - RNA, 19 nt, Artificial Sequence
  Description of Artificial Sequence: Synthetic oligonucleotide
  Antisense strand to SEQ ID NO: 759584
uacuaacccaugagauaug

SEQ ID NO: 759586 - RNA, 19 nt, Artificial Sequence
  Description of Artificial Sequence: Synthetic oligonucleotide
  Sense strand starting at position 3125 of SEQ ID NO: 587005
uggguuaguaccuaggagu

SEQ ID NO: 759587 - RNA, 19 nt, Artificial Sequence
  Description of Artificial Sequence: Synthetic oligonucleotide
  Antisense strand to SEQ ID NO: 759586
acuccuagguacuaaccca

SEQ ID NO: 759588 - RNA, 19 nt, Artificial Sequence
  Description of Artificial Sequence: Synthetic oligonucleotide
  Sense strand starting at position 3149 of SEQ ID NO: 587005
ggccaagucauagaauugu

SEQ ID NO: 759589 - RNA, 19 nt, Artificial Sequence
  Description of Artificial Sequence: Synthetic oligonucleotide
  Antisense strand to SEQ ID NO: 759588
acaauucuaugacuuggcc

SEQ ID NO: 759590 - RNA, 19 nt, Artificial Sequence
  Description of Artificial Sequence: Synthetic oligonucleotide
  Sense strand starting at position 3160 of SEQ ID NO: 587005
agaauuguauaugugcuua

SEQ ID NO: 759591 - RNA, 19 nt, Artificial Sequence
  Description of Artificial Sequence: Synthetic oligonucleotide
  Antisense strand to SEQ ID NO: 759590
uaagcacauauacaauucu

SEQ ID NO: 759592 - RNA, 19 nt, Artificial Sequence
  Description of Artificial Sequence: Synthetic oligonucleotide
  Sense strand starting at position 3263 of SEQ ID NO: 587005
accaucauuugauaugguu

SEQ ID NO: 759593 - RNA, 19 nt, Artificial Sequence
  Description of Artificial Sequence: Synthetic oligonucleotide
  Antisense strand to SEQ ID NO: 759592
aaccauaucaaaugauggu

SEQ ID NO: 759594 - RNA, 19 nt, Artificial Sequence
  Description of Artificial Sequence: Synthetic oligonucleotide
  Sense strand starting at position 3419 of SEQ ID NO: 587005
aaaugagguguccaagcuu

SEQ ID NO: 759595 - RNA, 19 nt, Artificial Sequence
  Description of Artificial Sequence: Synthetic oligonucleotide
  Antisense strand to SEQ ID NO: 759594
aagcuuggacaccucauuu

SEQ ID NO: 759596 - RNA, 19 nt, Artificial Sequence
  Description of Artificial Sequence: Synthetic oligonucleotide
  Sense strand starting at position 3481 of SEQ ID NO: 587005
cuuuauauacuguggauaa

SEQ ID NO: 759597 - RNA, 19 nt, Artificial Sequence
  Description of Artificial Sequence: Synthetic oligonucleotide
  Antisense strand to SEQ ID NO: 759596
uuauccacaguauauaaag

SEQ ID NO: 759598 - RNA, 19 nt, Artificial Sequence
  Description of Artificial Sequence: Synthetic oligonucleotide
  Sense strand starting at position 3598 of SEQ ID NO: 587005
aagucuaauuuaucgguuu

SEQ ID NO: 759599 - RNA, 19 nt, Artificial Sequence
  Description of Artificial Sequence: Synthetic oligonucleotide
  Antisense strand to SEQ ID NO: 759598
aaaccgauaaauuagacuu

SEQ ID NO: 759600 - RNA, 19 nt, Artificial Sequence
  Description of Artificial Sequence: Synthetic oligonucleotide
  Sense strand starting at position 3636 of SEQ ID NO: 587005
uuguguuguauguaaggaa

SEQ ID NO: 759601 - RNA, 19 nt, Artificial Sequence
  Description of Artificial Sequence: Synthetic oligonucleotide
  Antisense strand to SEQ ID NO: 759600
uuccuuacauacaacacaa

SEQ ID NO: 759602 - RNA, 19 nt, Artificial Sequence
  Description of Artificial Sequence: Synthetic oligonucleotide
  Sense strand starting at position 3862 of SEQ ID NO: 587005
uuugcacuauugucagaga

SEQ ID NO: 759603 - RNA, 19 nt, Artificial Sequence
  Description of Artificial Sequence: Synthetic oligonucleotide
  Antisense strand to SEQ ID NO: 759602
ucucugacaauagugcaaa

SEQ ID NO: 759604 - RNA, 19 nt, Artificial Sequence
  Description of Artificial Sequence: Synthetic oligonucleotide
  Sense strand starting at position 3912 of SEQ ID NO: 587005
uggauucucuguucuguua

SEQ ID NO: 759605 - RNA, 19 nt, Artificial Sequence
  Description of Artificial Sequence: Synthetic oligonucleotide
  Antisense strand to SEQ ID NO: 759604
uaacagaacagagaaucca

SEQ ID NO: 759606 - RNA, 19 nt, Artificial Sequence
  Description of Artificial Sequence: Synthetic oligonucleotide
  Sense strand starting at position 13 of SEQ ID NO: 587006
gugucaguaccuuuaucgu

SEQ ID NO: 759607 - RNA, 19 nt, Artificial Sequence
  Description of Artificial Sequence: Synthetic oligonucleotide
  Antisense strand to SEQ ID NO: 759606
acgauaaagguacugacac

SEQ ID NO: 759608 - RNA, 19 nt, Artificial Sequence
  Description of Artificial Sequence: Synthetic oligonucleotide
  Sense strand starting at position 413 of SEQ ID NO: 587006
ggacuuccacaauguaaac

SEQ ID NO: 759609 - RNA, 19 nt, Artificial Sequence
  Description of Artificial Sequence: Synthetic oligonucleotide
  Antisense strand to SEQ ID NO: 759608
guuuacauuguggaagucc

SEQ ID NO: 759610 - RNA, 19 nt, Artificial Sequence
  Description of Artificial Sequence: Synthetic oligonucleotide
  Sense strand starting at position 512 of SEQ ID NO: 587006
uuugaagauuccgugggau

SEQ ID NO: 759611 - RNA, 19 nt, Artificial Sequence
  Description of Artificial Sequence: Synthetic oligonucleotide
  Antisense strand to SEQ ID NO: 759610
aucccacggaaucuucaaa

SEQ ID NO: 759612 - RNA, 19 nt, Artificial Sequence
  Description of Artificial Sequence: Synthetic oligonucleotide
  Sense strand starting at position 514 of SEQ ID NO: 587006
ugaagauuccgugggauua

SEQ ID NO: 759613 - RNA, 19 nt, Artificial Sequence
  Description of Artificial Sequence: Synthetic oligonucleotide
  Antisense strand to SEQ ID NO: 759612
uaaucccacggaaucuuca

SEQ ID NO: 759614 - RNA, 19 nt, Artificial Sequence
  Description of Artificial Sequence: Synthetic oligonucleotide
  Sense strand starting at position 515 of SEQ ID NO: 587006
gaagauuccgugggauuaa

SEQ ID NO: 759615 - RNA, 19 nt, Artificial Sequence
  Description of Artificial Sequence: Synthetic oligonucleotide
  Antisense strand to SEQ ID NO: 759614
uuaaucccacggaaucuuc

SEQ ID NO: 759616 - RNA, 19 nt, Artificial Sequence
  Description of Artificial Sequence: Synthetic oligonucleotide
  Sense strand starting at position 1122 of SEQ ID NO: 587006
auggauuacuuugucacaa

SEQ ID NO: 759617 - RNA, 19 nt, Artificial Sequence
  Description of Artificial Sequence: Synthetic oligonucleotide
  Antisense strand to SEQ ID NO: 759616
uugugacaaaguaauccau

SEQ ID NO: 759618 - RNA, 19 nt, Artificial Sequence
  Description of Artificial Sequence: Synthetic oligonucleotide
  Sense strand starting at position 1123 of SEQ ID NO: 587006
uggauuacuuugucacaac

SEQ ID NO: 759619 - RNA, 19 nt, Artificial Sequence
  Description of Artificial Sequence: Synthetic oligonucleotide
  Antisense strand to SEQ ID NO: 759618
guugugacaaaguaaucca

SEQ ID NO: 759620 - RNA, 19 nt, Artificial Sequence
  Description of Artificial Sequence: Synthetic oligonucleotide
  Sense strand starting at position 1267 of SEQ ID NO: 587006
gacuauauauucccacgga

SEQ ID NO: 759621 - RNA, 19 nt, Artificial Sequence
  Description of Artificial Sequence: Synthetic oligonucleotide
  Antisense strand to SEQ ID NO: 759620
uccgugggaauauauaguc

SEQ ID NO: 759622 - RNA, 19 nt, Artificial Sequence
  Description of Artificial Sequence: Synthetic oligonucleotide
  Sense strand starting at position 1287 of SEQ ID NO: 587006
agcauuaaggcuuaaauuc

SEQ ID NO: 759623 - RNA, 19 nt, Artificial Sequence
  Description of Artificial Sequence: Synthetic oligonucleotide
  Antisense strand to SEQ ID NO: 759622
gaauuuaagccuuaaugcu

SEQ ID NO: 759624 - RNA, 19 nt, Artificial Sequence
  Description of Artificial Sequence: Synthetic oligonucleotide
  Sense strand starting at position 1346 of SEQ ID NO: 587006
ccaagaagcuacuucuaga

SEQ ID NO: 759625 - RNA, 19 nt, Artificial Sequence
  Description of Artificial Sequence: Synthetic oligonucleotide
  Antisense strand to SEQ ID NO: 759624
ucuagaaguagcuucuugg

SEQ ID NO: 759626 - RNA, 19 nt, Artificial Sequence
  Description of Artificial Sequence: Synthetic oligonucleotide
  Sense strand starting at position 1351 of SEQ ID NO: 587006
aagcuacuucuagaguagu

SEQ ID NO: 759627 - RNA, 19 nt, Artificial Sequence
  Description of Artificial Sequence: Synthetic oligonucleotide
  Antisense strand to SEQ ID NO: 759626
acuacucuagaaguagcuu

SEQ ID NO: 759628 - RNA, 19 nt, Artificial Sequence
  Description of Artificial Sequence: Synthetic oligonucleotide
  Sense strand starting at position 1389 of SEQ ID NO: 587006
augacuugcccugauuaug

SEQ ID NO: 759629 - RNA, 19 nt, Artificial Sequence
  Description of Artificial Sequence: Synthetic oligonucleotide
  Antisense strand to SEQ ID NO: 759628
cauaaucagggcaagucau

SEQ ID NO: 759630 - RNA, 19 nt, Artificial Sequence
  Description of Artificial Sequence: Synthetic oligonucleotide
  Sense strand starting at position 2164 of SEQ ID NO: 587006
ugacuuuagaggugacgua

SEQ ID NO: 759631 - RNA, 19 nt, Artificial Sequence
  Description of Artificial Sequence: Synthetic oligonucleotide
  Antisense strand to SEQ ID NO: 759630
uacgucaccucuaaaguca

SEQ ID NO: 759632 - RNA, 19 nt, Artificial Sequence
  Description of Artificial Sequence: Synthetic oligonucleotide
  Sense strand starting at position 2180 of SEQ ID NO: 587006
guaggauuucguggucuuu

SEQ ID NO: 759633 - RNA, 19 nt, Artificial Sequence
  Description of Artificial Sequence: Synthetic oligonucleotide
  Antisense strand to SEQ ID NO: 759632
aaagaccacgaaauccuac

SEQ ID NO: 759634 - RNA, 19 nt, Artificial Sequence
  Description of Artificial Sequence: Synthetic oligonucleotide
  Sense strand starting at position 2313 of SEQ ID NO: 587006
ucagauugguagcuuuaca

SEQ ID NO: 759635 - RNA, 19 nt, Artificial Sequence
  Description of Artificial Sequence: Synthetic oligonucleotide
  Antisense strand to SEQ ID NO: 759634
uguaaagcuaccaaucuga

SEQ ID NO: 759636 - RNA, 19 nt, Artificial Sequence
  Description of Artificial Sequence: Synthetic oligonucleotide
  Sense strand starting at position 2324 of SEQ ID NO: 587006
gcuuuacaagcguugguca

SEQ ID NO: 759637 - RNA, 19 nt, Artificial Sequence
  Description of Artificial Sequence: Synthetic oligonucleotide
  Antisense strand to SEQ ID NO: 759636
ugaccaacgcuuguaaagc

SEQ ID NO: 759638 - RNA, 19 nt, Artificial Sequence
  Description of Artificial Sequence: Synthetic oligonucleotide
  Sense strand starting at position 2329 of SEQ ID NO: 587006
acaagcguuggucaacuaa

SEQ ID NO: 759639 - RNA, 19 nt, Artificial Sequence
  Description of Artificial Sequence: Synthetic oligonucleotide
  Antisense strand to SEQ ID NO: 759638
uuaguugaccaacgcuugu

SEQ ID NO: 759640 - RNA, 19 nt, Artificial Sequence
  Description of Artificial Sequence: Synthetic oligonucleotide
  Sense strand starting at position 2419 of SEQ ID NO: 587006
ugcuucuuugcagauauua

SEQ ID NO: 759641 - RNA, 19 nt, Artificial Sequence
  Description of Artificial Sequence: Synthetic oligonucleotide
  Antisense strand to SEQ ID NO: 759640
uaauaucugcaaagaagca

SEQ ID NO: 759642 - RNA, 19 nt, Artificial Sequence
  Description of Artificial Sequence: Synthetic oligonucleotide
  Sense strand starting at position 2431 of SEQ ID NO: 587006
gauauuacacuuuguggca

SEQ ID NO: 759643 - RNA, 19 nt, Artificial Sequence
  Description of Artificial Sequence: Synthetic oligonucleotide
  Antisense strand to SEQ ID NO: 759642
ugccacaaaguguaauauc

SEQ ID NO: 759644 - RNA, 19 nt, Artificial Sequence
  Description of Artificial Sequence: Synthetic oligonucleotide
  Sense strand starting at position 2493 of SEQ ID NO: 587006
cagcuugaagguuaaagua

SEQ ID NO: 759645 - RNA, 19 nt, Artificial Sequence
  Description of Artificial Sequence: Synthetic oligonucleotide
  Antisense strand to SEQ ID NO: 759644
uacuuuaaccuucaagcug

SEQ ID NO: 759646 - RNA, 19 nt, Artificial Sequence
  Description of Artificial Sequence: Synthetic oligonucleotide
  Sense strand starting at position 2550 of SEQ ID NO: 587006
gggugaacauauguauaca

SEQ ID NO: 759647 - RNA, 19 nt, Artificial Sequence
  Description of Artificial Sequence: Synthetic oligonucleotide
  Antisense strand to SEQ ID NO: 759646
uguauacauauguucaccc

SEQ ID NO: 759648 - RNA, 19 nt, Artificial Sequence
  Description of Artificial Sequence: Synthetic oligonucleotide
  Sense strand starting at position 2562 of SEQ ID NO: 587006
guauacacuguugaaauca

SEQ ID NO: 759649 - RNA, 19 nt, Artificial Sequence
  Description of Artificial Sequence: Synthetic oligonucleotide
  Antisense strand to SEQ ID NO: 759648
ugauuucaacaguguauac

SEQ ID NO: 759650 - RNA, 19 nt, Artificial Sequence
  Description of Artificial Sequence: Synthetic oligonucleotide
  Sense strand starting at position 2633 of SEQ ID NO: 587006
guuguaauaccugacuccu

SEQ ID NO: 759651 - RNA, 19 nt, Artificial Sequence
  Description of Artificial Sequence: Synthetic oligonucleotide
  Antisense strand to SEQ ID NO: 759650
aggagucagguauuacaac

SEQ ID NO: 759652 - RNA, 19 nt, Artificial Sequence
  Description of Artificial Sequence: Synthetic oligonucleotide
  Sense strand starting at position 2677 of SEQ ID NO: 587006
accauauauuaguuugcau

SEQ ID NO: 759653 - RNA, 19 nt, Artificial Sequence
  Description of Artificial Sequence: Synthetic oligonucleotide
  Antisense strand to SEQ ID NO: 759652
augcaaacuaauauauggu

SEQ ID NO: 759654 - RNA, 19 nt, Artificial Sequence
  Description of Artificial Sequence: Synthetic oligonucleotide
  Sense strand starting at position 2781 of SEQ ID NO: 587006
aauuucguccuauguguca

SEQ ID NO: 759655 - RNA, 19 nt, Artificial Sequence
  Description of Artificial Sequence: Synthetic oligonucleotide
  Antisense strand to SEQ ID NO: 759654
ugacacauaggacgaaauu

SEQ ID NO: 759656 - RNA, 19 nt, Artificial Sequence
  Description of Artificial Sequence: Synthetic oligonucleotide
  Sense strand starting at position 2957 of SEQ ID NO: 587006
cauaucucauggguuagua

SEQ ID NO: 759657 - RNA, 19 nt, Artificial Sequence
  Description of Artificial Sequence: Synthetic oligonucleotide
  Antisense strand to SEQ ID NO: 759656
uacuaacccaugagauaug

SEQ ID NO: 759658 - RNA, 19 nt, Artificial Sequence
  Description of Artificial Sequence: Synthetic oligonucleotide
  Sense strand starting at position 2966 of SEQ ID NO: 587006
uggguuaguaccuaggagu

SEQ ID NO: 759659 - RNA, 19 nt, Artificial Sequence
  Description of Artificial Sequence: Synthetic oligonucleotide
  Antisense strand to SEQ ID NO: 759658
acuccuagguacuaaccca

SEQ ID NO: 759660 - RNA, 19 nt, Artificial Sequence
  Description of Artificial Sequence: Synthetic oligonucleotide
  Sense strand starting at position 2990 of SEQ ID NO: 587006
ggccaagucauagaauugu

SEQ ID NO: 759661 - RNA, 19 nt, Artificial Sequence
  Description of Artificial Sequence: Synthetic oligonucleotide
  Antisense strand to SEQ ID NO: 759660
acaauucuaugacuuggcc

SEQ ID NO: 759662 - RNA, 19 nt, Artificial Sequence
  Description of Artificial Sequence: Synthetic oligonucleotide
  Sense strand starting at position 3104 of SEQ ID NO: 587006
accaucauuugauaugguu

SEQ ID NO: 759663 - RNA, 19 nt, Artificial Sequence
  Description of Artificial Sequence: Synthetic oligonucleotide
  Antisense strand to SEQ ID NO: 759662
aaccauaucaaaugauggu

SEQ ID NO: 759664 - RNA, 19 nt, Artificial Sequence
  Description of Artificial Sequence: Synthetic oligonucleotide
  Sense strand starting at position 3260 of SEQ ID NO: 587006
aaaugagguguccaagcuu

SEQ ID NO: 759665 - RNA, 19 nt, Artificial Sequence
  Description of Artificial Sequence: Synthetic oligonucleotide
  Antisense strand to SEQ ID NO: 759664
aagcuuggacaccucauuu

SEQ ID NO: 759666 - RNA, 19 nt, Artificial Sequence
  Description of Artificial Sequence: Synthetic oligonucleotide
  Sense strand starting at position 3322 of SEQ ID NO: 587006
cuuuauauacuguggauaa

SEQ ID NO: 759667 - RNA, 19 nt, Artificial Sequence
  Description of Artificial Sequence: Synthetic oligonucleotide
  Antisense strand to SEQ ID NO: 759666
uuauccacaguauauaaag

SEQ ID NO: 759668 - RNA, 19 nt, Artificial Sequence
  Description of Artificial Sequence: Synthetic oligonucleotide
  Sense strand starting at position 3439 of SEQ ID NO: 587006
aagucuaauuuaucgguuu

SEQ ID NO: 759669 - RNA, 19 nt, Artificial Sequence
  Description of Artificial Sequence: Synthetic oligonucleotide
  Antisense strand to SEQ ID NO: 759668
aaaccgauaaauuagacuu

SEQ ID NO: 759670 - RNA, 19 nt, Artificial Sequence
  Description of Artificial Sequence: Synthetic oligonucleotide
  Sense strand starting at position 3477 of SEQ ID NO: 587006
uuguguuguauguaaggaa

SEQ ID NO: 759671 - RNA, 19 nt, Artificial Sequence
  Description of Artificial Sequence: Synthetic oligonucleotide
  Antisense strand to SEQ ID NO: 759670
uuccuuacauacaacacaa

SEQ ID NO: 759672 - RNA, 19 nt, Artificial Sequence
  Description of Artificial Sequence: Synthetic oligonucleotide
  Sense strand starting at position 3703 of SEQ ID NO: 587006
uuugcacuauugucagaga

SEQ ID NO: 759673 - RNA, 19 nt, Artificial Sequence
  Description of Artificial Sequence: Synthetic oligonucleotide
  Antisense strand to SEQ ID NO: 759672
ucucugacaauagugcaaa

SEQ ID NO: 759674 - RNA, 19 nt, Artificial Sequence
  Description of Artificial Sequence: Synthetic oligonucleotide
  Sense strand starting at position 3830 of SEQ ID NO: 587006
auuucaugcgaucguagaa

SEQ ID NO: 759675 - RNA, 19 nt, Artificial Sequence
  Description of Artificial Sequence: Synthetic oligonucleotide
  Antisense strand to SEQ ID NO: 759674
uucuacgaucgcaugaaau

SEQ ID NO: 759676 - RNA, 19 nt, Artificial Sequence
  Description of Artificial Sequence: Synthetic oligonucleotide
  Sense strand starting at position 3848 of SEQ ID NO: 587006
agcaauuugucagcaucua

SEQ ID NO: 759677 - RNA, 19 nt, Artificial Sequence
  Description of Artificial Sequence: Synthetic oligonucleotide
  Antisense strand to SEQ ID NO: 759676
uagaugcugacaaauugcu

SEQ ID NO: 759678 - RNA, 19 nt, Artificial Sequence
  Description of Artificial Sequence: Synthetic oligonucleotide
  Sense strand starting at position 3918 of SEQ ID NO: 587006
uugggaucacauugaaugu

SEQ ID NO: 759679 - RNA, 19 nt, Artificial Sequence
  Description of Artificial Sequence: Synthetic oligonucleotide
  Antisense strand to SEQ ID NO: 759678
acauucaaugugaucccaa

SEQ ID NO: 759680 - RNA, 19 nt, Artificial Sequence
  Description of Artificial Sequence: Synthetic oligonucleotide
  Sense strand starting at position 3939 of SEQ ID NO: 587006
acaccaauuugaggagaau

SEQ ID NO: 759681 - RNA, 19 nt, Artificial Sequence
  Description of Artificial Sequence: Synthetic oligonucleotide
  Antisense strand to SEQ ID NO: 759680
auucuccucaaauuggugu

SEQ ID NO: 759682 - RNA, 19 nt, Artificial Sequence
  Description of Artificial Sequence: Synthetic oligonucleotide
  Sense strand starting at position 3956 of SEQ ID NO: 587006
auggacaucuuagcuauau

SEQ ID NO: 759683 - RNA, 19 nt, Artificial Sequence
  Description of Artificial Sequence: Synthetic oligonucleotide
  Antisense strand to SEQ ID NO: 759682
auauagcuaagauguccau

SEQ ID NO: 759684 - RNA, 19 nt, Artificial Sequence
  Description of Artificial Sequence: Synthetic oligonucleotide
  Sense strand starting at position 3957 of SEQ ID NO: 587006
uggacaucuuagcuauauu

SEQ ID NO: 759685 - RNA, 19 nt, Artificial Sequence
  Description of Artificial Sequence: Synthetic oligonucleotide
  Antisense strand to SEQ ID NO: 759684
aauauagcuaagaugucca

SEQ ID NO: 759686 - RNA, 19 nt, Artificial Sequence
  Description of Artificial Sequence: Synthetic oligonucleotide
  Sense strand starting at position 433 of SEQ ID NO: 587007
uguguccucagaggacuaa

SEQ ID NO: 759687 - RNA, 19 nt, Artificial Sequence
  Description of Artificial Sequence: Synthetic oligonucleotide
  Antisense strand to SEQ ID NO: 759686
uuaguccucugaggacaca

SEQ ID NO: 759688 - RNA, 19 nt, Artificial Sequence
  Description of Artificial Sequence: Synthetic oligonucleotide
  Sense strand starting at position 536 of SEQ ID NO: 587007
caggguuguccugaggguu

SEQ ID NO: 759689 - RNA, 19 nt, Artificial Sequence
  Description of Artificial Sequence: Synthetic oligonucleotide
  Antisense strand to SEQ ID NO: 759688
aacccucaggacaacccug

SEQ ID NO: 759690 - RNA, 19 nt, Artificial Sequence
  Description of Artificial Sequence: Synthetic oligonucleotide
  Sense strand starting at position 789 of SEQ ID NO: 587007
guaggaaguagguauucuu

SEQ ID NO: 759691 - RNA, 19 nt, Artificial Sequence
  Description of Artificial Sequence: Synthetic oligonucleotide
  Antisense strand to SEQ ID NO: 759690
aagaauaccuacuuccuac

SEQ ID NO: 759692 - RNA, 19 nt, Artificial Sequence
  Description of Artificial Sequence: Synthetic oligonucleotide
  Sense strand starting at position 894 of SEQ ID NO: 587007
gcaauauuucgugaugcuc

SEQ ID NO: 759693 - RNA, 19 nt, Artificial Sequence
  Description of Artificial Sequence: Synthetic oligonucleotide
  Antisense strand to SEQ ID NO: 759692
gagcaucacgaaauauugc

SEQ ID NO: 759694 - RNA, 19 nt, Artificial Sequence
  Description of Artificial Sequence: Synthetic oligonucleotide
  Sense strand starting at position 921 of SEQ ID NO: 587007
acuauaucugguugacacu

SEQ ID NO: 759695 - RNA, 19 nt, Artificial Sequence
  Description of Artificial Sequence: Synthetic oligonucleotide
  Antisense strand to SEQ ID NO: 759694
agugucaaccagauauagu

SEQ ID NO: 759696 - RNA, 19 nt, Artificial Sequence
  Description of Artificial Sequence: Synthetic oligonucleotide
  Sense strand starting at position 1240 of SEQ ID NO: 587007
gaaguuugacgucagugag

SEQ ID NO: 759697 - RNA, 19 nt, Artificial Sequence
  Description of Artificial Sequence: Synthetic oligonucleotide
  Antisense strand to SEQ ID NO: 759696
cucacugacgucaaacuuc

SEQ ID NO: 759698 - RNA, 19 nt, Artificial Sequence
  Description of Artificial Sequence: Synthetic oligonucleotide
  Sense strand starting at position 1254 of SEQ ID NO: 587007
gugagaugaugucccacau

SEQ ID NO: 759699 - RNA, 19 nt, Artificial Sequence
  Description of Artificial Sequence: Synthetic oligonucleotide
  Antisense strand to SEQ ID NO: 759698
augugggacaucaucucac

SEQ ID NO: 759700 - RNA, 19 nt, Artificial Sequence
  Description of Artificial Sequence: Synthetic oligonucleotide
  Sense strand starting at position 1607 of SEQ ID NO: 587007
cgcucagggcuuuaaggaa

SEQ ID NO: 759701 - RNA, 19 nt, Artificial Sequence
  Description of Artificial Sequence: Synthetic oligonucleotide
  Antisense strand to SEQ ID NO: 759700
uuccuuaaagcccugagcg

SEQ ID NO: 759702 - RNA, 19 nt, Artificial Sequence
  Description of Artificial Sequence: Synthetic oligonucleotide
  Sense strand starting at position 1789 of SEQ ID NO: 587007
gacacagagugguuuggaa

SEQ ID NO: 759703 - RNA, 19 nt, Artificial Sequence
  Description of Artificial Sequence: Synthetic oligonucleotide
  Antisense strand to SEQ ID NO: 759702
uuccaaaccacucuguguc

SEQ ID NO: 759704 - RNA, 19 nt, Artificial Sequence
  Description of Artificial Sequence: Synthetic oligonucleotide
  Sense strand starting at position 1791 of SEQ ID NO: 587007
cacagagugguuuggaaac

SEQ ID NO: 759705 - RNA, 19 nt, Artificial Sequence
  Description of Artificial Sequence: Synthetic oligonucleotide
  Antisense strand to SEQ ID NO: 759704
guuuccaaaccacucugug

SEQ ID NO: 759706 - RNA, 19 nt, Artificial Sequence
  Description of Artificial Sequence: Synthetic oligonucleotide
  Sense strand starting at position 2053 of SEQ ID NO: 587007
ucucacuagcucuggauau

SEQ ID NO: 759707 - RNA, 19 nt, Artificial Sequence
  Description of Artificial Sequence: Synthetic oligonucleotide
  Antisense strand to SEQ ID NO: 759706
auauccagagcuagugaga

SEQ ID NO: 759708 - RNA, 19 nt, Artificial Sequence
  Description of Artificial Sequence: Synthetic oligonucleotide
  Sense strand starting at position 2055 of SEQ ID NO: 587007
ucacuagcucuggauauga

SEQ ID NO: 759709 - RNA, 19 nt, Artificial Sequence
  Description of Artificial Sequence: Synthetic oligonucleotide
  Antisense strand to SEQ ID NO: 759708
ucauauccagagcuaguga

SEQ ID NO: 759710 - RNA, 19 nt, Artificial Sequence
  Description of Artificial Sequence: Synthetic oligonucleotide
  Sense strand starting at position 2073 of SEQ ID NO: 587007
aagaguuaucccugguaac

SEQ ID NO: 759711 - RNA, 19 nt, Artificial Sequence
  Description of Artificial Sequence: Synthetic oligonucleotide
  Antisense strand to SEQ ID NO: 759710
guuaccagggauaacucuu

SEQ ID NO: 759712 - RNA, 19 nt, Artificial Sequence
  Description of Artificial Sequence: Synthetic oligonucleotide
  Sense strand starting at position 2074 of SEQ ID NO: 587007
agaguuaucccugguaaca

SEQ ID NO: 759713 - RNA, 19 nt, Artificial Sequence
  Description of Artificial Sequence: Synthetic oligonucleotide
  Antisense strand to SEQ ID NO: 759712
uguuaccagggauaacucu

SEQ ID NO: 759714 - RNA, 19 nt, Artificial Sequence
  Description of Artificial Sequence: Synthetic oligonucleotide
  Sense strand starting at position 2257 of SEQ ID NO: 587007
agauucugcccugaaauuc

SEQ ID NO: 759715 - RNA, 19 nt, Artificial Sequence
  Description of Artificial Sequence: Synthetic oligonucleotide
  Antisense strand to SEQ ID NO: 759714
gaauuucagggcagaaucu

SEQ ID NO: 759716 - RNA, 19 nt, Artificial Sequence
  Description of Artificial Sequence: Synthetic oligonucleotide
  Sense strand starting at position 2323 of SEQ ID NO: 587007
agagauccugccgggaaau

SEQ ID NO: 759717 - RNA, 19 nt, Artificial Sequence
  Description of Artificial Sequence: Synthetic oligonucleotide
  Antisense strand to SEQ ID NO: 759716
auuucccggcaggaucucu

SEQ ID NO: 759718 - RNA, 19 nt, Artificial Sequence
  Description of Artificial Sequence: Synthetic oligonucleotide
  Sense strand starting at position 2324 of SEQ ID NO: 587007
gagauccugccgggaaaua

SEQ ID NO: 759719 - RNA, 19 nt, Artificial Sequence
  Description of Artificial Sequence: Synthetic oligonucleotide
  Antisense strand to SEQ ID NO: 759718
uauuucccggcaggaucuc

SEQ ID NO: 759720 - RNA, 19 nt, Artificial Sequence
  Description of Artificial Sequence: Synthetic oligonucleotide
  Sense strand starting at position 2325 of SEQ ID NO: 587007
agauccugccgggaaauau

SEQ ID NO: 759721 - RNA, 19 nt, Artificial Sequence
  Description of Artificial Sequence: Synthetic oligonucleotide
  Antisense strand to SEQ ID NO: 759720
auauuucccggcaggaucu

SEQ ID NO: 759722 - RNA, 19 nt, Artificial Sequence
  Description of Artificial Sequence: Synthetic oligonucleotide
  Sense strand starting at position 2334 of SEQ ID NO: 587007
cgggaaauauucuccuucu

SEQ ID NO: 759723 - RNA, 19 nt, Artificial Sequence
  Description of Artificial Sequence: Synthetic oligonucleotide
  Antisense strand to SEQ ID NO: 759722
agaaggagaauauuucccg

SEQ ID NO: 759724 - RNA, 19 nt, Artificial Sequence
  Description of Artificial Sequence: Synthetic oligonucleotide
  Sense strand starting at position 2335 of SEQ ID NO: 587007
gggaaauauucuccuucuc

SEQ ID NO: 759725 - RNA, 19 nt, Artificial Sequence
  Description of Artificial Sequence: Synthetic oligonucleotide
  Antisense strand to SEQ ID NO: 759724
gagaaggagaauauuuccc

SEQ ID NO: 759726 - RNA, 19 nt, Artificial Sequence
  Description of Artificial Sequence: Synthetic oligonucleotide
  Sense strand starting at position 2500 of SEQ ID NO: 587007
auuuauucuccuuguuagu

SEQ ID NO: 759727 - RNA, 19 nt, Artificial Sequence
  Description of Artificial Sequence: Synthetic oligonucleotide
  Antisense strand to SEQ ID NO: 759726
acuaacaaggagaauaaau

SEQ ID NO: 759728 - RNA, 19 nt, Artificial Sequence
  Description of Artificial Sequence: Synthetic oligonucleotide
  Sense strand starting at position 2547 of SEQ ID NO: 587007
gggacuucaggcuguauua

SEQ ID NO: 759729 - RNA, 19 nt, Artificial Sequence
  Description of Artificial Sequence: Synthetic oligonucleotide
  Antisense strand to SEQ ID NO: 759728
uaauacagccugaaguccc

SEQ ID NO: 759730 - RNA, 19 nt, Artificial Sequence
  Description of Artificial Sequence: Synthetic oligonucleotide
  Sense strand starting at position 2692 of SEQ ID NO: 587007
ucaagaucuucucucuggu

SEQ ID NO: 759731 - RNA, 19 nt, Artificial Sequence
  Description of Artificial Sequence: Synthetic oligonucleotide
  Antisense strand to SEQ ID NO: 759730
accagagagaagaucuuga

SEQ ID NO: 759732 - RNA, 19 nt, Artificial Sequence
  Description of Artificial Sequence: Synthetic oligonucleotide
  Sense strand starting at position 2931 of SEQ ID NO: 587007
ccaagaugagccugagaca

SEQ ID NO: 759733 - RNA, 19 nt, Artificial Sequence
  Description of Artificial Sequence: Synthetic oligonucleotide
  Antisense strand to SEQ ID NO: 759732
ugucucaggcucaucuugg

SEQ ID NO: 759734 - RNA, 19 nt, Artificial Sequence
  Description of Artificial Sequence: Synthetic oligonucleotide
  Sense strand starting at position 2992 of SEQ ID NO: 587007
gcuagacauuggcuuccaa

SEQ ID NO: 759735 - RNA, 19 nt, Artificial Sequence
  Description of Artificial Sequence: Synthetic oligonucleotide
  Antisense strand to SEQ ID NO: 759734
uuggaagccaaugucuagc

SEQ ID NO: 759736 - RNA, 19 nt, Artificial Sequence
  Description of Artificial Sequence: Synthetic oligonucleotide
  Sense strand starting at position 3238 of SEQ ID NO: 587007
ggguuuaauguauaaguga

SEQ ID NO: 759737 - RNA, 19 nt, Artificial Sequence
  Description of Artificial Sequence: Synthetic oligonucleotide
  Antisense strand to SEQ ID NO: 759736
ucacuuauacauuaaaccc

SEQ ID NO: 759738 - RNA, 19 nt, Artificial Sequence
  Description of Artificial Sequence: Synthetic oligonucleotide
  Sense strand starting at position 3270 of SEQ ID NO: 587007
uguagaaagagcuguagaa

SEQ ID NO: 759739 - RNA, 19 nt, Artificial Sequence
  Description of Artificial Sequence: Synthetic oligonucleotide
  Antisense strand to SEQ ID NO: 759738
uucuacagcucuuucuaca

SEQ ID NO: 759740 - RNA, 19 nt, Artificial Sequence
  Description of Artificial Sequence: Synthetic oligonucleotide
  Sense strand starting at position 3348 of SEQ ID NO: 587007
agugguuugacagggaacu

SEQ ID NO: 759741 - RNA, 19 nt, Artificial Sequence
  Description of Artificial Sequence: Synthetic oligonucleotide
  Antisense strand to SEQ ID NO: 759740
aguucccugucaaaccacu

SEQ ID NO: 759742 - RNA, 19 nt, Artificial Sequence
  Description of Artificial Sequence: Synthetic oligonucleotide
  Sense strand starting at position 3349 of SEQ ID NO: 587007
gugguuugacagggaacuu

SEQ ID NO: 759743 - RNA, 19 nt, Artificial Sequence
  Description of Artificial Sequence: Synthetic oligonucleotide
  Antisense strand to SEQ ID NO: 759742
aaguucccugucaaaccac

SEQ ID NO: 759744 - RNA, 19 nt, Artificial Sequence
  Description of Artificial Sequence: Synthetic oligonucleotide
  Sense strand starting at position 3358 of SEQ ID NO: 587007
cagggaacuucugcuauag

SEQ ID NO: 759745 - RNA, 19 nt, Artificial Sequence
  Description of Artificial Sequence: Synthetic oligonucleotide
  Antisense strand to SEQ ID NO: 759744
cuauagcagaaguucccug

SEQ ID NO: 759746 - RNA, 19 nt, Artificial Sequence
  Description of Artificial Sequence: Synthetic oligonucleotide
  Sense strand starting at position 3370 of SEQ ID NO: 587007
gcuauagggagucacaauu

SEQ ID NO: 759747 - RNA, 19 nt, Artificial Sequence
  Description of Artificial Sequence: Synthetic oligonucleotide
  Antisense strand to SEQ ID NO: 759746
aauugugacucccuauagc

SEQ ID NO: 759748 - RNA, 19 nt, Artificial Sequence
  Description of Artificial Sequence: Synthetic oligonucleotide
  Sense strand starting at position 3441 of SEQ ID NO: 587007
aaccuauugugcuugagau

SEQ ID NO: 759749 - RNA, 19 nt, Artificial Sequence
  Description of Artificial Sequence: Synthetic oligonucleotide
  Antisense strand to SEQ ID NO: 759748
aucucaagcacaauagguu

SEQ ID NO: 759750 - RNA, 19 nt, Artificial Sequence
  Description of Artificial Sequence: Synthetic oligonucleotide
  Sense strand starting at position 3443 of SEQ ID NO: 587007
ccuauugugcuugagauuc

SEQ ID NO: 759751 - RNA, 19 nt, Artificial Sequence
  Description of Artificial Sequence: Synthetic oligonucleotide
  Antisense strand to SEQ ID NO: 759750
gaaucucaagcacaauagg

SEQ ID NO: 759752 - RNA, 19 nt, Artificial Sequence
  Description of Artificial Sequence: Synthetic oligonucleotide
  Sense strand starting at position 3506 of SEQ ID NO: 587007
ggcaaacuauugcugugaa

SEQ ID NO: 759753 - RNA, 19 nt, Artificial Sequence
  Description of Artificial Sequence: Synthetic oligonucleotide
  Antisense strand to SEQ ID NO: 759752
uucacagcaauaguuugcc

SEQ ID NO: 759754 - RNA, 19 nt, Artificial Sequence
  Description of Artificial Sequence: Synthetic oligonucleotide
  Sense strand starting at position 3509 of SEQ ID NO: 587007
aaacuauugcugugaaaga

SEQ ID NO: 759755 - RNA, 19 nt, Artificial Sequence
  Description of Artificial Sequence: Synthetic oligonucleotide
  Antisense strand to SEQ ID NO: 759754
ucuuucacagcaauaguuu

SEQ ID NO: 759756 - RNA, 19 nt, Artificial Sequence
  Description of Artificial Sequence: Synthetic oligonucleotide
  Sense strand starting at position 3519 of SEQ ID NO: 587007
ugugaaagauuguuucuuu

SEQ ID NO: 759757 - RNA, 19 nt, Artificial Sequence
  Description of Artificial Sequence: Synthetic oligonucleotide
  Antisense strand to SEQ ID NO: 759756
aaagaaacaaucuuucaca

SEQ ID NO: 759758 - RNA, 19 nt, Artificial Sequence
  Description of Artificial Sequence: Synthetic oligonucleotide
  Sense strand starting at position 3584 of SEQ ID NO: 587007
ggcacuuuaagcuagagau

SEQ ID NO: 759759 - RNA, 19 nt, Artificial Sequence
  Description of Artificial Sequence: Synthetic oligonucleotide
  Antisense strand to SEQ ID NO: 759758
aucucuagcuuaaagugcc

SEQ ID NO: 759760 - RNA, 19 nt, Artificial Sequence
  Description of Artificial Sequence: Synthetic oligonucleotide
  Sense strand starting at position 3754 of SEQ ID NO: 587007
auuugcagaugugauaaga

SEQ ID NO: 759761 - RNA, 19 nt, Artificial Sequence
  Description of Artificial Sequence: Synthetic oligonucleotide
  Antisense strand to SEQ ID NO: 759760
ucuuaucacaucugcaaau

SEQ ID NO: 759762 - RNA, 19 nt, Artificial Sequence
  Description of Artificial Sequence: Synthetic oligonucleotide
  Sense strand starting at position 3880 of SEQ ID NO: 587007
gaacgaauccuuggaacca

SEQ ID NO: 759763 - RNA, 19 nt, Artificial Sequence
  Description of Artificial Sequence: Synthetic oligonucleotide
  Antisense strand to SEQ ID NO: 759762
ugguuccaaggauucguuc

SEQ ID NO: 759764 - RNA, 19 nt, Artificial Sequence
  Description of Artificial Sequence: Synthetic oligonucleotide
  Sense strand starting at position 3889 of SEQ ID NO: 587007
cuuggaaccagaggguuua

SEQ ID NO: 759765 - RNA, 19 nt, Artificial Sequence
  Description of Artificial Sequence: Synthetic oligonucleotide
  Antisense strand to SEQ ID NO: 759764
uaaacccucugguuccaag

SEQ ID NO: 759766 - RNA, 19 nt, Artificial Sequence
  Description of Artificial Sequence: Synthetic oligonucleotide
  Sense strand starting at position 30 of SEQ ID NO: 587008
aaaggacuguacucucaga

SEQ ID NO: 759767 - RNA, 19 nt, Artificial Sequence
  Description of Artificial Sequence: Synthetic oligonucleotide
  Antisense strand to SEQ ID NO: 759766
ucugagaguacaguccuuu

SEQ ID NO: 759768 - RNA, 19 nt, Artificial Sequence
  Description of Artificial Sequence: Synthetic oligonucleotide
  Sense strand starting at position 45 of SEQ ID NO: 587008
cagagccuuugccugaaga

SEQ ID NO: 759769 - RNA, 19 nt, Artificial Sequence
  Description of Artificial Sequence: Synthetic oligonucleotide
  Antisense strand to SEQ ID NO: 759768
ucuucaggcaaaggcucug

SEQ ID NO: 759770 - RNA, 19 nt, Artificial Sequence
  Description of Artificial Sequence: Synthetic oligonucleotide
  Sense strand starting at position 46 of SEQ ID NO: 587008
agagccuuugccugaagaa

SEQ ID NO: 759771 - RNA, 19 nt, Artificial Sequence
  Description of Artificial Sequence: Synthetic oligonucleotide
  Antisense strand to SEQ ID NO: 759770
uucuucaggcaaaggcucu

SEQ ID NO: 759772 - RNA, 19 nt, Artificial Sequence
  Description of Artificial Sequence: Synthetic oligonucleotide
  Sense strand starting at position 47 of SEQ ID NO: 587008
gagccuuugccugaagaag

SEQ ID NO: 759773 - RNA, 19 nt, Artificial Sequence
  Description of Artificial Sequence: Synthetic oligonucleotide
  Antisense strand to SEQ ID NO: 759772
cuucuucaggcaaaggcuc

SEQ ID NO: 759774 - RNA, 19 nt, Artificial Sequence
  Description of Artificial Sequence: Synthetic oligonucleotide
  Sense strand starting at position 214 of SEQ ID NO: 587008
ugauauaucccuggcaccu

SEQ ID NO: 759775 - RNA, 19 nt, Artificial Sequence
  Description of Artificial Sequence: Synthetic oligonucleotide
  Antisense strand to SEQ ID NO: 759774
aggugccagggauauauca

SEQ ID NO: 759776 - RNA, 19 nt, Artificial Sequence
  Description of Artificial Sequence: Synthetic oligonucleotide
  Sense strand starting at position 245 of SEQ ID NO: 587008
ggcagaaaguccucgauaa

SEQ ID NO: 759777 - RNA, 19 nt, Artificial Sequence
  Description of Artificial Sequence: Synthetic oligonucleotide
  Antisense strand to SEQ ID NO: 759776
uuaucgaggacuuucugcc

SEQ ID NO: 759778 - RNA, 19 nt, Artificial Sequence
  Description of Artificial Sequence: Synthetic oligonucleotide
  Sense strand starting at position 246 of SEQ ID NO: 587008
gcagaaaguccucgauaaa

SEQ ID NO: 759779 - RNA, 19 nt, Artificial Sequence
  Description of Artificial Sequence: Synthetic oligonucleotide
  Antisense strand to SEQ ID NO: 759778
uuuaucgaggacuuucugc

SEQ ID NO: 759780 - RNA, 19 nt, Artificial Sequence
  Description of Artificial Sequence: Synthetic oligonucleotide
  Sense strand starting at position 398 of SEQ ID NO: 587008
gcggguaucaucuagcaag

SEQ ID NO: 759781 - RNA, 19 nt, Artificial Sequence
  Description of Artificial Sequence: Synthetic oligonucleotide
  Antisense strand to SEQ ID NO: 759780
cuugcuagaugauacccgc

SEQ ID NO: 759782 - RNA, 19 nt, Artificial Sequence
  Description of Artificial Sequence: Synthetic oligonucleotide
  Sense strand starting at position 588 of SEQ ID NO: 587008
caaggucugggaugccaaa

SEQ ID NO: 759783 - RNA, 19 nt, Artificial Sequence
  Description of Artificial Sequence: Synthetic oligonucleotide
  Antisense strand to SEQ ID NO: 759782
uuuggcaucccagaccuug

SEQ ID NO: 759784 - RNA, 19 nt, Artificial Sequence
  Description of Artificial Sequence: Synthetic oligonucleotide
  Sense strand starting at position 673 of SEQ ID NO: 587008
aagaguuacuauguacuga

SEQ ID NO: 759785 - RNA, 19 nt, Artificial Sequence
  Description of Artificial Sequence: Synthetic oligonucleotide
  Antisense strand to SEQ ID NO: 759784
ucaguacauaguaacucuu

SEQ ID NO: 759786 - RNA, 19 nt, Artificial Sequence
  Description of Artificial Sequence: Synthetic oligonucleotide
  Sense strand starting at position 770 of SEQ ID NO: 587008
ugagguaggcaguguuaau

SEQ ID NO: 759787 - RNA, 19 nt, Artificial Sequence
  Description of Artificial Sequence: Synthetic oligonucleotide
  Antisense strand to SEQ ID NO: 759786
auuaacacugccuaccuca

SEQ ID NO: 759788 - RNA, 19 nt, Artificial Sequence
  Description of Artificial Sequence: Synthetic oligonucleotide
  Sense strand starting at position 781 of SEQ ID NO: 587008
guguuaaucucaucuuaca

SEQ ID NO: 759789 - RNA, 19 nt, Artificial Sequence
  Description of Artificial Sequence: Synthetic oligonucleotide
  Antisense strand to SEQ ID NO: 759788
uguaagaugagauuaacac

SEQ ID NO: 759790 - RNA, 19 nt, Artificial Sequence
  Description of Artificial Sequence: Synthetic oligonucleotide
  Sense strand starting at position 818 of SEQ ID NO: 587008
cagagagguuccguaaugu

SEQ ID NO: 759791 - RNA, 19 nt, Artificial Sequence
  Description of Artificial Sequence: Synthetic oligonucleotide
  Antisense strand to SEQ ID NO: 759790
acauuacggaaccucucug

SEQ ID NO: 759792 - RNA, 19 nt, Artificial Sequence
  Description of Artificial Sequence: Synthetic oligonucleotide
  Sense strand starting at position 884 of SEQ ID NO: 587008
uggucugacuacuccaaag

SEQ ID NO: 759793 - RNA, 19 nt, Artificial Sequence
  Description of Artificial Sequence: Synthetic oligonucleotide
  Antisense strand to SEQ ID NO: 759792
cuuuggaguagucagacca

SEQ ID NO: 759794 - RNA, 19 nt, Artificial Sequence
  Description of Artificial Sequence: Synthetic oligonucleotide
  Sense strand starting at position 886 of SEQ ID NO: 587008
gucugacuacuccaaaguc

SEQ ID NO: 759795 - RNA, 19 nt, Artificial Sequence
  Description of Artificial Sequence: Synthetic oligonucleotide
  Antisense strand to SEQ ID NO: 759794
gacuuuggaguagucagac

SEQ ID NO: 759796 - RNA, 19 nt, Artificial Sequence
  Description of Artificial Sequence: Synthetic oligonucleotide
  Sense strand starting at position 905 of SEQ ID NO: 587008
ugguguucuugaccaccaa

SEQ ID NO: 759797 - RNA, 19 nt, Artificial Sequence
  Description of Artificial Sequence: Synthetic oligonucleotide
  Antisense strand to SEQ ID NO: 759796
uugguggucaagaacacca

SEQ ID NO: 759798 - RNA, 19 nt, Artificial Sequence
  Description of Artificial Sequence: Synthetic oligonucleotide
  Sense strand starting at position 920 of SEQ ID NO: 587008
ccaacuaugccagaugucu

SEQ ID NO: 759799 - RNA, 19 nt, Artificial Sequence
  Description of Artificial Sequence: Synthetic oligonucleotide
  Antisense strand to SEQ ID NO: 759798
agacaucuggcauaguugg

SEQ ID NO: 759800 - RNA, 19 nt, Artificial Sequence
  Description of Artificial Sequence: Synthetic oligonucleotide
  Sense strand starting at position 926 of SEQ ID NO: 587008
augccagaugucugaucuu

SEQ ID NO: 759801 - RNA, 19 nt, Artificial Sequence
  Description of Artificial Sequence: Synthetic oligonucleotide
  Antisense strand to SEQ ID NO: 759800
aagaucagacaucuggcau

SEQ ID NO: 759802 - RNA, 19 nt, Artificial Sequence
  Description of Artificial Sequence: Synthetic oligonucleotide
  Sense strand starting at position 993 of SEQ ID NO: 587008
accagaugauaucugcaga

SEQ ID NO: 759803 - RNA, 19 nt, Artificial Sequence
  Description of Artificial Sequence: Synthetic oligonucleotide
  Antisense strand to SEQ ID NO: 759802
ucugcagauaucaucuggu

SEQ ID NO: 759804 - RNA, 19 nt, Artificial Sequence
  Description of Artificial Sequence: Synthetic oligonucleotide
  Sense strand starting at position 2249 of SEQ ID NO: 587008
uugagaucaggcggguuau

SEQ ID NO: 759805 - RNA, 19 nt, Artificial Sequence
  Description of Artificial Sequence: Synthetic oligonucleotide
  Antisense strand to SEQ ID NO: 759804
auaacccgccugaucucaa

SEQ ID NO: 759806 - RNA, 19 nt, Artificial Sequence
  Description of Artificial Sequence: Synthetic oligonucleotide
  Sense strand starting at position 2469 of SEQ ID NO: 587008
gggacaucgcccgaaacga

SEQ ID NO: 759807 - RNA, 19 nt, Artificial Sequence
  Description of Artificial Sequence: Synthetic oligonucleotide
  Antisense strand to SEQ ID NO: 759806
ucguuucgggcgauguccc

SEQ ID NO: 759808 - RNA, 19 nt, Artificial Sequence
  Description of Artificial Sequence: Synthetic oligonucleotide
  Sense strand starting at position 2498 of SEQ ID NO: 587008
gucucuggaagcugagaau

SEQ ID NO: 759809 - RNA, 19 nt, Artificial Sequence
  Description of Artificial Sequence: Synthetic oligonucleotide
  Antisense strand to SEQ ID NO: 759808
auucucagcuuccagagac

SEQ ID NO: 759810 - RNA, 19 nt, Artificial Sequence
  Description of Artificial Sequence: Synthetic oligonucleotide
  Sense strand starting at position 2679 of SEQ ID NO: 587008
uuccucaugguguguaaau

SEQ ID NO: 759811 - RNA, 19 nt, Artificial Sequence
  Description of Artificial Sequence: Synthetic oligonucleotide
  Antisense strand to SEQ ID NO: 759810
auuuacacaccaugaggaa

SEQ ID NO: 759812 - RNA, 19 nt, Artificial Sequence
  Description of Artificial Sequence: Synthetic oligonucleotide
  Sense strand starting at position 2680 of SEQ ID NO: 587008
uccucaugguguguaaaug

SEQ ID NO: 759813 - RNA, 19 nt, Artificial Sequence
  Description of Artificial Sequence: Synthetic oligonucleotide
  Antisense strand to SEQ ID NO: 759812
cauuuacacaccaugagga

SEQ ID NO: 759814 - RNA, 19 nt, Artificial Sequence
  Description of Artificial Sequence: Synthetic oligonucleotide
  Sense strand starting at position 2681 of SEQ ID NO: 587008
ccucaugguguguaaaugu

SEQ ID NO: 759815 - RNA, 19 nt, Artificial Sequence
  Description of Artificial Sequence: Synthetic oligonucleotide
  Antisense strand to SEQ ID NO: 759814
acauuuacacaccaugagg

SEQ ID NO: 759816 - RNA, 19 nt, Artificial Sequence
  Description of Artificial Sequence: Synthetic oligonucleotide
  Sense strand starting at position 2689 of SEQ ID NO: 587008
uguguaaauguugagggua

SEQ ID NO: 759817 - RNA, 19 nt, Artificial Sequence
  Description of Artificial Sequence: Synthetic oligonucleotide
  Antisense strand to SEQ ID NO: 759816
uacccucaacauuuacaca

SEQ ID NO: 759818 - RNA, 19 nt, Artificial Sequence
  Description of Artificial Sequence: Synthetic oligonucleotide
  Sense strand starting at position 2858 of SEQ ID NO: 587008
gacagucuggcuugguaau

SEQ ID NO: 759819 - RNA, 19 nt, Artificial Sequence
  Description of Artificial Sequence: Synthetic oligonucleotide
  Antisense strand to SEQ ID NO: 759818
auuaccaagccagacuguc

SEQ ID NO: 759820 - RNA, 19 nt, Artificial Sequence
  Description of Artificial Sequence: Synthetic oligonucleotide
  Sense strand starting at position 2859 of SEQ ID NO: 587008
acagucuggcuugguaaua

SEQ ID NO: 759821 - RNA, 19 nt, Artificial Sequence
  Description of Artificial Sequence: Synthetic oligonucleotide
  Antisense strand to SEQ ID NO: 759820
uauuaccaagccagacugu

SEQ ID NO: 759822 - RNA, 19 nt, Artificial Sequence
  Description of Artificial Sequence: Synthetic oligonucleotide
  Sense strand starting at position 2991 of SEQ ID NO: 587008
ugcaguaagcgcuuuccaa

SEQ ID NO: 759823 - RNA, 19 nt, Artificial Sequence
  Description of Artificial Sequence: Synthetic oligonucleotide
  Antisense strand to SEQ ID NO: 759822
uuggaaagcgcuuacugca

SEQ ID NO: 759824 - RNA, 19 nt, Artificial Sequence
  Description of Artificial Sequence: Synthetic oligonucleotide
  Sense strand starting at position 3044 of SEQ ID NO: 587008
uuacgaauccaauguuacu

SEQ ID NO: 759825 - RNA, 19 nt, Artificial Sequence
  Description of Artificial Sequence: Synthetic oligonucleotide
  Antisense strand to SEQ ID NO: 759824
aguaacauuggauucguaa

SEQ ID NO: 759826 - RNA, 19 nt, Artificial Sequence
  Description of Artificial Sequence: Synthetic oligonucleotide
  Sense strand starting at position 3097 of SEQ ID NO: 587008
cgguuuccaagguaucaua

SEQ ID NO: 759827 - RNA, 19 nt, Artificial Sequence
  Description of Artificial Sequence: Synthetic oligonucleotide
  Antisense strand to SEQ ID NO: 759826
uaugauaccuuggaaaccg

SEQ ID NO: 759828 - RNA, 19 nt, Artificial Sequence
  Description of Artificial Sequence: Synthetic oligonucleotide
  Sense strand starting at position 3141 of SEQ ID NO: 587008
uaugcuguucucuggagga

SEQ ID NO: 759829 - RNA, 19 nt, Artificial Sequence
  Description of Artificial Sequence: Synthetic oligonucleotide
  Antisense strand to SEQ ID NO: 759828
uccuccagagaacagcaua

SEQ ID NO: 759830 - RNA, 19 nt, Artificial Sequence
  Description of Artificial Sequence: Synthetic oligonucleotide
  Sense strand starting at position 3143 of SEQ ID NO: 587008
ugcuguucucuggaggaga

SEQ ID NO: 759831 - RNA, 19 nt, Artificial Sequence
  Description of Artificial Sequence: Synthetic oligonucleotide
  Antisense strand to SEQ ID NO: 759830
ucuccuccagagaacagca

SEQ ID NO: 759832 - RNA, 19 nt, Artificial Sequence
  Description of Artificial Sequence: Synthetic oligonucleotide
  Sense strand starting at position 3145 of SEQ ID NO: 587008
cuguucucuggaggagacu

SEQ ID NO: 759833 - RNA, 19 nt, Artificial Sequence
  Description of Artificial Sequence: Synthetic oligonucleotide
  Antisense strand to SEQ ID NO: 759832
agucuccuccagagaacag

SEQ ID NO: 759834 - RNA, 19 nt, Artificial Sequence
  Description of Artificial Sequence: Synthetic oligonucleotide
  Sense strand starting at position 3154 of SEQ ID NO: 587008
ggaggagacugucuucugu

SEQ ID NO: 759835 - RNA, 19 nt, Artificial Sequence
  Description of Artificial Sequence: Synthetic oligonucleotide
  Antisense strand to SEQ ID NO: 759834
acagaagacagucuccucc

SEQ ID NO: 759836 - RNA, 19 nt, Artificial Sequence
  Description of Artificial Sequence: Synthetic oligonucleotide
  Sense strand starting at position 3199 of SEQ ID NO: 587008
uaaagauucuaguuaguug

SEQ ID NO: 759837 - RNA, 19 nt, Artificial Sequence
  Description of Artificial Sequence: Synthetic oligonucleotide
  Antisense strand to SEQ ID NO: 759836
caacuaacuagaaucuuua

SEQ ID NO: 759838 - RNA, 19 nt, Artificial Sequence
  Description of Artificial Sequence: Synthetic oligonucleotide
  Sense strand starting at position 3202 of SEQ ID NO: 587008
agauucuaguuaguuguca

SEQ ID NO: 759839 - RNA, 19 nt, Artificial Sequence
  Description of Artificial Sequence: Synthetic oligonucleotide
  Antisense strand to SEQ ID NO: 759838
ugacaacuaacuagaaucu

SEQ ID NO: 759840 - RNA, 19 nt, Artificial Sequence
  Description of Artificial Sequence: Synthetic oligonucleotide
  Sense strand starting at position 3435 of SEQ ID NO: 587008
guucauaggcgacagaaca

SEQ ID NO: 759841 - RNA, 19 nt, Artificial Sequence
  Description of Artificial Sequence: Synthetic oligonucleotide
  Antisense strand to SEQ ID NO: 759840
uguucugucgccuaugaac

SEQ ID NO: 759842 - RNA, 19 nt, Artificial Sequence
  Description of Artificial Sequence: Synthetic oligonucleotide
  Sense strand starting at position 3830 of SEQ ID NO: 587008
gaguguggcguuuacagaa

SEQ ID NO: 759843 - RNA, 19 nt, Artificial Sequence
  Description of Artificial Sequence: Synthetic oligonucleotide
  Antisense strand to SEQ ID NO: 759842
uucuguaaacgccacacuc

SEQ ID NO: 759844 - RNA, 19 nt, Artificial Sequence
  Description of Artificial Sequence: Synthetic oligonucleotide
  Sense strand starting at position 3921 of SEQ ID NO: 587008
gguauaauuuguuaaacuc

SEQ ID NO: 759845 - RNA, 19 nt, Artificial Sequence
  Description of Artificial Sequence: Synthetic oligonucleotide
  Antisense strand to SEQ ID NO: 759844
gaguuuaacaaauuauacc

SEQ ID NO: 759846 - RNA, 19 nt, Artificial Sequence
  Description of Artificial Sequence: Synthetic oligonucleotide
  Sense strand starting at position 15 of SEQ ID NO: 587009
gcggaagccucagaccauu

SEQ ID NO: 759847 - RNA, 19 nt, Artificial Sequence
  Description of Artificial Sequence: Synthetic oligonucleotide
  Antisense strand to SEQ ID NO: 759846
aauggucugaggcuuccgc

SEQ ID NO: 759848 - RNA, 19 nt, Artificial Sequence
  Description of Artificial Sequence: Synthetic oligonucleotide
  Sense strand starting at position 168 of SEQ ID NO: 587009
gccugagucugacuaucuu

SEQ ID NO: 759849 - RNA, 19 nt, Artificial Sequence
  Description of Artificial Sequence: Synthetic oligonucleotide
  Antisense strand to SEQ ID NO: 759848
aagauagucagacucaggc

SEQ ID NO: 759850 - RNA, 19 nt, Artificial Sequence
  Description of Artificial Sequence: Synthetic oligonucleotide
  Sense strand starting at position 230 of SEQ ID NO: 587009
aggcaagccguguuucuuu

SEQ ID NO: 759851 - RNA, 19 nt, Artificial Sequence
  Description of Artificial Sequence: Synthetic oligonucleotide
  Antisense strand to SEQ ID NO: 759850
aaagaaacacggcuugccu

SEQ ID NO: 759852 - RNA, 19 nt, Artificial Sequence
  Description of Artificial Sequence: Synthetic oligonucleotide
  Sense strand starting at position 287 of SEQ ID NO: 587009
ugacaugccagaggcuauu

SEQ ID NO: 759853 - RNA, 19 nt, Artificial Sequence
  Description of Artificial Sequence: Synthetic oligonucleotide
  Antisense strand to SEQ ID NO: 759852
aauagccucuggcauguca

SEQ ID NO: 759854 - RNA, 19 nt, Artificial Sequence
  Description of Artificial Sequence: Synthetic oligonucleotide
  Sense strand starting at position 298 of SEQ ID NO: 587009
aggcuauuauccuauguag

SEQ ID NO: 759855 - RNA, 19 nt, Artificial Sequence
  Description of Artificial Sequence: Synthetic oligonucleotide
  Antisense strand to SEQ ID NO: 759854
cuacauaggauaauagccu

SEQ ID NO: 759856 - RNA, 19 nt, Artificial Sequence
  Description of Artificial Sequence: Synthetic oligonucleotide
  Sense strand starting at position 562 of SEQ ID NO: 587009
gggcgcucggccaggaaua

SEQ ID NO: 759857 - RNA, 19 nt, Artificial Sequence
  Description of Artificial Sequence: Synthetic oligonucleotide
  Antisense strand to SEQ ID NO: 759856
uauuccuggccgagcgccc

SEQ ID NO: 759858 - RNA, 19 nt, Artificial Sequence
  Description of Artificial Sequence: Synthetic oligonucleotide
  Sense strand starting at position 563 of SEQ ID NO: 587009
ggcgcucggccaggaauaa

SEQ ID NO: 759859 - RNA, 19 nt, Artificial Sequence
  Description of Artificial Sequence: Synthetic oligonucleotide
  Antisense strand to SEQ ID NO: 759858
uuauuccuggccgagcgcc

SEQ ID NO: 759860 - RNA, 19 nt, Artificial Sequence
  Description of Artificial Sequence: Synthetic oligonucleotide
  Sense strand starting at position 900 of SEQ ID NO: 587009
gacucaaucuagucuugag

SEQ ID NO: 759861 - RNA, 19 nt, Artificial Sequence
  Description of Artificial Sequence: Synthetic oligonucleotide
  Antisense strand to SEQ ID NO: 759860
cucaagacuagauugaguc

SEQ ID NO: 759862 - RNA, 19 nt, Artificial Sequence
  Description of Artificial Sequence: Synthetic oligonucleotide
  Sense strand starting at position 910 of SEQ ID NO: 587009
agucuugagccuugaucca

SEQ ID NO: 759863 - RNA, 19 nt, Artificial Sequence
  Description of Artificial Sequence: Synthetic oligonucleotide
  Antisense strand to SEQ ID NO: 759862
uggaucaaggcucaagacu

SEQ ID NO: 759864 - RNA, 19 nt, Artificial Sequence
  Description of Artificial Sequence: Synthetic oligonucleotide
  Sense strand starting at position 1081 of SEQ ID NO: 587009
ggcucugacucagaacguu

SEQ ID NO: 759865 - RNA, 19 nt, Artificial Sequence
  Description of Artificial Sequence: Synthetic oligonucleotide
  Antisense strand to SEQ ID NO: 759864
aacguucugagucagagcc

SEQ ID NO: 759866 - RNA, 19 nt, Artificial Sequence
  Description of Artificial Sequence: Synthetic oligonucleotide
  Sense strand starting at position 1150 of SEQ ID NO: 587009
ggguuucccagauacaggu

SEQ ID NO: 759867 - RNA, 19 nt, Artificial Sequence
  Description of Artificial Sequence: Synthetic oligonucleotide
  Antisense strand to SEQ ID NO: 759866
accuguaucugggaaaccc

SEQ ID NO: 759868 - RNA, 19 nt, Artificial Sequence
  Description of Artificial Sequence: Synthetic oligonucleotide
  Sense strand starting at position 1938 of SEQ ID NO: 587009
ccuucaugcucccgggagu

SEQ ID NO: 759869 - RNA, 19 nt, Artificial Sequence
  Description of Artificial Sequence: Synthetic oligonucleotide
  Antisense strand to SEQ ID NO: 759868
acucccgggagcaugaagg

SEQ ID NO: 759870 - RNA, 19 nt, Artificial Sequence
  Description of Artificial Sequence: Synthetic oligonucleotide
  Sense strand starting at position 2377 of SEQ ID NO: 587009
acuagaguugcucgccacu

SEQ ID NO: 759871 - RNA, 19 nt, Artificial Sequence
  Description of Artificial Sequence: Synthetic oligonucleotide
  Antisense strand to SEQ ID NO: 759870
aguggcgagcaacucuagu

SEQ ID NO: 759872 - RNA, 19 nt, Artificial Sequence
  Description of Artificial Sequence: Synthetic oligonucleotide
  Sense strand starting at position 2389 of SEQ ID NO: 587009
cgccacuacuccugaauaa

SEQ ID NO: 759873 - RNA, 19 nt, Artificial Sequence
  Description of Artificial Sequence: Synthetic oligonucleotide
  Antisense strand to SEQ ID NO: 759872
uuauucaggaguaguggcg

SEQ ID NO: 759874 - RNA, 19 nt, Artificial Sequence
  Description of Artificial Sequence: Synthetic oligonucleotide
  Sense strand starting at position 2611 of SEQ ID NO: 587009
cccagaauuugcugaaggu

SEQ ID NO: 759875 - RNA, 19 nt, Artificial Sequence
  Description of Artificial Sequence: Synthetic oligonucleotide
  Antisense strand to SEQ ID NO: 759874
accuucagcaaauucuggg

SEQ ID NO: 759876 - RNA, 19 nt, Artificial Sequence
  Description of Artificial Sequence: Synthetic oligonucleotide
  Sense strand starting at position 3295 of SEQ ID NO: 587009
ucccaaguagcuugagauu

SEQ ID NO: 759877 - RNA, 19 nt, Artificial Sequence
  Description of Artificial Sequence: Synthetic oligonucleotide
  Antisense strand to SEQ ID NO: 759876
aaucucaagcuacuuggga

SEQ ID NO: 759878 - RNA, 19 nt, Artificial Sequence
  Description of Artificial Sequence: Synthetic oligonucleotide
  Sense strand starting at position 3298 of SEQ ID NO: 587009
caaguagcuugagauuaca

SEQ ID NO: 759879 - RNA, 19 nt, Artificial Sequence
  Description of Artificial Sequence: Synthetic oligonucleotide
  Antisense strand to SEQ ID NO: 759878
uguaaucucaagcuacuug

SEQ ID NO: 759880 - RNA, 19 nt, Artificial Sequence
  Description of Artificial Sequence: Synthetic oligonucleotide
  Sense strand starting at position 3481 of SEQ ID NO: 587009
acuacucuaucuuugggaa

SEQ ID NO: 759881 - RNA, 19 nt, Artificial Sequence
  Description of Artificial Sequence: Synthetic oligonucleotide
  Antisense strand to SEQ ID NO: 759880
uucccaaagauagaguagu

SEQ ID NO: 759882 - RNA, 19 nt, Artificial Sequence
  Description of Artificial Sequence: Synthetic oligonucleotide
  Sense strand starting at position 3482 of SEQ ID NO: 587009
cuacucuaucuuugggaaa

SEQ ID NO: 759883 - RNA, 19 nt, Artificial Sequence
  Description of Artificial Sequence: Synthetic oligonucleotide
  Antisense strand to SEQ ID NO: 759882
uuucccaaagauagaguag

SEQ ID NO: 759884 - RNA, 19 nt, Artificial Sequence
  Description of Artificial Sequence: Synthetic oligonucleotide
  Sense strand starting at position 3484 of SEQ ID NO: 587009
acucuaucuuugggaaaga

SEQ ID NO: 759885 - RNA, 19 nt, Artificial Sequence
  Description of Artificial Sequence: Synthetic oligonucleotide
  Antisense strand to SEQ ID NO: 759884
ucuuucccaaagauagagu

SEQ ID NO: 759886 - RNA, 19 nt, Artificial Sequence
  Description of Artificial Sequence: Synthetic oligonucleotide
  Sense strand starting at position 3686 of SEQ ID NO: 587009
ugggauuacacuuggccaa

SEQ ID NO: 759887 - RNA, 19 nt, Artificial Sequence
  Description of Artificial Sequence: Synthetic oligonucleotide
  Antisense strand to SEQ ID NO: 759886
uuggccaaguguaauccca

SEQ ID NO: 759888 - RNA, 19 nt, Artificial Sequence
  Description of Artificial Sequence: Synthetic oligonucleotide
  Sense strand starting at position 3687 of SEQ ID NO: 587009
gggauuacacuuggccaau

SEQ ID NO: 759889 - RNA, 19 nt, Artificial Sequence
  Description of Artificial Sequence: Synthetic oligonucleotide
  Antisense strand to SEQ ID NO: 759888
auuggccaaguguaauccc

SEQ ID NO: 759890 - RNA, 19 nt, Artificial Sequence
  Description of Artificial Sequence: Synthetic oligonucleotide
  Sense strand starting at position 3828 of SEQ ID NO: 587009
ccagcaucuuguugcaaca

SEQ ID NO: 759891 - RNA, 19 nt, Artificial Sequence
  Description of Artificial Sequence: Synthetic oligonucleotide
  Antisense strand to SEQ ID NO: 759890
uguugcaacaagaugcugg

SEQ ID NO: 759892 - RNA, 19 nt, Artificial Sequence
  Description of Artificial Sequence: Synthetic oligonucleotide
  Sense strand starting at position 57 of SEQ ID NO: 587010
ugaauacuggccuaugcuu

SEQ ID NO: 759893 - RNA, 19 nt, Artificial Sequence
  Description of Artificial Sequence: Synthetic oligonucleotide
  Antisense strand to SEQ ID NO: 759892
aagcauaggccaguauuca

SEQ ID NO: 759894 - RNA, 19 nt, Artificial Sequence
  Description of Artificial Sequence: Synthetic oligonucleotide
  Sense strand starting at position 214 of SEQ ID NO: 587010
ggaguugaauguuccauug

SEQ ID NO: 759895 - RNA, 19 nt, Artificial Sequence
  Description of Artificial Sequence: Synthetic oligonucleotide
  Antisense strand to SEQ ID NO: 759894
caauggaacauucaacucc

SEQ ID NO: 759896 - RNA, 19 nt, Artificial Sequence
  Description of Artificial Sequence: Synthetic oligonucleotide
  Sense strand starting at position 216 of SEQ ID NO: 587010
aguugaauguuccauugag

SEQ ID NO: 759897 - RNA, 19 nt, Artificial Sequence
  Description of Artificial Sequence: Synthetic oligonucleotide
  Antisense strand to SEQ ID NO: 759896
cucaauggaacauucaacu

SEQ ID NO: 759898 - RNA, 19 nt, Artificial Sequence
  Description of Artificial Sequence: Synthetic oligonucleotide
  Sense strand starting at position 363 of SEQ ID NO: 587010
gccggaguuuagcucuuau

SEQ ID NO: 759899 - RNA, 19 nt, Artificial Sequence
  Description of Artificial Sequence: Synthetic oligonucleotide
  Antisense strand to SEQ ID NO: 759898
auaagagcuaaacuccggc

SEQ ID NO: 759900 - RNA, 19 nt, Artificial Sequence
  Description of Artificial Sequence: Synthetic oligonucleotide
  Sense strand starting at position 1282 of SEQ ID NO: 587010
guaauaaacucauugugag

SEQ ID NO: 759901 - RNA, 19 nt, Artificial Sequence
  Description of Artificial Sequence: Synthetic oligonucleotide
  Antisense strand to SEQ ID NO: 759900
cucacaaugaguuuauuac

SEQ ID NO: 759902 - RNA, 19 nt, Artificial Sequence
  Description of Artificial Sequence: Synthetic oligonucleotide
  Sense strand starting at position 1285 of SEQ ID NO: 587010
auaaacucauugugagcaa

SEQ ID NO: 759903 - RNA, 19 nt, Artificial Sequence
  Description of Artificial Sequence: Synthetic oligonucleotide
  Antisense strand to SEQ ID NO: 759902
uugcucacaaugaguuuau

SEQ ID NO: 759904 - RNA, 19 nt, Artificial Sequence
  Description of Artificial Sequence: Synthetic oligonucleotide
  Sense strand starting at position 1288 of SEQ ID NO: 587010
aacucauugugagcaagga

SEQ ID NO: 759905 - RNA, 19 nt, Artificial Sequence
  Description of Artificial Sequence: Synthetic oligonucleotide
  Antisense strand to SEQ ID NO: 759904
uccuugcucacaaugaguu

SEQ ID NO: 759906 - RNA, 19 nt, Artificial Sequence
  Description of Artificial Sequence: Synthetic oligonucleotide
  Sense strand starting at position 1314 of SEQ ID NO: 587010
ucgacuuucugucugcgua

SEQ ID NO: 759907 - RNA, 19 nt, Artificial Sequence
  Description of Artificial Sequence: Synthetic oligonucleotide
  Antisense strand to SEQ ID NO: 759906
uacgcagacagaaagucga

SEQ ID NO: 759908 - RNA, 19 nt, Artificial Sequence
  Description of Artificial Sequence: Synthetic oligonucleotide
  Sense strand starting at position 1315 of SEQ ID NO: 587010
cgacuuucugucugcguaa

SEQ ID NO: 759909 - RNA, 19 nt, Artificial Sequence
  Description of Artificial Sequence: Synthetic oligonucleotide
  Antisense strand to SEQ ID NO: 759908
uuacgcagacagaaagucg

SEQ ID NO: 759910 - RNA, 19 nt, Artificial Sequence
  Description of Artificial Sequence: Synthetic oligonucleotide
  Sense strand starting at position 1316 of SEQ ID NO: 587010
gacuuucugucugcguaaa

SEQ ID NO: 759911 - RNA, 19 nt, Artificial Sequence
  Description of Artificial Sequence: Synthetic oligonucleotide
  Antisense strand to SEQ ID NO: 759910
uuuacgcagacagaaaguc

SEQ ID NO: 759912 - RNA, 19 nt, Artificial Sequence
  Description of Artificial Sequence: Synthetic oligonucleotide
  Sense strand starting at position 1317 of SEQ ID NO: 587010
acuuucugucugcguaaac

SEQ ID NO: 759913 - RNA, 19 nt, Artificial Sequence
  Description of Artificial Sequence: Synthetic oligonucleotide
  Antisense strand to SEQ ID NO: 759912
guuuacgcagacagaaagu

SEQ ID NO: 759914 - RNA, 19 nt, Artificial Sequence
  Description of Artificial Sequence: Synthetic oligonucleotide
  Sense strand starting at position 1318 of SEQ ID NO: 587010
cuuucugucugcguaaacu

SEQ ID NO: 759915 - RNA, 19 nt, Artificial Sequence
  Description of Artificial Sequence: Synthetic oligonucleotide
  Antisense strand to SEQ ID NO: 759914
aguuuacgcagacagaaag

SEQ ID NO: 759916 - RNA, 19 nt, Artificial Sequence
  Description of Artificial Sequence: Synthetic oligonucleotide
  Sense strand starting at position 1326 of SEQ ID NO: 587010
cugcguaaacucuacaaau

SEQ ID NO: 759917 - RNA, 19 nt, Artificial Sequence
  Description of Artificial Sequence: Synthetic oligonucleotide
  Antisense strand to SEQ ID NO: 759916
auuuguagaguuuacgcag

SEQ ID NO: 759918 - RNA, 19 nt, Artificial Sequence
  Description of Artificial Sequence: Synthetic oligonucleotide
  Sense strand starting at position 1363 of SEQ ID NO: 587010
agugucuuuauucguaaag

SEQ ID NO: 759919 - RNA, 19 nt, Artificial Sequence
  Description of Artificial Sequence: Synthetic oligonucleotide
  Antisense strand to SEQ ID NO: 759918
cuuuacgaauaaagacacu

SEQ ID NO: 759920 - RNA, 19 nt, Artificial Sequence
  Description of Artificial Sequence: Synthetic oligonucleotide
  Sense strand starting at position 1434 of SEQ ID NO: 587010
acuguaugaccacggaagu

SEQ ID NO: 759921 - RNA, 19 nt, Artificial Sequence
  Description of Artificial Sequence: Synthetic oligonucleotide
  Antisense strand to SEQ ID NO: 759920
acuuccguggucauacagu

SEQ ID NO: 759922 - RNA, 19 nt, Artificial Sequence
  Description of Artificial Sequence: Synthetic oligonucleotide
  Sense strand starting at position 1435 of SEQ ID NO: 587010
cuguaugaccacggaaguu

SEQ ID NO: 759923 - RNA, 19 nt, Artificial Sequence
  Description of Artificial Sequence: Synthetic oligonucleotide
  Antisense strand to SEQ ID NO: 759922
aacuuccguggucauacag

SEQ ID NO: 759924 - RNA, 19 nt, Artificial Sequence
  Description of Artificial Sequence: Synthetic oligonucleotide
  Sense strand starting at position 1447 of SEQ ID NO: 587010
ggaaguuguugucccuaca

SEQ ID NO: 759925 - RNA, 19 nt, Artificial Sequence
  Description of Artificial Sequence: Synthetic oligonucleotide
  Antisense strand to SEQ ID NO: 759924
uguagggacaacaacuucc

SEQ ID NO: 759926 - RNA, 19 nt, Artificial Sequence
  Description of Artificial Sequence: Synthetic oligonucleotide
  Sense strand starting at position 1487 of SEQ ID NO: 587010
acagaauagugguccucua

SEQ ID NO: 759927 - RNA, 19 nt, Artificial Sequence
  Description of Artificial Sequence: Synthetic oligonucleotide
  Antisense strand to SEQ ID NO: 759926
uagaggaccacuauucugu

SEQ ID NO: 759928 - RNA, 19 nt, Artificial Sequence
  Description of Artificial Sequence: Synthetic oligonucleotide
  Sense strand starting at position 1517 of SEQ ID NO: 587010
gcuggaggucgccauuauc

SEQ ID NO: 759929 - RNA, 19 nt, Artificial Sequence
  Description of Artificial Sequence: Synthetic oligonucleotide
  Antisense strand to SEQ ID NO: 759928
gauaauggcgaccuccagc

SEQ ID NO: 759930 - RNA, 19 nt, Artificial Sequence
  Description of Artificial Sequence: Synthetic oligonucleotide
  Sense strand starting at position 1567 of SEQ ID NO: 587010
gucucugcaacuugggaaa

SEQ ID NO: 759931 - RNA, 19 nt, Artificial Sequence
  Description of Artificial Sequence: Synthetic oligonucleotide
  Antisense strand to SEQ ID NO: 759930
uuucccaaguugcagagac

SEQ ID NO: 759932 - RNA, 19 nt, Artificial Sequence
  Description of Artificial Sequence: Synthetic oligonucleotide
  Sense strand starting at position 1992 of SEQ ID NO: 587010
ggaaguggccgugaucuca

SEQ ID NO: 759933 - RNA, 19 nt, Artificial Sequence
  Description of Artificial Sequence: Synthetic oligonucleotide
  Antisense strand to SEQ ID NO: 759932
ugagaucacggccacuucc

SEQ ID NO: 759934 - RNA, 19 nt, Artificial Sequence
  Description of Artificial Sequence: Synthetic oligonucleotide
  Sense strand starting at position 2510 of SEQ ID NO: 587010
cgccuucaagguugggaaa

SEQ ID NO: 759935 - RNA, 19 nt, Artificial Sequence
  Description of Artificial Sequence: Synthetic oligonucleotide
  Antisense strand to SEQ ID NO: 759934
uuucccaaccuugaaggcg

SEQ ID NO: 759936 - RNA, 19 nt, Artificial Sequence
  Description of Artificial Sequence: Synthetic oligonucleotide
  Sense strand starting at position 2532 of SEQ ID NO: 587010
gggcucugcaucugaaagu

SEQ ID NO: 759937 - RNA, 19 nt, Artificial Sequence
  Description of Artificial Sequence: Synthetic oligonucleotide
  Antisense strand to SEQ ID NO: 759936
acuuucagaugcagagccc

SEQ ID NO: 759938 - RNA, 19 nt, Artificial Sequence
  Description of Artificial Sequence: Synthetic oligonucleotide
  Sense strand starting at position 3076 of SEQ ID NO: 587010
gcccaagagggagguaauu

SEQ ID NO: 759939 - RNA, 19 nt, Artificial Sequence
  Description of Artificial Sequence: Synthetic oligonucleotide
  Antisense strand to SEQ ID NO: 759938
aauuaccucccucuugggc

SEQ ID NO: 759940 - RNA, 19 nt, Artificial Sequence
  Description of Artificial Sequence: Synthetic oligonucleotide
  Sense strand starting at position 3118 of SEQ ID NO: 587010
aucgaaguucucgaguuuc

SEQ ID NO: 759941 - RNA, 19 nt, Artificial Sequence
  Description of Artificial Sequence: Synthetic oligonucleotide
  Antisense strand to SEQ ID NO: 759940
gaaacucgagaacuucgau

SEQ ID NO: 759942 - RNA, 19 nt, Artificial Sequence
  Description of Artificial Sequence: Synthetic oligonucleotide
  Sense strand starting at position 3167 of SEQ ID NO: 587010
acaaaugcuccuggauuga

SEQ ID NO: 759943 - RNA, 19 nt, Artificial Sequence
  Description of Artificial Sequence: Synthetic oligonucleotide
  Antisense strand to SEQ ID NO: 759942
ucaauccaggagcauuugu

SEQ ID NO: 759944 - RNA, 19 nt, Artificial Sequence
  Description of Artificial Sequence: Synthetic oligonucleotide
  Sense strand starting at position 3203 of SEQ ID NO: 587010
caucgcaaguugguaauau

SEQ ID NO: 759945 - RNA, 19 nt, Artificial Sequence
  Description of Artificial Sequence: Synthetic oligonucleotide
  Antisense strand to SEQ ID NO: 759944
auauuaccaacuugcgaug

SEQ ID NO: 759946 - RNA, 19 nt, Artificial Sequence
  Description of Artificial Sequence: Synthetic oligonucleotide
  Sense strand starting at position 3207 of SEQ ID NO: 587010
gcaaguugguaauauccua

SEQ ID NO: 759947 - RNA, 19 nt, Artificial Sequence
  Description of Artificial Sequence: Synthetic oligonucleotide
  Antisense strand to SEQ ID NO: 759946
uaggauauuaccaacuugc

SEQ ID NO: 759948 - RNA, 19 nt, Artificial Sequence
  Description of Artificial Sequence: Synthetic oligonucleotide
  Sense strand starting at position 3212 of SEQ ID NO: 587010
uugguaauauccuaaguca

SEQ ID NO: 759949 - RNA, 19 nt, Artificial Sequence
  Description of Artificial Sequence: Synthetic oligonucleotide
  Antisense strand to SEQ ID NO: 759948
ugacuuaggauauuaccaa

SEQ ID NO: 759950 - RNA, 19 nt, Artificial Sequence
  Description of Artificial Sequence: Synthetic oligonucleotide
  Sense strand starting at position 3236 of SEQ ID NO: 587010
cgaguuuaacuuuguguau

SEQ ID NO: 759951 - RNA, 19 nt, Artificial Sequence
  Description of Artificial Sequence: Synthetic oligonucleotide
  Antisense strand to SEQ ID NO: 759950
auacacaaaguuaaacucg

SEQ ID NO: 759952 - RNA, 19 nt, Artificial Sequence
  Description of Artificial Sequence: Synthetic oligonucleotide
  Sense strand starting at position 3237 of SEQ ID NO: 587010
gaguuuaacuuuguguauu

SEQ ID NO: 759953 - RNA, 19 nt, Artificial Sequence
  Description of Artificial Sequence: Synthetic oligonucleotide
  Antisense strand to SEQ ID NO: 759952
aauacacaaaguuaaacuc

SEQ ID NO: 759954 - RNA, 19 nt, Artificial Sequence
  Description of Artificial Sequence: Synthetic oligonucleotide
  Sense strand starting at position 3336 of SEQ ID NO: 587010
ggcccagcuguauacagau

SEQ ID NO: 759955 - RNA, 19 nt, Artificial Sequence
  Description of Artificial Sequence: Synthetic oligonucleotide
  Antisense strand to SEQ ID NO: 759954
aucuguauacagcugggcc

SEQ ID NO: 759956 - RNA, 19 nt, Artificial Sequence
  Description of Artificial Sequence: Synthetic oligonucleotide
  Sense strand starting at position 3345 of SEQ ID NO: 587010
guauacagauaaguacauu

SEQ ID NO: 759957 - RNA, 19 nt, Artificial Sequence
  Description of Artificial Sequence: Synthetic oligonucleotide
  Antisense strand to SEQ ID NO: 759956
aauguacuuaucuguauac

SEQ ID NO: 759958 - RNA, 19 nt, Artificial Sequence
  Description of Artificial Sequence: Synthetic oligonucleotide
  Sense strand starting at position 3371 of SEQ ID NO: 587010
ugugcuugccaacaacuau

SEQ ID NO: 759959 - RNA, 19 nt, Artificial Sequence
  Description of Artificial Sequence: Synthetic oligonucleotide
  Antisense strand to SEQ ID NO: 759958
auaguuguuggcaagcaca

SEQ ID NO: 759960 - RNA, 19 nt, Artificial Sequence
  Description of Artificial Sequence: Synthetic oligonucleotide
  Sense strand starting at position 3411 of SEQ ID NO: 587010
caagauaagugagaaguga

SEQ ID NO: 759961 - RNA, 19 nt, Artificial Sequence
  Description of Artificial Sequence: Synthetic oligonucleotide
  Antisense strand to SEQ ID NO: 759960
ucacuucucacuuaucuug

SEQ ID NO: 759962 - RNA, 19 nt, Artificial Sequence
  Description of Artificial Sequence: Synthetic oligonucleotide
  Sense strand starting at position 3475 of SEQ ID NO: 587010
cgaugaaggucuuagggaa

SEQ ID NO: 759963 - RNA, 19 nt, Artificial Sequence
  Description of Artificial Sequence: Synthetic oligonucleotide
  Antisense strand to SEQ ID NO: 759962
uucccuaagaccuucaucg

SEQ ID NO: 759964 - RNA, 19 nt, Artificial Sequence
  Description of Artificial Sequence: Synthetic oligonucleotide
  Sense strand starting at position 3482 of SEQ ID NO: 587010
ggucuuagggaaugaguaa

SEQ ID NO: 759965 - RNA, 19 nt, Artificial Sequence
  Description of Artificial Sequence: Synthetic oligonucleotide
  Antisense strand to SEQ ID NO: 759964
uuacucauucccuaagacc

SEQ ID NO: 759966 - RNA, 19 nt, Artificial Sequence
  Description of Artificial Sequence: Synthetic oligonucleotide
  Sense strand starting at position 3645 of SEQ ID NO: 587010
cgacauauuuauugagcua

SEQ ID NO: 759967 - RNA, 19 nt, Artificial Sequence
  Description of Artificial Sequence: Synthetic oligonucleotide
  Antisense strand to SEQ ID NO: 759966
uagcucaauaaauaugucg

SEQ ID NO: 759968 - RNA, 19 nt, Artificial Sequence
  Description of Artificial Sequence: Synthetic oligonucleotide
  Sense strand starting at position 3657 of SEQ ID NO: 587010
ugagcuagguacuggaaau

SEQ ID NO: 759969 - RNA, 19 nt, Artificial Sequence
  Description of Artificial Sequence: Synthetic oligonucleotide
  Antisense strand to SEQ ID NO: 759968
auuuccaguaccuagcuca

SEQ ID NO: 759970 - RNA, 19 nt, Artificial Sequence
  Description of Artificial Sequence: Synthetic oligonucleotide
  Sense strand starting at position 3701 of SEQ ID NO: 587010
cccugcucucacggaaauu

SEQ ID NO: 759971 - RNA, 19 nt, Artificial Sequence
  Description of Artificial Sequence: Synthetic oligonucleotide
  Antisense strand to SEQ ID NO: 759970
aauuuccgugagagcaggg

SEQ ID NO: 759972 - RNA, 19 nt, Artificial Sequence
  Description of Artificial Sequence: Synthetic oligonucleotide
  Sense strand starting at position 388 of SEQ ID NO: 587011
acgugcuaccuugauuaag

SEQ ID NO: 759973 - RNA, 19 nt, Artificial Sequence
  Description of Artificial Sequence: Synthetic oligonucleotide
  Antisense strand to SEQ ID NO: 759972
cuuaaucaagguagcacgu

SEQ ID NO: 759974 - RNA, 19 nt, Artificial Sequence
  Description of Artificial Sequence: Synthetic oligonucleotide
  Sense strand starting at position 402 of SEQ ID NO: 587011
uuaagucuaucacuuguau

SEQ ID NO: 759975 - RNA, 19 nt, Artificial Sequence
  Description of Artificial Sequence: Synthetic oligonucleotide
  Antisense strand to SEQ ID NO: 759974
auacaagugauagacuuaa

SEQ ID NO: 759976 - RNA, 19 nt, Artificial Sequence
  Description of Artificial Sequence: Synthetic oligonucleotide
  Sense strand starting at position 510 of SEQ ID NO: 587011
gauagaagcugagaagaua

SEQ ID NO: 759977 - RNA, 19 nt, Artificial Sequence
  Description of Artificial Sequence: Synthetic oligonucleotide
  Antisense strand to SEQ ID NO: 759976
uaucuucucagcuucuauc

SEQ ID NO: 759978 - RNA, 19 nt, Artificial Sequence
  Description of Artificial Sequence: Synthetic oligonucleotide
  Sense strand starting at position 625 of SEQ ID NO: 587011
cccguuaggcuaugauuua

SEQ ID NO: 759979 - RNA, 19 nt, Artificial Sequence
  Description of Artificial Sequence: Synthetic oligonucleotide
  Antisense strand to SEQ ID NO: 759978
uaaaucauagccuaacggg

SEQ ID NO: 759980 - RNA, 19 nt, Artificial Sequence
  Description of Artificial Sequence: Synthetic oligonucleotide
  Sense strand starting at position 838 of SEQ ID NO: 587011
uguaaucucggcuacucua

SEQ ID NO: 759981 - RNA, 19 nt, Artificial Sequence
  Description of Artificial Sequence: Synthetic oligonucleotide
  Antisense strand to SEQ ID NO: 759980
uagaguagccgagauuaca

SEQ ID NO: 759982 - RNA, 19 nt, Artificial Sequence
  Description of Artificial Sequence: Synthetic oligonucleotide
  Sense strand starting at position 1029 of SEQ ID NO: 587011
cauagagauuacgucugua

SEQ ID NO: 759983 - RNA, 19 nt, Artificial Sequence
  Description of Artificial Sequence: Synthetic oligonucleotide
  Antisense strand to SEQ ID NO: 759982
uacagacguaaucucuaug

SEQ ID NO: 759984 - RNA, 19 nt, Artificial Sequence
  Description of Artificial Sequence: Synthetic oligonucleotide
  Sense strand starting at position 1032 of SEQ ID NO: 587011
agagauuacgucuguaauc

SEQ ID NO: 759985 - RNA, 19 nt, Artificial Sequence
  Description of Artificial Sequence: Synthetic oligonucleotide
  Antisense strand to SEQ ID NO: 759984
gauuacagacguaaucucu

SEQ ID NO: 759986 - RNA, 19 nt, Artificial Sequence
  Description of Artificial Sequence: Synthetic oligonucleotide
  Sense strand starting at position 1033 of SEQ ID NO: 587011
gagauuacgucuguaaucu

SEQ ID NO: 759987 - RNA, 19 nt, Artificial Sequence
  Description of Artificial Sequence: Synthetic oligonucleotide
  Antisense strand to SEQ ID NO: 759986
agauuacagacguaaucuc

SEQ ID NO: 759988 - RNA, 19 nt, Artificial Sequence
  Description of Artificial Sequence: Synthetic oligonucleotide
  Sense strand starting at position 1034 of SEQ ID NO: 587011
agauuacgucuguaaucuc

SEQ ID NO: 759989 - RNA, 19 nt, Artificial Sequence
  Description of Artificial Sequence: Synthetic oligonucleotide
  Antisense strand to SEQ ID NO: 759988
gagauuacagacguaaucu

SEQ ID NO: 759990 - RNA, 19 nt, Artificial Sequence
  Description of Artificial Sequence: Synthetic oligonucleotide
  Sense strand starting at position 1384 of SEQ ID NO: 587011
guucuauaacacuguagua

SEQ ID NO: 759991 - RNA, 19 nt, Artificial Sequence
  Description of Artificial Sequence: Synthetic oligonucleotide
  Antisense strand to SEQ ID NO: 759990
uacuacaguguuauagaac

SEQ ID NO: 759992 - RNA, 19 nt, Artificial Sequence
  Description of Artificial Sequence: Synthetic oligonucleotide
  Sense strand starting at position 1498 of SEQ ID NO: 587011
gggcuaaaguccuuucuga

SEQ ID NO: 759993 - RNA, 19 nt, Artificial Sequence
  Description of Artificial Sequence: Synthetic oligonucleotide
  Antisense strand to SEQ ID NO: 759992
ucagaaaggacuuuagccc

SEQ ID NO: 759994 - RNA, 19 nt, Artificial Sequence
  Description of Artificial Sequence: Synthetic oligonucleotide
  Sense strand starting at position 1536 of SEQ ID NO: 587011
uuucgaaguuacuuaaacu

SEQ ID NO: 759995 - RNA, 19 nt, Artificial Sequence
  Description of Artificial Sequence: Synthetic oligonucleotide
  Antisense strand to SEQ ID NO: 759994
aguuuaaguaacuucgaaa

SEQ ID NO: 759996 - RNA, 19 nt, Artificial Sequence
  Description of Artificial Sequence: Synthetic oligonucleotide
  Sense strand starting at position 1548 of SEQ ID NO: 587011
uuaaacuuggcggacgaaa

SEQ ID NO: 759997 - RNA, 19 nt, Artificial Sequence
  Description of Artificial Sequence: Synthetic oligonucleotide
  Antisense strand to SEQ ID NO: 759996
uuucguccgccaaguuuaa

SEQ ID NO: 759998 - RNA, 19 nt, Artificial Sequence
  Description of Artificial Sequence: Synthetic oligonucleotide
  Sense strand starting at position 2099 of SEQ ID NO: 587011
gcuucuagucugucgguca

SEQ ID NO: 759999 - RNA, 19 nt, Artificial Sequence
  Description of Artificial Sequence: Synthetic oligonucleotide
  Antisense strand to SEQ ID NO: 759998
ugaccgacagacuagaagc

SEQ ID NO: 760000 - RNA, 19 nt, Artificial Sequence
  Description of Artificial Sequence: Synthetic oligonucleotide
  Sense strand starting at position 2217 of SEQ ID NO: 587011
cucgccaagucagugauuu

SEQ ID NO: 760001 - RNA, 19 nt, Artificial Sequence
  Description of Artificial Sequence: Synthetic oligonucleotide
  Antisense strand to SEQ ID NO: 760000
aaaucacugacuuggcgag

SEQ ID NO: 760002 - RNA, 19 nt, Artificial Sequence
  Description of Artificial Sequence: Synthetic oligonucleotide
  Sense strand starting at position 2218 of SEQ ID NO: 587011
ucgccaagucagugauuua

SEQ ID NO: 760003 - RNA, 19 nt, Artificial Sequence
  Description of Artificial Sequence: Synthetic oligonucleotide
  Antisense strand to SEQ ID NO: 760002
uaaaucacugacuuggcga

SEQ ID NO: 760004 - RNA, 19 nt, Artificial Sequence
  Description of Artificial Sequence: Synthetic oligonucleotide
  Sense strand starting at position 2357 of SEQ ID NO: 587011
uacaguuccggugggagaa

SEQ ID NO: 760005 - RNA, 19 nt, Artificial Sequence
  Description of Artificial Sequence: Synthetic oligonucleotide
  Antisense strand to SEQ ID NO: 760004
uucucccaccggaacugua

SEQ ID NO: 760006 - RNA, 19 nt, Artificial Sequence
  Description of Artificial Sequence: Synthetic oligonucleotide
  Sense strand starting at position 2404 of SEQ ID NO: 587011
ccugauaugcagcgacaga

SEQ ID NO: 760007 - RNA, 19 nt, Artificial Sequence
  Description of Artificial Sequence: Synthetic oligonucleotide
  Antisense strand to SEQ ID NO: 760006
ucugucgcugcauaucagg

SEQ ID NO: 760008 - RNA, 19 nt, Artificial Sequence
  Description of Artificial Sequence: Synthetic oligonucleotide
  Sense strand starting at position 2405 of SEQ ID NO: 587011
cugauaugcagcgacagaa

SEQ ID NO: 760009 - RNA, 19 nt, Artificial Sequence
  Description of Artificial Sequence: Synthetic oligonucleotide
  Antisense strand to SEQ ID NO: 760008
uucugucgcugcauaucag

SEQ ID NO: 760010 - RNA, 19 nt, Artificial Sequence
  Description of Artificial Sequence: Synthetic oligonucleotide
  Sense strand starting at position 2764 of SEQ ID NO: 587011
agcguuugccgagcucuua

SEQ ID NO: 760011 - RNA, 19 nt, Artificial Sequence
  Description of Artificial Sequence: Synthetic oligonucleotide
  Antisense strand to SEQ ID NO: 760010
uaagagcucggcaaacgcu

SEQ ID NO: 760012 - RNA, 19 nt, Artificial Sequence
  Description of Artificial Sequence: Synthetic oligonucleotide
  Sense strand starting at position 2774 of SEQ ID NO: 587011
gagcucuuacuuuauggca

SEQ ID NO: 760013 - RNA, 19 nt, Artificial Sequence
  Description of Artificial Sequence: Synthetic oligonucleotide
  Antisense strand to SEQ ID NO: 760012
ugccauaaaguaagagcuc

SEQ ID NO: 760014 - RNA, 19 nt, Artificial Sequence
  Description of Artificial Sequence: Synthetic oligonucleotide
  Sense strand starting at position 2809 of SEQ ID NO: 587011
ucccuuuacguggauuauu

SEQ ID NO: 760015 - RNA, 19 nt, Artificial Sequence
  Description of Artificial Sequence: Synthetic oligonucleotide
  Antisense strand to SEQ ID NO: 760014
aauaauccacguaaaggga

SEQ ID NO: 760016 - RNA, 19 nt, Artificial Sequence
  Description of Artificial Sequence: Synthetic oligonucleotide
  Sense strand starting at position 2830 of SEQ ID NO: 587011
gucuaauccucucugaggu

SEQ ID NO: 760017 - RNA, 19 nt, Artificial Sequence
  Description of Artificial Sequence: Synthetic oligonucleotide
  Antisense strand to SEQ ID NO: 760016
accucagagaggauuagac

SEQ ID NO: 760018 - RNA, 19 nt, Artificial Sequence
  Description of Artificial Sequence: Synthetic oligonucleotide
  Sense strand starting at position 2831 of SEQ ID NO: 587011
ucuaauccucucugaggua

SEQ ID NO: 760019 - RNA, 19 nt, Artificial Sequence
  Description of Artificial Sequence: Synthetic oligonucleotide
  Antisense strand to SEQ ID NO: 760018
uaccucagagaggauuaga

SEQ ID NO: 760020 - RNA, 19 nt, Artificial Sequence
  Description of Artificial Sequence: Synthetic oligonucleotide
  Sense strand starting at position 2900 of SEQ ID NO: 587011
gagugacuuccggaagauu

SEQ ID NO: 760021 - RNA, 19 nt, Artificial Sequence
  Description of Artificial Sequence: Synthetic oligonucleotide
  Antisense strand to SEQ ID NO: 760020
aaucuuccggaagucacuc

SEQ ID NO: 760022 - RNA, 19 nt, Artificial Sequence
  Description of Artificial Sequence: Synthetic oligonucleotide
  Sense strand starting at position 2908 of SEQ ID NO: 587011
uccggaagauuauccgaaa

SEQ ID NO: 760023 - RNA, 19 nt, Artificial Sequence
  Description of Artificial Sequence: Synthetic oligonucleotide
  Antisense strand to SEQ ID NO: 760022
uuucggauaaucuuccgga

SEQ ID NO: 760024 - RNA, 19 nt, Artificial Sequence
  Description of Artificial Sequence: Synthetic oligonucleotide
  Sense strand starting at position 2909 of SEQ ID NO: 587011
ccggaagauuauccgaaag

SEQ ID NO: 760025 - RNA, 19 nt, Artificial Sequence
  Description of Artificial Sequence: Synthetic oligonucleotide
  Antisense strand to SEQ ID NO: 760024
cuuucggauaaucuuccgg

SEQ ID NO: 760026 - RNA, 19 nt, Artificial Sequence
  Description of Artificial Sequence: Synthetic oligonucleotide
  Sense strand starting at position 3160 of SEQ ID NO: 587011
uuuccauuccuuuagugag

SEQ ID NO: 760027 - RNA, 19 nt, Artificial Sequence
  Description of Artificial Sequence: Synthetic oligonucleotide
  Antisense strand to SEQ ID NO: 760026
cucacuaaaggaauggaaa

SEQ ID NO: 760028 - RNA, 19 nt, Artificial Sequence
  Description of Artificial Sequence: Synthetic oligonucleotide
  Sense strand starting at position 3196 of SEQ ID NO: 587011
gagagaguaucucuagcau

SEQ ID NO: 760029 - RNA, 19 nt, Artificial Sequence
  Description of Artificial Sequence: Synthetic oligonucleotide
  Antisense strand to SEQ ID NO: 760028
augcuagagauacucucuc

SEQ ID NO: 760030 - RNA, 19 nt, Artificial Sequence
  Description of Artificial Sequence: Synthetic oligonucleotide
  Sense strand starting at position 3325 of SEQ ID NO: 587011
guucaugagcuagaaaggu

SEQ ID NO: 760031 - RNA, 19 nt, Artificial Sequence
  Description of Artificial Sequence: Synthetic oligonucleotide
  Antisense strand to SEQ ID NO: 760030
accuuucuagcucaugaac

SEQ ID NO: 760032 - RNA, 19 nt, Artificial Sequence
  Description of Artificial Sequence: Synthetic oligonucleotide
  Sense strand starting at position 3482 of SEQ ID NO: 587011
uugagaugacaguggucau

SEQ ID NO: 760033 - RNA, 19 nt, Artificial Sequence
  Description of Artificial Sequence: Synthetic oligonucleotide
  Antisense strand to SEQ ID NO: 760032
augaccacugucaucucaa

SEQ ID NO: 760034 - RNA, 19 nt, Artificial Sequence
  Description of Artificial Sequence: Synthetic oligonucleotide
  Sense strand starting at position 3485 of SEQ ID NO: 587011
agaugacaguggucaugga

SEQ ID NO: 760035 - RNA, 19 nt, Artificial Sequence
  Description of Artificial Sequence: Synthetic oligonucleotide
  Antisense strand to SEQ ID NO: 760034
uccaugaccacugucaucu

SEQ ID NO: 760036 - RNA, 19 nt, Artificial Sequence
  Description of Artificial Sequence: Synthetic oligonucleotide
  Sense strand starting at position 3489 of SEQ ID NO: 587011
gacaguggucauggaauua

SEQ ID NO: 760037 - RNA, 19 nt, Artificial Sequence
  Description of Artificial Sequence: Synthetic oligonucleotide
  Antisense strand to SEQ ID NO: 760036
uaauuccaugaccacuguc

SEQ ID NO: 760038 - RNA, 19 nt, Artificial Sequence
  Description of Artificial Sequence: Synthetic oligonucleotide
  Sense strand starting at position 3575 of SEQ ID NO: 587011
aagcauggacuuuguaauu

SEQ ID NO: 760039 - RNA, 19 nt, Artificial Sequence
  Description of Artificial Sequence: Synthetic oligonucleotide
  Antisense strand to SEQ ID NO: 760038
aauuacaaaguccaugcuu

SEQ ID NO: 760040 - RNA, 19 nt, Artificial Sequence
  Description of Artificial Sequence: Synthetic oligonucleotide
  Sense strand starting at position 3580 of SEQ ID NO: 587011
uggacuuuguaauugaaca

SEQ ID NO: 760041 - RNA, 19 nt, Artificial Sequence
  Description of Artificial Sequence: Synthetic oligonucleotide
  Antisense strand to SEQ ID NO: 760040
uguucaauuacaaagucca

SEQ ID NO: 760042 - RNA, 19 nt, Artificial Sequence
  Description of Artificial Sequence: Synthetic oligonucleotide
  Sense strand starting at position 3771 of SEQ ID NO: 587011
aaugucuaaugaguuggaa

SEQ ID NO: 760043 - RNA, 19 nt, Artificial Sequence
  Description of Artificial Sequence: Synthetic oligonucleotide
  Antisense strand to SEQ ID NO: 760042
uuccaacucauuagacauu

SEQ ID NO: 760044 - RNA, 19 nt, Artificial Sequence
  Description of Artificial Sequence: Synthetic oligonucleotide
  Sense strand starting at position 3810 of SEQ ID NO: 587011
gcuugaagauccuugggcu

SEQ ID NO: 760045 - RNA, 19 nt, Artificial Sequence
  Description of Artificial Sequence: Synthetic oligonucleotide
  Antisense strand to SEQ ID NO: 760044
agcccaaggaucuucaagc

SEQ ID NO: 760046 - RNA, 19 nt, Artificial Sequence
  Description of Artificial Sequence: Synthetic oligonucleotide
  Sense strand starting at position 3840 of SEQ ID NO: 587011
aguaucuguaguggauaua

SEQ ID NO: 760047 - RNA, 19 nt, Artificial Sequence
  Description of Artificial Sequence: Synthetic oligonucleotide
  Antisense strand to SEQ ID NO: 760046
uauauccacuacagauacu

SEQ ID NO: 760048 - RNA, 19 nt, Artificial Sequence
  Description of Artificial Sequence: Synthetic oligonucleotide
  Sense strand starting at position 3841 of SEQ ID NO: 587011
guaucuguaguggauauaa

SEQ ID NO: 760049 - RNA, 19 nt, Artificial Sequence
  Description of Artificial Sequence: Synthetic oligonucleotide
  Antisense strand to SEQ ID NO: 760048
uuauauccacuacagauac

SEQ ID NO: 760050 - RNA, 19 nt, Artificial Sequence
  Description of Artificial Sequence: Synthetic oligonucleotide
  Sense strand starting at position 3971 of SEQ ID NO: 587011
acuuuaaguuguguugaua

SEQ ID NO: 760051 - RNA, 19 nt, Artificial Sequence
  Description of Artificial Sequence: Synthetic oligonucleotide
  Antisense strand to SEQ ID NO: 760050
uaucaacacaacuuaaagu

SEQ ID NO: 760052 - RNA, 19 nt, Artificial Sequence
  Description of Artificial Sequence: Synthetic oligonucleotide
  Sense strand starting at position 25 of SEQ ID NO: 587012
ucaagauccuaucuuugga

SEQ ID NO: 760053 - RNA, 19 nt, Artificial Sequence
  Description of Artificial Sequence: Synthetic oligonucleotide
  Antisense strand to SEQ ID NO: 760052
uccaaagauaggaucuuga

SEQ ID NO: 760054 - RNA, 19 nt, Artificial Sequence
  Description of Artificial Sequence: Synthetic oligonucleotide
  Sense strand starting at position 40 of SEQ ID NO: 587012
uggaucucuuauucugaca

SEQ ID NO: 760055 - RNA, 19 nt, Artificial Sequence
  Description of Artificial Sequence: Synthetic oligonucleotide
  Antisense strand to SEQ ID NO: 760054
ugucagaauaagagaucca

SEQ ID NO: 760056 - RNA, 19 nt, Artificial Sequence
  Description of Artificial Sequence: Synthetic oligonucleotide
  Sense strand starting at position 53 of SEQ ID NO: 587012
cugacacacucucagugau

SEQ ID NO: 760057 - RNA, 19 nt, Artificial Sequence
  Description of Artificial Sequence: Synthetic oligonucleotide
  Antisense strand to SEQ ID NO: 760056
aucacugagagugugucag

SEQ ID NO: 760058 - RNA, 19 nt, Artificial Sequence
  Description of Artificial Sequence: Synthetic oligonucleotide
  Sense strand starting at position 159 of SEQ ID NO: 587012
cucuguugucccggucaga

SEQ ID NO: 760059 - RNA, 19 nt, Artificial Sequence
  Description of Artificial Sequence: Synthetic oligonucleotide
  Antisense strand to SEQ ID NO: 760058
ucugaccgggacaacagag

SEQ ID NO: 760060 - RNA, 19 nt, Artificial Sequence
  Description of Artificial Sequence: Synthetic oligonucleotide
  Sense strand starting at position 543 of SEQ ID NO: 587012
gcagucagcuaugauggaa

SEQ ID NO: 760061 - RNA, 19 nt, Artificial Sequence
  Description of Artificial Sequence: Synthetic oligonucleotide
  Antisense strand to SEQ ID NO: 760060
uuccaucauagcugacugc

SEQ ID NO: 760062 - RNA, 19 nt, Artificial Sequence
  Description of Artificial Sequence: Synthetic oligonucleotide
  Sense strand starting at position 648 of SEQ ID NO: 587012
agggaaaucucagauugaa

SEQ ID NO: 760063 - RNA, 19 nt, Artificial Sequence
  Description of Artificial Sequence: Synthetic oligonucleotide
  Antisense strand to SEQ ID NO: 760062
uucaaucugagauuucccu

SEQ ID NO: 760064 - RNA, 19 nt, Artificial Sequence
  Description of Artificial Sequence: Synthetic oligonucleotide
  Sense strand starting at position 758 of SEQ ID NO: 587012
auagaugaaucugaacaga

SEQ ID NO: 760065 - RNA, 19 nt, Artificial Sequence
  Description of Artificial Sequence: Synthetic oligonucleotide
  Antisense strand to SEQ ID NO: 760064
ucuguucagauucaucuau

SEQ ID NO: 760066 - RNA, 19 nt, Artificial Sequence
  Description of Artificial Sequence: Synthetic oligonucleotide
  Sense strand starting at position 815 of SEQ ID NO: 587012
ugagaaacgguuugacuau

SEQ ID NO: 760067 - RNA, 19 nt, Artificial Sequence
  Description of Artificial Sequence: Synthetic oligonucleotide
  Antisense strand to SEQ ID NO: 760066
auagucaaaccguuucuca

SEQ ID NO: 760068 - RNA, 19 nt, Artificial Sequence
  Description of Artificial Sequence: Synthetic oligonucleotide
  Sense strand starting at position 816 of SEQ ID NO: 587012
gagaaacgguuugacuauu

SEQ ID NO: 760069 - RNA, 19 nt, Artificial Sequence
  Description of Artificial Sequence: Synthetic oligonucleotide
  Antisense strand to SEQ ID NO: 760068
aauagucaaaccguuucuc

SEQ ID NO: 760070 - RNA, 19 nt, Artificial Sequence
  Description of Artificial Sequence: Synthetic oligonucleotide
  Sense strand starting at position 863 of SEQ ID NO: 587012
gggauaaugucuggaccca

SEQ ID NO: 760071 - RNA, 19 nt, Artificial Sequence
  Description of Artificial Sequence: Synthetic oligonucleotide
  Antisense strand to SEQ ID NO: 760070
uggguccagacauuauccc

SEQ ID NO: 760072 - RNA, 19 nt, Artificial Sequence
  Description of Artificial Sequence: Synthetic oligonucleotide
  Sense strand starting at position 952 of SEQ ID NO: 587012
uauuuaagcuggccgagua

SEQ ID NO: 760073 - RNA, 19 nt, Artificial Sequence
  Description of Artificial Sequence: Synthetic oligonucleotide
  Antisense strand to SEQ ID NO: 760072
uacucggccagcuuaaaua

SEQ ID NO: 760074 - RNA, 19 nt, Artificial Sequence
  Description of Artificial Sequence: Synthetic oligonucleotide
  Sense strand starting at position 983 of SEQ ID NO: 587012
ggucguuccucguuauauu

SEQ ID NO: 760075 - RNA, 19 nt, Artificial Sequence
  Description of Artificial Sequence: Synthetic oligonucleotide
  Antisense strand to SEQ ID NO: 760074
aauauaacgaggaacgacc

SEQ ID NO: 760076 - RNA, 19 nt, Artificial Sequence
  Description of Artificial Sequence: Synthetic oligonucleotide
  Sense strand starting at position 984 of SEQ ID NO: 587012
gucguuccucguuauauuc

SEQ ID NO: 760077 - RNA, 19 nt, Artificial Sequence
  Description of Artificial Sequence: Synthetic oligonucleotide
  Antisense strand to SEQ ID NO: 760076
gaauauaacgaggaacgac

SEQ ID NO: 760078 - RNA, 19 nt, Artificial Sequence
  Description of Artificial Sequence: Synthetic oligonucleotide
  Sense strand starting at position 1343 of SEQ ID NO: 587012
gagauaaaguaucgaucug

SEQ ID NO: 760079 - RNA, 19 nt, Artificial Sequence
  Description of Artificial Sequence: Synthetic oligonucleotide
  Antisense strand to SEQ ID NO: 760078
cagaucgauacuuuaucuc

SEQ ID NO: 760080 - RNA, 19 nt, Artificial Sequence
  Description of Artificial Sequence: Synthetic oligonucleotide
  Sense strand starting at position 1344 of SEQ ID NO: 587012
agauaaaguaucgaucugu

SEQ ID NO: 760081 - RNA, 19 nt, Artificial Sequence
  Description of Artificial Sequence: Synthetic oligonucleotide
  Antisense strand to SEQ ID NO: 760080
acagaucgauacuuuaucu

SEQ ID NO: 760082 - RNA, 19 nt, Artificial Sequence
  Description of Artificial Sequence: Synthetic oligonucleotide
  Sense strand starting at position 2163 of SEQ ID NO: 587012
uucugaaccuuuggacagu

SEQ ID NO: 760083 - RNA, 19 nt, Artificial Sequence
  Description of Artificial Sequence: Synthetic oligonucleotide
  Antisense strand to SEQ ID NO: 760082
acuguccaaagguucagaa

SEQ ID NO: 760084 - RNA, 19 nt, Artificial Sequence
  Description of Artificial Sequence: Synthetic oligonucleotide
  Sense strand starting at position 2209 of SEQ ID NO: 587012
gcgucauaccauugcaaga

SEQ ID NO: 760085 - RNA, 19 nt, Artificial Sequence
  Description of Artificial Sequence: Synthetic oligonucleotide
  Antisense strand to SEQ ID NO: 760084
ucuugcaaugguaugacgc

SEQ ID NO: 760086 - RNA, 19 nt, Artificial Sequence
  Description of Artificial Sequence: Synthetic oligonucleotide
  Sense strand starting at position 3199 of SEQ ID NO: 587012
uggcaaucacagugcugaa

SEQ ID NO: 760087 - RNA, 19 nt, Artificial Sequence
  Description of Artificial Sequence: Synthetic oligonucleotide
  Antisense strand to SEQ ID NO: 760086
uucagcacugugauugcca

SEQ ID NO: 760088 - RNA, 19 nt, Artificial Sequence
  Description of Artificial Sequence: Synthetic oligonucleotide
  Sense strand starting at position 3231 of SEQ ID NO: 587012
uaagauggcucagaugauu

SEQ ID NO: 760089 - RNA, 19 nt, Artificial Sequence
  Description of Artificial Sequence: Synthetic oligonucleotide
  Antisense strand to SEQ ID NO: 760088
aaucaucugagccaucuua

SEQ ID NO: 760090 - RNA, 19 nt, Artificial Sequence
  Description of Artificial Sequence: Synthetic oligonucleotide
  Sense strand starting at position 3460 of SEQ ID NO: 587012
ccaaacuuaccaggaguga

SEQ ID NO: 760091 - RNA, 19 nt, Artificial Sequence
  Description of Artificial Sequence: Synthetic oligonucleotide
  Antisense strand to SEQ ID NO: 760090
ucacuccugguaaguuugg

SEQ ID NO: 760092 - RNA, 19 nt, Artificial Sequence
  Description of Artificial Sequence: Synthetic oligonucleotide
  Sense strand starting at position 3589 of SEQ ID NO: 587012
acaauauugugugcagcuu

SEQ ID NO: 760093 - RNA, 19 nt, Artificial Sequence
  Description of Artificial Sequence: Synthetic oligonucleotide
  Antisense strand to SEQ ID NO: 760092
aagcugcacacaauauugu

SEQ ID NO: 760094 - RNA, 19 nt, Artificial Sequence
  Description of Artificial Sequence: Synthetic oligonucleotide
  Sense strand starting at position 3605 of SEQ ID NO: 587012
cuuugcuuaucacugauga

SEQ ID NO: 760095 - RNA, 19 nt, Artificial Sequence
  Description of Artificial Sequence: Synthetic oligonucleotide
  Antisense strand to SEQ ID NO: 760094
ucaucagugauaagcaaag

SEQ ID NO: 760096 - RNA, 19 nt, Artificial Sequence
  Description of Artificial Sequence: Synthetic oligonucleotide
  Sense strand starting at position 3606 of SEQ ID NO: 587012
uuugcuuaucacugaugac

SEQ ID NO: 760097 - RNA, 19 nt, Artificial Sequence
  Description of Artificial Sequence: Synthetic oligonucleotide
  Antisense strand to SEQ ID NO: 760096
gucaucagugauaagcaaa

SEQ ID NO: 760098 - RNA, 19 nt, Artificial Sequence
  Description of Artificial Sequence: Synthetic oligonucleotide
  Sense strand starting at position 3609 of SEQ ID NO: 587012
gcuuaucacugaugacuca

SEQ ID NO: 760099 - RNA, 19 nt, Artificial Sequence
  Description of Artificial Sequence: Synthetic oligonucleotide
  Antisense strand to SEQ ID NO: 760098
ugagucaucagugauaagc

SEQ ID NO: 760100 - RNA, 19 nt, Artificial Sequence
  Description of Artificial Sequence: Synthetic oligonucleotide
  Sense strand starting at position 3712 of SEQ ID NO: 587012
uuugaugaaugucugacuu

SEQ ID NO: 760101 - RNA, 19 nt, Artificial Sequence
  Description of Artificial Sequence: Synthetic oligonucleotide
  Antisense strand to SEQ ID NO: 760100
aagucagacauucaucaaa

SEQ ID NO: 760102 - RNA, 19 nt, Artificial Sequence
  Description of Artificial Sequence: Synthetic oligonucleotide
  Sense strand starting at position 3714 of SEQ ID NO: 587012
ugaugaaugucugacuuau

SEQ ID NO: 760103 - RNA, 19 nt, Artificial Sequence
  Description of Artificial Sequence: Synthetic oligonucleotide
  Antisense strand to SEQ ID NO: 760102
auaagucagacauucauca

SEQ ID NO: 760104 - RNA, 19 nt, Artificial Sequence
  Description of Artificial Sequence: Synthetic oligonucleotide
  Sense strand starting at position 3716 of SEQ ID NO: 587012
augaaugucugacuuauac

SEQ ID NO: 760105 - RNA, 19 nt, Artificial Sequence
  Description of Artificial Sequence: Synthetic oligonucleotide
  Antisense strand to SEQ ID NO: 760104
guauaagucagacauucau

SEQ ID NO: 760106 - RNA, 19 nt, Artificial Sequence
  Description of Artificial Sequence: Synthetic oligonucleotide
  Sense strand starting at position 3778 of SEQ ID NO: 587012
guuuacucauacugaagua

SEQ ID NO: 760107 - RNA, 19 nt, Artificial Sequence
  Description of Artificial Sequence: Synthetic oligonucleotide
  Antisense strand to SEQ ID NO: 760106
uacuucaguaugaguaaac

SEQ ID NO: 760108 - RNA, 19 nt, Artificial Sequence
  Description of Artificial Sequence: Synthetic oligonucleotide
  Sense strand starting at position 3871 of SEQ ID NO: 587012
gacaauaggucuugcacau

SEQ ID NO: 760109 - RNA, 19 nt, Artificial Sequence
  Description of Artificial Sequence: Synthetic oligonucleotide
  Antisense strand to SEQ ID NO: 760108
augugcaagaccuauuguc

SEQ ID NO: 760110 - RNA, 19 nt, Artificial Sequence
  Description of Artificial Sequence: Synthetic oligonucleotide
  Sense strand starting at position 737 of SEQ ID NO: 587013
uugcuauggaagugugaug

SEQ ID NO: 760111 - RNA, 19 nt, Artificial Sequence
  Description of Artificial Sequence: Synthetic oligonucleotide
  Antisense strand to SEQ ID NO: 760110
caucacacuuccauagcaa

SEQ ID NO: 760112 - RNA, 19 nt, Artificial Sequence
  Description of Artificial Sequence: Synthetic oligonucleotide
  Sense strand starting at position 748 of SEQ ID NO: 587013
gugugauggaccuagaacu

SEQ ID NO: 760113 - RNA, 19 nt, Artificial Sequence
  Description of Artificial Sequence: Synthetic oligonucleotide
  Antisense strand to SEQ ID NO: 760112
aguucuagguccaucacac

SEQ ID NO: 760114 - RNA, 19 nt, Artificial Sequence
  Description of Artificial Sequence: Synthetic oligonucleotide
  Sense strand starting at position 754 of SEQ ID NO: 587013
uggaccuagaacugugaau

SEQ ID NO: 760115 - RNA, 19 nt, Artificial Sequence
  Description of Artificial Sequence: Synthetic oligonucleotide
  Antisense strand to SEQ ID NO: 760114
auucacaguucuaggucca

SEQ ID NO: 760116 - RNA, 19 nt, Artificial Sequence
  Description of Artificial Sequence: Synthetic oligonucleotide
  Sense strand starting at position 756 of SEQ ID NO: 587013
gaccuagaacugugaauua

SEQ ID NO: 760117 - RNA, 19 nt, Artificial Sequence
  Description of Artificial Sequence: Synthetic oligonucleotide
  Antisense strand to SEQ ID NO: 760116
uaauucacaguucuagguc

SEQ ID NO: 760118 - RNA, 19 nt, Artificial Sequence
  Description of Artificial Sequence: Synthetic oligonucleotide
  Sense strand starting at position 785 of SEQ ID NO: 587013
caucgaaugugagcucuga

SEQ ID NO: 760119 - RNA, 19 nt, Artificial Sequence
  Description of Artificial Sequence: Synthetic oligonucleotide
  Antisense strand to SEQ ID NO: 760118
ucagagcucacauucgaug

SEQ ID NO: 760120 - RNA, 19 nt, Artificial Sequence
  Description of Artificial Sequence: Synthetic oligonucleotide
  Sense strand starting at position 789 of SEQ ID NO: 587013
gaaugugagcucugacuaa

SEQ ID NO: 760121 - RNA, 19 nt, Artificial Sequence
  Description of Artificial Sequence: Synthetic oligonucleotide
  Antisense strand to SEQ ID NO: 760120
uuagucagagcucacauuc

SEQ ID NO: 760122 - RNA, 19 nt, Artificial Sequence
  Description of Artificial Sequence: Synthetic oligonucleotide
  Sense strand starting at position 793 of SEQ ID NO: 587013
gugagcucugacuaaugcu

SEQ ID NO: 760123 - RNA, 19 nt, Artificial Sequence
  Description of Artificial Sequence: Synthetic oligonucleotide
  Antisense strand to SEQ ID NO: 760122
agcauuagucagagcucac

SEQ ID NO: 760124 - RNA, 19 nt, Artificial Sequence
  Description of Artificial Sequence: Synthetic oligonucleotide
  Sense strand starting at position 800 of SEQ ID NO: 587013
cugacuaaugcugguaaca

SEQ ID NO: 760125 - RNA, 19 nt, Artificial Sequence
  Description of Artificial Sequence: Synthetic oligonucleotide
  Antisense strand to SEQ ID NO: 760124
uguuaccagcauuagucag

SEQ ID NO: 760126 - RNA, 19 nt, Artificial Sequence
  Description of Artificial Sequence: Synthetic oligonucleotide
  Sense strand starting at position 1363 of SEQ ID NO: 587013
cgcucuuucuacuuggaaa

SEQ ID NO: 760127 - RNA, 19 nt, Artificial Sequence
  Description of Artificial Sequence: Synthetic oligonucleotide
  Antisense strand to SEQ ID NO: 760126
uuuccaaguagaaagagcg

SEQ ID NO: 760128 - RNA, 19 nt, Artificial Sequence
  Description of Artificial Sequence: Synthetic oligonucleotide
  Sense strand starting at position 1431 of SEQ ID NO: 587013
gguucaguggaucggaaua

SEQ ID NO: 760129 - RNA, 19 nt, Artificial Sequence
  Description of Artificial Sequence: Synthetic oligonucleotide
  Antisense strand to SEQ ID NO: 760128
uauuccgauccacugaacc

SEQ ID NO: 760130 - RNA, 19 nt, Artificial Sequence
  Description of Artificial Sequence: Synthetic oligonucleotide
  Sense strand starting at position 1519 of SEQ ID NO: 587013
cuaugauguuuccuuugaa

SEQ ID NO: 760131 - RNA, 19 nt, Artificial Sequence
  Description of Artificial Sequence: Synthetic oligonucleotide
  Antisense strand to SEQ ID NO: 760130
uucaaaggaaacaucauag

SEQ ID NO: 760132 - RNA, 19 nt, Artificial Sequence
  Description of Artificial Sequence: Synthetic oligonucleotide
  Sense strand starting at position 1522 of SEQ ID NO: 587013
ugauguuuccuuugaaaug

SEQ ID NO: 760133 - RNA, 19 nt, Artificial Sequence
  Description of Artificial Sequence: Synthetic oligonucleotide
  Antisense strand to SEQ ID NO: 760132
cauuucaaaggaaacauca

SEQ ID NO: 760134 - RNA, 19 nt, Artificial Sequence
  Description of Artificial Sequence: Synthetic oligonucleotide
  Sense strand starting at position 1588 of SEQ ID NO: 587013
acugauacguucucacaaa

SEQ ID NO: 760135 - RNA, 19 nt, Artificial Sequence
  Description of Artificial Sequence: Synthetic oligonucleotide
  Antisense strand to SEQ ID NO: 760134
uuugugagaacguaucagu

SEQ ID NO: 760136 - RNA, 19 nt, Artificial Sequence
  Description of Artificial Sequence: Synthetic oligonucleotide
  Sense strand starting at position 1725 of SEQ ID NO: 587013
accuuaaagccguaagaaa

SEQ ID NO: 760137 - RNA, 19 nt, Artificial Sequence
  Description of Artificial Sequence: Synthetic oligonucleotide
  Antisense strand to SEQ ID NO: 760136
uuucuuacggcuuuaaggu

SEQ ID NO: 760138 - RNA, 19 nt, Artificial Sequence
  Description of Artificial Sequence: Synthetic oligonucleotide
  Sense strand starting at position 2052 of SEQ ID NO: 587013
agcgcauuccugucucagu

SEQ ID NO: 760139 - RNA, 19 nt, Artificial Sequence
  Description of Artificial Sequence: Synthetic oligonucleotide
  Antisense strand to SEQ ID NO: 760138
acugagacaggaaugcgcu

SEQ ID NO: 760140 - RNA, 19 nt, Artificial Sequence
  Description of Artificial Sequence: Synthetic oligonucleotide
  Sense strand starting at position 2158 of SEQ ID NO: 587013
cgagacaaguguuuccaua

SEQ ID NO: 760141 - RNA, 19 nt, Artificial Sequence
  Description of Artificial Sequence: Synthetic oligonucleotide
  Antisense strand to SEQ ID NO: 760140
uauggaaacacuugucucg

SEQ ID NO: 760142 - RNA, 19 nt, Artificial Sequence
  Description of Artificial Sequence: Synthetic oligonucleotide
  Sense strand starting at position 2160 of SEQ ID NO: 587013
agacaaguguuuccauagu

SEQ ID NO: 760143 - RNA, 19 nt, Artificial Sequence
  Description of Artificial Sequence: Synthetic oligonucleotide
  Antisense strand to SEQ ID NO: 760142
acuauggaaacacuugucu

SEQ ID NO: 760144 - RNA, 19 nt, Artificial Sequence
  Description of Artificial Sequence: Synthetic oligonucleotide
  Sense strand starting at position 2166 of SEQ ID NO: 587013
guguuuccauaguuacaag

SEQ ID NO: 760145 - RNA, 19 nt, Artificial Sequence
  Description of Artificial Sequence: Synthetic oligonucleotide
  Antisense strand to SEQ ID NO: 760144
cuuguaacuauggaaacac

SEQ ID NO: 760146 - RNA, 19 nt, Artificial Sequence
  Description of Artificial Sequence: Synthetic oligonucleotide
  Sense strand starting at position 2330 of SEQ ID NO: 587013
uuaaauccucacuguguca

SEQ ID NO: 760147 - RNA, 19 nt, Artificial Sequence
  Description of Artificial Sequence: Synthetic oligonucleotide
  Antisense strand to SEQ ID NO: 760146
ugacacagugaggauuuaa

SEQ ID NO: 760148 - RNA, 19 nt, Artificial Sequence
  Description of Artificial Sequence: Synthetic oligonucleotide
  Sense strand starting at position 2427 of SEQ ID NO: 587013
cagcguaugcguuccuaga

SEQ ID NO: 760149 - RNA, 19 nt, Artificial Sequence
  Description of Artificial Sequence: Synthetic oligonucleotide
  Antisense strand to SEQ ID NO: 760148
ucuaggaacgcauacgcug

SEQ ID NO: 760150 - RNA, 19 nt, Artificial Sequence
  Description of Artificial Sequence: Synthetic oligonucleotide
  Sense strand starting at position 2428 of SEQ ID NO: 587013
agcguaugcguuccuagau

SEQ ID NO: 760151 - RNA, 19 nt, Artificial Sequence
  Description of Artificial Sequence: Synthetic oligonucleotide
  Antisense strand to SEQ ID NO: 760150
aucuaggaacgcauacgcu

SEQ ID NO: 760152 - RNA, 19 nt, Artificial Sequence
  Description of Artificial Sequence: Synthetic oligonucleotide
  Sense strand starting at position 2483 of SEQ ID NO: 587013
gaaacugcagggugaauaa

SEQ ID NO: 760153 - RNA, 19 nt, Artificial Sequence
  Description of Artificial Sequence: Synthetic oligonucleotide
  Antisense strand to SEQ ID NO: 760152
uuauucacccugcaguuuc

SEQ ID NO: 760154 - RNA, 19 nt, Artificial Sequence
  Description of Artificial Sequence: Synthetic oligonucleotide
  Sense strand starting at position 2564 of SEQ ID NO: 587013
uuagaaaguguugaguaua

SEQ ID NO: 760155 - RNA, 19 nt, Artificial Sequence
  Description of Artificial Sequence: Synthetic oligonucleotide
  Antisense strand to SEQ ID NO: 760154
uauacucaacacuuucuaa

SEQ ID NO: 760156 - RNA, 19 nt, Artificial Sequence
  Description of Artificial Sequence: Synthetic oligonucleotide
  Sense strand starting at position 2567 of SEQ ID NO: 587013
gaaaguguugaguauauug

SEQ ID NO: 760157 - RNA, 19 nt, Artificial Sequence
  Description of Artificial Sequence: Synthetic oligonucleotide
  Antisense strand to SEQ ID NO: 760156
caauauacucaacacuuuc

SEQ ID NO: 760158 - RNA, 19 nt, Artificial Sequence
  Description of Artificial Sequence: Synthetic oligonucleotide
  Sense strand starting at position 2574 of SEQ ID NO: 587013
uugaguauauuguuucuca

SEQ ID NO: 760159 - RNA, 19 nt, Artificial Sequence
  Description of Artificial Sequence: Synthetic oligonucleotide
  Antisense strand to SEQ ID NO: 760158
ugagaaacaauauacucaa

SEQ ID NO: 760160 - RNA, 19 nt, Artificial Sequence
  Description of Artificial Sequence: Synthetic oligonucleotide
  Sense strand starting at position 2575 of SEQ ID NO: 587013
ugaguauauuguuucucag

SEQ ID NO: 760161 - RNA, 19 nt, Artificial Sequence
  Description of Artificial Sequence: Synthetic oligonucleotide
  Antisense strand to SEQ ID NO: 760160
cugagaaacaauauacuca

SEQ ID NO: 760162 - RNA, 19 nt, Artificial Sequence
  Description of Artificial Sequence: Synthetic oligonucleotide
  Sense strand starting at position 2586 of SEQ ID NO: 587013
uuucucagguugucaucua

SEQ ID NO: 760163 - RNA, 19 nt, Artificial Sequence
  Description of Artificial Sequence: Synthetic oligonucleotide
  Antisense strand to SEQ ID NO: 760162
uagaugacaaccugagaaa

SEQ ID NO: 760164 - RNA, 19 nt, Artificial Sequence
  Description of Artificial Sequence: Synthetic oligonucleotide
  Sense strand starting at position 2683 of SEQ ID NO: 587013
guagaagcaaugugaauca

SEQ ID NO: 760165 - RNA, 19 nt, Artificial Sequence
  Description of Artificial Sequence: Synthetic oligonucleotide
  Antisense strand to SEQ ID NO: 760164
ugauucacauugcuucuac

SEQ ID NO: 760166 - RNA, 19 nt, Artificial Sequence
  Description of Artificial Sequence: Synthetic oligonucleotide
  Sense strand starting at position 2710 of SEQ ID NO: 587013
ugcugaaauaucugaggga

SEQ ID NO: 760167 - RNA, 19 nt, Artificial Sequence
  Description of Artificial Sequence: Synthetic oligonucleotide
  Antisense strand to SEQ ID NO: 760166
ucccucagauauuucagca

SEQ ID NO: 760168 - RNA, 19 nt, Artificial Sequence
  Description of Artificial Sequence: Synthetic oligonucleotide
  Sense strand starting at position 2877 of SEQ ID NO: 587013
guacuacaccuacaaguau

SEQ ID NO: 760169 - RNA, 19 nt, Artificial Sequence
  Description of Artificial Sequence: Synthetic oligonucleotide
  Antisense strand to SEQ ID NO: 760168
auacuuguagguguaguac

SEQ ID NO: 760170 - RNA, 19 nt, Artificial Sequence
  Description of Artificial Sequence: Synthetic oligonucleotide
  Sense strand starting at position 2893 of SEQ ID NO: 587013
uaucgacaagcaugaugaa

SEQ ID NO: 760171 - RNA, 19 nt, Artificial Sequence
  Description of Artificial Sequence: Synthetic oligonucleotide
  Antisense strand to SEQ ID NO: 760170
uucaucaugcuugucgaua

SEQ ID NO: 760172 - RNA, 19 nt, Artificial Sequence
  Description of Artificial Sequence: Synthetic oligonucleotide
  Sense strand starting at position 3321 of SEQ ID NO: 587013
ucggcauuccaggaacuua

SEQ ID NO: 760173 - RNA, 19 nt, Artificial Sequence
  Description of Artificial Sequence: Synthetic oligonucleotide
  Antisense strand to SEQ ID NO: 760172
uaaguuccuggaaugccga

SEQ ID NO: 760174 - RNA, 19 nt, Artificial Sequence
  Description of Artificial Sequence: Synthetic oligonucleotide
  Sense strand starting at position 3396 of SEQ ID NO: 587013
guuaauaccuguuuaacug

SEQ ID NO: 760175 - RNA, 19 nt, Artificial Sequence
  Description of Artificial Sequence: Synthetic oligonucleotide
  Antisense strand to SEQ ID NO: 760174
caguuaaacagguauuaac

SEQ ID NO: 760176 - RNA, 19 nt, Artificial Sequence
  Description of Artificial Sequence: Synthetic oligonucleotide
  Sense strand starting at position 3756 of SEQ ID NO: 587013
gggcuaacucaguaguucu

SEQ ID NO: 760177 - RNA, 19 nt, Artificial Sequence
  Description of Artificial Sequence: Synthetic oligonucleotide
  Antisense strand to SEQ ID NO: 760176
agaacuacugaguuagccc

SEQ ID NO: 760178 - RNA, 19 nt, Artificial Sequence
  Description of Artificial Sequence: Synthetic oligonucleotide
  Sense strand starting at position 3764 of SEQ ID NO: 587013
ucaguaguucuauggacau

SEQ ID NO: 760179 - RNA, 19 nt, Artificial Sequence
  Description of Artificial Sequence: Synthetic oligonucleotide
  Antisense strand to SEQ ID NO: 760178
auguccauagaacuacuga

SEQ ID NO: 760180 - RNA, 19 nt, Artificial Sequence
  Description of Artificial Sequence: Synthetic oligonucleotide
  Sense strand starting at position 3792 of SEQ ID NO: 587013
cucagauguugggcuaauu

SEQ ID NO: 760181 - RNA, 19 nt, Artificial Sequence
  Description of Artificial Sequence: Synthetic oligonucleotide
  Antisense strand to SEQ ID NO: 760180
aauuagcccaacaucugag

SEQ ID NO: 760182 - RNA, 19 nt, Artificial Sequence
  Description of Artificial Sequence: Synthetic oligonucleotide
  Sense strand starting at position 3802 of SEQ ID NO: 587013
gggcuaauuuagcaauaag

SEQ ID NO: 760183 - RNA, 19 nt, Artificial Sequence
  Description of Artificial Sequence: Synthetic oligonucleotide
  Antisense strand to SEQ ID NO: 760182
cuuauugcuaaauuagccc

SEQ ID NO: 760184 - RNA, 19 nt, Artificial Sequence
  Description of Artificial Sequence: Synthetic oligonucleotide
  Sense strand starting at position 3921 of SEQ ID NO: 587013
ggauguggagucugugauu

SEQ ID NO: 760185 - RNA, 19 nt, Artificial Sequence
  Description of Artificial Sequence: Synthetic oligonucleotide
  Antisense strand to SEQ ID NO: 760184
aaucacagacuccacaucc

SEQ ID NO: 760186 - RNA, 19 nt, Artificial Sequence
  Description of Artificial Sequence: Synthetic oligonucleotide
  Sense strand starting at position 3926 of SEQ ID NO: 587013
uggagucugugauuacaga

SEQ ID NO: 760187 - RNA, 19 nt, Artificial Sequence
  Description of Artificial Sequence: Synthetic oligonucleotide
  Antisense strand to SEQ ID NO: 760186
ucuguaaucacagacucca

SEQ ID NO: 760188 - RNA, 19 nt, Artificial Sequence
  Description of Artificial Sequence: Synthetic oligonucleotide
  Sense strand starting at position 3927 of SEQ ID NO: 587013
ggagucugugauuacagac

SEQ ID NO: 760189 - RNA, 19 nt, Artificial Sequence
  Description of Artificial Sequence: Synthetic oligonucleotide
  Antisense strand to SEQ ID NO: 760188
gucuguaaucacagacucc

SEQ ID NO: 760190 - RNA, 19 nt, Artificial Sequence
  Description of Artificial Sequence: Synthetic oligonucleotide
  Sense strand starting at position 268 of SEQ ID NO: 587014
augcgugaacucugaagac

SEQ ID NO: 760191 - RNA, 19 nt, Artificial Sequence
  Description of Artificial Sequence: Synthetic oligonucleotide
  Antisense strand to SEQ ID NO: 760190
gucuucagaguucacgcau

SEQ ID NO: 760192 - RNA, 19 nt, Artificial Sequence
  Description of Artificial Sequence: Synthetic oligonucleotide
  Sense strand starting at position 449 of SEQ ID NO: 587014
aggguuuccaucugggaug

SEQ ID NO: 760193 - RNA, 19 nt, Artificial Sequence
  Description of Artificial Sequence: Synthetic oligonucleotide
  Antisense strand to SEQ ID NO: 760192
caucccagauggaaacccu

SEQ ID NO: 760194 - RNA, 19 nt, Artificial Sequence
  Description of Artificial Sequence: Synthetic oligonucleotide
  Sense strand starting at position 450 of SEQ ID NO: 587014
ggguuuccaucugggauga

SEQ ID NO: 760195 - RNA, 19 nt, Artificial Sequence
  Description of Artificial Sequence: Synthetic oligonucleotide
  Antisense strand to SEQ ID NO: 760194
ucaucccagauggaaaccc

SEQ ID NO: 760196 - RNA, 19 nt, Artificial Sequence
  Description of Artificial Sequence: Synthetic oligonucleotide
  Sense strand starting at position 451 of SEQ ID NO: 587014
gguuuccaucugggaugau

SEQ ID NO: 760197 - RNA, 19 nt, Artificial Sequence
  Description of Artificial Sequence: Synthetic oligonucleotide
  Antisense strand to SEQ ID NO: 760196
aucaucccagauggaaacc

SEQ ID NO: 760198 - RNA, 19 nt, Artificial Sequence
  Description of Artificial Sequence: Synthetic oligonucleotide
  Sense strand starting at position 481 of SEQ ID NO: 587014
guaacuagguggugauguu

SEQ ID NO: 760199 - RNA, 19 nt, Artificial Sequence
  Description of Artificial Sequence: Synthetic oligonucleotide
  Antisense strand to SEQ ID NO: 760198
aacaucaccaccuaguuac

SEQ ID NO: 760200 - RNA, 19 nt, Artificial Sequence
  Description of Artificial Sequence: Synthetic oligonucleotide
  Sense strand starting at position 541 of SEQ ID NO: 587014
gcaggugaaugagaggaua

SEQ ID NO: 760201 - RNA, 19 nt, Artificial Sequence
  Description of Artificial Sequence: Synthetic oligonucleotide
  Antisense strand to SEQ ID NO: 760200
uauccucucauucaccugc

SEQ ID NO: 760202 - RNA, 19 nt, Artificial Sequence
  Description of Artificial Sequence: Synthetic oligonucleotide
  Sense strand starting at position 894 of SEQ ID NO: 587014
cacgguguuucuccacagu

SEQ ID NO: 760203 - RNA, 19 nt, Artificial Sequence
  Description of Artificial Sequence: Synthetic oligonucleotide
  Antisense strand to SEQ ID NO: 760202
acuguggagaaacaccgug

SEQ ID NO: 760204 - RNA, 19 nt, Artificial Sequence
  Description of Artificial Sequence: Synthetic oligonucleotide
  Sense strand starting at position 897 of SEQ ID NO: 587014
gguguuucuccacagugga

SEQ ID NO: 760205 - RNA, 19 nt, Artificial Sequence
  Description of Artificial Sequence: Synthetic oligonucleotide
  Antisense strand to SEQ ID NO: 760204
uccacuguggagaaacacc

SEQ ID NO: 760206 - RNA, 19 nt, Artificial Sequence
  Description of Artificial Sequence: Synthetic oligonucleotide
  Sense strand starting at position 911 of SEQ ID NO: 587014
guggagauguagggaguaa

SEQ ID NO: 760207 - RNA, 19 nt, Artificial Sequence
  Description of Artificial Sequence: Synthetic oligonucleotide
  Antisense strand to SEQ ID NO: 760206
uuacucccuacaucuccac

SEQ ID NO: 760208 - RNA, 19 nt, Artificial Sequence
  Description of Artificial Sequence: Synthetic oligonucleotide
  Sense strand starting at position 992 of SEQ ID NO: 587014
ugggcaauacuaugacuga

SEQ ID NO: 760209 - RNA, 19 nt, Artificial Sequence
  Description of Artificial Sequence: Synthetic oligonucleotide
  Antisense strand to SEQ ID NO: 760208
ucagucauaguauugccca

SEQ ID NO: 760210 - RNA, 19 nt, Artificial Sequence
  Description of Artificial Sequence: Synthetic oligonucleotide
  Sense strand starting at position 993 of SEQ ID NO: 587014
gggcaauacuaugacugaa

SEQ ID NO: 760211 - RNA, 19 nt, Artificial Sequence
  Description of Artificial Sequence: Synthetic oligonucleotide
  Antisense strand to SEQ ID NO: 760210
uucagucauaguauugccc

SEQ ID NO: 760212 - RNA, 19 nt, Artificial Sequence
  Description of Artificial Sequence: Synthetic oligonucleotide
  Sense strand starting at position 1005 of SEQ ID NO: 587014
gacugaagcuuagaagaca

SEQ ID NO: 760213 - RNA, 19 nt, Artificial Sequence
  Description of Artificial Sequence: Synthetic oligonucleotide
  Antisense strand to SEQ ID NO: 760212
ugucuucuaagcuucaguc

SEQ ID NO: 760214 - RNA, 19 nt, Artificial Sequence
  Description of Artificial Sequence: Synthetic oligonucleotide
  Sense strand starting at position 1377 of SEQ ID NO: 587014
gccugugauccgagcgcuu

SEQ ID NO: 760215 - RNA, 19 nt, Artificial Sequence
  Description of Artificial Sequence: Synthetic oligonucleotide
  Antisense strand to SEQ ID NO: 760214
aagcgcucggaucacaggc

SEQ ID NO: 760216 - RNA, 19 nt, Artificial Sequence
  Description of Artificial Sequence: Synthetic oligonucleotide
  Sense strand starting at position 2501 of SEQ ID NO: 587014
gggucugcaucuucggaaa

SEQ ID NO: 760217 - RNA, 19 nt, Artificial Sequence
  Description of Artificial Sequence: Synthetic oligonucleotide
  Antisense strand to SEQ ID NO: 760216
uuuccgaagaugcagaccc

SEQ ID NO: 760218 - RNA, 19 nt, Artificial Sequence
  Description of Artificial Sequence: Synthetic oligonucleotide
  Sense strand starting at position 2504 of SEQ ID NO: 587014
ucugcaucuucggaaaggu

SEQ ID NO: 760219 - RNA, 19 nt, Artificial Sequence
  Description of Artificial Sequence: Synthetic oligonucleotide
  Antisense strand to SEQ ID NO: 760218
accuuuccgaagaugcaga

SEQ ID NO: 760220 - RNA, 19 nt, Artificial Sequence
  Description of Artificial Sequence: Synthetic oligonucleotide
  Sense strand starting at position 2512 of SEQ ID NO: 587014
uucggaaaggugugugcau

SEQ ID NO: 760221 - RNA, 19 nt, Artificial Sequence
  Description of Artificial Sequence: Synthetic oligonucleotide
  Antisense strand to SEQ ID NO: 760220
augcacacaccuuuccgaa

SEQ ID NO: 760222 - RNA, 19 nt, Artificial Sequence
  Description of Artificial Sequence: Synthetic oligonucleotide
  Sense strand starting at position 2887 of SEQ ID NO: 587014
cggcucuucccgcguggaa

SEQ ID NO: 760223 - RNA, 19 nt, Artificial Sequence
  Description of Artificial Sequence: Synthetic oligonucleotide
  Antisense strand to SEQ ID NO: 760222
uuccacgcgggaagagccg

SEQ ID NO: 760224 - RNA, 19 nt, Artificial Sequence
  Description of Artificial Sequence: Synthetic oligonucleotide
  Sense strand starting at position 2888 of SEQ ID NO: 587014
ggcucuucccgcguggaau

SEQ ID NO: 760225 - RNA, 19 nt, Artificial Sequence
  Description of Artificial Sequence: Synthetic oligonucleotide
  Antisense strand to SEQ ID NO: 760224
auuccacgcgggaagagcc

SEQ ID NO: 760226 - RNA, 19 nt, Artificial Sequence
  Description of Artificial Sequence: Synthetic oligonucleotide
  Sense strand starting at position 2889 of SEQ ID NO: 587014
gcucuucccgcguggaauu

SEQ ID NO: 760227 - RNA, 19 nt, Artificial Sequence
  Description of Artificial Sequence: Synthetic oligonucleotide
  Antisense strand to SEQ ID NO: 760226
aauuccacgcgggaagagc

SEQ ID NO: 760228 - RNA, 19 nt, Artificial Sequence
  Description of Artificial Sequence: Synthetic oligonucleotide
  Sense strand starting at position 2899 of SEQ ID NO: 587014
cguggaauucgcagguucu

SEQ ID NO: 760229 - RNA, 19 nt, Artificial Sequence
  Description of Artificial Sequence: Synthetic oligonucleotide
  Antisense strand to SEQ ID NO: 760228
agaaccugcgaauuccacg

SEQ ID NO: 760230 - RNA, 19 nt, Artificial Sequence
  Description of Artificial Sequence: Synthetic oligonucleotide
  Sense strand starting at position 2942 of SEQ ID NO: 587014
gcgucuugcaaauacugau

SEQ ID NO: 760231 - RNA, 19 nt, Artificial Sequence
  Description of Artificial Sequence: Synthetic oligonucleotide
  Antisense strand to SEQ ID NO: 760230
aucaguauuugcaagacgc

SEQ ID NO: 760232 - RNA, 19 nt, Artificial Sequence
  Description of Artificial Sequence: Synthetic oligonucleotide
  Sense strand starting at position 2956 of SEQ ID NO: 587014
cugauuuguucuuugcacu

SEQ ID NO: 760233 - RNA, 19 nt, Artificial Sequence
  Description of Artificial Sequence: Synthetic oligonucleotide
  Antisense strand to SEQ ID NO: 760232
agugcaaagaacaaaucag

SEQ ID NO: 760234 - RNA, 19 nt, Artificial Sequence
  Description of Artificial Sequence: Synthetic oligonucleotide
  Sense strand starting at position 2957 of SEQ ID NO: 587014
ugauuuguucuuugcacuu

SEQ ID NO: 760235 - RNA, 19 nt, Artificial Sequence
  Description of Artificial Sequence: Synthetic oligonucleotide
  Antisense strand to SEQ ID NO: 760234
aagugcaaagaacaaauca

SEQ ID NO: 760236 - RNA, 19 nt, Artificial Sequence
  Description of Artificial Sequence: Synthetic oligonucleotide
  Sense strand starting at position 3933 of SEQ ID NO: 587014
cacgcagugguaugaucau

SEQ ID NO: 760237 - RNA, 19 nt, Artificial Sequence
  Description of Artificial Sequence: Synthetic oligonucleotide
  Antisense strand to SEQ ID NO: 760236
augaucauaccacugcgug

SEQ ID NO: 760238 - RNA, 19 nt, Artificial Sequence
  Description of Artificial Sequence: Synthetic oligonucleotide
  Sense strand starting at position 319 of SEQ ID NO: 587015
gccugugauccgagcgcuu

SEQ ID NO: 760239 - RNA, 19 nt, Artificial Sequence
  Description of Artificial Sequence: Synthetic oligonucleotide
  Antisense strand to SEQ ID NO: 760238
aagcgcucggaucacaggc

SEQ ID NO: 760240 - RNA, 19 nt, Artificial Sequence
  Description of Artificial Sequence: Synthetic oligonucleotide
  Sense strand starting at position 1443 of SEQ ID NO: 587015
gggucugcaucuucggaaa

SEQ ID NO: 760241 - RNA, 19 nt, Artificial Sequence
  Description of Artificial Sequence: Synthetic oligonucleotide
  Antisense strand to SEQ ID NO: 760240
uuuccgaagaugcagaccc

SEQ ID NO: 760242 - RNA, 19 nt, Artificial Sequence
  Description of Artificial Sequence: Synthetic oligonucleotide
  Sense strand starting at position 1446 of SEQ ID NO: 587015
ucugcaucuucggaaaggu

SEQ ID NO: 760243 - RNA, 19 nt, Artificial Sequence
  Description of Artificial Sequence: Synthetic oligonucleotide
  Antisense strand to SEQ ID NO: 760242
accuuuccgaagaugcaga

SEQ ID NO: 760244 - RNA, 19 nt, Artificial Sequence
  Description of Artificial Sequence: Synthetic oligonucleotide
  Sense strand starting at position 1454 of SEQ ID NO: 587015
uucggaaaggugugugcau

SEQ ID NO: 760245 - RNA, 19 nt, Artificial Sequence
  Description of Artificial Sequence: Synthetic oligonucleotide
  Antisense strand to SEQ ID NO: 760244
augcacacaccuuuccgaa

SEQ ID NO: 760246 - RNA, 19 nt, Artificial Sequence
  Description of Artificial Sequence: Synthetic oligonucleotide
  Sense strand starting at position 1829 of SEQ ID NO: 587015
cggcucuucccgcguggaa

SEQ ID NO: 760247 - RNA, 19 nt, Artificial Sequence
  Description of Artificial Sequence: Synthetic oligonucleotide
  Antisense strand to SEQ ID NO: 760246
uuccacgcgggaagagccg

SEQ ID NO: 760248 - RNA, 19 nt, Artificial Sequence
  Description of Artificial Sequence: Synthetic oligonucleotide
  Sense strand starting at position 1830 of SEQ ID NO: 587015
ggcucuucccgcguggaau

SEQ ID NO: 760249 - RNA, 19 nt, Artificial Sequence
  Description of Artificial Sequence: Synthetic oligonucleotide
  Antisense strand to SEQ ID NO: 760248
auuccacgcgggaagagcc

SEQ ID NO: 760250 - RNA, 19 nt, Artificial Sequence
  Description of Artificial Sequence: Synthetic oligonucleotide
  Sense strand starting at position 1831 of SEQ ID NO: 587015
gcucuucccgcguggaauu

SEQ ID NO: 760251 - RNA, 19 nt, Artificial Sequence
  Description of Artificial Sequence: Synthetic oligonucleotide
  Antisense strand to SEQ ID NO: 760250
aauuccacgcgggaagagc

SEQ ID NO: 760252 - RNA, 19 nt, Artificial Sequence
  Description of Artificial Sequence: Synthetic oligonucleotide
  Sense strand starting at position 1841 of SEQ ID NO: 587015
cguggaauucgcagguucu

SEQ ID NO: 760253 - RNA, 19 nt, Artificial Sequence
  Description of Artificial Sequence: Synthetic oligonucleotide
  Antisense strand to SEQ ID NO: 760252
agaaccugcgaauuccacg

SEQ ID NO: 760254 - RNA, 19 nt, Artificial Sequence
  Description of Artificial Sequence: Synthetic oligonucleotide
  Sense strand starting at position 1884 of SEQ ID NO: 587015
gcgucuugcaaauacugau

SEQ ID NO: 760255 - RNA, 19 nt, Artificial Sequence
  Description of Artificial Sequence: Synthetic oligonucleotide
  Antisense strand to SEQ ID NO: 760254
aucaguauuugcaagacgc

SEQ ID NO: 760256 - RNA, 19 nt, Artificial Sequence
  Description of Artificial Sequence: Synthetic oligonucleotide
  Sense strand starting at position 1898 of SEQ ID NO: 587015
cugauuuguucuuugcacu

SEQ ID NO: 760257 - RNA, 19 nt, Artificial Sequence
  Description of Artificial Sequence: Synthetic oligonucleotide
  Antisense strand to SEQ ID NO: 760256
agugcaaagaacaaaucag

SEQ ID NO: 760258 - RNA, 19 nt, Artificial Sequence
  Description of Artificial Sequence: Synthetic oligonucleotide
  Sense strand starting at position 1899 of SEQ ID NO: 587015
ugauuuguucuuugcacuu

SEQ ID NO: 760259 - RNA, 19 nt, Artificial Sequence
  Description of Artificial Sequence: Synthetic oligonucleotide
  Antisense strand to SEQ ID NO: 760258
aagugcaaagaacaaauca

SEQ ID NO: 760260 - RNA, 19 nt, Artificial Sequence
  Description of Artificial Sequence: Synthetic oligonucleotide
  Sense strand starting at position 2875 of SEQ ID NO: 587015
cacgcagugguaugaucau

SEQ ID NO: 760261 - RNA, 19 nt, Artificial Sequence
  Description of Artificial Sequence: Synthetic oligonucleotide
  Antisense strand to SEQ ID NO: 760260
augaucauaccacugcgug

SEQ ID NO: 760262 - RNA, 19 nt, Artificial Sequence
  Description of Artificial Sequence: Synthetic oligonucleotide
  Sense strand starting at position 3362 of SEQ ID NO: 587015
ucuugagcucuuggucuga

SEQ ID NO: 760263 - RNA, 19 nt, Artificial Sequence
  Description of Artificial Sequence: Synthetic oligonucleotide
  Antisense strand to SEQ ID NO: 760262
ucagaccaagagcucaaga

SEQ ID NO: 760264 - RNA, 19 nt, Artificial Sequence
  Description of Artificial Sequence: Synthetic oligonucleotide
  Sense strand starting at position 3364 of SEQ ID NO: 587015
uugagcucuuggucugaaa

SEQ ID NO: 760265 - RNA, 19 nt, Artificial Sequence
  Description of Artificial Sequence: Synthetic oligonucleotide
  Antisense strand to SEQ ID NO: 760264
uuucagaccaagagcucaa

SEQ ID NO: 760266 - RNA, 19 nt, Artificial Sequence
  Description of Artificial Sequence: Synthetic oligonucleotide
  Sense strand starting at position 3367 of SEQ ID NO: 587015
agcucuuggucugaaacga

SEQ ID NO: 760267 - RNA, 19 nt, Artificial Sequence
  Description of Artificial Sequence: Synthetic oligonucleotide
  Antisense strand to SEQ ID NO: 760266
ucguuucagaccaagagcu

SEQ ID NO: 760268 - RNA, 19 nt, Artificial Sequence
  Description of Artificial Sequence: Synthetic oligonucleotide
  Sense strand starting at position 3451 of SEQ ID NO: 587015
agcauuaacucugauggac

SEQ ID NO: 760269 - RNA, 19 nt, Artificial Sequence
  Description of Artificial Sequence: Synthetic oligonucleotide
  Antisense strand to SEQ ID NO: 760268
guccaucagaguuaaugcu

SEQ ID NO: 760270 - RNA, 19 nt, Artificial Sequence
  Description of Artificial Sequence: Synthetic oligonucleotide
  Sense strand starting at position 3570 of SEQ ID NO: 587015
cugggucugucacuagaga

SEQ ID NO: 760271 - RNA, 19 nt, Artificial Sequence
  Description of Artificial Sequence: Synthetic oligonucleotide
  Antisense strand to SEQ ID NO: 760270
ucucuagugacagacccag

SEQ ID NO: 760272 - RNA, 19 nt, Artificial Sequence
  Description of Artificial Sequence: Synthetic oligonucleotide
  Sense strand starting at position 3571 of SEQ ID NO: 587015
ugggucugucacuagagaa

SEQ ID NO: 760273 - RNA, 19 nt, Artificial Sequence
  Description of Artificial Sequence: Synthetic oligonucleotide
  Antisense strand to SEQ ID NO: 760272
uucucuagugacagaccca

SEQ ID NO: 760274 - RNA, 19 nt, Artificial Sequence
  Description of Artificial Sequence: Synthetic oligonucleotide
  Sense strand starting at position 3739 of SEQ ID NO: 587015
gcuucugugucucccgaaa

SEQ ID NO: 760275 - RNA, 19 nt, Artificial Sequence
  Description of Artificial Sequence: Synthetic oligonucleotide
  Antisense strand to SEQ ID NO: 760274
uuucgggagacacagaagc

SEQ ID NO: 760276 - RNA, 19 nt, Artificial Sequence
  Description of Artificial Sequence: Synthetic oligonucleotide
  Sense strand starting at position 3741 of SEQ ID NO: 587015
uucugugucucccgaaaca

SEQ ID NO: 760277 - RNA, 19 nt, Artificial Sequence
  Description of Artificial Sequence: Synthetic oligonucleotide
  Antisense strand to SEQ ID NO: 760276
uguuucgggagacacagaa

SEQ ID NO: 760278 - RNA, 19 nt, Artificial Sequence
  Description of Artificial Sequence: Synthetic oligonucleotide
  Sense strand starting at position 3786 of SEQ ID NO: 587015
ggccaacuguccucauuuc

SEQ ID NO: 760279 - RNA, 19 nt, Artificial Sequence
  Description of Artificial Sequence: Synthetic oligonucleotide
  Antisense strand to SEQ ID NO: 760278
gaaaugaggacaguuggcc

SEQ ID NO: 760280 - RNA, 19 nt, Artificial Sequence
  Description of Artificial Sequence: Synthetic oligonucleotide
  Sense strand starting at position 29 of SEQ ID NO: 587016
ucaacugugcuguugugua

SEQ ID NO: 760281 - RNA, 19 nt, Artificial Sequence
  Description of Artificial Sequence: Synthetic oligonucleotide
  Antisense strand to SEQ ID NO: 760280
uacacaacagcacaguuga

SEQ ID NO: 760282 - RNA, 19 nt, Artificial Sequence
  Description of Artificial Sequence: Synthetic oligonucleotide
  Sense strand starting at position 99 of SEQ ID NO: 587016
auaucauguggguauccau

SEQ ID NO: 760283 - RNA, 19 nt, Artificial Sequence
  Description of Artificial Sequence: Synthetic oligonucleotide
  Antisense strand to SEQ ID NO: 760282
auggauacccacaugauau

SEQ ID NO: 760284 - RNA, 19 nt, Artificial Sequence
  Description of Artificial Sequence: Synthetic oligonucleotide
  Sense strand starting at position 268 of SEQ ID NO: 587016
ggucauaggauacaugcau

SEQ ID NO: 760285 - RNA, 19 nt, Artificial Sequence
  Description of Artificial Sequence: Synthetic oligonucleotide
  Antisense strand to SEQ ID NO: 760284
augcauguauccuaugacc

SEQ ID NO: 760286 - RNA, 19 nt, Artificial Sequence
  Description of Artificial Sequence: Synthetic oligonucleotide
  Sense strand starting at position 281 of SEQ ID NO: 587016
augcauaauccguugcagu

SEQ ID NO: 760287 - RNA, 19 nt, Artificial Sequence
  Description of Artificial Sequence: Synthetic oligonucleotide
  Antisense strand to SEQ ID NO: 760286
acugcaacggauuaugcau

SEQ ID NO: 760288 - RNA, 19 nt, Artificial Sequence
  Description of Artificial Sequence: Synthetic oligonucleotide
  Sense strand starting at position 411 of SEQ ID NO: 587016
uaacgugaaggcuauaaac

SEQ ID NO: 760289 - RNA, 19 nt, Artificial Sequence
  Description of Artificial Sequence: Synthetic oligonucleotide
  Antisense strand to SEQ ID NO: 760288
guuuauagccuucacguua

SEQ ID NO: 760290 - RNA, 19 nt, Artificial Sequence
  Description of Artificial Sequence: Synthetic oligonucleotide
  Sense strand starting at position 413 of SEQ ID NO: 587016
acgugaaggcuauaaacuu

SEQ ID NO: 760291 - RNA, 19 nt, Artificial Sequence
  Description of Artificial Sequence: Synthetic oligonucleotide
  Antisense strand to SEQ ID NO: 760290
aaguuuauagccuucacgu

SEQ ID NO: 760292 - RNA, 19 nt, Artificial Sequence
  Description of Artificial Sequence: Synthetic oligonucleotide
  Sense strand starting at position 550 of SEQ ID NO: 587016
aguacagaaucuuuaagua

SEQ ID NO: 760293 - RNA, 19 nt, Artificial Sequence
  Description of Artificial Sequence: Synthetic oligonucleotide
  Antisense strand to SEQ ID NO: 760292
uacuuaaagauucuguacu

SEQ ID NO: 760294 - RNA, 19 nt, Artificial Sequence
  Description of Artificial Sequence: Synthetic oligonucleotide
  Sense strand starting at position 672 of SEQ ID NO: 587016
agggaaguguauucuggaa

SEQ ID NO: 760295 - RNA, 19 nt, Artificial Sequence
  Description of Artificial Sequence: Synthetic oligonucleotide
  Antisense strand to SEQ ID NO: 760294
uuccagaauacacuucccu

SEQ ID NO: 760296 - RNA, 19 nt, Artificial Sequence
  Description of Artificial Sequence: Synthetic oligonucleotide
  Sense strand starting at position 766 of SEQ ID NO: 587016
ucaguuauggucuacaaga

SEQ ID NO: 760297 - RNA, 19 nt, Artificial Sequence
  Description of Artificial Sequence: Synthetic oligonucleotide
  Antisense strand to SEQ ID NO: 760296
ucuuguagaccauaacuga

SEQ ID NO: 760298 - RNA, 19 nt, Artificial Sequence
  Description of Artificial Sequence: Synthetic oligonucleotide
  Sense strand starting at position 1071 of SEQ ID NO: 587016
uaccaauaggaagguuauu

SEQ ID NO: 760299 - RNA, 19 nt, Artificial Sequence
  Description of Artificial Sequence: Synthetic oligonucleotide
  Antisense strand to SEQ ID NO: 760298
aauaaccuuccuauuggua

SEQ ID NO: 760300 - RNA, 19 nt, Artificial Sequence
  Description of Artificial Sequence: Synthetic oligonucleotide
  Sense strand starting at position 1135 of SEQ ID NO: 587016
gggcguuuguaaauagguu

SEQ ID NO: 760301 - RNA, 19 nt, Artificial Sequence
  Description of Artificial Sequence: Synthetic oligonucleotide
  Antisense strand to SEQ ID NO: 760300
aaccuauuuacaaacgccc

SEQ ID NO: 760302 - RNA, 19 nt, Artificial Sequence
  Description of Artificial Sequence: Synthetic oligonucleotide
  Sense strand starting at position 1142 of SEQ ID NO: 587016
uguaaauagguuuagggua

SEQ ID NO: 760303 - RNA, 19 nt, Artificial Sequence
  Description of Artificial Sequence: Synthetic oligonucleotide
  Antisense strand to SEQ ID NO: 760302
uacccuaaaccuauuuaca

SEQ ID NO: 760304 - RNA, 19 nt, Artificial Sequence
  Description of Artificial Sequence: Synthetic oligonucleotide
  Sense strand starting at position 1158 of SEQ ID NO: 587016
guauuuggauucccugcua

SEQ ID NO: 760305 - RNA, 19 nt, Artificial Sequence
  Description of Artificial Sequence: Synthetic oligonucleotide
  Antisense strand to SEQ ID NO: 760304
uagcagggaauccaaauac

SEQ ID NO: 760306 - RNA, 19 nt, Artificial Sequence
  Description of Artificial Sequence: Synthetic oligonucleotide
  Sense strand starting at position 1186 of SEQ ID NO: 587016
ccacauauguucucacuag

SEQ ID NO: 760307 - RNA, 19 nt, Artificial Sequence
  Description of Artificial Sequence: Synthetic oligonucleotide
  Antisense strand to SEQ ID NO: 760306
cuagugagaacauaugugg

SEQ ID NO: 760308 - RNA, 19 nt, Artificial Sequence
  Description of Artificial Sequence: Synthetic oligonucleotide
  Sense strand starting at position 1311 of SEQ ID NO: 587016
cggugcuaagcucugcaua

SEQ ID NO: 760309 - RNA, 19 nt, Artificial Sequence
  Description of Artificial Sequence: Synthetic oligonucleotide
  Antisense strand to SEQ ID NO: 760308
uaugcagagcuuagcaccg

SEQ ID NO: 760310 - RNA, 19 nt, Artificial Sequence
  Description of Artificial Sequence: Synthetic oligonucleotide
  Sense strand starting at position 1390 of SEQ ID NO: 587016
gugaauuaucuggaagcuu

SEQ ID NO: 760311 - RNA, 19 nt, Artificial Sequence
  Description of Artificial Sequence: Synthetic oligonucleotide
  Antisense strand to SEQ ID NO: 760310
aagcuuccagauaauucac

SEQ ID NO: 760312 - RNA, 19 nt, Artificial Sequence
  Description of Artificial Sequence: Synthetic oligonucleotide
  Sense strand starting at position 1499 of SEQ ID NO: 587016
accguugacauagaaguau

SEQ ID NO: 760313 - RNA, 19 nt, Artificial Sequence
  Description of Artificial Sequence: Synthetic oligonucleotide
  Antisense strand to SEQ ID NO: 760312
auacuucuaugucaacggu

SEQ ID NO: 760314 - RNA, 19 nt, Artificial Sequence
  Description of Artificial Sequence: Synthetic oligonucleotide
  Sense strand starting at position 1518 of SEQ ID NO: 587016
ugugaucaaguguaagacu

SEQ ID NO: 760315 - RNA, 19 nt, Artificial Sequence
  Description of Artificial Sequence: Synthetic oligonucleotide
  Antisense strand to SEQ ID NO: 760314
agucuuacacuugaucaca

SEQ ID NO: 760316 - RNA, 19 nt, Artificial Sequence
  Description of Artificial Sequence: Synthetic oligonucleotide
  Sense strand starting at position 1526 of SEQ ID NO: 587016
aguguaagacugugaugaa

SEQ ID NO: 760317 - RNA, 19 nt, Artificial Sequence
  Description of Artificial Sequence: Synthetic oligonucleotide
  Antisense strand to SEQ ID NO: 760316
uucaucacagucuuacacu

SEQ ID NO: 760318 - RNA, 19 nt, Artificial Sequence
  Description of Artificial Sequence: Synthetic oligonucleotide
  Sense strand starting at position 1604 of SEQ ID NO: 587016
ucggguaacagguaacaga

SEQ ID NO: 760319 - RNA, 19 nt, Artificial Sequence
  Description of Artificial Sequence: Synthetic oligonucleotide
  Antisense strand to SEQ ID NO: 760318
ucuguuaccuguuacccga

SEQ ID NO: 760320 - RNA, 19 nt, Artificial Sequence
  Description of Artificial Sequence: Synthetic oligonucleotide
  Sense strand starting at position 1696 of SEQ ID NO: 587016
acccauucgcaucaggauu

SEQ ID NO: 760321 - RNA, 19 nt, Artificial Sequence
  Description of Artificial Sequence: Synthetic oligonucleotide
  Antisense strand to SEQ ID NO: 760320
aauccugaugcgaaugggu

SEQ ID NO: 760322 - RNA, 19 nt, Artificial Sequence
  Description of Artificial Sequence: Synthetic oligonucleotide
  Sense strand starting at position 2089 of SEQ ID NO: 587016
cuaauuguaccauauguca

SEQ ID NO: 760323 - RNA, 19 nt, Artificial Sequence
  Description of Artificial Sequence: Synthetic oligonucleotide
  Antisense strand to SEQ ID NO: 760322
ugacauaugguacaauuag

SEQ ID NO: 760324 - RNA, 19 nt, Artificial Sequence
  Description of Artificial Sequence: Synthetic oligonucleotide
  Sense strand starting at position 2156 of SEQ ID NO: 587016
auagcaaaucuggauguuu

SEQ ID NO: 760325 - RNA, 19 nt, Artificial Sequence
  Description of Artificial Sequence: Synthetic oligonucleotide
  Antisense strand to SEQ ID NO: 760324
aaacauccagauuugcuau

SEQ ID NO: 760326 - RNA, 19 nt, Artificial Sequence
  Description of Artificial Sequence: Synthetic oligonucleotide
  Sense strand starting at position 2544 of SEQ ID NO: 587016
aggaauaaugcucauugca

SEQ ID NO: 760327 - RNA, 19 nt, Artificial Sequence
  Description of Artificial Sequence: Synthetic oligonucleotide
  Antisense strand to SEQ ID NO: 760326
ugcaaugagcauuauuccu

SEQ ID NO: 760328 - RNA, 19 nt, Artificial Sequence
  Description of Artificial Sequence: Synthetic oligonucleotide
  Sense strand starting at position 2552 of SEQ ID NO: 587016
ugcucauugcacguuguua

SEQ ID NO: 760329 - RNA, 19 nt, Artificial Sequence
  Description of Artificial Sequence: Synthetic oligonucleotide
  Antisense strand to SEQ ID NO: 760328
uaacaacgugcaaugagca

SEQ ID NO: 760330 - RNA, 19 nt, Artificial Sequence
  Description of Artificial Sequence: Synthetic oligonucleotide
  Sense strand starting at position 2553 of SEQ ID NO: 587016
gcucauugcacguuguuau

SEQ ID NO: 760331 - RNA, 19 nt, Artificial Sequence
  Description of Artificial Sequence: Synthetic oligonucleotide
  Antisense strand to SEQ ID NO: 760330
auaacaacgugcaaugagc

SEQ ID NO: 760332 - RNA, 19 nt, Artificial Sequence
  Description of Artificial Sequence: Synthetic oligonucleotide
  Sense strand starting at position 2565 of SEQ ID NO: 587016
uuguuauaugcacaucaca

SEQ ID NO: 760333 - RNA, 19 nt, Artificial Sequence
  Description of Artificial Sequence: Synthetic oligonucleotide
  Antisense strand to SEQ ID NO: 760332
ugugaugugcauauaacaa

SEQ ID NO: 760334 - RNA, 19 nt, Artificial Sequence
  Description of Artificial Sequence: Synthetic oligonucleotide
  Sense strand starting at position 2626 of SEQ ID NO: 587016
gaaggaugagcugguuuau

SEQ ID NO: 760335 - RNA, 19 nt, Artificial Sequence
  Description of Artificial Sequence: Synthetic oligonucleotide
  Antisense strand to SEQ ID NO: 760334
auaaaccagcucauccuuc

SEQ ID NO: 760336 - RNA, 19 nt, Artificial Sequence
  Description of Artificial Sequence: Synthetic oligonucleotide
  Sense strand starting at position 2653 of SEQ ID NO: 587016
uaaauucuacgaugacagu

SEQ ID NO: 760337 - RNA, 19 nt, Artificial Sequence
  Description of Artificial Sequence: Synthetic oligonucleotide
  Antisense strand to SEQ ID NO: 760336
acugucaucguagaauuua

SEQ ID NO: 760338 - RNA, 19 nt, Artificial Sequence
  Description of Artificial Sequence: Synthetic oligonucleotide
  Sense strand starting at position 2722 of SEQ ID NO: 587016
auuguuguugaugagaauu

SEQ ID NO: 760339 - RNA, 19 nt, Artificial Sequence
  Description of Artificial Sequence: Synthetic oligonucleotide
  Antisense strand to SEQ ID NO: 760338
aauucucaucaacaacaau

SEQ ID NO: 760340 - RNA, 19 nt, Artificial Sequence
  Description of Artificial Sequence: Synthetic oligonucleotide
  Sense strand starting at position 2983 of SEQ ID NO: 587016
cuuagaaugguccaccuau

SEQ ID NO: 760341 - RNA, 19 nt, Artificial Sequence
  Description of Artificial Sequence: Synthetic oligonucleotide
  Antisense strand to SEQ ID NO: 760340
auagguggaccauucuaag

SEQ ID NO: 760342 - RNA, 19 nt, Artificial Sequence
  Description of Artificial Sequence: Synthetic oligonucleotide
  Sense strand starting at position 3092 of SEQ ID NO: 587016
gugaauuuguaaguguuau

SEQ ID NO: 760343 - RNA, 19 nt, Artificial Sequence
  Description of Artificial Sequence: Synthetic oligonucleotide
  Antisense strand to SEQ ID NO: 760342
auaacacuuacaaauucac

SEQ ID NO: 760344 - RNA, 19 nt, Artificial Sequence
  Description of Artificial Sequence: Synthetic oligonucleotide
  Sense strand starting at position 3443 of SEQ ID NO: 587016
uuaaacauguaucuuggaa

SEQ ID NO: 760345 - RNA, 19 nt, Artificial Sequence
  Description of Artificial Sequence: Synthetic oligonucleotide
  Antisense strand to SEQ ID NO: 760344
uuccaagauacauguuuaa

SEQ ID NO: 760346 - RNA, 19 nt, Artificial Sequence
  Description of Artificial Sequence: Synthetic oligonucleotide
  Sense strand starting at position 3524 of SEQ ID NO: 587016
gugaaugggccauaggcua

SEQ ID NO: 760347 - RNA, 19 nt, Artificial Sequence
  Description of Artificial Sequence: Synthetic oligonucleotide
  Antisense strand to SEQ ID NO: 760346
uagccuauggcccauucac

SEQ ID NO: 760348 - RNA, 19 nt, Artificial Sequence
  Description of Artificial Sequence: Synthetic oligonucleotide
  Sense strand starting at position 3538 of SEQ ID NO: 587016
ggcuauuuagccugucuca

SEQ ID NO: 760349 - RNA, 19 nt, Artificial Sequence
  Description of Artificial Sequence: Synthetic oligonucleotide
  Antisense strand to SEQ ID NO: 760348
ugagacaggcuaaauagcc

SEQ ID NO: 760350 - RNA, 19 nt, Artificial Sequence
  Description of Artificial Sequence: Synthetic oligonucleotide
  Sense strand starting at position 3626 of SEQ ID NO: 587016
gugugaauauaucuuuaag

SEQ ID NO: 760351 - RNA, 19 nt, Artificial Sequence
  Description of Artificial Sequence: Synthetic oligonucleotide
  Antisense strand to SEQ ID NO: 760350
cuuaaagauauauucacac

SEQ ID NO: 760352 - RNA, 19 nt, Artificial Sequence
  Description of Artificial Sequence: Synthetic oligonucleotide
  Sense strand starting at position 3628 of SEQ ID NO: 587016
gugaauauaucuuuaagga

SEQ ID NO: 760353 - RNA, 19 nt, Artificial Sequence
  Description of Artificial Sequence: Synthetic oligonucleotide
  Antisense strand to SEQ ID NO: 760352
uccuuaaagauauauucac

SEQ ID NO: 760354 - RNA, 19 nt, Artificial Sequence
  Description of Artificial Sequence: Synthetic oligonucleotide
  Sense strand starting at position 3740 of SEQ ID NO: 587016
uugucagguguacacaaua

SEQ ID NO: 760355 - RNA, 19 nt, Artificial Sequence
  Description of Artificial Sequence: Synthetic oligonucleotide
  Antisense strand to SEQ ID NO: 760354
uauuguguacaccugacaa

SEQ ID NO: 760356 - RNA, 19 nt, Artificial Sequence
  Description of Artificial Sequence: Synthetic oligonucleotide
  Sense strand starting at position 3830 of SEQ ID NO: 587016
auuggacaguuaucuuaca

SEQ ID NO: 760357 - RNA, 19 nt, Artificial Sequence
  Description of Artificial Sequence: Synthetic oligonucleotide
  Antisense strand to SEQ ID NO: 760356
uguaagauaacuguccaau

SEQ ID NO: 760358 - RNA, 19 nt, Artificial Sequence
  Description of Artificial Sequence: Synthetic oligonucleotide
  Sense strand starting at position 3949 of SEQ ID NO: 587016
uggucuugacaaugacuuu

SEQ ID NO: 760359 - RNA, 19 nt, Artificial Sequence
  Description of Artificial Sequence: Synthetic oligonucleotide
  Antisense strand to SEQ ID NO: 760358
aaagucauugucaagacca

SEQ ID NO: 760360 - RNA, 19 nt, Artificial Sequence
  Description of Artificial Sequence: Synthetic oligonucleotide
  Sense strand starting at position 225 of SEQ ID NO: 587017
aaagacugcugcguccaau

SEQ ID NO: 760361 - RNA, 19 nt, Artificial Sequence
  Description of Artificial Sequence: Synthetic oligonucleotide
  Antisense strand to SEQ ID NO: 760360
auuggacgcagcagucuuu

SEQ ID NO: 760362 - RNA, 19 nt, Artificial Sequence
  Description of Artificial Sequence: Synthetic oligonucleotide
  Sense strand starting at position 228 of SEQ ID NO: 587017
gacugcugcguccaaugau

SEQ ID NO: 760363 - RNA, 19 nt, Artificial Sequence
  Description of Artificial Sequence: Synthetic oligonucleotide
  Antisense strand to SEQ ID NO: 760362
aucauuggacgcagcaguc

SEQ ID NO: 760364 - RNA, 19 nt, Artificial Sequence
  Description of Artificial Sequence: Synthetic oligonucleotide
  Sense strand starting at position 240 of SEQ ID NO: 587017
caaugauguuagcuuugaa

SEQ ID NO: 760365 - RNA, 19 nt, Artificial Sequence
  Description of Artificial Sequence: Synthetic oligonucleotide
  Antisense strand to SEQ ID NO: 760364
uucaaagcuaacaucauug

SEQ ID NO: 760366 - RNA, 19 nt, Artificial Sequence
  Description of Artificial Sequence: Synthetic oligonucleotide
  Sense strand starting at position 243 of SEQ ID NO: 587017
ugauguuagcuuugaagac

SEQ ID NO: 760367 - RNA, 19 nt, Artificial Sequence
  Description of Artificial Sequence: Synthetic oligonucleotide
  Antisense strand to SEQ ID NO: 760366
gucuucaaagcuaacauca

SEQ ID NO: 760368 - RNA, 19 nt, Artificial Sequence
  Description of Artificial Sequence: Synthetic oligonucleotide
  Sense strand starting at position 276 of SEQ ID NO: 587017
aggccuaagcucugauugu

SEQ ID NO: 760369 - RNA, 19 nt, Artificial Sequence
  Description of Artificial Sequence: Synthetic oligonucleotide
  Antisense strand to SEQ ID NO: 760368
acaaucagagcuuaggccu

SEQ ID NO: 760370 - RNA, 19 nt, Artificial Sequence
  Description of Artificial Sequence: Synthetic oligonucleotide
  Sense strand starting at position 391 of SEQ ID NO: 587017
gugacuuacuuuccgauuu

SEQ ID NO: 760371 - RNA, 19 nt, Artificial Sequence
  Description of Artificial Sequence: Synthetic oligonucleotide
  Antisense strand to SEQ ID NO: 760370
aaaucggaaaguaagucac

SEQ ID NO: 760372 - RNA, 19 nt, Artificial Sequence
  Description of Artificial Sequence: Synthetic oligonucleotide
  Sense strand starting at position 408 of SEQ ID NO: 587017
uuggcauaacauuauguga

SEQ ID NO: 760373 - RNA, 19 nt, Artificial Sequence
  Description of Artificial Sequence: Synthetic oligonucleotide
  Antisense strand to SEQ ID NO: 760372
ucacauaauguuaugccaa

SEQ ID NO: 760374 - RNA, 19 nt, Artificial Sequence
  Description of Artificial Sequence: Synthetic oligonucleotide
  Sense strand starting at position 1054 of SEQ ID NO: 587017
cuaucaaucccaggucugu

SEQ ID NO: 760375 - RNA, 19 nt, Artificial Sequence
  Description of Artificial Sequence: Synthetic oligonucleotide
  Antisense strand to SEQ ID NO: 760374
acagaccugggauugauag

SEQ ID NO: 760376 - RNA, 19 nt, Artificial Sequence
  Description of Artificial Sequence: Synthetic oligonucleotide
  Sense strand starting at position 1060 of SEQ ID NO: 587017
aucccaggucuguagacaa

SEQ ID NO: 760377 - RNA, 19 nt, Artificial Sequence
  Description of Artificial Sequence: Synthetic oligonucleotide
  Antisense strand to SEQ ID NO: 760376
uugucuacagaccugggau

SEQ ID NO: 760378 - RNA, 19 nt, Artificial Sequence
  Description of Artificial Sequence: Synthetic oligonucleotide
  Sense strand starting at position 1113 of SEQ ID NO: 587017
uuaccuauagccugaaagu

SEQ ID NO: 760379 - RNA, 19 nt, Artificial Sequence
  Description of Artificial Sequence: Synthetic oligonucleotide
  Antisense strand to SEQ ID NO: 760378
acuuucaggcuauagguaa

SEQ ID NO: 760380 - RNA, 19 nt, Artificial Sequence
  Description of Artificial Sequence: Synthetic oligonucleotide
  Sense strand starting at position 1392 of SEQ ID NO: 587017
aguacugcccaugaucaga

SEQ ID NO: 760381 - RNA, 19 nt, Artificial Sequence
  Description of Artificial Sequence: Synthetic oligonucleotide
  Antisense strand to SEQ ID NO: 760380
ucugaucaugggcaguacu

SEQ ID NO: 760382 - RNA, 19 nt, Artificial Sequence
  Description of Artificial Sequence: Synthetic oligonucleotide
  Sense strand starting at position 1451 of SEQ ID NO: 587017
cugcaucuuccacggugaa

SEQ ID NO: 760383 - RNA, 19 nt, Artificial Sequence
  Description of Artificial Sequence: Synthetic oligonucleotide
  Antisense strand to SEQ ID NO: 760382
uucaccguggaagaugcag

SEQ ID NO: 760384 - RNA, 19 nt, Artificial Sequence
  Description of Artificial Sequence: Synthetic oligonucleotide
  Sense strand starting at position 1470 of SEQ ID NO: 587017
cgucuuuggcucuaacaac

SEQ ID NO: 760385 - RNA, 19 nt, Artificial Sequence
  Description of Artificial Sequence: Synthetic oligonucleotide
  Antisense strand to SEQ ID NO: 760384
guuguuagagccaaagacg

SEQ ID NO: 760386 - RNA, 19 nt, Artificial Sequence
  Description of Artificial Sequence: Synthetic oligonucleotide
  Sense strand starting at position 1524 of SEQ ID NO: 587017
agggaaugcguguggacua

SEQ ID NO: 760387 - RNA, 19 nt, Artificial Sequence
  Description of Artificial Sequence: Synthetic oligonucleotide
  Antisense strand to SEQ ID NO: 760386
uaguccacacgcauucccu

SEQ ID NO: 760388 - RNA, 19 nt, Artificial Sequence
  Description of Artificial Sequence: Synthetic oligonucleotide
  Sense strand starting at position 1893 of SEQ ID NO: 587017
gcuggagacuucuaugaua

SEQ ID NO: 760389 - RNA, 19 nt, Artificial Sequence
  Description of Artificial Sequence: Synthetic oligonucleotide
  Antisense strand to SEQ ID NO: 760388
uaucauagaagucuccagc

SEQ ID NO: 760390 - RNA, 19 nt, Artificial Sequence
  Description of Artificial Sequence: Synthetic oligonucleotide
  Sense strand starting at position 1946 of SEQ ID NO: 587017
ggcucaauuuccgaaggcu

SEQ ID NO: 760391 - RNA, 19 nt, Artificial Sequence
  Description of Artificial Sequence: Synthetic oligonucleotide
  Antisense strand to SEQ ID NO: 760390
agccuucggaaauugagcc

SEQ ID NO: 760392 - RNA, 19 nt, Artificial Sequence
  Description of Artificial Sequence: Synthetic oligonucleotide
  Sense strand starting at position 2025 of SEQ ID NO: 587017
aacagcuucccugguggaa

SEQ ID NO: 760393 - RNA, 19 nt, Artificial Sequence
  Description of Artificial Sequence: Synthetic oligonucleotide
  Antisense strand to SEQ ID NO: 760392
uuccaccagggaagcuguu

SEQ ID NO: 760394 - RNA, 19 nt, Artificial Sequence
  Description of Artificial Sequence: Synthetic oligonucleotide
  Sense strand starting at position 2076 of SEQ ID NO: 587017
guuauuggauaguuaguau

SEQ ID NO: 760395 - RNA, 19 nt, Artificial Sequence
  Description of Artificial Sequence: Synthetic oligonucleotide
  Antisense strand to SEQ ID NO: 760394
auacuaacuauccaauaac

SEQ ID NO: 760396 - RNA, 19 nt, Artificial Sequence
  Description of Artificial Sequence: Synthetic oligonucleotide
  Sense strand starting at position 2079 of SEQ ID NO: 587017
auuggauaguuaguauaug

SEQ ID NO: 760397 - RNA, 19 nt, Artificial Sequence
  Description of Artificial Sequence: Synthetic oligonucleotide
  Antisense strand to SEQ ID NO: 760396
cauauacuaacuauccaau

SEQ ID NO: 760398 - RNA, 19 nt, Artificial Sequence
  Description of Artificial Sequence: Synthetic oligonucleotide
  Sense strand starting at position 2702 of SEQ ID NO: 587017
guacuaaugugcuugauaa

SEQ ID NO: 760399 - RNA, 19 nt, Artificial Sequence
  Description of Artificial Sequence: Synthetic oligonucleotide
  Antisense strand to SEQ ID NO: 760398
uuaucaagcacauuaguac

SEQ ID NO: 760400 - RNA, 19 nt, Artificial Sequence
  Description of Artificial Sequence: Synthetic oligonucleotide
  Sense strand starting at position 2704 of SEQ ID NO: 587017
acuaaugugcuugauaaau

SEQ ID NO: 760401 - RNA, 19 nt, Artificial Sequence
  Description of Artificial Sequence: Synthetic oligonucleotide
  Antisense strand to SEQ ID NO: 760400
auuuaucaagcacauuagu

SEQ ID NO: 760402 - RNA, 19 nt, Artificial Sequence
  Description of Artificial Sequence: Synthetic oligonucleotide
  Sense strand starting at position 2723 of SEQ ID NO: 587017
ggaagccauuacuauuauu

SEQ ID NO: 760403 - RNA, 19 nt, Artificial Sequence
  Description of Artificial Sequence: Synthetic oligonucleotide
  Antisense strand to SEQ ID NO: 760402
aauaauaguaauggcuucc

SEQ ID NO: 760404 - RNA, 19 nt, Artificial Sequence
  Description of Artificial Sequence: Synthetic oligonucleotide
  Sense strand starting at position 2734 of SEQ ID NO: 587017
cuauuauuacucuguauga

SEQ ID NO: 760405 - RNA, 19 nt, Artificial Sequence
  Description of Artificial Sequence: Synthetic oligonucleotide
  Antisense strand to SEQ ID NO: 760404
ucauacagaguaauaauag

SEQ ID NO: 760406 - RNA, 19 nt, Artificial Sequence
  Description of Artificial Sequence: Synthetic oligonucleotide
  Sense strand starting at position 2738 of SEQ ID NO: 587017
uauuacucuguaugaggga

SEQ ID NO: 760407 - RNA, 19 nt, Artificial Sequence
  Description of Artificial Sequence: Synthetic oligonucleotide
  Antisense strand to SEQ ID NO: 760406
ucccucauacagaguaaua

SEQ ID NO: 760408 - RNA, 19 nt, Artificial Sequence
  Description of Artificial Sequence: Synthetic oligonucleotide
  Sense strand starting at position 2743 of SEQ ID NO: 587017
cucuguaugagggauguau

SEQ ID NO: 760409 - RNA, 19 nt, Artificial Sequence
  Description of Artificial Sequence: Synthetic oligonucleotide
  Antisense strand to SEQ ID NO: 760408
auacaucccucauacagag

SEQ ID NO: 760410 - RNA, 19 nt, Artificial Sequence
  Description of Artificial Sequence: Synthetic oligonucleotide
  Sense strand starting at position 2754 of SEQ ID NO: 587017
ggauguauuugucacuaau

SEQ ID NO: 760411 - RNA, 19 nt, Artificial Sequence
  Description of Artificial Sequence: Synthetic oligonucleotide
  Antisense strand to SEQ ID NO: 760410
auuagugacaaauacaucc

SEQ ID NO: 760412 - RNA, 19 nt, Artificial Sequence
  Description of Artificial Sequence: Synthetic oligonucleotide
  Sense strand starting at position 2946 of SEQ ID NO: 587017
cucugagaccgguaaccaa

SEQ ID NO: 760413 - RNA, 19 nt, Artificial Sequence
  Description of Artificial Sequence: Synthetic oligonucleotide
  Antisense strand to SEQ ID NO: 760412
uugguuaccggucucagag

SEQ ID NO: 760414 - RNA, 19 nt, Artificial Sequence
  Description of Artificial Sequence: Synthetic oligonucleotide
  Sense strand starting at position 3004 of SEQ ID NO: 587017
ccaagagcauccucugagu

SEQ ID NO: 760415 - RNA, 19 nt, Artificial Sequence
  Description of Artificial Sequence: Synthetic oligonucleotide
  Antisense strand to SEQ ID NO: 760414
acucagaggaugcucuugg

SEQ ID NO: 760416 - RNA, 19 nt, Artificial Sequence
  Description of Artificial Sequence: Synthetic oligonucleotide
  Sense strand starting at position 3025 of SEQ ID NO: 587017
gagggaagauggcuuugau

SEQ ID NO: 760417 - RNA, 19 nt, Artificial Sequence
  Description of Artificial Sequence: Synthetic oligonucleotide
  Antisense strand to SEQ ID NO: 760416
aucaaagccaucuucccuc

SEQ ID NO: 760418 - RNA, 19 nt, Artificial Sequence
  Description of Artificial Sequence: Synthetic oligonucleotide
  Sense strand starting at position 3028 of SEQ ID NO: 587017
ggaagauggcuuugauaca

SEQ ID NO: 760419 - RNA, 19 nt, Artificial Sequence
  Description of Artificial Sequence: Synthetic oligonucleotide
  Antisense strand to SEQ ID NO: 760418
uguaucaaagccaucuucc

SEQ ID NO: 760420 - RNA, 19 nt, Artificial Sequence
  Description of Artificial Sequence: Synthetic oligonucleotide
  Sense strand starting at position 3029 of SEQ ID NO: 587017
gaagauggcuuugauacag

SEQ ID NO: 760421 - RNA, 19 nt, Artificial Sequence
  Description of Artificial Sequence: Synthetic oligonucleotide
  Antisense strand to SEQ ID NO: 760420
cuguaucaaagccaucuuc

SEQ ID NO: 760422 - RNA, 19 nt, Artificial Sequence
  Description of Artificial Sequence: Synthetic oligonucleotide
  Sense strand starting at position 3088 of SEQ ID NO: 587017
cuguauuuccagugugcuu

SEQ ID NO: 760423 - RNA, 19 nt, Artificial Sequence
  Description of Artificial Sequence: Synthetic oligonucleotide
  Antisense strand to SEQ ID NO: 760422
aagcacacuggaaauacag

SEQ ID NO: 760424 - RNA, 19 nt, Artificial Sequence
  Description of Artificial Sequence: Synthetic oligonucleotide
  Sense strand starting at position 3095 of SEQ ID NO: 587017
uccagugugcuuucuugca

SEQ ID NO: 760425 - RNA, 19 nt, Artificial Sequence
  Description of Artificial Sequence: Synthetic oligonucleotide
  Antisense strand to SEQ ID NO: 760424
ugcaagaaagcacacugga

SEQ ID NO: 760426 - RNA, 19 nt, Artificial Sequence
  Description of Artificial Sequence: Synthetic oligonucleotide
  Sense strand starting at position 3102 of SEQ ID NO: 587017
ugcuuucuugcaugucauu

SEQ ID NO: 760427 - RNA, 19 nt, Artificial Sequence
  Description of Artificial Sequence: Synthetic oligonucleotide
  Antisense strand to SEQ ID NO: 760426
aaugacaugcaagaaagca

SEQ ID NO: 760428 - RNA, 19 nt, Artificial Sequence
  Description of Artificial Sequence: Synthetic oligonucleotide
  Sense strand starting at position 3494 of SEQ ID NO: 587017
guaccaagucaguggcuua

SEQ ID NO: 760429 - RNA, 19 nt, Artificial Sequence
  Description of Artificial Sequence: Synthetic oligonucleotide
  Antisense strand to SEQ ID NO: 760428
uaagccacugacuugguac

SEQ ID NO: 760430 - RNA, 19 nt, Artificial Sequence
  Description of Artificial Sequence: Synthetic oligonucleotide
  Sense strand starting at position 3846 of SEQ ID NO: 587017
agaugacucuaagacauag

SEQ ID NO: 760431 - RNA, 19 nt, Artificial Sequence
  Description of Artificial Sequence: Synthetic oligonucleotide
  Antisense strand to SEQ ID NO: 760430
cuaugucuuagagucaucu

SEQ ID NO: 760432 - RNA, 19 nt, Artificial Sequence
  Description of Artificial Sequence: Synthetic oligonucleotide
  Sense strand starting at position 3877 of SEQ ID NO: 587017
auauuccuagugggauaaa

SEQ ID NO: 760433 - RNA, 19 nt, Artificial Sequence
  Description of Artificial Sequence: Synthetic oligonucleotide
  Antisense strand to SEQ ID NO: 760432
uuuaucccacuaggaauau

SEQ ID NO: 760434 - RNA, 19 nt, Artificial Sequence
  Description of Artificial Sequence: Synthetic oligonucleotide
  Sense strand starting at position 3942 of SEQ ID NO: 587017
uugguaucaucaguugcau

SEQ ID NO: 760435 - RNA, 19 nt, Artificial Sequence
  Description of Artificial Sequence: Synthetic oligonucleotide
  Antisense strand to SEQ ID NO: 760434
augcaacugaugauaccaa

SEQ ID NO: 760436 - RNA, 19 nt, Artificial Sequence
  Description of Artificial Sequence: Synthetic oligonucleotide
  Sense strand starting at position 3948 of SEQ ID NO: 587017
ucaucaguugcauauuagu

SEQ ID NO: 760437 - RNA, 19 nt, Artificial Sequence
  Description of Artificial Sequence: Synthetic oligonucleotide
  Antisense strand to SEQ ID NO: 760436
acuaauaugcaacugauga

SEQ ID NO: 760438 - RNA, 19 nt, Artificial Sequence
  Description of Artificial Sequence: Synthetic oligonucleotide
  Sense strand starting at position 3953 of SEQ ID NO: 587017
aguugcauauuaguacaua

SEQ ID NO: 760439 - RNA, 19 nt, Artificial Sequence
  Description of Artificial Sequence: Synthetic oligonucleotide
  Antisense strand to SEQ ID NO: 760438
uauguacuaauaugcaacu

SEQ ID NO: 760440 - RNA, 19 nt, Artificial Sequence
  Description of Artificial Sequence: Synthetic oligonucleotide
  Sense strand starting at position 74 of SEQ ID NO: 587018
guuuccuacugauuguaau

SEQ ID NO: 760441 - RNA, 19 nt, Artificial Sequence
  Description of Artificial Sequence: Synthetic oligonucleotide
  Antisense strand to SEQ ID NO: 760440
auuacaaucaguaggaaac

SEQ ID NO: 760442 - RNA, 19 nt, Artificial Sequence
  Description of Artificial Sequence: Synthetic oligonucleotide
  Sense strand starting at position 84 of SEQ ID NO: 587018
gauuguaauuuggacuucu

SEQ ID NO: 760443 - RNA, 19 nt, Artificial Sequence
  Description of Artificial Sequence: Synthetic oligonucleotide
  Antisense strand to SEQ ID NO: 760442
agaaguccaaauuacaauc

SEQ ID NO: 760444 - RNA, 19 nt, Artificial Sequence
  Description of Artificial Sequence: Synthetic oligonucleotide
  Sense strand starting at position 561 of SEQ ID NO: 587018
cggccuuccuuccuuuaau

SEQ ID NO: 760445 - RNA, 19 nt, Artificial Sequence
  Description of Artificial Sequence: Synthetic oligonucleotide
  Antisense strand to SEQ ID NO: 760444
auuaaaggaaggaaggccg

SEQ ID NO: 760446 - RNA, 19 nt, Artificial Sequence
  Description of Artificial Sequence: Synthetic oligonucleotide
  Sense strand starting at position 576 of SEQ ID NO: 587018
uaauccuucuggguagaga

SEQ ID NO: 760447 - RNA, 19 nt, Artificial Sequence
  Description of Artificial Sequence: Synthetic oligonucleotide
  Antisense strand to SEQ ID NO: 760446
ucucuacccagaaggauua

SEQ ID NO: 760448 - RNA, 19 nt, Artificial Sequence
  Description of Artificial Sequence: Synthetic oligonucleotide
  Sense strand starting at position 590 of SEQ ID NO: 587018
agagauuucuuagaacucu

SEQ ID NO: 760449 - RNA, 19 nt, Artificial Sequence
  Description of Artificial Sequence: Synthetic oligonucleotide
  Antisense strand to SEQ ID NO: 760448
agaguucuaagaaaucucu

SEQ ID NO: 760450 - RNA, 19 nt, Artificial Sequence
  Description of Artificial Sequence: Synthetic oligonucleotide
  Sense strand starting at position 691 of SEQ ID NO: 587018
gaagauaagccuggaaugu

SEQ ID NO: 760451 - RNA, 19 nt, Artificial Sequence
  Description of Artificial Sequence: Synthetic oligonucleotide
  Antisense strand to SEQ ID NO: 760450
acauuccaggcuuaucuuc

SEQ ID NO: 760452 - RNA, 19 nt, Artificial Sequence
  Description of Artificial Sequence: Synthetic oligonucleotide
  Sense strand starting at position 758 of SEQ ID NO: 587018
ggagaugccuacuaaagag

SEQ ID NO: 760453 - RNA, 19 nt, Artificial Sequence
  Description of Artificial Sequence: Synthetic oligonucleotide
  Antisense strand to SEQ ID NO: 760452
cucuuuaguaggcaucucc

SEQ ID NO: 760454 - RNA, 19 nt, Artificial Sequence
  Description of Artificial Sequence: Synthetic oligonucleotide
  Sense strand starting at position 924 of SEQ ID NO: 587018
gcaagugggagcgagauaa

SEQ ID NO: 760455 - RNA, 19 nt, Artificial Sequence
  Description of Artificial Sequence: Synthetic oligonucleotide
  Antisense strand to SEQ ID NO: 760454
uuaucucgcucccacuugc

SEQ ID NO: 760456 - RNA, 19 nt, Artificial Sequence
  Description of Artificial Sequence: Synthetic oligonucleotide
  Sense strand starting at position 996 of SEQ ID NO: 587018
cuagaaguaggcuggaaau

SEQ ID NO: 760457 - RNA, 19 nt, Artificial Sequence
  Description of Artificial Sequence: Synthetic oligonucleotide
  Antisense strand to SEQ ID NO: 760456
auuuccagccuacuucuag

SEQ ID NO: 760458 - RNA, 19 nt, Artificial Sequence
  Description of Artificial Sequence: Synthetic oligonucleotide
  Sense strand starting at position 1203 of SEQ ID NO: 587018
ucagauguguacuugugaa

SEQ ID NO: 760459 - RNA, 19 nt, Artificial Sequence
  Description of Artificial Sequence: Synthetic oligonucleotide
  Antisense strand to SEQ ID NO: 760458
uucacaaguacacaucuga

SEQ ID NO: 760460 - RNA, 19 nt, Artificial Sequence
  Description of Artificial Sequence: Synthetic oligonucleotide
  Sense strand starting at position 1291 of SEQ ID NO: 587018
gaagcagucucccuuuaug

SEQ ID NO: 760461 - RNA, 19 nt, Artificial Sequence
  Description of Artificial Sequence: Synthetic oligonucleotide
  Antisense strand to SEQ ID NO: 760460
cauaaagggagacugcuuc

SEQ ID NO: 760462 - RNA, 19 nt, Artificial Sequence
  Description of Artificial Sequence: Synthetic oligonucleotide
  Sense strand starting at position 1294 of SEQ ID NO: 587018
gcagucucccuuuauguua

SEQ ID NO: 760463 - RNA, 19 nt, Artificial Sequence
  Description of Artificial Sequence: Synthetic oligonucleotide
  Antisense strand to SEQ ID NO: 760462
uaacauaaagggagacugc

SEQ ID NO: 760464 - RNA, 19 nt, Artificial Sequence
  Description of Artificial Sequence: Synthetic oligonucleotide
  Sense strand starting at position 1297 of SEQ ID NO: 587018
gucucccuuuauguuauua

SEQ ID NO: 760465 - RNA, 19 nt, Artificial Sequence
  Description of Artificial Sequence: Synthetic oligonucleotide
  Antisense strand to SEQ ID NO: 760464
uaauaacauaaagggagac

SEQ ID NO: 760466 - RNA, 19 nt, Artificial Sequence
  Description of Artificial Sequence: Synthetic oligonucleotide
  Sense strand starting at position 1483 of SEQ ID NO: 587018
uuauuauaacuuggccuga

SEQ ID NO: 760467 - RNA, 19 nt, Artificial Sequence
  Description of Artificial Sequence: Synthetic oligonucleotide
  Antisense strand to SEQ ID NO: 760466
ucaggccaaguuauaauaa

SEQ ID NO: 760468 - RNA, 19 nt, Artificial Sequence
  Description of Artificial Sequence: Synthetic oligonucleotide
  Sense strand starting at position 1485 of SEQ ID NO: 587018
auuauaacuuggccugaga

SEQ ID NO: 760469 - RNA, 19 nt, Artificial Sequence
  Description of Artificial Sequence: Synthetic oligonucleotide
  Antisense strand to SEQ ID NO: 760468
ucucaggccaaguuauaau

SEQ ID NO: 760470 - RNA, 19 nt, Artificial Sequence
  Description of Artificial Sequence: Synthetic oligonucleotide
  Sense strand starting at position 1604 of SEQ ID NO: 587018
gaaugcugucagcucgcau

SEQ ID NO: 760471 - RNA, 19 nt, Artificial Sequence
  Description of Artificial Sequence: Synthetic oligonucleotide
  Antisense strand to SEQ ID NO: 760470
augcgagcugacagcauuc

SEQ ID NO: 760472 - RNA, 19 nt, Artificial Sequence
  Description of Artificial Sequence: Synthetic oligonucleotide
  Sense strand starting at position 1807 of SEQ ID NO: 587018
cuacacuuucuaggacaga

SEQ ID NO: 760473 - RNA, 19 nt, Artificial Sequence
  Description of Artificial Sequence: Synthetic oligonucleotide
  Antisense strand to SEQ ID NO: 760472
ucuguccuagaaaguguag

SEQ ID NO: 760474 - RNA, 19 nt, Artificial Sequence
  Description of Artificial Sequence: Synthetic oligonucleotide
  Sense strand starting at position 2926 of SEQ ID NO: 587018
aggugcuugucuuuaauac

SEQ ID NO: 760475 - RNA, 19 nt, Artificial Sequence
  Description of Artificial Sequence: Synthetic oligonucleotide
  Antisense strand to SEQ ID NO: 760474
guauuaaagacaagcaccu

SEQ ID NO: 760476 - RNA, 19 nt, Artificial Sequence
  Description of Artificial Sequence: Synthetic oligonucleotide
  Sense strand starting at position 2927 of SEQ ID NO: 587018
ggugcuugucuuuaauaca

SEQ ID NO: 760477 - RNA, 19 nt, Artificial Sequence
  Description of Artificial Sequence: Synthetic oligonucleotide
  Antisense strand to SEQ ID NO: 760476
uguauuaaagacaagcacc

SEQ ID NO: 760478 - RNA, 19 nt, Artificial Sequence
  Description of Artificial Sequence: Synthetic oligonucleotide
  Sense strand starting at position 3091 of SEQ ID NO: 587018
gggagacagugacaauguu

SEQ ID NO: 760479 - RNA, 19 nt, Artificial Sequence
  Description of Artificial Sequence: Synthetic oligonucleotide
  Antisense strand to SEQ ID NO: 760478
aacauugucacugucuccc

SEQ ID NO: 760480 - RNA, 19 nt, Artificial Sequence
  Description of Artificial Sequence: Synthetic oligonucleotide
  Sense strand starting at position 3099 of SEQ ID NO: 587018
gugacaauguugcucauua

SEQ ID NO: 760481 - RNA, 19 nt, Artificial Sequence
  Description of Artificial Sequence: Synthetic oligonucleotide
  Antisense strand to SEQ ID NO: 760480
uaaugagcaacauugucac

SEQ ID NO: 760482 - RNA, 19 nt, Artificial Sequence
  Description of Artificial Sequence: Synthetic oligonucleotide
  Sense strand starting at position 3100 of SEQ ID NO: 587018
ugacaauguugcucauuag

SEQ ID NO: 760483 - RNA, 19 nt, Artificial Sequence
  Description of Artificial Sequence: Synthetic oligonucleotide
  Antisense strand to SEQ ID NO: 760482
cuaaugagcaacauuguca

SEQ ID NO: 760484 - RNA, 19 nt, Artificial Sequence
  Description of Artificial Sequence: Synthetic oligonucleotide
  Sense strand starting at position 3136 of SEQ ID NO: 587018
gcacaauuguucccaguaa

SEQ ID NO: 760485 - RNA, 19 nt, Artificial Sequence
  Description of Artificial Sequence: Synthetic oligonucleotide
  Antisense strand to SEQ ID NO: 760484
uuacugggaacaauugugc

SEQ ID NO: 760486 - RNA, 19 nt, Artificial Sequence
  Description of Artificial Sequence: Synthetic oligonucleotide
  Sense strand starting at position 3168 of SEQ ID NO: 587018
gucagagucagaugggcua

SEQ ID NO: 760487 - RNA, 19 nt, Artificial Sequence
  Description of Artificial Sequence: Synthetic oligonucleotide
  Antisense strand to SEQ ID NO: 760486
uagcccaucugacucugac

SEQ ID NO: 760488 - RNA, 19 nt, Artificial Sequence
  Description of Artificial Sequence: Synthetic oligonucleotide
  Sense strand starting at position 3247 of SEQ ID NO: 587018
gcugcuuagagagaagucu

SEQ ID NO: 760489 - RNA, 19 nt, Artificial Sequence
  Description of Artificial Sequence: Synthetic oligonucleotide
  Antisense strand to SEQ ID NO: 760488
agacuucucucuaagcagc

SEQ ID NO: 760490 - RNA, 19 nt, Artificial Sequence
  Description of Artificial Sequence: Synthetic oligonucleotide
  Sense strand starting at position 3259 of SEQ ID NO: 587018
gaagucuucugagcuguga

SEQ ID NO: 760491 - RNA, 19 nt, Artificial Sequence
  Description of Artificial Sequence: Synthetic oligonucleotide
  Antisense strand to SEQ ID NO: 760490
ucacagcucagaagacuuc

SEQ ID NO: 760492 - RNA, 19 nt, Artificial Sequence
  Description of Artificial Sequence: Synthetic oligonucleotide
  Sense strand starting at position 3261 of SEQ ID NO: 587018
agucuucugagcugugaug

SEQ ID NO: 760493 - RNA, 19 nt, Artificial Sequence
  Description of Artificial Sequence: Synthetic oligonucleotide
  Antisense strand to SEQ ID NO: 760492
caucacagcucagaagacu

SEQ ID NO: 760494 - RNA, 19 nt, Artificial Sequence
  Description of Artificial Sequence: Synthetic oligonucleotide
  Sense strand starting at position 3278 of SEQ ID NO: 587018
uggccuaaugagggagauu

SEQ ID NO: 760495 - RNA, 19 nt, Artificial Sequence
  Description of Artificial Sequence: Synthetic oligonucleotide
  Antisense strand to SEQ ID NO: 760494
aaucucccucauuaggcca

SEQ ID NO: 760496 - RNA, 19 nt, Artificial Sequence
  Description of Artificial Sequence: Synthetic oligonucleotide
  Sense strand starting at position 3379 of SEQ ID NO: 587018
cauuuacaugugugucaug

SEQ ID NO: 760497 - RNA, 19 nt, Artificial Sequence
  Description of Artificial Sequence: Synthetic oligonucleotide
  Antisense strand to SEQ ID NO: 760496
caugacacacauguaaaug

SEQ ID NO: 760498 - RNA, 19 nt, Artificial Sequence
  Description of Artificial Sequence: Synthetic oligonucleotide
  Sense strand starting at position 3386 of SEQ ID NO: 587018
augugugucauguacuaua

SEQ ID NO: 760499 - RNA, 19 nt, Artificial Sequence
  Description of Artificial Sequence: Synthetic oligonucleotide
  Antisense strand to SEQ ID NO: 760498
uauaguacaugacacacau

SEQ ID NO: 760500 - RNA, 19 nt, Artificial Sequence
  Description of Artificial Sequence: Synthetic oligonucleotide
  Sense strand starting at position 3477 of SEQ ID NO: 587018
ggaucuaagaggugcauau

SEQ ID NO: 760501 - RNA, 19 nt, Artificial Sequence
  Description of Artificial Sequence: Synthetic oligonucleotide
  Antisense strand to SEQ ID NO: 760500
auaugcaccucuuagaucc

SEQ ID NO: 760502 - RNA, 19 nt, Artificial Sequence
  Description of Artificial Sequence: Synthetic oligonucleotide
  Sense strand starting at position 3510 of SEQ ID NO: 587018
ggguacagaucaguuagaa

SEQ ID NO: 760503 - RNA, 19 nt, Artificial Sequence
  Description of Artificial Sequence: Synthetic oligonucleotide
  Antisense strand to SEQ ID NO: 760502
uucuaacugaucuguaccc

SEQ ID NO: 760504 - RNA, 19 nt, Artificial Sequence
  Description of Artificial Sequence: Synthetic oligonucleotide
  Sense strand starting at position 3514 of SEQ ID NO: 587018
acagaucaguuagaauuaa

SEQ ID NO: 760505 - RNA, 19 nt, Artificial Sequence
  Description of Artificial Sequence: Synthetic oligonucleotide
  Antisense strand to SEQ ID NO: 760504
uuaauucuaacugaucugu

SEQ ID NO: 760506 - RNA, 19 nt, Artificial Sequence
  Description of Artificial Sequence: Synthetic oligonucleotide
  Sense strand starting at position 3538 of SEQ ID NO: 587018
aaguuauagggucacccua

SEQ ID NO: 760507 - RNA, 19 nt, Artificial Sequence
  Description of Artificial Sequence: Synthetic oligonucleotide
  Antisense strand to SEQ ID NO: 760506
uagggugacccuauaacuu

SEQ ID NO: 760508 - RNA, 19 nt, Artificial Sequence
  Description of Artificial Sequence: Synthetic oligonucleotide
  Sense strand starting at position 3540 of SEQ ID NO: 587018
guuauagggucacccuaaa

SEQ ID NO: 760509 - RNA, 19 nt, Artificial Sequence
  Description of Artificial Sequence: Synthetic oligonucleotide
  Antisense strand to SEQ ID NO: 760508
uuuagggugacccuauaac

SEQ ID NO: 760510 - RNA, 19 nt, Artificial Sequence
  Description of Artificial Sequence: Synthetic oligonucleotide
  Sense strand starting at position 3585 of SEQ ID NO: 587018
uucugaaagccaugagaac

SEQ ID NO: 760511 - RNA, 19 nt, Artificial Sequence
  Description of Artificial Sequence: Synthetic oligonucleotide
  Antisense strand to SEQ ID NO: 760510
guucucauggcuuucagaa

SEQ ID NO: 760512 - RNA, 19 nt, Artificial Sequence
  Description of Artificial Sequence: Synthetic oligonucleotide
  Sense strand starting at position 3661 of SEQ ID NO: 587018
ggagcucucaggcacacaa

SEQ ID NO: 760513 - RNA, 19 nt, Artificial Sequence
  Description of Artificial Sequence: Synthetic oligonucleotide
  Antisense strand to SEQ ID NO: 760512
uugugugccugagagcucc

SEQ ID NO: 760514 - RNA, 19 nt, Artificial Sequence
  Description of Artificial Sequence: Synthetic oligonucleotide
  Sense strand starting at position 3806 of SEQ ID NO: 587018
acaagaaacugcuucugca

SEQ ID NO: 760515 - RNA, 19 nt, Artificial Sequence
  Description of Artificial Sequence: Synthetic oligonucleotide
  Antisense strand to SEQ ID NO: 760514
ugcagaagcaguuucuugu

SEQ ID NO: 760516 - RNA, 19 nt, Artificial Sequence
  Description of Artificial Sequence: Synthetic oligonucleotide
  Sense strand starting at position 3814 of SEQ ID NO: 587018
cugcuucugcaagaacaau

SEQ ID NO: 760517 - RNA, 19 nt, Artificial Sequence
  Description of Artificial Sequence: Synthetic oligonucleotide
  Antisense strand to SEQ ID NO: 760516
auuguucuugcagaagcag

SEQ ID NO: 760518 - RNA, 19 nt, Artificial Sequence
  Description of Artificial Sequence: Synthetic oligonucleotide
  Sense strand starting at position 3953 of SEQ ID NO: 587018
uuccuugccuuccuggaua

SEQ ID NO: 760519 - RNA, 19 nt, Artificial Sequence
  Description of Artificial Sequence: Synthetic oligonucleotide
  Antisense strand to SEQ ID NO: 760518
uauccaggaaggcaaggaa

SEQ ID NO: 760520 - RNA, 19 nt, Artificial Sequence
  Description of Artificial Sequence: Synthetic oligonucleotide
  Sense strand starting at position 62 of SEQ ID NO: 587019
aucacuagugcuugaaaua

SEQ ID NO: 760521 - RNA, 19 nt, Artificial Sequence
  Description of Artificial Sequence: Synthetic oligonucleotide
  Antisense strand to SEQ ID NO: 760520
uauuucaagcacuagugau

SEQ ID NO: 760522 - RNA, 19 nt, Artificial Sequence
  Description of Artificial Sequence: Synthetic oligonucleotide
  Sense strand starting at position 63 of SEQ ID NO: 587019
ucacuagugcuugaaauau

SEQ ID NO: 760523 - RNA, 19 nt, Artificial Sequence
  Description of Artificial Sequence: Synthetic oligonucleotide
  Antisense strand to SEQ ID NO: 760522
auauuucaagcacuaguga

SEQ ID NO: 760524 - RNA, 19 nt, Artificial Sequence
  Description of Artificial Sequence: Synthetic oligonucleotide
  Sense strand starting at position 377 of SEQ ID NO: 587019
guagucauuugugugaagu

SEQ ID NO: 760525 - RNA, 19 nt, Artificial Sequence
  Description of Artificial Sequence: Synthetic oligonucleotide
  Antisense strand to SEQ ID NO: 760524
acuucacacaaaugacuac

SEQ ID NO: 760526 - RNA, 19 nt, Artificial Sequence
  Description of Artificial Sequence: Synthetic oligonucleotide
  Sense strand starting at position 378 of SEQ ID NO: 587019
uagucauuugugugaaguc

SEQ ID NO: 760527 - RNA, 19 nt, Artificial Sequence
  Description of Artificial Sequence: Synthetic oligonucleotide
  Antisense strand to SEQ ID NO: 760526
gacuucacacaaaugacua

SEQ ID NO: 760528 - RNA, 19 nt, Artificial Sequence
  Description of Artificial Sequence: Synthetic oligonucleotide
  Sense strand starting at position 387 of SEQ ID NO: 587019
gugugaagucagcacuacu

SEQ ID NO: 760529 - RNA, 19 nt, Artificial Sequence
  Description of Artificial Sequence: Synthetic oligonucleotide
  Antisense strand to SEQ ID NO: 760528
aguagugcugacuucacac

SEQ ID NO: 760530 - RNA, 19 nt, Artificial Sequence
  Description of Artificial Sequence: Synthetic oligonucleotide
  Sense strand starting at position 429 of SEQ ID NO: 587019
auguucagugaauggugaa

SEQ ID NO: 760531 - RNA, 19 nt, Artificial Sequence
  Description of Artificial Sequence: Synthetic oligonucleotide
  Antisense strand to SEQ ID NO: 760530
uucaccauucacugaacau

SEQ ID NO: 760532 - RNA, 19 nt, Artificial Sequence
  Description of Artificial Sequence: Synthetic oligonucleotide
  Sense strand starting at position 508 of SEQ ID NO: 587019
cagagaaacugaguuucua

SEQ ID NO: 760533 - RNA, 19 nt, Artificial Sequence
  Description of Artificial Sequence: Synthetic oligonucleotide
  Antisense strand to SEQ ID NO: 760532
uagaaacucaguuucucug

SEQ ID NO: 760534 - RNA, 19 nt, Artificial Sequence
  Description of Artificial Sequence: Synthetic oligonucleotide
  Sense strand starting at position 539 of SEQ ID NO: 587019
aaacauccucgguagguua

SEQ ID NO: 760535 - RNA, 19 nt, Artificial Sequence
  Description of Artificial Sequence: Synthetic oligonucleotide
  Antisense strand to SEQ ID NO: 760534
uaaccuaccgaggauguuu

SEQ ID NO: 760536 - RNA, 19 nt, Artificial Sequence
  Description of Artificial Sequence: Synthetic oligonucleotide
  Sense strand starting at position 655 of SEQ ID NO: 587019
acacaacuugccugcagaa

SEQ ID NO: 760537 - RNA, 19 nt, Artificial Sequence
  Description of Artificial Sequence: Synthetic oligonucleotide
  Antisense strand to SEQ ID NO: 760536
uucugcaggcaaguugugu

SEQ ID NO: 760538 - RNA, 19 nt, Artificial Sequence
  Description of Artificial Sequence: Synthetic oligonucleotide
  Sense strand starting at position 657 of SEQ ID NO: 587019
acaacuugccugcagaaau

SEQ ID NO: 760539 - RNA, 19 nt, Artificial Sequence
  Description of Artificial Sequence: Synthetic oligonucleotide
  Antisense strand to SEQ ID NO: 760538
auuucugcaggcaaguugu

SEQ ID NO: 760540 - RNA, 19 nt, Artificial Sequence
  Description of Artificial Sequence: Synthetic oligonucleotide
  Sense strand starting at position 739 of SEQ ID NO: 587019
aguaacugaucauugccaa

SEQ ID NO: 760541 - RNA, 19 nt, Artificial Sequence
  Description of Artificial Sequence: Synthetic oligonucleotide
  Antisense strand to SEQ ID NO: 760540
uuggcaaugaucaguuacu

SEQ ID NO: 760542 - RNA, 19 nt, Artificial Sequence
  Description of Artificial Sequence: Synthetic oligonucleotide
  Sense strand starting at position 740 of SEQ ID NO: 587019
guaacugaucauugccaag

SEQ ID NO: 760543 - RNA, 19 nt, Artificial Sequence
  Description of Artificial Sequence: Synthetic oligonucleotide
  Antisense strand to SEQ ID NO: 760542
cuuggcaaugaucaguuac

SEQ ID NO: 760544 - RNA, 19 nt, Artificial Sequence
  Description of Artificial Sequence: Synthetic oligonucleotide
  Sense strand starting at position 746 of SEQ ID NO: 587019
gaucauugccaaggucgaa

SEQ ID NO: 760545 - RNA, 19 nt, Artificial Sequence
  Description of Artificial Sequence: Synthetic oligonucleotide
  Antisense strand to SEQ ID NO: 760544
uucgaccuuggcaaugauc

SEQ ID NO: 760546 - RNA, 19 nt, Artificial Sequence
  Description of Artificial Sequence: Synthetic oligonucleotide
  Sense strand starting at position 781 of SEQ ID NO: 587019
gauguuaaugauugugagu

SEQ ID NO: 760547 - RNA, 19 nt, Artificial Sequence
  Description of Artificial Sequence: Synthetic oligonucleotide
  Antisense strand to SEQ ID NO: 760546
acucacaaucauuaacauc

SEQ ID NO: 760548 - RNA, 19 nt, Artificial Sequence
  Description of Artificial Sequence: Synthetic oligonucleotide
  Sense strand starting at position 834 of SEQ ID NO: 587019
acaggauguuguuuggaaa

SEQ ID NO: 760549 - RNA, 19 nt, Artificial Sequence
  Description of Artificial Sequence: Synthetic oligonucleotide
  Antisense strand to SEQ ID NO: 760548
uuuccaaacaacauccugu

SEQ ID NO: 760550 - RNA, 19 nt, Artificial Sequence
  Description of Artificial Sequence: Synthetic oligonucleotide
  Sense strand starting at position 835 of SEQ ID NO: 587019
caggauguuguuuggaaau

SEQ ID NO: 760551 - RNA, 19 nt, Artificial Sequence
  Description of Artificial Sequence: Synthetic oligonucleotide
  Antisense strand to SEQ ID NO: 760550
auuuccaaacaacauccug

SEQ ID NO: 760552 - RNA, 19 nt, Artificial Sequence
  Description of Artificial Sequence: Synthetic oligonucleotide
  Sense strand starting at position 885 of SEQ ID NO: 587019
guguuauuaagugaaccga

SEQ ID NO: 760553 - RNA, 19 nt, Artificial Sequence
  Description of Artificial Sequence: Synthetic oligonucleotide
  Antisense strand to SEQ ID NO: 760552
ucgguucacuuaauaacac

SEQ ID NO: 760554 - RNA, 19 nt, Artificial Sequence
  Description of Artificial Sequence: Synthetic oligonucleotide
  Sense strand starting at position 901 of SEQ ID NO: 587019
cgaucugacucgaugcguu

SEQ ID NO: 760555 - RNA, 19 nt, Artificial Sequence
  Description of Artificial Sequence: Synthetic oligonucleotide
  Antisense strand to SEQ ID NO: 760554
aacgcaucgagucagaucg

SEQ ID NO: 760556 - RNA, 19 nt, Artificial Sequence
  Description of Artificial Sequence: Synthetic oligonucleotide
  Sense strand starting at position 1011 of SEQ ID NO: 587019
cggaaugcucgccaaauca

SEQ ID NO: 760557 - RNA, 19 nt, Artificial Sequence
  Description of Artificial Sequence: Synthetic oligonucleotide
  Antisense strand to SEQ ID NO: 760556
ugauuuggcgagcauuccg

SEQ ID NO: 760558 - RNA, 19 nt, Artificial Sequence
  Description of Artificial Sequence: Synthetic oligonucleotide
  Sense strand starting at position 1495 of SEQ ID NO: 587019
acucgaggaccuugaugaa

SEQ ID NO: 760559 - RNA, 19 nt, Artificial Sequence
  Description of Artificial Sequence: Synthetic oligonucleotide
  Antisense strand to SEQ ID NO: 760558
uucaucaagguccucgagu

SEQ ID NO: 760560 - RNA, 19 nt, Artificial Sequence
  Description of Artificial Sequence: Synthetic oligonucleotide
  Sense strand starting at position 1554 of SEQ ID NO: 587019
ccggacauccucugaggaa

SEQ ID NO: 760561 - RNA, 19 nt, Artificial Sequence
  Description of Artificial Sequence: Synthetic oligonucleotide
  Antisense strand to SEQ ID NO: 760560
uuccucagaggauguccgg

SEQ ID NO: 760562 - RNA, 19 nt, Artificial Sequence
  Description of Artificial Sequence: Synthetic oligonucleotide
  Sense strand starting at position 2163 of SEQ ID NO: 587019
uauaauguauuggcacaga

SEQ ID NO: 760563 - RNA, 19 nt, Artificial Sequence
  Description of Artificial Sequence: Synthetic oligonucleotide
  Antisense strand to SEQ ID NO: 760562
ucugugccaauacauuaua

SEQ ID NO: 760564 - RNA, 19 nt, Artificial Sequence
  Description of Artificial Sequence: Synthetic oligonucleotide
  Sense strand starting at position 2282 of SEQ ID NO: 587019
caccaaauauucguaugga

SEQ ID NO: 760565 - RNA, 19 nt, Artificial Sequence
  Description of Artificial Sequence: Synthetic oligonucleotide
  Antisense strand to SEQ ID NO: 760564
uccauacgaauauuuggug

SEQ ID NO: 760566 - RNA, 19 nt, Artificial Sequence
  Description of Artificial Sequence: Synthetic oligonucleotide
  Sense strand starting at position 2285 of SEQ ID NO: 587019
caaauauucguauggaaau

SEQ ID NO: 760567 - RNA, 19 nt, Artificial Sequence
  Description of Artificial Sequence: Synthetic oligonucleotide
  Antisense strand to SEQ ID NO: 760566
auuuccauacgaauauuug

SEQ ID NO: 760568 - RNA, 19 nt, Artificial Sequence
  Description of Artificial Sequence: Synthetic oligonucleotide
  Sense strand starting at position 2487 of SEQ ID NO: 587019
uaagauucggcuuagguga

SEQ ID NO: 760569 - RNA, 19 nt, Artificial Sequence
  Description of Artificial Sequence: Synthetic oligonucleotide
  Antisense strand to SEQ ID NO: 760568
ucaccuaagccgaaucuua

SEQ ID NO: 760570 - RNA, 19 nt, Artificial Sequence
  Description of Artificial Sequence: Synthetic oligonucleotide
  Sense strand starting at position 2575 of SEQ ID NO: 587019
ccuggaaaguuccuggaca

SEQ ID NO: 760571 - RNA, 19 nt, Artificial Sequence
  Description of Artificial Sequence: Synthetic oligonucleotide
  Antisense strand to SEQ ID NO: 760570
uguccaggaacuuuccagg

SEQ ID NO: 760572 - RNA, 19 nt, Artificial Sequence
  Description of Artificial Sequence: Synthetic oligonucleotide
  Sense strand starting at position 2595 of SEQ ID NO: 587019
cuggaauguggucauauuc

SEQ ID NO: 760573 - RNA, 19 nt, Artificial Sequence
  Description of Artificial Sequence: Synthetic oligonucleotide
  Antisense strand to SEQ ID NO: 760572
gaauaugaccacauuccag

SEQ ID NO: 760574 - RNA, 19 nt, Artificial Sequence
  Description of Artificial Sequence: Synthetic oligonucleotide
  Sense strand starting at position 2605 of SEQ ID NO: 587019
gucauauucguguauauga

SEQ ID NO: 760575 - RNA, 19 nt, Artificial Sequence
  Description of Artificial Sequence: Synthetic oligonucleotide
  Antisense strand to SEQ ID NO: 760574
ucauauacacgaauaugac

SEQ ID NO: 760576 - RNA, 19 nt, Artificial Sequence
  Description of Artificial Sequence: Synthetic oligonucleotide
  Sense strand starting at position 2607 of SEQ ID NO: 587019
cauauucguguauaugaaa

SEQ ID NO: 760577 - RNA, 19 nt, Artificial Sequence
  Description of Artificial Sequence: Synthetic oligonucleotide
  Antisense strand to SEQ ID NO: 760576
uuucauauacacgaauaug

SEQ ID NO: 760578 - RNA, 19 nt, Artificial Sequence
  Description of Artificial Sequence: Synthetic oligonucleotide
  Sense strand starting at position 2691 of SEQ ID NO: 587019
agguuauuccgucaggguu

SEQ ID NO: 760579 - RNA, 19 nt, Artificial Sequence
  Description of Artificial Sequence: Synthetic oligonucleotide
  Antisense strand to SEQ ID NO: 760578
aacccugacggaauaaccu

SEQ ID NO: 760580 - RNA, 19 nt, Artificial Sequence
  Description of Artificial Sequence: Synthetic oligonucleotide
  Sense strand starting at position 2692 of SEQ ID NO: 587019
gguuauuccgucaggguug

SEQ ID NO: 760581 - RNA, 19 nt, Artificial Sequence
  Description of Artificial Sequence: Synthetic oligonucleotide
  Antisense strand to SEQ ID NO: 760580
caacccugacggaauaacc

SEQ ID NO: 760582 - RNA, 19 nt, Artificial Sequence
  Description of Artificial Sequence: Synthetic oligonucleotide
  Sense strand starting at position 2704 of SEQ ID NO: 587019
aggguugacaacuguuauu

SEQ ID NO: 760583 - RNA, 19 nt, Artificial Sequence
  Description of Artificial Sequence: Synthetic oligonucleotide
  Antisense strand to SEQ ID NO: 760582
aauaacaguugucaacccu

SEQ ID NO: 760584 - RNA, 19 nt, Artificial Sequence
  Description of Artificial Sequence: Synthetic oligonucleotide
  Sense strand starting at position 2748 of SEQ ID NO: 587019
uuucucuuucgagaccuau

SEQ ID NO: 760585 - RNA, 19 nt, Artificial Sequence
  Description of Artificial Sequence: Synthetic oligonucleotide
  Antisense strand to SEQ ID NO: 760584
auaggucucgaaagagaaa

SEQ ID NO: 760586 - RNA, 19 nt, Artificial Sequence
  Description of Artificial Sequence: Synthetic oligonucleotide
  Sense strand starting at position 2869 of SEQ ID NO: 587019
cacagucagugcucaauga

SEQ ID NO: 760587 - RNA, 19 nt, Artificial Sequence
  Description of Artificial Sequence: Synthetic oligonucleotide
  Antisense strand to SEQ ID NO: 760586
ucauugagcacugacugug

SEQ ID NO: 760588 - RNA, 19 nt, Artificial Sequence
  Description of Artificial Sequence: Synthetic oligonucleotide
  Sense strand starting at position 3162 of SEQ ID NO: 587019
aauggaugguugcagauuu

SEQ ID NO: 760589 - RNA, 19 nt, Artificial Sequence
  Description of Artificial Sequence: Synthetic oligonucleotide
  Antisense strand to SEQ ID NO: 760588
aaaucugcaaccauccauu

SEQ ID NO: 760590 - RNA, 19 nt, Artificial Sequence
  Description of Artificial Sequence: Synthetic oligonucleotide
  Sense strand starting at position 3170 of SEQ ID NO: 587019
guugcagauuucucccacu

SEQ ID NO: 760591 - RNA, 19 nt, Artificial Sequence
  Description of Artificial Sequence: Synthetic oligonucleotide
  Antisense strand to SEQ ID NO: 760590
agugggagaaaucugcaac

SEQ ID NO: 760592 - RNA, 19 nt, Artificial Sequence
  Description of Artificial Sequence: Synthetic oligonucleotide
  Sense strand starting at position 3173 of SEQ ID NO: 587019
gcagauuucucccacuaag

SEQ ID NO: 760593 - RNA, 19 nt, Artificial Sequence
  Description of Artificial Sequence: Synthetic oligonucleotide
  Antisense strand to SEQ ID NO: 760592
cuuagugggagaaaucugc

SEQ ID NO: 760594 - RNA, 19 nt, Artificial Sequence
  Description of Artificial Sequence: Synthetic oligonucleotide
  Sense strand starting at position 3451 of SEQ ID NO: 587019
gacuauuuagcuugagcuu

SEQ ID NO: 760595 - RNA, 19 nt, Artificial Sequence
  Description of Artificial Sequence: Synthetic oligonucleotide
  Antisense strand to SEQ ID NO: 760594
aagcucaagcuaaauaguc

SEQ ID NO: 760596 - RNA, 19 nt, Artificial Sequence
  Description of Artificial Sequence: Synthetic oligonucleotide
  Sense strand starting at position 3828 of SEQ ID NO: 587019
ugagauaugccuugacaga

SEQ ID NO: 760597 - RNA, 19 nt, Artificial Sequence
  Description of Artificial Sequence: Synthetic oligonucleotide
  Antisense strand to SEQ ID NO: 760596
ucugucaaggcauaucuca

SEQ ID NO: 760598 - RNA, 19 nt, Artificial Sequence
  Description of Artificial Sequence: Synthetic oligonucleotide
  Sense strand starting at position 3936 of SEQ ID NO: 587019
uuguuuauugaaggccuua

SEQ ID NO: 760599 - RNA, 19 nt, Artificial Sequence
  Description of Artificial Sequence: Synthetic oligonucleotide
  Antisense strand to SEQ ID NO: 760598
uaaggccuucaauaaacaa

SEQ ID NO: 760600 - RNA, 19 nt, Artificial Sequence
  Description of Artificial Sequence: Synthetic oligonucleotide
  Sense strand starting at position 187 of SEQ ID NO: 587020
uaguguuuaguacagaucu

SEQ ID NO: 760601 - RNA, 19 nt, Artificial Sequence
  Description of Artificial Sequence: Synthetic oligonucleotide
  Antisense strand to SEQ ID NO: 760600
agaucuguacuaaacacua

SEQ ID NO: 760602 - RNA, 19 nt, Artificial Sequence
  Description of Artificial Sequence: Synthetic oligonucleotide
  Sense strand starting at position 264 of SEQ ID NO: 587020
ggcucuccuguguaauaac

SEQ ID NO: 760603 - RNA, 19 nt, Artificial Sequence
  Description of Artificial Sequence: Synthetic oligonucleotide
  Antisense strand to SEQ ID NO: 760602
guuauuacacaggagagcc

SEQ ID NO: 760604 - RNA, 19 nt, Artificial Sequence
  Description of Artificial Sequence: Synthetic oligonucleotide
  Sense strand starting at position 364 of SEQ ID NO: 587020
aucacuagugcuugaaaua

SEQ ID NO: 760605 - RNA, 19 nt, Artificial Sequence
  Description of Artificial Sequence: Synthetic oligonucleotide
  Antisense strand to SEQ ID NO: 760604
uauuucaagcacuagugau

SEQ ID NO: 760606 - RNA, 19 nt, Artificial Sequence
  Description of Artificial Sequence: Synthetic oligonucleotide
  Sense strand starting at position 365 of SEQ ID NO: 587020
ucacuagugcuugaaauau

SEQ ID NO: 760607 - RNA, 19 nt, Artificial Sequence
  Description of Artificial Sequence: Synthetic oligonucleotide
  Antisense strand to SEQ ID NO: 760606
auauuucaagcacuaguga

SEQ ID NO: 760608 - RNA, 19 nt, Artificial Sequence
  Description of Artificial Sequence: Synthetic oligonucleotide
  Sense strand starting at position 679 of SEQ ID NO: 587020
guagucauuugugugaagu

SEQ ID NO: 760609 - RNA, 19 nt, Artificial Sequence
  Description of Artificial Sequence: Synthetic oligonucleotide
  Antisense strand to SEQ ID NO: 760608
acuucacacaaaugacuac

SEQ ID NO: 760610 - RNA, 19 nt, Artificial Sequence
  Description of Artificial Sequence: Synthetic oligonucleotide
  Sense strand starting at position 680 of SEQ ID NO: 587020
uagucauuugugugaaguc

SEQ ID NO: 760611 - RNA, 19 nt, Artificial Sequence
  Description of Artificial Sequence: Synthetic oligonucleotide
  Antisense strand to SEQ ID NO: 760610
gacuucacacaaaugacua

SEQ ID NO: 760612 - RNA, 19 nt, Artificial Sequence
  Description of Artificial Sequence: Synthetic oligonucleotide
  Sense strand starting at position 689 of SEQ ID NO: 587020
gugugaagucagcacuacu

SEQ ID NO: 760613 - RNA, 19 nt, Artificial Sequence
  Description of Artificial Sequence: Synthetic oligonucleotide
  Antisense strand to SEQ ID NO: 760612
aguagugcugacuucacac

SEQ ID NO: 760614 - RNA, 19 nt, Artificial Sequence
  Description of Artificial Sequence: Synthetic oligonucleotide
  Sense strand starting at position 731 of SEQ ID NO: 587020
auguucagugaauggugaa

SEQ ID NO: 760615 - RNA, 19 nt, Artificial Sequence
  Description of Artificial Sequence: Synthetic oligonucleotide
  Antisense strand to SEQ ID NO: 760614
uucaccauucacugaacau

SEQ ID NO: 760616 - RNA, 19 nt, Artificial Sequence
  Description of Artificial Sequence: Synthetic oligonucleotide
  Sense strand starting at position 810 of SEQ ID NO: 587020
cagagaaacugaguuucua

SEQ ID NO: 760617 - RNA, 19 nt, Artificial Sequence
  Description of Artificial Sequence: Synthetic oligonucleotide
  Antisense strand to SEQ ID NO: 760616
uagaaacucaguuucucug

SEQ ID NO: 760618 - RNA, 19 nt, Artificial Sequence
  Description of Artificial Sequence: Synthetic oligonucleotide
  Sense strand starting at position 841 of SEQ ID NO: 587020
aaacauccucgguagguua

SEQ ID NO: 760619 - RNA, 19 nt, Artificial Sequence
  Description of Artificial Sequence: Synthetic oligonucleotide
  Antisense strand to SEQ ID NO: 760618
uaaccuaccgaggauguuu

SEQ ID NO: 760620 - RNA, 19 nt, Artificial Sequence
  Description of Artificial Sequence: Synthetic oligonucleotide
  Sense strand starting at position 957 of SEQ ID NO: 587020
acacaacuugccugcagaa

SEQ ID NO: 760621 - RNA, 19 nt, Artificial Sequence
  Description of Artificial Sequence: Synthetic oligonucleotide
  Antisense strand to SEQ ID NO: 760620
uucugcaggcaaguugugu

SEQ ID NO: 760622 - RNA, 19 nt, Artificial Sequence
  Description of Artificial Sequence: Synthetic oligonucleotide
  Sense strand starting at position 959 of SEQ ID NO: 587020
acaacuugccugcagaaau

SEQ ID NO: 760623 - RNA, 19 nt, Artificial Sequence
  Description of Artificial Sequence: Synthetic oligonucleotide
  Antisense strand to SEQ ID NO: 760622
auuucugcaggcaaguugu

SEQ ID NO: 760624 - RNA, 19 nt, Artificial Sequence
  Description of Artificial Sequence: Synthetic oligonucleotide
  Sense strand starting at position 1041 of SEQ ID NO: 587020
aguaacugaucauugccaa

SEQ ID NO: 760625 - RNA, 19 nt, Artificial Sequence
  Description of Artificial Sequence: Synthetic oligonucleotide
  Antisense strand to SEQ ID NO: 760624
uuggcaaugaucaguuacu

SEQ ID NO: 760626 - RNA, 19 nt, Artificial Sequence
  Description of Artificial Sequence: Synthetic oligonucleotide
  Sense strand starting at position 1042 of SEQ ID NO: 587020
guaacugaucauugccaag

SEQ ID NO: 760627 - RNA, 19 nt, Artificial Sequence
  Description of Artificial Sequence: Synthetic oligonucleotide
  Antisense strand to SEQ ID NO: 760626
cuuggcaaugaucaguuac

SEQ ID NO: 760628 - RNA, 19 nt, Artificial Sequence
  Description of Artificial Sequence: Synthetic oligonucleotide
  Sense strand starting at position 1048 of SEQ ID NO: 587020
gaucauugccaaggucgaa

SEQ ID NO: 760629 - RNA, 19 nt, Artificial Sequence
  Description of Artificial Sequence: Synthetic oligonucleotide
  Antisense strand to SEQ ID NO: 760628
uucgaccuuggcaaugauc

SEQ ID NO: 760630 - RNA, 19 nt, Artificial Sequence
  Description of Artificial Sequence: Synthetic oligonucleotide
  Sense strand starting at position 1083 of SEQ ID NO: 587020
gauguuaaugauugugagu

SEQ ID NO: 760631 - RNA, 19 nt, Artificial Sequence
  Description of Artificial Sequence: Synthetic oligonucleotide
  Antisense strand to SEQ ID NO: 760630
acucacaaucauuaacauc

SEQ ID NO: 760632 - RNA, 19 nt, Artificial Sequence
  Description of Artificial Sequence: Synthetic oligonucleotide
  Sense strand starting at position 1136 of SEQ ID NO: 587020
acaggauguuguuuggaaa

SEQ ID NO: 760633 - RNA, 19 nt, Artificial Sequence
  Description of Artificial Sequence: Synthetic oligonucleotide
  Antisense strand to SEQ ID NO: 760632
uuuccaaacaacauccugu

SEQ ID NO: 760634 - RNA, 19 nt, Artificial Sequence
  Description of Artificial Sequence: Synthetic oligonucleotide
  Sense strand starting at position 1137 of SEQ ID NO: 587020
caggauguuguuuggaaau

SEQ ID NO: 760635 - RNA, 19 nt, Artificial Sequence
  Description of Artificial Sequence: Synthetic oligonucleotide
  Antisense strand to SEQ ID NO: 760634
auuuccaaacaacauccug

SEQ ID NO: 760636 - RNA, 19 nt, Artificial Sequence
  Description of Artificial Sequence: Synthetic oligonucleotide
  Sense strand starting at position 1187 of SEQ ID NO: 587020
guguuauuaagugaaccga

SEQ ID NO: 760637 - RNA, 19 nt, Artificial Sequence
  Description of Artificial Sequence: Synthetic oligonucleotide
  Antisense strand to SEQ ID NO: 760636
ucgguucacuuaauaacac

SEQ ID NO: 760638 - RNA, 19 nt, Artificial Sequence
  Description of Artificial Sequence: Synthetic oligonucleotide
  Sense strand starting at position 1203 of SEQ ID NO: 587020
cgaucugacucgaugcguu

SEQ ID NO: 760639 - RNA, 19 nt, Artificial Sequence
  Description of Artificial Sequence: Synthetic oligonucleotide
  Antisense strand to SEQ ID NO: 760638
aacgcaucgagucagaucg

SEQ ID NO: 760640 - RNA, 19 nt, Artificial Sequence
  Description of Artificial Sequence: Synthetic oligonucleotide
  Sense strand starting at position 1313 of SEQ ID NO: 587020
cggaaugcucgccaaauca

SEQ ID NO: 760641 - RNA, 19 nt, Artificial Sequence
  Description of Artificial Sequence: Synthetic oligonucleotide
  Antisense strand to SEQ ID NO: 760640
ugauuuggcgagcauuccg

SEQ ID NO: 760642 - RNA, 19 nt, Artificial Sequence
  Description of Artificial Sequence: Synthetic oligonucleotide
  Sense strand starting at position 1797 of SEQ ID NO: 587020
acucgaggaccuugaugaa

SEQ ID NO: 760643 - RNA, 19 nt, Artificial Sequence
  Description of Artificial Sequence: Synthetic oligonucleotide
  Antisense strand to SEQ ID NO: 760642
uucaucaagguccucgagu

SEQ ID NO: 760644 - RNA, 19 nt, Artificial Sequence
  Description of Artificial Sequence: Synthetic oligonucleotide
  Sense strand starting at position 1856 of SEQ ID NO: 587020
ccggacauccucugaggaa

SEQ ID NO: 760645 - RNA, 19 nt, Artificial Sequence
  Description of Artificial Sequence: Synthetic oligonucleotide
  Antisense strand to SEQ ID NO: 760644
uuccucagaggauguccgg

SEQ ID NO: 760646 - RNA, 19 nt, Artificial Sequence
  Description of Artificial Sequence: Synthetic oligonucleotide
  Sense strand starting at position 2465 of SEQ ID NO: 587020
uauaauguauuggcacaga

SEQ ID NO: 760647 - RNA, 19 nt, Artificial Sequence
  Description of Artificial Sequence: Synthetic oligonucleotide
  Antisense strand to SEQ ID NO: 760646
ucugugccaauacauuaua

SEQ ID NO: 760648 - RNA, 19 nt, Artificial Sequence
  Description of Artificial Sequence: Synthetic oligonucleotide
  Sense strand starting at position 2584 of SEQ ID NO: 587020
caccaaauauucguaugga

SEQ ID NO: 760649 - RNA, 19 nt, Artificial Sequence
  Description of Artificial Sequence: Synthetic oligonucleotide
  Antisense strand to SEQ ID NO: 760648
uccauacgaauauuuggug

SEQ ID NO: 760650 - RNA, 19 nt, Artificial Sequence
  Description of Artificial Sequence: Synthetic oligonucleotide
  Sense strand starting at position 2587 of SEQ ID NO: 587020
caaauauucguauggaaau

SEQ ID NO: 760651 - RNA, 19 nt, Artificial Sequence
  Description of Artificial Sequence: Synthetic oligonucleotide
  Antisense strand to SEQ ID NO: 760650
auuuccauacgaauauuug

SEQ ID NO: 760652 - RNA, 19 nt, Artificial Sequence
  Description of Artificial Sequence: Synthetic oligonucleotide
  Sense strand starting at position 2789 of SEQ ID NO: 587020
uaagauucggcuuagguga

SEQ ID NO: 760653 - RNA, 19 nt, Artificial Sequence
  Description of Artificial Sequence: Synthetic oligonucleotide
  Antisense strand to SEQ ID NO: 760652
ucaccuaagccgaaucuua

SEQ ID NO: 760654 - RNA, 19 nt, Artificial Sequence
  Description of Artificial Sequence: Synthetic oligonucleotide
  Sense strand starting at position 2877 of SEQ ID NO: 587020
ccuggaaaguuccuggaca

SEQ ID NO: 760655 - RNA, 19 nt, Artificial Sequence
  Description of Artificial Sequence: Synthetic oligonucleotide
  Antisense strand to SEQ ID NO: 760654
uguccaggaacuuuccagg

SEQ ID NO: 760656 - RNA, 19 nt, Artificial Sequence
  Description of Artificial Sequence: Synthetic oligonucleotide
  Sense strand starting at position 2897 of SEQ ID NO: 587020
cuggaauguggucauauuc

SEQ ID NO: 760657 - RNA, 19 nt, Artificial Sequence
  Description of Artificial Sequence: Synthetic oligonucleotide
  Antisense strand to SEQ ID NO: 760656
gaauaugaccacauuccag

SEQ ID NO: 760658 - RNA, 19 nt, Artificial Sequence
  Description of Artificial Sequence: Synthetic oligonucleotide
  Sense strand starting at position 2907 of SEQ ID NO: 587020
gucauauucguguauauga

SEQ ID NO: 760659 - RNA, 19 nt, Artificial Sequence
  Description of Artificial Sequence: Synthetic oligonucleotide
  Antisense strand to SEQ ID NO: 760658
ucauauacacgaauaugac

SEQ ID NO: 760660 - RNA, 19 nt, Artificial Sequence
  Description of Artificial Sequence: Synthetic oligonucleotide
  Sense strand starting at position 2909 of SEQ ID NO: 587020
cauauucguguauaugaaa

SEQ ID NO: 760661 - RNA, 19 nt, Artificial Sequence
  Description of Artificial Sequence: Synthetic oligonucleotide
  Antisense strand to SEQ ID NO: 760660
uuucauauacacgaauaug

SEQ ID NO: 760662 - RNA, 19 nt, Artificial Sequence
  Description of Artificial Sequence: Synthetic oligonucleotide
  Sense strand starting at position 2993 of SEQ ID NO: 587020
agguuauuccgucaggguu

SEQ ID NO: 760663 - RNA, 19 nt, Artificial Sequence
  Description of Artificial Sequence: Synthetic oligonucleotide
  Antisense strand to SEQ ID NO: 760662
aacccugacggaauaaccu

SEQ ID NO: 760664 - RNA, 19 nt, Artificial Sequence
  Description of Artificial Sequence: Synthetic oligonucleotide
  Sense strand starting at position 2994 of SEQ ID NO: 587020
gguuauuccgucaggguug

SEQ ID NO: 760665 - RNA, 19 nt, Artificial Sequence
  Description of Artificial Sequence: Synthetic oligonucleotide
  Antisense strand to SEQ ID NO: 760664
caacccugacggaauaacc

SEQ ID NO: 760666 - RNA, 19 nt, Artificial Sequence
  Description of Artificial Sequence: Synthetic oligonucleotide
  Sense strand starting at position 3006 of SEQ ID NO: 587020
aggguugacaacuguuauu

SEQ ID NO: 760667 - RNA, 19 nt, Artificial Sequence
  Description of Artificial Sequence: Synthetic oligonucleotide
  Antisense strand to SEQ ID NO: 760666
aauaacaguugucaacccu

SEQ ID NO: 760668 - RNA, 19 nt, Artificial Sequence
  Description of Artificial Sequence: Synthetic oligonucleotide
  Sense strand starting at position 3050 of SEQ ID NO: 587020
uuucucuuucgagaccuau

SEQ ID NO: 760669 - RNA, 19 nt, Artificial Sequence
  Description of Artificial Sequence: Synthetic oligonucleotide
  Antisense strand to SEQ ID NO: 760668
auaggucucgaaagagaaa

SEQ ID NO: 760670 - RNA, 19 nt, Artificial Sequence
  Description of Artificial Sequence: Synthetic oligonucleotide
  Sense strand starting at position 3171 of SEQ ID NO: 587020
cacagucagugcucaauga

SEQ ID NO: 760671 - RNA, 19 nt, Artificial Sequence
  Description of Artificial Sequence: Synthetic oligonucleotide
  Antisense strand to SEQ ID NO: 760670
ucauugagcacugacugug

SEQ ID NO: 760672 - RNA, 19 nt, Artificial Sequence
  Description of Artificial Sequence: Synthetic oligonucleotide
  Sense strand starting at position 3464 of SEQ ID NO: 587020
aauggaugguugcagauuu

SEQ ID NO: 760673 - RNA, 19 nt, Artificial Sequence
  Description of Artificial Sequence: Synthetic oligonucleotide
  Antisense strand to SEQ ID NO: 760672
aaaucugcaaccauccauu

SEQ ID NO: 760674 - RNA, 19 nt, Artificial Sequence
  Description of Artificial Sequence: Synthetic oligonucleotide
  Sense strand starting at position 3472 of SEQ ID NO: 587020
guugcagauuucucccacu

SEQ ID NO: 760675 - RNA, 19 nt, Artificial Sequence
  Description of Artificial Sequence: Synthetic oligonucleotide
  Antisense strand to SEQ ID NO: 760674
agugggagaaaucugcaac

SEQ ID NO: 760676 - RNA, 19 nt, Artificial Sequence
  Description of Artificial Sequence: Synthetic oligonucleotide
  Sense strand starting at position 3475 of SEQ ID NO: 587020
gcagauuucucccacuaag

SEQ ID NO: 760677 - RNA, 19 nt, Artificial Sequence
  Description of Artificial Sequence: Synthetic oligonucleotide
  Antisense strand to SEQ ID NO: 760676
cuuagugggagaaaucugc

SEQ ID NO: 760678 - RNA, 19 nt, Artificial Sequence
  Description of Artificial Sequence: Synthetic oligonucleotide
  Sense strand starting at position 3753 of SEQ ID NO: 587020
gacuauuuagcuugagcuu

SEQ ID NO: 760679 - RNA, 19 nt, Artificial Sequence
  Description of Artificial Sequence: Synthetic oligonucleotide
  Antisense strand to SEQ ID NO: 760678
aagcucaagcuaaauaguc

SEQ ID NO: 760680 - RNA, 19 nt, Artificial Sequence
  Description of Artificial Sequence: Synthetic oligonucleotide
  Sense strand starting at position 926 of SEQ ID NO: 587021
augaaaucuuacgagauuu

SEQ ID NO: 760681 - RNA, 19 nt, Artificial Sequence
  Description of Artificial Sequence: Synthetic oligonucleotide
  Antisense strand to SEQ ID NO: 760680
aaaucucguaagauuucau

SEQ ID NO: 760682 - RNA, 19 nt, Artificial Sequence
  Description of Artificial Sequence: Synthetic oligonucleotide
  Sense strand starting at position 934 of SEQ ID NO: 587021
uuacgagauuucccgccuu

SEQ ID NO: 760683 - RNA, 19 nt, Artificial Sequence
  Description of Artificial Sequence: Synthetic oligonucleotide
  Antisense strand to SEQ ID NO: 760682
aaggcgggaaaucucguaa

SEQ ID NO: 760684 - RNA, 19 nt, Artificial Sequence
  Description of Artificial Sequence: Synthetic oligonucleotide
  Sense strand starting at position 1033 of SEQ ID NO: 587021
acuugaaucgugggcacaa

SEQ ID NO: 760685 - RNA, 19 nt, Artificial Sequence
  Description of Artificial Sequence: Synthetic oligonucleotide
  Antisense strand to SEQ ID NO: 760684
uugugcccacgauucaagu

SEQ ID NO: 760686 - RNA, 19 nt, Artificial Sequence
  Description of Artificial Sequence: Synthetic oligonucleotide
  Sense strand starting at position 1034 of SEQ ID NO: 587021
cuugaaucgugggcacaaa

SEQ ID NO: 760687 - RNA, 19 nt, Artificial Sequence
  Description of Artificial Sequence: Synthetic oligonucleotide
  Antisense strand to SEQ ID NO: 760686
uuugugcccacgauucaag

SEQ ID NO: 760688 - RNA, 19 nt, Artificial Sequence
  Description of Artificial Sequence: Synthetic oligonucleotide
  Sense strand starting at position 1129 of SEQ ID NO: 587021
gugcgugccacguuaacua

SEQ ID NO: 760689 - RNA, 19 nt, Artificial Sequence
  Description of Artificial Sequence: Synthetic oligonucleotide
  Antisense strand to SEQ ID NO: 760688
uaguuaacguggcacgcac

SEQ ID NO: 760690 - RNA, 19 nt, Artificial Sequence
  Description of Artificial Sequence: Synthetic oligonucleotide
  Sense strand starting at position 1413 of SEQ ID NO: 587021
gugguuauccaagaguuaa

SEQ ID NO: 760691 - RNA, 19 nt, Artificial Sequence
  Description of Artificial Sequence: Synthetic oligonucleotide
  Antisense strand to SEQ ID NO: 760690
uuaacucuuggauaaccac

SEQ ID NO: 760692 - RNA, 19 nt, Artificial Sequence
  Description of Artificial Sequence: Synthetic oligonucleotide
  Sense strand starting at position 1634 of SEQ ID NO: 587021
gggcguuggcguuugggaa

SEQ ID NO: 760693 - RNA, 19 nt, Artificial Sequence
  Description of Artificial Sequence: Synthetic oligonucleotide
  Antisense strand to SEQ ID NO: 760692
uucccaaacgccaacgccc

SEQ ID NO: 760694 - RNA, 19 nt, Artificial Sequence
  Description of Artificial Sequence: Synthetic oligonucleotide
  Sense strand starting at position 2001 of SEQ ID NO: 587021
gauugagaguuuccgagac

SEQ ID NO: 760695 - RNA, 19 nt, Artificial Sequence
  Description of Artificial Sequence: Synthetic oligonucleotide
  Antisense strand to SEQ ID NO: 760694
gucucggaaacucucaauc

SEQ ID NO: 760696 - RNA, 19 nt, Artificial Sequence
  Description of Artificial Sequence: Synthetic oligonucleotide
  Sense strand starting at position 2005 of SEQ ID NO: 587021
gagaguuuccgagacggua

SEQ ID NO: 760697 - RNA, 19 nt, Artificial Sequence
  Description of Artificial Sequence: Synthetic oligonucleotide
  Antisense strand to SEQ ID NO: 760696
uaccgucucggaaacucuc

SEQ ID NO: 760698 - RNA, 19 nt, Artificial Sequence
  Description of Artificial Sequence: Synthetic oligonucleotide
  Sense strand starting at position 2027 of SEQ ID NO: 587021
cgucgaugcccauaacauc

SEQ ID NO: 760699 - RNA, 19 nt, Artificial Sequence
  Description of Artificial Sequence: Synthetic oligonucleotide
  Antisense strand to SEQ ID NO: 760698
gauguuaugggcaucgacg

SEQ ID NO: 760700 - RNA, 19 nt, Artificial Sequence
  Description of Artificial Sequence: Synthetic oligonucleotide
  Sense strand starting at position 2047 of SEQ ID NO: 587021
ggacccaauuggguucuaa

SEQ ID NO: 760701 - RNA, 19 nt, Artificial Sequence
  Description of Artificial Sequence: Synthetic oligonucleotide
  Antisense strand to SEQ ID NO: 760700
uuagaacccaauugggucc

SEQ ID NO: 760702 - RNA, 19 nt, Artificial Sequence
  Description of Artificial Sequence: Synthetic oligonucleotide
  Sense strand starting at position 2114 of SEQ ID NO: 587021
gccugcuuccgucugcaga

SEQ ID NO: 760703 - RNA, 19 nt, Artificial Sequence
  Description of Artificial Sequence: Synthetic oligonucleotide
  Antisense strand to SEQ ID NO: 760702
ucugcagacggaagcaggc

SEQ ID NO: 760704 - RNA, 19 nt, Artificial Sequence
  Description of Artificial Sequence: Synthetic oligonucleotide
  Sense strand starting at position 2206 of SEQ ID NO: 587021
gugacucauuccuuggacu

SEQ ID NO: 760705 - RNA, 19 nt, Artificial Sequence
  Description of Artificial Sequence: Synthetic oligonucleotide
  Antisense strand to SEQ ID NO: 760704
aguccaaggaaugagucac

SEQ ID NO: 760706 - RNA, 19 nt, Artificial Sequence
  Description of Artificial Sequence: Synthetic oligonucleotide
  Sense strand starting at position 2207 of SEQ ID NO: 587021
ugacucauuccuuggacuu

SEQ ID NO: 760707 - RNA, 19 nt, Artificial Sequence
  Description of Artificial Sequence: Synthetic oligonucleotide
  Antisense strand to SEQ ID NO: 760706
aaguccaaggaaugaguca

SEQ ID NO: 760708 - RNA, 19 nt, Artificial Sequence
  Description of Artificial Sequence: Synthetic oligonucleotide
  Sense strand starting at position 2217 of SEQ ID NO: 587021
cuuggacuucgguaacuuu

SEQ ID NO: 760709 - RNA, 19 nt, Artificial Sequence
  Description of Artificial Sequence: Synthetic oligonucleotide
  Antisense strand to SEQ ID NO: 760708
aaaguuaccgaaguccaag

SEQ ID NO: 760710 - RNA, 19 nt, Artificial Sequence
  Description of Artificial Sequence: Synthetic oligonucleotide
  Sense strand starting at position 2244 of SEQ ID NO: 587021
ucgagacgucaggauaagu

SEQ ID NO: 760711 - RNA, 19 nt, Artificial Sequence
  Description of Artificial Sequence: Synthetic oligonucleotide
  Antisense strand to SEQ ID NO: 760710
acuuauccugacgucucga

SEQ ID NO: 760712 - RNA, 19 nt, Artificial Sequence
  Description of Artificial Sequence: Synthetic oligonucleotide
  Sense strand starting at position 2279 of SEQ ID NO: 587021
gccaaauaacuguaggcau

SEQ ID NO: 760713 - RNA, 19 nt, Artificial Sequence
  Description of Artificial Sequence: Synthetic oligonucleotide
  Antisense strand to SEQ ID NO: 760712
augccuacaguuauuuggc

SEQ ID NO: 760714 - RNA, 19 nt, Artificial Sequence
  Description of Artificial Sequence: Synthetic oligonucleotide
  Sense strand starting at position 2410 of SEQ ID NO: 587021
gagacacagcaucguucua

SEQ ID NO: 760715 - RNA, 19 nt, Artificial Sequence
  Description of Artificial Sequence: Synthetic oligonucleotide
  Antisense strand to SEQ ID NO: 760714
uagaacgaugcugugucuc

SEQ ID NO: 760716 - RNA, 19 nt, Artificial Sequence
  Description of Artificial Sequence: Synthetic oligonucleotide
  Sense strand starting at position 2412 of SEQ ID NO: 587021
gacacagcaucguucuaua

SEQ ID NO: 760717 - RNA, 19 nt, Artificial Sequence
  Description of Artificial Sequence: Synthetic oligonucleotide
  Antisense strand to SEQ ID NO: 760716
uauagaacgaugcuguguc

SEQ ID NO: 760718 - RNA, 19 nt, Artificial Sequence
  Description of Artificial Sequence: Synthetic oligonucleotide
  Sense strand starting at position 2445 of SEQ ID NO: 587021
cuucuaaaucaacgcgaau

SEQ ID NO: 760719 - RNA, 19 nt, Artificial Sequence
  Description of Artificial Sequence: Synthetic oligonucleotide
  Antisense strand to SEQ ID NO: 760718
auucgcguugauuuagaag

SEQ ID NO: 760720 - RNA, 19 nt, Artificial Sequence
  Description of Artificial Sequence: Synthetic oligonucleotide
  Sense strand starting at position 2448 of SEQ ID NO: 587021
cuaaaucaacgcgaauacu

SEQ ID NO: 760721 - RNA, 19 nt, Artificial Sequence
  Description of Artificial Sequence: Synthetic oligonucleotide
  Antisense strand to SEQ ID NO: 760720
aguauucgcguugauuuag

SEQ ID NO: 760722 - RNA, 19 nt, Artificial Sequence
  Description of Artificial Sequence: Synthetic oligonucleotide
  Sense strand starting at position 2487 of SEQ ID NO: 587021
aaaggauguuuagucccau

SEQ ID NO: 760723 - RNA, 19 nt, Artificial Sequence
  Description of Artificial Sequence: Synthetic oligonucleotide
  Antisense strand to SEQ ID NO: 760722
augggacuaaacauccuuu

SEQ ID NO: 760724 - RNA, 19 nt, Artificial Sequence
  Description of Artificial Sequence: Synthetic oligonucleotide
  Sense strand starting at position 2488 of SEQ ID NO: 587021
aaggauguuuagucccaua

SEQ ID NO: 760725 - RNA, 19 nt, Artificial Sequence
  Description of Artificial Sequence: Synthetic oligonucleotide
  Antisense strand to SEQ ID NO: 760724
uaugggacuaaacauccuu

SEQ ID NO: 760726 - RNA, 19 nt, Artificial Sequence
  Description of Artificial Sequence: Synthetic oligonucleotide
  Sense strand starting at position 2493 of SEQ ID NO: 587021
uguuuagucccauaguauu

SEQ ID NO: 760727 - RNA, 19 nt, Artificial Sequence
  Description of Artificial Sequence: Synthetic oligonucleotide
  Antisense strand to SEQ ID NO: 760726
aauacuaugggacuaaaca

SEQ ID NO: 760728 - RNA, 19 nt, Artificial Sequence
  Description of Artificial Sequence: Synthetic oligonucleotide
  Sense strand starting at position 2564 of SEQ ID NO: 587021
caugacauugugugucaga

SEQ ID NO: 760729 - RNA, 19 nt, Artificial Sequence
  Description of Artificial Sequence: Synthetic oligonucleotide
  Antisense strand to SEQ ID NO: 760728
ucugacacacaaugucaug

SEQ ID NO: 760730 - RNA, 19 nt, Artificial Sequence
  Description of Artificial Sequence: Synthetic oligonucleotide
  Sense strand starting at position 2573 of SEQ ID NO: 587021
gugugucagacuuaggauu

SEQ ID NO: 760731 - RNA, 19 nt, Artificial Sequence
  Description of Artificial Sequence: Synthetic oligonucleotide
  Antisense strand to SEQ ID NO: 760730
aauccuaagucugacacac

SEQ ID NO: 760732 - RNA, 19 nt, Artificial Sequence
  Description of Artificial Sequence: Synthetic oligonucleotide
  Sense strand starting at position 2704 of SEQ ID NO: 587021
gcaacauaguguguaggau

SEQ ID NO: 760733 - RNA, 19 nt, Artificial Sequence
  Description of Artificial Sequence: Synthetic oligonucleotide
  Antisense strand to SEQ ID NO: 760732
auccuacacacuauguugc

SEQ ID NO: 760734 - RNA, 19 nt, Artificial Sequence
  Description of Artificial Sequence: Synthetic oligonucleotide
  Sense strand starting at position 2769 of SEQ ID NO: 587021
cuaugaaaguaaguguagu

SEQ ID NO: 760735 - RNA, 19 nt, Artificial Sequence
  Description of Artificial Sequence: Synthetic oligonucleotide
  Antisense strand to SEQ ID NO: 760734
acuacacuuacuuucauag

SEQ ID NO: 760736 - RNA, 19 nt, Artificial Sequence
  Description of Artificial Sequence: Synthetic oligonucleotide
  Sense strand starting at position 2779 of SEQ ID NO: 587021
aaguguagugaagaugcua

SEQ ID NO: 760737 - RNA, 19 nt, Artificial Sequence
  Description of Artificial Sequence: Synthetic oligonucleotide
  Antisense strand to SEQ ID NO: 760736
uagcaucuucacuacacuu

SEQ ID NO: 760738 - RNA, 19 nt, Artificial Sequence
  Description of Artificial Sequence: Synthetic oligonucleotide
  Sense strand starting at position 2792 of SEQ ID NO: 587021
augcuaaugggacagucau

SEQ ID NO: 760739 - RNA, 19 nt, Artificial Sequence
  Description of Artificial Sequence: Synthetic oligonucleotide
  Antisense strand to SEQ ID NO: 760738
augacugucccauuagcau

SEQ ID NO: 760740 - RNA, 19 nt, Artificial Sequence
  Description of Artificial Sequence: Synthetic oligonucleotide
  Sense strand starting at position 2920 of SEQ ID NO: 587021
augugacaucuuuggugga

SEQ ID NO: 760741 - RNA, 19 nt, Artificial Sequence
  Description of Artificial Sequence: Synthetic oligonucleotide
  Antisense strand to SEQ ID NO: 760740
uccaccaaagaugucacau

SEQ ID NO: 760742 - RNA, 19 nt, Artificial Sequence
  Description of Artificial Sequence: Synthetic oligonucleotide
  Sense strand starting at position 2922 of SEQ ID NO: 587021
gugacaucuuugguggagu

SEQ ID NO: 760743 - RNA, 19 nt, Artificial Sequence
  Description of Artificial Sequence: Synthetic oligonucleotide
  Antisense strand to SEQ ID NO: 760742
acuccaccaaagaugucac

SEQ ID NO: 760744 - RNA, 19 nt, Artificial Sequence
  Description of Artificial Sequence: Synthetic oligonucleotide
  Sense strand starting at position 2925 of SEQ ID NO: 587021
acaucuuugguggaguagu

SEQ ID NO: 760745 - RNA, 19 nt, Artificial Sequence
  Description of Artificial Sequence: Synthetic oligonucleotide
  Antisense strand to SEQ ID NO: 760744
acuacuccaccaaagaugu

SEQ ID NO: 760746 - RNA, 19 nt, Artificial Sequence
  Description of Artificial Sequence: Synthetic oligonucleotide
  Sense strand starting at position 3050 of SEQ ID NO: 587021
uucucuauguuguucuuaa

SEQ ID NO: 760747 - RNA, 19 nt, Artificial Sequence
  Description of Artificial Sequence: Synthetic oligonucleotide
  Antisense strand to SEQ ID NO: 760746
uuaagaacaacauagagaa

SEQ ID NO: 760748 - RNA, 19 nt, Artificial Sequence
  Description of Artificial Sequence: Synthetic oligonucleotide
  Sense strand starting at position 3051 of SEQ ID NO: 587021
ucucuauguuguucuuaaa

SEQ ID NO: 760749 - RNA, 19 nt, Artificial Sequence
  Description of Artificial Sequence: Synthetic oligonucleotide
  Antisense strand to SEQ ID NO: 760748
uuuaagaacaacauagaga

SEQ ID NO: 760750 - RNA, 19 nt, Artificial Sequence
  Description of Artificial Sequence: Synthetic oligonucleotide
  Sense strand starting at position 3237 of SEQ ID NO: 587021
uuuccucugcacugagauu

SEQ ID NO: 760751 - RNA, 19 nt, Artificial Sequence
  Description of Artificial Sequence: Synthetic oligonucleotide
  Antisense strand to SEQ ID NO: 760750
aaucucagugcagaggaaa

SEQ ID NO: 760752 - RNA, 19 nt, Artificial Sequence
  Description of Artificial Sequence: Synthetic oligonucleotide
  Sense strand starting at position 3303 of SEQ ID NO: 587021
ucagcaugucuguauaaag

SEQ ID NO: 760753 - RNA, 19 nt, Artificial Sequence
  Description of Artificial Sequence: Synthetic oligonucleotide
  Antisense strand to SEQ ID NO: 760752
cuuuauacagacaugcuga

SEQ ID NO: 760754 - RNA, 19 nt, Artificial Sequence
  Description of Artificial Sequence: Synthetic oligonucleotide
  Sense strand starting at position 3313 of SEQ ID NO: 587021
uguauaaagguaggaauua

SEQ ID NO: 760755 - RNA, 19 nt, Artificial Sequence
  Description of Artificial Sequence: Synthetic oligonucleotide
  Antisense strand to SEQ ID NO: 760754
uaauuccuaccuuuauaca

SEQ ID NO: 760756 - RNA, 19 nt, Artificial Sequence
  Description of Artificial Sequence: Synthetic oligonucleotide
  Sense strand starting at position 3633 of SEQ ID NO: 587021
ggcccucuuccagguuaca

SEQ ID NO: 760757 - RNA, 19 nt, Artificial Sequence
  Description of Artificial Sequence: Synthetic oligonucleotide
  Antisense strand to SEQ ID NO: 760756
uguaaccuggaagagggcc

SEQ ID NO: 760758 - RNA, 19 nt, Artificial Sequence
  Description of Artificial Sequence: Synthetic oligonucleotide
  Sense strand starting at position 3643 of SEQ ID NO: 587021
cagguuacagacugucaua

SEQ ID NO: 760759 - RNA, 19 nt, Artificial Sequence
  Description of Artificial Sequence: Synthetic oligonucleotide
  Antisense strand to SEQ ID NO: 760758
uaugacagucuguaaccug

SEQ ID NO: 760760 - RNA, 19 nt, Artificial Sequence
  Description of Artificial Sequence: Synthetic oligonucleotide
  Sense strand starting at position 401 of SEQ ID NO: 587022
gggagaaccgcuugaacca

SEQ ID NO: 760761 - RNA, 19 nt, Artificial Sequence
  Description of Artificial Sequence: Synthetic oligonucleotide
  Antisense strand to SEQ ID NO: 760760
ugguucaagcgguucuccc

SEQ ID NO: 760762 - RNA, 19 nt, Artificial Sequence
  Description of Artificial Sequence: Synthetic oligonucleotide
  Sense strand starting at position 838 of SEQ ID NO: 587022
guuggacauuaggaagauu

SEQ ID NO: 760763 - RNA, 19 nt, Artificial Sequence
  Description of Artificial Sequence: Synthetic oligonucleotide
  Antisense strand to SEQ ID NO: 760762
aaucuuccuaauguccaac

SEQ ID NO: 760764 - RNA, 19 nt, Artificial Sequence
  Description of Artificial Sequence: Synthetic oligonucleotide
  Sense strand starting at position 862 of SEQ ID NO: 587022
aucaauacugcuuaggagu

SEQ ID NO: 760765 - RNA, 19 nt, Artificial Sequence
  Description of Artificial Sequence: Synthetic oligonucleotide
  Antisense strand to SEQ ID NO: 760764
acuccuaagcaguauugau

SEQ ID NO: 760766 - RNA, 19 nt, Artificial Sequence
  Description of Artificial Sequence: Synthetic oligonucleotide
  Sense strand starting at position 868 of SEQ ID NO: 587022
acugcuuaggaguaguaca

SEQ ID NO: 760767 - RNA, 19 nt, Artificial Sequence
  Description of Artificial Sequence: Synthetic oligonucleotide
  Antisense strand to SEQ ID NO: 760766
uguacuacuccuaagcagu

SEQ ID NO: 760768 - RNA, 19 nt, Artificial Sequence
  Description of Artificial Sequence: Synthetic oligonucleotide
  Sense strand starting at position 1001 of SEQ ID NO: 587022
acacaacuauucgagacau

SEQ ID NO: 760769 - RNA, 19 nt, Artificial Sequence
  Description of Artificial Sequence: Synthetic oligonucleotide
  Antisense strand to SEQ ID NO: 760768
augucucgaauaguugugu

SEQ ID NO: 760770 - RNA, 19 nt, Artificial Sequence
  Description of Artificial Sequence: Synthetic oligonucleotide
  Sense strand starting at position 1194 of SEQ ID NO: 587022
ggguuaacuuaagcgagau

SEQ ID NO: 760771 - RNA, 19 nt, Artificial Sequence
  Description of Artificial Sequence: Synthetic oligonucleotide
  Antisense strand to SEQ ID NO: 760770
aucucgcuuaaguuaaccc

SEQ ID NO: 760772 - RNA, 19 nt, Artificial Sequence
  Description of Artificial Sequence: Synthetic oligonucleotide
  Sense strand starting at position 1195 of SEQ ID NO: 587022
gguuaacuuaagcgagauc

SEQ ID NO: 760773 - RNA, 19 nt, Artificial Sequence
  Description of Artificial Sequence: Synthetic oligonucleotide
  Antisense strand to SEQ ID NO: 760772
gaucucgcuuaaguuaacc

SEQ ID NO: 760774 - RNA, 19 nt, Artificial Sequence
  Description of Artificial Sequence: Synthetic oligonucleotide
  Sense strand starting at position 1561 of SEQ ID NO: 587022
gaauaaguccucuaggcuc

SEQ ID NO: 760775 - RNA, 19 nt, Artificial Sequence
  Description of Artificial Sequence: Synthetic oligonucleotide
  Antisense strand to SEQ ID NO: 760774
gagccuagaggacuuauuc

SEQ ID NO: 760776 - RNA, 19 nt, Artificial Sequence
  Description of Artificial Sequence: Synthetic oligonucleotide
  Sense strand starting at position 1574 of SEQ ID NO: 587022
aggcucgcagaaugaaauu

SEQ ID NO: 760777 - RNA, 19 nt, Artificial Sequence
  Description of Artificial Sequence: Synthetic oligonucleotide
  Antisense strand to SEQ ID NO: 760776
aauuucauucugcgagccu

SEQ ID NO: 760778 - RNA, 19 nt, Artificial Sequence
  Description of Artificial Sequence: Synthetic oligonucleotide
  Sense strand starting at position 1631 of SEQ ID NO: 587022
gcacucccucuugguguaa

SEQ ID NO: 760779 - RNA, 19 nt, Artificial Sequence
  Description of Artificial Sequence: Synthetic oligonucleotide
  Antisense strand to SEQ ID NO: 760778
uuacaccaagagggagugc

SEQ ID NO: 760780 - RNA, 19 nt, Artificial Sequence
  Description of Artificial Sequence: Synthetic oligonucleotide
  Sense strand starting at position 1992 of SEQ ID NO: 587022
agcaaaugcgaagguauuu

SEQ ID NO: 760781 - RNA, 19 nt, Artificial Sequence
  Description of Artificial Sequence: Synthetic oligonucleotide
  Antisense strand to SEQ ID NO: 760780
aaauaccuucgcauuugcu

SEQ ID NO: 760782 - RNA, 19 nt, Artificial Sequence
  Description of Artificial Sequence: Synthetic oligonucleotide
  Sense strand starting at position 2063 of SEQ ID NO: 587022
cggacauccuagccuguau

SEQ ID NO: 760783 - RNA, 19 nt, Artificial Sequence
  Description of Artificial Sequence: Synthetic oligonucleotide
  Antisense strand to SEQ ID NO: 760782
auacaggcuaggauguccg

SEQ ID NO: 760784 - RNA, 19 nt, Artificial Sequence
  Description of Artificial Sequence: Synthetic oligonucleotide
  Sense strand starting at position 2074 of SEQ ID NO: 587022
gccuguauuggguggguca

SEQ ID NO: 760785 - RNA, 19 nt, Artificial Sequence
  Description of Artificial Sequence: Synthetic oligonucleotide
  Antisense strand to SEQ ID NO: 760784
ugacccacccaauacaggc

SEQ ID NO: 760786 - RNA, 19 nt, Artificial Sequence
  Description of Artificial Sequence: Synthetic oligonucleotide
  Sense strand starting at position 2125 of SEQ ID NO: 587022
gguggagcuuggcugaauu

SEQ ID NO: 760787 - RNA, 19 nt, Artificial Sequence
  Description of Artificial Sequence: Synthetic oligonucleotide
  Antisense strand to SEQ ID NO: 760786
aauucagccaagcuccacc

SEQ ID NO: 760788 - RNA, 19 nt, Artificial Sequence
  Description of Artificial Sequence: Synthetic oligonucleotide
  Sense strand starting at position 2307 of SEQ ID NO: 587022
gugaguguuuaccucaugu

SEQ ID NO: 760789 - RNA, 19 nt, Artificial Sequence
  Description of Artificial Sequence: Synthetic oligonucleotide
  Antisense strand to SEQ ID NO: 760788
acaugagguaaacacucac

SEQ ID NO: 760790 - RNA, 19 nt, Artificial Sequence
  Description of Artificial Sequence: Synthetic oligonucleotide
  Sense strand starting at position 2309 of SEQ ID NO: 587022
gaguguuuaccucauguca

SEQ ID NO: 760791 - RNA, 19 nt, Artificial Sequence
  Description of Artificial Sequence: Synthetic oligonucleotide
  Antisense strand to SEQ ID NO: 760790
ugacaugagguaaacacuc

SEQ ID NO: 760792 - RNA, 19 nt, Artificial Sequence
  Description of Artificial Sequence: Synthetic oligonucleotide
  Sense strand starting at position 2446 of SEQ ID NO: 587022
ggguuugagggugaguaau

SEQ ID NO: 760793 - RNA, 19 nt, Artificial Sequence
  Description of Artificial Sequence: Synthetic oligonucleotide
  Antisense strand to SEQ ID NO: 760792
auuacucacccucaaaccc

SEQ ID NO: 760794 - RNA, 19 nt, Artificial Sequence
  Description of Artificial Sequence: Synthetic oligonucleotide
  Sense strand starting at position 2448 of SEQ ID NO: 587022
guuugagggugaguaauuc

SEQ ID NO: 760795 - RNA, 19 nt, Artificial Sequence
  Description of Artificial Sequence: Synthetic oligonucleotide
  Antisense strand to SEQ ID NO: 760794
gaauuacucacccucaaac

SEQ ID NO: 760796 - RNA, 19 nt, Artificial Sequence
  Description of Artificial Sequence: Synthetic oligonucleotide
  Sense strand starting at position 2535 of SEQ ID NO: 587022
gcagacggugcguacuaua

SEQ ID NO: 760797 - RNA, 19 nt, Artificial Sequence
  Description of Artificial Sequence: Synthetic oligonucleotide
  Antisense strand to SEQ ID NO: 760796
uauaguacgcaccgucugc

SEQ ID NO: 760798 - RNA, 19 nt, Artificial Sequence
  Description of Artificial Sequence: Synthetic oligonucleotide
  Sense strand starting at position 2540 of SEQ ID NO: 587022
cggugcguacuauauggau

SEQ ID NO: 760799 - RNA, 19 nt, Artificial Sequence
  Description of Artificial Sequence: Synthetic oligonucleotide
  Antisense strand to SEQ ID NO: 760798
auccauauaguacgcaccg

SEQ ID NO: 760800 - RNA, 19 nt, Artificial Sequence
  Description of Artificial Sequence: Synthetic oligonucleotide
  Sense strand starting at position 2542 of SEQ ID NO: 587022
gugcguacuauauggauuu

SEQ ID NO: 760801 - RNA, 19 nt, Artificial Sequence
  Description of Artificial Sequence: Synthetic oligonucleotide
  Antisense strand to SEQ ID NO: 760800
aaauccauauaguacgcac

SEQ ID NO: 760802 - RNA, 19 nt, Artificial Sequence
  Description of Artificial Sequence: Synthetic oligonucleotide
  Sense strand starting at position 2655 of SEQ ID NO: 587022
uuacguuucuucccuggau

SEQ ID NO: 760803 - RNA, 19 nt, Artificial Sequence
  Description of Artificial Sequence: Synthetic oligonucleotide
  Antisense strand to SEQ ID NO: 760802
auccagggaagaaacguaa

SEQ ID NO: 760804 - RNA, 19 nt, Artificial Sequence
  Description of Artificial Sequence: Synthetic oligonucleotide
  Sense strand starting at position 2656 of SEQ ID NO: 587022
uacguuucuucccuggauu

SEQ ID NO: 760805 - RNA, 19 nt, Artificial Sequence
  Description of Artificial Sequence: Synthetic oligonucleotide
  Antisense strand to SEQ ID NO: 760804
aauccagggaagaaacgua

SEQ ID NO: 760806 - RNA, 19 nt, Artificial Sequence
  Description of Artificial Sequence: Synthetic oligonucleotide
  Sense strand starting at position 2696 of SEQ ID NO: 587022
ccucaacuguauuccagua

SEQ ID NO: 760807 - RNA, 19 nt, Artificial Sequence
  Description of Artificial Sequence: Synthetic oligonucleotide
  Antisense strand to SEQ ID NO: 760806
uacuggaauacaguugagg

SEQ ID NO: 760808 - RNA, 19 nt, Artificial Sequence
  Description of Artificial Sequence: Synthetic oligonucleotide
  Sense strand starting at position 2701 of SEQ ID NO: 587022
acuguauuccaguaucaug

SEQ ID NO: 760809 - RNA, 19 nt, Artificial Sequence
  Description of Artificial Sequence: Synthetic oligonucleotide
  Antisense strand to SEQ ID NO: 760808
caugauacuggaauacagu

SEQ ID NO: 760810 - RNA, 19 nt, Artificial Sequence
  Description of Artificial Sequence: Synthetic oligonucleotide
  Sense strand starting at position 2835 of SEQ ID NO: 587022
uguaucaguccuugcuuua

SEQ ID NO: 760811 - RNA, 19 nt, Artificial Sequence
  Description of Artificial Sequence: Synthetic oligonucleotide
  Antisense strand to SEQ ID NO: 760810
uaaagcaaggacugauaca

SEQ ID NO: 760812 - RNA, 19 nt, Artificial Sequence
  Description of Artificial Sequence: Synthetic oligonucleotide
  Sense strand starting at position 2990 of SEQ ID NO: 587022
gcuugucauccuugguuua

SEQ ID NO: 760813 - RNA, 19 nt, Artificial Sequence
  Description of Artificial Sequence: Synthetic oligonucleotide
  Antisense strand to SEQ ID NO: 760812
uaaaccaaggaugacaagc

SEQ ID NO: 760814 - RNA, 19 nt, Artificial Sequence
  Description of Artificial Sequence: Synthetic oligonucleotide
  Sense strand starting at position 2992 of SEQ ID NO: 587022
uugucauccuugguuuauc

SEQ ID NO: 760815 - RNA, 19 nt, Artificial Sequence
  Description of Artificial Sequence: Synthetic oligonucleotide
  Antisense strand to SEQ ID NO: 760814
gauaaaccaaggaugacaa

SEQ ID NO: 760816 - RNA, 19 nt, Artificial Sequence
  Description of Artificial Sequence: Synthetic oligonucleotide
  Sense strand starting at position 3000 of SEQ ID NO: 587022
cuugguuuaucugucccaa

SEQ ID NO: 760817 - RNA, 19 nt, Artificial Sequence
  Description of Artificial Sequence: Synthetic oligonucleotide
  Antisense strand to SEQ ID NO: 760816
uugggacagauaaaccaag

SEQ ID NO: 760818 - RNA, 19 nt, Artificial Sequence
  Description of Artificial Sequence: Synthetic oligonucleotide
  Sense strand starting at position 3002 of SEQ ID NO: 587022
ugguuuaucugucccaacu

SEQ ID NO: 760819 - RNA, 19 nt, Artificial Sequence
  Description of Artificial Sequence: Synthetic oligonucleotide
  Antisense strand to SEQ ID NO: 760818
aguugggacagauaaacca

SEQ ID NO: 760820 - RNA, 19 nt, Artificial Sequence
  Description of Artificial Sequence: Synthetic oligonucleotide
  Sense strand starting at position 3024 of SEQ ID NO: 587022
cugacagagaccuguagau

SEQ ID NO: 760821 - RNA, 19 nt, Artificial Sequence
  Description of Artificial Sequence: Synthetic oligonucleotide
  Antisense strand to SEQ ID NO: 760820
aucuacaggucucugucag

SEQ ID NO: 760822 - RNA, 19 nt, Artificial Sequence
  Description of Artificial Sequence: Synthetic oligonucleotide
  Sense strand starting at position 3042 of SEQ ID NO: 587022
uagagauaauaggucuuau

SEQ ID NO: 760823 - RNA, 19 nt, Artificial Sequence
  Description of Artificial Sequence: Synthetic oligonucleotide
  Antisense strand to SEQ ID NO: 760822
auaagaccuauuaucucua

SEQ ID NO: 760824 - RNA, 19 nt, Artificial Sequence
  Description of Artificial Sequence: Synthetic oligonucleotide
  Sense strand starting at position 3055 of SEQ ID NO: 587022
ucuuauugcugucuauauu

SEQ ID NO: 760825 - RNA, 19 nt, Artificial Sequence
  Description of Artificial Sequence: Synthetic oligonucleotide
  Antisense strand to SEQ ID NO: 760824
aauauagacagcaauaaga

SEQ ID NO: 760826 - RNA, 19 nt, Artificial Sequence
  Description of Artificial Sequence: Synthetic oligonucleotide
  Sense strand starting at position 3063 of SEQ ID NO: 587022
cugucuauauuguuaguau

SEQ ID NO: 760827 - RNA, 19 nt, Artificial Sequence
  Description of Artificial Sequence: Synthetic oligonucleotide
  Antisense strand to SEQ ID NO: 760826
auacuaacaauauagacag

SEQ ID NO: 760828 - RNA, 19 nt, Artificial Sequence
  Description of Artificial Sequence: Synthetic oligonucleotide
  Sense strand starting at position 3066 of SEQ ID NO: 587022
ucuauauuguuaguaugca

SEQ ID NO: 760829 - RNA, 19 nt, Artificial Sequence
  Description of Artificial Sequence: Synthetic oligonucleotide
  Antisense strand to SEQ ID NO: 760828
ugcauacuaacaauauaga

SEQ ID NO: 760830 - RNA, 19 nt, Artificial Sequence
  Description of Artificial Sequence: Synthetic oligonucleotide
  Sense strand starting at position 3110 of SEQ ID NO: 587022
gcaggauaacagugaauac

SEQ ID NO: 760831 - RNA, 19 nt, Artificial Sequence
  Description of Artificial Sequence: Synthetic oligonucleotide
  Antisense strand to SEQ ID NO: 760830
guauucacuguuauccugc

SEQ ID NO: 760832 - RNA, 19 nt, Artificial Sequence
  Description of Artificial Sequence: Synthetic oligonucleotide
  Sense strand starting at position 3128 of SEQ ID NO: 587022
cuuauacagugcucacuau

SEQ ID NO: 760833 - RNA, 19 nt, Artificial Sequence
  Description of Artificial Sequence: Synthetic oligonucleotide
  Antisense strand to SEQ ID NO: 760832
auagugagcacuguauaag

SEQ ID NO: 760834 - RNA, 19 nt, Artificial Sequence
  Description of Artificial Sequence: Synthetic oligonucleotide
  Sense strand starting at position 3146 of SEQ ID NO: 587022
ugugccagccuuuauauau

SEQ ID NO: 760835 - RNA, 19 nt, Artificial Sequence
  Description of Artificial Sequence: Synthetic oligonucleotide
  Antisense strand to SEQ ID NO: 760834
auauauaaaggcuggcaca

SEQ ID NO: 760836 - RNA, 19 nt, Artificial Sequence
  Description of Artificial Sequence: Synthetic oligonucleotide
  Sense strand starting at position 3153 of SEQ ID NO: 587022
gccuuuauauauguugauu

SEQ ID NO: 760837 - RNA, 19 nt, Artificial Sequence
  Description of Artificial Sequence: Synthetic oligonucleotide
  Antisense strand to SEQ ID NO: 760836
aaucaacauauauaaaggc

SEQ ID NO: 760838 - RNA, 19 nt, Artificial Sequence
  Description of Artificial Sequence: Synthetic oligonucleotide
  Sense strand starting at position 3199 of SEQ ID NO: 587022
gggacauacuauuauuauc

SEQ ID NO: 760839 - RNA, 19 nt, Artificial Sequence
  Description of Artificial Sequence: Synthetic oligonucleotide
  Antisense strand to SEQ ID NO: 760838
gauaauaauaguauguccc

SEQ ID NO: 760840 - RNA, 19 nt, Artificial Sequence
  Description of Artificial Sequence: Synthetic oligonucleotide
  Sense strand starting at position 200 of SEQ ID NO: 587023
gacagagcucuuuauuaug

SEQ ID NO: 760841 - RNA, 19 nt, Artificial Sequence
  Description of Artificial Sequence: Synthetic oligonucleotide
  Antisense strand to SEQ ID NO: 760840
cauaauaaagagcucuguc

SEQ ID NO: 760842 - RNA, 19 nt, Artificial Sequence
  Description of Artificial Sequence: Synthetic oligonucleotide
  Sense strand starting at position 225 of SEQ ID NO: 587023
gauguauuccaggagccca

SEQ ID NO: 760843 - RNA, 19 nt, Artificial Sequence
  Description of Artificial Sequence: Synthetic oligonucleotide
  Antisense strand to SEQ ID NO: 760842
ugggcuccuggaauacauc

SEQ ID NO: 760844 - RNA, 19 nt, Artificial Sequence
  Description of Artificial Sequence: Synthetic oligonucleotide
  Sense strand starting at position 282 of SEQ ID NO: 587023
aguuguaaggcuuagagau

SEQ ID NO: 760845 - RNA, 19 nt, Artificial Sequence
  Description of Artificial Sequence: Synthetic oligonucleotide
  Antisense strand to SEQ ID NO: 760844
aucucuaagccuuacaacu

SEQ ID NO: 760846 - RNA, 19 nt, Artificial Sequence
  Description of Artificial Sequence: Synthetic oligonucleotide
  Sense strand starting at position 297 of SEQ ID NO: 587023
agauauuggugcucaguaa

SEQ ID NO: 760847 - RNA, 19 nt, Artificial Sequence
  Description of Artificial Sequence: Synthetic oligonucleotide
  Antisense strand to SEQ ID NO: 760846
uuacugagcaccaauaucu

SEQ ID NO: 760848 - RNA, 19 nt, Artificial Sequence
  Description of Artificial Sequence: Synthetic oligonucleotide
  Sense strand starting at position 298 of SEQ ID NO: 587023
gauauuggugcucaguaaa

SEQ ID NO: 760849 - RNA, 19 nt, Artificial Sequence
  Description of Artificial Sequence: Synthetic oligonucleotide
  Antisense strand to SEQ ID NO: 760848
uuuacugagcaccaauauc

SEQ ID NO: 760850 - RNA, 19 nt, Artificial Sequence
  Description of Artificial Sequence: Synthetic oligonucleotide
  Sense strand starting at position 301 of SEQ ID NO: 587023
auuggugcucaguaaauac

SEQ ID NO: 760851 - RNA, 19 nt, Artificial Sequence
  Description of Artificial Sequence: Synthetic oligonucleotide
  Antisense strand to SEQ ID NO: 760850
guauuuacugagcaccaau

SEQ ID NO: 760852 - RNA, 19 nt, Artificial Sequence
  Description of Artificial Sequence: Synthetic oligonucleotide
  Sense strand starting at position 308 of SEQ ID NO: 587023
cucaguaaauacuugguau

SEQ ID NO: 760853 - RNA, 19 nt, Artificial Sequence
  Description of Artificial Sequence: Synthetic oligonucleotide
  Antisense strand to SEQ ID NO: 760852
auaccaaguauuuacugag

SEQ ID NO: 760854 - RNA, 19 nt, Artificial Sequence
  Description of Artificial Sequence: Synthetic oligonucleotide
  Sense strand starting at position 311 of SEQ ID NO: 587023
aguaaauacuugguaucac

SEQ ID NO: 760855 - RNA, 19 nt, Artificial Sequence
  Description of Artificial Sequence: Synthetic oligonucleotide
  Antisense strand to SEQ ID NO: 760854
gugauaccaaguauuuacu

SEQ ID NO: 760856 - RNA, 19 nt, Artificial Sequence
  Description of Artificial Sequence: Synthetic oligonucleotide
  Sense strand starting at position 360 of SEQ ID NO: 587023
gagccuacacuguaguuaa

SEQ ID NO: 760857 - RNA, 19 nt, Artificial Sequence
  Description of Artificial Sequence: Synthetic oligonucleotide
  Antisense strand to SEQ ID NO: 760856
uuaacuacaguguaggcuc

SEQ ID NO: 760858 - RNA, 19 nt, Artificial Sequence
  Description of Artificial Sequence: Synthetic oligonucleotide
  Sense strand starting at position 887 of SEQ ID NO: 587023
gggagaaccgcuugaacca

SEQ ID NO: 760859 - RNA, 19 nt, Artificial Sequence
  Description of Artificial Sequence: Synthetic oligonucleotide
  Antisense strand to SEQ ID NO: 760858
ugguucaagcgguucuccc

SEQ ID NO: 760860 - RNA, 19 nt, Artificial Sequence
  Description of Artificial Sequence: Synthetic oligonucleotide
  Sense strand starting at position 1348 of SEQ ID NO: 587023
aucaauacugcuuaggagu

SEQ ID NO: 760861 - RNA, 19 nt, Artificial Sequence
  Description of Artificial Sequence: Synthetic oligonucleotide
  Antisense strand to SEQ ID NO: 760860
acuccuaagcaguauugau

SEQ ID NO: 760862 - RNA, 19 nt, Artificial Sequence
  Description of Artificial Sequence: Synthetic oligonucleotide
  Sense strand starting at position 1354 of SEQ ID NO: 587023
acugcuuaggaguaguaca

SEQ ID NO: 760863 - RNA, 19 nt, Artificial Sequence
  Description of Artificial Sequence: Synthetic oligonucleotide
  Antisense strand to SEQ ID NO: 760862
uguacuacuccuaagcagu

SEQ ID NO: 760864 - RNA, 19 nt, Artificial Sequence
  Description of Artificial Sequence: Synthetic oligonucleotide
  Sense strand starting at position 1680 of SEQ ID NO: 587023
ggguuaacuuaagcgagau

SEQ ID NO: 760865 - RNA, 19 nt, Artificial Sequence
  Description of Artificial Sequence: Synthetic oligonucleotide
  Antisense strand to SEQ ID NO: 760864
aucucgcuuaaguuaaccc

SEQ ID NO: 760866 - RNA, 19 nt, Artificial Sequence
  Description of Artificial Sequence: Synthetic oligonucleotide
  Sense strand starting at position 1681 of SEQ ID NO: 587023
gguuaacuuaagcgagauc

SEQ ID NO: 760867 - RNA, 19 nt, Artificial Sequence
  Description of Artificial Sequence: Synthetic oligonucleotide
  Antisense strand to SEQ ID NO: 760866
gaucucgcuuaaguuaacc

SEQ ID NO: 760868 - RNA, 19 nt, Artificial Sequence
  Description of Artificial Sequence: Synthetic oligonucleotide
  Sense strand starting at position 2047 of SEQ ID NO: 587023
gaauaaguccucuaggcuc

SEQ ID NO: 760869 - RNA, 19 nt, Artificial Sequence
  Description of Artificial Sequence: Synthetic oligonucleotide
  Antisense strand to SEQ ID NO: 760868
gagccuagaggacuuauuc

SEQ ID NO: 760870 - RNA, 19 nt, Artificial Sequence
  Description of Artificial Sequence: Synthetic oligonucleotide
  Sense strand starting at position 2060 of SEQ ID NO: 587023
aggcucgcagaaugaaauu

SEQ ID NO: 760871 - RNA, 19 nt, Artificial Sequence
  Description of Artificial Sequence: Synthetic oligonucleotide
  Antisense strand to SEQ ID NO: 760870
aauuucauucugcgagccu

SEQ ID NO: 760872 - RNA, 19 nt, Artificial Sequence
  Description of Artificial Sequence: Synthetic oligonucleotide
  Sense strand starting at position 2478 of SEQ ID NO: 587023
agcaaaugcgaagguauuu

SEQ ID NO: 760873 - RNA, 19 nt, Artificial Sequence
  Description of Artificial Sequence: Synthetic oligonucleotide
  Antisense strand to SEQ ID NO: 760872
aaauaccuucgcauuugcu

SEQ ID NO: 760874 - RNA, 19 nt, Artificial Sequence
  Description of Artificial Sequence: Synthetic oligonucleotide
  Sense strand starting at position 2549 of SEQ ID NO: 587023
cggacauccuagccuguau

SEQ ID NO: 760875 - RNA, 19 nt, Artificial Sequence
  Description of Artificial Sequence: Synthetic oligonucleotide
  Antisense strand to SEQ ID NO: 760874
auacaggcuaggauguccg

SEQ ID NO: 760876 - RNA, 19 nt, Artificial Sequence
  Description of Artificial Sequence: Synthetic oligonucleotide
  Sense strand starting at position 2611 of SEQ ID NO: 587023
gguggagcuuggcugaauu

SEQ ID NO: 760877 - RNA, 19 nt, Artificial Sequence
  Description of Artificial Sequence: Synthetic oligonucleotide
  Antisense strand to SEQ ID NO: 760876
aauucagccaagcuccacc

SEQ ID NO: 760878 - RNA, 19 nt, Artificial Sequence
  Description of Artificial Sequence: Synthetic oligonucleotide
  Sense strand starting at position 2795 of SEQ ID NO: 587023
gaguguuuaccucauguca

SEQ ID NO: 760879 - RNA, 19 nt, Artificial Sequence
  Description of Artificial Sequence: Synthetic oligonucleotide
  Antisense strand to SEQ ID NO: 760878
ugacaugagguaaacacuc

SEQ ID NO: 760880 - RNA, 19 nt, Artificial Sequence
  Description of Artificial Sequence: Synthetic oligonucleotide
  Sense strand starting at position 2932 of SEQ ID NO: 587023
ggguuugagggugaguaau

SEQ ID NO: 760881 - RNA, 19 nt, Artificial Sequence
  Description of Artificial Sequence: Synthetic oligonucleotide
  Antisense strand to SEQ ID NO: 760880
auuacucacccucaaaccc

SEQ ID NO: 760882 - RNA, 19 nt, Artificial Sequence
  Description of Artificial Sequence: Synthetic oligonucleotide
  Sense strand starting at position 2934 of SEQ ID NO: 587023
guuugagggugaguaauuc

SEQ ID NO: 760883 - RNA, 19 nt, Artificial Sequence
  Description of Artificial Sequence: Synthetic oligonucleotide
  Antisense strand to SEQ ID NO: 760882
gaauuacucacccucaaac

SEQ ID NO: 760884 - RNA, 19 nt, Artificial Sequence
  Description of Artificial Sequence: Synthetic oligonucleotide
  Sense strand starting at position 3026 of SEQ ID NO: 587023
cggugcguacuauauggau

SEQ ID NO: 760885 - RNA, 19 nt, Artificial Sequence
  Description of Artificial Sequence: Synthetic oligonucleotide
  Antisense strand to SEQ ID NO: 760884
auccauauaguacgcaccg

SEQ ID NO: 760886 - RNA, 19 nt, Artificial Sequence
  Description of Artificial Sequence: Synthetic oligonucleotide
  Sense strand starting at position 3028 of SEQ ID NO: 587023
gugcguacuauauggauuu

SEQ ID NO: 760887 - RNA, 19 nt, Artificial Sequence
  Description of Artificial Sequence: Synthetic oligonucleotide
  Antisense strand to SEQ ID NO: 760886
aaauccauauaguacgcac

SEQ ID NO: 760888 - RNA, 19 nt, Artificial Sequence
  Description of Artificial Sequence: Synthetic oligonucleotide
  Sense strand starting at position 3141 of SEQ ID NO: 587023
uuacguuucuucccuggau

SEQ ID NO: 760889 - RNA, 19 nt, Artificial Sequence
  Description of Artificial Sequence: Synthetic oligonucleotide
  Antisense strand to SEQ ID NO: 760888
auccagggaagaaacguaa

SEQ ID NO: 760890 - RNA, 19 nt, Artificial Sequence
  Description of Artificial Sequence: Synthetic oligonucleotide
  Sense strand starting at position 3142 of SEQ ID NO: 587023
uacguuucuucccuggauu

SEQ ID NO: 760891 - RNA, 19 nt, Artificial Sequence
  Description of Artificial Sequence: Synthetic oligonucleotide
  Antisense strand to SEQ ID NO: 760890
aauccagggaagaaacgua

SEQ ID NO: 760892 - RNA, 19 nt, Artificial Sequence
  Description of Artificial Sequence: Synthetic oligonucleotide
  Sense strand starting at position 3182 of SEQ ID NO: 587023
ccucaacuguauuccagua

SEQ ID NO: 760893 - RNA, 19 nt, Artificial Sequence
  Description of Artificial Sequence: Synthetic oligonucleotide
  Antisense strand to SEQ ID NO: 760892
uacuggaauacaguugagg

SEQ ID NO: 760894 - RNA, 19 nt, Artificial Sequence
  Description of Artificial Sequence: Synthetic oligonucleotide
  Sense strand starting at position 3187 of SEQ ID NO: 587023
acuguauuccaguaucaug

SEQ ID NO: 760895 - RNA, 19 nt, Artificial Sequence
  Description of Artificial Sequence: Synthetic oligonucleotide
  Antisense strand to SEQ ID NO: 760894
caugauacuggaauacagu

SEQ ID NO: 760896 - RNA, 19 nt, Artificial Sequence
  Description of Artificial Sequence: Synthetic oligonucleotide
  Sense strand starting at position 3478 of SEQ ID NO: 587023
uugucauccuugguuuauc

SEQ ID NO: 760897 - RNA, 19 nt, Artificial Sequence
  Description of Artificial Sequence: Synthetic oligonucleotide
  Antisense strand to SEQ ID NO: 760896
gauaaaccaaggaugacaa

SEQ ID NO: 760898 - RNA, 19 nt, Artificial Sequence
  Description of Artificial Sequence: Synthetic oligonucleotide
  Sense strand starting at position 3486 of SEQ ID NO: 587023
cuugguuuaucugucccaa

SEQ ID NO: 760899 - RNA, 19 nt, Artificial Sequence
  Description of Artificial Sequence: Synthetic oligonucleotide
  Antisense strand to SEQ ID NO: 760898
uugggacagauaaaccaag

SEQ ID NO: 760900 - RNA, 19 nt, Artificial Sequence
  Description of Artificial Sequence: Synthetic oligonucleotide
  Sense strand starting at position 3488 of SEQ ID NO: 587023
ugguuuaucugucccaacu

SEQ ID NO: 760901 - RNA, 19 nt, Artificial Sequence
  Description of Artificial Sequence: Synthetic oligonucleotide
  Antisense strand to SEQ ID NO: 760900
aguugggacagauaaacca

SEQ ID NO: 760902 - RNA, 19 nt, Artificial Sequence
  Description of Artificial Sequence: Synthetic oligonucleotide
  Sense strand starting at position 3510 of SEQ ID NO: 587023
cugacagagaccuguagau

SEQ ID NO: 760903 - RNA, 19 nt, Artificial Sequence
  Description of Artificial Sequence: Synthetic oligonucleotide
  Antisense strand to SEQ ID NO: 760902
aucuacaggucucugucag

SEQ ID NO: 760904 - RNA, 19 nt, Artificial Sequence
  Description of Artificial Sequence: Synthetic oligonucleotide
  Sense strand starting at position 3528 of SEQ ID NO: 587023
uagagauaauaggucuuau

SEQ ID NO: 760905 - RNA, 19 nt, Artificial Sequence
  Description of Artificial Sequence: Synthetic oligonucleotide
  Antisense strand to SEQ ID NO: 760904
auaagaccuauuaucucua

SEQ ID NO: 760906 - RNA, 19 nt, Artificial Sequence
  Description of Artificial Sequence: Synthetic oligonucleotide
  Sense strand starting at position 3541 of SEQ ID NO: 587023
ucuuauugcugucuauauu

SEQ ID NO: 760907 - RNA, 19 nt, Artificial Sequence
  Description of Artificial Sequence: Synthetic oligonucleotide
  Antisense strand to SEQ ID NO: 760906
aauauagacagcaauaaga

SEQ ID NO: 760908 - RNA, 19 nt, Artificial Sequence
  Description of Artificial Sequence: Synthetic oligonucleotide
  Sense strand starting at position 3549 of SEQ ID NO: 587023
cugucuauauuguuaguau

SEQ ID NO: 760909 - RNA, 19 nt, Artificial Sequence
  Description of Artificial Sequence: Synthetic oligonucleotide
  Antisense strand to SEQ ID NO: 760908
auacuaacaauauagacag

SEQ ID NO: 760910 - RNA, 19 nt, Artificial Sequence
  Description of Artificial Sequence: Synthetic oligonucleotide
  Sense strand starting at position 3552 of SEQ ID NO: 587023
ucuauauuguuaguaugca

SEQ ID NO: 760911 - RNA, 19 nt, Artificial Sequence
  Description of Artificial Sequence: Synthetic oligonucleotide
  Antisense strand to SEQ ID NO: 760910
ugcauacuaacaauauaga

SEQ ID NO: 760912 - RNA, 19 nt, Artificial Sequence
  Description of Artificial Sequence: Synthetic oligonucleotide
  Sense strand starting at position 3596 of SEQ ID NO: 587023
gcaggauaacagugaauac

SEQ ID NO: 760913 - RNA, 19 nt, Artificial Sequence
  Description of Artificial Sequence: Synthetic oligonucleotide
  Antisense strand to SEQ ID NO: 760912
guauucacuguuauccugc

SEQ ID NO: 760914 - RNA, 19 nt, Artificial Sequence
  Description of Artificial Sequence: Synthetic oligonucleotide
  Sense strand starting at position 3614 of SEQ ID NO: 587023
cuuauacagugcucacuau

SEQ ID NO: 760915 - RNA, 19 nt, Artificial Sequence
  Description of Artificial Sequence: Synthetic oligonucleotide
  Antisense strand to SEQ ID NO: 760914
auagugagcacuguauaag

SEQ ID NO: 760916 - RNA, 19 nt, Artificial Sequence
  Description of Artificial Sequence: Synthetic oligonucleotide
  Sense strand starting at position 3632 of SEQ ID NO: 587023
ugugccagccuuuauauau

SEQ ID NO: 760917 - RNA, 19 nt, Artificial Sequence
  Description of Artificial Sequence: Synthetic oligonucleotide
  Antisense strand to SEQ ID NO: 760916
auauauaaaggcuggcaca

SEQ ID NO: 760918 - RNA, 19 nt, Artificial Sequence
  Description of Artificial Sequence: Synthetic oligonucleotide
  Sense strand starting at position 3639 of SEQ ID NO: 587023
gccuuuauauauguugauu

SEQ ID NO: 760919 - RNA, 19 nt, Artificial Sequence
  Description of Artificial Sequence: Synthetic oligonucleotide
  Antisense strand to SEQ ID NO: 760918
aaucaacauauauaaaggc

SEQ ID NO: 760920 - RNA, 19 nt, Artificial Sequence
  Description of Artificial Sequence: Synthetic oligonucleotide
  Sense strand starting at position 174 of SEQ ID NO: 587024
gacagagcucuuuauuaug

SEQ ID NO: 760921 - RNA, 19 nt, Artificial Sequence
  Description of Artificial Sequence: Synthetic oligonucleotide
  Antisense strand to SEQ ID NO: 760920
cauaauaaagagcucuguc

SEQ ID NO: 760922 - RNA, 19 nt, Artificial Sequence
  Description of Artificial Sequence: Synthetic oligonucleotide
  Sense strand starting at position 199 of SEQ ID NO: 587024
gauguauuccaggagccca

SEQ ID NO: 760923 - RNA, 19 nt, Artificial Sequence
  Description of Artificial Sequence: Synthetic oligonucleotide
  Antisense strand to SEQ ID NO: 760922
ugggcuccuggaauacauc

SEQ ID NO: 760924 - RNA, 19 nt, Artificial Sequence
  Description of Artificial Sequence: Synthetic oligonucleotide
  Sense strand starting at position 256 of SEQ ID NO: 587024
aguuguaaggcuuagagau

SEQ ID NO: 760925 - RNA, 19 nt, Artificial Sequence
  Description of Artificial Sequence: Synthetic oligonucleotide
  Antisense strand to SEQ ID NO: 760924
aucucuaagccuuacaacu

SEQ ID NO: 760926 - RNA, 19 nt, Artificial Sequence
  Description of Artificial Sequence: Synthetic oligonucleotide
  Sense strand starting at position 271 of SEQ ID NO: 587024
agauauuggugcucaguaa

SEQ ID NO: 760927 - RNA, 19 nt, Artificial Sequence
  Description of Artificial Sequence: Synthetic oligonucleotide
  Antisense strand to SEQ ID NO: 760926
uuacugagcaccaauaucu

SEQ ID NO: 760928 - RNA, 19 nt, Artificial Sequence
  Description of Artificial Sequence: Synthetic oligonucleotide
  Sense strand starting at position 272 of SEQ ID NO: 587024
gauauuggugcucaguaaa

SEQ ID NO: 760929 - RNA, 19 nt, Artificial Sequence
  Description of Artificial Sequence: Synthetic oligonucleotide
  Antisense strand to SEQ ID NO: 760928
uuuacugagcaccaauauc

SEQ ID NO: 760930 - RNA, 19 nt, Artificial Sequence
  Description of Artificial Sequence: Synthetic oligonucleotide
  Sense strand starting at position 275 of SEQ ID NO: 587024
auuggugcucaguaaauac

SEQ ID NO: 760931 - RNA, 19 nt, Artificial Sequence
  Description of Artificial Sequence: Synthetic oligonucleotide
  Antisense strand to SEQ ID NO: 760930
guauuuacugagcaccaau

SEQ ID NO: 760932 - RNA, 19 nt, Artificial Sequence
  Description of Artificial Sequence: Synthetic oligonucleotide
  Sense strand starting at position 282 of SEQ ID NO: 587024
cucaguaaauacuugguau

SEQ ID NO: 760933 - RNA, 19 nt, Artificial Sequence
  Description of Artificial Sequence: Synthetic oligonucleotide
  Antisense strand to SEQ ID NO: 760932
auaccaaguauuuacugag

SEQ ID NO: 760934 - RNA, 19 nt, Artificial Sequence
  Description of Artificial Sequence: Synthetic oligonucleotide
  Sense strand starting at position 285 of SEQ ID NO: 587024
aguaaauacuugguaucac

SEQ ID NO: 760935 - RNA, 19 nt, Artificial Sequence
  Description of Artificial Sequence: Synthetic oligonucleotide
  Antisense strand to SEQ ID NO: 760934
gugauaccaaguauuuacu

SEQ ID NO: 760936 - RNA, 19 nt, Artificial Sequence
  Description of Artificial Sequence: Synthetic oligonucleotide
  Sense strand starting at position 334 of SEQ ID NO: 587024
gagccuacacuguaguuaa

SEQ ID NO: 760937 - RNA, 19 nt, Artificial Sequence
  Description of Artificial Sequence: Synthetic oligonucleotide
  Antisense strand to SEQ ID NO: 760936
uuaacuacaguguaggcuc

SEQ ID NO: 760938 - RNA, 19 nt, Artificial Sequence
  Description of Artificial Sequence: Synthetic oligonucleotide
  Sense strand starting at position 861 of SEQ ID NO: 587024
gggagaaccgcuugaacca

SEQ ID NO: 760939 - RNA, 19 nt, Artificial Sequence
  Description of Artificial Sequence: Synthetic oligonucleotide
  Antisense strand to SEQ ID NO: 760938
ugguucaagcgguucuccc

SEQ ID NO: 760940 - RNA, 19 nt, Artificial Sequence
  Description of Artificial Sequence: Synthetic oligonucleotide
  Sense strand starting at position 1322 of SEQ ID NO: 587024
aucaauacugcuuaggagu

SEQ ID NO: 760941 - RNA, 19 nt, Artificial Sequence
  Description of Artificial Sequence: Synthetic oligonucleotide
  Antisense strand to SEQ ID NO: 760940
acuccuaagcaguauugau

SEQ ID NO: 760942 - RNA, 19 nt, Artificial Sequence
  Description of Artificial Sequence: Synthetic oligonucleotide
  Sense strand starting at position 1328 of SEQ ID NO: 587024
acugcuuaggaguaguaca

SEQ ID NO: 760943 - RNA, 19 nt, Artificial Sequence
  Description of Artificial Sequence: Synthetic oligonucleotide
  Antisense strand to SEQ ID NO: 760942
uguacuacuccuaagcagu

SEQ ID NO: 760944 - RNA, 19 nt, Artificial Sequence
  Description of Artificial Sequence: Synthetic oligonucleotide
  Sense strand starting at position 1654 of SEQ ID NO: 587024
ggguuaacuuaagcgagau

SEQ ID NO: 760945 - RNA, 19 nt, Artificial Sequence
  Description of Artificial Sequence: Synthetic oligonucleotide
  Antisense strand to SEQ ID NO: 760944
aucucgcuuaaguuaaccc

SEQ ID NO: 760946 - RNA, 19 nt, Artificial Sequence
  Description of Artificial Sequence: Synthetic oligonucleotide
  Sense strand starting at position 1655 of SEQ ID NO: 587024
gguuaacuuaagcgagauc

SEQ ID NO: 760947 - RNA, 19 nt, Artificial Sequence
  Description of Artificial Sequence: Synthetic oligonucleotide
  Antisense strand to SEQ ID NO: 760946
gaucucgcuuaaguuaacc

SEQ ID NO: 760948 - RNA, 19 nt, Artificial Sequence
  Description of Artificial Sequence: Synthetic oligonucleotide
  Sense strand starting at position 2021 of SEQ ID NO: 587024
gaauaaguccucuaggcuc

SEQ ID NO: 760949 - RNA, 19 nt, Artificial Sequence
  Description of Artificial Sequence: Synthetic oligonucleotide
  Antisense strand to SEQ ID NO: 760948
gagccuagaggacuuauuc

SEQ ID NO: 760950 - RNA, 19 nt, Artificial Sequence
  Description of Artificial Sequence: Synthetic oligonucleotide
  Sense strand starting at position 2034 of SEQ ID NO: 587024
aggcucgcagaaugaaauu

SEQ ID NO: 760951 - RNA, 19 nt, Artificial Sequence
  Description of Artificial Sequence: Synthetic oligonucleotide
  Antisense strand to SEQ ID NO: 760950
aauuucauucugcgagccu

SEQ ID NO: 760952 - RNA, 19 nt, Artificial Sequence
  Description of Artificial Sequence: Synthetic oligonucleotide
  Sense strand starting at position 2452 of SEQ ID NO: 587024
agcaaaugcgaagguauuu

SEQ ID NO: 760953 - RNA, 19 nt, Artificial Sequence
  Description of Artificial Sequence: Synthetic oligonucleotide
  Antisense strand to SEQ ID NO: 760952
aaauaccuucgcauuugcu

SEQ ID NO: 760954 - RNA, 19 nt, Artificial Sequence
  Description of Artificial Sequence: Synthetic oligonucleotide
  Sense strand starting at position 2523 of SEQ ID NO: 587024
cggacauccuagccuguau

SEQ ID NO: 760955 - RNA, 19 nt, Artificial Sequence
  Description of Artificial Sequence: Synthetic oligonucleotide
  Antisense strand to SEQ ID NO: 760954
auacaggcuaggauguccg

SEQ ID NO: 760956 - RNA, 19 nt, Artificial Sequence
  Description of Artificial Sequence: Synthetic oligonucleotide
  Sense strand starting at position 2585 of SEQ ID NO: 587024
gguggagcuuggcugaauu

SEQ ID NO: 760957 - RNA, 19 nt, Artificial Sequence
  Description of Artificial Sequence: Synthetic oligonucleotide
  Antisense strand to SEQ ID NO: 760956
aauucagccaagcuccacc

SEQ ID NO: 760958 - RNA, 19 nt, Artificial Sequence
  Description of Artificial Sequence: Synthetic oligonucleotide
  Sense strand starting at position 2769 of SEQ ID NO: 587024
gaguguuuaccucauguca

SEQ ID NO: 760959 - RNA, 19 nt, Artificial Sequence
  Description of Artificial Sequence: Synthetic oligonucleotide
  Antisense strand to SEQ ID NO: 760958
ugacaugagguaaacacuc

SEQ ID NO: 760960 - RNA, 19 nt, Artificial Sequence
  Description of Artificial Sequence: Synthetic oligonucleotide
  Sense strand starting at position 2906 of SEQ ID NO: 587024
ggguuugagggugaguaau

SEQ ID NO: 760961 - RNA, 19 nt, Artificial Sequence
  Description of Artificial Sequence: Synthetic oligonucleotide
  Antisense strand to SEQ ID NO: 760960
auuacucacccucaaaccc

SEQ ID NO: 760962 - RNA, 19 nt, Artificial Sequence
  Description of Artificial Sequence: Synthetic oligonucleotide
  Sense strand starting at position 2908 of SEQ ID NO: 587024
guuugagggugaguaauuc

SEQ ID NO: 760963 - RNA, 19 nt, Artificial Sequence
  Description of Artificial Sequence: Synthetic oligonucleotide
  Antisense strand to SEQ ID NO: 760962
gaauuacucacccucaaac

SEQ ID NO: 760964 - RNA, 19 nt, Artificial Sequence
  Description of Artificial Sequence: Synthetic oligonucleotide
  Sense strand starting at position 3000 of SEQ ID NO: 587024
cggugcguacuauauggau

SEQ ID NO: 760965 - RNA, 19 nt, Artificial Sequence
  Description of Artificial Sequence: Synthetic oligonucleotide
  Antisense strand to SEQ ID NO: 760964
auccauauaguacgcaccg

SEQ ID NO: 760966 - RNA, 19 nt, Artificial Sequence
  Description of Artificial Sequence: Synthetic oligonucleotide
  Sense strand starting at position 3002 of SEQ ID NO: 587024
gugcguacuauauggauuu

SEQ ID NO: 760967 - RNA, 19 nt, Artificial Sequence
  Description of Artificial Sequence: Synthetic oligonucleotide
  Antisense strand to SEQ ID NO: 760966
aaauccauauaguacgcac

SEQ ID NO: 760968 - RNA, 19 nt, Artificial Sequence
  Description of Artificial Sequence: Synthetic oligonucleotide
  Sense strand starting at position 3115 of SEQ ID NO: 587024
uuacguuucuucccuggau

SEQ ID NO: 760969 - RNA, 19 nt, Artificial Sequence
  Description of Artificial Sequence: Synthetic oligonucleotide
  Antisense strand to SEQ ID NO: 760968
auccagggaagaaacguaa

SEQ ID NO: 760970 - RNA, 19 nt, Artificial Sequence
  Description of Artificial Sequence: Synthetic oligonucleotide
  Sense strand starting at position 3116 of SEQ ID NO: 587024
uacguuucuucccuggauu

SEQ ID NO: 760971 - RNA, 19 nt, Artificial Sequence
  Description of Artificial Sequence: Synthetic oligonucleotide
  Antisense strand to SEQ ID NO: 760970
aauccagggaagaaacgua

SEQ ID NO: 760972 - RNA, 19 nt, Artificial Sequence
  Description of Artificial Sequence: Synthetic oligonucleotide
  Sense strand starting at position 3156 of SEQ ID NO: 587024
ccucaacuguauuccagua

SEQ ID NO: 760973 - RNA, 19 nt, Artificial Sequence
  Description of Artificial Sequence: Synthetic oligonucleotide
  Antisense strand to SEQ ID NO: 760972
uacuggaauacaguugagg

SEQ ID NO: 760974 - RNA, 19 nt, Artificial Sequence
  Description of Artificial Sequence: Synthetic oligonucleotide
  Sense strand starting at position 3161 of SEQ ID NO: 587024
acuguauuccaguaucaug

SEQ ID NO: 760975 - RNA, 19 nt, Artificial Sequence
  Description of Artificial Sequence: Synthetic oligonucleotide
  Antisense strand to SEQ ID NO: 760974
caugauacuggaauacagu

SEQ ID NO: 760976 - RNA, 19 nt, Artificial Sequence
  Description of Artificial Sequence: Synthetic oligonucleotide
  Sense strand starting at position 3452 of SEQ ID NO: 587024
uugucauccuugguuuauc

SEQ ID NO: 760977 - RNA, 19 nt, Artificial Sequence
  Description of Artificial Sequence: Synthetic oligonucleotide
  Antisense strand to SEQ ID NO: 760976
gauaaaccaaggaugacaa

SEQ ID NO: 760978 - RNA, 19 nt, Artificial Sequence
  Description of Artificial Sequence: Synthetic oligonucleotide
  Sense strand starting at position 3460 of SEQ ID NO: 587024
cuugguuuaucugucccaa

SEQ ID NO: 760979 - RNA, 19 nt, Artificial Sequence
  Description of Artificial Sequence: Synthetic oligonucleotide
  Antisense strand to SEQ ID NO: 760978
uugggacagauaaaccaag

SEQ ID NO: 760980 - RNA, 19 nt, Artificial Sequence
  Description of Artificial Sequence: Synthetic oligonucleotide
  Sense strand starting at position 3462 of SEQ ID NO: 587024
ugguuuaucugucccaacu

SEQ ID NO: 760981 - RNA, 19 nt, Artificial Sequence
  Description of Artificial Sequence: Synthetic oligonucleotide
  Antisense strand to SEQ ID NO: 760980
aguugggacagauaaacca

SEQ ID NO: 760982 - RNA, 19 nt, Artificial Sequence
  Description of Artificial Sequence: Synthetic oligonucleotide
  Sense strand starting at position 3484 of SEQ ID NO: 587024
cugacagagaccuguagau

SEQ ID NO: 760983 - RNA, 19 nt, Artificial Sequence
  Description of Artificial Sequence: Synthetic oligonucleotide
  Antisense strand to SEQ ID NO: 760982
aucuacaggucucugucag

SEQ ID NO: 760984 - RNA, 19 nt, Artificial Sequence
  Description of Artificial Sequence: Synthetic oligonucleotide
  Sense strand starting at position 3502 of SEQ ID NO: 587024
uagagauaauaggucuuau

SEQ ID NO: 760985 - RNA, 19 nt, Artificial Sequence
  Description of Artificial Sequence: Synthetic oligonucleotide
  Antisense strand to SEQ ID NO: 760984
auaagaccuauuaucucua

SEQ ID NO: 760986 - RNA, 19 nt, Artificial Sequence
  Description of Artificial Sequence: Synthetic oligonucleotide
  Sense strand starting at position 3515 of SEQ ID NO: 587024
ucuuauugcugucuauauu

SEQ ID NO: 760987 - RNA, 19 nt, Artificial Sequence
  Description of Artificial Sequence: Synthetic oligonucleotide
  Antisense strand to SEQ ID NO: 760986
aauauagacagcaauaaga

SEQ ID NO: 760988 - RNA, 19 nt, Artificial Sequence
  Description of Artificial Sequence: Synthetic oligonucleotide
  Sense strand starting at position 3523 of SEQ ID NO: 587024
cugucuauauuguuaguau

SEQ ID NO: 760989 - RNA, 19 nt, Artificial Sequence
  Description of Artificial Sequence: Synthetic oligonucleotide
  Antisense strand to SEQ ID NO: 760988
auacuaacaauauagacag

SEQ ID NO: 760990 - RNA, 19 nt, Artificial Sequence
  Description of Artificial Sequence: Synthetic oligonucleotide
  Sense strand starting at position 3526 of SEQ ID NO: 587024
ucuauauuguuaguaugca

SEQ ID NO: 760991 - RNA, 19 nt, Artificial Sequence
  Description of Artificial Sequence: Synthetic oligonucleotide
  Antisense strand to SEQ ID NO: 760990
ugcauacuaacaauauaga

SEQ ID NO: 760992 - RNA, 19 nt, Artificial Sequence
  Description of Artificial Sequence: Synthetic oligonucleotide
  Sense strand starting at position 3570 of SEQ ID NO: 587024
gcaggauaacagugaauac

SEQ ID NO: 760993 - RNA, 19 nt, Artificial Sequence
  Description of Artificial Sequence: Synthetic oligonucleotide
  Antisense strand to SEQ ID NO: 760992
guauucacuguuauccugc

SEQ ID NO: 760994 - RNA, 19 nt, Artificial Sequence
  Description of Artificial Sequence: Synthetic oligonucleotide
  Sense strand starting at position 3588 of SEQ ID NO: 587024
cuuauacagugcucacuau

SEQ ID NO: 760995 - RNA, 19 nt, Artificial Sequence
  Description of Artificial Sequence: Synthetic oligonucleotide
  Antisense strand to SEQ ID NO: 760994
auagugagcacuguauaag

SEQ ID NO: 760996 - RNA, 19 nt, Artificial Sequence
  Description of Artificial Sequence: Synthetic oligonucleotide
  Sense strand starting at position 3606 of SEQ ID NO: 587024
ugugccagccuuuauauau

SEQ ID NO: 760997 - RNA, 19 nt, Artificial Sequence
  Description of Artificial Sequence: Synthetic oligonucleotide
  Antisense strand to SEQ ID NO: 760996
auauauaaaggcuggcaca

SEQ ID NO: 760998 - RNA, 19 nt, Artificial Sequence
  Description of Artificial Sequence: Synthetic oligonucleotide
  Sense strand starting at position 3613 of SEQ ID NO: 587024
gccuuuauauauguugauu

SEQ ID NO: 760999 - RNA, 19 nt, Artificial Sequence
  Description of Artificial Sequence: Synthetic oligonucleotide
  Antisense strand to SEQ ID NO: 760998
aaucaacauauauaaaggc

SEQ ID NO: 761000 - RNA, 19 nt, Artificial Sequence
  Description of Artificial Sequence: Synthetic oligonucleotide
  Sense strand starting at position 34 of SEQ ID NO: 587025
gugaauaauugugucuuag

SEQ ID NO: 761001 - RNA, 19 nt, Artificial Sequence
  Description of Artificial Sequence: Synthetic oligonucleotide
  Antisense strand to SEQ ID NO: 761000
cuaagacacaauuauucac

SEQ ID NO: 761002 - RNA, 19 nt, Artificial Sequence
  Description of Artificial Sequence: Synthetic oligonucleotide
  Sense strand starting at position 36 of SEQ ID NO: 587025
gaauaauugugucuuagaa

SEQ ID NO: 761003 - RNA, 19 nt, Artificial Sequence
  Description of Artificial Sequence: Synthetic oligonucleotide
  Antisense strand to SEQ ID NO: 761002
uucuaagacacaauuauuc

SEQ ID NO: 761004 - RNA, 19 nt, Artificial Sequence
  Description of Artificial Sequence: Synthetic oligonucleotide
  Sense strand starting at position 96 of SEQ ID NO: 587025
gacgcuuugaccugagaug

SEQ ID NO: 761005 - RNA, 19 nt, Artificial Sequence
  Description of Artificial Sequence: Synthetic oligonucleotide
  Antisense strand to SEQ ID NO: 761004
caucucaggucaaagcguc

SEQ ID NO: 761006 - RNA, 19 nt, Artificial Sequence
  Description of Artificial Sequence: Synthetic oligonucleotide
  Sense strand starting at position 117 of SEQ ID NO: 587025
uuagaaagcuguucugaga

SEQ ID NO: 761007 - RNA, 19 nt, Artificial Sequence
  Description of Artificial Sequence: Synthetic oligonucleotide
  Antisense strand to SEQ ID NO: 761006
ucucagaacagcuuucuaa

SEQ ID NO: 761008 - RNA, 19 nt, Artificial Sequence
  Description of Artificial Sequence: Synthetic oligonucleotide
  Sense strand starting at position 126 of SEQ ID NO: 587025
uguucugagauagaugcuu

SEQ ID NO: 761009 - RNA, 19 nt, Artificial Sequence
  Description of Artificial Sequence: Synthetic oligonucleotide
  Antisense strand to SEQ ID NO: 761008
aagcaucuaucucagaaca

SEQ ID NO: 761010 - RNA, 19 nt, Artificial Sequence
  Description of Artificial Sequence: Synthetic oligonucleotide
  Sense strand starting at position 403 of SEQ ID NO: 587025
ucagguagaucauauuuga

SEQ ID NO: 761011 - RNA, 19 nt, Artificial Sequence
  Description of Artificial Sequence: Synthetic oligonucleotide
  Antisense strand to SEQ ID NO: 761010
ucaaauaugaucuaccuga

SEQ ID NO: 761012 - RNA, 19 nt, Artificial Sequence
  Description of Artificial Sequence: Synthetic oligonucleotide
  Sense strand starting at position 571 of SEQ ID NO: 587025
uaaagaccuuucgugggua

SEQ ID NO: 761013 - RNA, 19 nt, Artificial Sequence
  Description of Artificial Sequence: Synthetic oligonucleotide
  Antisense strand to SEQ ID NO: 761012
uacccacgaaaggucuuua

SEQ ID NO: 761014 - RNA, 19 nt, Artificial Sequence
  Description of Artificial Sequence: Synthetic oligonucleotide
  Sense strand starting at position 644 of SEQ ID NO: 587025
gcauucugguagguaauuu

SEQ ID NO: 761015 - RNA, 19 nt, Artificial Sequence
  Description of Artificial Sequence: Synthetic oligonucleotide
  Antisense strand to SEQ ID NO: 761014
aaauuaccuaccagaaugc

SEQ ID NO: 761016 - RNA, 19 nt, Artificial Sequence
  Description of Artificial Sequence: Synthetic oligonucleotide
  Sense strand starting at position 652 of SEQ ID NO: 587025
guagguaauuuccauauuu

SEQ ID NO: 761017 - RNA, 19 nt, Artificial Sequence
  Description of Artificial Sequence: Synthetic oligonucleotide
  Antisense strand to SEQ ID NO: 761016
aaauauggaaauuaccuac

SEQ ID NO: 761018 - RNA, 19 nt, Artificial Sequence
  Description of Artificial Sequence: Synthetic oligonucleotide
  Sense strand starting at position 720 of SEQ ID NO: 587025
aucuucuuuguacagauca

SEQ ID NO: 761019 - RNA, 19 nt, Artificial Sequence
  Description of Artificial Sequence: Synthetic oligonucleotide
  Antisense strand to SEQ ID NO: 761018
ugaucuguacaaagaagau

SEQ ID NO: 761020 - RNA, 19 nt, Artificial Sequence
  Description of Artificial Sequence: Synthetic oligonucleotide
  Sense strand starting at position 728 of SEQ ID NO: 587025
uguacagaucaacgugaaa

SEQ ID NO: 761021 - RNA, 19 nt, Artificial Sequence
  Description of Artificial Sequence: Synthetic oligonucleotide
  Antisense strand to SEQ ID NO: 761020
uuucacguugaucuguaca

SEQ ID NO: 761022 - RNA, 19 nt, Artificial Sequence
  Description of Artificial Sequence: Synthetic oligonucleotide
  Sense strand starting at position 832 of SEQ ID NO: 587025
ccagaucuauuauugugua

SEQ ID NO: 761023 - RNA, 19 nt, Artificial Sequence
  Description of Artificial Sequence: Synthetic oligonucleotide
  Antisense strand to SEQ ID NO: 761022
uacacaauaauagaucugg

SEQ ID NO: 761024 - RNA, 19 nt, Artificial Sequence
  Description of Artificial Sequence: Synthetic oligonucleotide
  Sense strand starting at position 837 of SEQ ID NO: 587025
ucuauuauuguguaucuag

SEQ ID NO: 761025 - RNA, 19 nt, Artificial Sequence
  Description of Artificial Sequence: Synthetic oligonucleotide
  Antisense strand to SEQ ID NO: 761024
cuagauacacaauaauaga

SEQ ID NO: 761026 - RNA, 19 nt, Artificial Sequence
  Description of Artificial Sequence: Synthetic oligonucleotide
  Sense strand starting at position 929 of SEQ ID NO: 587025
uaaugugaugagggucaau

SEQ ID NO: 761027 - RNA, 19 nt, Artificial Sequence
  Description of Artificial Sequence: Synthetic oligonucleotide
  Antisense strand to SEQ ID NO: 761026
auugacccucaucacauua

SEQ ID NO: 761028 - RNA, 19 nt, Artificial Sequence
  Description of Artificial Sequence: Synthetic oligonucleotide
  Sense strand starting at position 932 of SEQ ID NO: 587025
ugugaugagggucaauauc

SEQ ID NO: 761029 - RNA, 19 nt, Artificial Sequence
  Description of Artificial Sequence: Synthetic oligonucleotide
  Antisense strand to SEQ ID NO: 761028
gauauugacccucaucaca

SEQ ID NO: 761030 - RNA, 19 nt, Artificial Sequence
  Description of Artificial Sequence: Synthetic oligonucleotide
  Sense strand starting at position 1358 of SEQ ID NO: 587025
gacuaagaguaucuuuaug

SEQ ID NO: 761031 - RNA, 19 nt, Artificial Sequence
  Description of Artificial Sequence: Synthetic oligonucleotide
  Antisense strand to SEQ ID NO: 761030
cauaaagauacucuuaguc

SEQ ID NO: 761032 - RNA, 19 nt, Artificial Sequence
  Description of Artificial Sequence: Synthetic oligonucleotide
  Sense strand starting at position 1360 of SEQ ID NO: 587025
cuaagaguaucuuuaugag

SEQ ID NO: 761033 - RNA, 19 nt, Artificial Sequence
  Description of Artificial Sequence: Synthetic oligonucleotide
  Antisense strand to SEQ ID NO: 761032
cucauaaagauacucuuag

SEQ ID NO: 761034 - RNA, 19 nt, Artificial Sequence
  Description of Artificial Sequence: Synthetic oligonucleotide
  Sense strand starting at position 1465 of SEQ ID NO: 587025
auaaaugcagcuuauguua

SEQ ID NO: 761035 - RNA, 19 nt, Artificial Sequence
  Description of Artificial Sequence: Synthetic oligonucleotide
  Antisense strand to SEQ ID NO: 761034
uaacauaagcugcauuuau

SEQ ID NO: 761036 - RNA, 19 nt, Artificial Sequence
  Description of Artificial Sequence: Synthetic oligonucleotide
  Sense strand starting at position 1715 of SEQ ID NO: 587025
gccuccauccuuuagagau

SEQ ID NO: 761037 - RNA, 19 nt, Artificial Sequence
  Description of Artificial Sequence: Synthetic oligonucleotide
  Antisense strand to SEQ ID NO: 761036
aucucuaaaggauggaggc

SEQ ID NO: 761038 - RNA, 19 nt, Artificial Sequence
  Description of Artificial Sequence: Synthetic oligonucleotide
  Sense strand starting at position 1729 of SEQ ID NO: 587025
gagauuugcaguuggucua

SEQ ID NO: 761039 - RNA, 19 nt, Artificial Sequence
  Description of Artificial Sequence: Synthetic oligonucleotide
  Antisense strand to SEQ ID NO: 761038
uagaccaacugcaaaucuc

SEQ ID NO: 761040 - RNA, 19 nt, Artificial Sequence
  Description of Artificial Sequence: Synthetic oligonucleotide
  Sense strand starting at position 1743 of SEQ ID NO: 587025
gucuaagcuccuuaguaau

SEQ ID NO: 761041 - RNA, 19 nt, Artificial Sequence
  Description of Artificial Sequence: Synthetic oligonucleotide
  Antisense strand to SEQ ID NO: 761040
auuacuaaggagcuuagac

SEQ ID NO: 761042 - RNA, 19 nt, Artificial Sequence
  Description of Artificial Sequence: Synthetic oligonucleotide
  Sense strand starting at position 1815 of SEQ ID NO: 587025
accugaccucucuggagau

SEQ ID NO: 761043 - RNA, 19 nt, Artificial Sequence
  Description of Artificial Sequence: Synthetic oligonucleotide
  Antisense strand to SEQ ID NO: 761042
aucuccagagaggucaggu

SEQ ID NO: 761044 - RNA, 19 nt, Artificial Sequence
  Description of Artificial Sequence: Synthetic oligonucleotide
  Sense strand starting at position 2019 of SEQ ID NO: 587025
auaagaaucucccuuugug

SEQ ID NO: 761045 - RNA, 19 nt, Artificial Sequence
  Description of Artificial Sequence: Synthetic oligonucleotide
  Antisense strand to SEQ ID NO: 761044
cacaaagggagauucuuau

SEQ ID NO: 761046 - RNA, 19 nt, Artificial Sequence
  Description of Artificial Sequence: Synthetic oligonucleotide
  Sense strand starting at position 2139 of SEQ ID NO: 587025
acuggaucugaauguaauc

SEQ ID NO: 761047 - RNA, 19 nt, Artificial Sequence
  Description of Artificial Sequence: Synthetic oligonucleotide
  Antisense strand to SEQ ID NO: 761046
gauuacauucagauccagu

SEQ ID NO: 761048 - RNA, 19 nt, Artificial Sequence
  Description of Artificial Sequence: Synthetic oligonucleotide
  Sense strand starting at position 2304 of SEQ ID NO: 587025
guauacacuuugucuuaag

SEQ ID NO: 761049 - RNA, 19 nt, Artificial Sequence
  Description of Artificial Sequence: Synthetic oligonucleotide
  Antisense strand to SEQ ID NO: 761048
cuuaagacaaaguguauac

SEQ ID NO: 761050 - RNA, 19 nt, Artificial Sequence
  Description of Artificial Sequence: Synthetic oligonucleotide
  Sense strand starting at position 2358 of SEQ ID NO: 587025
gagagacaauaauaggauu

SEQ ID NO: 761051 - RNA, 19 nt, Artificial Sequence
  Description of Artificial Sequence: Synthetic oligonucleotide
  Antisense strand to SEQ ID NO: 761050
aauccuauuauugucucuc

SEQ ID NO: 761052 - RNA, 19 nt, Artificial Sequence
  Description of Artificial Sequence: Synthetic oligonucleotide
  Sense strand starting at position 2366 of SEQ ID NO: 587025
auaauaggauuccuauguu

SEQ ID NO: 761053 - RNA, 19 nt, Artificial Sequence
  Description of Artificial Sequence: Synthetic oligonucleotide
  Antisense strand to SEQ ID NO: 761052
aacauaggaauccuauuau

SEQ ID NO: 761054 - RNA, 19 nt, Artificial Sequence
  Description of Artificial Sequence: Synthetic oligonucleotide
  Sense strand starting at position 2369 of SEQ ID NO: 587025
auaggauuccuauguuuga

SEQ ID NO: 761055 - RNA, 19 nt, Artificial Sequence
  Description of Artificial Sequence: Synthetic oligonucleotide
  Antisense strand to SEQ ID NO: 761054
ucaaacauaggaauccuau

SEQ ID NO: 761056 - RNA, 19 nt, Artificial Sequence
  Description of Artificial Sequence: Synthetic oligonucleotide
  Sense strand starting at position 2372 of SEQ ID NO: 587025
ggauuccuauguuugacau

SEQ ID NO: 761057 - RNA, 19 nt, Artificial Sequence
  Description of Artificial Sequence: Synthetic oligonucleotide
  Antisense strand to SEQ ID NO: 761056
augucaaacauaggaaucc

SEQ ID NO: 761058 - RNA, 19 nt, Artificial Sequence
  Description of Artificial Sequence: Synthetic oligonucleotide
  Sense strand starting at position 2428 of SEQ ID NO: 587025
ugggauucauauguaugga

SEQ ID NO: 761059 - RNA, 19 nt, Artificial Sequence
  Description of Artificial Sequence: Synthetic oligonucleotide
  Antisense strand to SEQ ID NO: 761058
uccauacauaugaauccca

SEQ ID NO: 761060 - RNA, 19 nt, Artificial Sequence
  Description of Artificial Sequence: Synthetic oligonucleotide
  Sense strand starting at position 2820 of SEQ ID NO: 587025
uccaguucucacugauaga

SEQ ID NO: 761061 - RNA, 19 nt, Artificial Sequence
  Description of Artificial Sequence: Synthetic oligonucleotide
  Antisense strand to SEQ ID NO: 761060
ucuaucagugagaacugga

SEQ ID NO: 761062 - RNA, 19 nt, Artificial Sequence
  Description of Artificial Sequence: Synthetic oligonucleotide
  Sense strand starting at position 2837 of SEQ ID NO: 587025
gaauacugaugaguuguua

SEQ ID NO: 761063 - RNA, 19 nt, Artificial Sequence
  Description of Artificial Sequence: Synthetic oligonucleotide
  Antisense strand to SEQ ID NO: 761062
uaacaacucaucaguauuc

SEQ ID NO: 761064 - RNA, 19 nt, Artificial Sequence
  Description of Artificial Sequence: Synthetic oligonucleotide
  Sense strand starting at position 2841 of SEQ ID NO: 587025
acugaugaguuguuagaaa

SEQ ID NO: 761065 - RNA, 19 nt, Artificial Sequence
  Description of Artificial Sequence: Synthetic oligonucleotide
  Antisense strand to SEQ ID NO: 761064
uuucuaacaacucaucagu

SEQ ID NO: 761066 - RNA, 19 nt, Artificial Sequence
  Description of Artificial Sequence: Synthetic oligonucleotide
  Sense strand starting at position 2945 of SEQ ID NO: 587025
ugugcuacucaacagagaa

SEQ ID NO: 761067 - RNA, 19 nt, Artificial Sequence
  Description of Artificial Sequence: Synthetic oligonucleotide
  Antisense strand to SEQ ID NO: 761066
uucucuguugaguagcaca

SEQ ID NO: 761068 - RNA, 19 nt, Artificial Sequence
  Description of Artificial Sequence: Synthetic oligonucleotide
  Sense strand starting at position 3424 of SEQ ID NO: 587025
cuagucaugugacuuuaag

SEQ ID NO: 761069 - RNA, 19 nt, Artificial Sequence
  Description of Artificial Sequence: Synthetic oligonucleotide
  Antisense strand to SEQ ID NO: 761068
cuuaaagucacaugacuag

SEQ ID NO: 761070 - RNA, 19 nt, Artificial Sequence
  Description of Artificial Sequence: Synthetic oligonucleotide
  Sense strand starting at position 3493 of SEQ ID NO: 587025
cuaagaggaucuccugcau

SEQ ID NO: 761071 - RNA, 19 nt, Artificial Sequence
  Description of Artificial Sequence: Synthetic oligonucleotide
  Antisense strand to SEQ ID NO: 761070
augcaggagauccucuuag

SEQ ID NO: 761072 - RNA, 19 nt, Artificial Sequence
  Description of Artificial Sequence: Synthetic oligonucleotide
  Sense strand starting at position 3497 of SEQ ID NO: 587025
gaggaucuccugcauaggu

SEQ ID NO: 761073 - RNA, 19 nt, Artificial Sequence
  Description of Artificial Sequence: Synthetic oligonucleotide
  Antisense strand to SEQ ID NO: 761072
accuaugcaggagauccuc

SEQ ID NO: 761074 - RNA, 19 nt, Artificial Sequence
  Description of Artificial Sequence: Synthetic oligonucleotide
  Sense strand starting at position 3505 of SEQ ID NO: 587025
ccugcauaggucugaugag

SEQ ID NO: 761075 - RNA, 19 nt, Artificial Sequence
  Description of Artificial Sequence: Synthetic oligonucleotide
  Antisense strand to SEQ ID NO: 761074
cucaucagaccuaugcagg

SEQ ID NO: 761076 - RNA, 19 nt, Artificial Sequence
  Description of Artificial Sequence: Synthetic oligonucleotide
  Sense strand starting at position 3878 of SEQ ID NO: 587025
aauauuugcugagaggaug

SEQ ID NO: 761077 - RNA, 19 nt, Artificial Sequence
  Description of Artificial Sequence: Synthetic oligonucleotide
  Antisense strand to SEQ ID NO: 761076
cauccucucagcaaauauu

SEQ ID NO: 761078 - RNA, 19 nt, Artificial Sequence
  Description of Artificial Sequence: Synthetic oligonucleotide
  Sense strand starting at position 3951 of SEQ ID NO: 587025
ugacauggcugguugaacu

SEQ ID NO: 761079 - RNA, 19 nt, Artificial Sequence
  Description of Artificial Sequence: Synthetic oligonucleotide
  Antisense strand to SEQ ID NO: 761078
aguucaaccagccauguca

SEQ ID NO: 761080 - RNA, 19 nt, Artificial Sequence
  Description of Artificial Sequence: Synthetic oligonucleotide
  Sense strand starting at position 19 of SEQ ID NO: 587026
acgucuaaagaaugaguau

SEQ ID NO: 761081 - RNA, 19 nt, Artificial Sequence
  Description of Artificial Sequence: Synthetic oligonucleotide
  Antisense strand to SEQ ID NO: 761080
auacucauucuuuagacgu

SEQ ID NO: 761082 - RNA, 19 nt, Artificial Sequence
  Description of Artificial Sequence: Synthetic oligonucleotide
  Sense strand starting at position 22 of SEQ ID NO: 587026
ucuaaagaaugaguauguu

SEQ ID NO: 761083 - RNA, 19 nt, Artificial Sequence
  Description of Artificial Sequence: Synthetic oligonucleotide
  Antisense strand to SEQ ID NO: 761082
aacauacucauucuuuaga

SEQ ID NO: 761084 - RNA, 19 nt, Artificial Sequence
  Description of Artificial Sequence: Synthetic oligonucleotide
  Sense strand starting at position 185 of SEQ ID NO: 587026
cuggguuguauaugggaaa

SEQ ID NO: 761085 - RNA, 19 nt, Artificial Sequence
  Description of Artificial Sequence: Synthetic oligonucleotide
  Antisense strand to SEQ ID NO: 761084
uuucccauauacaacccag

SEQ ID NO: 761086 - RNA, 19 nt, Artificial Sequence
  Description of Artificial Sequence: Synthetic oligonucleotide
  Sense strand starting at position 309 of SEQ ID NO: 587026
aguuguauaguugacacaa

SEQ ID NO: 761087 - RNA, 19 nt, Artificial Sequence
  Description of Artificial Sequence: Synthetic oligonucleotide
  Antisense strand to SEQ ID NO: 761086
uugugucaacuauacaacu

SEQ ID NO: 761088 - RNA, 19 nt, Artificial Sequence
  Description of Artificial Sequence: Synthetic oligonucleotide
  Sense strand starting at position 629 of SEQ ID NO: 587026
gaaggcuuaguaugggaau

SEQ ID NO: 761089 - RNA, 19 nt, Artificial Sequence
  Description of Artificial Sequence: Synthetic oligonucleotide
  Antisense strand to SEQ ID NO: 761088
auucccauacuaagccuuc

SEQ ID NO: 761090 - RNA, 19 nt, Artificial Sequence
  Description of Artificial Sequence: Synthetic oligonucleotide
  Sense strand starting at position 631 of SEQ ID NO: 587026
aggcuuaguaugggaauca

SEQ ID NO: 761091 - RNA, 19 nt, Artificial Sequence
  Description of Artificial Sequence: Synthetic oligonucleotide
  Antisense strand to SEQ ID NO: 761090
ugauucccauacuaagccu

SEQ ID NO: 761092 - RNA, 19 nt, Artificial Sequence
  Description of Artificial Sequence: Synthetic oligonucleotide
  Sense strand starting at position 654 of SEQ ID NO: 587026
ggguacaagcaauauguuu

SEQ ID NO: 761093 - RNA, 19 nt, Artificial Sequence
  Description of Artificial Sequence: Synthetic oligonucleotide
  Antisense strand to SEQ ID NO: 761092
aaacauauugcuuguaccc

SEQ ID NO: 761094 - RNA, 19 nt, Artificial Sequence
  Description of Artificial Sequence: Synthetic oligonucleotide
  Sense strand starting at position 712 of SEQ ID NO: 587026
cagucaugggaagguuaaa

SEQ ID NO: 761095 - RNA, 19 nt, Artificial Sequence
  Description of Artificial Sequence: Synthetic oligonucleotide
  Antisense strand to SEQ ID NO: 761094
uuuaaccuucccaugacug

SEQ ID NO: 761096 - RNA, 19 nt, Artificial Sequence
  Description of Artificial Sequence: Synthetic oligonucleotide
  Sense strand starting at position 755 of SEQ ID NO: 587026
gacugucuuguguagaaua

SEQ ID NO: 761097 - RNA, 19 nt, Artificial Sequence
  Description of Artificial Sequence: Synthetic oligonucleotide
  Antisense strand to SEQ ID NO: 761096
uauucuacacaagacaguc

SEQ ID NO: 761098 - RNA, 19 nt, Artificial Sequence
  Description of Artificial Sequence: Synthetic oligonucleotide
  Sense strand starting at position 791 of SEQ ID NO: 587026
cagaguuggcaaggacuaa

SEQ ID NO: 761099 - RNA, 19 nt, Artificial Sequence
  Description of Artificial Sequence: Synthetic oligonucleotide
  Antisense strand to SEQ ID NO: 761098
uuaguccuugccaacucug

SEQ ID NO: 761100 - RNA, 19 nt, Artificial Sequence
  Description of Artificial Sequence: Synthetic oligonucleotide
  Sense strand starting at position 934 of SEQ ID NO: 587026
gggaaugaggguugcauua

SEQ ID NO: 761101 - RNA, 19 nt, Artificial Sequence
  Description of Artificial Sequence: Synthetic oligonucleotide
  Antisense strand to SEQ ID NO: 761100
uaaugcaacccucauuccc

SEQ ID NO: 761102 - RNA, 19 nt, Artificial Sequence
  Description of Artificial Sequence: Synthetic oligonucleotide
  Sense strand starting at position 1199 of SEQ ID NO: 587026
ugaugaguaugguuagaaa

SEQ ID NO: 761103 - RNA, 19 nt, Artificial Sequence
  Description of Artificial Sequence: Synthetic oligonucleotide
  Antisense strand to SEQ ID NO: 761102
uuucuaaccauacucauca

SEQ ID NO: 761104 - RNA, 19 nt, Artificial Sequence
  Description of Artificial Sequence: Synthetic oligonucleotide
  Sense strand starting at position 1263 of SEQ ID NO: 587026
agugaagcgcgcuuucaug

SEQ ID NO: 761105 - RNA, 19 nt, Artificial Sequence
  Description of Artificial Sequence: Synthetic oligonucleotide
  Antisense strand to SEQ ID NO: 761104
caugaaagcgcgcuucacu

SEQ ID NO: 761106 - RNA, 19 nt, Artificial Sequence
  Description of Artificial Sequence: Synthetic oligonucleotide
  Sense strand starting at position 1431 of SEQ ID NO: 587026
gucaguuacagugcuguuu

SEQ ID NO: 761107 - RNA, 19 nt, Artificial Sequence
  Description of Artificial Sequence: Synthetic oligonucleotide
  Antisense strand to SEQ ID NO: 761106
aaacagcacuguaacugac

SEQ ID NO: 761108 - RNA, 19 nt, Artificial Sequence
  Description of Artificial Sequence: Synthetic oligonucleotide
  Sense strand starting at position 1464 of SEQ ID NO: 587026
cauggugaguaacugaauu

SEQ ID NO: 761109 - RNA, 19 nt, Artificial Sequence
  Description of Artificial Sequence: Synthetic oligonucleotide
  Antisense strand to SEQ ID NO: 761108
aauucaguuacucaccaug

SEQ ID NO: 761110 - RNA, 19 nt, Artificial Sequence
  Description of Artificial Sequence: Synthetic oligonucleotide
  Sense strand starting at position 1487 of SEQ ID NO: 587026
uguaauucccaauagcuga

SEQ ID NO: 761111 - RNA, 19 nt, Artificial Sequence
  Description of Artificial Sequence: Synthetic oligonucleotide
  Antisense strand to SEQ ID NO: 761110
ucagcuauugggaauuaca

SEQ ID NO: 761112 - RNA, 19 nt, Artificial Sequence
  Description of Artificial Sequence: Synthetic oligonucleotide
  Sense strand starting at position 1595 of SEQ ID NO: 587026
ugugaugggugaaagaaga

SEQ ID NO: 761113 - RNA, 19 nt, Artificial Sequence
  Description of Artificial Sequence: Synthetic oligonucleotide
  Antisense strand to SEQ ID NO: 761112
ucuucuuucacccaucaca

SEQ ID NO: 761114 - RNA, 19 nt, Artificial Sequence
  Description of Artificial Sequence: Synthetic oligonucleotide
  Sense strand starting at position 1790 of SEQ ID NO: 587026
gaaucauguccacaggcau

SEQ ID NO: 761115 - RNA, 19 nt, Artificial Sequence
  Description of Artificial Sequence: Synthetic oligonucleotide
  Antisense strand to SEQ ID NO: 761114
augccuguggacaugauuc

SEQ ID NO: 761116 - RNA, 19 nt, Artificial Sequence
  Description of Artificial Sequence: Synthetic oligonucleotide
  Sense strand starting at position 1865 of SEQ ID NO: 587026
gcacaauaauugucaagga

SEQ ID NO: 761117 - RNA, 19 nt, Artificial Sequence
  Description of Artificial Sequence: Synthetic oligonucleotide
  Antisense strand to SEQ ID NO: 761116
uccuugacaauuauugugc

SEQ ID NO: 761118 - RNA, 19 nt, Artificial Sequence
  Description of Artificial Sequence: Synthetic oligonucleotide
  Sense strand starting at position 1916 of SEQ ID NO: 587026
ugaguuggauggguaucau

SEQ ID NO: 761119 - RNA, 19 nt, Artificial Sequence
  Description of Artificial Sequence: Synthetic oligonucleotide
  Antisense strand to SEQ ID NO: 761118
augauacccauccaacuca

SEQ ID NO: 761120 - RNA, 19 nt, Artificial Sequence
  Description of Artificial Sequence: Synthetic oligonucleotide
  Sense strand starting at position 1947 of SEQ ID NO: 587026
aagugucuuccuggacaaa

SEQ ID NO: 761121 - RNA, 19 nt, Artificial Sequence
  Description of Artificial Sequence: Synthetic oligonucleotide
  Antisense strand to SEQ ID NO: 761120
uuuguccaggaagacacuu

SEQ ID NO: 761122 - RNA, 19 nt, Artificial Sequence
  Description of Artificial Sequence: Synthetic oligonucleotide
  Sense strand starting at position 1948 of SEQ ID NO: 587026
agugucuuccuggacaaag

SEQ ID NO: 761123 - RNA, 19 nt, Artificial Sequence
  Description of Artificial Sequence: Synthetic oligonucleotide
  Antisense strand to SEQ ID NO: 761122
cuuuguccaggaagacacu

SEQ ID NO: 761124 - RNA, 19 nt, Artificial Sequence
  Description of Artificial Sequence: Synthetic oligonucleotide
  Sense strand starting at position 1997 of SEQ ID NO: 587026
gagaauggguuccugauuc

SEQ ID NO: 761125 - RNA, 19 nt, Artificial Sequence
  Description of Artificial Sequence: Synthetic oligonucleotide
  Antisense strand to SEQ ID NO: 761124
gaaucaggaacccauucuc

SEQ ID NO: 761126 - RNA, 19 nt, Artificial Sequence
  Description of Artificial Sequence: Synthetic oligonucleotide
  Sense strand starting at position 2947 of SEQ ID NO: 587026
augagagguuauucuaauu

SEQ ID NO: 761127 - RNA, 19 nt, Artificial Sequence
  Description of Artificial Sequence: Synthetic oligonucleotide
  Antisense strand to SEQ ID NO: 761126
aauuagaauaaccucucau

SEQ ID NO: 761128 - RNA, 19 nt, Artificial Sequence
  Description of Artificial Sequence: Synthetic oligonucleotide
  Sense strand starting at position 2986 of SEQ ID NO: 587026
aagugaaagucauugaccu

SEQ ID NO: 761129 - RNA, 19 nt, Artificial Sequence
  Description of Artificial Sequence: Synthetic oligonucleotide
  Antisense strand to SEQ ID NO: 761128
aggucaaugacuuucacuu

SEQ ID NO: 761130 - RNA, 19 nt, Artificial Sequence
  Description of Artificial Sequence: Synthetic oligonucleotide
  Sense strand starting at position 2990 of SEQ ID NO: 587026
gaaagucauugaccuuaug

SEQ ID NO: 761131 - RNA, 19 nt, Artificial Sequence
  Description of Artificial Sequence: Synthetic oligonucleotide
  Antisense strand to SEQ ID NO: 761130
cauaaggucaaugacuuuc

SEQ ID NO: 761132 - RNA, 19 nt, Artificial Sequence
  Description of Artificial Sequence: Synthetic oligonucleotide
  Sense strand starting at position 2993 of SEQ ID NO: 587026
agucauugaccuuauguau

SEQ ID NO: 761133 - RNA, 19 nt, Artificial Sequence
  Description of Artificial Sequence: Synthetic oligonucleotide
  Antisense strand to SEQ ID NO: 761132
auacauaaggucaaugacu

SEQ ID NO: 761134 - RNA, 19 nt, Artificial Sequence
  Description of Artificial Sequence: Synthetic oligonucleotide
  Sense strand starting at position 2999 of SEQ ID NO: 587026
ugaccuuauguaugauaaa

SEQ ID NO: 761135 - RNA, 19 nt, Artificial Sequence
  Description of Artificial Sequence: Synthetic oligonucleotide
  Antisense strand to SEQ ID NO: 761134
uuuaucauacauaagguca

SEQ ID NO: 761136 - RNA, 19 nt, Artificial Sequence
  Description of Artificial Sequence: Synthetic oligonucleotide
  Sense strand starting at position 3266 of SEQ ID NO: 587026
aggugaauugguugagaug

SEQ ID NO: 761137 - RNA, 19 nt, Artificial Sequence
  Description of Artificial Sequence: Synthetic oligonucleotide
  Antisense strand to SEQ ID NO: 761136
caucucaaccaauucaccu

SEQ ID NO: 761138 - RNA, 19 nt, Artificial Sequence
  Description of Artificial Sequence: Synthetic oligonucleotide
  Sense strand starting at position 3267 of SEQ ID NO: 587026
ggugaauugguugagaugu

SEQ ID NO: 761139 - RNA, 19 nt, Artificial Sequence
  Description of Artificial Sequence: Synthetic oligonucleotide
  Antisense strand to SEQ ID NO: 761138
acaucucaaccaauucacc

SEQ ID NO: 761140 - RNA, 19 nt, Artificial Sequence
  Description of Artificial Sequence: Synthetic oligonucleotide
  Sense strand starting at position 3302 of SEQ ID NO: 587026
ggagaaagaugagauauga

SEQ ID NO: 761141 - RNA, 19 nt, Artificial Sequence
  Description of Artificial Sequence: Synthetic oligonucleotide
  Antisense strand to SEQ ID NO: 761140
ucauaucucaucuuucucc

SEQ ID NO: 761142 - RNA, 19 nt, Artificial Sequence
  Description of Artificial Sequence: Synthetic oligonucleotide
  Sense strand starting at position 3311 of SEQ ID NO: 587026
ugagauaugaaauguuggu

SEQ ID NO: 761143 - RNA, 19 nt, Artificial Sequence
  Description of Artificial Sequence: Synthetic oligonucleotide
  Antisense strand to SEQ ID NO: 761142
accaacauuucauaucuca

SEQ ID NO: 761144 - RNA, 19 nt, Artificial Sequence
  Description of Artificial Sequence: Synthetic oligonucleotide
  Sense strand starting at position 3320 of SEQ ID NO: 587026
aaauguugguaugugaaac

SEQ ID NO: 761145 - RNA, 19 nt, Artificial Sequence
  Description of Artificial Sequence: Synthetic oligonucleotide
  Antisense strand to SEQ ID NO: 761144
guuucacauaccaacauuu

SEQ ID NO: 761146 - RNA, 19 nt, Artificial Sequence
  Description of Artificial Sequence: Synthetic oligonucleotide
  Sense strand starting at position 3326 of SEQ ID NO: 587026
ugguaugugaaacaugcaa

SEQ ID NO: 761147 - RNA, 19 nt, Artificial Sequence
  Description of Artificial Sequence: Synthetic oligonucleotide
  Antisense strand to SEQ ID NO: 761146
uugcauguuucacauacca

SEQ ID NO: 761148 - RNA, 19 nt, Artificial Sequence
  Description of Artificial Sequence: Synthetic oligonucleotide
  Sense strand starting at position 3504 of SEQ ID NO: 587026
ggauuccagccacaauagu

SEQ ID NO: 761149 - RNA, 19 nt, Artificial Sequence
  Description of Artificial Sequence: Synthetic oligonucleotide
  Antisense strand to SEQ ID NO: 761148
acuauuguggcuggaaucc

SEQ ID NO: 761150 - RNA, 19 nt, Artificial Sequence
  Description of Artificial Sequence: Synthetic oligonucleotide
  Sense strand starting at position 3531 of SEQ ID NO: 587026
gaaugaguuucuguccaaa

SEQ ID NO: 761151 - RNA, 19 nt, Artificial Sequence
  Description of Artificial Sequence: Synthetic oligonucleotide
  Antisense strand to SEQ ID NO: 761150
uuuggacagaaacucauuc

SEQ ID NO: 761152 - RNA, 19 nt, Artificial Sequence
  Description of Artificial Sequence: Synthetic oligonucleotide
  Sense strand starting at position 3624 of SEQ ID NO: 587026
gugauaguggcugauuaaa

SEQ ID NO: 761153 - RNA, 19 nt, Artificial Sequence
  Description of Artificial Sequence: Synthetic oligonucleotide
  Antisense strand to SEQ ID NO: 761152
uuuaaucagccacuaucac

SEQ ID NO: 761154 - RNA, 19 nt, Artificial Sequence
  Description of Artificial Sequence: Synthetic oligonucleotide
  Sense strand starting at position 3626 of SEQ ID NO: 587026
gauaguggcugauuaaaua

SEQ ID NO: 761155 - RNA, 19 nt, Artificial Sequence
  Description of Artificial Sequence: Synthetic oligonucleotide
  Antisense strand to SEQ ID NO: 761154
uauuuaaucagccacuauc

SEQ ID NO: 761156 - RNA, 19 nt, Artificial Sequence
  Description of Artificial Sequence: Synthetic oligonucleotide
  Sense strand starting at position 3661 of SEQ ID NO: 587026
ugggaaaguuugaagguga

SEQ ID NO: 761157 - RNA, 19 nt, Artificial Sequence
  Description of Artificial Sequence: Synthetic oligonucleotide
  Antisense strand to SEQ ID NO: 761156
ucaccuucaaacuuuccca

SEQ ID NO: 761158 - RNA, 19 nt, Artificial Sequence
  Description of Artificial Sequence: Synthetic oligonucleotide
  Sense strand starting at position 3872 of SEQ ID NO: 587026
auuguugucccuuaacuag

SEQ ID NO: 761159 - RNA, 19 nt, Artificial Sequence
  Description of Artificial Sequence: Synthetic oligonucleotide
  Antisense strand to SEQ ID NO: 761158
cuaguuaagggacaacaau

SEQ ID NO: 761160 - RNA, 19 nt, Artificial Sequence
  Description of Artificial Sequence: Synthetic oligonucleotide
  Sense strand starting at position 47 of SEQ ID NO: 587027
ucaggauauuaagcaauau

SEQ ID NO: 761161 - RNA, 19 nt, Artificial Sequence
  Description of Artificial Sequence: Synthetic oligonucleotide
  Antisense strand to SEQ ID NO: 761160
auauugcuuaauauccuga

SEQ ID NO: 761162 - RNA, 19 nt, Artificial Sequence
  Description of Artificial Sequence: Synthetic oligonucleotide
  Sense strand starting at position 358 of SEQ ID NO: 587027
aucauuacacaauguguuu

SEQ ID NO: 761163 - RNA, 19 nt, Artificial Sequence
  Description of Artificial Sequence: Synthetic oligonucleotide
  Antisense strand to SEQ ID NO: 761162
aaacacauuguguaaugau

SEQ ID NO: 761164 - RNA, 19 nt, Artificial Sequence
  Description of Artificial Sequence: Synthetic oligonucleotide
  Sense strand starting at position 365 of SEQ ID NO: 587027
cacaauguguuugugggaa

SEQ ID NO: 761165 - RNA, 19 nt, Artificial Sequence
  Description of Artificial Sequence: Synthetic oligonucleotide
  Antisense strand to SEQ ID NO: 761164
uucccacaaacacauugug

SEQ ID NO: 761166 - RNA, 19 nt, Artificial Sequence
  Description of Artificial Sequence: Synthetic oligonucleotide
  Sense strand starting at position 419 of SEQ ID NO: 587027
ccaauauuagcgcaauaau

SEQ ID NO: 761167 - RNA, 19 nt, Artificial Sequence
  Description of Artificial Sequence: Synthetic oligonucleotide
  Antisense strand to SEQ ID NO: 761166
auuauugcgcuaauauugg

SEQ ID NO: 761168 - RNA, 19 nt, Artificial Sequence
  Description of Artificial Sequence: Synthetic oligonucleotide
  Sense strand starting at position 443 of SEQ ID NO: 587027
ucacuuacugaguacugua

SEQ ID NO: 761169 - RNA, 19 nt, Artificial Sequence
  Description of Artificial Sequence: Synthetic oligonucleotide
  Antisense strand to SEQ ID NO: 761168
uacaguacucaguaaguga

SEQ ID NO: 761170 - RNA, 19 nt, Artificial Sequence
  Description of Artificial Sequence: Synthetic oligonucleotide
  Sense strand starting at position 450 of SEQ ID NO: 587027
cugaguacuguacacaaca

SEQ ID NO: 761171 - RNA, 19 nt, Artificial Sequence
  Description of Artificial Sequence: Synthetic oligonucleotide
  Antisense strand to SEQ ID NO: 761170
uguuguguacaguacucag

SEQ ID NO: 761172 - RNA, 19 nt, Artificial Sequence
  Description of Artificial Sequence: Synthetic oligonucleotide
  Sense strand starting at position 508 of SEQ ID NO: 587027
ucagacagguaauuaaagu

SEQ ID NO: 761173 - RNA, 19 nt, Artificial Sequence
  Description of Artificial Sequence: Synthetic oligonucleotide
  Antisense strand to SEQ ID NO: 761172
acuuuaauuaccugucuga

SEQ ID NO: 761174 - RNA, 19 nt, Artificial Sequence
  Description of Artificial Sequence: Synthetic oligonucleotide
  Sense strand starting at position 609 of SEQ ID NO: 587027
ucaagucuacuauguaauu

SEQ ID NO: 761175 - RNA, 19 nt, Artificial Sequence
  Description of Artificial Sequence: Synthetic oligonucleotide
  Antisense strand to SEQ ID NO: 761174
aauuacauaguagacuuga

SEQ ID NO: 761176 - RNA, 19 nt, Artificial Sequence
  Description of Artificial Sequence: Synthetic oligonucleotide
  Sense strand starting at position 677 of SEQ ID NO: 587027
acucauuaugucgagcuga

SEQ ID NO: 761177 - RNA, 19 nt, Artificial Sequence
  Description of Artificial Sequence: Synthetic oligonucleotide
  Antisense strand to SEQ ID NO: 761176
ucagcucgacauaaugagu

SEQ ID NO: 761178 - RNA, 19 nt, Artificial Sequence
  Description of Artificial Sequence: Synthetic oligonucleotide
  Sense strand starting at position 682 of SEQ ID NO: 587027
uuaugucgagcugaugauu

SEQ ID NO: 761179 - RNA, 19 nt, Artificial Sequence
  Description of Artificial Sequence: Synthetic oligonucleotide
  Antisense strand to SEQ ID NO: 761178
aaucaucagcucgacauaa

SEQ ID NO: 761180 - RNA, 19 nt, Artificial Sequence
  Description of Artificial Sequence: Synthetic oligonucleotide
  Sense strand starting at position 685 of SEQ ID NO: 587027
ugucgagcugaugauuauu

SEQ ID NO: 761181 - RNA, 19 nt, Artificial Sequence
  Description of Artificial Sequence: Synthetic oligonucleotide
  Antisense strand to SEQ ID NO: 761180
aauaaucaucagcucgaca

SEQ ID NO: 761182 - RNA, 19 nt, Artificial Sequence
  Description of Artificial Sequence: Synthetic oligonucleotide
  Sense strand starting at position 687 of SEQ ID NO: 587027
ucgagcugaugauuauuaa

SEQ ID NO: 761183 - RNA, 19 nt, Artificial Sequence
  Description of Artificial Sequence: Synthetic oligonucleotide
  Antisense strand to SEQ ID NO: 761182
uuaauaaucaucagcucga

SEQ ID NO: 761184 - RNA, 19 nt, Artificial Sequence
  Description of Artificial Sequence: Synthetic oligonucleotide
  Sense strand starting at position 688 of SEQ ID NO: 587027
cgagcugaugauuauuaaa

SEQ ID NO: 761185 - RNA, 19 nt, Artificial Sequence
  Description of Artificial Sequence: Synthetic oligonucleotide
  Antisense strand to SEQ ID NO: 761184
uuuaauaaucaucagcucg

SEQ ID NO: 761186 - RNA, 19 nt, Artificial Sequence
  Description of Artificial Sequence: Synthetic oligonucleotide
  Sense strand starting at position 892 of SEQ ID NO: 587027
uguuauggaacugguaaca

SEQ ID NO: 761187 - RNA, 19 nt, Artificial Sequence
  Description of Artificial Sequence: Synthetic oligonucleotide
  Antisense strand to SEQ ID NO: 761186
uguuaccaguuccauaaca

SEQ ID NO: 761188 - RNA, 19 nt, Artificial Sequence
  Description of Artificial Sequence: Synthetic oligonucleotide
  Sense strand starting at position 1986 of SEQ ID NO: 587027
agaaucuccucacugaugu

SEQ ID NO: 761189 - RNA, 19 nt, Artificial Sequence
  Description of Artificial Sequence: Synthetic oligonucleotide
  Antisense strand to SEQ ID NO: 761188
acaucagugaggagauucu

SEQ ID NO: 761190 - RNA, 19 nt, Artificial Sequence
  Description of Artificial Sequence: Synthetic oligonucleotide
  Sense strand starting at position 2068 of SEQ ID NO: 587027
cccaauuuagucugucgua

SEQ ID NO: 761191 - RNA, 19 nt, Artificial Sequence
  Description of Artificial Sequence: Synthetic oligonucleotide
  Antisense strand to SEQ ID NO: 761190
uacgacagacuaaauuggg

SEQ ID NO: 761192 - RNA, 19 nt, Artificial Sequence
  Description of Artificial Sequence: Synthetic oligonucleotide
  Sense strand starting at position 2143 of SEQ ID NO: 587027
gaugauauggauugucaua

SEQ ID NO: 761193 - RNA, 19 nt, Artificial Sequence
  Description of Artificial Sequence: Synthetic oligonucleotide
  Antisense strand to SEQ ID NO: 761192
uaugacaauccauaucauc

SEQ ID NO: 761194 - RNA, 19 nt, Artificial Sequence
  Description of Artificial Sequence: Synthetic oligonucleotide
  Sense strand starting at position 2145 of SEQ ID NO: 587027
ugauauggauugucauauu

SEQ ID NO: 761195 - RNA, 19 nt, Artificial Sequence
  Description of Artificial Sequence: Synthetic oligonucleotide
  Antisense strand to SEQ ID NO: 761194
aauaugacaauccauauca

SEQ ID NO: 761196 - RNA, 19 nt, Artificial Sequence
  Description of Artificial Sequence: Synthetic oligonucleotide
  Sense strand starting at position 2343 of SEQ ID NO: 587027
ggcucagaauuacucagaa

SEQ ID NO: 761197 - RNA, 19 nt, Artificial Sequence
  Description of Artificial Sequence: Synthetic oligonucleotide
  Antisense strand to SEQ ID NO: 761196
uucugaguaauucugagcc

SEQ ID NO: 761198 - RNA, 19 nt, Artificial Sequence
  Description of Artificial Sequence: Synthetic oligonucleotide
  Sense strand starting at position 2476 of SEQ ID NO: 587027
agugccauugaucauggau

SEQ ID NO: 761199 - RNA, 19 nt, Artificial Sequence
  Description of Artificial Sequence: Synthetic oligonucleotide
  Antisense strand to SEQ ID NO: 761198
auccaugaucaauggcacu

SEQ ID NO: 761200 - RNA, 19 nt, Artificial Sequence
  Description of Artificial Sequence: Synthetic oligonucleotide
  Sense strand starting at position 2479 of SEQ ID NO: 587027
gccauugaucauggauuag

SEQ ID NO: 761201 - RNA, 19 nt, Artificial Sequence
  Description of Artificial Sequence: Synthetic oligonucleotide
  Antisense strand to SEQ ID NO: 761200
cuaauccaugaucaauggc

SEQ ID NO: 761202 - RNA, 19 nt, Artificial Sequence
  Description of Artificial Sequence: Synthetic oligonucleotide
  Sense strand starting at position 2525 of SEQ ID NO: 587027
ggcuuacaugcagagagau

SEQ ID NO: 761203 - RNA, 19 nt, Artificial Sequence
  Description of Artificial Sequence: Synthetic oligonucleotide
  Antisense strand to SEQ ID NO: 761202
aucucucugcauguaagcc

SEQ ID NO: 761204 - RNA, 19 nt, Artificial Sequence
  Description of Artificial Sequence: Synthetic oligonucleotide
  Sense strand starting at position 2537 of SEQ ID NO: 587027
gagagauggcuguaagcua

SEQ ID NO: 761205 - RNA, 19 nt, Artificial Sequence
  Description of Artificial Sequence: Synthetic oligonucleotide
  Antisense strand to SEQ ID NO: 761204
uagcuuacagccaucucuc

SEQ ID NO: 761206 - RNA, 19 nt, Artificial Sequence
  Description of Artificial Sequence: Synthetic oligonucleotide
  Sense strand starting at position 2656 of SEQ ID NO: 587027
cuauaauacuguccaggga

SEQ ID NO: 761207 - RNA, 19 nt, Artificial Sequence
  Description of Artificial Sequence: Synthetic oligonucleotide
  Antisense strand to SEQ ID NO: 761206
ucccuggacaguauuauag

SEQ ID NO: 761208 - RNA, 19 nt, Artificial Sequence
  Description of Artificial Sequence: Synthetic oligonucleotide
  Sense strand starting at position 2720 of SEQ ID NO: 587027
uuaacaagcggcuauuaau

SEQ ID NO: 761209 - RNA, 19 nt, Artificial Sequence
  Description of Artificial Sequence: Synthetic oligonucleotide
  Antisense strand to SEQ ID NO: 761208
auuaauagccgcuuguuaa

SEQ ID NO: 761210 - RNA, 19 nt, Artificial Sequence
  Description of Artificial Sequence: Synthetic oligonucleotide
  Sense strand starting at position 2727 of SEQ ID NO: 587027
gcggcuauuaauuaaggau

SEQ ID NO: 761211 - RNA, 19 nt, Artificial Sequence
  Description of Artificial Sequence: Synthetic oligonucleotide
  Antisense strand to SEQ ID NO: 761210
auccuuaauuaauagccgc

SEQ ID NO: 761212 - RNA, 19 nt, Artificial Sequence
  Description of Artificial Sequence: Synthetic oligonucleotide
  Sense strand starting at position 2752 of SEQ ID NO: 587027
ucaggacuauaugcagaau

SEQ ID NO: 761213 - RNA, 19 nt, Artificial Sequence
  Description of Artificial Sequence: Synthetic oligonucleotide
  Antisense strand to SEQ ID NO: 761212
auucugcauauaguccuga

SEQ ID NO: 761214 - RNA, 19 nt, Artificial Sequence
  Description of Artificial Sequence: Synthetic oligonucleotide
  Sense strand starting at position 2774 of SEQ ID NO: 587027
gcaguacguaguuuguauu

SEQ ID NO: 761215 - RNA, 19 nt, Artificial Sequence
  Description of Artificial Sequence: Synthetic oligonucleotide
  Antisense strand to SEQ ID NO: 761214
aauacaaacuacguacugc

SEQ ID NO: 761216 - RNA, 19 nt, Artificial Sequence
  Description of Artificial Sequence: Synthetic oligonucleotide
  Sense strand starting at position 2956 of SEQ ID NO: 587027
agagaaagauaagaguaaa

SEQ ID NO: 761217 - RNA, 19 nt, Artificial Sequence
  Description of Artificial Sequence: Synthetic oligonucleotide
  Antisense strand to SEQ ID NO: 761216
uuuacucuuaucuuucucu

SEQ ID NO: 761218 - RNA, 19 nt, Artificial Sequence
  Description of Artificial Sequence: Synthetic oligonucleotide
  Sense strand starting at position 2967 of SEQ ID NO: 587027
agaguaaagaguugcucau

SEQ ID NO: 761219 - RNA, 19 nt, Artificial Sequence
  Description of Artificial Sequence: Synthetic oligonucleotide
  Antisense strand to SEQ ID NO: 761218
augagcaacucuuuacucu

SEQ ID NO: 761220 - RNA, 19 nt, Artificial Sequence
  Description of Artificial Sequence: Synthetic oligonucleotide
  Sense strand starting at position 2971 of SEQ ID NO: 587027
uaaagaguugcucauguau

SEQ ID NO: 761221 - RNA, 19 nt, Artificial Sequence
  Description of Artificial Sequence: Synthetic oligonucleotide
  Antisense strand to SEQ ID NO: 761220
auacaugagcaacucuuua

SEQ ID NO: 761222 - RNA, 19 nt, Artificial Sequence
  Description of Artificial Sequence: Synthetic oligonucleotide
  Sense strand starting at position 3304 of SEQ ID NO: 587027
uauagaaaguucccugaga

SEQ ID NO: 761223 - RNA, 19 nt, Artificial Sequence
  Description of Artificial Sequence: Synthetic oligonucleotide
  Antisense strand to SEQ ID NO: 761222
ucucagggaacuuucuaua

SEQ ID NO: 761224 - RNA, 19 nt, Artificial Sequence
  Description of Artificial Sequence: Synthetic oligonucleotide
  Sense strand starting at position 3306 of SEQ ID NO: 587027
uagaaaguucccugagagc

SEQ ID NO: 761225 - RNA, 19 nt, Artificial Sequence
  Description of Artificial Sequence: Synthetic oligonucleotide
  Antisense strand to SEQ ID NO: 761224
gcucucagggaacuuucua

SEQ ID NO: 761226 - RNA, 19 nt, Artificial Sequence
  Description of Artificial Sequence: Synthetic oligonucleotide
  Sense strand starting at position 3439 of SEQ ID NO: 587027
acaauagauacuggguagu

SEQ ID NO: 761227 - RNA, 19 nt, Artificial Sequence
  Description of Artificial Sequence: Synthetic oligonucleotide
  Antisense strand to SEQ ID NO: 761226
acuacccaguaucuauugu

SEQ ID NO: 761228 - RNA, 19 nt, Artificial Sequence
  Description of Artificial Sequence: Synthetic oligonucleotide
  Sense strand starting at position 3450 of SEQ ID NO: 587027
uggguagugcauuaaucau

SEQ ID NO: 761229 - RNA, 19 nt, Artificial Sequence
  Description of Artificial Sequence: Synthetic oligonucleotide
  Antisense strand to SEQ ID NO: 761228
augauuaaugcacuaccca

SEQ ID NO: 761230 - RNA, 19 nt, Artificial Sequence
  Description of Artificial Sequence: Synthetic oligonucleotide
  Sense strand starting at position 3542 of SEQ ID NO: 587027
uagcuaauuccuggaguua

SEQ ID NO: 761231 - RNA, 19 nt, Artificial Sequence
  Description of Artificial Sequence: Synthetic oligonucleotide
  Antisense strand to SEQ ID NO: 761230
uaacuccaggaauuagcua

SEQ ID NO: 761232 - RNA, 19 nt, Artificial Sequence
  Description of Artificial Sequence: Synthetic oligonucleotide
  Sense strand starting at position 3543 of SEQ ID NO: 587027
agcuaauuccuggaguuag

SEQ ID NO: 761233 - RNA, 19 nt, Artificial Sequence
  Description of Artificial Sequence: Synthetic oligonucleotide
  Antisense strand to SEQ ID NO: 761232
cuaacuccaggaauuagcu

SEQ ID NO: 761234 - RNA, 19 nt, Artificial Sequence
  Description of Artificial Sequence: Synthetic oligonucleotide
  Sense strand starting at position 3560 of SEQ ID NO: 587027
agccaacuugccugagaaa

SEQ ID NO: 761235 - RNA, 19 nt, Artificial Sequence
  Description of Artificial Sequence: Synthetic oligonucleotide
  Antisense strand to SEQ ID NO: 761234
uuucucaggcaaguuggcu

SEQ ID NO: 761236 - RNA, 19 nt, Artificial Sequence
  Description of Artificial Sequence: Synthetic oligonucleotide
  Sense strand starting at position 3636 of SEQ ID NO: 587027
uccuuugcuuagguagaaa

SEQ ID NO: 761237 - RNA, 19 nt, Artificial Sequence
  Description of Artificial Sequence: Synthetic oligonucleotide
  Antisense strand to SEQ ID NO: 761236
uuucuaccuaagcaaagga

SEQ ID NO: 761238 - RNA, 19 nt, Artificial Sequence
  Description of Artificial Sequence: Synthetic oligonucleotide
  Sense strand starting at position 3970 of SEQ ID NO: 587027
gugugacaugauuaaagca

SEQ ID NO: 761239 - RNA, 19 nt, Artificial Sequence
  Description of Artificial Sequence: Synthetic oligonucleotide
  Antisense strand to SEQ ID NO: 761238
ugcuuuaaucaugucacac

SEQ ID NO: 761240 - RNA, 19 nt, Artificial Sequence
  Description of Artificial Sequence: Synthetic oligonucleotide
  Sense strand starting at position 462 of SEQ ID NO: 587028
aggauuauauccuuauugu

SEQ ID NO: 761241 - RNA, 19 nt, Artificial Sequence
  Description of Artificial Sequence: Synthetic oligonucleotide
  Antisense strand to SEQ ID NO: 761240
acaauaaggauauaauccu

SEQ ID NO: 761242 - RNA, 19 nt, Artificial Sequence
  Description of Artificial Sequence: Synthetic oligonucleotide
  Sense strand starting at position 463 of SEQ ID NO: 587028
ggauuauauccuuauugua

SEQ ID NO: 761243 - RNA, 19 nt, Artificial Sequence
  Description of Artificial Sequence: Synthetic oligonucleotide
  Antisense strand to SEQ ID NO: 761242
uacaauaaggauauaaucc

SEQ ID NO: 761244 - RNA, 19 nt, Artificial Sequence
  Description of Artificial Sequence: Synthetic oligonucleotide
  Sense strand starting at position 517 of SEQ ID NO: 587028
uuccgagaaagagguuuaa

SEQ ID NO: 761245 - RNA, 19 nt, Artificial Sequence
  Description of Artificial Sequence: Synthetic oligonucleotide
  Antisense strand to SEQ ID NO: 761244
uuaaaccucuuucucggaa

SEQ ID NO: 761246 - RNA, 19 nt, Artificial Sequence
  Description of Artificial Sequence: Synthetic oligonucleotide
  Sense strand starting at position 528 of SEQ ID NO: 587028
agguuuaacagucauguua

SEQ ID NO: 761247 - RNA, 19 nt, Artificial Sequence
  Description of Artificial Sequence: Synthetic oligonucleotide
  Antisense strand to SEQ ID NO: 761246
uaacaugacuguuaaaccu

SEQ ID NO: 761248 - RNA, 19 nt, Artificial Sequence
  Description of Artificial Sequence: Synthetic oligonucleotide
  Sense strand starting at position 557 of SEQ ID NO: 587028
auauuaucuugggauuuag

SEQ ID NO: 761249 - RNA, 19 nt, Artificial Sequence
  Description of Artificial Sequence: Synthetic oligonucleotide
  Antisense strand to SEQ ID NO: 761248
cuaaaucccaagauaauau

SEQ ID NO: 761250 - RNA, 19 nt, Artificial Sequence
  Description of Artificial Sequence: Synthetic oligonucleotide
  Sense strand starting at position 816 of SEQ ID NO: 587028
aggcuuugugaggaaucag

SEQ ID NO: 761251 - RNA, 19 nt, Artificial Sequence
  Description of Artificial Sequence: Synthetic oligonucleotide
  Antisense strand to SEQ ID NO: 761250
cugauuccucacaaagccu

SEQ ID NO: 761252 - RNA, 19 nt, Artificial Sequence
  Description of Artificial Sequence: Synthetic oligonucleotide
  Sense strand starting at position 826 of SEQ ID NO: 587028
aggaaucagaguuguauuc

SEQ ID NO: 761253 - RNA, 19 nt, Artificial Sequence
  Description of Artificial Sequence: Synthetic oligonucleotide
  Antisense strand to SEQ ID NO: 761252
gaauacaacucugauuccu

SEQ ID NO: 761254 - RNA, 19 nt, Artificial Sequence
  Description of Artificial Sequence: Synthetic oligonucleotide
  Sense strand starting at position 833 of SEQ ID NO: 587028
agaguuguauuccugaaga

SEQ ID NO: 761255 - RNA, 19 nt, Artificial Sequence
  Description of Artificial Sequence: Synthetic oligonucleotide
  Antisense strand to SEQ ID NO: 761254
ucuucaggaauacaacucu

SEQ ID NO: 761256 - RNA, 19 nt, Artificial Sequence
  Description of Artificial Sequence: Synthetic oligonucleotide
  Sense strand starting at position 835 of SEQ ID NO: 587028
aguuguauuccugaagaau

SEQ ID NO: 761257 - RNA, 19 nt, Artificial Sequence
  Description of Artificial Sequence: Synthetic oligonucleotide
  Antisense strand to SEQ ID NO: 761256
auucuucaggaauacaacu

SEQ ID NO: 761258 - RNA, 19 nt, Artificial Sequence
  Description of Artificial Sequence: Synthetic oligonucleotide
  Sense strand starting at position 882 of SEQ ID NO: 587028
cguauuaaugaagagcuca

SEQ ID NO: 761259 - RNA, 19 nt, Artificial Sequence
  Description of Artificial Sequence: Synthetic oligonucleotide
  Antisense strand to SEQ ID NO: 761258
ugagcucuucauuaauacg

SEQ ID NO: 761260 - RNA, 19 nt, Artificial Sequence
  Description of Artificial Sequence: Synthetic oligonucleotide
  Sense strand starting at position 1170 of SEQ ID NO: 587028
aagagacuugagggcuuua

SEQ ID NO: 761261 - RNA, 19 nt, Artificial Sequence
  Description of Artificial Sequence: Synthetic oligonucleotide
  Antisense strand to SEQ ID NO: 761260
uaaagcccucaagucucuu

SEQ ID NO: 761262 - RNA, 19 nt, Artificial Sequence
  Description of Artificial Sequence: Synthetic oligonucleotide
  Sense strand starting at position 1541 of SEQ ID NO: 587028
gagagaaacggaugagcuu

SEQ ID NO: 761263 - RNA, 19 nt, Artificial Sequence
  Description of Artificial Sequence: Synthetic oligonucleotide
  Antisense strand to SEQ ID NO: 761262
aagcucauccguuucucuc

SEQ ID NO: 761264 - RNA, 19 nt, Artificial Sequence
  Description of Artificial Sequence: Synthetic oligonucleotide
  Sense strand starting at position 1552 of SEQ ID NO: 587028
augagcuuggagcaguaaa

SEQ ID NO: 761265 - RNA, 19 nt, Artificial Sequence
  Description of Artificial Sequence: Synthetic oligonucleotide
  Antisense strand to SEQ ID NO: 761264
uuuacugcuccaagcucau

SEQ ID NO: 761266 - RNA, 19 nt, Artificial Sequence
  Description of Artificial Sequence: Synthetic oligonucleotide
  Sense strand starting at position 1616 of SEQ ID NO: 587028
ucauccauagcaugaugau

SEQ ID NO: 761267 - RNA, 19 nt, Artificial Sequence
  Description of Artificial Sequence: Synthetic oligonucleotide
  Antisense strand to SEQ ID NO: 761266
aucaucaugcuauggauga

SEQ ID NO: 761268 - RNA, 19 nt, Artificial Sequence
  Description of Artificial Sequence: Synthetic oligonucleotide
  Sense strand starting at position 1859 of SEQ ID NO: 587028
acagaaauguacuccugac

SEQ ID NO: 761269 - RNA, 19 nt, Artificial Sequence
  Description of Artificial Sequence: Synthetic oligonucleotide
  Antisense strand to SEQ ID NO: 761268
gucaggaguacauuucugu

SEQ ID NO: 761270 - RNA, 19 nt, Artificial Sequence
  Description of Artificial Sequence: Synthetic oligonucleotide
  Sense strand starting at position 1892 of SEQ ID NO: 587028
ugcggaugcgaguuagagu

SEQ ID NO: 761271 - RNA, 19 nt, Artificial Sequence
  Description of Artificial Sequence: Synthetic oligonucleotide
  Antisense strand to SEQ ID NO: 761270
acucuaacucgcauccgca

SEQ ID NO: 761272 - RNA, 19 nt, Artificial Sequence
  Description of Artificial Sequence: Synthetic oligonucleotide
  Sense strand starting at position 2084 of SEQ ID NO: 587028
aaguucuggcaggaaacuu

SEQ ID NO: 761273 - RNA, 19 nt, Artificial Sequence
  Description of Artificial Sequence: Synthetic oligonucleotide
  Antisense strand to SEQ ID NO: 761272
aaguuuccugccagaacuu

SEQ ID NO: 761274 - RNA, 19 nt, Artificial Sequence
  Description of Artificial Sequence: Synthetic oligonucleotide
  Sense strand starting at position 2119 of SEQ ID NO: 587028
ucuagaacaucucuuggau

SEQ ID NO: 761275 - RNA, 19 nt, Artificial Sequence
  Description of Artificial Sequence: Synthetic oligonucleotide
  Antisense strand to SEQ ID NO: 761274
auccaagagauguucuaga

SEQ ID NO: 761276 - RNA, 19 nt, Artificial Sequence
  Description of Artificial Sequence: Synthetic oligonucleotide
  Sense strand starting at position 2396 of SEQ ID NO: 587028
ugaucuaagguuugaaaua

SEQ ID NO: 761277 - RNA, 19 nt, Artificial Sequence
  Description of Artificial Sequence: Synthetic oligonucleotide
  Antisense strand to SEQ ID NO: 761276
uauuucaaaccuuagauca

SEQ ID NO: 761278 - RNA, 19 nt, Artificial Sequence
  Description of Artificial Sequence: Synthetic oligonucleotide
  Sense strand starting at position 2589 of SEQ ID NO: 587028
gugccuggcaaggagaaua

SEQ ID NO: 761279 - RNA, 19 nt, Artificial Sequence
  Description of Artificial Sequence: Synthetic oligonucleotide
  Antisense strand to SEQ ID NO: 761278
uauucuccuugccaggcac

SEQ ID NO: 761280 - RNA, 19 nt, Artificial Sequence
  Description of Artificial Sequence: Synthetic oligonucleotide
  Sense strand starting at position 2923 of SEQ ID NO: 587028
cccgauaaauccuuuaaga

SEQ ID NO: 761281 - RNA, 19 nt, Artificial Sequence
  Description of Artificial Sequence: Synthetic oligonucleotide
  Antisense strand to SEQ ID NO: 761280
ucuuaaaggauuuaucggg

SEQ ID NO: 761282 - RNA, 19 nt, Artificial Sequence
  Description of Artificial Sequence: Synthetic oligonucleotide
  Sense strand starting at position 2925 of SEQ ID NO: 587028
cgauaaauccuuuaagagu

SEQ ID NO: 761283 - RNA, 19 nt, Artificial Sequence
  Description of Artificial Sequence: Synthetic oligonucleotide
  Antisense strand to SEQ ID NO: 761282
acucuuaaaggauuuaucg

SEQ ID NO: 761284 - RNA, 19 nt, Artificial Sequence
  Description of Artificial Sequence: Synthetic oligonucleotide
  Sense strand starting at position 3029 of SEQ ID NO: 587028
uuaguagugacauaaguca

SEQ ID NO: 761285 - RNA, 19 nt, Artificial Sequence
  Description of Artificial Sequence: Synthetic oligonucleotide
  Antisense strand to SEQ ID NO: 761284
ugacuuaugucacuacuaa

SEQ ID NO: 761286 - RNA, 19 nt, Artificial Sequence
  Description of Artificial Sequence: Synthetic oligonucleotide
  Sense strand starting at position 3034 of SEQ ID NO: 587028
agugacauaagucagugau

SEQ ID NO: 761287 - RNA, 19 nt, Artificial Sequence
  Description of Artificial Sequence: Synthetic oligonucleotide
  Antisense strand to SEQ ID NO: 761286
aucacugacuuaugucacu

SEQ ID NO: 761288 - RNA, 19 nt, Artificial Sequence
  Description of Artificial Sequence: Synthetic oligonucleotide
  Sense strand starting at position 3036 of SEQ ID NO: 587028
ugacauaagucagugauua

SEQ ID NO: 761289 - RNA, 19 nt, Artificial Sequence
  Description of Artificial Sequence: Synthetic oligonucleotide
  Antisense strand to SEQ ID NO: 761288
uaaucacugacuuauguca

SEQ ID NO: 761290 - RNA, 19 nt, Artificial Sequence
  Description of Artificial Sequence: Synthetic oligonucleotide
  Sense strand starting at position 3037 of SEQ ID NO: 587028
gacauaagucagugauuac

SEQ ID NO: 761291 - RNA, 19 nt, Artificial Sequence
  Description of Artificial Sequence: Synthetic oligonucleotide
  Antisense strand to SEQ ID NO: 761290
guaaucacugacuuauguc

SEQ ID NO: 761292 - RNA, 19 nt, Artificial Sequence
  Description of Artificial Sequence: Synthetic oligonucleotide
  Sense strand starting at position 3040 of SEQ ID NO: 587028
auaagucagugauuacuaa

SEQ ID NO: 761293 - RNA, 19 nt, Artificial Sequence
  Description of Artificial Sequence: Synthetic oligonucleotide
  Antisense strand to SEQ ID NO: 761292
uuaguaaucacugacuuau

SEQ ID NO: 761294 - RNA, 19 nt, Artificial Sequence
  Description of Artificial Sequence: Synthetic oligonucleotide
  Sense strand starting at position 3129 of SEQ ID NO: 587028
ugauguagcaguuguauuu

SEQ ID NO: 761295 - RNA, 19 nt, Artificial Sequence
  Description of Artificial Sequence: Synthetic oligonucleotide
  Antisense strand to SEQ ID NO: 761294
aaauacaacugcuacauca

SEQ ID NO: 761296 - RNA, 19 nt, Artificial Sequence
  Description of Artificial Sequence: Synthetic oligonucleotide
  Sense strand starting at position 3274 of SEQ ID NO: 587028
cacuaaagguguuuagaaa

SEQ ID NO: 761297 - RNA, 19 nt, Artificial Sequence
  Description of Artificial Sequence: Synthetic oligonucleotide
  Antisense strand to SEQ ID NO: 761296
uuucuaaacaccuuuagug

SEQ ID NO: 761298 - RNA, 19 nt, Artificial Sequence
  Description of Artificial Sequence: Synthetic oligonucleotide
  Sense strand starting at position 3537 of SEQ ID NO: 587028
aguguuugggauuaucuaa

SEQ ID NO: 761299 - RNA, 19 nt, Artificial Sequence
  Description of Artificial Sequence: Synthetic oligonucleotide
  Antisense strand to SEQ ID NO: 761298
uuagauaaucccaaacacu

SEQ ID NO: 761300 - RNA, 19 nt, Artificial Sequence
  Description of Artificial Sequence: Synthetic oligonucleotide
  Sense strand starting at position 3544 of SEQ ID NO: 587028
gggauuaucuaaguaaucu

SEQ ID NO: 761301 - RNA, 19 nt, Artificial Sequence
  Description of Artificial Sequence: Synthetic oligonucleotide
  Antisense strand to SEQ ID NO: 761300
agauuacuuagauaauccc

SEQ ID NO: 761302 - RNA, 19 nt, Artificial Sequence
  Description of Artificial Sequence: Synthetic oligonucleotide
  Sense strand starting at position 3605 of SEQ ID NO: 587028
ugguuuacucaggaagcua

SEQ ID NO: 761303 - RNA, 19 nt, Artificial Sequence
  Description of Artificial Sequence: Synthetic oligonucleotide
  Antisense strand to SEQ ID NO: 761302
uagcuuccugaguaaacca

SEQ ID NO: 761304 - RNA, 19 nt, Artificial Sequence
  Description of Artificial Sequence: Synthetic oligonucleotide
  Sense strand starting at position 3676 of SEQ ID NO: 587028
agcuccuuauuuguuauua

SEQ ID NO: 761305 - RNA, 19 nt, Artificial Sequence
  Description of Artificial Sequence: Synthetic oligonucleotide
  Antisense strand to SEQ ID NO: 761304
uaauaacaaauaaggagcu

SEQ ID NO: 761306 - RNA, 19 nt, Artificial Sequence
  Description of Artificial Sequence: Synthetic oligonucleotide
  Sense strand starting at position 3677 of SEQ ID NO: 587028
gcuccuuauuuguuauuag

SEQ ID NO: 761307 - RNA, 19 nt, Artificial Sequence
  Description of Artificial Sequence: Synthetic oligonucleotide
  Antisense strand to SEQ ID NO: 761306
cuaauaacaaauaaggagc

SEQ ID NO: 761308 - RNA, 19 nt, Artificial Sequence
  Description of Artificial Sequence: Synthetic oligonucleotide
  Sense strand starting at position 3692 of SEQ ID NO: 587028
uuaguagugauauaaguca

SEQ ID NO: 761309 - RNA, 19 nt, Artificial Sequence
  Description of Artificial Sequence: Synthetic oligonucleotide
  Antisense strand to SEQ ID NO: 761308
ugacuuauaucacuacuaa

SEQ ID NO: 761310 - RNA, 19 nt, Artificial Sequence
  Description of Artificial Sequence: Synthetic oligonucleotide
  Sense strand starting at position 3700 of SEQ ID NO: 587028
gauauaagucagugacuac

SEQ ID NO: 761311 - RNA, 19 nt, Artificial Sequence
  Description of Artificial Sequence: Synthetic oligonucleotide
  Antisense strand to SEQ ID NO: 761310
guagucacugacuuauauc

SEQ ID NO: 761312 - RNA, 19 nt, Artificial Sequence
  Description of Artificial Sequence: Synthetic oligonucleotide
  Sense strand starting at position 3711 of SEQ ID NO: 587028
gugacuacaucuuuaucag

SEQ ID NO: 761313 - RNA, 19 nt, Artificial Sequence
  Description of Artificial Sequence: Synthetic oligonucleotide
  Antisense strand to SEQ ID NO: 761312
cugauaaagauguagucac

SEQ ID NO: 761314 - RNA, 19 nt, Artificial Sequence
  Description of Artificial Sequence: Synthetic oligonucleotide
  Sense strand starting at position 3842 of SEQ ID NO: 587028
ggaauuacauucuuuggau

SEQ ID NO: 761315 - RNA, 19 nt, Artificial Sequence
  Description of Artificial Sequence: Synthetic oligonucleotide
  Antisense strand to SEQ ID NO: 761314
auccaaagaauguaauucc

SEQ ID NO: 761316 - RNA, 19 nt, Artificial Sequence
  Description of Artificial Sequence: Synthetic oligonucleotide
  Sense strand starting at position 3879 of SEQ ID NO: 587028
cuuuguuagcuugacagaa

SEQ ID NO: 761317 - RNA, 19 nt, Artificial Sequence
  Description of Artificial Sequence: Synthetic oligonucleotide
  Antisense strand to SEQ ID NO: 761316
uucugucaagcuaacaaag

SEQ ID NO: 761318 - RNA, 19 nt, Artificial Sequence
  Description of Artificial Sequence: Synthetic oligonucleotide
  Sense strand starting at position 3949 of SEQ ID NO: 587028
agauguuuccaaugacuag

SEQ ID NO: 761319 - RNA, 19 nt, Artificial Sequence
  Description of Artificial Sequence: Synthetic oligonucleotide
  Antisense strand to SEQ ID NO: 761318
cuagucauuggaaacaucu

SEQ ID NO: 761320 - RNA, 19 nt, Artificial Sequence
  Description of Artificial Sequence: Synthetic oligonucleotide
  Sense strand starting at position 61 of SEQ ID NO: 587029
ucagaagcccucugugaau

SEQ ID NO: 761321 - RNA, 19 nt, Artificial Sequence
  Description of Artificial Sequence: Synthetic oligonucleotide
  Antisense strand to SEQ ID NO: 761320
auucacagagggcuucuga

SEQ ID NO: 761322 - RNA, 19 nt, Artificial Sequence
  Description of Artificial Sequence: Synthetic oligonucleotide
  Sense strand starting at position 63 of SEQ ID NO: 587029
agaagcccucugugaauua

SEQ ID NO: 761323 - RNA, 19 nt, Artificial Sequence
  Description of Artificial Sequence: Synthetic oligonucleotide
  Antisense strand to SEQ ID NO: 761322
uaauucacagagggcuucu

SEQ ID NO: 761324 - RNA, 19 nt, Artificial Sequence
  Description of Artificial Sequence: Synthetic oligonucleotide
  Sense strand starting at position 97 of SEQ ID NO: 587029
uccagaaacuuugcaugua

SEQ ID NO: 761325 - RNA, 19 nt, Artificial Sequence
  Description of Artificial Sequence: Synthetic oligonucleotide
  Antisense strand to SEQ ID NO: 761324
uacaugcaaaguuucugga

SEQ ID NO: 761326 - RNA, 19 nt, Artificial Sequence
  Description of Artificial Sequence: Synthetic oligonucleotide
  Sense strand starting at position 100 of SEQ ID NO: 587029
agaaacuuugcauguacau

SEQ ID NO: 761327 - RNA, 19 nt, Artificial Sequence
  Description of Artificial Sequence: Synthetic oligonucleotide
  Antisense strand to SEQ ID NO: 761326
auguacaugcaaaguuucu

SEQ ID NO: 761328 - RNA, 19 nt, Artificial Sequence
  Description of Artificial Sequence: Synthetic oligonucleotide
  Sense strand starting at position 439 of SEQ ID NO: 587029
uugguuauaucuuugaaag

SEQ ID NO: 761329 - RNA, 19 nt, Artificial Sequence
  Description of Artificial Sequence: Synthetic oligonucleotide
  Antisense strand to SEQ ID NO: 761328
cuuucaaagauauaaccaa

SEQ ID NO: 761330 - RNA, 19 nt, Artificial Sequence
  Description of Artificial Sequence: Synthetic oligonucleotide
  Sense strand starting at position 440 of SEQ ID NO: 587029
ugguuauaucuuugaaaga

SEQ ID NO: 761331 - RNA, 19 nt, Artificial Sequence
  Description of Artificial Sequence: Synthetic oligonucleotide
  Antisense strand to SEQ ID NO: 761330
ucuuucaaagauauaacca

SEQ ID NO: 761332 - RNA, 19 nt, Artificial Sequence
  Description of Artificial Sequence: Synthetic oligonucleotide
  Sense strand starting at position 608 of SEQ ID NO: 587029
agcagaaucaccuggagau

SEQ ID NO: 761333 - RNA, 19 nt, Artificial Sequence
  Description of Artificial Sequence: Synthetic oligonucleotide
  Antisense strand to SEQ ID NO: 761332
aucuccaggugauucugcu

SEQ ID NO: 761334 - RNA, 19 nt, Artificial Sequence
  Description of Artificial Sequence: Synthetic oligonucleotide
  Sense strand starting at position 609 of SEQ ID NO: 587029
gcagaaucaccuggagauc

SEQ ID NO: 761335 - RNA, 19 nt, Artificial Sequence
  Description of Artificial Sequence: Synthetic oligonucleotide
  Antisense strand to SEQ ID NO: 761334
gaucuccaggugauucugc

SEQ ID NO: 761336 - RNA, 19 nt, Artificial Sequence
  Description of Artificial Sequence: Synthetic oligonucleotide
  Sense strand starting at position 674 of SEQ ID NO: 587029
aucugagauuggguuugaa

SEQ ID NO: 761337 - RNA, 19 nt, Artificial Sequence
  Description of Artificial Sequence: Synthetic oligonucleotide
  Antisense strand to SEQ ID NO: 761336
uucaaacccaaucucagau

SEQ ID NO: 761338 - RNA, 19 nt, Artificial Sequence
  Description of Artificial Sequence: Synthetic oligonucleotide
  Sense strand starting at position 677 of SEQ ID NO: 587029
ugagauuggguuugaacau

SEQ ID NO: 761339 - RNA, 19 nt, Artificial Sequence
  Description of Artificial Sequence: Synthetic oligonucleotide
  Antisense strand to SEQ ID NO: 761338
auguucaaacccaaucuca

SEQ ID NO: 761340 - RNA, 19 nt, Artificial Sequence
  Description of Artificial Sequence: Synthetic oligonucleotide
  Sense strand starting at position 684 of SEQ ID NO: 587029
ggguuugaacauugguauu

SEQ ID NO: 761341 - RNA, 19 nt, Artificial Sequence
  Description of Artificial Sequence: Synthetic oligonucleotide
  Antisense strand to SEQ ID NO: 761340
aauaccaauguucaaaccc

SEQ ID NO: 761342 - RNA, 19 nt, Artificial Sequence
  Description of Artificial Sequence: Synthetic oligonucleotide
  Sense strand starting at position 810 of SEQ ID NO: 587029
cuaagauuguacccaugaa

SEQ ID NO: 761343 - RNA, 19 nt, Artificial Sequence
  Description of Artificial Sequence: Synthetic oligonucleotide
  Antisense strand to SEQ ID NO: 761342
uucauggguacaaucuuag

SEQ ID NO: 761344 - RNA, 19 nt, Artificial Sequence
  Description of Artificial Sequence: Synthetic oligonucleotide
  Sense strand starting at position 814 of SEQ ID NO: 587029
gauuguacccaugaagcaa

SEQ ID NO: 761345 - RNA, 19 nt, Artificial Sequence
  Description of Artificial Sequence: Synthetic oligonucleotide
  Antisense strand to SEQ ID NO: 761344
uugcuucauggguacaauc

SEQ ID NO: 761346 - RNA, 19 nt, Artificial Sequence
  Description of Artificial Sequence: Synthetic oligonucleotide
  Sense strand starting at position 2044 of SEQ ID NO: 587029
ggaggaagcaauugaugua

SEQ ID NO: 761347 - RNA, 19 nt, Artificial Sequence
  Description of Artificial Sequence: Synthetic oligonucleotide
  Antisense strand to SEQ ID NO: 761346
uacaucaauugcuuccucc

SEQ ID NO: 761348 - RNA, 19 nt, Artificial Sequence
  Description of Artificial Sequence: Synthetic oligonucleotide
  Sense strand starting at position 2284 of SEQ ID NO: 587029
uugguuaacugagucauca

SEQ ID NO: 761349 - RNA, 19 nt, Artificial Sequence
  Description of Artificial Sequence: Synthetic oligonucleotide
  Antisense strand to SEQ ID NO: 761348
ugaugacucaguuaaccaa

SEQ ID NO: 761350 - RNA, 19 nt, Artificial Sequence
  Description of Artificial Sequence: Synthetic oligonucleotide
  Sense strand starting at position 2534 of SEQ ID NO: 587029
acacaacuagagcgugaua

SEQ ID NO: 761351 - RNA, 19 nt, Artificial Sequence
  Description of Artificial Sequence: Synthetic oligonucleotide
  Antisense strand to SEQ ID NO: 761350
uaucacgcucuaguugugu

SEQ ID NO: 761352 - RNA, 19 nt, Artificial Sequence
  Description of Artificial Sequence: Synthetic oligonucleotide
  Sense strand starting at position 2536 of SEQ ID NO: 587029
acaacuagagcgugauaga

SEQ ID NO: 761353 - RNA, 19 nt, Artificial Sequence
  Description of Artificial Sequence: Synthetic oligonucleotide
  Antisense strand to SEQ ID NO: 761352
ucuaucacgcucuaguugu

SEQ ID NO: 761354 - RNA, 19 nt, Artificial Sequence
  Description of Artificial Sequence: Synthetic oligonucleotide
  Sense strand starting at position 2537 of SEQ ID NO: 587029
caacuagagcgugauagaa

SEQ ID NO: 761355 - RNA, 19 nt, Artificial Sequence
  Description of Artificial Sequence: Synthetic oligonucleotide
  Antisense strand to SEQ ID NO: 761354
uucuaucacgcucuaguug

SEQ ID NO: 761356 - RNA, 19 nt, Artificial Sequence
  Description of Artificial Sequence: Synthetic oligonucleotide
  Sense strand starting at position 2545 of SEQ ID NO: 587029
gcgugauagaacugggauu

SEQ ID NO: 761357 - RNA, 19 nt, Artificial Sequence
  Description of Artificial Sequence: Synthetic oligonucleotide
  Antisense strand to SEQ ID NO: 761356
aaucccaguucuaucacgc

SEQ ID NO: 761358 - RNA, 19 nt, Artificial Sequence
  Description of Artificial Sequence: Synthetic oligonucleotide
  Sense strand starting at position 2638 of SEQ ID NO: 587029
uugugugcccaagacuaaa

SEQ ID NO: 761359 - RNA, 19 nt, Artificial Sequence
  Description of Artificial Sequence: Synthetic oligonucleotide
  Antisense strand to SEQ ID NO: 761358
uuuagucuugggcacacaa

SEQ ID NO: 761360 - RNA, 19 nt, Artificial Sequence
  Description of Artificial Sequence: Synthetic oligonucleotide
  Sense strand starting at position 2650 of SEQ ID NO: 587029
gacuaaaugcaggguugau

SEQ ID NO: 761361 - RNA, 19 nt, Artificial Sequence
  Description of Artificial Sequence: Synthetic oligonucleotide
  Antisense strand to SEQ ID NO: 761360
aucaacccugcauuuaguc

SEQ ID NO: 761362 - RNA, 19 nt, Artificial Sequence
  Description of Artificial Sequence: Synthetic oligonucleotide
  Sense strand starting at position 2923 of SEQ ID NO: 587029
gcuagcgaaccugagaaua

SEQ ID NO: 761363 - RNA, 19 nt, Artificial Sequence
  Description of Artificial Sequence: Synthetic oligonucleotide
  Antisense strand to SEQ ID NO: 761362
uauucucagguucgcuagc

SEQ ID NO: 761364 - RNA, 19 nt, Artificial Sequence
  Description of Artificial Sequence: Synthetic oligonucleotide
  Sense strand starting at position 3265 of SEQ ID NO: 587029
uuagaugaguuguuacgaa

SEQ ID NO: 761365 - RNA, 19 nt, Artificial Sequence
  Description of Artificial Sequence: Synthetic oligonucleotide
  Antisense strand to SEQ ID NO: 761364
uucguaacaacucaucuaa

SEQ ID NO: 761366 - RNA, 19 nt, Artificial Sequence
  Description of Artificial Sequence: Synthetic oligonucleotide
  Sense strand starting at position 3331 of SEQ ID NO: 587029
uugaauacagcguaauaga

SEQ ID NO: 761367 - RNA, 19 nt, Artificial Sequence
  Description of Artificial Sequence: Synthetic oligonucleotide
  Antisense strand to SEQ ID NO: 761366
ucuauuacgcuguauucaa

SEQ ID NO: 761368 - RNA, 19 nt, Artificial Sequence
  Description of Artificial Sequence: Synthetic oligonucleotide
  Sense strand starting at position 3385 of SEQ ID NO: 587029
acaaguaggccuggaguau

SEQ ID NO: 761369 - RNA, 19 nt, Artificial Sequence
  Description of Artificial Sequence: Synthetic oligonucleotide
  Antisense strand to SEQ ID NO: 761368
auacuccaggccuacuugu

SEQ ID NO: 761370 - RNA, 19 nt, Artificial Sequence
  Description of Artificial Sequence: Synthetic oligonucleotide
  Sense strand starting at position 3525 of SEQ ID NO: 587029
ugcgucuuuccucauuuga

SEQ ID NO: 761371 - RNA, 19 nt, Artificial Sequence
  Description of Artificial Sequence: Synthetic oligonucleotide
  Antisense strand to SEQ ID NO: 761370
ucaaaugaggaaagacgca

SEQ ID NO: 761372 - RNA, 19 nt, Artificial Sequence
  Description of Artificial Sequence: Synthetic oligonucleotide
  Sense strand starting at position 3527 of SEQ ID NO: 587029
cgucuuuccucauuugauu

SEQ ID NO: 761373 - RNA, 19 nt, Artificial Sequence
  Description of Artificial Sequence: Synthetic oligonucleotide
  Antisense strand to SEQ ID NO: 761372
aaucaaaugaggaaagacg

SEQ ID NO: 761374 - RNA, 19 nt, Artificial Sequence
  Description of Artificial Sequence: Synthetic oligonucleotide
  Sense strand starting at position 3540 of SEQ ID NO: 587029
uugauuuguuuauccaugu

SEQ ID NO: 761375 - RNA, 19 nt, Artificial Sequence
  Description of Artificial Sequence: Synthetic oligonucleotide
  Antisense strand to SEQ ID NO: 761374
acauggauaaacaaaucaa

SEQ ID NO: 761376 - RNA, 19 nt, Artificial Sequence
  Description of Artificial Sequence: Synthetic oligonucleotide
  Sense strand starting at position 3609 of SEQ ID NO: 587029
agauacuugcuggguugau

SEQ ID NO: 761377 - RNA, 19 nt, Artificial Sequence
  Description of Artificial Sequence: Synthetic oligonucleotide
  Antisense strand to SEQ ID NO: 761376
aucaacccagcaaguaucu

SEQ ID NO: 761378 - RNA, 19 nt, Artificial Sequence
  Description of Artificial Sequence: Synthetic oligonucleotide
  Sense strand starting at position 3610 of SEQ ID NO: 587029
gauacuugcuggguugaua

SEQ ID NO: 761379 - RNA, 19 nt, Artificial Sequence
  Description of Artificial Sequence: Synthetic oligonucleotide
  Antisense strand to SEQ ID NO: 761378
uaucaacccagcaaguauc

SEQ ID NO: 761380 - RNA, 19 nt, Artificial Sequence
  Description of Artificial Sequence: Synthetic oligonucleotide
  Sense strand starting at position 3613 of SEQ ID NO: 587029
acuugcuggguugauauau

SEQ ID NO: 761381 - RNA, 19 nt, Artificial Sequence
  Description of Artificial Sequence: Synthetic oligonucleotide
  Antisense strand to SEQ ID NO: 761380
auauaucaacccagcaagu

SEQ ID NO: 761382 - RNA, 19 nt, Artificial Sequence
  Description of Artificial Sequence: Synthetic oligonucleotide
  Sense strand starting at position 3625 of SEQ ID NO: 587029
gauauauggccuuagugaa

SEQ ID NO: 761383 - RNA, 19 nt, Artificial Sequence
  Description of Artificial Sequence: Synthetic oligonucleotide
  Antisense strand to SEQ ID NO: 761382
uucacuaaggccauauauc

SEQ ID NO: 761384 - RNA, 19 nt, Artificial Sequence
  Description of Artificial Sequence: Synthetic oligonucleotide
  Sense strand starting at position 3655 of SEQ ID NO: 587029
cagagaagcucuuuaugag

SEQ ID NO: 761385 - RNA, 19 nt, Artificial Sequence
  Description of Artificial Sequence: Synthetic oligonucleotide
  Antisense strand to SEQ ID NO: 761384
cucauaaagagcuucucug

SEQ ID NO: 761386 - RNA, 19 nt, Artificial Sequence
  Description of Artificial Sequence: Synthetic oligonucleotide
  Sense strand starting at position 3725 of SEQ ID NO: 587029
agguccuaugccuaaauca

SEQ ID NO: 761387 - RNA, 19 nt, Artificial Sequence
  Description of Artificial Sequence: Synthetic oligonucleotide
  Antisense strand to SEQ ID NO: 761386
ugauuuaggcauaggaccu

SEQ ID NO: 761388 - RNA, 19 nt, Artificial Sequence
  Description of Artificial Sequence: Synthetic oligonucleotide
  Sense strand starting at position 3751 of SEQ ID NO: 587029
gagcauaaacagugagguu

SEQ ID NO: 761389 - RNA, 19 nt, Artificial Sequence
  Description of Artificial Sequence: Synthetic oligonucleotide
  Antisense strand to SEQ ID NO: 761388
aaccucacuguuuaugcuc

SEQ ID NO: 761390 - RNA, 19 nt, Artificial Sequence
  Description of Artificial Sequence: Synthetic oligonucleotide
  Sense strand starting at position 3760 of SEQ ID NO: 587029
cagugagguucagugagaa

SEQ ID NO: 761391 - RNA, 19 nt, Artificial Sequence
  Description of Artificial Sequence: Synthetic oligonucleotide
  Antisense strand to SEQ ID NO: 761390
uucucacugaaccucacug

SEQ ID NO: 761392 - RNA, 19 nt, Artificial Sequence
  Description of Artificial Sequence: Synthetic oligonucleotide
  Sense strand starting at position 3791 of SEQ ID NO: 587029
uagagaacaucuguguaag

SEQ ID NO: 761393 - RNA, 19 nt, Artificial Sequence
  Description of Artificial Sequence: Synthetic oligonucleotide
  Antisense strand to SEQ ID NO: 761392
cuuacacagauguucucua

SEQ ID NO: 761394 - RNA, 19 nt, Artificial Sequence
  Description of Artificial Sequence: Synthetic oligonucleotide
  Sense strand starting at position 3792 of SEQ ID NO: 587029
agagaacaucuguguaaga

SEQ ID NO: 761395 - RNA, 19 nt, Artificial Sequence
  Description of Artificial Sequence: Synthetic oligonucleotide
  Antisense strand to SEQ ID NO: 761394
ucuuacacagauguucucu

SEQ ID NO: 761396 - RNA, 19 nt, Artificial Sequence
  Description of Artificial Sequence: Synthetic oligonucleotide
  Sense strand starting at position 3793 of SEQ ID NO: 587029
gagaacaucuguguaagaa

SEQ ID NO: 761397 - RNA, 19 nt, Artificial Sequence
  Description of Artificial Sequence: Synthetic oligonucleotide
  Antisense strand to SEQ ID NO: 761396
uucuuacacagauguucuc

SEQ ID NO: 761398 - RNA, 19 nt, Artificial Sequence
  Description of Artificial Sequence: Synthetic oligonucleotide
  Sense strand starting at position 3979 of SEQ ID NO: 587029
cuugccacagcuuaugaaa

SEQ ID NO: 761399 - RNA, 19 nt, Artificial Sequence
  Description of Artificial Sequence: Synthetic oligonucleotide
  Antisense strand to SEQ ID NO: 761398
uuucauaagcuguggcaag

SEQ ID NO: 761400 - RNA, 19 nt, Artificial Sequence
  Description of Artificial Sequence: Synthetic oligonucleotide
  Sense strand starting at position 185 of SEQ ID NO: 587030
uaggguuucuugcuaggaa

SEQ ID NO: 761401 - RNA, 19 nt, Artificial Sequence
  Description of Artificial Sequence: Synthetic oligonucleotide
  Antisense strand to SEQ ID NO: 761400
uuccuagcaagaaacccua

SEQ ID NO: 761402 - RNA, 19 nt, Artificial Sequence
  Description of Artificial Sequence: Synthetic oligonucleotide
  Sense strand starting at position 188 of SEQ ID NO: 587030
gguuucuugcuaggaauag

SEQ ID NO: 761403 - RNA, 19 nt, Artificial Sequence
  Description of Artificial Sequence: Synthetic oligonucleotide
  Antisense strand to SEQ ID NO: 761402
cuauuccuagcaagaaacc

SEQ ID NO: 761404 - RNA, 19 nt, Artificial Sequence
  Description of Artificial Sequence: Synthetic oligonucleotide
  Sense strand starting at position 214 of SEQ ID NO: 587030
acuauuacccagcaagugu

SEQ ID NO: 761405 - RNA, 19 nt, Artificial Sequence
  Description of Artificial Sequence: Synthetic oligonucleotide
  Antisense strand to SEQ ID NO: 761404
acacuugcuggguaauagu

SEQ ID NO: 761406 - RNA, 19 nt, Artificial Sequence
  Description of Artificial Sequence: Synthetic oligonucleotide
  Sense strand starting at position 765 of SEQ ID NO: 587030
cccaauguguucucuaauu

SEQ ID NO: 761407 - RNA, 19 nt, Artificial Sequence
  Description of Artificial Sequence: Synthetic oligonucleotide
  Antisense strand to SEQ ID NO: 761406
aauuagagaacacauuggg

SEQ ID NO: 761408 - RNA, 19 nt, Artificial Sequence
  Description of Artificial Sequence: Synthetic oligonucleotide
  Sense strand starting at position 773 of SEQ ID NO: 587030
guucucuaauuuggaagaa

SEQ ID NO: 761409 - RNA, 19 nt, Artificial Sequence
  Description of Artificial Sequence: Synthetic oligonucleotide
  Antisense strand to SEQ ID NO: 761408
uucuuccaaauuagagaac

SEQ ID NO: 761410 - RNA, 19 nt, Artificial Sequence
  Description of Artificial Sequence: Synthetic oligonucleotide
  Sense strand starting at position 785 of SEQ ID NO: 587030
ggaagaauuucccauuaua

SEQ ID NO: 761411 - RNA, 19 nt, Artificial Sequence
  Description of Artificial Sequence: Synthetic oligonucleotide
  Antisense strand to SEQ ID NO: 761410
uauaaugggaaauucuucc

SEQ ID NO: 761412 - RNA, 19 nt, Artificial Sequence
  Description of Artificial Sequence: Synthetic oligonucleotide
  Sense strand starting at position 818 of SEQ ID NO: 587030
gaaacaaugugaugauuuc

SEQ ID NO: 761413 - RNA, 19 nt, Artificial Sequence
  Description of Artificial Sequence: Synthetic oligonucleotide
  Antisense strand to SEQ ID NO: 761412
gaaaucaucacauuguuuc

SEQ ID NO: 761414 - RNA, 19 nt, Artificial Sequence
  Description of Artificial Sequence: Synthetic oligonucleotide
  Sense strand starting at position 987 of SEQ ID NO: 587030
gaugucagaucagcaauca

SEQ ID NO: 761415 - RNA, 19 nt, Artificial Sequence
  Description of Artificial Sequence: Synthetic oligonucleotide
  Antisense strand to SEQ ID NO: 761414
ugauugcugaucugacauc

SEQ ID NO: 761416 - RNA, 19 nt, Artificial Sequence
  Description of Artificial Sequence: Synthetic oligonucleotide
  Sense strand starting at position 1068 of SEQ ID NO: 587030
cagguaaaucuagguauug

SEQ ID NO: 761417 - RNA, 19 nt, Artificial Sequence
  Description of Artificial Sequence: Synthetic oligonucleotide
  Antisense strand to SEQ ID NO: 761416
caauaccuagauuuaccug

SEQ ID NO: 761418 - RNA, 19 nt, Artificial Sequence
  Description of Artificial Sequence: Synthetic oligonucleotide
  Sense strand starting at position 1069 of SEQ ID NO: 587030
agguaaaucuagguauugu

SEQ ID NO: 761419 - RNA, 19 nt, Artificial Sequence
  Description of Artificial Sequence: Synthetic oligonucleotide
  Antisense strand to SEQ ID NO: 761418
acaauaccuagauuuaccu

SEQ ID NO: 761420 - RNA, 19 nt, Artificial Sequence
  Description of Artificial Sequence: Synthetic oligonucleotide
  Sense strand starting at position 1070 of SEQ ID NO: 587030
gguaaaucuagguauuguu

SEQ ID NO: 761421 - RNA, 19 nt, Artificial Sequence
  Description of Artificial Sequence: Synthetic oligonucleotide
  Antisense strand to SEQ ID NO: 761420
aacaauaccuagauuuacc

SEQ ID NO: 761422 - RNA, 19 nt, Artificial Sequence
  Description of Artificial Sequence: Synthetic oligonucleotide
  Sense strand starting at position 1077 of SEQ ID NO: 587030
cuagguauuguuuacugaa

SEQ ID NO: 761423 - RNA, 19 nt, Artificial Sequence
  Description of Artificial Sequence: Synthetic oligonucleotide
  Antisense strand to SEQ ID NO: 761422
uucaguaaacaauaccuag

SEQ ID NO: 761424 - RNA, 19 nt, Artificial Sequence
  Description of Artificial Sequence: Synthetic oligonucleotide
  Sense strand starting at position 1079 of SEQ ID NO: 587030
agguauuguuuacugaaau

SEQ ID NO: 761425 - RNA, 19 nt, Artificial Sequence
  Description of Artificial Sequence: Synthetic oligonucleotide
  Antisense strand to SEQ ID NO: 761424
auuucaguaaacaauaccu

SEQ ID NO: 761426 - RNA, 19 nt, Artificial Sequence
  Description of Artificial Sequence: Synthetic oligonucleotide
  Sense strand starting at position 2000 of SEQ ID NO: 587030
aucuuuacucauugaggau

SEQ ID NO: 761427 - RNA, 19 nt, Artificial Sequence
  Description of Artificial Sequence: Synthetic oligonucleotide
  Antisense strand to SEQ ID NO: 761426
auccucaaugaguaaagau

SEQ ID NO: 761428 - RNA, 19 nt, Artificial Sequence
  Description of Artificial Sequence: Synthetic oligonucleotide
  Sense strand starting at position 2263 of SEQ ID NO: 587030
ggaguccacuccuccaaga

SEQ ID NO: 761429 - RNA, 19 nt, Artificial Sequence
  Description of Artificial Sequence: Synthetic oligonucleotide
  Antisense strand to SEQ ID NO: 761428
ucuuggaggaguggacucc

SEQ ID NO: 761430 - RNA, 19 nt, Artificial Sequence
  Description of Artificial Sequence: Synthetic oligonucleotide
  Sense strand starting at position 2340 of SEQ ID NO: 587030
agagcuugaguccagcaau

SEQ ID NO: 761431 - RNA, 19 nt, Artificial Sequence
  Description of Artificial Sequence: Synthetic oligonucleotide
  Antisense strand to SEQ ID NO: 761430
auugcuggacucaagcucu

SEQ ID NO: 761432 - RNA, 19 nt, Artificial Sequence
  Description of Artificial Sequence: Synthetic oligonucleotide
  Sense strand starting at position 2526 of SEQ ID NO: 587030
accaauuggccaugccaau

SEQ ID NO: 761433 - RNA, 19 nt, Artificial Sequence
  Description of Artificial Sequence: Synthetic oligonucleotide
  Antisense strand to SEQ ID NO: 761432
auuggcauggccaauuggu

SEQ ID NO: 761434 - RNA, 19 nt, Artificial Sequence
  Description of Artificial Sequence: Synthetic oligonucleotide
  Sense strand starting at position 2773 of SEQ ID NO: 587030
uuauaaaucuggguuuaug

SEQ ID NO: 761435 - RNA, 19 nt, Artificial Sequence
  Description of Artificial Sequence: Synthetic oligonucleotide
  Antisense strand to SEQ ID NO: 761434
cauaaacccagauuuauaa

SEQ ID NO: 761436 - RNA, 19 nt, Artificial Sequence
  Description of Artificial Sequence: Synthetic oligonucleotide
  Sense strand starting at position 2781 of SEQ ID NO: 587030
cuggguuuauguuuagauc

SEQ ID NO: 761437 - RNA, 19 nt, Artificial Sequence
  Description of Artificial Sequence: Synthetic oligonucleotide
  Antisense strand to SEQ ID NO: 761436
gaucuaaacauaaacccag

SEQ ID NO: 761438 - RNA, 19 nt, Artificial Sequence
  Description of Artificial Sequence: Synthetic oligonucleotide
  Sense strand starting at position 2782 of SEQ ID NO: 587030
uggguuuauguuuagauca

SEQ ID NO: 761439 - RNA, 19 nt, Artificial Sequence
  Description of Artificial Sequence: Synthetic oligonucleotide
  Antisense strand to SEQ ID NO: 761438
ugaucuaaacauaaaccca

SEQ ID NO: 761440 - RNA, 19 nt, Artificial Sequence
  Description of Artificial Sequence: Synthetic oligonucleotide
  Sense strand starting at position 2792 of SEQ ID NO: 587030
uuuagaucauauguggcua

SEQ ID NO: 761441 - RNA, 19 nt, Artificial Sequence
  Description of Artificial Sequence: Synthetic oligonucleotide
  Antisense strand to SEQ ID NO: 761440
uagccacauaugaucuaaa

SEQ ID NO: 761442 - RNA, 19 nt, Artificial Sequence
  Description of Artificial Sequence: Synthetic oligonucleotide
  Sense strand starting at position 2861 of SEQ ID NO: 587030
acaguaaugcauuaguugu

SEQ ID NO: 761443 - RNA, 19 nt, Artificial Sequence
  Description of Artificial Sequence: Synthetic oligonucleotide
  Antisense strand to SEQ ID NO: 761442
acaacuaaugcauuacugu

SEQ ID NO: 761444 - RNA, 19 nt, Artificial Sequence
  Description of Artificial Sequence: Synthetic oligonucleotide
  Sense strand starting at position 2900 of SEQ ID NO: 587030
uaggcaucucauugcugga

SEQ ID NO: 761445 - RNA, 19 nt, Artificial Sequence
  Description of Artificial Sequence: Synthetic oligonucleotide
  Antisense strand to SEQ ID NO: 761444
uccagcaaugagaugccua

SEQ ID NO: 761446 - RNA, 19 nt, Artificial Sequence
  Description of Artificial Sequence: Synthetic oligonucleotide
  Sense strand starting at position 2913 of SEQ ID NO: 587030
gcuggauuucucuguacuu

SEQ ID NO: 761447 - RNA, 19 nt, Artificial Sequence
  Description of Artificial Sequence: Synthetic oligonucleotide
  Antisense strand to SEQ ID NO: 761446
aaguacagagaaauccagc

SEQ ID NO: 761448 - RNA, 19 nt, Artificial Sequence
  Description of Artificial Sequence: Synthetic oligonucleotide
  Sense strand starting at position 2928 of SEQ ID NO: 587030
acuugcucagaugggaaau

SEQ ID NO: 761449 - RNA, 19 nt, Artificial Sequence
  Description of Artificial Sequence: Synthetic oligonucleotide
  Antisense strand to SEQ ID NO: 761448
auuucccaucugagcaagu

SEQ ID NO: 761450 - RNA, 19 nt, Artificial Sequence
  Description of Artificial Sequence: Synthetic oligonucleotide
  Sense strand starting at position 2981 of SEQ ID NO: 587030
cccauaggugaauguaaga

SEQ ID NO: 761451 - RNA, 19 nt, Artificial Sequence
  Description of Artificial Sequence: Synthetic oligonucleotide
  Antisense strand to SEQ ID NO: 761450
ucuuacauucaccuauggg

SEQ ID NO: 761452 - RNA, 19 nt, Artificial Sequence
  Description of Artificial Sequence: Synthetic oligonucleotide
  Sense strand starting at position 3041 of SEQ ID NO: 587030
aggugcaauccuggaugca

SEQ ID NO: 761453 - RNA, 19 nt, Artificial Sequence
  Description of Artificial Sequence: Synthetic oligonucleotide
  Antisense strand to SEQ ID NO: 761452
ugcauccaggauugcaccu

SEQ ID NO: 761454 - RNA, 19 nt, Artificial Sequence
  Description of Artificial Sequence: Synthetic oligonucleotide
  Sense strand starting at position 3214 of SEQ ID NO: 587030
gaagccuagccuggagaaa

SEQ ID NO: 761455 - RNA, 19 nt, Artificial Sequence
  Description of Artificial Sequence: Synthetic oligonucleotide
  Antisense strand to SEQ ID NO: 761454
uuucuccaggcuaggcuuc

SEQ ID NO: 761456 - RNA, 19 nt, Artificial Sequence
  Description of Artificial Sequence: Synthetic oligonucleotide
  Sense strand starting at position 3215 of SEQ ID NO: 587030
aagccuagccuggagaaau

SEQ ID NO: 761457 - RNA, 19 nt, Artificial Sequence
  Description of Artificial Sequence: Synthetic oligonucleotide
  Antisense strand to SEQ ID NO: 761456
auuucuccaggcuaggcuu

SEQ ID NO: 761458 - RNA, 19 nt, Artificial Sequence
  Description of Artificial Sequence: Synthetic oligonucleotide
  Sense strand starting at position 3389 of SEQ ID NO: 587030
uccauagauggcugcauua

SEQ ID NO: 761459 - RNA, 19 nt, Artificial Sequence
  Description of Artificial Sequence: Synthetic oligonucleotide
  Antisense strand to SEQ ID NO: 761458
uaaugcagccaucuaugga

SEQ ID NO: 761460 - RNA, 19 nt, Artificial Sequence
  Description of Artificial Sequence: Synthetic oligonucleotide
  Sense strand starting at position 3409 of SEQ ID NO: 587030
aguggugaaguugaaauau

SEQ ID NO: 761461 - RNA, 19 nt, Artificial Sequence
  Description of Artificial Sequence: Synthetic oligonucleotide
  Antisense strand to SEQ ID NO: 761460
auauuucaacuucaccacu

SEQ ID NO: 761462 - RNA, 19 nt, Artificial Sequence
  Description of Artificial Sequence: Synthetic oligonucleotide
  Sense strand starting at position 3457 of SEQ ID NO: 587030
gauauagaguaagccauaa

SEQ ID NO: 761463 - RNA, 19 nt, Artificial Sequence
  Description of Artificial Sequence: Synthetic oligonucleotide
  Antisense strand to SEQ ID NO: 761462
uuauggcuuacucuauauc

SEQ ID NO: 761464 - RNA, 19 nt, Artificial Sequence
  Description of Artificial Sequence: Synthetic oligonucleotide
  Sense strand starting at position 3558 of SEQ ID NO: 587030
ggguucucuguaggaggaa

SEQ ID NO: 761465 - RNA, 19 nt, Artificial Sequence
  Description of Artificial Sequence: Synthetic oligonucleotide
  Antisense strand to SEQ ID NO: 761464
uuccuccuacagagaaccc

SEQ ID NO: 761466 - RNA, 19 nt, Artificial Sequence
  Description of Artificial Sequence: Synthetic oligonucleotide
  Sense strand starting at position 3614 of SEQ ID NO: 587030
aucaaugaaugagcucauu

SEQ ID NO: 761467 - RNA, 19 nt, Artificial Sequence
  Description of Artificial Sequence: Synthetic oligonucleotide
  Antisense strand to SEQ ID NO: 761466
aaugagcucauucauugau

SEQ ID NO: 761468 - RNA, 19 nt, Artificial Sequence
  Description of Artificial Sequence: Synthetic oligonucleotide
  Sense strand starting at position 3689 of SEQ ID NO: 587030
ucucccuaugcaugagaau

SEQ ID NO: 761469 - RNA, 19 nt, Artificial Sequence
  Description of Artificial Sequence: Synthetic oligonucleotide
  Antisense strand to SEQ ID NO: 761468
auucucaugcauagggaga

SEQ ID NO: 761470 - RNA, 19 nt, Artificial Sequence
  Description of Artificial Sequence: Synthetic oligonucleotide
  Sense strand starting at position 3690 of SEQ ID NO: 587030
cucccuaugcaugagaauu

SEQ ID NO: 761471 - RNA, 19 nt, Artificial Sequence
  Description of Artificial Sequence: Synthetic oligonucleotide
  Antisense strand to SEQ ID NO: 761470
aauucucaugcauagggag

SEQ ID NO: 761472 - RNA, 19 nt, Artificial Sequence
  Description of Artificial Sequence: Synthetic oligonucleotide
  Sense strand starting at position 3698 of SEQ ID NO: 587030
gcaugagaauuugaccuau

SEQ ID NO: 761473 - RNA, 19 nt, Artificial Sequence
  Description of Artificial Sequence: Synthetic oligonucleotide
  Antisense strand to SEQ ID NO: 761472
auaggucaaauucucaugc

SEQ ID NO: 761474 - RNA, 19 nt, Artificial Sequence
  Description of Artificial Sequence: Synthetic oligonucleotide
  Sense strand starting at position 3708 of SEQ ID NO: 587030
uugaccuaugguuaaacuu

SEQ ID NO: 761475 - RNA, 19 nt, Artificial Sequence
  Description of Artificial Sequence: Synthetic oligonucleotide
  Antisense strand to SEQ ID NO: 761474
aaguuuaaccauaggucaa

SEQ ID NO: 761476 - RNA, 19 nt, Artificial Sequence
  Description of Artificial Sequence: Synthetic oligonucleotide
  Sense strand starting at position 3951 of SEQ ID NO: 587030
ccuagaagcuuugucuaca

SEQ ID NO: 761477 - RNA, 19 nt, Artificial Sequence
  Description of Artificial Sequence: Synthetic oligonucleotide
  Antisense strand to SEQ ID NO: 761476
uguagacaaagcuucuagg

SEQ ID NO: 761478 - RNA, 19 nt, Artificial Sequence
  Description of Artificial Sequence: Synthetic oligonucleotide
  Sense strand starting at position 3952 of SEQ ID NO: 587030
cuagaagcuuugucuacaa

SEQ ID NO: 761479 - RNA, 19 nt, Artificial Sequence
  Description of Artificial Sequence: Synthetic oligonucleotide
  Antisense strand to SEQ ID NO: 761478
uuguagacaaagcuucuag

SEQ ID NO: 761480 - RNA, 19 nt, Artificial Sequence
  Description of Artificial Sequence: Synthetic oligonucleotide
  Sense strand starting at position 242 of SEQ ID NO: 587031
cccucccauuuggagaaau

SEQ ID NO: 761481 - RNA, 19 nt, Artificial Sequence
  Description of Artificial Sequence: Synthetic oligonucleotide
  Antisense strand to SEQ ID NO: 761480
auuucuccaaaugggaggg

SEQ ID NO: 761482 - RNA, 19 nt, Artificial Sequence
  Description of Artificial Sequence: Synthetic oligonucleotide
  Sense strand starting at position 365 of SEQ ID NO: 587031
uuggcauuaucuucuggaa

SEQ ID NO: 761483 - RNA, 19 nt, Artificial Sequence
  Description of Artificial Sequence: Synthetic oligonucleotide
  Antisense strand to SEQ ID NO: 761482
uuccagaagauaaugccaa

SEQ ID NO: 761484 - RNA, 19 nt, Artificial Sequence
  Description of Artificial Sequence: Synthetic oligonucleotide
  Sense strand starting at position 488 of SEQ ID NO: 587031
ucugcagcacuugauaauu

SEQ ID NO: 761485 - RNA, 19 nt, Artificial Sequence
  Description of Artificial Sequence: Synthetic oligonucleotide
  Antisense strand to SEQ ID NO: 761484
aauuaucaagugcugcaga

SEQ ID NO: 761486 - RNA, 19 nt, Artificial Sequence
  Description of Artificial Sequence: Synthetic oligonucleotide
  Sense strand starting at position 620 of SEQ ID NO: 587031
gggugucuuaaguaggaug

SEQ ID NO: 761487 - RNA, 19 nt, Artificial Sequence
  Description of Artificial Sequence: Synthetic oligonucleotide
  Antisense strand to SEQ ID NO: 761486
cauccuacuuaagacaccc

SEQ ID NO: 761488 - RNA, 19 nt, Artificial Sequence
  Description of Artificial Sequence: Synthetic oligonucleotide
  Sense strand starting at position 625 of SEQ ID NO: 587031
ucuuaaguaggaugaucau

SEQ ID NO: 761489 - RNA, 19 nt, Artificial Sequence
  Description of Artificial Sequence: Synthetic oligonucleotide
  Antisense strand to SEQ ID NO: 761488
augaucauccuacuuaaga

SEQ ID NO: 761490 - RNA, 19 nt, Artificial Sequence
  Description of Artificial Sequence: Synthetic oligonucleotide
  Sense strand starting at position 628 of SEQ ID NO: 587031
uaaguaggaugaucaugua

SEQ ID NO: 761491 - RNA, 19 nt, Artificial Sequence
  Description of Artificial Sequence: Synthetic oligonucleotide
  Antisense strand to SEQ ID NO: 761490
uacaugaucauccuacuua

SEQ ID NO: 761492 - RNA, 19 nt, Artificial Sequence
  Description of Artificial Sequence: Synthetic oligonucleotide
  Sense strand starting at position 712 of SEQ ID NO: 587031
cagagauugucccuggcaa

SEQ ID NO: 761493 - RNA, 19 nt, Artificial Sequence
  Description of Artificial Sequence: Synthetic oligonucleotide
  Antisense strand to SEQ ID NO: 761492
uugccagggacaaucucug

SEQ ID NO: 761494 - RNA, 19 nt, Artificial Sequence
  Description of Artificial Sequence: Synthetic oligonucleotide
  Sense strand starting at position 713 of SEQ ID NO: 587031
agagauugucccuggcaaa

SEQ ID NO: 761495 - RNA, 19 nt, Artificial Sequence
  Description of Artificial Sequence: Synthetic oligonucleotide
  Antisense strand to SEQ ID NO: 761494
uuugccagggacaaucucu

SEQ ID NO: 761496 - RNA, 19 nt, Artificial Sequence
  Description of Artificial Sequence: Synthetic oligonucleotide
  Sense strand starting at position 714 of SEQ ID NO: 587031
gagauugucccuggcaaac

SEQ ID NO: 761497 - RNA, 19 nt, Artificial Sequence
  Description of Artificial Sequence: Synthetic oligonucleotide
  Antisense strand to SEQ ID NO: 761496
guuugccagggacaaucuc

SEQ ID NO: 761498 - RNA, 19 nt, Artificial Sequence
  Description of Artificial Sequence: Synthetic oligonucleotide
  Sense strand starting at position 724 of SEQ ID NO: 587031
cuggcaaaccgauaugucu

SEQ ID NO: 761499 - RNA, 19 nt, Artificial Sequence
  Description of Artificial Sequence: Synthetic oligonucleotide
  Antisense strand to SEQ ID NO: 761498
agacauaucgguuugccag

SEQ ID NO: 761500 - RNA, 19 nt, Artificial Sequence
  Description of Artificial Sequence: Synthetic oligonucleotide
  Sense strand starting at position 853 of SEQ ID NO: 587031
guuacuucuguuuagaauc

SEQ ID NO: 761501 - RNA, 19 nt, Artificial Sequence
  Description of Artificial Sequence: Synthetic oligonucleotide
  Antisense strand to SEQ ID NO: 761500
gauucuaaacagaaguaac

SEQ ID NO: 761502 - RNA, 19 nt, Artificial Sequence
  Description of Artificial Sequence: Synthetic oligonucleotide
  Sense strand starting at position 904 of SEQ ID NO: 587031
aggaucacguuaucugaga

SEQ ID NO: 761503 - RNA, 19 nt, Artificial Sequence
  Description of Artificial Sequence: Synthetic oligonucleotide
  Antisense strand to SEQ ID NO: 761502
ucucagauaacgugauccu

SEQ ID NO: 761504 - RNA, 19 nt, Artificial Sequence
  Description of Artificial Sequence: Synthetic oligonucleotide
  Sense strand starting at position 905 of SEQ ID NO: 587031
ggaucacguuaucugagaa

SEQ ID NO: 761505 - RNA, 19 nt, Artificial Sequence
  Description of Artificial Sequence: Synthetic oligonucleotide
  Antisense strand to SEQ ID NO: 761504
uucucagauaacgugaucc

SEQ ID NO: 761506 - RNA, 19 nt, Artificial Sequence
  Description of Artificial Sequence: Synthetic oligonucleotide
  Sense strand starting at position 913 of SEQ ID NO: 587031
uuaucugagaagugucaga

SEQ ID NO: 761507 - RNA, 19 nt, Artificial Sequence
  Description of Artificial Sequence: Synthetic oligonucleotide
  Antisense strand to SEQ ID NO: 761506
ucugacacuucucagauaa

SEQ ID NO: 761508 - RNA, 19 nt, Artificial Sequence
  Description of Artificial Sequence: Synthetic oligonucleotide
  Sense strand starting at position 964 of SEQ ID NO: 587031
agaguucuaccugaggcaa

SEQ ID NO: 761509 - RNA, 19 nt, Artificial Sequence
  Description of Artificial Sequence: Synthetic oligonucleotide
  Antisense strand to SEQ ID NO: 761508
uugccucagguagaacucu

SEQ ID NO: 761510 - RNA, 19 nt, Artificial Sequence
  Description of Artificial Sequence: Synthetic oligonucleotide
  Sense strand starting at position 1019 of SEQ ID NO: 587031
gugaguuccagucacagag

SEQ ID NO: 761511 - RNA, 19 nt, Artificial Sequence
  Description of Artificial Sequence: Synthetic oligonucleotide
  Antisense strand to SEQ ID NO: 761510
cucugugacuggaacucac

SEQ ID NO: 761512 - RNA, 19 nt, Artificial Sequence
  Description of Artificial Sequence: Synthetic oligonucleotide
  Sense strand starting at position 2235 of SEQ ID NO: 587031
ucagaagcucacuggaaau

SEQ ID NO: 761513 - RNA, 19 nt, Artificial Sequence
  Description of Artificial Sequence: Synthetic oligonucleotide
  Antisense strand to SEQ ID NO: 761512
auuuccagugagcuucuga

SEQ ID NO: 761514 - RNA, 19 nt, Artificial Sequence
  Description of Artificial Sequence: Synthetic oligonucleotide
  Sense strand starting at position 2249 of SEQ ID NO: 587031
gaaauaauuugagacaugu

SEQ ID NO: 761515 - RNA, 19 nt, Artificial Sequence
  Description of Artificial Sequence: Synthetic oligonucleotide
  Antisense strand to SEQ ID NO: 761514
acaugucucaaauuauuuc

SEQ ID NO: 761516 - RNA, 19 nt, Artificial Sequence
  Description of Artificial Sequence: Synthetic oligonucleotide
  Sense strand starting at position 2315 of SEQ ID NO: 587031
ccugauaagcaaugaauac

SEQ ID NO: 761517 - RNA, 19 nt, Artificial Sequence
  Description of Artificial Sequence: Synthetic oligonucleotide
  Antisense strand to SEQ ID NO: 761516
guauucauugcuuaucagg

SEQ ID NO: 761518 - RNA, 19 nt, Artificial Sequence
  Description of Artificial Sequence: Synthetic oligonucleotide
  Sense strand starting at position 2527 of SEQ ID NO: 587031
agaauugaguuucuuccaa

SEQ ID NO: 761519 - RNA, 19 nt, Artificial Sequence
  Description of Artificial Sequence: Synthetic oligonucleotide
  Antisense strand to SEQ ID NO: 761518
uuggaagaaacucaauucu

SEQ ID NO: 761520 - RNA, 19 nt, Artificial Sequence
  Description of Artificial Sequence: Synthetic oligonucleotide
  Sense strand starting at position 2555 of SEQ ID NO: 587031
cuauuauaauguccucgaa

SEQ ID NO: 761521 - RNA, 19 nt, Artificial Sequence
  Description of Artificial Sequence: Synthetic oligonucleotide
  Antisense strand to SEQ ID NO: 761520
uucgaggacauuauaauag

SEQ ID NO: 761522 - RNA, 19 nt, Artificial Sequence
  Description of Artificial Sequence: Synthetic oligonucleotide
  Sense strand starting at position 2557 of SEQ ID NO: 587031
auuauaauguccucgaaua

SEQ ID NO: 761523 - RNA, 19 nt, Artificial Sequence
  Description of Artificial Sequence: Synthetic oligonucleotide
  Antisense strand to SEQ ID NO: 761522
uauucgaggacauuauaau

SEQ ID NO: 761524 - RNA, 19 nt, Artificial Sequence
  Description of Artificial Sequence: Synthetic oligonucleotide
  Sense strand starting at position 2558 of SEQ ID NO: 587031
uuauaauguccucgaauag

SEQ ID NO: 761525 - RNA, 19 nt, Artificial Sequence
  Description of Artificial Sequence: Synthetic oligonucleotide
  Antisense strand to SEQ ID NO: 761524
cuauucgaggacauuauaa

SEQ ID NO: 761526 - RNA, 19 nt, Artificial Sequence
  Description of Artificial Sequence: Synthetic oligonucleotide
  Sense strand starting at position 2559 of SEQ ID NO: 587031
uauaauguccucgaauagu

SEQ ID NO: 761527 - RNA, 19 nt, Artificial Sequence
  Description of Artificial Sequence: Synthetic oligonucleotide
  Antisense strand to SEQ ID NO: 761526
acuauucgaggacauuaua

SEQ ID NO: 761528 - RNA, 19 nt, Artificial Sequence
  Description of Artificial Sequence: Synthetic oligonucleotide
  Sense strand starting at position 2562 of SEQ ID NO: 587031
aauguccucgaauaguaua

SEQ ID NO: 761529 - RNA, 19 nt, Artificial Sequence
  Description of Artificial Sequence: Synthetic oligonucleotide
  Antisense strand to SEQ ID NO: 761528
uauacuauucgaggacauu

SEQ ID NO: 761530 - RNA, 19 nt, Artificial Sequence
  Description of Artificial Sequence: Synthetic oligonucleotide
  Sense strand starting at position 2653 of SEQ ID NO: 587031
guguaugugucaucaauuu

SEQ ID NO: 761531 - RNA, 19 nt, Artificial Sequence
  Description of Artificial Sequence: Synthetic oligonucleotide
  Antisense strand to SEQ ID NO: 761530
aaauugaugacacauacac

SEQ ID NO: 761532 - RNA, 19 nt, Artificial Sequence
  Description of Artificial Sequence: Synthetic oligonucleotide
  Sense strand starting at position 2729 of SEQ ID NO: 587031
gggagaauucaguguucug

SEQ ID NO: 761533 - RNA, 19 nt, Artificial Sequence
  Description of Artificial Sequence: Synthetic oligonucleotide
  Antisense strand to SEQ ID NO: 761532
cagaacacugaauucuccc

SEQ ID NO: 761534 - RNA, 19 nt, Artificial Sequence
  Description of Artificial Sequence: Synthetic oligonucleotide
  Sense strand starting at position 2747 of SEQ ID NO: 587031
ggacaugguguugaaguuu

SEQ ID NO: 761535 - RNA, 19 nt, Artificial Sequence
  Description of Artificial Sequence: Synthetic oligonucleotide
  Antisense strand to SEQ ID NO: 761534
aaacuucaacaccaugucc

SEQ ID NO: 761536 - RNA, 19 nt, Artificial Sequence
  Description of Artificial Sequence: Synthetic oligonucleotide
  Sense strand starting at position 2753 of SEQ ID NO: 587031
gguguugaaguuuggaaau

SEQ ID NO: 761537 - RNA, 19 nt, Artificial Sequence
  Description of Artificial Sequence: Synthetic oligonucleotide
  Antisense strand to SEQ ID NO: 761536
auuuccaaacuucaacacc

SEQ ID NO: 761538 - RNA, 19 nt, Artificial Sequence
  Description of Artificial Sequence: Synthetic oligonucleotide
  Sense strand starting at position 2869 of SEQ ID NO: 587031
ccaggacucguccaaaucu

SEQ ID NO: 761539 - RNA, 19 nt, Artificial Sequence
  Description of Artificial Sequence: Synthetic oligonucleotide
  Antisense strand to SEQ ID NO: 761538
agauuuggacgaguccugg

SEQ ID NO: 761540 - RNA, 19 nt, Artificial Sequence
  Description of Artificial Sequence: Synthetic oligonucleotide
  Sense strand starting at position 2877 of SEQ ID NO: 587031
cguccaaaucuaggaaauc

SEQ ID NO: 761541 - RNA, 19 nt, Artificial Sequence
  Description of Artificial Sequence: Synthetic oligonucleotide
  Antisense strand to SEQ ID NO: 761540
gauuuccuagauuuggacg

SEQ ID NO: 761542 - RNA, 19 nt, Artificial Sequence
  Description of Artificial Sequence: Synthetic oligonucleotide
  Sense strand starting at position 2949 of SEQ ID NO: 587031
guugcucauagucaggauu

SEQ ID NO: 761543 - RNA, 19 nt, Artificial Sequence
  Description of Artificial Sequence: Synthetic oligonucleotide
  Antisense strand to SEQ ID NO: 761542
aauccugacuaugagcaac

SEQ ID NO: 761544 - RNA, 19 nt, Artificial Sequence
  Description of Artificial Sequence: Synthetic oligonucleotide
  Sense strand starting at position 2952 of SEQ ID NO: 587031
gcucauagucaggauugag

SEQ ID NO: 761545 - RNA, 19 nt, Artificial Sequence
  Description of Artificial Sequence: Synthetic oligonucleotide
  Antisense strand to SEQ ID NO: 761544
cucaauccugacuaugagc

SEQ ID NO: 761546 - RNA, 19 nt, Artificial Sequence
  Description of Artificial Sequence: Synthetic oligonucleotide
  Sense strand starting at position 2955 of SEQ ID NO: 587031
cauagucaggauugagauc

SEQ ID NO: 761547 - RNA, 19 nt, Artificial Sequence
  Description of Artificial Sequence: Synthetic oligonucleotide
  Antisense strand to SEQ ID NO: 761546
gaucucaauccugacuaug

SEQ ID NO: 761548 - RNA, 19 nt, Artificial Sequence
  Description of Artificial Sequence: Synthetic oligonucleotide
  Sense strand starting at position 3004 of SEQ ID NO: 587031
gggucagauuuggccugua

SEQ ID NO: 761549 - RNA, 19 nt, Artificial Sequence
  Description of Artificial Sequence: Synthetic oligonucleotide
  Antisense strand to SEQ ID NO: 761548
uacaggccaaaucugaccc

SEQ ID NO: 761550 - RNA, 19 nt, Artificial Sequence
  Description of Artificial Sequence: Synthetic oligonucleotide
  Sense strand starting at position 3007 of SEQ ID NO: 587031
ucagauuuggccuguaguc

SEQ ID NO: 761551 - RNA, 19 nt, Artificial Sequence
  Description of Artificial Sequence: Synthetic oligonucleotide
  Antisense strand to SEQ ID NO: 761550
gacuacaggccaaaucuga

SEQ ID NO: 761552 - RNA, 19 nt, Artificial Sequence
  Description of Artificial Sequence: Synthetic oligonucleotide
  Sense strand starting at position 3056 of SEQ ID NO: 587031
gcauuaauccaccagugug

SEQ ID NO: 761553 - RNA, 19 nt, Artificial Sequence
  Description of Artificial Sequence: Synthetic oligonucleotide
  Antisense strand to SEQ ID NO: 761552
cacacugguggauuaaugc

SEQ ID NO: 761554 - RNA, 19 nt, Artificial Sequence
  Description of Artificial Sequence: Synthetic oligonucleotide
  Sense strand starting at position 3204 of SEQ ID NO: 587031
cuggcugaagcugaguaau

SEQ ID NO: 761555 - RNA, 19 nt, Artificial Sequence
  Description of Artificial Sequence: Synthetic oligonucleotide
  Antisense strand to SEQ ID NO: 761554
auuacucagcuucagccag

SEQ ID NO: 761556 - RNA, 19 nt, Artificial Sequence
  Description of Artificial Sequence: Synthetic oligonucleotide
  Sense strand starting at position 3257 of SEQ ID NO: 587031
guuuguugacaauacuaau

SEQ ID NO: 761557 - RNA, 19 nt, Artificial Sequence
  Description of Artificial Sequence: Synthetic oligonucleotide
  Antisense strand to SEQ ID NO: 761556
auuaguauugucaacaaac

SEQ ID NO: 761558 - RNA, 19 nt, Artificial Sequence
  Description of Artificial Sequence: Synthetic oligonucleotide
  Sense strand starting at position 3667 of SEQ ID NO: 587031
ugggccuugguccauuaua

SEQ ID NO: 761559 - RNA, 19 nt, Artificial Sequence
  Description of Artificial Sequence: Synthetic oligonucleotide
  Antisense strand to SEQ ID NO: 761558
uauaauggaccaaggccca

SEQ ID NO: 761560 - RNA, 19 nt, Artificial Sequence
  Description of Artificial Sequence: Synthetic oligonucleotide
  Sense strand starting at position 259 of SEQ ID NO: 587032
cucccaguccagugaaauu

SEQ ID NO: 761561 - RNA, 19 nt, Artificial Sequence
  Description of Artificial Sequence: Synthetic oligonucleotide
  Antisense strand to SEQ ID NO: 761560
aauuucacuggacugggag

SEQ ID NO: 761562 - RNA, 19 nt, Artificial Sequence
  Description of Artificial Sequence: Synthetic oligonucleotide
  Sense strand starting at position 269 of SEQ ID NO: 587032
agugaaauuccugagucug

SEQ ID NO: 761563 - RNA, 19 nt, Artificial Sequence
  Description of Artificial Sequence: Synthetic oligonucleotide
  Antisense strand to SEQ ID NO: 761562
cagacucaggaauuucacu

SEQ ID NO: 761564 - RNA, 19 nt, Artificial Sequence
  Description of Artificial Sequence: Synthetic oligonucleotide
  Sense strand starting at position 323 of SEQ ID NO: 587032
agaugugacucugugacau

SEQ ID NO: 761565 - RNA, 19 nt, Artificial Sequence
  Description of Artificial Sequence: Synthetic oligonucleotide
  Antisense strand to SEQ ID NO: 761564
augucacagagucacaucu

SEQ ID NO: 761566 - RNA, 19 nt, Artificial Sequence
  Description of Artificial Sequence: Synthetic oligonucleotide
  Sense strand starting at position 334 of SEQ ID NO: 587032
ugugacauaugcuugagga

SEQ ID NO: 761567 - RNA, 19 nt, Artificial Sequence
  Description of Artificial Sequence: Synthetic oligonucleotide
  Antisense strand to SEQ ID NO: 761566
uccucaagcauaugucaca

SEQ ID NO: 761568 - RNA, 19 nt, Artificial Sequence
  Description of Artificial Sequence: Synthetic oligonucleotide
  Sense strand starting at position 335 of SEQ ID NO: 587032
gugacauaugcuugaggaa

SEQ ID NO: 761569 - RNA, 19 nt, Artificial Sequence
  Description of Artificial Sequence: Synthetic oligonucleotide
  Antisense strand to SEQ ID NO: 761568
uuccucaagcauaugucac

SEQ ID NO: 761570 - RNA, 19 nt, Artificial Sequence
  Description of Artificial Sequence: Synthetic oligonucleotide
  Sense strand starting at position 466 of SEQ ID NO: 587032
aaagaaacuggguggugua

SEQ ID NO: 761571 - RNA, 19 nt, Artificial Sequence
  Description of Artificial Sequence: Synthetic oligonucleotide
  Antisense strand to SEQ ID NO: 761570
uacaccacccaguuucuuu

SEQ ID NO: 761572 - RNA, 19 nt, Artificial Sequence
  Description of Artificial Sequence: Synthetic oligonucleotide
  Sense strand starting at position 526 of SEQ ID NO: 587032
auccaaguuuguguggaga

SEQ ID NO: 761573 - RNA, 19 nt, Artificial Sequence
  Description of Artificial Sequence: Synthetic oligonucleotide
  Antisense strand to SEQ ID NO: 761572
ucuccacacaaacuuggau

SEQ ID NO: 761574 - RNA, 19 nt, Artificial Sequence
  Description of Artificial Sequence: Synthetic oligonucleotide
  Sense strand starting at position 529 of SEQ ID NO: 587032
caaguuuguguggagacaa

SEQ ID NO: 761575 - RNA, 19 nt, Artificial Sequence
  Description of Artificial Sequence: Synthetic oligonucleotide
  Antisense strand to SEQ ID NO: 761574
uugucuccacacaaacuug

SEQ ID NO: 761576 - RNA, 19 nt, Artificial Sequence
  Description of Artificial Sequence: Synthetic oligonucleotide
  Sense strand starting at position 710 of SEQ ID NO: 587032
gcucuuaacuuucugaaag

SEQ ID NO: 761577 - RNA, 19 nt, Artificial Sequence
  Description of Artificial Sequence: Synthetic oligonucleotide
  Antisense strand to SEQ ID NO: 761576
cuuucagaaaguuaagagc

SEQ ID NO: 761578 - RNA, 19 nt, Artificial Sequence
  Description of Artificial Sequence: Synthetic oligonucleotide
  Sense strand starting at position 770 of SEQ ID NO: 587032
cgaagccuuccagauaaca

SEQ ID NO: 761579 - RNA, 19 nt, Artificial Sequence
  Description of Artificial Sequence: Synthetic oligonucleotide
  Antisense strand to SEQ ID NO: 761578
uguuaucuggaaggcuucg

SEQ ID NO: 761580 - RNA, 19 nt, Artificial Sequence
  Description of Artificial Sequence: Synthetic oligonucleotide
  Sense strand starting at position 806 of SEQ ID NO: 587032
ggaguagcacgacaucaua

SEQ ID NO: 761581 - RNA, 19 nt, Artificial Sequence
  Description of Artificial Sequence: Synthetic oligonucleotide
  Antisense strand to SEQ ID NO: 761580
uaugaugucgugcuacucc

SEQ ID NO: 761582 - RNA, 19 nt, Artificial Sequence
  Description of Artificial Sequence: Synthetic oligonucleotide
  Sense strand starting at position 809 of SEQ ID NO: 587032
guagcacgacaucauauua

SEQ ID NO: 761583 - RNA, 19 nt, Artificial Sequence
  Description of Artificial Sequence: Synthetic oligonucleotide
  Antisense strand to SEQ ID NO: 761582
uaauaugaugucgugcuac

SEQ ID NO: 761584 - RNA, 19 nt, Artificial Sequence
  Description of Artificial Sequence: Synthetic oligonucleotide
  Sense strand starting at position 834 of SEQ ID NO: 587032
ucugaacuucugggcaaua

SEQ ID NO: 761585 - RNA, 19 nt, Artificial Sequence
  Description of Artificial Sequence: Synthetic oligonucleotide
  Antisense strand to SEQ ID NO: 761584
uauugcccagaaguucaga

SEQ ID NO: 761586 - RNA, 19 nt, Artificial Sequence
  Description of Artificial Sequence: Synthetic oligonucleotide
  Sense strand starting at position 836 of SEQ ID NO: 587032
ugaacuucugggcaauacu

SEQ ID NO: 761587 - RNA, 19 nt, Artificial Sequence
  Description of Artificial Sequence: Synthetic oligonucleotide
  Antisense strand to SEQ ID NO: 761586
aguauugcccagaaguuca

SEQ ID NO: 761588 - RNA, 19 nt, Artificial Sequence
  Description of Artificial Sequence: Synthetic oligonucleotide
  Sense strand starting at position 872 of SEQ ID NO: 587032
gggacugcaucuuuauaac

SEQ ID NO: 761589 - RNA, 19 nt, Artificial Sequence
  Description of Artificial Sequence: Synthetic oligonucleotide
  Antisense strand to SEQ ID NO: 761588
guuauaaagaugcaguccc

SEQ ID NO: 761590 - RNA, 19 nt, Artificial Sequence
  Description of Artificial Sequence: Synthetic oligonucleotide
  Sense strand starting at position 901 of SEQ ID NO: 587032
agggaagcaugcucagaga

SEQ ID NO: 761591 - RNA, 19 nt, Artificial Sequence
  Description of Artificial Sequence: Synthetic oligonucleotide
  Antisense strand to SEQ ID NO: 761590
ucucugagcaugcuucccu

SEQ ID NO: 761592 - RNA, 19 nt, Artificial Sequence
  Description of Artificial Sequence: Synthetic oligonucleotide
  Sense strand starting at position 912 of SEQ ID NO: 587032
cucagagaguucccagauu

SEQ ID NO: 761593 - RNA, 19 nt, Artificial Sequence
  Description of Artificial Sequence: Synthetic oligonucleotide
  Antisense strand to SEQ ID NO: 761592
aaucugggaacucucugag

SEQ ID NO: 761594 - RNA, 19 nt, Artificial Sequence
  Description of Artificial Sequence: Synthetic oligonucleotide
  Sense strand starting at position 2083 of SEQ ID NO: 587032
cuuuccuaggagugcuaaa

SEQ ID NO: 761595 - RNA, 19 nt, Artificial Sequence
  Description of Artificial Sequence: Synthetic oligonucleotide
  Antisense strand to SEQ ID NO: 761594
uuuagcacuccuaggaaag

SEQ ID NO: 761596 - RNA, 19 nt, Artificial Sequence
  Description of Artificial Sequence: Synthetic oligonucleotide
  Sense strand starting at position 2096 of SEQ ID NO: 587032
gcuaaagaguggucaggcu

SEQ ID NO: 761597 - RNA, 19 nt, Artificial Sequence
  Description of Artificial Sequence: Synthetic oligonucleotide
  Antisense strand to SEQ ID NO: 761596
agccugaccacucuuuagc

SEQ ID NO: 761598 - RNA, 19 nt, Artificial Sequence
  Description of Artificial Sequence: Synthetic oligonucleotide
  Sense strand starting at position 2195 of SEQ ID NO: 587032
gcaaauuuauccuaguguc

SEQ ID NO: 761599 - RNA, 19 nt, Artificial Sequence
  Description of Artificial Sequence: Synthetic oligonucleotide
  Antisense strand to SEQ ID NO: 761598
gacacuaggauaaauuugc

SEQ ID NO: 761600 - RNA, 19 nt, Artificial Sequence
  Description of Artificial Sequence: Synthetic oligonucleotide
  Sense strand starting at position 2219 of SEQ ID NO: 587032
ccacuaggccugcaaauua

SEQ ID NO: 761601 - RNA, 19 nt, Artificial Sequence
  Description of Artificial Sequence: Synthetic oligonucleotide
  Antisense strand to SEQ ID NO: 761600
uaauuugcaggccuagugg

SEQ ID NO: 761602 - RNA, 19 nt, Artificial Sequence
  Description of Artificial Sequence: Synthetic oligonucleotide
  Sense strand starting at position 2270 of SEQ ID NO: 587032
cugccaugguuaguaucaa

SEQ ID NO: 761603 - RNA, 19 nt, Artificial Sequence
  Description of Artificial Sequence: Synthetic oligonucleotide
  Antisense strand to SEQ ID NO: 761602
uugauacuaaccauggcag

SEQ ID NO: 761604 - RNA, 19 nt, Artificial Sequence
  Description of Artificial Sequence: Synthetic oligonucleotide
  Sense strand starting at position 2281 of SEQ ID NO: 587032
aguaucaaugucuaugauu

SEQ ID NO: 761605 - RNA, 19 nt, Artificial Sequence
  Description of Artificial Sequence: Synthetic oligonucleotide
  Antisense strand to SEQ ID NO: 761604
aaucauagacauugauacu

SEQ ID NO: 761606 - RNA, 19 nt, Artificial Sequence
  Description of Artificial Sequence: Synthetic oligonucleotide
  Sense strand starting at position 2305 of SEQ ID NO: 587032
gggucucugugacugaguu

SEQ ID NO: 761607 - RNA, 19 nt, Artificial Sequence
  Description of Artificial Sequence: Synthetic oligonucleotide
  Antisense strand to SEQ ID NO: 761606
aacucagucacagagaccc

SEQ ID NO: 761608 - RNA, 19 nt, Artificial Sequence
  Description of Artificial Sequence: Synthetic oligonucleotide
  Sense strand starting at position 2309 of SEQ ID NO: 587032
cucugugacugaguuccau

SEQ ID NO: 761609 - RNA, 19 nt, Artificial Sequence
  Description of Artificial Sequence: Synthetic oligonucleotide
  Antisense strand to SEQ ID NO: 761608
auggaacucagucacagag

SEQ ID NO: 761610 - RNA, 19 nt, Artificial Sequence
  Description of Artificial Sequence: Synthetic oligonucleotide
  Sense strand starting at position 2439 of SEQ ID NO: 587032
ucaguacuucccuguuaca

SEQ ID NO: 761611 - RNA, 19 nt, Artificial Sequence
  Description of Artificial Sequence: Synthetic oligonucleotide
  Antisense strand to SEQ ID NO: 761610
uguaacagggaaguacuga

SEQ ID NO: 761612 - RNA, 19 nt, Artificial Sequence
  Description of Artificial Sequence: Synthetic oligonucleotide
  Sense strand starting at position 2550 of SEQ ID NO: 587032
caugaauccugagauguaa

SEQ ID NO: 761613 - RNA, 19 nt, Artificial Sequence
  Description of Artificial Sequence: Synthetic oligonucleotide
  Antisense strand to SEQ ID NO: 761612
uuacaucucaggauucaug

SEQ ID NO: 761614 - RNA, 19 nt, Artificial Sequence
  Description of Artificial Sequence: Synthetic oligonucleotide
  Sense strand starting at position 2561 of SEQ ID NO: 587032
agauguaaaugauaauggu

SEQ ID NO: 761615 - RNA, 19 nt, Artificial Sequence
  Description of Artificial Sequence: Synthetic oligonucleotide
  Antisense strand to SEQ ID NO: 761614
accauuaucauuuacaucu

SEQ ID NO: 761616 - RNA, 19 nt, Artificial Sequence
  Description of Artificial Sequence: Synthetic oligonucleotide
  Sense strand starting at position 2565 of SEQ ID NO: 587032
guaaaugauaaugguguaa

SEQ ID NO: 761617 - RNA, 19 nt, Artificial Sequence
  Description of Artificial Sequence: Synthetic oligonucleotide
  Antisense strand to SEQ ID NO: 761616
uuacaccauuaucauuuac

SEQ ID NO: 761618 - RNA, 19 nt, Artificial Sequence
  Description of Artificial Sequence: Synthetic oligonucleotide
  Sense strand starting at position 2594 of SEQ ID NO: 587032
uauuuccagugagagaauu

SEQ ID NO: 761619 - RNA, 19 nt, Artificial Sequence
  Description of Artificial Sequence: Synthetic oligonucleotide
  Antisense strand to SEQ ID NO: 761618
aauucucucacuggaaaua

SEQ ID NO: 761620 - RNA, 19 nt, Artificial Sequence
  Description of Artificial Sequence: Synthetic oligonucleotide
  Sense strand starting at position 2686 of SEQ ID NO: 587032
acugcucucugguccuaga

SEQ ID NO: 761621 - RNA, 19 nt, Artificial Sequence
  Description of Artificial Sequence: Synthetic oligonucleotide
  Antisense strand to SEQ ID NO: 761620
ucuaggaccagagagcagu

SEQ ID NO: 761622 - RNA, 19 nt, Artificial Sequence
  Description of Artificial Sequence: Synthetic oligonucleotide
  Sense strand starting at position 2773 of SEQ ID NO: 587032
aagggagucugcuaacaag

SEQ ID NO: 761623 - RNA, 19 nt, Artificial Sequence
  Description of Artificial Sequence: Synthetic oligonucleotide
  Antisense strand to SEQ ID NO: 761622
cuuguuagcagacucccuu

SEQ ID NO: 761624 - RNA, 19 nt, Artificial Sequence
  Description of Artificial Sequence: Synthetic oligonucleotide
  Sense strand starting at position 2851 of SEQ ID NO: 587032
gucuauuggcuagaagcaa

SEQ ID NO: 761625 - RNA, 19 nt, Artificial Sequence
  Description of Artificial Sequence: Synthetic oligonucleotide
  Antisense strand to SEQ ID NO: 761624
uugcuucuagccaauagac

SEQ ID NO: 761626 - RNA, 19 nt, Artificial Sequence
  Description of Artificial Sequence: Synthetic oligonucleotide
  Sense strand starting at position 2970 of SEQ ID NO: 587032
ugagauacccgaggcauau

SEQ ID NO: 761627 - RNA, 19 nt, Artificial Sequence
  Description of Artificial Sequence: Synthetic oligonucleotide
  Antisense strand to SEQ ID NO: 761626
auaugccucggguaucuca

SEQ ID NO: 761628 - RNA, 19 nt, Artificial Sequence
  Description of Artificial Sequence: Synthetic oligonucleotide
  Sense strand starting at position 3300 of SEQ ID NO: 587032
ucucuacuucuguggguuu

SEQ ID NO: 761629 - RNA, 19 nt, Artificial Sequence
  Description of Artificial Sequence: Synthetic oligonucleotide
  Antisense strand to SEQ ID NO: 761628
aaacccacagaaguagaga

SEQ ID NO: 761630 - RNA, 19 nt, Artificial Sequence
  Description of Artificial Sequence: Synthetic oligonucleotide
  Sense strand starting at position 3344 of SEQ ID NO: 587032
gagaucguacaauauaugu

SEQ ID NO: 761631 - RNA, 19 nt, Artificial Sequence
  Description of Artificial Sequence: Synthetic oligonucleotide
  Antisense strand to SEQ ID NO: 761630
acauauauuguacgaucuc

SEQ ID NO: 761632 - RNA, 19 nt, Artificial Sequence
  Description of Artificial Sequence: Synthetic oligonucleotide
  Sense strand starting at position 3827 of SEQ ID NO: 587032
ucaggugauuugugauauu

SEQ ID NO: 761633 - RNA, 19 nt, Artificial Sequence
  Description of Artificial Sequence: Synthetic oligonucleotide
  Antisense strand to SEQ ID NO: 761632
aauaucacaaaucaccuga

SEQ ID NO: 761634 - RNA, 19 nt, Artificial Sequence
  Description of Artificial Sequence: Synthetic oligonucleotide
  Sense strand starting at position 3830 of SEQ ID NO: 587032
ggugauuugugauauuaaa

SEQ ID NO: 761635 - RNA, 19 nt, Artificial Sequence
  Description of Artificial Sequence: Synthetic oligonucleotide
  Antisense strand to SEQ ID NO: 761634
uuuaauaucacaaaucacc

SEQ ID NO: 761636 - RNA, 19 nt, Artificial Sequence
  Description of Artificial Sequence: Synthetic oligonucleotide
  Sense strand starting at position 3956 of SEQ ID NO: 587032
uugaauaaguuccuuguau

SEQ ID NO: 761637 - RNA, 19 nt, Artificial Sequence
  Description of Artificial Sequence: Synthetic oligonucleotide
  Antisense strand to SEQ ID NO: 761636
auacaaggaacuuauucaa

SEQ ID NO: 761638 - RNA, 19 nt, Artificial Sequence
  Description of Artificial Sequence: Synthetic oligonucleotide
  Sense strand starting at position 3957 of SEQ ID NO: 587032
ugaauaaguuccuuguauu

SEQ ID NO: 761639 - RNA, 19 nt, Artificial Sequence
  Description of Artificial Sequence: Synthetic oligonucleotide
  Antisense strand to SEQ ID NO: 761638
aauacaaggaacuuauuca

SEQ ID NO: 761640 - RNA, 19 nt, Artificial Sequence
  Description of Artificial Sequence: Synthetic oligonucleotide
  Sense strand starting at position 284 of SEQ ID NO: 587033
cggcuaauuuggucuugau

SEQ ID NO: 761641 - RNA, 19 nt, Artificial Sequence
  Description of Artificial Sequence: Synthetic oligonucleotide
  Antisense strand to SEQ ID NO: 761640
aucaagaccaaauuagccg

SEQ ID NO: 761642 - RNA, 19 nt, Artificial Sequence
  Description of Artificial Sequence: Synthetic oligonucleotide
  Sense strand starting at position 287 of SEQ ID NO: 587033
cuaauuuggucuugaucuc

SEQ ID NO: 761643 - RNA, 19 nt, Artificial Sequence
  Description of Artificial Sequence: Synthetic oligonucleotide
  Antisense strand to SEQ ID NO: 761642
gagaucaagaccaaauuag

SEQ ID NO: 761644 - RNA, 19 nt, Artificial Sequence
  Description of Artificial Sequence: Synthetic oligonucleotide
  Sense strand starting at position 476 of SEQ ID NO: 587033
gggaaauuauuugauacuu

SEQ ID NO: 761645 - RNA, 19 nt, Artificial Sequence
  Description of Artificial Sequence: Synthetic oligonucleotide
  Antisense strand to SEQ ID NO: 761644
aaguaucaaauaauuuccc

SEQ ID NO: 761646 - RNA, 19 nt, Artificial Sequence
  Description of Artificial Sequence: Synthetic oligonucleotide
  Sense strand starting at position 623 of SEQ ID NO: 587033
uugcuauauguagacagaa

SEQ ID NO: 761647 - RNA, 19 nt, Artificial Sequence
  Description of Artificial Sequence: Synthetic oligonucleotide
  Antisense strand to SEQ ID NO: 761646
uucugucuacauauagcaa

SEQ ID NO: 761648 - RNA, 19 nt, Artificial Sequence
  Description of Artificial Sequence: Synthetic oligonucleotide
  Sense strand starting at position 749 of SEQ ID NO: 587033
agccuugauuucuguggua

SEQ ID NO: 761649 - RNA, 19 nt, Artificial Sequence
  Description of Artificial Sequence: Synthetic oligonucleotide
  Antisense strand to SEQ ID NO: 761648
uaccacagaaaucaaggcu

SEQ ID NO: 761650 - RNA, 19 nt, Artificial Sequence
  Description of Artificial Sequence: Synthetic oligonucleotide
  Sense strand starting at position 752 of SEQ ID NO: 587033
cuugauuucugugguacau

SEQ ID NO: 761651 - RNA, 19 nt, Artificial Sequence
  Description of Artificial Sequence: Synthetic oligonucleotide
  Antisense strand to SEQ ID NO: 761650
auguaccacagaaaucaag

SEQ ID NO: 761652 - RNA, 19 nt, Artificial Sequence
  Description of Artificial Sequence: Synthetic oligonucleotide
  Sense strand starting at position 754 of SEQ ID NO: 587033
ugauuucugugguacauua

SEQ ID NO: 761653 - RNA, 19 nt, Artificial Sequence
  Description of Artificial Sequence: Synthetic oligonucleotide
  Antisense strand to SEQ ID NO: 761652
uaauguaccacagaaauca

SEQ ID NO: 761654 - RNA, 19 nt, Artificial Sequence
  Description of Artificial Sequence: Synthetic oligonucleotide
  Sense strand starting at position 799 of SEQ ID NO: 587033
gagacauaguauuggguuu

SEQ ID NO: 761655 - RNA, 19 nt, Artificial Sequence
  Description of Artificial Sequence: Synthetic oligonucleotide
  Antisense strand to SEQ ID NO: 761654
aaacccaauacuaugucuc

SEQ ID NO: 761656 - RNA, 19 nt, Artificial Sequence
  Description of Artificial Sequence: Synthetic oligonucleotide
  Sense strand starting at position 2019 of SEQ ID NO: 587033
guuggaaguuaugauacca

SEQ ID NO: 761657 - RNA, 19 nt, Artificial Sequence
  Description of Artificial Sequence: Synthetic oligonucleotide
  Antisense strand to SEQ ID NO: 761656
ugguaucauaacuuccaac

SEQ ID NO: 761658 - RNA, 19 nt, Artificial Sequence
  Description of Artificial Sequence: Synthetic oligonucleotide
  Sense strand starting at position 2055 of SEQ ID NO: 587033
augaaugaacccugagugu

SEQ ID NO: 761659 - RNA, 19 nt, Artificial Sequence
  Description of Artificial Sequence: Synthetic oligonucleotide
  Antisense strand to SEQ ID NO: 761658
acacucaggguucauucau

SEQ ID NO: 761660 - RNA, 19 nt, Artificial Sequence
  Description of Artificial Sequence: Synthetic oligonucleotide
  Sense strand starting at position 2224 of SEQ ID NO: 587033
augagcucauaugcuauau

SEQ ID NO: 761661 - RNA, 19 nt, Artificial Sequence
  Description of Artificial Sequence: Synthetic oligonucleotide
  Antisense strand to SEQ ID NO: 761660
auauagcauaugagcucau

SEQ ID NO: 761662 - RNA, 19 nt, Artificial Sequence
  Description of Artificial Sequence: Synthetic oligonucleotide
  Sense strand starting at position 2583 of SEQ ID NO: 587033
gagaacucucuacgaagcu

SEQ ID NO: 761663 - RNA, 19 nt, Artificial Sequence
  Description of Artificial Sequence: Synthetic oligonucleotide
  Antisense strand to SEQ ID NO: 761662
agcuucguagagaguucuc

SEQ ID NO: 761664 - RNA, 19 nt, Artificial Sequence
  Description of Artificial Sequence: Synthetic oligonucleotide
  Sense strand starting at position 2631 of SEQ ID NO: 587033
ggccucaguugcucuauua

SEQ ID NO: 761665 - RNA, 19 nt, Artificial Sequence
  Description of Artificial Sequence: Synthetic oligonucleotide
  Antisense strand to SEQ ID NO: 761664
uaauagagcaacugaggcc

SEQ ID NO: 761666 - RNA, 19 nt, Artificial Sequence
  Description of Artificial Sequence: Synthetic oligonucleotide
  Sense strand starting at position 2657 of SEQ ID NO: 587033
aauggauuguaggaugaga

SEQ ID NO: 761667 - RNA, 19 nt, Artificial Sequence
  Description of Artificial Sequence: Synthetic oligonucleotide
  Antisense strand to SEQ ID NO: 761666
ucucauccuacaauccauu

SEQ ID NO: 761668 - RNA, 19 nt, Artificial Sequence
  Description of Artificial Sequence: Synthetic oligonucleotide
  Sense strand starting at position 2659 of SEQ ID NO: 587033
uggauuguaggaugagauu

SEQ ID NO: 761669 - RNA, 19 nt, Artificial Sequence
  Description of Artificial Sequence: Synthetic oligonucleotide
  Antisense strand to SEQ ID NO: 761668
aaucucauccuacaaucca

SEQ ID NO: 761670 - RNA, 19 nt, Artificial Sequence
  Description of Artificial Sequence: Synthetic oligonucleotide
  Sense strand starting at position 2668 of SEQ ID NO: 587033
ggaugagauuuccauuccu

SEQ ID NO: 761671 - RNA, 19 nt, Artificial Sequence
  Description of Artificial Sequence: Synthetic oligonucleotide
  Antisense strand to SEQ ID NO: 761670
aggaauggaaaucucaucc

SEQ ID NO: 761672 - RNA, 19 nt, Artificial Sequence
  Description of Artificial Sequence: Synthetic oligonucleotide
  Sense strand starting at position 2676 of SEQ ID NO: 587033
uuuccauuccuucggacua

SEQ ID NO: 761673 - RNA, 19 nt, Artificial Sequence
  Description of Artificial Sequence: Synthetic oligonucleotide
  Antisense strand to SEQ ID NO: 761672
uaguccgaaggaauggaaa

SEQ ID NO: 761674 - RNA, 19 nt, Artificial Sequence
  Description of Artificial Sequence: Synthetic oligonucleotide
  Sense strand starting at position 2678 of SEQ ID NO: 587033
uccauuccuucggacuaaa

SEQ ID NO: 761675 - RNA, 19 nt, Artificial Sequence
  Description of Artificial Sequence: Synthetic oligonucleotide
  Antisense strand to SEQ ID NO: 761674
uuuaguccgaaggaaugga

SEQ ID NO: 761676 - RNA, 19 nt, Artificial Sequence
  Description of Artificial Sequence: Synthetic oligonucleotide
  Sense strand starting at position 2718 of SEQ ID NO: 587033
gucaaacuacgguguacua

SEQ ID NO: 761677 - RNA, 19 nt, Artificial Sequence
  Description of Artificial Sequence: Synthetic oligonucleotide
  Antisense strand to SEQ ID NO: 761676
uaguacaccguaguuugac

SEQ ID NO: 761678 - RNA, 19 nt, Artificial Sequence
  Description of Artificial Sequence: Synthetic oligonucleotide
  Sense strand starting at position 2781 of SEQ ID NO: 587033
gguagcauccauuguacau

SEQ ID NO: 761679 - RNA, 19 nt, Artificial Sequence
  Description of Artificial Sequence: Synthetic oligonucleotide
  Antisense strand to SEQ ID NO: 761678
auguacaauggaugcuacc

SEQ ID NO: 761680 - RNA, 19 nt, Artificial Sequence
  Description of Artificial Sequence: Synthetic oligonucleotide
  Sense strand starting at position 2934 of SEQ ID NO: 587033
cagugacuuucugauagag

SEQ ID NO: 761681 - RNA, 19 nt, Artificial Sequence
  Description of Artificial Sequence: Synthetic oligonucleotide
  Antisense strand to SEQ ID NO: 761680
cucuaucagaaagucacug

SEQ ID NO: 761682 - RNA, 19 nt, Artificial Sequence
  Description of Artificial Sequence: Synthetic oligonucleotide
  Sense strand starting at position 2936 of SEQ ID NO: 587033
gugacuuucugauagagac

SEQ ID NO: 761683 - RNA, 19 nt, Artificial Sequence
  Description of Artificial Sequence: Synthetic oligonucleotide
  Antisense strand to SEQ ID NO: 761682
gucucuaucagaaagucac

SEQ ID NO: 761684 - RNA, 19 nt, Artificial Sequence
  Description of Artificial Sequence: Synthetic oligonucleotide
  Sense strand starting at position 2996 of SEQ ID NO: 587033
aguggaauuugccaccgau

SEQ ID NO: 761685 - RNA, 19 nt, Artificial Sequence
  Description of Artificial Sequence: Synthetic oligonucleotide
  Antisense strand to SEQ ID NO: 761684
aucgguggcaaauuccacu

SEQ ID NO: 761686 - RNA, 19 nt, Artificial Sequence
  Description of Artificial Sequence: Synthetic oligonucleotide
  Sense strand starting at position 3038 of SEQ ID NO: 587033
ccagaaagcuagucuggca

SEQ ID NO: 761687 - RNA, 19 nt, Artificial Sequence
  Description of Artificial Sequence: Synthetic oligonucleotide
  Antisense strand to SEQ ID NO: 761686
ugccagacuagcuuucugg

SEQ ID NO: 761688 - RNA, 19 nt, Artificial Sequence
  Description of Artificial Sequence: Synthetic oligonucleotide
  Sense strand starting at position 3268 of SEQ ID NO: 587033
auagcauauuggcaaagaa

SEQ ID NO: 761689 - RNA, 19 nt, Artificial Sequence
  Description of Artificial Sequence: Synthetic oligonucleotide
  Antisense strand to SEQ ID NO: 761688
uucuuugccaauaugcuau

SEQ ID NO: 761690 - RNA, 19 nt, Artificial Sequence
  Description of Artificial Sequence: Synthetic oligonucleotide
  Sense strand starting at position 3288 of SEQ ID NO: 587033
acuugauuaucugcaguaa

SEQ ID NO: 761691 - RNA, 19 nt, Artificial Sequence
  Description of Artificial Sequence: Synthetic oligonucleotide
  Antisense strand to SEQ ID NO: 761690
uuacugcagauaaucaagu

SEQ ID NO: 761692 - RNA, 19 nt, Artificial Sequence
  Description of Artificial Sequence: Synthetic oligonucleotide
  Sense strand starting at position 3289 of SEQ ID NO: 587033
cuugauuaucugcaguaau

SEQ ID NO: 761693 - RNA, 19 nt, Artificial Sequence
  Description of Artificial Sequence: Synthetic oligonucleotide
  Antisense strand to SEQ ID NO: 761692
auuacugcagauaaucaag

SEQ ID NO: 761694 - RNA, 19 nt, Artificial Sequence
  Description of Artificial Sequence: Synthetic oligonucleotide
  Sense strand starting at position 3316 of SEQ ID NO: 587033
augugauacuucccaugca

SEQ ID NO: 761695 - RNA, 19 nt, Artificial Sequence
  Description of Artificial Sequence: Synthetic oligonucleotide
  Antisense strand to SEQ ID NO: 761694
ugcaugggaaguaucacau

SEQ ID NO: 761696 - RNA, 19 nt, Artificial Sequence
  Description of Artificial Sequence: Synthetic oligonucleotide
  Sense strand starting at position 3523 of SEQ ID NO: 587033
uacuguugucagugauaca

SEQ ID NO: 761697 - RNA, 19 nt, Artificial Sequence
  Description of Artificial Sequence: Synthetic oligonucleotide
  Antisense strand to SEQ ID NO: 761696
uguaucacugacaacagua

SEQ ID NO: 761698 - RNA, 19 nt, Artificial Sequence
  Description of Artificial Sequence: Synthetic oligonucleotide
  Sense strand starting at position 3524 of SEQ ID NO: 587033
acuguugucagugauacag

SEQ ID NO: 761699 - RNA, 19 nt, Artificial Sequence
  Description of Artificial Sequence: Synthetic oligonucleotide
  Antisense strand to SEQ ID NO: 761698
cuguaucacugacaacagu

SEQ ID NO: 761700 - RNA, 19 nt, Artificial Sequence
  Description of Artificial Sequence: Synthetic oligonucleotide
  Sense strand starting at position 3528 of SEQ ID NO: 587033
uugucagugauacaguuaa

SEQ ID NO: 761701 - RNA, 19 nt, Artificial Sequence
  Description of Artificial Sequence: Synthetic oligonucleotide
  Antisense strand to SEQ ID NO: 761700
uuaacuguaucacugacaa

SEQ ID NO: 761702 - RNA, 19 nt, Artificial Sequence
  Description of Artificial Sequence: Synthetic oligonucleotide
  Sense strand starting at position 3540 of SEQ ID NO: 587033
caguuaagggccugauuag

SEQ ID NO: 761703 - RNA, 19 nt, Artificial Sequence
  Description of Artificial Sequence: Synthetic oligonucleotide
  Antisense strand to SEQ ID NO: 761702
cuaaucaggcccuuaacug

SEQ ID NO: 761704 - RNA, 19 nt, Artificial Sequence
  Description of Artificial Sequence: Synthetic oligonucleotide
  Sense strand starting at position 3571 of SEQ ID NO: 587033
agucauggccucuaggauu

SEQ ID NO: 761705 - RNA, 19 nt, Artificial Sequence
  Description of Artificial Sequence: Synthetic oligonucleotide
  Antisense strand to SEQ ID NO: 761704
aauccuagaggccaugacu

SEQ ID NO: 761706 - RNA, 19 nt, Artificial Sequence
  Description of Artificial Sequence: Synthetic oligonucleotide
  Sense strand starting at position 3611 of SEQ ID NO: 587033
acagaauucucugacaagu

SEQ ID NO: 761707 - RNA, 19 nt, Artificial Sequence
  Description of Artificial Sequence: Synthetic oligonucleotide
  Antisense strand to SEQ ID NO: 761706
acuugucagagaauucugu

SEQ ID NO: 761708 - RNA, 19 nt, Artificial Sequence
  Description of Artificial Sequence: Synthetic oligonucleotide
  Sense strand starting at position 3613 of SEQ ID NO: 587033
agaauucucugacaagucu

SEQ ID NO: 761709 - RNA, 19 nt, Artificial Sequence
  Description of Artificial Sequence: Synthetic oligonucleotide
  Antisense strand to SEQ ID NO: 761708
agacuugucagagaauucu

SEQ ID NO: 761710 - RNA, 19 nt, Artificial Sequence
  Description of Artificial Sequence: Synthetic oligonucleotide
  Sense strand starting at position 3622 of SEQ ID NO: 587033
ugacaagucugauuccuca

SEQ ID NO: 761711 - RNA, 19 nt, Artificial Sequence
  Description of Artificial Sequence: Synthetic oligonucleotide
  Antisense strand to SEQ ID NO: 761710
ugaggaaucagacuuguca

SEQ ID NO: 761712 - RNA, 19 nt, Artificial Sequence
  Description of Artificial Sequence: Synthetic oligonucleotide
  Sense strand starting at position 3681 of SEQ ID NO: 587033
gaguguugcagagauggca

SEQ ID NO: 761713 - RNA, 19 nt, Artificial Sequence
  Description of Artificial Sequence: Synthetic oligonucleotide
  Antisense strand to SEQ ID NO: 761712
ugccaucucugcaacacuc

SEQ ID NO: 761714 - RNA, 19 nt, Artificial Sequence
  Description of Artificial Sequence: Synthetic oligonucleotide
  Sense strand starting at position 3695 of SEQ ID NO: 587033
uggcaagaauggugagauc

SEQ ID NO: 761715 - RNA, 19 nt, Artificial Sequence
  Description of Artificial Sequence: Synthetic oligonucleotide
  Antisense strand to SEQ ID NO: 761714
gaucucaccauucuugcca

SEQ ID NO: 761716 - RNA, 19 nt, Artificial Sequence
  Description of Artificial Sequence: Synthetic oligonucleotide
  Sense strand starting at position 3698 of SEQ ID NO: 587033
caagaauggugagaucaga

SEQ ID NO: 761717 - RNA, 19 nt, Artificial Sequence
  Description of Artificial Sequence: Synthetic oligonucleotide
  Antisense strand to SEQ ID NO: 761716
ucugaucucaccauucuug

SEQ ID NO: 761718 - RNA, 19 nt, Artificial Sequence
  Description of Artificial Sequence: Synthetic oligonucleotide
  Sense strand starting at position 3952 of SEQ ID NO: 587033
uguugcuguuuccuguuaa

SEQ ID NO: 761719 - RNA, 19 nt, Artificial Sequence
  Description of Artificial Sequence: Synthetic oligonucleotide
  Antisense strand to SEQ ID NO: 761718
uuaacaggaaacagcaaca

SEQ ID NO: 761720 - RNA, 19 nt, Artificial Sequence
  Description of Artificial Sequence: Synthetic oligonucleotide
  Sense strand starting at position 44 of SEQ ID NO: 587034
agagaccaguccucuaaug

SEQ ID NO: 761721 - RNA, 19 nt, Artificial Sequence
  Description of Artificial Sequence: Synthetic oligonucleotide
  Antisense strand to SEQ ID NO: 761720
cauuagaggacuggucucu

SEQ ID NO: 761722 - RNA, 19 nt, Artificial Sequence
  Description of Artificial Sequence: Synthetic oligonucleotide
  Sense strand starting at position 46 of SEQ ID NO: 587034
agaccaguccucuaaugua

SEQ ID NO: 761723 - RNA, 19 nt, Artificial Sequence
  Description of Artificial Sequence: Synthetic oligonucleotide
  Antisense strand to SEQ ID NO: 761722
uacauuagaggacuggucu

SEQ ID NO: 761724 - RNA, 19 nt, Artificial Sequence
  Description of Artificial Sequence: Synthetic oligonucleotide
  Sense strand starting at position 166 of SEQ ID NO: 587034
gaacuuaaagaacguuuga

SEQ ID NO: 761725 - RNA, 19 nt, Artificial Sequence
  Description of Artificial Sequence: Synthetic oligonucleotide
  Antisense strand to SEQ ID NO: 761724
ucaaacguucuuuaaguuc

SEQ ID NO: 761726 - RNA, 19 nt, Artificial Sequence
  Description of Artificial Sequence: Synthetic oligonucleotide
  Sense strand starting at position 447 of SEQ ID NO: 587034
cuccaaaggucaucggaga

SEQ ID NO: 761727 - RNA, 19 nt, Artificial Sequence
  Description of Artificial Sequence: Synthetic oligonucleotide
  Antisense strand to SEQ ID NO: 761726
ucuccgaugaccuuuggag

SEQ ID NO: 761728 - RNA, 19 nt, Artificial Sequence
  Description of Artificial Sequence: Synthetic oligonucleotide
  Sense strand starting at position 448 of SEQ ID NO: 587034
uccaaaggucaucggagaa

SEQ ID NO: 761729 - RNA, 19 nt, Artificial Sequence
  Description of Artificial Sequence: Synthetic oligonucleotide
  Antisense strand to SEQ ID NO: 761728
uucuccgaugaccuuugga

SEQ ID NO: 761730 - RNA, 19 nt, Artificial Sequence
  Description of Artificial Sequence: Synthetic oligonucleotide
  Sense strand starting at position 601 of SEQ ID NO: 587034
uugaauugaugagaaggga

SEQ ID NO: 761731 - RNA, 19 nt, Artificial Sequence
  Description of Artificial Sequence: Synthetic oligonucleotide
  Antisense strand to SEQ ID NO: 761730
ucccuucucaucaauucaa

SEQ ID NO: 761732 - RNA, 19 nt, Artificial Sequence
  Description of Artificial Sequence: Synthetic oligonucleotide
  Sense strand starting at position 671 of SEQ ID NO: 587034
cccaguucgauugaacaga

SEQ ID NO: 761733 - RNA, 19 nt, Artificial Sequence
  Description of Artificial Sequence: Synthetic oligonucleotide
  Antisense strand to SEQ ID NO: 761732
ucuguucaaucgaacuggg

SEQ ID NO: 761734 - RNA, 19 nt, Artificial Sequence
  Description of Artificial Sequence: Synthetic oligonucleotide
  Sense strand starting at position 697 of SEQ ID NO: 587034
uugcaugaaguuugaggau

SEQ ID NO: 761735 - RNA, 19 nt, Artificial Sequence
  Description of Artificial Sequence: Synthetic oligonucleotide
  Antisense strand to SEQ ID NO: 761734
auccucaaacuucaugcaa

SEQ ID NO: 761736 - RNA, 19 nt, Artificial Sequence
  Description of Artificial Sequence: Synthetic oligonucleotide
  Sense strand starting at position 786 of SEQ ID NO: 587034
uggauucuuugaccacauc

SEQ ID NO: 761737 - RNA, 19 nt, Artificial Sequence
  Description of Artificial Sequence: Synthetic oligonucleotide
  Antisense strand to SEQ ID NO: 761736
gauguggucaaagaaucca

SEQ ID NO: 761738 - RNA, 19 nt, Artificial Sequence
  Description of Artificial Sequence: Synthetic oligonucleotide
  Sense strand starting at position 838 of SEQ ID NO: 587034
gcacuuggugaguacauaa

SEQ ID NO: 761739 - RNA, 19 nt, Artificial Sequence
  Description of Artificial Sequence: Synthetic oligonucleotide
  Antisense strand to SEQ ID NO: 761738
uuauguacucaccaagugc

SEQ ID NO: 761740 - RNA, 19 nt, Artificial Sequence
  Description of Artificial Sequence: Synthetic oligonucleotide
  Sense strand starting at position 1009 of SEQ ID NO: 587034
acaagaaucuccuugaagu

SEQ ID NO: 761741 - RNA, 19 nt, Artificial Sequence
  Description of Artificial Sequence: Synthetic oligonucleotide
  Antisense strand to SEQ ID NO: 761740
acuucaaggagauucuugu

SEQ ID NO: 761742 - RNA, 19 nt, Artificial Sequence
  Description of Artificial Sequence: Synthetic oligonucleotide
  Sense strand starting at position 2065 of SEQ ID NO: 587034
gguccuguaggauauguuu

SEQ ID NO: 761743 - RNA, 19 nt, Artificial Sequence
  Description of Artificial Sequence: Synthetic oligonucleotide
  Antisense strand to SEQ ID NO: 761742
aaacauauccuacaggacc

SEQ ID NO: 761744 - RNA, 19 nt, Artificial Sequence
  Description of Artificial Sequence: Synthetic oligonucleotide
  Sense strand starting at position 2293 of SEQ ID NO: 587034
ggcauuuaguguccuuaca

SEQ ID NO: 761745 - RNA, 19 nt, Artificial Sequence
  Description of Artificial Sequence: Synthetic oligonucleotide
  Antisense strand to SEQ ID NO: 761744
uguaaggacacuaaaugcc

SEQ ID NO: 761746 - RNA, 19 nt, Artificial Sequence
  Description of Artificial Sequence: Synthetic oligonucleotide
  Sense strand starting at position 2675 of SEQ ID NO: 587034
gauaacugguggccucuaa

SEQ ID NO: 761747 - RNA, 19 nt, Artificial Sequence
  Description of Artificial Sequence: Synthetic oligonucleotide
  Antisense strand to SEQ ID NO: 761746
uuagaggccaccaguuauc

SEQ ID NO: 761748 - RNA, 19 nt, Artificial Sequence
  Description of Artificial Sequence: Synthetic oligonucleotide
  Sense strand starting at position 2723 of SEQ ID NO: 587034
gcgauaagccaaugggaua

SEQ ID NO: 761749 - RNA, 19 nt, Artificial Sequence
  Description of Artificial Sequence: Synthetic oligonucleotide
  Antisense strand to SEQ ID NO: 761748
uaucccauuggcuuaucgc

SEQ ID NO: 761750 - RNA, 19 nt, Artificial Sequence
  Description of Artificial Sequence: Synthetic oligonucleotide
  Sense strand starting at position 2724 of SEQ ID NO: 587034
cgauaagccaaugggauau

SEQ ID NO: 761751 - RNA, 19 nt, Artificial Sequence
  Description of Artificial Sequence: Synthetic oligonucleotide
  Antisense strand to SEQ ID NO: 761750
auaucccauuggcuuaucg

SEQ ID NO: 761752 - RNA, 19 nt, Artificial Sequence
  Description of Artificial Sequence: Synthetic oligonucleotide
  Sense strand starting at position 2805 of SEQ ID NO: 587034
ugaguugcuggauauguca

SEQ ID NO: 761753 - RNA, 19 nt, Artificial Sequence
  Description of Artificial Sequence: Synthetic oligonucleotide
  Antisense strand to SEQ ID NO: 761752
ugacauauccagcaacuca

SEQ ID NO: 761754 - RNA, 19 nt, Artificial Sequence
  Description of Artificial Sequence: Synthetic oligonucleotide
  Sense strand starting at position 2895 of SEQ ID NO: 587034
cuuagaaucucggcuuaga

SEQ ID NO: 761755 - RNA, 19 nt, Artificial Sequence
  Description of Artificial Sequence: Synthetic oligonucleotide
  Antisense strand to SEQ ID NO: 761754
ucuaagccgagauucuaag

SEQ ID NO: 761756 - RNA, 19 nt, Artificial Sequence
  Description of Artificial Sequence: Synthetic oligonucleotide
  Sense strand starting at position 2898 of SEQ ID NO: 587034
agaaucucggcuuagaaug

SEQ ID NO: 761757 - RNA, 19 nt, Artificial Sequence
  Description of Artificial Sequence: Synthetic oligonucleotide
  Antisense strand to SEQ ID NO: 761756
cauucuaagccgagauucu

SEQ ID NO: 761758 - RNA, 19 nt, Artificial Sequence
  Description of Artificial Sequence: Synthetic oligonucleotide
  Sense strand starting at position 2903 of SEQ ID NO: 587034
cucggcuuagaaugaaaga

SEQ ID NO: 761759 - RNA, 19 nt, Artificial Sequence
  Description of Artificial Sequence: Synthetic oligonucleotide
  Antisense strand to SEQ ID NO: 761758
ucuuucauucuaagccgag

SEQ ID NO: 761760 - RNA, 19 nt, Artificial Sequence
  Description of Artificial Sequence: Synthetic oligonucleotide
  Sense strand starting at position 3053 of SEQ ID NO: 587034
caugguuagcaauacaugu

SEQ ID NO: 761761 - RNA, 19 nt, Artificial Sequence
  Description of Artificial Sequence: Synthetic oligonucleotide
  Antisense strand to SEQ ID NO: 761760
acauguauugcuaaccaug

SEQ ID NO: 761762 - RNA, 19 nt, Artificial Sequence
  Description of Artificial Sequence: Synthetic oligonucleotide
  Sense strand starting at position 3294 of SEQ ID NO: 587034
acuuuauuagaauggcuau

SEQ ID NO: 761763 - RNA, 19 nt, Artificial Sequence
  Description of Artificial Sequence: Synthetic oligonucleotide
  Antisense strand to SEQ ID NO: 761762
auagccauucuaauaaagu

SEQ ID NO: 761764 - RNA, 19 nt, Artificial Sequence
  Description of Artificial Sequence: Synthetic oligonucleotide
  Sense strand starting at position 3297 of SEQ ID NO: 587034
uuauuagaauggcuaucuu

SEQ ID NO: 761765 - RNA, 19 nt, Artificial Sequence
  Description of Artificial Sequence: Synthetic oligonucleotide
  Antisense strand to SEQ ID NO: 761764
aagauagccauucuaauaa

SEQ ID NO: 761766 - RNA, 19 nt, Artificial Sequence
  Description of Artificial Sequence: Synthetic oligonucleotide
  Sense strand starting at position 3326 of SEQ ID NO: 587034
cauccuguggcauaauaag

SEQ ID NO: 761767 - RNA, 19 nt, Artificial Sequence
  Description of Artificial Sequence: Synthetic oligonucleotide
  Antisense strand to SEQ ID NO: 761766
cuuauuaugccacaggaug

SEQ ID NO: 761768 - RNA, 19 nt, Artificial Sequence
  Description of Artificial Sequence: Synthetic oligonucleotide
  Sense strand starting at position 3402 of SEQ ID NO: 587034
augucagaccacugauauc

SEQ ID NO: 761769 - RNA, 19 nt, Artificial Sequence
  Description of Artificial Sequence: Synthetic oligonucleotide
  Antisense strand to SEQ ID NO: 761768
gauaucaguggucugacau

SEQ ID NO: 761770 - RNA, 19 nt, Artificial Sequence
  Description of Artificial Sequence: Synthetic oligonucleotide
  Sense strand starting at position 3525 of SEQ ID NO: 587034
uaacgugucacagggagau

SEQ ID NO: 761771 - RNA, 19 nt, Artificial Sequence
  Description of Artificial Sequence: Synthetic oligonucleotide
  Antisense strand to SEQ ID NO: 761770
aucucccugugacacguua

SEQ ID NO: 761772 - RNA, 19 nt, Artificial Sequence
  Description of Artificial Sequence: Synthetic oligonucleotide
  Sense strand starting at position 3553 of SEQ ID NO: 587034
ggaauuguucugggucaaa

SEQ ID NO: 761773 - RNA, 19 nt, Artificial Sequence
  Description of Artificial Sequence: Synthetic oligonucleotide
  Antisense strand to SEQ ID NO: 761772
uuugacccagaacaauucc

SEQ ID NO: 761774 - RNA, 19 nt, Artificial Sequence
  Description of Artificial Sequence: Synthetic oligonucleotide
  Sense strand starting at position 3556 of SEQ ID NO: 587034
auuguucugggucaaauac

SEQ ID NO: 761775 - RNA, 19 nt, Artificial Sequence
  Description of Artificial Sequence: Synthetic oligonucleotide
  Antisense strand to SEQ ID NO: 761774
guauuugacccagaacaau

SEQ ID NO: 761776 - RNA, 19 nt, Artificial Sequence
  Description of Artificial Sequence: Synthetic oligonucleotide
  Sense strand starting at position 3565 of SEQ ID NO: 587034
ggucaaauacagcaauauu

SEQ ID NO: 761777 - RNA, 19 nt, Artificial Sequence
  Description of Artificial Sequence: Synthetic oligonucleotide
  Antisense strand to SEQ ID NO: 761776
aauauugcuguauuugacc

SEQ ID NO: 761778 - RNA, 19 nt, Artificial Sequence
  Description of Artificial Sequence: Synthetic oligonucleotide
  Sense strand starting at position 3687 of SEQ ID NO: 587034
gggaauagaacgcauguca

SEQ ID NO: 761779 - RNA, 19 nt, Artificial Sequence
  Description of Artificial Sequence: Synthetic oligonucleotide
  Antisense strand to SEQ ID NO: 761778
ugacaugcguucuauuccc

SEQ ID NO: 761780 - RNA, 19 nt, Artificial Sequence
  Description of Artificial Sequence: Synthetic oligonucleotide
  Sense strand starting at position 3753 of SEQ ID NO: 587034
guggaauuguuucuuuaac

SEQ ID NO: 761781 - RNA, 19 nt, Artificial Sequence
  Description of Artificial Sequence: Synthetic oligonucleotide
  Antisense strand to SEQ ID NO: 761780
guuaaagaaacaauuccac

SEQ ID NO: 761782 - RNA, 19 nt, Artificial Sequence
  Description of Artificial Sequence: Synthetic oligonucleotide
  Sense strand starting at position 3754 of SEQ ID NO: 587034
uggaauuguuucuuuaaca

SEQ ID NO: 761783 - RNA, 19 nt, Artificial Sequence
  Description of Artificial Sequence: Synthetic oligonucleotide
  Antisense strand to SEQ ID NO: 761782
uguuaaagaaacaauucca

SEQ ID NO: 761784 - RNA, 19 nt, Artificial Sequence
  Description of Artificial Sequence: Synthetic oligonucleotide
  Sense strand starting at position 3755 of SEQ ID NO: 587034
ggaauuguuucuuuaacac

SEQ ID NO: 761785 - RNA, 19 nt, Artificial Sequence
  Description of Artificial Sequence: Synthetic oligonucleotide
  Antisense strand to SEQ ID NO: 761784
guguuaaagaaacaauucc

SEQ ID NO: 761786 - RNA, 19 nt, Artificial Sequence
  Description of Artificial Sequence: Synthetic oligonucleotide
  Sense strand starting at position 3790 of SEQ ID NO: 587034
ggacauaggucuucggagu

SEQ ID NO: 761787 - RNA, 19 nt, Artificial Sequence
  Description of Artificial Sequence: Synthetic oligonucleotide
  Antisense strand to SEQ ID NO: 761786
acuccgaagaccuaugucc

SEQ ID NO: 761788 - RNA, 19 nt, Artificial Sequence
  Description of Artificial Sequence: Synthetic oligonucleotide
  Sense strand starting at position 3791 of SEQ ID NO: 587034
gacauaggucuucggagua

SEQ ID NO: 761789 - RNA, 19 nt, Artificial Sequence
  Description of Artificial Sequence: Synthetic oligonucleotide
  Antisense strand to SEQ ID NO: 761788
uacuccgaagaccuauguc

SEQ ID NO: 761790 - RNA, 19 nt, Artificial Sequence
  Description of Artificial Sequence: Synthetic oligonucleotide
  Sense strand starting at position 3796 of SEQ ID NO: 587034
aggucuucggaguaaagga

SEQ ID NO: 761791 - RNA, 19 nt, Artificial Sequence
  Description of Artificial Sequence: Synthetic oligonucleotide
  Antisense strand to SEQ ID NO: 761790
uccuuuacuccgaagaccu

SEQ ID NO: 761792 - RNA, 19 nt, Artificial Sequence
  Description of Artificial Sequence: Synthetic oligonucleotide
  Sense strand starting at position 3844 of SEQ ID NO: 587034
ccuuucugugaagaugcaa

SEQ ID NO: 761793 - RNA, 19 nt, Artificial Sequence
  Description of Artificial Sequence: Synthetic oligonucleotide
  Antisense strand to SEQ ID NO: 761792
uugcaucuucacagaaagg

SEQ ID NO: 761794 - RNA, 19 nt, Artificial Sequence
  Description of Artificial Sequence: Synthetic oligonucleotide
  Sense strand starting at position 3856 of SEQ ID NO: 587034
gaugcaaauuuccaggaga

SEQ ID NO: 761795 - RNA, 19 nt, Artificial Sequence
  Description of Artificial Sequence: Synthetic oligonucleotide
  Antisense strand to SEQ ID NO: 761794
ucuccuggaaauuugcauc

SEQ ID NO: 761796 - RNA, 19 nt, Artificial Sequence
  Description of Artificial Sequence: Synthetic oligonucleotide
  Sense strand starting at position 3871 of SEQ ID NO: 587034
gagauagaguucccaacug

SEQ ID NO: 761797 - RNA, 19 nt, Artificial Sequence
  Description of Artificial Sequence: Synthetic oligonucleotide
  Antisense strand to SEQ ID NO: 761796
caguugggaacucuaucuc

SEQ ID NO: 761798 - RNA, 19 nt, Artificial Sequence
  Description of Artificial Sequence: Synthetic oligonucleotide
  Sense strand starting at position 3970 of SEQ ID NO: 587034
cuuauagcucuggaguaug

SEQ ID NO: 761799 - RNA, 19 nt, Artificial Sequence
  Description of Artificial Sequence: Synthetic oligonucleotide
  Antisense strand to SEQ ID NO: 761798
cauacuccagagcuauaag

SEQ ID NO: 761800 - RNA, 19 nt, Artificial Sequence
  Description of Artificial Sequence: Synthetic oligonucleotide
  Sense strand starting at position 621 of SEQ ID NO: 587035
acuacaauguucuuugaag

SEQ ID NO: 761801 - RNA, 19 nt, Artificial Sequence
  Description of Artificial Sequence: Synthetic oligonucleotide
  Antisense strand to SEQ ID NO: 761800
cuucaaagaacauuguagu

SEQ ID NO: 761802 - RNA, 19 nt, Artificial Sequence
  Description of Artificial Sequence: Synthetic oligonucleotide
  Sense strand starting at position 622 of SEQ ID NO: 587035
cuacaauguucuuugaagu

SEQ ID NO: 761803 - RNA, 19 nt, Artificial Sequence
  Description of Artificial Sequence: Synthetic oligonucleotide
  Antisense strand to SEQ ID NO: 761802
acuucaaagaacauuguag

SEQ ID NO: 761804 - RNA, 19 nt, Artificial Sequence
  Description of Artificial Sequence: Synthetic oligonucleotide
  Sense strand starting at position 639 of SEQ ID NO: 587035
guugaacaaucaguuugaa

SEQ ID NO: 761805 - RNA, 19 nt, Artificial Sequence
  Description of Artificial Sequence: Synthetic oligonucleotide
  Antisense strand to SEQ ID NO: 761804
uucaaacugauuguucaac

SEQ ID NO: 761806 - RNA, 19 nt, Artificial Sequence
  Description of Artificial Sequence: Synthetic oligonucleotide
  Sense strand starting at position 674 of SEQ ID NO: 587035
auuagaagucggcaucauc

SEQ ID NO: 761807 - RNA, 19 nt, Artificial Sequence
  Description of Artificial Sequence: Synthetic oligonucleotide
  Antisense strand to SEQ ID NO: 761806
gaugaugccgacuucuaau

SEQ ID NO: 761808 - RNA, 19 nt, Artificial Sequence
  Description of Artificial Sequence: Synthetic oligonucleotide
  Sense strand starting at position 677 of SEQ ID NO: 587035
agaagucggcaucaucaaa

SEQ ID NO: 761809 - RNA, 19 nt, Artificial Sequence
  Description of Artificial Sequence: Synthetic oligonucleotide
  Antisense strand to SEQ ID NO: 761808
uuugaugaugccgacuucu

SEQ ID NO: 761810 - RNA, 19 nt, Artificial Sequence
  Description of Artificial Sequence: Synthetic oligonucleotide
  Sense strand starting at position 704 of SEQ ID NO: 587035
caaguuuacccuugaaagg

SEQ ID NO: 761811 - RNA, 19 nt, Artificial Sequence
  Description of Artificial Sequence: Synthetic oligonucleotide
  Antisense strand to SEQ ID NO: 761810
ccuuucaaggguaaacuug

SEQ ID NO: 761812 - RNA, 19 nt, Artificial Sequence
  Description of Artificial Sequence: Synthetic oligonucleotide
  Sense strand starting at position 871 of SEQ ID NO: 587035
cgugcacagcucguagaaa

SEQ ID NO: 761813 - RNA, 19 nt, Artificial Sequence
  Description of Artificial Sequence: Synthetic oligonucleotide
  Antisense strand to SEQ ID NO: 761812
uuucuacgagcugugcacg

SEQ ID NO: 761814 - RNA, 19 nt, Artificial Sequence
  Description of Artificial Sequence: Synthetic oligonucleotide
  Sense strand starting at position 892 of SEQ ID NO: 587035
uuaacauuagcagaaugca

SEQ ID NO: 761815 - RNA, 19 nt, Artificial Sequence
  Description of Artificial Sequence: Synthetic oligonucleotide
  Antisense strand to SEQ ID NO: 761814
ugcauucugcuaauguuaa

SEQ ID NO: 761816 - RNA, 19 nt, Artificial Sequence
  Description of Artificial Sequence: Synthetic oligonucleotide
  Sense strand starting at position 1047 of SEQ ID NO: 587035
ccaauaagguguguacaca

SEQ ID NO: 761817 - RNA, 19 nt, Artificial Sequence
  Description of Artificial Sequence: Synthetic oligonucleotide
  Antisense strand to SEQ ID NO: 761816
uguguacacaccuuauugg

SEQ ID NO: 761818 - RNA, 19 nt, Artificial Sequence
  Description of Artificial Sequence: Synthetic oligonucleotide
  Sense strand starting at position 1129 of SEQ ID NO: 587035
gcuaaacucuagccacaga

SEQ ID NO: 761819 - RNA, 19 nt, Artificial Sequence
  Description of Artificial Sequence: Synthetic oligonucleotide
  Antisense strand to SEQ ID NO: 761818
ucuguggcuagaguuuagc

SEQ ID NO: 761820 - RNA, 19 nt, Artificial Sequence
  Description of Artificial Sequence: Synthetic oligonucleotide
  Sense strand starting at position 1215 of SEQ ID NO: 587035
auggauuccaggugaagca

SEQ ID NO: 761821 - RNA, 19 nt, Artificial Sequence
  Description of Artificial Sequence: Synthetic oligonucleotide
  Antisense strand to SEQ ID NO: 761820
ugcuucaccuggaauccau

SEQ ID NO: 761822 - RNA, 19 nt, Artificial Sequence
  Description of Artificial Sequence: Synthetic oligonucleotide
  Sense strand starting at position 1446 of SEQ ID NO: 587035
agaguuuagccuuggacac

SEQ ID NO: 761823 - RNA, 19 nt, Artificial Sequence
  Description of Artificial Sequence: Synthetic oligonucleotide
  Antisense strand to SEQ ID NO: 761822
guguccaaggcuaaacucu

SEQ ID NO: 761824 - RNA, 19 nt, Artificial Sequence
  Description of Artificial Sequence: Synthetic oligonucleotide
  Sense strand starting at position 1660 of SEQ ID NO: 587035
gaagguuugucuucgggaa

SEQ ID NO: 761825 - RNA, 19 nt, Artificial Sequence
  Description of Artificial Sequence: Synthetic oligonucleotide
  Antisense strand to SEQ ID NO: 761824
uucccgaagacaaaccuuc

SEQ ID NO: 761826 - RNA, 19 nt, Artificial Sequence
  Description of Artificial Sequence: Synthetic oligonucleotide
  Sense strand starting at position 1661 of SEQ ID NO: 587035
aagguuugucuucgggaag

SEQ ID NO: 761827 - RNA, 19 nt, Artificial Sequence
  Description of Artificial Sequence: Synthetic oligonucleotide
  Antisense strand to SEQ ID NO: 761826
cuucccgaagacaaaccuu

SEQ ID NO: 761828 - RNA, 19 nt, Artificial Sequence
  Description of Artificial Sequence: Synthetic oligonucleotide
  Sense strand starting at position 1664 of SEQ ID NO: 587035
guuugucuucgggaaggaa

SEQ ID NO: 761829 - RNA, 19 nt, Artificial Sequence
  Description of Artificial Sequence: Synthetic oligonucleotide
  Antisense strand to SEQ ID NO: 761828
uuccuucccgaagacaaac

SEQ ID NO: 761830 - RNA, 19 nt, Artificial Sequence
  Description of Artificial Sequence: Synthetic oligonucleotide
  Sense strand starting at position 1819 of SEQ ID NO: 587035
cgccuuacccaguggaaag

SEQ ID NO: 761831 - RNA, 19 nt, Artificial Sequence
  Description of Artificial Sequence: Synthetic oligonucleotide
  Antisense strand to SEQ ID NO: 761830
cuuuccacuggguaaggcg

SEQ ID NO: 761832 - RNA, 19 nt, Artificial Sequence
  Description of Artificial Sequence: Synthetic oligonucleotide
  Sense strand starting at position 1820 of SEQ ID NO: 587035
gccuuacccaguggaaaga

SEQ ID NO: 761833 - RNA, 19 nt, Artificial Sequence
  Description of Artificial Sequence: Synthetic oligonucleotide
  Antisense strand to SEQ ID NO: 761832
ucuuuccacuggguaaggc

SEQ ID NO: 761834 - RNA, 19 nt, Artificial Sequence
  Description of Artificial Sequence: Synthetic oligonucleotide
  Sense strand starting at position 2216 of SEQ ID NO: 587035
uaaguaacucaccagcgau

SEQ ID NO: 761835 - RNA, 19 nt, Artificial Sequence
  Description of Artificial Sequence: Synthetic oligonucleotide
  Antisense strand to SEQ ID NO: 761834
aucgcuggugaguuacuua

SEQ ID NO: 761836 - RNA, 19 nt, Artificial Sequence
  Description of Artificial Sequence: Synthetic oligonucleotide
  Sense strand starting at position 2385 of SEQ ID NO: 587035
ccaagacugucucugaacu

SEQ ID NO: 761837 - RNA, 19 nt, Artificial Sequence
  Description of Artificial Sequence: Synthetic oligonucleotide
  Antisense strand to SEQ ID NO: 761836
aguucagagacagucuugg

SEQ ID NO: 761838 - RNA, 19 nt, Artificial Sequence
  Description of Artificial Sequence: Synthetic oligonucleotide
  Sense strand starting at position 2525 of SEQ ID NO: 587035
agccgcauuucugugaguu

SEQ ID NO: 761839 - RNA, 19 nt, Artificial Sequence
  Description of Artificial Sequence: Synthetic oligonucleotide
  Antisense strand to SEQ ID NO: 761838
aacucacagaaaugcggcu

SEQ ID NO: 761840 - RNA, 19 nt, Artificial Sequence
  Description of Artificial Sequence: Synthetic oligonucleotide
  Sense strand starting at position 2529 of SEQ ID NO: 587035
gcauuucugugaguuaccu

SEQ ID NO: 761841 - RNA, 19 nt, Artificial Sequence
  Description of Artificial Sequence: Synthetic oligonucleotide
  Antisense strand to SEQ ID NO: 761840
agguaacucacagaaaugc

SEQ ID NO: 761842 - RNA, 19 nt, Artificial Sequence
  Description of Artificial Sequence: Synthetic oligonucleotide
  Sense strand starting at position 2707 of SEQ ID NO: 587035
uagucuucuguugccguaa

SEQ ID NO: 761843 - RNA, 19 nt, Artificial Sequence
  Description of Artificial Sequence: Synthetic oligonucleotide
  Antisense strand to SEQ ID NO: 761842
uuacggcaacagaagacua

SEQ ID NO: 761844 - RNA, 19 nt, Artificial Sequence
  Description of Artificial Sequence: Synthetic oligonucleotide
  Sense strand starting at position 2763 of SEQ ID NO: 587035
uguaaauuagaucgcauua

SEQ ID NO: 761845 - RNA, 19 nt, Artificial Sequence
  Description of Artificial Sequence: Synthetic oligonucleotide
  Antisense strand to SEQ ID NO: 761844
uaaugcgaucuaauuuaca

SEQ ID NO: 761846 - RNA, 19 nt, Artificial Sequence
  Description of Artificial Sequence: Synthetic oligonucleotide
  Sense strand starting at position 2768 of SEQ ID NO: 587035
auuagaucgcauuaaaugu

SEQ ID NO: 761847 - RNA, 19 nt, Artificial Sequence
  Description of Artificial Sequence: Synthetic oligonucleotide
  Antisense strand to SEQ ID NO: 761846
acauuuaaugcgaucuaau

SEQ ID NO: 761848 - RNA, 19 nt, Artificial Sequence
  Description of Artificial Sequence: Synthetic oligonucleotide
  Sense strand starting at position 2859 of SEQ ID NO: 587035
agaagacauuagcuuugau

SEQ ID NO: 761849 - RNA, 19 nt, Artificial Sequence
  Description of Artificial Sequence: Synthetic oligonucleotide
  Antisense strand to SEQ ID NO: 761848
aucaaagcuaaugucuucu

SEQ ID NO: 761850 - RNA, 19 nt, Artificial Sequence
  Description of Artificial Sequence: Synthetic oligonucleotide
  Sense strand starting at position 2862 of SEQ ID NO: 587035
agacauuagcuuugauaac

SEQ ID NO: 761851 - RNA, 19 nt, Artificial Sequence
  Description of Artificial Sequence: Synthetic oligonucleotide
  Antisense strand to SEQ ID NO: 761850
guuaucaaagcuaaugucu

SEQ ID NO: 761852 - RNA, 19 nt, Artificial Sequence
  Description of Artificial Sequence: Synthetic oligonucleotide
  Sense strand starting at position 2903 of SEQ ID NO: 587035
cugauuuguuuccugugua

SEQ ID NO: 761853 - RNA, 19 nt, Artificial Sequence
  Description of Artificial Sequence: Synthetic oligonucleotide
  Antisense strand to SEQ ID NO: 761852
uacacaggaaacaaaucag

SEQ ID NO: 761854 - RNA, 19 nt, Artificial Sequence
  Description of Artificial Sequence: Synthetic oligonucleotide
  Sense strand starting at position 2906 of SEQ ID NO: 587035
auuuguuuccuguguauug

SEQ ID NO: 761855 - RNA, 19 nt, Artificial Sequence
  Description of Artificial Sequence: Synthetic oligonucleotide
  Antisense strand to SEQ ID NO: 761854
caauacacaggaaacaaau

SEQ ID NO: 761856 - RNA, 19 nt, Artificial Sequence
  Description of Artificial Sequence: Synthetic oligonucleotide
  Sense strand starting at position 2941 of SEQ ID NO: 587035
ucuugugcuggguauuaua

SEQ ID NO: 761857 - RNA, 19 nt, Artificial Sequence
  Description of Artificial Sequence: Synthetic oligonucleotide
  Antisense strand to SEQ ID NO: 761856
uauaauacccagcacaaga

SEQ ID NO: 761858 - RNA, 19 nt, Artificial Sequence
  Description of Artificial Sequence: Synthetic oligonucleotide
  Sense strand starting at position 2949 of SEQ ID NO: 587035
uggguauuauacuugauca

SEQ ID NO: 761859 - RNA, 19 nt, Artificial Sequence
  Description of Artificial Sequence: Synthetic oligonucleotide
  Antisense strand to SEQ ID NO: 761858
ugaucaaguauaauaccca

SEQ ID NO: 761860 - RNA, 19 nt, Artificial Sequence
  Description of Artificial Sequence: Synthetic oligonucleotide
  Sense strand starting at position 3034 of SEQ ID NO: 587035
cggugugaauaaucaacau

SEQ ID NO: 761861 - RNA, 19 nt, Artificial Sequence
  Description of Artificial Sequence: Synthetic oligonucleotide
  Antisense strand to SEQ ID NO: 761860
auguugauuauucacaccg

SEQ ID NO: 761862 - RNA, 19 nt, Artificial Sequence
  Description of Artificial Sequence: Synthetic oligonucleotide
  Sense strand starting at position 3093 of SEQ ID NO: 587035
agaaauaacugugucccuu

SEQ ID NO: 761863 - RNA, 19 nt, Artificial Sequence
  Description of Artificial Sequence: Synthetic oligonucleotide
  Antisense strand to SEQ ID NO: 761862
aagggacacaguuauuucu

SEQ ID NO: 761864 - RNA, 19 nt, Artificial Sequence
  Description of Artificial Sequence: Synthetic oligonucleotide
  Sense strand starting at position 3097 of SEQ ID NO: 587035
auaacugugucccuuaaga

SEQ ID NO: 761865 - RNA, 19 nt, Artificial Sequence
  Description of Artificial Sequence: Synthetic oligonucleotide
  Antisense strand to SEQ ID NO: 761864
ucuuaagggacacaguuau

SEQ ID NO: 761866 - RNA, 19 nt, Artificial Sequence
  Description of Artificial Sequence: Synthetic oligonucleotide
  Sense strand starting at position 3143 of SEQ ID NO: 587035
agcacaauuugucagagau

SEQ ID NO: 761867 - RNA, 19 nt, Artificial Sequence
  Description of Artificial Sequence: Synthetic oligonucleotide
  Antisense strand to SEQ ID NO: 761866
aucucugacaaauugugcu

SEQ ID NO: 761868 - RNA, 19 nt, Artificial Sequence
  Description of Artificial Sequence: Synthetic oligonucleotide
  Sense strand starting at position 3145 of SEQ ID NO: 587035
cacaauuugucagagaugu

SEQ ID NO: 761869 - RNA, 19 nt, Artificial Sequence
  Description of Artificial Sequence: Synthetic oligonucleotide
  Antisense strand to SEQ ID NO: 761868
acaucucugacaaauugug

SEQ ID NO: 761870 - RNA, 19 nt, Artificial Sequence
  Description of Artificial Sequence: Synthetic oligonucleotide
  Sense strand starting at position 3158 of SEQ ID NO: 587035
agaugucacucuuuguuua

SEQ ID NO: 761871 - RNA, 19 nt, Artificial Sequence
  Description of Artificial Sequence: Synthetic oligonucleotide
  Antisense strand to SEQ ID NO: 761870
uaaacaaagagugacaucu

SEQ ID NO: 761872 - RNA, 19 nt, Artificial Sequence
  Description of Artificial Sequence: Synthetic oligonucleotide
  Sense strand starting at position 3160 of SEQ ID NO: 587035
augucacucuuuguuuaaa

SEQ ID NO: 761873 - RNA, 19 nt, Artificial Sequence
  Description of Artificial Sequence: Synthetic oligonucleotide
  Antisense strand to SEQ ID NO: 761872
uuuaaacaaagagugacau

SEQ ID NO: 761874 - RNA, 19 nt, Artificial Sequence
  Description of Artificial Sequence: Synthetic oligonucleotide
  Sense strand starting at position 3161 of SEQ ID NO: 587035
ugucacucuuuguuuaaau

SEQ ID NO: 761875 - RNA, 19 nt, Artificial Sequence
  Description of Artificial Sequence: Synthetic oligonucleotide
  Antisense strand to SEQ ID NO: 761874
auuuaaacaaagagugaca

SEQ ID NO: 761876 - RNA, 19 nt, Artificial Sequence
  Description of Artificial Sequence: Synthetic oligonucleotide
  Sense strand starting at position 3162 of SEQ ID NO: 587035
gucacucuuuguuuaaauc

SEQ ID NO: 761877 - RNA, 19 nt, Artificial Sequence
  Description of Artificial Sequence: Synthetic oligonucleotide
  Antisense strand to SEQ ID NO: 761876
gauuuaaacaaagagugac

SEQ ID NO: 761878 - RNA, 19 nt, Artificial Sequence
  Description of Artificial Sequence: Synthetic oligonucleotide
  Sense strand starting at position 3581 of SEQ ID NO: 587035
gguauuuguucuggaauuu

SEQ ID NO: 761879 - RNA, 19 nt, Artificial Sequence
  Description of Artificial Sequence: Synthetic oligonucleotide
  Antisense strand to SEQ ID NO: 761878
aaauuccagaacaaauacc

SEQ ID NO: 761880 - RNA, 19 nt, Artificial Sequence
  Description of Artificial Sequence: Synthetic oligonucleotide
  Sense strand starting at position 149 of SEQ ID NO: 587036
cgugcacagcucguagaaa

SEQ ID NO: 761881 - RNA, 19 nt, Artificial Sequence
  Description of Artificial Sequence: Synthetic oligonucleotide
  Antisense strand to SEQ ID NO: 761880
uuucuacgagcugugcacg

SEQ ID NO: 761882 - RNA, 19 nt, Artificial Sequence
  Description of Artificial Sequence: Synthetic oligonucleotide
  Sense strand starting at position 170 of SEQ ID NO: 587036
uuaacauuagcagaaugca

SEQ ID NO: 761883 - RNA, 19 nt, Artificial Sequence
  Description of Artificial Sequence: Synthetic oligonucleotide
  Antisense strand to SEQ ID NO: 761882
ugcauucugcuaauguuaa

SEQ ID NO: 761884 - RNA, 19 nt, Artificial Sequence
  Description of Artificial Sequence: Synthetic oligonucleotide
  Sense strand starting at position 325 of SEQ ID NO: 587036
ccaauaagguguguacaca

SEQ ID NO: 761885 - RNA, 19 nt, Artificial Sequence
  Description of Artificial Sequence: Synthetic oligonucleotide
  Antisense strand to SEQ ID NO: 761884
uguguacacaccuuauugg

SEQ ID NO: 761886 - RNA, 19 nt, Artificial Sequence
  Description of Artificial Sequence: Synthetic oligonucleotide
  Sense strand starting at position 407 of SEQ ID NO: 587036
gcuaaacucuagccacaga

SEQ ID NO: 761887 - RNA, 19 nt, Artificial Sequence
  Description of Artificial Sequence: Synthetic oligonucleotide
  Antisense strand to SEQ ID NO: 761886
ucuguggcuagaguuuagc

SEQ ID NO: 761888 - RNA, 19 nt, Artificial Sequence
  Description of Artificial Sequence: Synthetic oligonucleotide
  Sense strand starting at position 493 of SEQ ID NO: 587036
auggauuccaggugaagca

SEQ ID NO: 761889 - RNA, 19 nt, Artificial Sequence
  Description of Artificial Sequence: Synthetic oligonucleotide
  Antisense strand to SEQ ID NO: 761888
ugcuucaccuggaauccau

SEQ ID NO: 761890 - RNA, 19 nt, Artificial Sequence
  Description of Artificial Sequence: Synthetic oligonucleotide
  Sense strand starting at position 724 of SEQ ID NO: 587036
agaguuuagccuuggacac

SEQ ID NO: 761891 - RNA, 19 nt, Artificial Sequence
  Description of Artificial Sequence: Synthetic oligonucleotide
  Antisense strand to SEQ ID NO: 761890
guguccaaggcuaaacucu

SEQ ID NO: 761892 - RNA, 19 nt, Artificial Sequence
  Description of Artificial Sequence: Synthetic oligonucleotide
  Sense strand starting at position 938 of SEQ ID NO: 587036
gaagguuugucuucgggaa

SEQ ID NO: 761893 - RNA, 19 nt, Artificial Sequence
  Description of Artificial Sequence: Synthetic oligonucleotide
  Antisense strand to SEQ ID NO: 761892
uucccgaagacaaaccuuc

SEQ ID NO: 761894 - RNA, 19 nt, Artificial Sequence
  Description of Artificial Sequence: Synthetic oligonucleotide
  Sense strand starting at position 939 of SEQ ID NO: 587036
aagguuugucuucgggaag

SEQ ID NO: 761895 - RNA, 19 nt, Artificial Sequence
  Description of Artificial Sequence: Synthetic oligonucleotide
  Antisense strand to SEQ ID NO: 761894
cuucccgaagacaaaccuu

SEQ ID NO: 761896 - RNA, 19 nt, Artificial Sequence
  Description of Artificial Sequence: Synthetic oligonucleotide
  Sense strand starting at position 942 of SEQ ID NO: 587036
guuugucuucgggaaggaa

SEQ ID NO: 761897 - RNA, 19 nt, Artificial Sequence
  Description of Artificial Sequence: Synthetic oligonucleotide
  Antisense strand to SEQ ID NO: 761896
uuccuucccgaagacaaac

SEQ ID NO: 761898 - RNA, 19 nt, Artificial Sequence
  Description of Artificial Sequence: Synthetic oligonucleotide
  Sense strand starting at position 1098 of SEQ ID NO: 587036
gccuuacccaguggaaaga

SEQ ID NO: 761899 - RNA, 19 nt, Artificial Sequence
  Description of Artificial Sequence: Synthetic oligonucleotide
  Antisense strand to SEQ ID NO: 761898
ucuuuccacuggguaaggc

SEQ ID NO: 761900 - RNA, 19 nt, Artificial Sequence
  Description of Artificial Sequence: Synthetic oligonucleotide
  Sense strand starting at position 1494 of SEQ ID NO: 587036
uaaguaacucaccagcgau

SEQ ID NO: 761901 - RNA, 19 nt, Artificial Sequence
  Description of Artificial Sequence: Synthetic oligonucleotide
  Antisense strand to SEQ ID NO: 761900
aucgcuggugaguuacuua

SEQ ID NO: 761902 - RNA, 19 nt, Artificial Sequence
  Description of Artificial Sequence: Synthetic oligonucleotide
  Sense strand starting at position 1663 of SEQ ID NO: 587036
ccaagacugucucugaacu

SEQ ID NO: 761903 - RNA, 19 nt, Artificial Sequence
  Description of Artificial Sequence: Synthetic oligonucleotide
  Antisense strand to SEQ ID NO: 761902
aguucagagacagucuugg

SEQ ID NO: 761904 - RNA, 19 nt, Artificial Sequence
  Description of Artificial Sequence: Synthetic oligonucleotide
  Sense strand starting at position 1807 of SEQ ID NO: 587036
gcauuucugugaguuaccu

SEQ ID NO: 761905 - RNA, 19 nt, Artificial Sequence
  Description of Artificial Sequence: Synthetic oligonucleotide
  Antisense strand to SEQ ID NO: 761904
agguaacucacagaaaugc

SEQ ID NO: 761906 - RNA, 19 nt, Artificial Sequence
  Description of Artificial Sequence: Synthetic oligonucleotide
  Sense strand starting at position 1985 of SEQ ID NO: 587036
uagucuucuguugccguaa

SEQ ID NO: 761907 - RNA, 19 nt, Artificial Sequence
  Description of Artificial Sequence: Synthetic oligonucleotide
  Antisense strand to SEQ ID NO: 761906
uuacggcaacagaagacua

SEQ ID NO: 761908 - RNA, 19 nt, Artificial Sequence
  Description of Artificial Sequence: Synthetic oligonucleotide
  Sense strand starting at position 2046 of SEQ ID NO: 587036
auuagaucgcauuaaaugu

SEQ ID NO: 761909 - RNA, 19 nt, Artificial Sequence
  Description of Artificial Sequence: Synthetic oligonucleotide
  Antisense strand to SEQ ID NO: 761908
acauuuaaugcgaucuaau

SEQ ID NO: 761910 - RNA, 19 nt, Artificial Sequence
  Description of Artificial Sequence: Synthetic oligonucleotide
  Sense strand starting at position 2137 of SEQ ID NO: 587036
agaagacauuagcuuugau

SEQ ID NO: 761911 - RNA, 19 nt, Artificial Sequence
  Description of Artificial Sequence: Synthetic oligonucleotide
  Antisense strand to SEQ ID NO: 761910
aucaaagcuaaugucuucu

SEQ ID NO: 761912 - RNA, 19 nt, Artificial Sequence
  Description of Artificial Sequence: Synthetic oligonucleotide
  Sense strand starting at position 2140 of SEQ ID NO: 587036
agacauuagcuuugauaac

SEQ ID NO: 761913 - RNA, 19 nt, Artificial Sequence
  Description of Artificial Sequence: Synthetic oligonucleotide
  Antisense strand to SEQ ID NO: 761912
guuaucaaagcuaaugucu

SEQ ID NO: 761914 - RNA, 19 nt, Artificial Sequence
  Description of Artificial Sequence: Synthetic oligonucleotide
  Sense strand starting at position 2181 of SEQ ID NO: 587036
cugauuuguuuccugugua

SEQ ID NO: 761915 - RNA, 19 nt, Artificial Sequence
  Description of Artificial Sequence: Synthetic oligonucleotide
  Antisense strand to SEQ ID NO: 761914
uacacaggaaacaaaucag

SEQ ID NO: 761916 - RNA, 19 nt, Artificial Sequence
  Description of Artificial Sequence: Synthetic oligonucleotide
  Sense strand starting at position 2184 of SEQ ID NO: 587036
auuuguuuccuguguauug

SEQ ID NO: 761917 - RNA, 19 nt, Artificial Sequence
  Description of Artificial Sequence: Synthetic oligonucleotide
  Antisense strand to SEQ ID NO: 761916
caauacacaggaaacaaau

SEQ ID NO: 761918 - RNA, 19 nt, Artificial Sequence
  Description of Artificial Sequence: Synthetic oligonucleotide
  Sense strand starting at position 2227 of SEQ ID NO: 587036
uggguauuauacuugauca

SEQ ID NO: 761919 - RNA, 19 nt, Artificial Sequence
  Description of Artificial Sequence: Synthetic oligonucleotide
  Antisense strand to SEQ ID NO: 761918
ugaucaaguauaauaccca

SEQ ID NO: 761920 - RNA, 19 nt, Artificial Sequence
  Description of Artificial Sequence: Synthetic oligonucleotide
  Sense strand starting at position 2312 of SEQ ID NO: 587036
cggugugaauaaucaacau

SEQ ID NO: 761921 - RNA, 19 nt, Artificial Sequence
  Description of Artificial Sequence: Synthetic oligonucleotide
  Antisense strand to SEQ ID NO: 761920
auguugauuauucacaccg

SEQ ID NO: 761922 - RNA, 19 nt, Artificial Sequence
  Description of Artificial Sequence: Synthetic oligonucleotide
  Sense strand starting at position 2371 of SEQ ID NO: 587036
agaaauaacugugucccuu

SEQ ID NO: 761923 - RNA, 19 nt, Artificial Sequence
  Description of Artificial Sequence: Synthetic oligonucleotide
  Antisense strand to SEQ ID NO: 761922
aagggacacaguuauuucu

SEQ ID NO: 761924 - RNA, 19 nt, Artificial Sequence
  Description of Artificial Sequence: Synthetic oligonucleotide
  Sense strand starting at position 2375 of SEQ ID NO: 587036
auaacugugucccuuaaga

SEQ ID NO: 761925 - RNA, 19 nt, Artificial Sequence
  Description of Artificial Sequence: Synthetic oligonucleotide
  Antisense strand to SEQ ID NO: 761924
ucuuaagggacacaguuau

SEQ ID NO: 761926 - RNA, 19 nt, Artificial Sequence
  Description of Artificial Sequence: Synthetic oligonucleotide
  Sense strand starting at position 2421 of SEQ ID NO: 587036
agcacaauuugucagagau

SEQ ID NO: 761927 - RNA, 19 nt, Artificial Sequence
  Description of Artificial Sequence: Synthetic oligonucleotide
  Antisense strand to SEQ ID NO: 761926
aucucugacaaauugugcu

SEQ ID NO: 761928 - RNA, 19 nt, Artificial Sequence
  Description of Artificial Sequence: Synthetic oligonucleotide
  Sense strand starting at position 2438 of SEQ ID NO: 587036
augucacucuuuguuuaaa

SEQ ID NO: 761929 - RNA, 19 nt, Artificial Sequence
  Description of Artificial Sequence: Synthetic oligonucleotide
  Antisense strand to SEQ ID NO: 761928
uuuaaacaaagagugacau

SEQ ID NO: 761930 - RNA, 19 nt, Artificial Sequence
  Description of Artificial Sequence: Synthetic oligonucleotide
  Sense strand starting at position 2859 of SEQ ID NO: 587036
gguauuuguucuggaauuu

SEQ ID NO: 761931 - RNA, 19 nt, Artificial Sequence
  Description of Artificial Sequence: Synthetic oligonucleotide
  Antisense strand to SEQ ID NO: 761930
aaauuccagaacaaauacc

SEQ ID NO: 761932 - RNA, 19 nt, Artificial Sequence
  Description of Artificial Sequence: Synthetic oligonucleotide
  Sense strand starting at position 3324 of SEQ ID NO: 587036
guuagccucuuauuuguau

SEQ ID NO: 761933 - RNA, 19 nt, Artificial Sequence
  Description of Artificial Sequence: Synthetic oligonucleotide
  Antisense strand to SEQ ID NO: 761932
auacaaauaagaggcuaac

SEQ ID NO: 761934 - RNA, 19 nt, Artificial Sequence
  Description of Artificial Sequence: Synthetic oligonucleotide
  Sense strand starting at position 3330 of SEQ ID NO: 587036
cucuuauuuguauggcagu

SEQ ID NO: 761935 - RNA, 19 nt, Artificial Sequence
  Description of Artificial Sequence: Synthetic oligonucleotide
  Antisense strand to SEQ ID NO: 761934
acugccauacaaauaagag

SEQ ID NO: 761936 - RNA, 19 nt, Artificial Sequence
  Description of Artificial Sequence: Synthetic oligonucleotide
  Sense strand starting at position 3387 of SEQ ID NO: 587036
agugaaaucuuucugccag

SEQ ID NO: 761937 - RNA, 19 nt, Artificial Sequence
  Description of Artificial Sequence: Synthetic oligonucleotide
  Antisense strand to SEQ ID NO: 761936
cuggcagaaagauuucacu

SEQ ID NO: 761938 - RNA, 19 nt, Artificial Sequence
  Description of Artificial Sequence: Synthetic oligonucleotide
  Sense strand starting at position 3389 of SEQ ID NO: 587036
ugaaaucuuucugccagau

SEQ ID NO: 761939 - RNA, 19 nt, Artificial Sequence
  Description of Artificial Sequence: Synthetic oligonucleotide
  Antisense strand to SEQ ID NO: 761938
aucuggcagaaagauuuca

SEQ ID NO: 761940 - RNA, 19 nt, Artificial Sequence
  Description of Artificial Sequence: Synthetic oligonucleotide
  Sense strand starting at position 3393 of SEQ ID NO: 587036
aucuuucugccagauggau

SEQ ID NO: 761941 - RNA, 19 nt, Artificial Sequence
  Description of Artificial Sequence: Synthetic oligonucleotide
  Antisense strand to SEQ ID NO: 761940
auccaucuggcagaaagau

SEQ ID NO: 761942 - RNA, 19 nt, Artificial Sequence
  Description of Artificial Sequence: Synthetic oligonucleotide
  Sense strand starting at position 3441 of SEQ ID NO: 587036
agaggugugcuuuauguga

SEQ ID NO: 761943 - RNA, 19 nt, Artificial Sequence
  Description of Artificial Sequence: Synthetic oligonucleotide
  Antisense strand to SEQ ID NO: 761942
ucacauaaagcacaccucu

SEQ ID NO: 761944 - RNA, 19 nt, Artificial Sequence
  Description of Artificial Sequence: Synthetic oligonucleotide
  Sense strand starting at position 3454 of SEQ ID NO: 587036
augugacauuccucacuau

SEQ ID NO: 761945 - RNA, 19 nt, Artificial Sequence
  Description of Artificial Sequence: Synthetic oligonucleotide
  Antisense strand to SEQ ID NO: 761944
auagugaggaaugucacau

SEQ ID NO: 761946 - RNA, 19 nt, Artificial Sequence
  Description of Artificial Sequence: Synthetic oligonucleotide
  Sense strand starting at position 3455 of SEQ ID NO: 587036
ugugacauuccucacuauc

SEQ ID NO: 761947 - RNA, 19 nt, Artificial Sequence
  Description of Artificial Sequence: Synthetic oligonucleotide
  Antisense strand to SEQ ID NO: 761946
gauagugaggaaugucaca

SEQ ID NO: 761948 - RNA, 19 nt, Artificial Sequence
  Description of Artificial Sequence: Synthetic oligonucleotide
  Sense strand starting at position 3537 of SEQ ID NO: 587036
ugaaauguauagucucacu

SEQ ID NO: 761949 - RNA, 19 nt, Artificial Sequence
  Description of Artificial Sequence: Synthetic oligonucleotide
  Antisense strand to SEQ ID NO: 761948
agugagacuauacauuuca

SEQ ID NO: 761950 - RNA, 19 nt, Artificial Sequence
  Description of Artificial Sequence: Synthetic oligonucleotide
  Sense strand starting at position 3863 of SEQ ID NO: 587036
uuucgaaguggugaauauu

SEQ ID NO: 761951 - RNA, 19 nt, Artificial Sequence
  Description of Artificial Sequence: Synthetic oligonucleotide
  Antisense strand to SEQ ID NO: 761950
aauauucaccacuucgaaa

SEQ ID NO: 761952 - RNA, 19 nt, Artificial Sequence
  Description of Artificial Sequence: Synthetic oligonucleotide
  Sense strand starting at position 3895 of SEQ ID NO: 587036
gaaaguaaaucagugagua

SEQ ID NO: 761953 - RNA, 19 nt, Artificial Sequence
  Description of Artificial Sequence: Synthetic oligonucleotide
  Antisense strand to SEQ ID NO: 761952
uacucacugauuuacuuuc

SEQ ID NO: 761954 - RNA, 19 nt, Artificial Sequence
  Description of Artificial Sequence: Synthetic oligonucleotide
  Sense strand starting at position 3896 of SEQ ID NO: 587036
aaaguaaaucagugaguaa

SEQ ID NO: 761955 - RNA, 19 nt, Artificial Sequence
  Description of Artificial Sequence: Synthetic oligonucleotide
  Antisense strand to SEQ ID NO: 761954
uuacucacugauuuacuuu

SEQ ID NO: 761956 - RNA, 19 nt, Artificial Sequence
  Description of Artificial Sequence: Synthetic oligonucleotide
  Sense strand starting at position 3958 of SEQ ID NO: 587036
ggcaguuguccuguguuug

SEQ ID NO: 761957 - RNA, 19 nt, Artificial Sequence
  Description of Artificial Sequence: Synthetic oligonucleotide
  Antisense strand to SEQ ID NO: 761956
caaacacaggacaacugcc

SEQ ID NO: 761958 - RNA, 19 nt, Artificial Sequence
  Description of Artificial Sequence: Synthetic oligonucleotide
  Sense strand starting at position 3966 of SEQ ID NO: 587036
uccuguguuugauugggaa

SEQ ID NO: 761959 - RNA, 19 nt, Artificial Sequence
  Description of Artificial Sequence: Synthetic oligonucleotide
  Antisense strand to SEQ ID NO: 761958
uucccaaucaaacacagga

SEQ ID NO: 761960 - RNA, 19 nt, Artificial Sequence
  Description of Artificial Sequence: Synthetic oligonucleotide
  Sense strand starting at position 181 of SEQ ID NO: 587037
ggcaaacucuucuucuaga

SEQ ID NO: 761961 - RNA, 19 nt, Artificial Sequence
  Description of Artificial Sequence: Synthetic oligonucleotide
  Antisense strand to SEQ ID NO: 761960
ucuagaagaagaguuugcc

SEQ ID NO: 761962 - RNA, 19 nt, Artificial Sequence
  Description of Artificial Sequence: Synthetic oligonucleotide
  Sense strand starting at position 524 of SEQ ID NO: 587037
ccgagaucccgccacuaga

SEQ ID NO: 761963 - RNA, 19 nt, Artificial Sequence
  Description of Artificial Sequence: Synthetic oligonucleotide
  Antisense strand to SEQ ID NO: 761962
ucuaguggcgggaucucgg

SEQ ID NO: 761964 - RNA, 19 nt, Artificial Sequence
  Description of Artificial Sequence: Synthetic oligonucleotide
  Sense strand starting at position 920 of SEQ ID NO: 587037
cacugacucucugguguuu

SEQ ID NO: 761965 - RNA, 19 nt, Artificial Sequence
  Description of Artificial Sequence: Synthetic oligonucleotide
  Antisense strand to SEQ ID NO: 761964
aaacaccagagagucagug

SEQ ID NO: 761966 - RNA, 19 nt, Artificial Sequence
  Description of Artificial Sequence: Synthetic oligonucleotide
  Sense strand starting at position 1017 of SEQ ID NO: 587037
cgcgaucuaucacaacuca

SEQ ID NO: 761967 - RNA, 19 nt, Artificial Sequence
  Description of Artificial Sequence: Synthetic oligonucleotide
  Antisense strand to SEQ ID NO: 761966
ugaguugugauagaucgcg

SEQ ID NO: 761968 - RNA, 19 nt, Artificial Sequence
  Description of Artificial Sequence: Synthetic oligonucleotide
  Sense strand starting at position 1315 of SEQ ID NO: 587037
guacuucuccuuuacugga

SEQ ID NO: 761969 - RNA, 19 nt, Artificial Sequence
  Description of Artificial Sequence: Synthetic oligonucleotide
  Antisense strand to SEQ ID NO: 761968
uccaguaaaggagaaguac

SEQ ID NO: 761970 - RNA, 19 nt, Artificial Sequence
  Description of Artificial Sequence: Synthetic oligonucleotide
  Sense strand starting at position 1357 of SEQ ID NO: 587037
agccuaucacagggucaua

SEQ ID NO: 761971 - RNA, 19 nt, Artificial Sequence
  Description of Artificial Sequence: Synthetic oligonucleotide
  Antisense strand to SEQ ID NO: 761970
uaugacccugugauaggcu

SEQ ID NO: 761972 - RNA, 19 nt, Artificial Sequence
  Description of Artificial Sequence: Synthetic oligonucleotide
  Sense strand starting at position 1369 of SEQ ID NO: 587037
ggucauagaugcccaguaa

SEQ ID NO: 761973 - RNA, 19 nt, Artificial Sequence
  Description of Artificial Sequence: Synthetic oligonucleotide
  Antisense strand to SEQ ID NO: 761972
uuacugggcaucuaugacc

SEQ ID NO: 761974 - RNA, 19 nt, Artificial Sequence
  Description of Artificial Sequence: Synthetic oligonucleotide
  Sense strand starting at position 1370 of SEQ ID NO: 587037
gucauagaugcccaguaaa

SEQ ID NO: 761975 - RNA, 19 nt, Artificial Sequence
  Description of Artificial Sequence: Synthetic oligonucleotide
  Antisense strand to SEQ ID NO: 761974
uuuacugggcaucuaugac

SEQ ID NO: 761976 - RNA, 19 nt, Artificial Sequence
  Description of Artificial Sequence: Synthetic oligonucleotide
  Sense strand starting at position 1383 of SEQ ID NO: 587037
aguaaaugcugcugcacau

SEQ ID NO: 761977 - RNA, 19 nt, Artificial Sequence
  Description of Artificial Sequence: Synthetic oligonucleotide
  Antisense strand to SEQ ID NO: 761976
augugcagcagcauuuacu

SEQ ID NO: 761978 - RNA, 19 nt, Artificial Sequence
  Description of Artificial Sequence: Synthetic oligonucleotide
  Sense strand starting at position 1437 of SEQ ID NO: 587037
ggagcaggcugaagaguuu

SEQ ID NO: 761979 - RNA, 19 nt, Artificial Sequence
  Description of Artificial Sequence: Synthetic oligonucleotide
  Antisense strand to SEQ ID NO: 761978
aaacucuucagccugcucc

SEQ ID NO: 761980 - RNA, 19 nt, Artificial Sequence
  Description of Artificial Sequence: Synthetic oligonucleotide
  Sense strand starting at position 1854 of SEQ ID NO: 587037
gcgagagcuccauguuggu

SEQ ID NO: 761981 - RNA, 19 nt, Artificial Sequence
  Description of Artificial Sequence: Synthetic oligonucleotide
  Antisense strand to SEQ ID NO: 761980
accaacauggagcucucgc

SEQ ID NO: 761982 - RNA, 19 nt, Artificial Sequence
  Description of Artificial Sequence: Synthetic oligonucleotide
  Sense strand starting at position 2316 of SEQ ID NO: 587037
ucgccuggcgguugagauu

SEQ ID NO: 761983 - RNA, 19 nt, Artificial Sequence
  Description of Artificial Sequence: Synthetic oligonucleotide
  Antisense strand to SEQ ID NO: 761982
aaucucaaccgccaggcga

SEQ ID NO: 761984 - RNA, 19 nt, Artificial Sequence
  Description of Artificial Sequence: Synthetic oligonucleotide
  Sense strand starting at position 2396 of SEQ ID NO: 587037
agaacucacugauaauugu

SEQ ID NO: 761985 - RNA, 19 nt, Artificial Sequence
  Description of Artificial Sequence: Synthetic oligonucleotide
  Antisense strand to SEQ ID NO: 761984
acaauuaucagugaguucu

SEQ ID NO: 761986 - RNA, 19 nt, Artificial Sequence
  Description of Artificial Sequence: Synthetic oligonucleotide
  Sense strand starting at position 2505 of SEQ ID NO: 587037
cucagcaucagcgaaaguu

SEQ ID NO: 761987 - RNA, 19 nt, Artificial Sequence
  Description of Artificial Sequence: Synthetic oligonucleotide
  Antisense strand to SEQ ID NO: 761986
aacuuucgcugaugcugag

SEQ ID NO: 761988 - RNA, 19 nt, Artificial Sequence
  Description of Artificial Sequence: Synthetic oligonucleotide
  Sense strand starting at position 2666 of SEQ ID NO: 587037
gcucauuacagggagaggu

SEQ ID NO: 761989 - RNA, 19 nt, Artificial Sequence
  Description of Artificial Sequence: Synthetic oligonucleotide
  Antisense strand to SEQ ID NO: 761988
accucucccuguaaugagc

SEQ ID NO: 761990 - RNA, 19 nt, Artificial Sequence
  Description of Artificial Sequence: Synthetic oligonucleotide
  Sense strand starting at position 2691 of SEQ ID NO: 587037
aaagcugugucugaggauu

SEQ ID NO: 761991 - RNA, 19 nt, Artificial Sequence
  Description of Artificial Sequence: Synthetic oligonucleotide
  Antisense strand to SEQ ID NO: 761990
aauccucagacacagcuuu

SEQ ID NO: 761992 - RNA, 19 nt, Artificial Sequence
  Description of Artificial Sequence: Synthetic oligonucleotide
  Sense strand starting at position 2699 of SEQ ID NO: 587037
gucugaggauucccuggau

SEQ ID NO: 761993 - RNA, 19 nt, Artificial Sequence
  Description of Artificial Sequence: Synthetic oligonucleotide
  Antisense strand to SEQ ID NO: 761992
auccagggaauccucagac

SEQ ID NO: 761994 - RNA, 19 nt, Artificial Sequence
  Description of Artificial Sequence: Synthetic oligonucleotide
  Sense strand starting at position 2715 of SEQ ID NO: 587037
gauggaccuuugugugaaa

SEQ ID NO: 761995 - RNA, 19 nt, Artificial Sequence
  Description of Artificial Sequence: Synthetic oligonucleotide
  Antisense strand to SEQ ID NO: 761994
uuucacacaaagguccauc

SEQ ID NO: 761996 - RNA, 19 nt, Artificial Sequence
  Description of Artificial Sequence: Synthetic oligonucleotide
  Sense strand starting at position 3186 of SEQ ID NO: 587037
gauggagucucguugcacu

SEQ ID NO: 761997 - RNA, 19 nt, Artificial Sequence
  Description of Artificial Sequence: Synthetic oligonucleotide
  Antisense strand to SEQ ID NO: 761996
agugcaacgagacuccauc

SEQ ID NO: 761998 - RNA, 19 nt, Artificial Sequence
  Description of Artificial Sequence: Synthetic oligonucleotide
  Sense strand starting at position 252 of SEQ ID NO: 587038
ucccaaagccucuguggau

SEQ ID NO: 761999 - RNA, 19 nt, Artificial Sequence
  Description of Artificial Sequence: Synthetic oligonucleotide
  Antisense strand to SEQ ID NO: 761998
auccacagaggcuuuggga

SEQ ID NO: 762000 - RNA, 19 nt, Artificial Sequence
  Description of Artificial Sequence: Synthetic oligonucleotide
  Sense strand starting at position 253 of SEQ ID NO: 587038
cccaaagccucuguggaua

SEQ ID NO: 762001 - RNA, 19 nt, Artificial Sequence
  Description of Artificial Sequence: Synthetic oligonucleotide
  Antisense strand to SEQ ID NO: 762000
uauccacagaggcuuuggg

SEQ ID NO: 762002 - RNA, 19 nt, Artificial Sequence
  Description of Artificial Sequence: Synthetic oligonucleotide
  Sense strand starting at position 256 of SEQ ID NO: 587038
aaagccucuguggauauau

SEQ ID NO: 762003 - RNA, 19 nt, Artificial Sequence
  Description of Artificial Sequence: Synthetic oligonucleotide
  Antisense strand to SEQ ID NO: 762002
auauauccacagaggcuuu

SEQ ID NO: 762004 - RNA, 19 nt, Artificial Sequence
  Description of Artificial Sequence: Synthetic oligonucleotide
  Sense strand starting at position 303 of SEQ ID NO: 587038
ucucgaaaccaagguagau

SEQ ID NO: 762005 - RNA, 19 nt, Artificial Sequence
  Description of Artificial Sequence: Synthetic oligonucleotide
  Antisense strand to SEQ ID NO: 762004
aucuaccuugguuucgaga

SEQ ID NO: 762006 - RNA, 19 nt, Artificial Sequence
  Description of Artificial Sequence: Synthetic oligonucleotide
  Sense strand starting at position 1018 of SEQ ID NO: 587038
agcagaauguacguuugau

SEQ ID NO: 762007 - RNA, 19 nt, Artificial Sequence
  Description of Artificial Sequence: Synthetic oligonucleotide
  Antisense strand to SEQ ID NO: 762006
aucaaacguacauucugcu

SEQ ID NO: 762008 - RNA, 19 nt, Artificial Sequence
  Description of Artificial Sequence: Synthetic oligonucleotide
  Sense strand starting at position 1030 of SEQ ID NO: 587038
guuugaucuuucuccacuu

SEQ ID NO: 762009 - RNA, 19 nt, Artificial Sequence
  Description of Artificial Sequence: Synthetic oligonucleotide
  Antisense strand to SEQ ID NO: 762008
aaguggagaaagaucaaac

SEQ ID NO: 762010 - RNA, 19 nt, Artificial Sequence
  Description of Artificial Sequence: Synthetic oligonucleotide
  Sense strand starting at position 1166 of SEQ ID NO: 587038
gucggaguauuugcccaaa

SEQ ID NO: 762011 - RNA, 19 nt, Artificial Sequence
  Description of Artificial Sequence: Synthetic oligonucleotide
  Antisense strand to SEQ ID NO: 762010
uuugggcaaauacuccgac

SEQ ID NO: 762012 - RNA, 19 nt, Artificial Sequence
  Description of Artificial Sequence: Synthetic oligonucleotide
  Sense strand starting at position 1209 of SEQ ID NO: 587038
cuaagcacaguguagaaau

SEQ ID NO: 762013 - RNA, 19 nt, Artificial Sequence
  Description of Artificial Sequence: Synthetic oligonucleotide
  Antisense strand to SEQ ID NO: 762012
auuucuacacugugcuuag

SEQ ID NO: 762014 - RNA, 19 nt, Artificial Sequence
  Description of Artificial Sequence: Synthetic oligonucleotide
  Sense strand starting at position 1220 of SEQ ID NO: 587038
guagaaaucuuuccgacuu

SEQ ID NO: 762015 - RNA, 19 nt, Artificial Sequence
  Description of Artificial Sequence: Synthetic oligonucleotide
  Antisense strand to SEQ ID NO: 762014
aagucggaaagauuucuac

SEQ ID NO: 762016 - RNA, 19 nt, Artificial Sequence
  Description of Artificial Sequence: Synthetic oligonucleotide
  Sense strand starting at position 1529 of SEQ ID NO: 587038
agagcaguuuagccgagua

SEQ ID NO: 762017 - RNA, 19 nt, Artificial Sequence
  Description of Artificial Sequence: Synthetic oligonucleotide
  Antisense strand to SEQ ID NO: 762016
uacucggcuaaacugcucu

SEQ ID NO: 762018 - RNA, 19 nt, Artificial Sequence
  Description of Artificial Sequence: Synthetic oligonucleotide
  Sense strand starting at position 1531 of SEQ ID NO: 587038
agcaguuuagccgaguaaa

SEQ ID NO: 762019 - RNA, 19 nt, Artificial Sequence
  Description of Artificial Sequence: Synthetic oligonucleotide
  Antisense strand to SEQ ID NO: 762018
uuuacucggcuaaacugcu

SEQ ID NO: 762020 - RNA, 19 nt, Artificial Sequence
  Description of Artificial Sequence: Synthetic oligonucleotide
  Sense strand starting at position 1565 of SEQ ID NO: 587038
cagacuugaguuuaggcaa

SEQ ID NO: 762021 - RNA, 19 nt, Artificial Sequence
  Description of Artificial Sequence: Synthetic oligonucleotide
  Antisense strand to SEQ ID NO: 762020
uugccuaaacucaagucug

SEQ ID NO: 762022 - RNA, 19 nt, Artificial Sequence
  Description of Artificial Sequence: Synthetic oligonucleotide
  Sense strand starting at position 1568 of SEQ ID NO: 587038
acuugaguuuaggcaaaca

SEQ ID NO: 762023 - RNA, 19 nt, Artificial Sequence
  Description of Artificial Sequence: Synthetic oligonucleotide
  Antisense strand to SEQ ID NO: 762022
uguuugccuaaacucaagu

SEQ ID NO: 762024 - RNA, 19 nt, Artificial Sequence
  Description of Artificial Sequence: Synthetic oligonucleotide
  Sense strand starting at position 2062 of SEQ ID NO: 587038
gggugacaucuuugcugag

SEQ ID NO: 762025 - RNA, 19 nt, Artificial Sequence
  Description of Artificial Sequence: Synthetic oligonucleotide
  Antisense strand to SEQ ID NO: 762024
cucagcaaagaugucaccc

SEQ ID NO: 762026 - RNA, 19 nt, Artificial Sequence
  Description of Artificial Sequence: Synthetic oligonucleotide
  Sense strand starting at position 2093 of SEQ ID NO: 587038
gcgauaggucaugggaaac

SEQ ID NO: 762027 - RNA, 19 nt, Artificial Sequence
  Description of Artificial Sequence: Synthetic oligonucleotide
  Antisense strand to SEQ ID NO: 762026
guuucccaugaccuaucgc

SEQ ID NO: 762028 - RNA, 19 nt, Artificial Sequence
  Description of Artificial Sequence: Synthetic oligonucleotide
  Sense strand starting at position 2404 of SEQ ID NO: 587038
agugguguuuaauuacaaa

SEQ ID NO: 762029 - RNA, 19 nt, Artificial Sequence
  Description of Artificial Sequence: Synthetic oligonucleotide
  Antisense strand to SEQ ID NO: 762028
uuuguaauuaaacaccacu

SEQ ID NO: 762030 - RNA, 19 nt, Artificial Sequence
  Description of Artificial Sequence: Synthetic oligonucleotide
  Sense strand starting at position 2443 of SEQ ID NO: 587038
aacgaaauguaucugaggu

SEQ ID NO: 762031 - RNA, 19 nt, Artificial Sequence
  Description of Artificial Sequence: Synthetic oligonucleotide
  Antisense strand to SEQ ID NO: 762030
accucagauacauuucguu

SEQ ID NO: 762032 - RNA, 19 nt, Artificial Sequence
  Description of Artificial Sequence: Synthetic oligonucleotide
  Sense strand starting at position 2444 of SEQ ID NO: 587038
acgaaauguaucugagguc

SEQ ID NO: 762033 - RNA, 19 nt, Artificial Sequence
  Description of Artificial Sequence: Synthetic oligonucleotide
  Antisense strand to SEQ ID NO: 762032
gaccucagauacauuucgu

SEQ ID NO: 762034 - RNA, 19 nt, Artificial Sequence
  Description of Artificial Sequence: Synthetic oligonucleotide
  Sense strand starting at position 2451 of SEQ ID NO: 587038
guaucugaggucuauauau

SEQ ID NO: 762035 - RNA, 19 nt, Artificial Sequence
  Description of Artificial Sequence: Synthetic oligonucleotide
  Antisense strand to SEQ ID NO: 762034
auauauagaccucagauac

SEQ ID NO: 762036 - RNA, 19 nt, Artificial Sequence
  Description of Artificial Sequence: Synthetic oligonucleotide
  Sense strand starting at position 2518 of SEQ ID NO: 587038
guuaauaauuacuuggcua

SEQ ID NO: 762037 - RNA, 19 nt, Artificial Sequence
  Description of Artificial Sequence: Synthetic oligonucleotide
  Antisense strand to SEQ ID NO: 762036
uagccaaguaauuauuaac

SEQ ID NO: 762038 - RNA, 19 nt, Artificial Sequence
  Description of Artificial Sequence: Synthetic oligonucleotide
  Sense strand starting at position 2842 of SEQ ID NO: 587038
uuuguuuguguuuguaaac

SEQ ID NO: 762039 - RNA, 19 nt, Artificial Sequence
  Description of Artificial Sequence: Synthetic oligonucleotide
  Antisense strand to SEQ ID NO: 762038
guuuacaaacacaaacaaa

SEQ ID NO: 762040 - RNA, 19 nt, Artificial Sequence
  Description of Artificial Sequence: Synthetic oligonucleotide
  Sense strand starting at position 2843 of SEQ ID NO: 587038
uuguuuguguuuguaaacu

SEQ ID NO: 762041 - RNA, 19 nt, Artificial Sequence
  Description of Artificial Sequence: Synthetic oligonucleotide
  Antisense strand to SEQ ID NO: 762040
aguuuacaaacacaaacaa

SEQ ID NO: 762042 - RNA, 19 nt, Artificial Sequence
  Description of Artificial Sequence: Synthetic oligonucleotide
  Sense strand starting at position 3002 of SEQ ID NO: 587038
acuaacagacuuuguggua

SEQ ID NO: 762043 - RNA, 19 nt, Artificial Sequence
  Description of Artificial Sequence: Synthetic oligonucleotide
  Antisense strand to SEQ ID NO: 762042
uaccacaaagucuguuagu

SEQ ID NO: 762044 - RNA, 19 nt, Artificial Sequence
  Description of Artificial Sequence: Synthetic oligonucleotide
  Sense strand starting at position 3018 of SEQ ID NO: 587038
guaguaagauaccaaauua

SEQ ID NO: 762045 - RNA, 19 nt, Artificial Sequence
  Description of Artificial Sequence: Synthetic oligonucleotide
  Antisense strand to SEQ ID NO: 762044
uaauuugguaucuuacuac

SEQ ID NO: 762046 - RNA, 19 nt, Artificial Sequence
  Description of Artificial Sequence: Synthetic oligonucleotide
  Sense strand starting at position 3087 of SEQ ID NO: 587038
ccaucaaucuugcugaaga

SEQ ID NO: 762047 - RNA, 19 nt, Artificial Sequence
  Description of Artificial Sequence: Synthetic oligonucleotide
  Antisense strand to SEQ ID NO: 762046
ucuucagcaagauugaugg

SEQ ID NO: 762048 - RNA, 19 nt, Artificial Sequence
  Description of Artificial Sequence: Synthetic oligonucleotide
  Sense strand starting at position 3122 of SEQ ID NO: 587038
guguauuguggcugauucu

SEQ ID NO: 762049 - RNA, 19 nt, Artificial Sequence
  Description of Artificial Sequence: Synthetic oligonucleotide
  Antisense strand to SEQ ID NO: 762048
agaaucagccacaauacac

SEQ ID NO: 762050 - RNA, 19 nt, Artificial Sequence
  Description of Artificial Sequence: Synthetic oligonucleotide
  Sense strand starting at position 3357 of SEQ ID NO: 587038
ucguguauauaucuaugua

SEQ ID NO: 762051 - RNA, 19 nt, Artificial Sequence
  Description of Artificial Sequence: Synthetic oligonucleotide
  Antisense strand to SEQ ID NO: 762050
uacauagauauauacacga

SEQ ID NO: 762052 - RNA, 19 nt, Artificial Sequence
  Description of Artificial Sequence: Synthetic oligonucleotide
  Sense strand starting at position 3381 of SEQ ID NO: 587038
guccacauauaacuuguaa

SEQ ID NO: 762053 - RNA, 19 nt, Artificial Sequence
  Description of Artificial Sequence: Synthetic oligonucleotide
  Antisense strand to SEQ ID NO: 762052
uuacaaguuauauguggac

SEQ ID NO: 762054 - RNA, 19 nt, Artificial Sequence
  Description of Artificial Sequence: Synthetic oligonucleotide
  Sense strand starting at position 3430 of SEQ ID NO: 587038
gagccaaaccaguguauac

SEQ ID NO: 762055 - RNA, 19 nt, Artificial Sequence
  Description of Artificial Sequence: Synthetic oligonucleotide
  Antisense strand to SEQ ID NO: 762054
guauacacugguuuggcuc

SEQ ID NO: 762056 - RNA, 19 nt, Artificial Sequence
  Description of Artificial Sequence: Synthetic oligonucleotide
  Sense strand starting at position 3579 of SEQ ID NO: 587038
acucauuggcccugaauaa

SEQ ID NO: 762057 - RNA, 19 nt, Artificial Sequence
  Description of Artificial Sequence: Synthetic oligonucleotide
  Antisense strand to SEQ ID NO: 762056
uuauucagggccaaugagu

SEQ ID NO: 762058 - RNA, 19 nt, Artificial Sequence
  Description of Artificial Sequence: Synthetic oligonucleotide
  Sense strand starting at position 3580 of SEQ ID NO: 587038
cucauuggcccugaauaaa

SEQ ID NO: 762059 - RNA, 19 nt, Artificial Sequence
  Description of Artificial Sequence: Synthetic oligonucleotide
  Antisense strand to SEQ ID NO: 762058
uuuauucagggccaaugag

SEQ ID NO: 762060 - RNA, 19 nt, Artificial Sequence
  Description of Artificial Sequence: Synthetic oligonucleotide
  Sense strand starting at position 3687 of SEQ ID NO: 587038
ucacaaguugucugucaaa

SEQ ID NO: 762061 - RNA, 19 nt, Artificial Sequence
  Description of Artificial Sequence: Synthetic oligonucleotide
  Antisense strand to SEQ ID NO: 762060
uuugacagacaacuuguga

SEQ ID NO: 762062 - RNA, 19 nt, Artificial Sequence
  Description of Artificial Sequence: Synthetic oligonucleotide
  Sense strand starting at position 3859 of SEQ ID NO: 587038
uguccagaguaggugaauu

SEQ ID NO: 762063 - RNA, 19 nt, Artificial Sequence
  Description of Artificial Sequence: Synthetic oligonucleotide
  Antisense strand to SEQ ID NO: 762062
aauucaccuacucuggaca

SEQ ID NO: 762064 - RNA, 19 nt, Artificial Sequence
  Description of Artificial Sequence: Synthetic oligonucleotide
  Sense strand starting at position 3876 of SEQ ID NO: 587038
uugauagagucaccuaugu

SEQ ID NO: 762065 - RNA, 19 nt, Artificial Sequence
  Description of Artificial Sequence: Synthetic oligonucleotide
  Antisense strand to SEQ ID NO: 762064
acauaggugacucuaucaa

SEQ ID NO: 762066 - RNA, 19 nt, Artificial Sequence
  Description of Artificial Sequence: Synthetic oligonucleotide
  Sense strand starting at position 3880 of SEQ ID NO: 587038
uagagucaccuaugugaug

SEQ ID NO: 762067 - RNA, 19 nt, Artificial Sequence
  Description of Artificial Sequence: Synthetic oligonucleotide
  Antisense strand to SEQ ID NO: 762066
caucacauaggugacucua

SEQ ID NO: 762068 - RNA, 19 nt, Artificial Sequence
  Description of Artificial Sequence: Synthetic oligonucleotide
  Sense strand starting at position 3881 of SEQ ID NO: 587038
agagucaccuaugugaugu

SEQ ID NO: 762069 - RNA, 19 nt, Artificial Sequence
  Description of Artificial Sequence: Synthetic oligonucleotide
  Antisense strand to SEQ ID NO: 762068
acaucacauaggugacucu

SEQ ID NO: 762070 - RNA, 19 nt, Artificial Sequence
  Description of Artificial Sequence: Synthetic oligonucleotide
  Sense strand starting at position 3921 of SEQ ID NO: 587038
ugacuucugauggguuuga

SEQ ID NO: 762071 - RNA, 19 nt, Artificial Sequence
  Description of Artificial Sequence: Synthetic oligonucleotide
  Antisense strand to SEQ ID NO: 762070
ucaaacccaucagaaguca

SEQ ID NO: 762072 - RNA, 19 nt, Artificial Sequence
  Description of Artificial Sequence: Synthetic oligonucleotide
  Sense strand starting at position 3925 of SEQ ID NO: 587038
uucugauggguuugagguu

SEQ ID NO: 762073 - RNA, 19 nt, Artificial Sequence
  Description of Artificial Sequence: Synthetic oligonucleotide
  Antisense strand to SEQ ID NO: 762072
aaccucaaacccaucagaa

SEQ ID NO: 762074 - RNA, 19 nt, Artificial Sequence
  Description of Artificial Sequence: Synthetic oligonucleotide
  Sense strand starting at position 3963 of SEQ ID NO: 587038
guguccuggaauuggauaa

SEQ ID NO: 762075 - RNA, 19 nt, Artificial Sequence
  Description of Artificial Sequence: Synthetic oligonucleotide
  Antisense strand to SEQ ID NO: 762074
uuauccaauuccaggacac

SEQ ID NO: 762076 - RNA, 19 nt, Artificial Sequence
  Description of Artificial Sequence: Synthetic oligonucleotide
  Sense strand starting at position 3964 of SEQ ID NO: 587038
uguccuggaauuggauaau

SEQ ID NO: 762077 - RNA, 19 nt, Artificial Sequence
  Description of Artificial Sequence: Synthetic oligonucleotide
  Antisense strand to SEQ ID NO: 762076
auuauccaauuccaggaca

SEQ ID NO: 762078 - RNA, 19 nt, Artificial Sequence
  Description of Artificial Sequence: Synthetic oligonucleotide
  Sense strand starting at position 5 of SEQ ID NO: 587039
cuggcauguuucccaauuu

SEQ ID NO: 762079 - RNA, 19 nt, Artificial Sequence
  Description of Artificial Sequence: Synthetic oligonucleotide
  Antisense strand to SEQ ID NO: 762078
aaauugggaaacaugccag

SEQ ID NO: 762080 - RNA, 19 nt, Artificial Sequence
  Description of Artificial Sequence: Synthetic oligonucleotide
  Sense strand starting at position 30 of SEQ ID NO: 587039
uacacuucugucgggaauc

SEQ ID NO: 762081 - RNA, 19 nt, Artificial Sequence
  Description of Artificial Sequence: Synthetic oligonucleotide
  Antisense strand to SEQ ID NO: 762080
gauucccgacagaagugua

SEQ ID NO: 762082 - RNA, 19 nt, Artificial Sequence
  Description of Artificial Sequence: Synthetic oligonucleotide
  Sense strand starting at position 112 of SEQ ID NO: 587039
auguauaauguugagaagu

SEQ ID NO: 762083 - RNA, 19 nt, Artificial Sequence
  Description of Artificial Sequence: Synthetic oligonucleotide
  Antisense strand to SEQ ID NO: 762082
acuucucaacauuauacau

SEQ ID NO: 762084 - RNA, 19 nt, Artificial Sequence
  Description of Artificial Sequence: Synthetic oligonucleotide
  Sense strand starting at position 123 of SEQ ID NO: 587039
ugagaagucgcacaauaua

SEQ ID NO: 762085 - RNA, 19 nt, Artificial Sequence
  Description of Artificial Sequence: Synthetic oligonucleotide
  Antisense strand to SEQ ID NO: 762084
uauauugugcgacuucuca

SEQ ID NO: 762086 - RNA, 19 nt, Artificial Sequence
  Description of Artificial Sequence: Synthetic oligonucleotide
  Sense strand starting at position 186 of SEQ ID NO: 587039
uuugauugauugucuccau

SEQ ID NO: 762087 - RNA, 19 nt, Artificial Sequence
  Description of Artificial Sequence: Synthetic oligonucleotide
  Antisense strand to SEQ ID NO: 762086
auggagacaaucaaucaaa

SEQ ID NO: 762088 - RNA, 19 nt, Artificial Sequence
  Description of Artificial Sequence: Synthetic oligonucleotide
  Sense strand starting at position 187 of SEQ ID NO: 587039
uugauugauugucuccauu

SEQ ID NO: 762089 - RNA, 19 nt, Artificial Sequence
  Description of Artificial Sequence: Synthetic oligonucleotide
  Antisense strand to SEQ ID NO: 762088
aauggagacaaucaaucaa

SEQ ID NO: 762090 - RNA, 19 nt, Artificial Sequence
  Description of Artificial Sequence: Synthetic oligonucleotide
  Sense strand starting at position 190 of SEQ ID NO: 587039
auugauugucuccauucuu

SEQ ID NO: 762091 - RNA, 19 nt, Artificial Sequence
  Description of Artificial Sequence: Synthetic oligonucleotide
  Antisense strand to SEQ ID NO: 762090
aagaauggagacaaucaau

SEQ ID NO: 762092 - RNA, 19 nt, Artificial Sequence
  Description of Artificial Sequence: Synthetic oligonucleotide
  Sense strand starting at position 214 of SEQ ID NO: 587039
gguuuagauuuagauggga

SEQ ID NO: 762093 - RNA, 19 nt, Artificial Sequence
  Description of Artificial Sequence: Synthetic oligonucleotide
  Antisense strand to SEQ ID NO: 762092
ucccaucuaaaucuaaacc

SEQ ID NO: 762094 - RNA, 19 nt, Artificial Sequence
  Description of Artificial Sequence: Synthetic oligonucleotide
  Sense strand starting at position 443 of SEQ ID NO: 587039
ugauauguuaaguguggga

SEQ ID NO: 762095 - RNA, 19 nt, Artificial Sequence
  Description of Artificial Sequence: Synthetic oligonucleotide
  Antisense strand to SEQ ID NO: 762094
ucccacacuuaacauauca

SEQ ID NO: 762096 - RNA, 19 nt, Artificial Sequence
  Description of Artificial Sequence: Synthetic oligonucleotide
  Sense strand starting at position 445 of SEQ ID NO: 587039
auauguuaagugugggaag

SEQ ID NO: 762097 - RNA, 19 nt, Artificial Sequence
  Description of Artificial Sequence: Synthetic oligonucleotide
  Antisense strand to SEQ ID NO: 762096
cuucccacacuuaacauau

SEQ ID NO: 762098 - RNA, 19 nt, Artificial Sequence
  Description of Artificial Sequence: Synthetic oligonucleotide
  Sense strand starting at position 447 of SEQ ID NO: 587039
auguuaagugugggaagga

SEQ ID NO: 762099 - RNA, 19 nt, Artificial Sequence
  Description of Artificial Sequence: Synthetic oligonucleotide
  Antisense strand to SEQ ID NO: 762098
uccuucccacacuuaacau

SEQ ID NO: 762100 - RNA, 19 nt, Artificial Sequence
  Description of Artificial Sequence: Synthetic oligonucleotide
  Sense strand starting at position 744 of SEQ ID NO: 587039
aaugguaaagguuguuaaa

SEQ ID NO: 762101 - RNA, 19 nt, Artificial Sequence
  Description of Artificial Sequence: Synthetic oligonucleotide
  Antisense strand to SEQ ID NO: 762100
uuuaacaaccuuuaccauu

SEQ ID NO: 762102 - RNA, 19 nt, Artificial Sequence
  Description of Artificial Sequence: Synthetic oligonucleotide
  Sense strand starting at position 746 of SEQ ID NO: 587039
ugguaaagguuguuaaaca

SEQ ID NO: 762103 - RNA, 19 nt, Artificial Sequence
  Description of Artificial Sequence: Synthetic oligonucleotide
  Antisense strand to SEQ ID NO: 762102
uguuuaacaaccuuuacca

SEQ ID NO: 762104 - RNA, 19 nt, Artificial Sequence
  Description of Artificial Sequence: Synthetic oligonucleotide
  Sense strand starting at position 791 of SEQ ID NO: 587039
uugagaaaugguuacuggu

SEQ ID NO: 762105 - RNA, 19 nt, Artificial Sequence
  Description of Artificial Sequence: Synthetic oligonucleotide
  Antisense strand to SEQ ID NO: 762104
accaguaaccauuucucaa

SEQ ID NO: 762106 - RNA, 19 nt, Artificial Sequence
  Description of Artificial Sequence: Synthetic oligonucleotide
  Sense strand starting at position 793 of SEQ ID NO: 587039
gagaaaugguuacugguua

SEQ ID NO: 762107 - RNA, 19 nt, Artificial Sequence
  Description of Artificial Sequence: Synthetic oligonucleotide
  Antisense strand to SEQ ID NO: 762106
uaaccaguaaccauuucuc

SEQ ID NO: 762108 - RNA, 19 nt, Artificial Sequence
  Description of Artificial Sequence: Synthetic oligonucleotide
  Sense strand starting at position 853 of SEQ ID NO: 587039
aaugaugucuuggugauaa

SEQ ID NO: 762109 - RNA, 19 nt, Artificial Sequence
  Description of Artificial Sequence: Synthetic oligonucleotide
  Antisense strand to SEQ ID NO: 762108
uuaucaccaagacaucauu

SEQ ID NO: 762110 - RNA, 19 nt, Artificial Sequence
  Description of Artificial Sequence: Synthetic oligonucleotide
  Sense strand starting at position 855 of SEQ ID NO: 587039
ugaugucuuggugauaagu

SEQ ID NO: 762111 - RNA, 19 nt, Artificial Sequence
  Description of Artificial Sequence: Synthetic oligonucleotide
  Antisense strand to SEQ ID NO: 762110
acuuaucaccaagacauca

SEQ ID NO: 762112 - RNA, 19 nt, Artificial Sequence
  Description of Artificial Sequence: Synthetic oligonucleotide
  Sense strand starting at position 863 of SEQ ID NO: 587039
uggugauaagucuagagcu

SEQ ID NO: 762113 - RNA, 19 nt, Artificial Sequence
  Description of Artificial Sequence: Synthetic oligonucleotide
  Antisense strand to SEQ ID NO: 762112
agcucuagacuuaucacca

SEQ ID NO: 762114 - RNA, 19 nt, Artificial Sequence
  Description of Artificial Sequence: Synthetic oligonucleotide
  Sense strand starting at position 865 of SEQ ID NO: 587039
gugauaagucuagagcuuc

SEQ ID NO: 762115 - RNA, 19 nt, Artificial Sequence
  Description of Artificial Sequence: Synthetic oligonucleotide
  Antisense strand to SEQ ID NO: 762114
gaagcucuagacuuaucac

SEQ ID NO: 762116 - RNA, 19 nt, Artificial Sequence
  Description of Artificial Sequence: Synthetic oligonucleotide
  Sense strand starting at position 907 of SEQ ID NO: 587039
ggagaacuggcuuauucug

SEQ ID NO: 762117 - RNA, 19 nt, Artificial Sequence
  Description of Artificial Sequence: Synthetic oligonucleotide
  Antisense strand to SEQ ID NO: 762116
cagaauaagccaguucucc

SEQ ID NO: 762118 - RNA, 19 nt, Artificial Sequence
  Description of Artificial Sequence: Synthetic oligonucleotide
  Sense strand starting at position 1041 of SEQ ID NO: 587039
agguguuacaugcacagua

SEQ ID NO: 762119 - RNA, 19 nt, Artificial Sequence
  Description of Artificial Sequence: Synthetic oligonucleotide
  Antisense strand to SEQ ID NO: 762118
uacugugcauguaacaccu

SEQ ID NO: 762120 - RNA, 19 nt, Artificial Sequence
  Description of Artificial Sequence: Synthetic oligonucleotide
  Sense strand starting at position 1043 of SEQ ID NO: 587039
guguuacaugcacaguaaa

SEQ ID NO: 762121 - RNA, 19 nt, Artificial Sequence
  Description of Artificial Sequence: Synthetic oligonucleotide
  Antisense strand to SEQ ID NO: 762120
uuuacugugcauguaacac

SEQ ID NO: 762122 - RNA, 19 nt, Artificial Sequence
  Description of Artificial Sequence: Synthetic oligonucleotide
  Sense strand starting at position 1137 of SEQ ID NO: 587039
ccauaugucugaucugaua

SEQ ID NO: 762123 - RNA, 19 nt, Artificial Sequence
  Description of Artificial Sequence: Synthetic oligonucleotide
  Antisense strand to SEQ ID NO: 762122
uaucagaucagacauaugg

SEQ ID NO: 762124 - RNA, 19 nt, Artificial Sequence
  Description of Artificial Sequence: Synthetic oligonucleotide
  Sense strand starting at position 1610 of SEQ ID NO: 587039
caaaguuuccgagagcagu

SEQ ID NO: 762125 - RNA, 19 nt, Artificial Sequence
  Description of Artificial Sequence: Synthetic oligonucleotide
  Antisense strand to SEQ ID NO: 762124
acugcucucggaaacuuug

SEQ ID NO: 762126 - RNA, 19 nt, Artificial Sequence
  Description of Artificial Sequence: Synthetic oligonucleotide
  Sense strand starting at position 2352 of SEQ ID NO: 587039
aagcuaugaccagaccagu

SEQ ID NO: 762127 - RNA, 19 nt, Artificial Sequence
  Description of Artificial Sequence: Synthetic oligonucleotide
  Antisense strand to SEQ ID NO: 762126
acuggucuggucauagcuu

SEQ ID NO: 762128 - RNA, 19 nt, Artificial Sequence
  Description of Artificial Sequence: Synthetic oligonucleotide
  Sense strand starting at position 2438 of SEQ ID NO: 587039
uagggaagcgcucaguaga

SEQ ID NO: 762129 - RNA, 19 nt, Artificial Sequence
  Description of Artificial Sequence: Synthetic oligonucleotide
  Antisense strand to SEQ ID NO: 762128
ucuacugagcgcuucccua

SEQ ID NO: 762130 - RNA, 19 nt, Artificial Sequence
  Description of Artificial Sequence: Synthetic oligonucleotide
  Sense strand starting at position 2517 of SEQ ID NO: 587039
cugggacucucauucgaug

SEQ ID NO: 762131 - RNA, 19 nt, Artificial Sequence
  Description of Artificial Sequence: Synthetic oligonucleotide
  Antisense strand to SEQ ID NO: 762130
caucgaaugagagucccag

SEQ ID NO: 762132 - RNA, 19 nt, Artificial Sequence
  Description of Artificial Sequence: Synthetic oligonucleotide
  Sense strand starting at position 2525 of SEQ ID NO: 587039
cucauucgauggucccaaa

SEQ ID NO: 762133 - RNA, 19 nt, Artificial Sequence
  Description of Artificial Sequence: Synthetic oligonucleotide
  Antisense strand to SEQ ID NO: 762132
uuugggaccaucgaaugag

SEQ ID NO: 762134 - RNA, 19 nt, Artificial Sequence
  Description of Artificial Sequence: Synthetic oligonucleotide
  Sense strand starting at position 2787 of SEQ ID NO: 587039
gagugcgaaccuuauggua

SEQ ID NO: 762135 - RNA, 19 nt, Artificial Sequence
  Description of Artificial Sequence: Synthetic oligonucleotide
  Antisense strand to SEQ ID NO: 762134
uaccauaagguucgcacuc

SEQ ID NO: 762136 - RNA, 19 nt, Artificial Sequence
  Description of Artificial Sequence: Synthetic oligonucleotide
  Sense strand starting at position 2938 of SEQ ID NO: 587039
aggguaauccgcuucgcuu

SEQ ID NO: 762137 - RNA, 19 nt, Artificial Sequence
  Description of Artificial Sequence: Synthetic oligonucleotide
  Antisense strand to SEQ ID NO: 762136
aagcgaagcggauuacccu

SEQ ID NO: 762138 - RNA, 19 nt, Artificial Sequence
  Description of Artificial Sequence: Synthetic oligonucleotide
  Sense strand starting at position 2951 of SEQ ID NO: 587039
ucgcuuggagccguguaaa

SEQ ID NO: 762139 - RNA, 19 nt, Artificial Sequence
  Description of Artificial Sequence: Synthetic oligonucleotide
  Antisense strand to SEQ ID NO: 762138
uuuacacggcuccaagcga

SEQ ID NO: 762140 - RNA, 19 nt, Artificial Sequence
  Description of Artificial Sequence: Synthetic oligonucleotide
  Sense strand starting at position 2987 of SEQ ID NO: 587039
acucaagcuguauauguaa

SEQ ID NO: 762141 - RNA, 19 nt, Artificial Sequence
  Description of Artificial Sequence: Synthetic oligonucleotide
  Antisense strand to SEQ ID NO: 762140
uuacauauacagcuugagu

SEQ ID NO: 762142 - RNA, 19 nt, Artificial Sequence
  Description of Artificial Sequence: Synthetic oligonucleotide
  Sense strand starting at position 3264 of SEQ ID NO: 587039
gcuggaugaaggugacuaa

SEQ ID NO: 762143 - RNA, 19 nt, Artificial Sequence
  Description of Artificial Sequence: Synthetic oligonucleotide
  Antisense strand to SEQ ID NO: 762142
uuagucaccuucauccagc

SEQ ID NO: 762144 - RNA, 19 nt, Artificial Sequence
  Description of Artificial Sequence: Synthetic oligonucleotide
  Sense strand starting at position 3310 of SEQ ID NO: 587039
guucgaagugucgauuuau

SEQ ID NO: 762145 - RNA, 19 nt, Artificial Sequence
  Description of Artificial Sequence: Synthetic oligonucleotide
  Antisense strand to SEQ ID NO: 762144
auaaaucgacacuucgaac

SEQ ID NO: 762146 - RNA, 19 nt, Artificial Sequence
  Description of Artificial Sequence: Synthetic oligonucleotide
  Sense strand starting at position 3621 of SEQ ID NO: 587039
gcaggaugcaucugaggau

SEQ ID NO: 762147 - RNA, 19 nt, Artificial Sequence
  Description of Artificial Sequence: Synthetic oligonucleotide
  Antisense strand to SEQ ID NO: 762146
auccucagaugcauccugc

SEQ ID NO: 762148 - RNA, 19 nt, Artificial Sequence
  Description of Artificial Sequence: Synthetic oligonucleotide
  Sense strand starting at position 3630 of SEQ ID NO: 587039
aucugaggauccguuucua

SEQ ID NO: 762149 - RNA, 19 nt, Artificial Sequence
  Description of Artificial Sequence: Synthetic oligonucleotide
  Antisense strand to SEQ ID NO: 762148
uagaaacggauccucagau

SEQ ID NO: 762150 - RNA, 19 nt, Artificial Sequence
  Description of Artificial Sequence: Synthetic oligonucleotide
  Sense strand starting at position 3746 of SEQ ID NO: 587039
acaccuucucaauguaagu

SEQ ID NO: 762151 - RNA, 19 nt, Artificial Sequence
  Description of Artificial Sequence: Synthetic oligonucleotide
  Antisense strand to SEQ ID NO: 762150
acuuacauugagaaggugu

SEQ ID NO: 762152 - RNA, 19 nt, Artificial Sequence
  Description of Artificial Sequence: Synthetic oligonucleotide
  Sense strand starting at position 3751 of SEQ ID NO: 587039
uucucaauguaagugacau

SEQ ID NO: 762153 - RNA, 19 nt, Artificial Sequence
  Description of Artificial Sequence: Synthetic oligonucleotide
  Antisense strand to SEQ ID NO: 762152
augucacuuacauugagaa

SEQ ID NO: 762154 - RNA, 19 nt, Artificial Sequence
  Description of Artificial Sequence: Synthetic oligonucleotide
  Sense strand starting at position 3881 of SEQ ID NO: 587039
gaauguuaugguuagucua

SEQ ID NO: 762155 - RNA, 19 nt, Artificial Sequence
  Description of Artificial Sequence: Synthetic oligonucleotide
  Antisense strand to SEQ ID NO: 762154
uagacuaaccauaacauuc

SEQ ID NO: 762156 - RNA, 19 nt, Artificial Sequence
  Description of Artificial Sequence: Synthetic oligonucleotide
  Sense strand starting at position 3883 of SEQ ID NO: 587039
auguuaugguuagucuaga

SEQ ID NO: 762157 - RNA, 19 nt, Artificial Sequence
  Description of Artificial Sequence: Synthetic oligonucleotide
  Antisense strand to SEQ ID NO: 762156
ucuagacuaaccauaacau

SEQ ID NO: 762158 - RNA, 19 nt, Artificial Sequence
  Description of Artificial Sequence: Synthetic oligonucleotide
  Sense strand starting at position 100 of SEQ ID NO: 587040
accacuucugcuugguaca

SEQ ID NO: 762159 - RNA, 19 nt, Artificial Sequence
  Description of Artificial Sequence: Synthetic oligonucleotide
  Antisense strand to SEQ ID NO: 762158
uguaccaagcagaaguggu

SEQ ID NO: 762160 - RNA, 19 nt, Artificial Sequence
  Description of Artificial Sequence: Synthetic oligonucleotide
  Sense strand starting at position 141 of SEQ ID NO: 587040
ugaaccagguuauuaauau

SEQ ID NO: 762161 - RNA, 19 nt, Artificial Sequence
  Description of Artificial Sequence: Synthetic oligonucleotide
  Antisense strand to SEQ ID NO: 762160
auauuaauaaccugguuca

SEQ ID NO: 762162 - RNA, 19 nt, Artificial Sequence
  Description of Artificial Sequence: Synthetic oligonucleotide
  Sense strand starting at position 150 of SEQ ID NO: 587040
uuauuaauauggcccaaga

SEQ ID NO: 762163 - RNA, 19 nt, Artificial Sequence
  Description of Artificial Sequence: Synthetic oligonucleotide
  Antisense strand to SEQ ID NO: 762162
ucuugggccauauuaauaa

SEQ ID NO: 762164 - RNA, 19 nt, Artificial Sequence
  Description of Artificial Sequence: Synthetic oligonucleotide
  Sense strand starting at position 304 of SEQ ID NO: 587040
agcauagcuauugaugaga

SEQ ID NO: 762165 - RNA, 19 nt, Artificial Sequence
  Description of Artificial Sequence: Synthetic oligonucleotide
  Antisense strand to SEQ ID NO: 762164
ucucaucaauagcuaugcu

SEQ ID NO: 762166 - RNA, 19 nt, Artificial Sequence
  Description of Artificial Sequence: Synthetic oligonucleotide
  Sense strand starting at position 415 of SEQ ID NO: 587040
uaauuauaguggcugacau

SEQ ID NO: 762167 - RNA, 19 nt, Artificial Sequence
  Description of Artificial Sequence: Synthetic oligonucleotide
  Antisense strand to SEQ ID NO: 762166
augucagccacuauaauua

SEQ ID NO: 762168 - RNA, 19 nt, Artificial Sequence
  Description of Artificial Sequence: Synthetic oligonucleotide
  Sense strand starting at position 416 of SEQ ID NO: 587040
aauuauaguggcugacauc

SEQ ID NO: 762169 - RNA, 19 nt, Artificial Sequence
  Description of Artificial Sequence: Synthetic oligonucleotide
  Antisense strand to SEQ ID NO: 762168
gaugucagccacuauaauu

SEQ ID NO: 762170 - RNA, 19 nt, Artificial Sequence
  Description of Artificial Sequence: Synthetic oligonucleotide
  Sense strand starting at position 469 of SEQ ID NO: 587040
ucgggcuucccggagcaua

SEQ ID NO: 762171 - RNA, 19 nt, Artificial Sequence
  Description of Artificial Sequence: Synthetic oligonucleotide
  Antisense strand to SEQ ID NO: 762170
uaugcuccgggaagcccga

SEQ ID NO: 762172 - RNA, 19 nt, Artificial Sequence
  Description of Artificial Sequence: Synthetic oligonucleotide
  Sense strand starting at position 761 of SEQ ID NO: 587040
ugcauaaugcuugaugcuu

SEQ ID NO: 762173 - RNA, 19 nt, Artificial Sequence
  Description of Artificial Sequence: Synthetic oligonucleotide
  Antisense strand to SEQ ID NO: 762172
aagcaucaagcauuaugca

SEQ ID NO: 762174 - RNA, 19 nt, Artificial Sequence
  Description of Artificial Sequence: Synthetic oligonucleotide
  Sense strand starting at position 793 of SEQ ID NO: 587040
cccaguuauuaaucuagag

SEQ ID NO: 762175 - RNA, 19 nt, Artificial Sequence
  Description of Artificial Sequence: Synthetic oligonucleotide
  Antisense strand to SEQ ID NO: 762174
cucuagauuaauaacuggg

SEQ ID NO: 762176 - RNA, 19 nt, Artificial Sequence
  Description of Artificial Sequence: Synthetic oligonucleotide
  Sense strand starting at position 854 of SEQ ID NO: 587040
ggacuccaguccuccauua

SEQ ID NO: 762177 - RNA, 19 nt, Artificial Sequence
  Description of Artificial Sequence: Synthetic oligonucleotide
  Antisense strand to SEQ ID NO: 762176
uaauggaggacuggagucc

SEQ ID NO: 762178 - RNA, 19 nt, Artificial Sequence
  Description of Artificial Sequence: Synthetic oligonucleotide
  Sense strand starting at position 931 of SEQ ID NO: 587040
uugaauggguaacucuaau

SEQ ID NO: 762179 - RNA, 19 nt, Artificial Sequence
  Description of Artificial Sequence: Synthetic oligonucleotide
  Antisense strand to SEQ ID NO: 762178
auuagaguuacccauucaa

SEQ ID NO: 762180 - RNA, 19 nt, Artificial Sequence
  Description of Artificial Sequence: Synthetic oligonucleotide
  Sense strand starting at position 965 of SEQ ID NO: 587040
ggcgaauaugcauaaaugu

SEQ ID NO: 762181 - RNA, 19 nt, Artificial Sequence
  Description of Artificial Sequence: Synthetic oligonucleotide
  Antisense strand to SEQ ID NO: 762180
acauuuaugcauauucgcc

SEQ ID NO: 762182 - RNA, 19 nt, Artificial Sequence
  Description of Artificial Sequence: Synthetic oligonucleotide
  Sense strand starting at position 990 of SEQ ID NO: 587040
uuaugaggccuucgaccua

SEQ ID NO: 762183 - RNA, 19 nt, Artificial Sequence
  Description of Artificial Sequence: Synthetic oligonucleotide
  Antisense strand to SEQ ID NO: 762182
uaggucgaaggccucauaa

SEQ ID NO: 762184 - RNA, 19 nt, Artificial Sequence
  Description of Artificial Sequence: Synthetic oligonucleotide
  Sense strand starting at position 1074 of SEQ ID NO: 587040
ggaguucaaguuugagauc

SEQ ID NO: 762185 - RNA, 19 nt, Artificial Sequence
  Description of Artificial Sequence: Synthetic oligonucleotide
  Antisense strand to SEQ ID NO: 762184
gaucucaaacuugaacucc

SEQ ID NO: 762186 - RNA, 19 nt, Artificial Sequence
  Description of Artificial Sequence: Synthetic oligonucleotide
  Sense strand starting at position 1445 of SEQ ID NO: 587040
agcguucucagucacugaa

SEQ ID NO: 762187 - RNA, 19 nt, Artificial Sequence
  Description of Artificial Sequence: Synthetic oligonucleotide
  Antisense strand to SEQ ID NO: 762186
uucagugacugagaacgcu

SEQ ID NO: 762188 - RNA, 19 nt, Artificial Sequence
  Description of Artificial Sequence: Synthetic oligonucleotide
  Sense strand starting at position 1448 of SEQ ID NO: 587040
guucucagucacugaauca

SEQ ID NO: 762189 - RNA, 19 nt, Artificial Sequence
  Description of Artificial Sequence: Synthetic oligonucleotide
  Antisense strand to SEQ ID NO: 762188
ugauucagugacugagaac

SEQ ID NO: 762190 - RNA, 19 nt, Artificial Sequence
  Description of Artificial Sequence: Synthetic oligonucleotide
  Sense strand starting at position 1506 of SEQ ID NO: 587040
aaagauuaaccuggcuguu

SEQ ID NO: 762191 - RNA, 19 nt, Artificial Sequence
  Description of Artificial Sequence: Synthetic oligonucleotide
  Antisense strand to SEQ ID NO: 762190
aacagccagguuaaucuuu

SEQ ID NO: 762192 - RNA, 19 nt, Artificial Sequence
  Description of Artificial Sequence: Synthetic oligonucleotide
  Sense strand starting at position 1534 of SEQ ID NO: 587040
uucugaagcuguguuaaua

SEQ ID NO: 762193 - RNA, 19 nt, Artificial Sequence
  Description of Artificial Sequence: Synthetic oligonucleotide
  Antisense strand to SEQ ID NO: 762192
uauuaacacagcuucagaa

SEQ ID NO: 762194 - RNA, 19 nt, Artificial Sequence
  Description of Artificial Sequence: Synthetic oligonucleotide
  Sense strand starting at position 1552 of SEQ ID NO: 587040
acucacucccgcuagauua

SEQ ID NO: 762195 - RNA, 19 nt, Artificial Sequence
  Description of Artificial Sequence: Synthetic oligonucleotide
  Antisense strand to SEQ ID NO: 762194
uaaucuagcgggagugagu

SEQ ID NO: 762196 - RNA, 19 nt, Artificial Sequence
  Description of Artificial Sequence: Synthetic oligonucleotide
  Sense strand starting at position 2001 of SEQ ID NO: 587040
ugaugacugcacugucaau

SEQ ID NO: 762197 - RNA, 19 nt, Artificial Sequence
  Description of Artificial Sequence: Synthetic oligonucleotide
  Antisense strand to SEQ ID NO: 762196
auugacagugcagucauca

SEQ ID NO: 762198 - RNA, 19 nt, Artificial Sequence
  Description of Artificial Sequence: Synthetic oligonucleotide
  Sense strand starting at position 2096 of SEQ ID NO: 587040
acggacuuguacucugaga

SEQ ID NO: 762199 - RNA, 19 nt, Artificial Sequence
  Description of Artificial Sequence: Synthetic oligonucleotide
  Antisense strand to SEQ ID NO: 762198
ucucagaguacaaguccgu

SEQ ID NO: 762200 - RNA, 19 nt, Artificial Sequence
  Description of Artificial Sequence: Synthetic oligonucleotide
  Sense strand starting at position 2098 of SEQ ID NO: 587040
ggacuuguacucugagagg

SEQ ID NO: 762201 - RNA, 19 nt, Artificial Sequence
  Description of Artificial Sequence: Synthetic oligonucleotide
  Antisense strand to SEQ ID NO: 762200
ccucucagaguacaagucc

SEQ ID NO: 762202 - RNA, 19 nt, Artificial Sequence
  Description of Artificial Sequence: Synthetic oligonucleotide
  Sense strand starting at position 2225 of SEQ ID NO: 587040
agugaagauacaugucaag

SEQ ID NO: 762203 - RNA, 19 nt, Artificial Sequence
  Description of Artificial Sequence: Synthetic oligonucleotide
  Antisense strand to SEQ ID NO: 762202
cuugacauguaucuucacu

SEQ ID NO: 762204 - RNA, 19 nt, Artificial Sequence
  Description of Artificial Sequence: Synthetic oligonucleotide
  Sense strand starting at position 2228 of SEQ ID NO: 587040
gaagauacaugucaagaga

SEQ ID NO: 762205 - RNA, 19 nt, Artificial Sequence
  Description of Artificial Sequence: Synthetic oligonucleotide
  Antisense strand to SEQ ID NO: 762204
ucucuugacauguaucuuc

SEQ ID NO: 762206 - RNA, 19 nt, Artificial Sequence
  Description of Artificial Sequence: Synthetic oligonucleotide
  Sense strand starting at position 2239 of SEQ ID NO: 587040
ucaagagauucugaauauc

SEQ ID NO: 762207 - RNA, 19 nt, Artificial Sequence
  Description of Artificial Sequence: Synthetic oligonucleotide
  Antisense strand to SEQ ID NO: 762206
gauauucagaaucucuuga

SEQ ID NO: 762208 - RNA, 19 nt, Artificial Sequence
  Description of Artificial Sequence: Synthetic oligonucleotide
  Sense strand starting at position 2427 of SEQ ID NO: 587040
gggcuucucaaguguuuga

SEQ ID NO: 762209 - RNA, 19 nt, Artificial Sequence
  Description of Artificial Sequence: Synthetic oligonucleotide
  Antisense strand to SEQ ID NO: 762208
ucaaacacuugagaagccc

SEQ ID NO: 762210 - RNA, 19 nt, Artificial Sequence
  Description of Artificial Sequence: Synthetic oligonucleotide
  Sense strand starting at position 2483 of SEQ ID NO: 587040
uagcuuugagcuuaucuga

SEQ ID NO: 762211 - RNA, 19 nt, Artificial Sequence
  Description of Artificial Sequence: Synthetic oligonucleotide
  Antisense strand to SEQ ID NO: 762210
ucagauaagcucaaagcua

SEQ ID NO: 762212 - RNA, 19 nt, Artificial Sequence
  Description of Artificial Sequence: Synthetic oligonucleotide
  Sense strand starting at position 2486 of SEQ ID NO: 587040
cuuugagcuuaucugacua

SEQ ID NO: 762213 - RNA, 19 nt, Artificial Sequence
  Description of Artificial Sequence: Synthetic oligonucleotide
  Antisense strand to SEQ ID NO: 762212
uagucagauaagcucaaag

SEQ ID NO: 762214 - RNA, 19 nt, Artificial Sequence
  Description of Artificial Sequence: Synthetic oligonucleotide
  Sense strand starting at position 2490 of SEQ ID NO: 587040
gagcuuaucugacuaaagu

SEQ ID NO: 762215 - RNA, 19 nt, Artificial Sequence
  Description of Artificial Sequence: Synthetic oligonucleotide
  Antisense strand to SEQ ID NO: 762214
acuuuagucagauaagcuc

SEQ ID NO: 762216 - RNA, 19 nt, Artificial Sequence
  Description of Artificial Sequence: Synthetic oligonucleotide
  Sense strand starting at position 2491 of SEQ ID NO: 587040
agcuuaucugacuaaagug

SEQ ID NO: 762217 - RNA, 19 nt, Artificial Sequence
  Description of Artificial Sequence: Synthetic oligonucleotide
  Antisense strand to SEQ ID NO: 762216
cacuuuagucagauaagcu

SEQ ID NO: 762218 - RNA, 19 nt, Artificial Sequence
  Description of Artificial Sequence: Synthetic oligonucleotide
  Sense strand starting at position 2582 of SEQ ID NO: 587040
ggaggcuuccauggugaau

SEQ ID NO: 762219 - RNA, 19 nt, Artificial Sequence
  Description of Artificial Sequence: Synthetic oligonucleotide
  Antisense strand to SEQ ID NO: 762218
auucaccauggaagccucc

SEQ ID NO: 762220 - RNA, 19 nt, Artificial Sequence
  Description of Artificial Sequence: Synthetic oligonucleotide
  Sense strand starting at position 3184 of SEQ ID NO: 587040
agaucuuugccucagcaca

SEQ ID NO: 762221 - RNA, 19 nt, Artificial Sequence
  Description of Artificial Sequence: Synthetic oligonucleotide
  Antisense strand to SEQ ID NO: 762220
ugugcugaggcaaagaucu

SEQ ID NO: 762222 - RNA, 19 nt, Artificial Sequence
  Description of Artificial Sequence: Synthetic oligonucleotide
  Sense strand starting at position 3209 of SEQ ID NO: 587040
ucagguuauccagaguuga

SEQ ID NO: 762223 - RNA, 19 nt, Artificial Sequence
  Description of Artificial Sequence: Synthetic oligonucleotide
  Antisense strand to SEQ ID NO: 762222
ucaacucuggauaaccuga

SEQ ID NO: 762224 - RNA, 19 nt, Artificial Sequence
  Description of Artificial Sequence: Synthetic oligonucleotide
  Sense strand starting at position 3213 of SEQ ID NO: 587040
guuauccagaguugagaca

SEQ ID NO: 762225 - RNA, 19 nt, Artificial Sequence
  Description of Artificial Sequence: Synthetic oligonucleotide
  Antisense strand to SEQ ID NO: 762224
ugucucaacucuggauaac

SEQ ID NO: 762226 - RNA, 19 nt, Artificial Sequence
  Description of Artificial Sequence: Synthetic oligonucleotide
  Sense strand starting at position 3459 of SEQ ID NO: 587040
cugagagaauucgucauua

SEQ ID NO: 762227 - RNA, 19 nt, Artificial Sequence
  Description of Artificial Sequence: Synthetic oligonucleotide
  Antisense strand to SEQ ID NO: 762226
uaaugacgaauucucucag

SEQ ID NO: 762228 - RNA, 19 nt, Artificial Sequence
  Description of Artificial Sequence: Synthetic oligonucleotide
  Sense strand starting at position 3461 of SEQ ID NO: 587040
gagagaauucgucauuacc

SEQ ID NO: 762229 - RNA, 19 nt, Artificial Sequence
  Description of Artificial Sequence: Synthetic oligonucleotide
  Antisense strand to SEQ ID NO: 762228
gguaaugacgaauucucuc

SEQ ID NO: 762230 - RNA, 19 nt, Artificial Sequence
  Description of Artificial Sequence: Synthetic oligonucleotide
  Sense strand starting at position 3463 of SEQ ID NO: 587040
gagaauucgucauuaccaa

SEQ ID NO: 762231 - RNA, 19 nt, Artificial Sequence
  Description of Artificial Sequence: Synthetic oligonucleotide
  Antisense strand to SEQ ID NO: 762230
uugguaaugacgaauucuc

SEQ ID NO: 762232 - RNA, 19 nt, Artificial Sequence
  Description of Artificial Sequence: Synthetic oligonucleotide
  Sense strand starting at position 3908 of SEQ ID NO: 587040
aggucuuaggauggucaca

SEQ ID NO: 762233 - RNA, 19 nt, Artificial Sequence
  Description of Artificial Sequence: Synthetic oligonucleotide
  Antisense strand to SEQ ID NO: 762232
ugugaccauccuaagaccu

SEQ ID NO: 762234 - RNA, 19 nt, Artificial Sequence
  Description of Artificial Sequence: Synthetic oligonucleotide
  Sense strand starting at position 3926 of SEQ ID NO: 587040
agguacauuuguuacagaa

SEQ ID NO: 762235 - RNA, 19 nt, Artificial Sequence
  Description of Artificial Sequence: Synthetic oligonucleotide
  Antisense strand to SEQ ID NO: 762234
uucuguaacaaauguaccu

SEQ ID NO: 762236 - RNA, 19 nt, Artificial Sequence
  Description of Artificial Sequence: Synthetic oligonucleotide
  Sense strand starting at position 3958 of SEQ ID NO: 587040
ggugcagauucccuggaaa

SEQ ID NO: 762237 - RNA, 19 nt, Artificial Sequence
  Description of Artificial Sequence: Synthetic oligonucleotide
  Antisense strand to SEQ ID NO: 762236
uuuccagggaaucugcacc

SEQ ID NO: 762238 - RNA, 19 nt, Artificial Sequence
  Description of Artificial Sequence: Synthetic oligonucleotide
  Sense strand starting at position 13 of SEQ ID NO: 587041
gagacaugcauguagggua

SEQ ID NO: 762239 - RNA, 19 nt, Artificial Sequence
  Description of Artificial Sequence: Synthetic oligonucleotide
  Antisense strand to SEQ ID NO: 762238
uacccuacaugcaugucuc

SEQ ID NO: 762240 - RNA, 19 nt, Artificial Sequence
  Description of Artificial Sequence: Synthetic oligonucleotide
  Sense strand starting at position 21 of SEQ ID NO: 587041
cauguaggguauguauuaa

SEQ ID NO: 762241 - RNA, 19 nt, Artificial Sequence
  Description of Artificial Sequence: Synthetic oligonucleotide
  Antisense strand to SEQ ID NO: 762240
uuaauacauacccuacaug

SEQ ID NO: 762242 - RNA, 19 nt, Artificial Sequence
  Description of Artificial Sequence: Synthetic oligonucleotide
  Sense strand starting at position 31 of SEQ ID NO: 587041
auguauuaacagggaguua

SEQ ID NO: 762243 - RNA, 19 nt, Artificial Sequence
  Description of Artificial Sequence: Synthetic oligonucleotide
  Antisense strand to SEQ ID NO: 762242
uaacucccuguuaauacau

SEQ ID NO: 762244 - RNA, 19 nt, Artificial Sequence
  Description of Artificial Sequence: Synthetic oligonucleotide
  Sense strand starting at position 58 of SEQ ID NO: 587041
uguggugaaggcuaugaua

SEQ ID NO: 762245 - RNA, 19 nt, Artificial Sequence
  Description of Artificial Sequence: Synthetic oligonucleotide
  Antisense strand to SEQ ID NO: 762244
uaucauagccuucaccaca

SEQ ID NO: 762246 - RNA, 19 nt, Artificial Sequence
  Description of Artificial Sequence: Synthetic oligonucleotide
  Sense strand starting at position 60 of SEQ ID NO: 587041
uggugaaggcuaugauaga

SEQ ID NO: 762247 - RNA, 19 nt, Artificial Sequence
  Description of Artificial Sequence: Synthetic oligonucleotide
  Antisense strand to SEQ ID NO: 762246
ucuaucauagccuucacca

SEQ ID NO: 762248 - RNA, 19 nt, Artificial Sequence
  Description of Artificial Sequence: Synthetic oligonucleotide
  Sense strand starting at position 95 of SEQ ID NO: 587041
aggagaacauuacuauugu

SEQ ID NO: 762249 - RNA, 19 nt, Artificial Sequence
  Description of Artificial Sequence: Synthetic oligonucleotide
  Antisense strand to SEQ ID NO: 762248
acaauaguaauguucuccu

SEQ ID NO: 762250 - RNA, 19 nt, Artificial Sequence
  Description of Artificial Sequence: Synthetic oligonucleotide
  Sense strand starting at position 206 of SEQ ID NO: 587041
ugaaccuaggucugacuua

SEQ ID NO: 762251 - RNA, 19 nt, Artificial Sequence
  Description of Artificial Sequence: Synthetic oligonucleotide
  Antisense strand to SEQ ID NO: 762250
uaagucagaccuagguuca

SEQ ID NO: 762252 - RNA, 19 nt, Artificial Sequence
  Description of Artificial Sequence: Synthetic oligonucleotide
  Sense strand starting at position 271 of SEQ ID NO: 587041
cagguagaaucugcuuaaa

SEQ ID NO: 762253 - RNA, 19 nt, Artificial Sequence
  Description of Artificial Sequence: Synthetic oligonucleotide
  Antisense strand to SEQ ID NO: 762252
uuuaagcagauucuaccug

SEQ ID NO: 762254 - RNA, 19 nt, Artificial Sequence
  Description of Artificial Sequence: Synthetic oligonucleotide
  Sense strand starting at position 273 of SEQ ID NO: 587041
gguagaaucugcuuaaaga

SEQ ID NO: 762255 - RNA, 19 nt, Artificial Sequence
  Description of Artificial Sequence: Synthetic oligonucleotide
  Antisense strand to SEQ ID NO: 762254
ucuuuaagcagauucuacc

SEQ ID NO: 762256 - RNA, 19 nt, Artificial Sequence
  Description of Artificial Sequence: Synthetic oligonucleotide
  Sense strand starting at position 396 of SEQ ID NO: 587041
aaaccaguuuggcuagaga

SEQ ID NO: 762257 - RNA, 19 nt, Artificial Sequence
  Description of Artificial Sequence: Synthetic oligonucleotide
  Antisense strand to SEQ ID NO: 762256
ucucuagccaaacugguuu

SEQ ID NO: 762258 - RNA, 19 nt, Artificial Sequence
  Description of Artificial Sequence: Synthetic oligonucleotide
  Sense strand starting at position 417 of SEQ ID NO: 587041
cagugacuugcugaacuca

SEQ ID NO: 762259 - RNA, 19 nt, Artificial Sequence
  Description of Artificial Sequence: Synthetic oligonucleotide
  Antisense strand to SEQ ID NO: 762258
ugaguucagcaagucacug

SEQ ID NO: 762260 - RNA, 19 nt, Artificial Sequence
  Description of Artificial Sequence: Synthetic oligonucleotide
  Sense strand starting at position 427 of SEQ ID NO: 587041
cugaacucauguccuuaga

SEQ ID NO: 762261 - RNA, 19 nt, Artificial Sequence
  Description of Artificial Sequence: Synthetic oligonucleotide
  Antisense strand to SEQ ID NO: 762260
ucuaaggacaugaguucag

SEQ ID NO: 762262 - RNA, 19 nt, Artificial Sequence
  Description of Artificial Sequence: Synthetic oligonucleotide
  Sense strand starting at position 505 of SEQ ID NO: 587041
gagguugaguccuuagagg

SEQ ID NO: 762263 - RNA, 19 nt, Artificial Sequence
  Description of Artificial Sequence: Synthetic oligonucleotide
  Antisense strand to SEQ ID NO: 762262
ccucuaaggacucaaccuc

SEQ ID NO: 762264 - RNA, 19 nt, Artificial Sequence
  Description of Artificial Sequence: Synthetic oligonucleotide
  Sense strand starting at position 511 of SEQ ID NO: 587041
gaguccuuagaggauguua

SEQ ID NO: 762265 - RNA, 19 nt, Artificial Sequence
  Description of Artificial Sequence: Synthetic oligonucleotide
  Antisense strand to SEQ ID NO: 762264
uaacauccucuaaggacuc

SEQ ID NO: 762266 - RNA, 19 nt, Artificial Sequence
  Description of Artificial Sequence: Synthetic oligonucleotide
  Sense strand starting at position 547 of SEQ ID NO: 587041
gccagaaccacguauuaug

SEQ ID NO: 762267 - RNA, 19 nt, Artificial Sequence
  Description of Artificial Sequence: Synthetic oligonucleotide
  Antisense strand to SEQ ID NO: 762266
cauaauacgugguucuggc

SEQ ID NO: 762268 - RNA, 19 nt, Artificial Sequence
  Description of Artificial Sequence: Synthetic oligonucleotide
  Sense strand starting at position 804 of SEQ ID NO: 587041
gcaacaguagucuaggauu

SEQ ID NO: 762269 - RNA, 19 nt, Artificial Sequence
  Description of Artificial Sequence: Synthetic oligonucleotide
  Antisense strand to SEQ ID NO: 762268
aauccuagacuacuguugc

SEQ ID NO: 762270 - RNA, 19 nt, Artificial Sequence
  Description of Artificial Sequence: Synthetic oligonucleotide
  Sense strand starting at position 818 of SEQ ID NO: 587041
ggauucugcaaacgugaau

SEQ ID NO: 762271 - RNA, 19 nt, Artificial Sequence
  Description of Artificial Sequence: Synthetic oligonucleotide
  Antisense strand to SEQ ID NO: 762270
auucacguuugcagaaucc

SEQ ID NO: 762272 - RNA, 19 nt, Artificial Sequence
  Description of Artificial Sequence: Synthetic oligonucleotide
  Sense strand starting at position 830 of SEQ ID NO: 587041
cgugaauggcauuagguua

SEQ ID NO: 762273 - RNA, 19 nt, Artificial Sequence
  Description of Artificial Sequence: Synthetic oligonucleotide
  Antisense strand to SEQ ID NO: 762272
uaaccuaaugccauucacg

SEQ ID NO: 762274 - RNA, 19 nt, Artificial Sequence
  Description of Artificial Sequence: Synthetic oligonucleotide
  Sense strand starting at position 1053 of SEQ ID NO: 587041
aaaguuauacaguguuaga

SEQ ID NO: 762275 - RNA, 19 nt, Artificial Sequence
  Description of Artificial Sequence: Synthetic oligonucleotide
  Antisense strand to SEQ ID NO: 762274
ucuaacacuguauaacuuu

SEQ ID NO: 762276 - RNA, 19 nt, Artificial Sequence
  Description of Artificial Sequence: Synthetic oligonucleotide
  Sense strand starting at position 1063 of SEQ ID NO: 587041
aguguuagagaucauuauu

SEQ ID NO: 762277 - RNA, 19 nt, Artificial Sequence
  Description of Artificial Sequence: Synthetic oligonucleotide
  Antisense strand to SEQ ID NO: 762276
aauaaugaucucuaacacu

SEQ ID NO: 762278 - RNA, 19 nt, Artificial Sequence
  Description of Artificial Sequence: Synthetic oligonucleotide
  Sense strand starting at position 1138 of SEQ ID NO: 587041
uugacaucaugguccagua

SEQ ID NO: 762279 - RNA, 19 nt, Artificial Sequence
  Description of Artificial Sequence: Synthetic oligonucleotide
  Antisense strand to SEQ ID NO: 762278
uacuggaccaugaugucaa

SEQ ID NO: 762280 - RNA, 19 nt, Artificial Sequence
  Description of Artificial Sequence: Synthetic oligonucleotide
  Sense strand starting at position 1156 of SEQ ID NO: 587041
acacuuguccaguaccuau

SEQ ID NO: 762281 - RNA, 19 nt, Artificial Sequence
  Description of Artificial Sequence: Synthetic oligonucleotide
  Antisense strand to SEQ ID NO: 762280
auagguacuggacaagugu

SEQ ID NO: 762282 - RNA, 19 nt, Artificial Sequence
  Description of Artificial Sequence: Synthetic oligonucleotide
  Sense strand starting at position 1486 of SEQ ID NO: 587041
aggagagagcgcugagaaa

SEQ ID NO: 762283 - RNA, 19 nt, Artificial Sequence
  Description of Artificial Sequence: Synthetic oligonucleotide
  Antisense strand to SEQ ID NO: 762282
uuucucagcgcucucuccu

SEQ ID NO: 762284 - RNA, 19 nt, Artificial Sequence
  Description of Artificial Sequence: Synthetic oligonucleotide
  Sense strand starting at position 1686 of SEQ ID NO: 587041
ccucguguggcuuuccgaa

SEQ ID NO: 762285 - RNA, 19 nt, Artificial Sequence
  Description of Artificial Sequence: Synthetic oligonucleotide
  Antisense strand to SEQ ID NO: 762284
uucggaaagccacacgagg

SEQ ID NO: 762286 - RNA, 19 nt, Artificial Sequence
  Description of Artificial Sequence: Synthetic oligonucleotide
  Sense strand starting at position 2958 of SEQ ID NO: 587041
gcgauaaaugaaggugaug

SEQ ID NO: 762287 - RNA, 19 nt, Artificial Sequence
  Description of Artificial Sequence: Synthetic oligonucleotide
  Antisense strand to SEQ ID NO: 762286
caucaccuucauuuaucgc

SEQ ID NO: 762288 - RNA, 19 nt, Artificial Sequence
  Description of Artificial Sequence: Synthetic oligonucleotide
  Sense strand starting at position 2969 of SEQ ID NO: 587041
aggugaugcggcuuagcuu

SEQ ID NO: 762289 - RNA, 19 nt, Artificial Sequence
  Description of Artificial Sequence: Synthetic oligonucleotide
  Antisense strand to SEQ ID NO: 762288
aagcuaagccgcaucaccu

SEQ ID NO: 762290 - RNA, 19 nt, Artificial Sequence
  Description of Artificial Sequence: Synthetic oligonucleotide
  Sense strand starting at position 3300 of SEQ ID NO: 587041
ggucgaucuguguugugca

SEQ ID NO: 762291 - RNA, 19 nt, Artificial Sequence
  Description of Artificial Sequence: Synthetic oligonucleotide
  Antisense strand to SEQ ID NO: 762290
ugcacaacacagaucgacc

SEQ ID NO: 762292 - RNA, 19 nt, Artificial Sequence
  Description of Artificial Sequence: Synthetic oligonucleotide
  Sense strand starting at position 3356 of SEQ ID NO: 587041
ugccuuuagcaagaaagaa

SEQ ID NO: 762293 - RNA, 19 nt, Artificial Sequence
  Description of Artificial Sequence: Synthetic oligonucleotide
  Antisense strand to SEQ ID NO: 762292
uucuuucuugcuaaaggca

SEQ ID NO: 762294 - RNA, 19 nt, Artificial Sequence
  Description of Artificial Sequence: Synthetic oligonucleotide
  Sense strand starting at position 3533 of SEQ ID NO: 587041
acccaagugugucugauuu

SEQ ID NO: 762295 - RNA, 19 nt, Artificial Sequence
  Description of Artificial Sequence: Synthetic oligonucleotide
  Antisense strand to SEQ ID NO: 762294
aaaucagacacacuugggu

SEQ ID NO: 762296 - RNA, 19 nt, Artificial Sequence
  Description of Artificial Sequence: Synthetic oligonucleotide
  Sense strand starting at position 3653 of SEQ ID NO: 587041
ucagauauucuguggauga

SEQ ID NO: 762297 - RNA, 19 nt, Artificial Sequence
  Description of Artificial Sequence: Synthetic oligonucleotide
  Antisense strand to SEQ ID NO: 762296
ucauccacagaauaucuga

SEQ ID NO: 762298 - RNA, 19 nt, Artificial Sequence
  Description of Artificial Sequence: Synthetic oligonucleotide
  Sense strand starting at position 3657 of SEQ ID NO: 587041
auauucuguggaugaaauc

SEQ ID NO: 762299 - RNA, 19 nt, Artificial Sequence
  Description of Artificial Sequence: Synthetic oligonucleotide
  Antisense strand to SEQ ID NO: 762298
gauuucauccacagaauau

SEQ ID NO: 762300 - RNA, 19 nt, Artificial Sequence
  Description of Artificial Sequence: Synthetic oligonucleotide
  Sense strand starting at position 3663 of SEQ ID NO: 587041
uguggaugaaaucgcaaau

SEQ ID NO: 762301 - RNA, 19 nt, Artificial Sequence
  Description of Artificial Sequence: Synthetic oligonucleotide
  Antisense strand to SEQ ID NO: 762300
auuugcgauuucauccaca

SEQ ID NO: 762302 - RNA, 19 nt, Artificial Sequence
  Description of Artificial Sequence: Synthetic oligonucleotide
  Sense strand starting at position 3799 of SEQ ID NO: 587041
ucuguuauaagaggcugau

SEQ ID NO: 762303 - RNA, 19 nt, Artificial Sequence
  Description of Artificial Sequence: Synthetic oligonucleotide
  Antisense strand to SEQ ID NO: 762302
aucagccucuuauaacaga

SEQ ID NO: 762304 - RNA, 19 nt, Artificial Sequence
  Description of Artificial Sequence: Synthetic oligonucleotide
  Sense strand starting at position 3802 of SEQ ID NO: 587041
guuauaagaggcugauuaa

SEQ ID NO: 762305 - RNA, 19 nt, Artificial Sequence
  Description of Artificial Sequence: Synthetic oligonucleotide
  Antisense strand to SEQ ID NO: 762304
uuaaucagccucuuauaac

SEQ ID NO: 762306 - RNA, 19 nt, Artificial Sequence
  Description of Artificial Sequence: Synthetic oligonucleotide
  Sense strand starting at position 3877 of SEQ ID NO: 587041
gguuucuggccggaauaaa

SEQ ID NO: 762307 - RNA, 19 nt, Artificial Sequence
  Description of Artificial Sequence: Synthetic oligonucleotide
  Antisense strand to SEQ ID NO: 762306
uuuauuccggccagaaacc

SEQ ID NO: 762308 - RNA, 19 nt, Artificial Sequence
  Description of Artificial Sequence: Synthetic oligonucleotide
  Sense strand starting at position 3886 of SEQ ID NO: 587041
ccggaauaaaguuaccagu

SEQ ID NO: 762309 - RNA, 19 nt, Artificial Sequence
  Description of Artificial Sequence: Synthetic oligonucleotide
  Antisense strand to SEQ ID NO: 762308
acugguaacuuuauuccgg

SEQ ID NO: 762310 - RNA, 19 nt, Artificial Sequence
  Description of Artificial Sequence: Synthetic oligonucleotide
  Sense strand starting at position 3888 of SEQ ID NO: 587041
ggaauaaaguuaccaguca

SEQ ID NO: 762311 - RNA, 19 nt, Artificial Sequence
  Description of Artificial Sequence: Synthetic oligonucleotide
  Antisense strand to SEQ ID NO: 762310
ugacugguaacuuuauucc

SEQ ID NO: 762312 - RNA, 19 nt, Artificial Sequence
  Description of Artificial Sequence: Synthetic oligonucleotide
  Sense strand starting at position 3900 of SEQ ID NO: 587041
ccagucaggcccuggauaa

SEQ ID NO: 762313 - RNA, 19 nt, Artificial Sequence
  Description of Artificial Sequence: Synthetic oligonucleotide
  Antisense strand to SEQ ID NO: 762312
uuauccagggccugacugg

SEQ ID NO: 762314 - RNA, 19 nt, Artificial Sequence
  Description of Artificial Sequence: Synthetic oligonucleotide
  Sense strand starting at position 3913 of SEQ ID NO: 587041
ggauaacgaggcuguaaau

SEQ ID NO: 762315 - RNA, 19 nt, Artificial Sequence
  Description of Artificial Sequence: Synthetic oligonucleotide
  Antisense strand to SEQ ID NO: 762314
auuuacagccucguuaucc

SEQ ID NO: 762316 - RNA, 19 nt, Artificial Sequence
  Description of Artificial Sequence: Synthetic oligonucleotide
  Sense strand starting at position 3982 of SEQ ID NO: 587041
ggcuguuuagaaggcaaca

SEQ ID NO: 762317 - RNA, 19 nt, Artificial Sequence
  Description of Artificial Sequence: Synthetic oligonucleotide
  Antisense strand to SEQ ID NO: 762316
uguugccuucuaaacagcc

SEQ ID NO: 762318 - RNA, 19 nt, Artificial Sequence
  Description of Artificial Sequence: Synthetic oligonucleotide
  Sense strand starting at position 44 of SEQ ID NO: 587042
ugucacuuucuauaguguu

SEQ ID NO: 762319 - RNA, 19 nt, Artificial Sequence
  Description of Artificial Sequence: Synthetic oligonucleotide
  Antisense strand to SEQ ID NO: 762318
aacacuauagaaagugaca

SEQ ID NO: 762320 - RNA, 19 nt, Artificial Sequence
  Description of Artificial Sequence: Synthetic oligonucleotide
  Sense strand starting at position 446 of SEQ ID NO: 587042
uggauaagcaagcaguuua

SEQ ID NO: 762321 - RNA, 19 nt, Artificial Sequence
  Description of Artificial Sequence: Synthetic oligonucleotide
  Antisense strand to SEQ ID NO: 762320
uaaacugcuugcuuaucca

SEQ ID NO: 762322 - RNA, 19 nt, Artificial Sequence
  Description of Artificial Sequence: Synthetic oligonucleotide
  Sense strand starting at position 479 of SEQ ID NO: 587042
gcagguugagcucaaugaa

SEQ ID NO: 762323 - RNA, 19 nt, Artificial Sequence
  Description of Artificial Sequence: Synthetic oligonucleotide
  Antisense strand to SEQ ID NO: 762322
uucauugagcucaaccugc

SEQ ID NO: 762324 - RNA, 19 nt, Artificial Sequence
  Description of Artificial Sequence: Synthetic oligonucleotide
  Sense strand starting at position 482 of SEQ ID NO: 587042
gguugagcucaaugaaagg

SEQ ID NO: 762325 - RNA, 19 nt, Artificial Sequence
  Description of Artificial Sequence: Synthetic oligonucleotide
  Antisense strand to SEQ ID NO: 762324
ccuuucauugagcucaacc

SEQ ID NO: 762326 - RNA, 19 nt, Artificial Sequence
  Description of Artificial Sequence: Synthetic oligonucleotide
  Sense strand starting at position 557 of SEQ ID NO: 587042
uugaaucuucugggcaguu

SEQ ID NO: 762327 - RNA, 19 nt, Artificial Sequence
  Description of Artificial Sequence: Synthetic oligonucleotide
  Antisense strand to SEQ ID NO: 762326
aacugcccagaagauucaa

SEQ ID NO: 762328 - RNA, 19 nt, Artificial Sequence
  Description of Artificial Sequence: Synthetic oligonucleotide
  Sense strand starting at position 558 of SEQ ID NO: 587042
ugaaucuucugggcaguua

SEQ ID NO: 762329 - RNA, 19 nt, Artificial Sequence
  Description of Artificial Sequence: Synthetic oligonucleotide
  Antisense strand to SEQ ID NO: 762328
uaacugcccagaagauuca

SEQ ID NO: 762330 - RNA, 19 nt, Artificial Sequence
  Description of Artificial Sequence: Synthetic oligonucleotide
  Sense strand starting at position 559 of SEQ ID NO: 587042
gaaucuucugggcaguuaa

SEQ ID NO: 762331 - RNA, 19 nt, Artificial Sequence
  Description of Artificial Sequence: Synthetic oligonucleotide
  Antisense strand to SEQ ID NO: 762330
uuaacugcccagaagauuc

SEQ ID NO: 762332 - RNA, 19 nt, Artificial Sequence
  Description of Artificial Sequence: Synthetic oligonucleotide
  Sense strand starting at position 579 of SEQ ID NO: 587042
gggagaagacucugcuaca

SEQ ID NO: 762333 - RNA, 19 nt, Artificial Sequence
  Description of Artificial Sequence: Synthetic oligonucleotide
  Antisense strand to SEQ ID NO: 762332
uguagcagagucuucuccc

SEQ ID NO: 762334 - RNA, 19 nt, Artificial Sequence
  Description of Artificial Sequence: Synthetic oligonucleotide
  Sense strand starting at position 580 of SEQ ID NO: 587042
ggagaagacucugcuacag

SEQ ID NO: 762335 - RNA, 19 nt, Artificial Sequence
  Description of Artificial Sequence: Synthetic oligonucleotide
  Antisense strand to SEQ ID NO: 762334
cuguagcagagucuucucc

SEQ ID NO: 762336 - RNA, 19 nt, Artificial Sequence
  Description of Artificial Sequence: Synthetic oligonucleotide
  Sense strand starting at position 684 of SEQ ID NO: 587042
guugacauccgguaaccau

SEQ ID NO: 762337 - RNA, 19 nt, Artificial Sequence
  Description of Artificial Sequence: Synthetic oligonucleotide
  Antisense strand to SEQ ID NO: 762336
augguuaccggaugucaac

SEQ ID NO: 762338 - RNA, 19 nt, Artificial Sequence
  Description of Artificial Sequence: Synthetic oligonucleotide
  Sense strand starting at position 950 of SEQ ID NO: 587042
caagaugaauuugaguuga

SEQ ID NO: 762339 - RNA, 19 nt, Artificial Sequence
  Description of Artificial Sequence: Synthetic oligonucleotide
  Antisense strand to SEQ ID NO: 762338
ucaacucaaauucaucuug

SEQ ID NO: 762340 - RNA, 19 nt, Artificial Sequence
  Description of Artificial Sequence: Synthetic oligonucleotide
  Sense strand starting at position 973 of SEQ ID NO: 587042
ucagucuuuccacgaagaa

SEQ ID NO: 762341 - RNA, 19 nt, Artificial Sequence
  Description of Artificial Sequence: Synthetic oligonucleotide
  Antisense strand to SEQ ID NO: 762340
uucuucguggaaagacuga

SEQ ID NO: 762342 - RNA, 19 nt, Artificial Sequence
  Description of Artificial Sequence: Synthetic oligonucleotide
  Sense strand starting at position 974 of SEQ ID NO: 587042
cagucuuuccacgaagaag

SEQ ID NO: 762343 - RNA, 19 nt, Artificial Sequence
  Description of Artificial Sequence: Synthetic oligonucleotide
  Antisense strand to SEQ ID NO: 762342
cuucuucguggaaagacug

SEQ ID NO: 762344 - RNA, 19 nt, Artificial Sequence
  Description of Artificial Sequence: Synthetic oligonucleotide
  Sense strand starting at position 1144 of SEQ ID NO: 587042
uccucugagccuuaggagu

SEQ ID NO: 762345 - RNA, 19 nt, Artificial Sequence
  Description of Artificial Sequence: Synthetic oligonucleotide
  Antisense strand to SEQ ID NO: 762344
acuccuaaggcucagagga

SEQ ID NO: 762346 - RNA, 19 nt, Artificial Sequence
  Description of Artificial Sequence: Synthetic oligonucleotide
  Sense strand starting at position 1332 of SEQ ID NO: 587042
guaguugauucuuuccuga

SEQ ID NO: 762347 - RNA, 19 nt, Artificial Sequence
  Description of Artificial Sequence: Synthetic oligonucleotide
  Antisense strand to SEQ ID NO: 762346
ucaggaaagaaucaacuac

SEQ ID NO: 762348 - RNA, 19 nt, Artificial Sequence
  Description of Artificial Sequence: Synthetic oligonucleotide
  Sense strand starting at position 1334 of SEQ ID NO: 587042
aguugauucuuuccugaag

SEQ ID NO: 762349 - RNA, 19 nt, Artificial Sequence
  Description of Artificial Sequence: Synthetic oligonucleotide
  Antisense strand to SEQ ID NO: 762348
cuucaggaaagaaucaacu

SEQ ID NO: 762350 - RNA, 19 nt, Artificial Sequence
  Description of Artificial Sequence: Synthetic oligonucleotide
  Sense strand starting at position 1335 of SEQ ID NO: 587042
guugauucuuuccugaaga

SEQ ID NO: 762351 - RNA, 19 nt, Artificial Sequence
  Description of Artificial Sequence: Synthetic oligonucleotide
  Antisense strand to SEQ ID NO: 762350
ucuucaggaaagaaucaac

SEQ ID NO: 762352 - RNA, 19 nt, Artificial Sequence
  Description of Artificial Sequence: Synthetic oligonucleotide
  Sense strand starting at position 1565 of SEQ ID NO: 587042
ugcugcgugauucucgaaa

SEQ ID NO: 762353 - RNA, 19 nt, Artificial Sequence
  Description of Artificial Sequence: Synthetic oligonucleotide
  Antisense strand to SEQ ID NO: 762352
uuucgagaaucacgcagca

SEQ ID NO: 762354 - RNA, 19 nt, Artificial Sequence
  Description of Artificial Sequence: Synthetic oligonucleotide
  Sense strand starting at position 1596 of SEQ ID NO: 587042
ccgcgauccgcuucuccua

SEQ ID NO: 762355 - RNA, 19 nt, Artificial Sequence
  Description of Artificial Sequence: Synthetic oligonucleotide
  Antisense strand to SEQ ID NO: 762354
uaggagaagcggaucgcgg

SEQ ID NO: 762356 - RNA, 19 nt, Artificial Sequence
  Description of Artificial Sequence: Synthetic oligonucleotide
  Sense strand starting at position 2350 of SEQ ID NO: 587042
acaggugucuuccugguau

SEQ ID NO: 762357 - RNA, 19 nt, Artificial Sequence
  Description of Artificial Sequence: Synthetic oligonucleotide
  Antisense strand to SEQ ID NO: 762356
auaccaggaagacaccugu

SEQ ID NO: 762358 - RNA, 19 nt, Artificial Sequence
  Description of Artificial Sequence: Synthetic oligonucleotide
  Sense strand starting at position 2362 of SEQ ID NO: 587042
cugguauccaucgaacuga

SEQ ID NO: 762359 - RNA, 19 nt, Artificial Sequence
  Description of Artificial Sequence: Synthetic oligonucleotide
  Antisense strand to SEQ ID NO: 762358
ucaguucgauggauaccag

SEQ ID NO: 762360 - RNA, 19 nt, Artificial Sequence
  Description of Artificial Sequence: Synthetic oligonucleotide
  Sense strand starting at position 2436 of SEQ ID NO: 587042
ccuggaagcauaugugauu

SEQ ID NO: 762361 - RNA, 19 nt, Artificial Sequence
  Description of Artificial Sequence: Synthetic oligonucleotide
  Antisense strand to SEQ ID NO: 762360
aaucacauaugcuuccagg

SEQ ID NO: 762362 - RNA, 19 nt, Artificial Sequence
  Description of Artificial Sequence: Synthetic oligonucleotide
  Sense strand starting at position 2466 of SEQ ID NO: 587042
gcaugguguggugucagua

SEQ ID NO: 762363 - RNA, 19 nt, Artificial Sequence
  Description of Artificial Sequence: Synthetic oligonucleotide
  Antisense strand to SEQ ID NO: 762362
uacugacaccacaccaugc

SEQ ID NO: 762364 - RNA, 19 nt, Artificial Sequence
  Description of Artificial Sequence: Synthetic oligonucleotide
  Sense strand starting at position 2469 of SEQ ID NO: 587042
ugguguggugucaguaaca

SEQ ID NO: 762365 - RNA, 19 nt, Artificial Sequence
  Description of Artificial Sequence: Synthetic oligonucleotide
  Antisense strand to SEQ ID NO: 762364
uguuacugacaccacacca

SEQ ID NO: 762366 - RNA, 19 nt, Artificial Sequence
  Description of Artificial Sequence: Synthetic oligonucleotide
  Sense strand starting at position 2470 of SEQ ID NO: 587042
gguguggugucaguaacag

SEQ ID NO: 762367 - RNA, 19 nt, Artificial Sequence
  Description of Artificial Sequence: Synthetic oligonucleotide
  Antisense strand to SEQ ID NO: 762366
cuguuacugacaccacacc

SEQ ID NO: 762368 - RNA, 19 nt, Artificial Sequence
  Description of Artificial Sequence: Synthetic oligonucleotide
  Sense strand starting at position 2505 of SEQ ID NO: 587042
acucuauugucagugacaa

SEQ ID NO: 762369 - RNA, 19 nt, Artificial Sequence
  Description of Artificial Sequence: Synthetic oligonucleotide
  Antisense strand to SEQ ID NO: 762368
uugucacugacaauagagu

SEQ ID NO: 762370 - RNA, 19 nt, Artificial Sequence
  Description of Artificial Sequence: Synthetic oligonucleotide
  Sense strand starting at position 2506 of SEQ ID NO: 587042
cucuauugucagugacaaa

SEQ ID NO: 762371 - RNA, 19 nt, Artificial Sequence
  Description of Artificial Sequence: Synthetic oligonucleotide
  Antisense strand to SEQ ID NO: 762370
uuugucacugacaauagag

SEQ ID NO: 762372 - RNA, 19 nt, Artificial Sequence
  Description of Artificial Sequence: Synthetic oligonucleotide
  Sense strand starting at position 2529 of SEQ ID NO: 587042
aguguaagcuggccuaaua

SEQ ID NO: 762373 - RNA, 19 nt, Artificial Sequence
  Description of Artificial Sequence: Synthetic oligonucleotide
  Antisense strand to SEQ ID NO: 762372
uauuaggccagcuuacacu

SEQ ID NO: 762374 - RNA, 19 nt, Artificial Sequence
  Description of Artificial Sequence: Synthetic oligonucleotide
  Sense strand starting at position 2550 of SEQ ID NO: 587042
uuaauaguaauaugcgagu

SEQ ID NO: 762375 - RNA, 19 nt, Artificial Sequence
  Description of Artificial Sequence: Synthetic oligonucleotide
  Antisense strand to SEQ ID NO: 762374
acucgcauauuacuauuaa

SEQ ID NO: 762376 - RNA, 19 nt, Artificial Sequence
  Description of Artificial Sequence: Synthetic oligonucleotide
  Sense strand starting at position 2602 of SEQ ID NO: 587042
uuacuugggucuucucauu

SEQ ID NO: 762377 - RNA, 19 nt, Artificial Sequence
  Description of Artificial Sequence: Synthetic oligonucleotide
  Antisense strand to SEQ ID NO: 762376
aaugagaagacccaaguaa

SEQ ID NO: 762378 - RNA, 19 nt, Artificial Sequence
  Description of Artificial Sequence: Synthetic oligonucleotide
  Sense strand starting at position 2702 of SEQ ID NO: 587042
cacguuguaagcgauggaa

SEQ ID NO: 762379 - RNA, 19 nt, Artificial Sequence
  Description of Artificial Sequence: Synthetic oligonucleotide
  Antisense strand to SEQ ID NO: 762378
uuccaucgcuuacaacgug

SEQ ID NO: 762380 - RNA, 19 nt, Artificial Sequence
  Description of Artificial Sequence: Synthetic oligonucleotide
  Sense strand starting at position 3123 of SEQ ID NO: 587042
gcuagauacuacccgacau

SEQ ID NO: 762381 - RNA, 19 nt, Artificial Sequence
  Description of Artificial Sequence: Synthetic oligonucleotide
  Antisense strand to SEQ ID NO: 762380
augucggguaguaucuagc

SEQ ID NO: 762382 - RNA, 19 nt, Artificial Sequence
  Description of Artificial Sequence: Synthetic oligonucleotide
  Sense strand starting at position 3337 of SEQ ID NO: 587042
gugucugacccugacuuua

SEQ ID NO: 762383 - RNA, 19 nt, Artificial Sequence
  Description of Artificial Sequence: Synthetic oligonucleotide
  Antisense strand to SEQ ID NO: 762382
uaaagucagggucagacac

SEQ ID NO: 762384 - RNA, 19 nt, Artificial Sequence
  Description of Artificial Sequence: Synthetic oligonucleotide
  Sense strand starting at position 3381 of SEQ ID NO: 587042
guggacuuggucuggagau

SEQ ID NO: 762385 - RNA, 19 nt, Artificial Sequence
  Description of Artificial Sequence: Synthetic oligonucleotide
  Antisense strand to SEQ ID NO: 762384
aucuccagaccaaguccac

SEQ ID NO: 762386 - RNA, 19 nt, Artificial Sequence
  Description of Artificial Sequence: Synthetic oligonucleotide
  Sense strand starting at position 3383 of SEQ ID NO: 587042
ggacuuggucuggagaugu

SEQ ID NO: 762387 - RNA, 19 nt, Artificial Sequence
  Description of Artificial Sequence: Synthetic oligonucleotide
  Antisense strand to SEQ ID NO: 762386
acaucuccagaccaagucc

SEQ ID NO: 762388 - RNA, 19 nt, Artificial Sequence
  Description of Artificial Sequence: Synthetic oligonucleotide
  Sense strand starting at position 3458 of SEQ ID NO: 587042
gaggaagaucagggugcua

SEQ ID NO: 762389 - RNA, 19 nt, Artificial Sequence
  Description of Artificial Sequence: Synthetic oligonucleotide
  Antisense strand to SEQ ID NO: 762388
uagcacccugaucuuccuc

SEQ ID NO: 762390 - RNA, 19 nt, Artificial Sequence
  Description of Artificial Sequence: Synthetic oligonucleotide
  Sense strand starting at position 3460 of SEQ ID NO: 587042
ggaagaucagggugcuauu

SEQ ID NO: 762391 - RNA, 19 nt, Artificial Sequence
  Description of Artificial Sequence: Synthetic oligonucleotide
  Antisense strand to SEQ ID NO: 762390
aauagcacccugaucuucc

SEQ ID NO: 762392 - RNA, 19 nt, Artificial Sequence
  Description of Artificial Sequence: Synthetic oligonucleotide
  Sense strand starting at position 3471 of SEQ ID NO: 587042
gugcuauuagcagaaggac

SEQ ID NO: 762393 - RNA, 19 nt, Artificial Sequence
  Description of Artificial Sequence: Synthetic oligonucleotide
  Antisense strand to SEQ ID NO: 762392
guccuucugcuaauagcac

SEQ ID NO: 762394 - RNA, 19 nt, Artificial Sequence
  Description of Artificial Sequence: Synthetic oligonucleotide
  Sense strand starting at position 3804 of SEQ ID NO: 587042
aggaugaguggucgcuaga

SEQ ID NO: 762395 - RNA, 19 nt, Artificial Sequence
  Description of Artificial Sequence: Synthetic oligonucleotide
  Antisense strand to SEQ ID NO: 762394
ucuagcgaccacucauccu

SEQ ID NO: 762396 - RNA, 19 nt, Artificial Sequence
  Description of Artificial Sequence: Synthetic oligonucleotide
  Sense strand starting at position 3807 of SEQ ID NO: 587042
augaguggucgcuagacug

SEQ ID NO: 762397 - RNA, 19 nt, Artificial Sequence
  Description of Artificial Sequence: Synthetic oligonucleotide
  Antisense strand to SEQ ID NO: 762396
cagucuagcgaccacucau

SEQ ID NO: 762398 - RNA, 19 nt, Artificial Sequence
  Description of Artificial Sequence: Synthetic oligonucleotide
  Sense strand starting at position 193 of SEQ ID NO: 587043
agaauagugucauuacccu

SEQ ID NO: 762399 - RNA, 19 nt, Artificial Sequence
  Description of Artificial Sequence: Synthetic oligonucleotide
  Antisense strand to SEQ ID NO: 762398
aggguaaugacacuauucu

SEQ ID NO: 762400 - RNA, 19 nt, Artificial Sequence
  Description of Artificial Sequence: Synthetic oligonucleotide
  Sense strand starting at position 506 of SEQ ID NO: 587043
augcaaucacgcuaccauu

SEQ ID NO: 762401 - RNA, 19 nt, Artificial Sequence
  Description of Artificial Sequence: Synthetic oligonucleotide
  Antisense strand to SEQ ID NO: 762400
aaugguagcgugauugcau

SEQ ID NO: 762402 - RNA, 19 nt, Artificial Sequence
  Description of Artificial Sequence: Synthetic oligonucleotide
  Sense strand starting at position 575 of SEQ ID NO: 587043
uuuagucgcaaggaaugaa

SEQ ID NO: 762403 - RNA, 19 nt, Artificial Sequence
  Description of Artificial Sequence: Synthetic oligonucleotide
  Antisense strand to SEQ ID NO: 762402
uucauuccuugcgacuaaa

SEQ ID NO: 762404 - RNA, 19 nt, Artificial Sequence
  Description of Artificial Sequence: Synthetic oligonucleotide
  Sense strand starting at position 689 of SEQ ID NO: 587043
aauccaguucugggcauaa

SEQ ID NO: 762405 - RNA, 19 nt, Artificial Sequence
  Description of Artificial Sequence: Synthetic oligonucleotide
  Antisense strand to SEQ ID NO: 762404
uuaugcccagaacuggauu

SEQ ID NO: 762406 - RNA, 19 nt, Artificial Sequence
  Description of Artificial Sequence: Synthetic oligonucleotide
  Sense strand starting at position 826 of SEQ ID NO: 587043
uucucuauuugauaaggga

SEQ ID NO: 762407 - RNA, 19 nt, Artificial Sequence
  Description of Artificial Sequence: Synthetic oligonucleotide
  Antisense strand to SEQ ID NO: 762406
ucccuuaucaaauagagaa

SEQ ID NO: 762408 - RNA, 19 nt, Artificial Sequence
  Description of Artificial Sequence: Synthetic oligonucleotide
  Sense strand starting at position 840 of SEQ ID NO: 587043
agggacagcuagcuuaaau

SEQ ID NO: 762409 - RNA, 19 nt, Artificial Sequence
  Description of Artificial Sequence: Synthetic oligonucleotide
  Antisense strand to SEQ ID NO: 762408
auuuaagcuagcugucccu

SEQ ID NO: 762410 - RNA, 19 nt, Artificial Sequence
  Description of Artificial Sequence: Synthetic oligonucleotide
  Sense strand starting at position 1307 of SEQ ID NO: 587043
ggagaucagagcugucaaa

SEQ ID NO: 762411 - RNA, 19 nt, Artificial Sequence
  Description of Artificial Sequence: Synthetic oligonucleotide
  Antisense strand to SEQ ID NO: 762410
uuugacagcucugaucucc

SEQ ID NO: 762412 - RNA, 19 nt, Artificial Sequence
  Description of Artificial Sequence: Synthetic oligonucleotide
  Sense strand starting at position 1488 of SEQ ID NO: 587043
cugggauuccgugagacug

SEQ ID NO: 762413 - RNA, 19 nt, Artificial Sequence
  Description of Artificial Sequence: Synthetic oligonucleotide
  Antisense strand to SEQ ID NO: 762412
cagucucacggaaucccag

SEQ ID NO: 762414 - RNA, 19 nt, Artificial Sequence
  Description of Artificial Sequence: Synthetic oligonucleotide
  Sense strand starting at position 2243 of SEQ ID NO: 587043
ggcaauuuguaccuguguu

SEQ ID NO: 762415 - RNA, 19 nt, Artificial Sequence
  Description of Artificial Sequence: Synthetic oligonucleotide
  Antisense strand to SEQ ID NO: 762414
aacacagguacaaauugcc

SEQ ID NO: 762416 - RNA, 19 nt, Artificial Sequence
  Description of Artificial Sequence: Synthetic oligonucleotide
  Sense strand starting at position 2244 of SEQ ID NO: 587043
gcaauuuguaccuguguuu

SEQ ID NO: 762417 - RNA, 19 nt, Artificial Sequence
  Description of Artificial Sequence: Synthetic oligonucleotide
  Antisense strand to SEQ ID NO: 762416
aaacacagguacaaauugc

SEQ ID NO: 762418 - RNA, 19 nt, Artificial Sequence
  Description of Artificial Sequence: Synthetic oligonucleotide
  Sense strand starting at position 2289 of SEQ ID NO: 587043
gggaauaguuaucccaaua

SEQ ID NO: 762419 - RNA, 19 nt, Artificial Sequence
  Description of Artificial Sequence: Synthetic oligonucleotide
  Antisense strand to SEQ ID NO: 762418
uauugggauaacuauuccc

SEQ ID NO: 762420 - RNA, 19 nt, Artificial Sequence
  Description of Artificial Sequence: Synthetic oligonucleotide
  Sense strand starting at position 2359 of SEQ ID NO: 587043
agagauuguagggaucguu

SEQ ID NO: 762421 - RNA, 19 nt, Artificial Sequence
  Description of Artificial Sequence: Synthetic oligonucleotide
  Antisense strand to SEQ ID NO: 762420
aacgaucccuacaaucucu

SEQ ID NO: 762422 - RNA, 19 nt, Artificial Sequence
  Description of Artificial Sequence: Synthetic oligonucleotide
  Sense strand starting at position 2365 of SEQ ID NO: 587043
uguagggaucguuagggau

SEQ ID NO: 762423 - RNA, 19 nt, Artificial Sequence
  Description of Artificial Sequence: Synthetic oligonucleotide
  Antisense strand to SEQ ID NO: 762422
aucccuaacgaucccuaca

SEQ ID NO: 762424 - RNA, 19 nt, Artificial Sequence
  Description of Artificial Sequence: Synthetic oligonucleotide
  Sense strand starting at position 2377 of SEQ ID NO: 587043
uagggauuccugugaugga

SEQ ID NO: 762425 - RNA, 19 nt, Artificial Sequence
  Description of Artificial Sequence: Synthetic oligonucleotide
  Antisense strand to SEQ ID NO: 762424
uccaucacaggaaucccua

SEQ ID NO: 762426 - RNA, 19 nt, Artificial Sequence
  Description of Artificial Sequence: Synthetic oligonucleotide
  Sense strand starting at position 2494 of SEQ ID NO: 587043
cccuaaagucagcgaagau

SEQ ID NO: 762427 - RNA, 19 nt, Artificial Sequence
  Description of Artificial Sequence: Synthetic oligonucleotide
  Antisense strand to SEQ ID NO: 762426
aucuucgcugacuuuaggg

SEQ ID NO: 762428 - RNA, 19 nt, Artificial Sequence
  Description of Artificial Sequence: Synthetic oligonucleotide
  Sense strand starting at position 2495 of SEQ ID NO: 587043
ccuaaagucagcgaagauu

SEQ ID NO: 762429 - RNA, 19 nt, Artificial Sequence
  Description of Artificial Sequence: Synthetic oligonucleotide
  Antisense strand to SEQ ID NO: 762428
aaucuucgcugacuuuagg

SEQ ID NO: 762430 - RNA, 19 nt, Artificial Sequence
  Description of Artificial Sequence: Synthetic oligonucleotide
  Sense strand starting at position 2503 of SEQ ID NO: 587043
cagcgaagauucuuagauu

SEQ ID NO: 762431 - RNA, 19 nt, Artificial Sequence
  Description of Artificial Sequence: Synthetic oligonucleotide
  Antisense strand to SEQ ID NO: 762430
aaucuaagaaucuucgcug

SEQ ID NO: 762432 - RNA, 19 nt, Artificial Sequence
  Description of Artificial Sequence: Synthetic oligonucleotide
  Sense strand starting at position 2659 of SEQ ID NO: 587043
uuugaugaagcagagucau

SEQ ID NO: 762433 - RNA, 19 nt, Artificial Sequence
  Description of Artificial Sequence: Synthetic oligonucleotide
  Antisense strand to SEQ ID NO: 762432
augacucugcuucaucaaa

SEQ ID NO: 762434 - RNA, 19 nt, Artificial Sequence
  Description of Artificial Sequence: Synthetic oligonucleotide
  Sense strand starting at position 2665 of SEQ ID NO: 587043
gaagcagagucaucacauu

SEQ ID NO: 762435 - RNA, 19 nt, Artificial Sequence
  Description of Artificial Sequence: Synthetic oligonucleotide
  Antisense strand to SEQ ID NO: 762434
aaugugaugacucugcuuc

SEQ ID NO: 762436 - RNA, 19 nt, Artificial Sequence
  Description of Artificial Sequence: Synthetic oligonucleotide
  Sense strand starting at position 2676 of SEQ ID NO: 587043
aucacauuggugcaccaaa

SEQ ID NO: 762437 - RNA, 19 nt, Artificial Sequence
  Description of Artificial Sequence: Synthetic oligonucleotide
  Antisense strand to SEQ ID NO: 762436
uuuggugcaccaaugugau

SEQ ID NO: 762438 - RNA, 19 nt, Artificial Sequence
  Description of Artificial Sequence: Synthetic oligonucleotide
  Sense strand starting at position 2863 of SEQ ID NO: 587043
agaggcauugcucaugaau

SEQ ID NO: 762439 - RNA, 19 nt, Artificial Sequence
  Description of Artificial Sequence: Synthetic oligonucleotide
  Antisense strand to SEQ ID NO: 762438
auucaugagcaaugccucu

SEQ ID NO: 762440 - RNA, 19 nt, Artificial Sequence
  Description of Artificial Sequence: Synthetic oligonucleotide
  Sense strand starting at position 2866 of SEQ ID NO: 587043
ggcauugcucaugaaucua

SEQ ID NO: 762441 - RNA, 19 nt, Artificial Sequence
  Description of Artificial Sequence: Synthetic oligonucleotide
  Antisense strand to SEQ ID NO: 762440
uagauucaugagcaaugcc

SEQ ID NO: 762442 - RNA, 19 nt, Artificial Sequence
  Description of Artificial Sequence: Synthetic oligonucleotide
  Sense strand starting at position 3202 of SEQ ID NO: 587043
gauuuauaaugugcauguu

SEQ ID NO: 762443 - RNA, 19 nt, Artificial Sequence
  Description of Artificial Sequence: Synthetic oligonucleotide
  Antisense strand to SEQ ID NO: 762442
aacaugcacauuauaaauc

SEQ ID NO: 762444 - RNA, 19 nt, Artificial Sequence
  Description of Artificial Sequence: Synthetic oligonucleotide
  Sense strand starting at position 3355 of SEQ ID NO: 587043
cguuguaaguguauaggau

SEQ ID NO: 762445 - RNA, 19 nt, Artificial Sequence
  Description of Artificial Sequence: Synthetic oligonucleotide
  Antisense strand to SEQ ID NO: 762444
auccuauacacuuacaacg

SEQ ID NO: 762446 - RNA, 19 nt, Artificial Sequence
  Description of Artificial Sequence: Synthetic oligonucleotide
  Sense strand starting at position 3356 of SEQ ID NO: 587043
guuguaaguguauaggauc

SEQ ID NO: 762447 - RNA, 19 nt, Artificial Sequence
  Description of Artificial Sequence: Synthetic oligonucleotide
  Antisense strand to SEQ ID NO: 762446
gauccuauacacuuacaac

SEQ ID NO: 762448 - RNA, 19 nt, Artificial Sequence
  Description of Artificial Sequence: Synthetic oligonucleotide
  Sense strand starting at position 3371 of SEQ ID NO: 587043
gaucaugaggucuagcuau

SEQ ID NO: 762449 - RNA, 19 nt, Artificial Sequence
  Description of Artificial Sequence: Synthetic oligonucleotide
  Antisense strand to SEQ ID NO: 762448
auagcuagaccucaugauc

SEQ ID NO: 762450 - RNA, 19 nt, Artificial Sequence
  Description of Artificial Sequence: Synthetic oligonucleotide
  Sense strand starting at position 3377 of SEQ ID NO: 587043
gaggucuagcuaugacaag

SEQ ID NO: 762451 - RNA, 19 nt, Artificial Sequence
  Description of Artificial Sequence: Synthetic oligonucleotide
  Antisense strand to SEQ ID NO: 762450
cuugucauagcuagaccuc

SEQ ID NO: 762452 - RNA, 19 nt, Artificial Sequence
  Description of Artificial Sequence: Synthetic oligonucleotide
  Sense strand starting at position 3618 of SEQ ID NO: 587043
uguguaucauuggcaagga

SEQ ID NO: 762453 - RNA, 19 nt, Artificial Sequence
  Description of Artificial Sequence: Synthetic oligonucleotide
  Antisense strand to SEQ ID NO: 762452
uccuugccaaugauacaca

SEQ ID NO: 762454 - RNA, 19 nt, Artificial Sequence
  Description of Artificial Sequence: Synthetic oligonucleotide
  Sense strand starting at position 3665 of SEQ ID NO: 587043
uggaauuaucacugugcca

SEQ ID NO: 762455 - RNA, 19 nt, Artificial Sequence
  Description of Artificial Sequence: Synthetic oligonucleotide
  Antisense strand to SEQ ID NO: 762454
uggcacagugauaauucca

SEQ ID NO: 762456 - RNA, 19 nt, Artificial Sequence
  Description of Artificial Sequence: Synthetic oligonucleotide
  Sense strand starting at position 3732 of SEQ ID NO: 587043
ugagguagauaaguguuaa

SEQ ID NO: 762457 - RNA, 19 nt, Artificial Sequence
  Description of Artificial Sequence: Synthetic oligonucleotide
  Antisense strand to SEQ ID NO: 762456
uuaacacuuaucuaccuca

SEQ ID NO: 762458 - RNA, 19 nt, Artificial Sequence
  Description of Artificial Sequence: Synthetic oligonucleotide
  Sense strand starting at position 3733 of SEQ ID NO: 587043
gagguagauaaguguuaag

SEQ ID NO: 762459 - RNA, 19 nt, Artificial Sequence
  Description of Artificial Sequence: Synthetic oligonucleotide
  Antisense strand to SEQ ID NO: 762458
cuuaacacuuaucuaccuc

SEQ ID NO: 762460 - RNA, 19 nt, Artificial Sequence
  Description of Artificial Sequence: Synthetic oligonucleotide
  Sense strand starting at position 3786 of SEQ ID NO: 587043
gguguuaagcuacaguuau

SEQ ID NO: 762461 - RNA, 19 nt, Artificial Sequence
  Description of Artificial Sequence: Synthetic oligonucleotide
  Antisense strand to SEQ ID NO: 762460
auaacuguagcuuaacacc

SEQ ID NO: 762462 - RNA, 19 nt, Artificial Sequence
  Description of Artificial Sequence: Synthetic oligonucleotide
  Sense strand starting at position 3823 of SEQ ID NO: 587043
augguuugaugaguacaug

SEQ ID NO: 762463 - RNA, 19 nt, Artificial Sequence
  Description of Artificial Sequence: Synthetic oligonucleotide
  Antisense strand to SEQ ID NO: 762462
cauguacucaucaaaccau

SEQ ID NO: 762464 - RNA, 19 nt, Artificial Sequence
  Description of Artificial Sequence: Synthetic oligonucleotide
  Sense strand starting at position 3824 of SEQ ID NO: 587043
ugguuugaugaguacaugu

SEQ ID NO: 762465 - RNA, 19 nt, Artificial Sequence
  Description of Artificial Sequence: Synthetic oligonucleotide
  Antisense strand to SEQ ID NO: 762464
acauguacucaucaaacca

SEQ ID NO: 762466 - RNA, 19 nt, Artificial Sequence
  Description of Artificial Sequence: Synthetic oligonucleotide
  Sense strand starting at position 3826 of SEQ ID NO: 587043
guuugaugaguacauguag

SEQ ID NO: 762467 - RNA, 19 nt, Artificial Sequence
  Description of Artificial Sequence: Synthetic oligonucleotide
  Antisense strand to SEQ ID NO: 762466
cuacauguacucaucaaac

SEQ ID NO: 762468 - RNA, 19 nt, Artificial Sequence
  Description of Artificial Sequence: Synthetic oligonucleotide
  Sense strand starting at position 3833 of SEQ ID NO: 587043
gaguacauguaguugauga

SEQ ID NO: 762469 - RNA, 19 nt, Artificial Sequence
  Description of Artificial Sequence: Synthetic oligonucleotide
  Antisense strand to SEQ ID NO: 762468
ucaucaacuacauguacuc

SEQ ID NO: 762470 - RNA, 19 nt, Artificial Sequence
  Description of Artificial Sequence: Synthetic oligonucleotide
  Sense strand starting at position 3835 of SEQ ID NO: 587043
guacauguaguugaugaca

SEQ ID NO: 762471 - RNA, 19 nt, Artificial Sequence
  Description of Artificial Sequence: Synthetic oligonucleotide
  Antisense strand to SEQ ID NO: 762470
ugucaucaacuacauguac

SEQ ID NO: 762472 - RNA, 19 nt, Artificial Sequence
  Description of Artificial Sequence: Synthetic oligonucleotide
  Sense strand starting at position 3843 of SEQ ID NO: 587043
aguugaugacaguggaaug

SEQ ID NO: 762473 - RNA, 19 nt, Artificial Sequence
  Description of Artificial Sequence: Synthetic oligonucleotide
  Antisense strand to SEQ ID NO: 762472
cauuccacugucaucaacu

SEQ ID NO: 762474 - RNA, 19 nt, Artificial Sequence
  Description of Artificial Sequence: Synthetic oligonucleotide
  Sense strand starting at position 3844 of SEQ ID NO: 587043
guugaugacaguggaauga

SEQ ID NO: 762475 - RNA, 19 nt, Artificial Sequence
  Description of Artificial Sequence: Synthetic oligonucleotide
  Antisense strand to SEQ ID NO: 762474
ucauuccacugucaucaac

SEQ ID NO: 762476 - RNA, 19 nt, Artificial Sequence
  Description of Artificial Sequence: Synthetic oligonucleotide
  Sense strand starting at position 3896 of SEQ ID NO: 587043
cucuauggauagcucagaa

SEQ ID NO: 762477 - RNA, 19 nt, Artificial Sequence
  Description of Artificial Sequence: Synthetic oligonucleotide
  Antisense strand to SEQ ID NO: 762476
uucugagcuauccauagag

SEQ ID NO: 762478 - RNA, 19 nt, Artificial Sequence
  Description of Artificial Sequence: Synthetic oligonucleotide
  Sense strand starting at position 111 of SEQ ID NO: 587044
aguaauguaaaggguaaua

SEQ ID NO: 762479 - RNA, 19 nt, Artificial Sequence
  Description of Artificial Sequence: Synthetic oligonucleotide
  Antisense strand to SEQ ID NO: 762478
uauuacccuuuacauuacu

SEQ ID NO: 762480 - RNA, 19 nt, Artificial Sequence
  Description of Artificial Sequence: Synthetic oligonucleotide
  Sense strand starting at position 121 of SEQ ID NO: 587044
aggguaauauuccucuucu

SEQ ID NO: 762481 - RNA, 19 nt, Artificial Sequence
  Description of Artificial Sequence: Synthetic oligonucleotide
  Antisense strand to SEQ ID NO: 762480
agaagaggaauauuacccu

SEQ ID NO: 762482 - RNA, 19 nt, Artificial Sequence
  Description of Artificial Sequence: Synthetic oligonucleotide
  Sense strand starting at position 122 of SEQ ID NO: 587044
ggguaauauuccucuucug

SEQ ID NO: 762483 - RNA, 19 nt, Artificial Sequence
  Description of Artificial Sequence: Synthetic oligonucleotide
  Antisense strand to SEQ ID NO: 762482
cagaagaggaauauuaccc

SEQ ID NO: 762484 - RNA, 19 nt, Artificial Sequence
  Description of Artificial Sequence: Synthetic oligonucleotide
  Sense strand starting at position 136 of SEQ ID NO: 587044
uucuguaacuucucuagag

SEQ ID NO: 762485 - RNA, 19 nt, Artificial Sequence
  Description of Artificial Sequence: Synthetic oligonucleotide
  Antisense strand to SEQ ID NO: 762484
cucuagagaaguuacagaa

SEQ ID NO: 762486 - RNA, 19 nt, Artificial Sequence
  Description of Artificial Sequence: Synthetic oligonucleotide
  Sense strand starting at position 138 of SEQ ID NO: 587044
cuguaacuucucuagagua

SEQ ID NO: 762487 - RNA, 19 nt, Artificial Sequence
  Description of Artificial Sequence: Synthetic oligonucleotide
  Antisense strand to SEQ ID NO: 762486
uacucuagagaaguuacag

SEQ ID NO: 762488 - RNA, 19 nt, Artificial Sequence
  Description of Artificial Sequence: Synthetic oligonucleotide
  Sense strand starting at position 140 of SEQ ID NO: 587044
guaacuucucuagaguaau

SEQ ID NO: 762489 - RNA, 19 nt, Artificial Sequence
  Description of Artificial Sequence: Synthetic oligonucleotide
  Antisense strand to SEQ ID NO: 762488
auuacucuagagaaguuac

SEQ ID NO: 762490 - RNA, 19 nt, Artificial Sequence
  Description of Artificial Sequence: Synthetic oligonucleotide
  Sense strand starting at position 184 of SEQ ID NO: 587044
uuguuugcuaggcaggaau

SEQ ID NO: 762491 - RNA, 19 nt, Artificial Sequence
  Description of Artificial Sequence: Synthetic oligonucleotide
  Antisense strand to SEQ ID NO: 762490
auuccugccuagcaaacaa

SEQ ID NO: 762492 - RNA, 19 nt, Artificial Sequence
  Description of Artificial Sequence: Synthetic oligonucleotide
  Sense strand starting at position 243 of SEQ ID NO: 587044
gcugaaugucugcacauca

SEQ ID NO: 762493 - RNA, 19 nt, Artificial Sequence
  Description of Artificial Sequence: Synthetic oligonucleotide
  Antisense strand to SEQ ID NO: 762492
ugaugugcagacauucagc

SEQ ID NO: 762494 - RNA, 19 nt, Artificial Sequence
  Description of Artificial Sequence: Synthetic oligonucleotide
  Sense strand starting at position 317 of SEQ ID NO: 587044
agaagaaugaggugugagu

SEQ ID NO: 762495 - RNA, 19 nt, Artificial Sequence
  Description of Artificial Sequence: Synthetic oligonucleotide
  Antisense strand to SEQ ID NO: 762494
acucacaccucauucuucu

SEQ ID NO: 762496 - RNA, 19 nt, Artificial Sequence
  Description of Artificial Sequence: Synthetic oligonucleotide
  Sense strand starting at position 319 of SEQ ID NO: 587044
aagaaugaggugugaguca

SEQ ID NO: 762497 - RNA, 19 nt, Artificial Sequence
  Description of Artificial Sequence: Synthetic oligonucleotide
  Antisense strand to SEQ ID NO: 762496
ugacucacaccucauucuu

SEQ ID NO: 762498 - RNA, 19 nt, Artificial Sequence
  Description of Artificial Sequence: Synthetic oligonucleotide
  Sense strand starting at position 324 of SEQ ID NO: 587044
ugaggugugagucaacaaa

SEQ ID NO: 762499 - RNA, 19 nt, Artificial Sequence
  Description of Artificial Sequence: Synthetic oligonucleotide
  Antisense strand to SEQ ID NO: 762498
uuuguugacucacaccuca

SEQ ID NO: 762500 - RNA, 19 nt, Artificial Sequence
  Description of Artificial Sequence: Synthetic oligonucleotide
  Sense strand starting at position 1049 of SEQ ID NO: 587044
uuagaugcugccuacuaua

SEQ ID NO: 762501 - RNA, 19 nt, Artificial Sequence
  Description of Artificial Sequence: Synthetic oligonucleotide
  Antisense strand to SEQ ID NO: 762500
uauaguaggcagcaucuaa

SEQ ID NO: 762502 - RNA, 19 nt, Artificial Sequence
  Description of Artificial Sequence: Synthetic oligonucleotide
  Sense strand starting at position 1221 of SEQ ID NO: 587044
gcaucuaaagcagaacuuu

SEQ ID NO: 762503 - RNA, 19 nt, Artificial Sequence
  Description of Artificial Sequence: Synthetic oligonucleotide
  Antisense strand to SEQ ID NO: 762502
aaaguucugcuuuagaugc

SEQ ID NO: 762504 - RNA, 19 nt, Artificial Sequence
  Description of Artificial Sequence: Synthetic oligonucleotide
  Sense strand starting at position 1428 of SEQ ID NO: 587044
agcugcaaaccagauuauu

SEQ ID NO: 762505 - RNA, 19 nt, Artificial Sequence
  Description of Artificial Sequence: Synthetic oligonucleotide
  Antisense strand to SEQ ID NO: 762504
aauaaucugguuugcagcu

SEQ ID NO: 762506 - RNA, 19 nt, Artificial Sequence
  Description of Artificial Sequence: Synthetic oligonucleotide
  Sense strand starting at position 1609 of SEQ ID NO: 587044
ucaguaccuccaugugaca

SEQ ID NO: 762507 - RNA, 19 nt, Artificial Sequence
  Description of Artificial Sequence: Synthetic oligonucleotide
  Antisense strand to SEQ ID NO: 762506
ugucacauggagguacuga

SEQ ID NO: 762508 - RNA, 19 nt, Artificial Sequence
  Description of Artificial Sequence: Synthetic oligonucleotide
  Sense strand starting at position 1734 of SEQ ID NO: 587044
uauuauuaggagcgaaauu

SEQ ID NO: 762509 - RNA, 19 nt, Artificial Sequence
  Description of Artificial Sequence: Synthetic oligonucleotide
  Antisense strand to SEQ ID NO: 762508
aauuucgcuccuaauaaua

SEQ ID NO: 762510 - RNA, 19 nt, Artificial Sequence
  Description of Artificial Sequence: Synthetic oligonucleotide
  Sense strand starting at position 1819 of SEQ ID NO: 587044
auuccaucugaucaguuua

SEQ ID NO: 762511 - RNA, 19 nt, Artificial Sequence
  Description of Artificial Sequence: Synthetic oligonucleotide
  Antisense strand to SEQ ID NO: 762510
uaaacugaucagauggaau

SEQ ID NO: 762512 - RNA, 19 nt, Artificial Sequence
  Description of Artificial Sequence: Synthetic oligonucleotide
  Sense strand starting at position 1888 of SEQ ID NO: 587044
uauacuacuguaugaagga

SEQ ID NO: 762513 - RNA, 19 nt, Artificial Sequence
  Description of Artificial Sequence: Synthetic oligonucleotide
  Antisense strand to SEQ ID NO: 762512
uccuucauacaguaguaua

SEQ ID NO: 762514 - RNA, 19 nt, Artificial Sequence
  Description of Artificial Sequence: Synthetic oligonucleotide
  Sense strand starting at position 1913 of SEQ ID NO: 587044
uugaaaugcuuaccaauag

SEQ ID NO: 762515 - RNA, 19 nt, Artificial Sequence
  Description of Artificial Sequence: Synthetic oligonucleotide
  Antisense strand to SEQ ID NO: 762514
cuauugguaagcauuucaa

SEQ ID NO: 762516 - RNA, 19 nt, Artificial Sequence
  Description of Artificial Sequence: Synthetic oligonucleotide
  Sense strand starting at position 2053 of SEQ ID NO: 587044
auugcuucuuaauuaggau

SEQ ID NO: 762517 - RNA, 19 nt, Artificial Sequence
  Description of Artificial Sequence: Synthetic oligonucleotide
  Antisense strand to SEQ ID NO: 762516
auccuaauuaagaagcaau

SEQ ID NO: 762518 - RNA, 19 nt, Artificial Sequence
  Description of Artificial Sequence: Synthetic oligonucleotide
  Sense strand starting at position 2060 of SEQ ID NO: 587044
cuuaauuaggauuggcuga

SEQ ID NO: 762519 - RNA, 19 nt, Artificial Sequence
  Description of Artificial Sequence: Synthetic oligonucleotide
  Antisense strand to SEQ ID NO: 762518
ucagccaauccuaauuaag

SEQ ID NO: 762520 - RNA, 19 nt, Artificial Sequence
  Description of Artificial Sequence: Synthetic oligonucleotide
  Sense strand starting at position 2090 of SEQ ID NO: 587044
gcugaaagacacuguaaug

SEQ ID NO: 762521 - RNA, 19 nt, Artificial Sequence
  Description of Artificial Sequence: Synthetic oligonucleotide
  Antisense strand to SEQ ID NO: 762520
cauuacagugucuuucagc

SEQ ID NO: 762522 - RNA, 19 nt, Artificial Sequence
  Description of Artificial Sequence: Synthetic oligonucleotide
  Sense strand starting at position 2106 of SEQ ID NO: 587044
auggaaugcgcucauaaac

SEQ ID NO: 762523 - RNA, 19 nt, Artificial Sequence
  Description of Artificial Sequence: Synthetic oligonucleotide
  Antisense strand to SEQ ID NO: 762522
guuuaugagcgcauuccau

SEQ ID NO: 762524 - RNA, 19 nt, Artificial Sequence
  Description of Artificial Sequence: Synthetic oligonucleotide
  Sense strand starting at position 2333 of SEQ ID NO: 587044
acuugaauacugcgaucau

SEQ ID NO: 762525 - RNA, 19 nt, Artificial Sequence
  Description of Artificial Sequence: Synthetic oligonucleotide
  Antisense strand to SEQ ID NO: 762524
augaucgcaguauucaagu

SEQ ID NO: 762526 - RNA, 19 nt, Artificial Sequence
  Description of Artificial Sequence: Synthetic oligonucleotide
  Sense strand starting at position 2419 of SEQ ID NO: 587044
ggaugaguagauugacugu

SEQ ID NO: 762527 - RNA, 19 nt, Artificial Sequence
  Description of Artificial Sequence: Synthetic oligonucleotide
  Antisense strand to SEQ ID NO: 762526
acagucaaucuacucaucc

SEQ ID NO: 762528 - RNA, 19 nt, Artificial Sequence
  Description of Artificial Sequence: Synthetic oligonucleotide
  Sense strand starting at position 2422 of SEQ ID NO: 587044
ugaguagauugacuguaca

SEQ ID NO: 762529 - RNA, 19 nt, Artificial Sequence
  Description of Artificial Sequence: Synthetic oligonucleotide
  Antisense strand to SEQ ID NO: 762528
uguacagucaaucuacuca

SEQ ID NO: 762530 - RNA, 19 nt, Artificial Sequence
  Description of Artificial Sequence: Synthetic oligonucleotide
  Sense strand starting at position 2425 of SEQ ID NO: 587044
guagauugacuguacaauu

SEQ ID NO: 762531 - RNA, 19 nt, Artificial Sequence
  Description of Artificial Sequence: Synthetic oligonucleotide
  Antisense strand to SEQ ID NO: 762530
aauuguacagucaaucuac

SEQ ID NO: 762532 - RNA, 19 nt, Artificial Sequence
  Description of Artificial Sequence: Synthetic oligonucleotide
  Sense strand starting at position 2559 of SEQ ID NO: 587044
ggcugagggcuucacugaa

SEQ ID NO: 762533 - RNA, 19 nt, Artificial Sequence
  Description of Artificial Sequence: Synthetic oligonucleotide
  Antisense strand to SEQ ID NO: 762532
uucagugaagcccucagcc

SEQ ID NO: 762534 - RNA, 19 nt, Artificial Sequence
  Description of Artificial Sequence: Synthetic oligonucleotide
  Sense strand starting at position 2953 of SEQ ID NO: 587044
guaucagagaagugguuug

SEQ ID NO: 762535 - RNA, 19 nt, Artificial Sequence
  Description of Artificial Sequence: Synthetic oligonucleotide
  Antisense strand to SEQ ID NO: 762534
caaaccacuucucugauac

SEQ ID NO: 762536 - RNA, 19 nt, Artificial Sequence
  Description of Artificial Sequence: Synthetic oligonucleotide
  Sense strand starting at position 2963 of SEQ ID NO: 587044
agugguuuggauuaccaua

SEQ ID NO: 762537 - RNA, 19 nt, Artificial Sequence
  Description of Artificial Sequence: Synthetic oligonucleotide
  Antisense strand to SEQ ID NO: 762536
uaugguaauccaaaccacu

SEQ ID NO: 762538 - RNA, 19 nt, Artificial Sequence
  Description of Artificial Sequence: Synthetic oligonucleotide
  Sense strand starting at position 3175 of SEQ ID NO: 587044
aaaucagauucgucuagag

SEQ ID NO: 762539 - RNA, 19 nt, Artificial Sequence
  Description of Artificial Sequence: Synthetic oligonucleotide
  Antisense strand to SEQ ID NO: 762538
cucuagacgaaucugauuu

SEQ ID NO: 762540 - RNA, 19 nt, Artificial Sequence
  Description of Artificial Sequence: Synthetic oligonucleotide
  Sense strand starting at position 3177 of SEQ ID NO: 587044
aucagauucgucuagagca

SEQ ID NO: 762541 - RNA, 19 nt, Artificial Sequence
  Description of Artificial Sequence: Synthetic oligonucleotide
  Antisense strand to SEQ ID NO: 762540
ugcucuagacgaaucugau

SEQ ID NO: 762542 - RNA, 19 nt, Artificial Sequence
  Description of Artificial Sequence: Synthetic oligonucleotide
  Sense strand starting at position 3179 of SEQ ID NO: 587044
cagauucgucuagagcaga

SEQ ID NO: 762543 - RNA, 19 nt, Artificial Sequence
  Description of Artificial Sequence: Synthetic oligonucleotide
  Antisense strand to SEQ ID NO: 762542
ucugcucuagacgaaucug

SEQ ID NO: 762544 - RNA, 19 nt, Artificial Sequence
  Description of Artificial Sequence: Synthetic oligonucleotide
  Sense strand starting at position 3192 of SEQ ID NO: 587044
agcagaaagugggcucaau

SEQ ID NO: 762545 - RNA, 19 nt, Artificial Sequence
  Description of Artificial Sequence: Synthetic oligonucleotide
  Antisense strand to SEQ ID NO: 762544
auugagcccacuuucugcu

SEQ ID NO: 762546 - RNA, 19 nt, Artificial Sequence
  Description of Artificial Sequence: Synthetic oligonucleotide
  Sense strand starting at position 3240 of SEQ ID NO: 587044
ucaguacauugauucuuga

SEQ ID NO: 762547 - RNA, 19 nt, Artificial Sequence
  Description of Artificial Sequence: Synthetic oligonucleotide
  Antisense strand to SEQ ID NO: 762546
ucaagaaucaauguacuga

SEQ ID NO: 762548 - RNA, 19 nt, Artificial Sequence
  Description of Artificial Sequence: Synthetic oligonucleotide
  Sense strand starting at position 3243 of SEQ ID NO: 587044
guacauugauucuugauuc

SEQ ID NO: 762549 - RNA, 19 nt, Artificial Sequence
  Description of Artificial Sequence: Synthetic oligonucleotide
  Antisense strand to SEQ ID NO: 762548
gaaucaagaaucaauguac

SEQ ID NO: 762550 - RNA, 19 nt, Artificial Sequence
  Description of Artificial Sequence: Synthetic oligonucleotide
  Sense strand starting at position 3670 of SEQ ID NO: 587044
gaauccuuugcauagcgau

SEQ ID NO: 762551 - RNA, 19 nt, Artificial Sequence
  Description of Artificial Sequence: Synthetic oligonucleotide
  Antisense strand to SEQ ID NO: 762550
aucgcuaugcaaaggauuc

SEQ ID NO: 762552 - RNA, 19 nt, Artificial Sequence
  Description of Artificial Sequence: Synthetic oligonucleotide
  Sense strand starting at position 3906 of SEQ ID NO: 587044
auaauuuacugagagcaug

SEQ ID NO: 762553 - RNA, 19 nt, Artificial Sequence
  Description of Artificial Sequence: Synthetic oligonucleotide
  Antisense strand to SEQ ID NO: 762552
caugcucucaguaaauuau

SEQ ID NO: 762554 - RNA, 19 nt, Artificial Sequence
  Description of Artificial Sequence: Synthetic oligonucleotide
  Sense strand starting at position 3960 of SEQ ID NO: 587044
uguuaaauagcaugaagau

SEQ ID NO: 762555 - RNA, 19 nt, Artificial Sequence
  Description of Artificial Sequence: Synthetic oligonucleotide
  Antisense strand to SEQ ID NO: 762554
aucuucaugcuauuuaaca

SEQ ID NO: 762556 - RNA, 19 nt, Artificial Sequence
  Description of Artificial Sequence: Synthetic oligonucleotide
  Sense strand starting at position 3970 of SEQ ID NO: 587044
caugaagaucuaugcagga

SEQ ID NO: 762557 - RNA, 19 nt, Artificial Sequence
  Description of Artificial Sequence: Synthetic oligonucleotide
  Antisense strand to SEQ ID NO: 762556
uccugcauagaucuucaug

SEQ ID NO: 762558 - RNA, 19 nt, Artificial Sequence
  Description of Artificial Sequence: Synthetic oligonucleotide
  Sense strand starting at position 110 of SEQ ID NO: 587045
uccacuauauaaguuagua

SEQ ID NO: 762559 - RNA, 19 nt, Artificial Sequence
  Description of Artificial Sequence: Synthetic oligonucleotide
  Antisense strand to SEQ ID NO: 762558
uacuaacuuauauagugga

SEQ ID NO: 762560 - RNA, 19 nt, Artificial Sequence
  Description of Artificial Sequence: Synthetic oligonucleotide
  Sense strand starting at position 191 of SEQ ID NO: 587045
uugggcuaucuagaacuua

SEQ ID NO: 762561 - RNA, 19 nt, Artificial Sequence
  Description of Artificial Sequence: Synthetic oligonucleotide
  Antisense strand to SEQ ID NO: 762560
uaaguucuagauagcccaa

SEQ ID NO: 762562 - RNA, 19 nt, Artificial Sequence
  Description of Artificial Sequence: Synthetic oligonucleotide
  Sense strand starting at position 282 of SEQ ID NO: 587045
ugacaugagcuccaaguuu

SEQ ID NO: 762563 - RNA, 19 nt, Artificial Sequence
  Description of Artificial Sequence: Synthetic oligonucleotide
  Antisense strand to SEQ ID NO: 762562
aaacuuggagcucauguca

SEQ ID NO: 762564 - RNA, 19 nt, Artificial Sequence
  Description of Artificial Sequence: Synthetic oligonucleotide
  Sense strand starting at position 586 of SEQ ID NO: 587045
gaagcagaauuguccgaau

SEQ ID NO: 762565 - RNA, 19 nt, Artificial Sequence
  Description of Artificial Sequence: Synthetic oligonucleotide
  Antisense strand to SEQ ID NO: 762564
auucggacaauucugcuuc

SEQ ID NO: 762566 - RNA, 19 nt, Artificial Sequence
  Description of Artificial Sequence: Synthetic oligonucleotide
  Sense strand starting at position 588 of SEQ ID NO: 587045
agcagaauuguccgaauaa

SEQ ID NO: 762567 - RNA, 19 nt, Artificial Sequence
  Description of Artificial Sequence: Synthetic oligonucleotide
  Antisense strand to SEQ ID NO: 762566
uuauucggacaauucugcu

SEQ ID NO: 762568 - RNA, 19 nt, Artificial Sequence
  Description of Artificial Sequence: Synthetic oligonucleotide
  Sense strand starting at position 599 of SEQ ID NO: 587045
ccgaauaaugcugauaaua

SEQ ID NO: 762569 - RNA, 19 nt, Artificial Sequence
  Description of Artificial Sequence: Synthetic oligonucleotide
  Antisense strand to SEQ ID NO: 762568
uauuaucagcauuauucgg

SEQ ID NO: 762570 - RNA, 19 nt, Artificial Sequence
  Description of Artificial Sequence: Synthetic oligonucleotide
  Sense strand starting at position 736 of SEQ ID NO: 587045
uugaaauuaccucagguuu

SEQ ID NO: 762571 - RNA, 19 nt, Artificial Sequence
  Description of Artificial Sequence: Synthetic oligonucleotide
  Antisense strand to SEQ ID NO: 762570
aaaccugagguaauuucaa

SEQ ID NO: 762572 - RNA, 19 nt, Artificial Sequence
  Description of Artificial Sequence: Synthetic oligonucleotide
  Sense strand starting at position 771 of SEQ ID NO: 587045
gcauauucccagugaaaua

SEQ ID NO: 762573 - RNA, 19 nt, Artificial Sequence
  Description of Artificial Sequence: Synthetic oligonucleotide
  Antisense strand to SEQ ID NO: 762572
uauuucacugggaauaugc

SEQ ID NO: 762574 - RNA, 19 nt, Artificial Sequence
  Description of Artificial Sequence: Synthetic oligonucleotide
  Sense strand starting at position 1264 of SEQ ID NO: 587045
guugcauugggauacuuga

SEQ ID NO: 762575 - RNA, 19 nt, Artificial Sequence
  Description of Artificial Sequence: Synthetic oligonucleotide
  Antisense strand to SEQ ID NO: 762574
ucaaguaucccaaugcaac

SEQ ID NO: 762576 - RNA, 19 nt, Artificial Sequence
  Description of Artificial Sequence: Synthetic oligonucleotide
  Sense strand starting at position 1431 of SEQ ID NO: 587045
auagauauugcucaaaugu

SEQ ID NO: 762577 - RNA, 19 nt, Artificial Sequence
  Description of Artificial Sequence: Synthetic oligonucleotide
  Antisense strand to SEQ ID NO: 762576
acauuugagcaauaucuau

SEQ ID NO: 762578 - RNA, 19 nt, Artificial Sequence
  Description of Artificial Sequence: Synthetic oligonucleotide
  Sense strand starting at position 1503 of SEQ ID NO: 587045
guuaaaucauguuccaauu

SEQ ID NO: 762579 - RNA, 19 nt, Artificial Sequence
  Description of Artificial Sequence: Synthetic oligonucleotide
  Antisense strand to SEQ ID NO: 762578
aauuggaacaugauuuaac

SEQ ID NO: 762580 - RNA, 19 nt, Artificial Sequence
  Description of Artificial Sequence: Synthetic oligonucleotide
  Sense strand starting at position 1590 of SEQ ID NO: 587045
uuuccacaucuugguugaa

SEQ ID NO: 762581 - RNA, 19 nt, Artificial Sequence
  Description of Artificial Sequence: Synthetic oligonucleotide
  Antisense strand to SEQ ID NO: 762580
uucaaccaagauguggaaa

SEQ ID NO: 762582 - RNA, 19 nt, Artificial Sequence
  Description of Artificial Sequence: Synthetic oligonucleotide
  Sense strand starting at position 1591 of SEQ ID NO: 587045
uuccacaucuugguugaaa

SEQ ID NO: 762583 - RNA, 19 nt, Artificial Sequence
  Description of Artificial Sequence: Synthetic oligonucleotide
  Antisense strand to SEQ ID NO: 762582
uuucaaccaagauguggaa

SEQ ID NO: 762584 - RNA, 19 nt, Artificial Sequence
  Description of Artificial Sequence: Synthetic oligonucleotide
  Sense strand starting at position 1592 of SEQ ID NO: 587045
uccacaucuugguugaaau

SEQ ID NO: 762585 - RNA, 19 nt, Artificial Sequence
  Description of Artificial Sequence: Synthetic oligonucleotide
  Antisense strand to SEQ ID NO: 762584
auuucaaccaagaugugga

SEQ ID NO: 762586 - RNA, 19 nt, Artificial Sequence
  Description of Artificial Sequence: Synthetic oligonucleotide
  Sense strand starting at position 1593 of SEQ ID NO: 587045
ccacaucuugguugaaaua

SEQ ID NO: 762587 - RNA, 19 nt, Artificial Sequence
  Description of Artificial Sequence: Synthetic oligonucleotide
  Antisense strand to SEQ ID NO: 762586
uauuucaaccaagaugugg

SEQ ID NO: 762588 - RNA, 19 nt, Artificial Sequence
  Description of Artificial Sequence: Synthetic oligonucleotide
  Sense strand starting at position 1677 of SEQ ID NO: 587045
auauccugauaccuaguua

SEQ ID NO: 762589 - RNA, 19 nt, Artificial Sequence
  Description of Artificial Sequence: Synthetic oligonucleotide
  Antisense strand to SEQ ID NO: 762588
uaacuagguaucaggauau

SEQ ID NO: 762590 - RNA, 19 nt, Artificial Sequence
  Description of Artificial Sequence: Synthetic oligonucleotide
  Sense strand starting at position 1681 of SEQ ID NO: 587045
ccugauaccuaguuaucau

SEQ ID NO: 762591 - RNA, 19 nt, Artificial Sequence
  Description of Artificial Sequence: Synthetic oligonucleotide
  Antisense strand to SEQ ID NO: 762590
augauaacuagguaucagg

SEQ ID NO: 762592 - RNA, 19 nt, Artificial Sequence
  Description of Artificial Sequence: Synthetic oligonucleotide
  Sense strand starting at position 1766 of SEQ ID NO: 587045
ucuuccuaguuuguuuaaa

SEQ ID NO: 762593 - RNA, 19 nt, Artificial Sequence
  Description of Artificial Sequence: Synthetic oligonucleotide
  Antisense strand to SEQ ID NO: 762592
uuuaaacaaacuaggaaga

SEQ ID NO: 762594 - RNA, 19 nt, Artificial Sequence
  Description of Artificial Sequence: Synthetic oligonucleotide
  Sense strand starting at position 1767 of SEQ ID NO: 587045
cuuccuaguuuguuuaaag

SEQ ID NO: 762595 - RNA, 19 nt, Artificial Sequence
  Description of Artificial Sequence: Synthetic oligonucleotide
  Antisense strand to SEQ ID NO: 762594
cuuuaaacaaacuaggaag

SEQ ID NO: 762596 - RNA, 19 nt, Artificial Sequence
  Description of Artificial Sequence: Synthetic oligonucleotide
  Sense strand starting at position 1843 of SEQ ID NO: 587045
uguugucaucucuacaaac

SEQ ID NO: 762597 - RNA, 19 nt, Artificial Sequence
  Description of Artificial Sequence: Synthetic oligonucleotide
  Antisense strand to SEQ ID NO: 762596
guuuguagagaugacaaca

SEQ ID NO: 762598 - RNA, 19 nt, Artificial Sequence
  Description of Artificial Sequence: Synthetic oligonucleotide
  Sense strand starting at position 1963 of SEQ ID NO: 587045
uuggaauccaguuaguuga

SEQ ID NO: 762599 - RNA, 19 nt, Artificial Sequence
  Description of Artificial Sequence: Synthetic oligonucleotide
  Antisense strand to SEQ ID NO: 762598
ucaacuaacuggauuccaa

SEQ ID NO: 762600 - RNA, 19 nt, Artificial Sequence
  Description of Artificial Sequence: Synthetic oligonucleotide
  Sense strand starting at position 1966 of SEQ ID NO: 587045
gaauccaguuaguugagga

SEQ ID NO: 762601 - RNA, 19 nt, Artificial Sequence
  Description of Artificial Sequence: Synthetic oligonucleotide
  Antisense strand to SEQ ID NO: 762600
uccucaacuaacuggauuc

SEQ ID NO: 762602 - RNA, 19 nt, Artificial Sequence
  Description of Artificial Sequence: Synthetic oligonucleotide
  Sense strand starting at position 2018 of SEQ ID NO: 587045
ccugaacccugguuggaau

SEQ ID NO: 762603 - RNA, 19 nt, Artificial Sequence
  Description of Artificial Sequence: Synthetic oligonucleotide
  Antisense strand to SEQ ID NO: 762602
auuccaaccaggguucagg

SEQ ID NO: 762604 - RNA, 19 nt, Artificial Sequence
  Description of Artificial Sequence: Synthetic oligonucleotide
  Sense strand starting at position 2188 of SEQ ID NO: 587045
guggcuccauaauuaacaa

SEQ ID NO: 762605 - RNA, 19 nt, Artificial Sequence
  Description of Artificial Sequence: Synthetic oligonucleotide
  Antisense strand to SEQ ID NO: 762604
uuguuaauuauggagccac

SEQ ID NO: 762606 - RNA, 19 nt, Artificial Sequence
  Description of Artificial Sequence: Synthetic oligonucleotide
  Sense strand starting at position 2230 of SEQ ID NO: 587045
aguacaugguuguuaucau

SEQ ID NO: 762607 - RNA, 19 nt, Artificial Sequence
  Description of Artificial Sequence: Synthetic oligonucleotide
  Antisense strand to SEQ ID NO: 762606
augauaacaaccauguacu

SEQ ID NO: 762608 - RNA, 19 nt, Artificial Sequence
  Description of Artificial Sequence: Synthetic oligonucleotide
  Sense strand starting at position 2490 of SEQ ID NO: 587045
uuuaucuucccauguagau

SEQ ID NO: 762609 - RNA, 19 nt, Artificial Sequence
  Description of Artificial Sequence: Synthetic oligonucleotide
  Antisense strand to SEQ ID NO: 762608
aucuacaugggaagauaaa

SEQ ID NO: 762610 - RNA, 19 nt, Artificial Sequence
  Description of Artificial Sequence: Synthetic oligonucleotide
  Sense strand starting at position 2611 of SEQ ID NO: 587045
ugccuuuaccaaugugaua

SEQ ID NO: 762611 - RNA, 19 nt, Artificial Sequence
  Description of Artificial Sequence: Synthetic oligonucleotide
  Antisense strand to SEQ ID NO: 762610
uaucacauugguaaaggca

SEQ ID NO: 762612 - RNA, 19 nt, Artificial Sequence
  Description of Artificial Sequence: Synthetic oligonucleotide
  Sense strand starting at position 2644 of SEQ ID NO: 587045
ucauguguuagguaucuca

SEQ ID NO: 762613 - RNA, 19 nt, Artificial Sequence
  Description of Artificial Sequence: Synthetic oligonucleotide
  Antisense strand to SEQ ID NO: 762612
ugagauaccuaacacauga

SEQ ID NO: 762614 - RNA, 19 nt, Artificial Sequence
  Description of Artificial Sequence: Synthetic oligonucleotide
  Sense strand starting at position 2647 of SEQ ID NO: 587045
uguguuagguaucucagga

SEQ ID NO: 762615 - RNA, 19 nt, Artificial Sequence
  Description of Artificial Sequence: Synthetic oligonucleotide
  Antisense strand to SEQ ID NO: 762614
uccugagauaccuaacaca

SEQ ID NO: 762616 - RNA, 19 nt, Artificial Sequence
  Description of Artificial Sequence: Synthetic oligonucleotide
  Sense strand starting at position 2812 of SEQ ID NO: 587045
ugaaguuuaaugugaaggu

SEQ ID NO: 762617 - RNA, 19 nt, Artificial Sequence
  Description of Artificial Sequence: Synthetic oligonucleotide
  Antisense strand to SEQ ID NO: 762616
accuucacauuaaacuuca

SEQ ID NO: 762618 - RNA, 19 nt, Artificial Sequence
  Description of Artificial Sequence: Synthetic oligonucleotide
  Sense strand starting at position 2816 of SEQ ID NO: 587045
guuuaaugugaagguuaca

SEQ ID NO: 762619 - RNA, 19 nt, Artificial Sequence
  Description of Artificial Sequence: Synthetic oligonucleotide
  Antisense strand to SEQ ID NO: 762618
uguaaccuucacauuaaac

SEQ ID NO: 762620 - RNA, 19 nt, Artificial Sequence
  Description of Artificial Sequence: Synthetic oligonucleotide
  Sense strand starting at position 2881 of SEQ ID NO: 587045
ugacauuuguguuugucaa

SEQ ID NO: 762621 - RNA, 19 nt, Artificial Sequence
  Description of Artificial Sequence: Synthetic oligonucleotide
  Antisense strand to SEQ ID NO: 762620
uugacaaacacaaauguca

SEQ ID NO: 762622 - RNA, 19 nt, Artificial Sequence
  Description of Artificial Sequence: Synthetic oligonucleotide
  Sense strand starting at position 2882 of SEQ ID NO: 587045
gacauuuguguuugucaag

SEQ ID NO: 762623 - RNA, 19 nt, Artificial Sequence
  Description of Artificial Sequence: Synthetic oligonucleotide
  Antisense strand to SEQ ID NO: 762622
cuugacaaacacaaauguc

SEQ ID NO: 762624 - RNA, 19 nt, Artificial Sequence
  Description of Artificial Sequence: Synthetic oligonucleotide
  Sense strand starting at position 2892 of SEQ ID NO: 587045
uuugucaagaaguggagau

SEQ ID NO: 762625 - RNA, 19 nt, Artificial Sequence
  Description of Artificial Sequence: Synthetic oligonucleotide
  Antisense strand to SEQ ID NO: 762624
aucuccacuucuugacaaa

SEQ ID NO: 762626 - RNA, 19 nt, Artificial Sequence
  Description of Artificial Sequence: Synthetic oligonucleotide
  Sense strand starting at position 2893 of SEQ ID NO: 587045
uugucaagaaguggagauu

SEQ ID NO: 762627 - RNA, 19 nt, Artificial Sequence
  Description of Artificial Sequence: Synthetic oligonucleotide
  Antisense strand to SEQ ID NO: 762626
aaucuccacuucuugacaa

SEQ ID NO: 762628 - RNA, 19 nt, Artificial Sequence
  Description of Artificial Sequence: Synthetic oligonucleotide
  Sense strand starting at position 2972 of SEQ ID NO: 587045
auuguucugucacuaucaa

SEQ ID NO: 762629 - RNA, 19 nt, Artificial Sequence
  Description of Artificial Sequence: Synthetic oligonucleotide
  Antisense strand to SEQ ID NO: 762628
uugauagugacagaacaau

SEQ ID NO: 762630 - RNA, 19 nt, Artificial Sequence
  Description of Artificial Sequence: Synthetic oligonucleotide
  Sense strand starting at position 2973 of SEQ ID NO: 587045
uuguucugucacuaucaau

SEQ ID NO: 762631 - RNA, 19 nt, Artificial Sequence
  Description of Artificial Sequence: Synthetic oligonucleotide
  Antisense strand to SEQ ID NO: 762630
auugauagugacagaacaa

SEQ ID NO: 762632 - RNA, 19 nt, Artificial Sequence
  Description of Artificial Sequence: Synthetic oligonucleotide
  Sense strand starting at position 3385 of SEQ ID NO: 587045
uuucuuaaugguggcauaa

SEQ ID NO: 762633 - RNA, 19 nt, Artificial Sequence
  Description of Artificial Sequence: Synthetic oligonucleotide
  Antisense strand to SEQ ID NO: 762632
uuaugccaccauuaagaaa

SEQ ID NO: 762634 - RNA, 19 nt, Artificial Sequence
  Description of Artificial Sequence: Synthetic oligonucleotide
  Sense strand starting at position 3397 of SEQ ID NO: 587045
ggcauaaucggguaguuac

SEQ ID NO: 762635 - RNA, 19 nt, Artificial Sequence
  Description of Artificial Sequence: Synthetic oligonucleotide
  Antisense strand to SEQ ID NO: 762634
guaacuacccgauuaugcc

SEQ ID NO: 762636 - RNA, 19 nt, Artificial Sequence
  Description of Artificial Sequence: Synthetic oligonucleotide
  Sense strand starting at position 3449 of SEQ ID NO: 587045
uuauauaaaguguggcaau

SEQ ID NO: 762637 - RNA, 19 nt, Artificial Sequence
  Description of Artificial Sequence: Synthetic oligonucleotide
  Antisense strand to SEQ ID NO: 762636
auugccacacuuuauauaa

SEQ ID NO: 762638 - RNA, 19 nt, Artificial Sequence
  Description of Artificial Sequence: Synthetic oligonucleotide
  Sense strand starting at position 6 of SEQ ID NO: 587046
ggaagaauguuacugcaag

SEQ ID NO: 762639 - RNA, 19 nt, Artificial Sequence
  Description of Artificial Sequence: Synthetic oligonucleotide
  Antisense strand to SEQ ID NO: 762638
cuugcaguaacauucuucc

SEQ ID NO: 762640 - RNA, 19 nt, Artificial Sequence
  Description of Artificial Sequence: Synthetic oligonucleotide
  Sense strand starting at position 293 of SEQ ID NO: 587046
aguagagagcuuggauuca

SEQ ID NO: 762641 - RNA, 19 nt, Artificial Sequence
  Description of Artificial Sequence: Synthetic oligonucleotide
  Antisense strand to SEQ ID NO: 762640
ugaauccaagcucucuacu

SEQ ID NO: 762642 - RNA, 19 nt, Artificial Sequence
  Description of Artificial Sequence: Synthetic oligonucleotide
  Sense strand starting at position 325 of SEQ ID NO: 587046
cuaacacaaugucuggauu

SEQ ID NO: 762643 - RNA, 19 nt, Artificial Sequence
  Description of Artificial Sequence: Synthetic oligonucleotide
  Antisense strand to SEQ ID NO: 762642
aauccagacauuguguuag

SEQ ID NO: 762644 - RNA, 19 nt, Artificial Sequence
  Description of Artificial Sequence: Synthetic oligonucleotide
  Sense strand starting at position 328 of SEQ ID NO: 587046
acacaaugucuggauucuu

SEQ ID NO: 762645 - RNA, 19 nt, Artificial Sequence
  Description of Artificial Sequence: Synthetic oligonucleotide
  Antisense strand to SEQ ID NO: 762644
aagaauccagacauugugu

SEQ ID NO: 762646 - RNA, 19 nt, Artificial Sequence
  Description of Artificial Sequence: Synthetic oligonucleotide
  Sense strand starting at position 691 of SEQ ID NO: 587046
ggcauuauaguauguauuu

SEQ ID NO: 762647 - RNA, 19 nt, Artificial Sequence
  Description of Artificial Sequence: Synthetic oligonucleotide
  Antisense strand to SEQ ID NO: 762646
aaauacauacuauaaugcc

SEQ ID NO: 762648 - RNA, 19 nt, Artificial Sequence
  Description of Artificial Sequence: Synthetic oligonucleotide
  Sense strand starting at position 941 of SEQ ID NO: 587046
augagugucaagggaaacu

SEQ ID NO: 762649 - RNA, 19 nt, Artificial Sequence
  Description of Artificial Sequence: Synthetic oligonucleotide
  Antisense strand to SEQ ID NO: 762648
aguuucccuugacacucau

SEQ ID NO: 762650 - RNA, 19 nt, Artificial Sequence
  Description of Artificial Sequence: Synthetic oligonucleotide
  Sense strand starting at position 1264 of SEQ ID NO: 587046
agcagagguauacaguuua

SEQ ID NO: 762651 - RNA, 19 nt, Artificial Sequence
  Description of Artificial Sequence: Synthetic oligonucleotide
  Antisense strand to SEQ ID NO: 762650
uaaacuguauaccucugcu

SEQ ID NO: 762652 - RNA, 19 nt, Artificial Sequence
  Description of Artificial Sequence: Synthetic oligonucleotide
  Sense strand starting at position 1413 of SEQ ID NO: 587046
aauauaguggcagauuauc

SEQ ID NO: 762653 - RNA, 19 nt, Artificial Sequence
  Description of Artificial Sequence: Synthetic oligonucleotide
  Antisense strand to SEQ ID NO: 762652
gauaaucugccacuauauu

SEQ ID NO: 762654 - RNA, 19 nt, Artificial Sequence
  Description of Artificial Sequence: Synthetic oligonucleotide
  Sense strand starting at position 1418 of SEQ ID NO: 587046
aguggcagauuaucuggaa

SEQ ID NO: 762655 - RNA, 19 nt, Artificial Sequence
  Description of Artificial Sequence: Synthetic oligonucleotide
  Antisense strand to SEQ ID NO: 762654
uuccagauaaucugccacu

SEQ ID NO: 762656 - RNA, 19 nt, Artificial Sequence
  Description of Artificial Sequence: Synthetic oligonucleotide
  Sense strand starting at position 1419 of SEQ ID NO: 587046
guggcagauuaucuggaaa

SEQ ID NO: 762657 - RNA, 19 nt, Artificial Sequence
  Description of Artificial Sequence: Synthetic oligonucleotide
  Antisense strand to SEQ ID NO: 762656
uuuccagauaaucugccac

SEQ ID NO: 762658 - RNA, 19 nt, Artificial Sequence
  Description of Artificial Sequence: Synthetic oligonucleotide
  Sense strand starting at position 1581 of SEQ ID NO: 587046
ugcaacaauuaguuugaaa

SEQ ID NO: 762659 - RNA, 19 nt, Artificial Sequence
  Description of Artificial Sequence: Synthetic oligonucleotide
  Antisense strand to SEQ ID NO: 762658
uuucaaacuaauuguugca

SEQ ID NO: 762660 - RNA, 19 nt, Artificial Sequence
  Description of Artificial Sequence: Synthetic oligonucleotide
  Sense strand starting at position 1721 of SEQ ID NO: 587046
uugucaauacagcagaaua

SEQ ID NO: 762661 - RNA, 19 nt, Artificial Sequence
  Description of Artificial Sequence: Synthetic oligonucleotide
  Antisense strand to SEQ ID NO: 762660
uauucugcuguauugacaa

SEQ ID NO: 762662 - RNA, 19 nt, Artificial Sequence
  Description of Artificial Sequence: Synthetic oligonucleotide
  Sense strand starting at position 1967 of SEQ ID NO: 587046
ccaagagaacuguguggaa

SEQ ID NO: 762663 - RNA, 19 nt, Artificial Sequence
  Description of Artificial Sequence: Synthetic oligonucleotide
  Antisense strand to SEQ ID NO: 762662
uuccacacaguucucuugg

SEQ ID NO: 762664 - RNA, 19 nt, Artificial Sequence
  Description of Artificial Sequence: Synthetic oligonucleotide
  Sense strand starting at position 2028 of SEQ ID NO: 587046
agacuaaucuugucuagau

SEQ ID NO: 762665 - RNA, 19 nt, Artificial Sequence
  Description of Artificial Sequence: Synthetic oligonucleotide
  Antisense strand to SEQ ID NO: 762664
aucuagacaagauuagucu

SEQ ID NO: 762666 - RNA, 19 nt, Artificial Sequence
  Description of Artificial Sequence: Synthetic oligonucleotide
  Sense strand starting at position 2030 of SEQ ID NO: 587046
acuaaucuugucuagauug

SEQ ID NO: 762667 - RNA, 19 nt, Artificial Sequence
  Description of Artificial Sequence: Synthetic oligonucleotide
  Antisense strand to SEQ ID NO: 762666
caaucuagacaagauuagu

SEQ ID NO: 762668 - RNA, 19 nt, Artificial Sequence
  Description of Artificial Sequence: Synthetic oligonucleotide
  Sense strand starting at position 2040 of SEQ ID NO: 587046
ucuagauugugauugacaa

SEQ ID NO: 762669 - RNA, 19 nt, Artificial Sequence
  Description of Artificial Sequence: Synthetic oligonucleotide
  Antisense strand to SEQ ID NO: 762668
uugucaaucacaaucuaga

SEQ ID NO: 762670 - RNA, 19 nt, Artificial Sequence
  Description of Artificial Sequence: Synthetic oligonucleotide
  Sense strand starting at position 2236 of SEQ ID NO: 587046
agaaaugaguuacuaugca

SEQ ID NO: 762671 - RNA, 19 nt, Artificial Sequence
  Description of Artificial Sequence: Synthetic oligonucleotide
  Antisense strand to SEQ ID NO: 762670
ugcauaguaacucauuucu

SEQ ID NO: 762672 - RNA, 19 nt, Artificial Sequence
  Description of Artificial Sequence: Synthetic oligonucleotide
  Sense strand starting at position 2255 of SEQ ID NO: 587046
caaccacgucucugaaaga

SEQ ID NO: 762673 - RNA, 19 nt, Artificial Sequence
  Description of Artificial Sequence: Synthetic oligonucleotide
  Antisense strand to SEQ ID NO: 762672
ucuuucagagacgugguug

SEQ ID NO: 762674 - RNA, 19 nt, Artificial Sequence
  Description of Artificial Sequence: Synthetic oligonucleotide
  Sense strand starting at position 2287 of SEQ ID NO: 587046
aagaccaauggguguaaau

SEQ ID NO: 762675 - RNA, 19 nt, Artificial Sequence
  Description of Artificial Sequence: Synthetic oligonucleotide
  Antisense strand to SEQ ID NO: 762674
auuuacacccauuggucuu

SEQ ID NO: 762676 - RNA, 19 nt, Artificial Sequence
  Description of Artificial Sequence: Synthetic oligonucleotide
  Sense strand starting at position 2347 of SEQ ID NO: 587046
uggagugugccagaugaua

SEQ ID NO: 762677 - RNA, 19 nt, Artificial Sequence
  Description of Artificial Sequence: Synthetic oligonucleotide
  Antisense strand to SEQ ID NO: 762676
uaucaucuggcacacucca

SEQ ID NO: 762678 - RNA, 19 nt, Artificial Sequence
  Description of Artificial Sequence: Synthetic oligonucleotide
  Sense strand starting at position 2360 of SEQ ID NO: 587046
augauaagaucugucucag

SEQ ID NO: 762679 - RNA, 19 nt, Artificial Sequence
  Description of Artificial Sequence: Synthetic oligonucleotide
  Antisense strand to SEQ ID NO: 762678
cugagacagaucuuaucau

SEQ ID NO: 762680 - RNA, 19 nt, Artificial Sequence
  Description of Artificial Sequence: Synthetic oligonucleotide
  Sense strand starting at position 2528 of SEQ ID NO: 587046
gggcaaguuacugaacucu

SEQ ID NO: 762681 - RNA, 19 nt, Artificial Sequence
  Description of Artificial Sequence: Synthetic oligonucleotide
  Antisense strand to SEQ ID NO: 762680
agaguucaguaacuugccc

SEQ ID NO: 762682 - RNA, 19 nt, Artificial Sequence
  Description of Artificial Sequence: Synthetic oligonucleotide
  Sense strand starting at position 3030 of SEQ ID NO: 587046
ucauaagucagaggguaaa

SEQ ID NO: 762683 - RNA, 19 nt, Artificial Sequence
  Description of Artificial Sequence: Synthetic oligonucleotide
  Antisense strand to SEQ ID NO: 762682
uuuacccucugacuuauga

SEQ ID NO: 762684 - RNA, 19 nt, Artificial Sequence
  Description of Artificial Sequence: Synthetic oligonucleotide
  Sense strand starting at position 3056 of SEQ ID NO: 587046
agacauugauuugaggagu

SEQ ID NO: 762685 - RNA, 19 nt, Artificial Sequence
  Description of Artificial Sequence: Synthetic oligonucleotide
  Antisense strand to SEQ ID NO: 762684
acuccucaaaucaaugucu

SEQ ID NO: 762686 - RNA, 19 nt, Artificial Sequence
  Description of Artificial Sequence: Synthetic oligonucleotide
  Sense strand starting at position 3071 of SEQ ID NO: 587046
gagucauggaguuagggua

SEQ ID NO: 762687 - RNA, 19 nt, Artificial Sequence
  Description of Artificial Sequence: Synthetic oligonucleotide
  Antisense strand to SEQ ID NO: 762686
uacccuaacuccaugacuc

SEQ ID NO: 762688 - RNA, 19 nt, Artificial Sequence
  Description of Artificial Sequence: Synthetic oligonucleotide
  Sense strand starting at position 3079 of SEQ ID NO: 587046
gaguuaggguaauugugaa

SEQ ID NO: 762689 - RNA, 19 nt, Artificial Sequence
  Description of Artificial Sequence: Synthetic oligonucleotide
  Antisense strand to SEQ ID NO: 762688
uucacaauuacccuaacuc

SEQ ID NO: 762690 - RNA, 19 nt, Artificial Sequence
  Description of Artificial Sequence: Synthetic oligonucleotide
  Sense strand starting at position 3109 of SEQ ID NO: 587046
acaagcugacauugacuaa

SEQ ID NO: 762691 - RNA, 19 nt, Artificial Sequence
  Description of Artificial Sequence: Synthetic oligonucleotide
  Antisense strand to SEQ ID NO: 762690
uuagucaaugucagcuugu

SEQ ID NO: 762692 - RNA, 19 nt, Artificial Sequence
  Description of Artificial Sequence: Synthetic oligonucleotide
  Sense strand starting at position 3202 of SEQ ID NO: 587046
augguuguaagaugauaau

SEQ ID NO: 762693 - RNA, 19 nt, Artificial Sequence
  Description of Artificial Sequence: Synthetic oligonucleotide
  Antisense strand to SEQ ID NO: 762692
auuaucaucuuacaaccau

SEQ ID NO: 762694 - RNA, 19 nt, Artificial Sequence
  Description of Artificial Sequence: Synthetic oligonucleotide
  Sense strand starting at position 3291 of SEQ ID NO: 587046
auaauaaagugucuggauu

SEQ ID NO: 762695 - RNA, 19 nt, Artificial Sequence
  Description of Artificial Sequence: Synthetic oligonucleotide
  Antisense strand to SEQ ID NO: 762694
aauccagacacuuuauuau

SEQ ID NO: 762696 - RNA, 19 nt, Artificial Sequence
  Description of Artificial Sequence: Synthetic oligonucleotide
  Sense strand starting at position 3292 of SEQ ID NO: 587046
uaauaaagugucuggauua

SEQ ID NO: 762697 - RNA, 19 nt, Artificial Sequence
  Description of Artificial Sequence: Synthetic oligonucleotide
  Antisense strand to SEQ ID NO: 762696
uaauccagacacuuuauua

SEQ ID NO: 762698 - RNA, 19 nt, Artificial Sequence
  Description of Artificial Sequence: Synthetic oligonucleotide
  Sense strand starting at position 3302 of SEQ ID NO: 587046
ucuggauuauauuccgaau

SEQ ID NO: 762699 - RNA, 19 nt, Artificial Sequence
  Description of Artificial Sequence: Synthetic oligonucleotide
  Antisense strand to SEQ ID NO: 762698
auucggaauauaauccaga

SEQ ID NO: 762700 - RNA, 19 nt, Artificial Sequence
  Description of Artificial Sequence: Synthetic oligonucleotide
  Sense strand starting at position 3518 of SEQ ID NO: 587046
ucuggaaaucuuggaugua

SEQ ID NO: 762701 - RNA, 19 nt, Artificial Sequence
  Description of Artificial Sequence: Synthetic oligonucleotide
  Antisense strand to SEQ ID NO: 762700
uacauccaagauuuccaga

SEQ ID NO: 762702 - RNA, 19 nt, Artificial Sequence
  Description of Artificial Sequence: Synthetic oligonucleotide
  Sense strand starting at position 3663 of SEQ ID NO: 587046
ccaugcuauguuuaagaua

SEQ ID NO: 762703 - RNA, 19 nt, Artificial Sequence
  Description of Artificial Sequence: Synthetic oligonucleotide
  Antisense strand to SEQ ID NO: 762702
uaucuuaaacauagcaugg

SEQ ID NO: 762704 - RNA, 19 nt, Artificial Sequence
  Description of Artificial Sequence: Synthetic oligonucleotide
  Sense strand starting at position 3704 of SEQ ID NO: 587046
ucaaguaagcaguagaaua

SEQ ID NO: 762705 - RNA, 19 nt, Artificial Sequence
  Description of Artificial Sequence: Synthetic oligonucleotide
  Antisense strand to SEQ ID NO: 762704
uauucuacugcuuacuuga

SEQ ID NO: 762706 - RNA, 19 nt, Artificial Sequence
  Description of Artificial Sequence: Synthetic oligonucleotide
  Sense strand starting at position 3741 of SEQ ID NO: 587046
gggauugaucuaggcuaga

SEQ ID NO: 762707 - RNA, 19 nt, Artificial Sequence
  Description of Artificial Sequence: Synthetic oligonucleotide
  Antisense strand to SEQ ID NO: 762706
ucuagccuagaucaauccc

SEQ ID NO: 762708 - RNA, 19 nt, Artificial Sequence
  Description of Artificial Sequence: Synthetic oligonucleotide
  Sense strand starting at position 3746 of SEQ ID NO: 587046
ugaucuaggcuagagaugu

SEQ ID NO: 762709 - RNA, 19 nt, Artificial Sequence
  Description of Artificial Sequence: Synthetic oligonucleotide
  Antisense strand to SEQ ID NO: 762708
acaucucuagccuagauca

SEQ ID NO: 762710 - RNA, 19 nt, Artificial Sequence
  Description of Artificial Sequence: Synthetic oligonucleotide
  Sense strand starting at position 3756 of SEQ ID NO: 587046
uagagauguguugauguua

SEQ ID NO: 762711 - RNA, 19 nt, Artificial Sequence
  Description of Artificial Sequence: Synthetic oligonucleotide
  Antisense strand to SEQ ID NO: 762710
uaacaucaacacaucucua

SEQ ID NO: 762712 - RNA, 19 nt, Artificial Sequence
  Description of Artificial Sequence: Synthetic oligonucleotide
  Sense strand starting at position 3765 of SEQ ID NO: 587046
guugauguuaccuauagga

SEQ ID NO: 762713 - RNA, 19 nt, Artificial Sequence
  Description of Artificial Sequence: Synthetic oligonucleotide
  Antisense strand to SEQ ID NO: 762712
uccuauagguaacaucaac

SEQ ID NO: 762714 - RNA, 19 nt, Artificial Sequence
  Description of Artificial Sequence: Synthetic oligonucleotide
  Sense strand starting at position 3841 of SEQ ID NO: 587046
uuuagacaucugugagaag

SEQ ID NO: 762715 - RNA, 19 nt, Artificial Sequence
  Description of Artificial Sequence: Synthetic oligonucleotide
  Antisense strand to SEQ ID NO: 762714
cuucucacagaugucuaaa

SEQ ID NO: 762716 - RNA, 19 nt, Artificial Sequence
  Description of Artificial Sequence: Synthetic oligonucleotide
  Sense strand starting at position 3945 of SEQ ID NO: 587046
guuaaaugccacugaggag

SEQ ID NO: 762717 - RNA, 19 nt, Artificial Sequence
  Description of Artificial Sequence: Synthetic oligonucleotide
  Antisense strand to SEQ ID NO: 762716
cuccucaguggcauuuaac

SEQ ID NO: 762718 - RNA, 19 nt, Artificial Sequence
  Description of Artificial Sequence: Synthetic oligonucleotide
  Sense strand starting at position 83 of SEQ ID NO: 587047
cuggaaaccuguucucaau

SEQ ID NO: 762719 - RNA, 19 nt, Artificial Sequence
  Description of Artificial Sequence: Synthetic oligonucleotide
  Antisense strand to SEQ ID NO: 762718
auugagaacagguuuccag

SEQ ID NO: 762720 - RNA, 19 nt, Artificial Sequence
  Description of Artificial Sequence: Synthetic oligonucleotide
  Sense strand starting at position 247 of SEQ ID NO: 587047
guaauagaacaauguuagu

SEQ ID NO: 762721 - RNA, 19 nt, Artificial Sequence
  Description of Artificial Sequence: Synthetic oligonucleotide
  Antisense strand to SEQ ID NO: 762720
acuaacauuguucuauuac

SEQ ID NO: 762722 - RNA, 19 nt, Artificial Sequence
  Description of Artificial Sequence: Synthetic oligonucleotide
  Sense strand starting at position 580 of SEQ ID NO: 587047
ggccuuaaccgauauaauu

SEQ ID NO: 762723 - RNA, 19 nt, Artificial Sequence
  Description of Artificial Sequence: Synthetic oligonucleotide
  Antisense strand to SEQ ID NO: 762722
aauuauaucgguuaaggcc

SEQ ID NO: 762724 - RNA, 19 nt, Artificial Sequence
  Description of Artificial Sequence: Synthetic oligonucleotide
  Sense strand starting at position 663 of SEQ ID NO: 587047
ccaacacauguuuggguau

SEQ ID NO: 762725 - RNA, 19 nt, Artificial Sequence
  Description of Artificial Sequence: Synthetic oligonucleotide
  Antisense strand to SEQ ID NO: 762724
auacccaaacauguguugg

SEQ ID NO: 762726 - RNA, 19 nt, Artificial Sequence
  Description of Artificial Sequence: Synthetic oligonucleotide
  Sense strand starting at position 697 of SEQ ID NO: 587047
guuauauaaugagcuaagu

SEQ ID NO: 762727 - RNA, 19 nt, Artificial Sequence
  Description of Artificial Sequence: Synthetic oligonucleotide
  Antisense strand to SEQ ID NO: 762726
acuuagcucauuauauaac

SEQ ID NO: 762728 - RNA, 19 nt, Artificial Sequence
  Description of Artificial Sequence: Synthetic oligonucleotide
  Sense strand starting at position 926 of SEQ ID NO: 587047
acugaauuaugaucaaugu

SEQ ID NO: 762729 - RNA, 19 nt, Artificial Sequence
  Description of Artificial Sequence: Synthetic oligonucleotide
  Antisense strand to SEQ ID NO: 762728
acauugaucauaauucagu

SEQ ID NO: 762730 - RNA, 19 nt, Artificial Sequence
  Description of Artificial Sequence: Synthetic oligonucleotide
  Sense strand starting at position 935 of SEQ ID NO: 587047
ugaucaaugucaguuggga

SEQ ID NO: 762731 - RNA, 19 nt, Artificial Sequence
  Description of Artificial Sequence: Synthetic oligonucleotide
  Antisense strand to SEQ ID NO: 762730
ucccaacugacauugauca

SEQ ID NO: 762732 - RNA, 19 nt, Artificial Sequence
  Description of Artificial Sequence: Synthetic oligonucleotide
  Sense strand starting at position 937 of SEQ ID NO: 587047
aucaaugucaguugggaga

SEQ ID NO: 762733 - RNA, 19 nt, Artificial Sequence
  Description of Artificial Sequence: Synthetic oligonucleotide
  Antisense strand to SEQ ID NO: 762732
ucucccaacugacauugau

SEQ ID NO: 762734 - RNA, 19 nt, Artificial Sequence
  Description of Artificial Sequence: Synthetic oligonucleotide
  Sense strand starting at position 951 of SEQ ID NO: 587047
ggagacaggaaauguguua

SEQ ID NO: 762735 - RNA, 19 nt, Artificial Sequence
  Description of Artificial Sequence: Synthetic oligonucleotide
  Antisense strand to SEQ ID NO: 762734
uaacacauuuccugucucc

SEQ ID NO: 762736 - RNA, 19 nt, Artificial Sequence
  Description of Artificial Sequence: Synthetic oligonucleotide
  Sense strand starting at position 1007 of SEQ ID NO: 587047
aaccaugagguuugcuuaa

SEQ ID NO: 762737 - RNA, 19 nt, Artificial Sequence
  Description of Artificial Sequence: Synthetic oligonucleotide
  Antisense strand to SEQ ID NO: 762736
uuaagcaaaccucaugguu

SEQ ID NO: 762738 - RNA, 19 nt, Artificial Sequence
  Description of Artificial Sequence: Synthetic oligonucleotide
  Sense strand starting at position 1009 of SEQ ID NO: 587047
ccaugagguuugcuuaaca

SEQ ID NO: 762739 - RNA, 19 nt, Artificial Sequence
  Description of Artificial Sequence: Synthetic oligonucleotide
  Antisense strand to SEQ ID NO: 762738
uguuaagcaaaccucaugg

SEQ ID NO: 762740 - RNA, 19 nt, Artificial Sequence
  Description of Artificial Sequence: Synthetic oligonucleotide
  Sense strand starting at position 1175 of SEQ ID NO: 587047
gccucccagguguagaaau

SEQ ID NO: 762741 - RNA, 19 nt, Artificial Sequence
  Description of Artificial Sequence: Synthetic oligonucleotide
  Antisense strand to SEQ ID NO: 762740
auuucuacaccugggaggc

SEQ ID NO: 762742 - RNA, 19 nt, Artificial Sequence
  Description of Artificial Sequence: Synthetic oligonucleotide
  Sense strand starting at position 1255 of SEQ ID NO: 587047
guaguaguaacggagaagu

SEQ ID NO: 762743 - RNA, 19 nt, Artificial Sequence
  Description of Artificial Sequence: Synthetic oligonucleotide
  Antisense strand to SEQ ID NO: 762742
acuucuccguuacuacuac

SEQ ID NO: 762744 - RNA, 19 nt, Artificial Sequence
  Description of Artificial Sequence: Synthetic oligonucleotide
  Sense strand starting at position 1317 of SEQ ID NO: 587047
ccgcguuauuuccugaaga

SEQ ID NO: 762745 - RNA, 19 nt, Artificial Sequence
  Description of Artificial Sequence: Synthetic oligonucleotide
  Antisense strand to SEQ ID NO: 762744
ucuucaggaaauaacgcgg

SEQ ID NO: 762746 - RNA, 19 nt, Artificial Sequence
  Description of Artificial Sequence: Synthetic oligonucleotide
  Sense strand starting at position 1983 of SEQ ID NO: 587047
agcguuugugucaguaaug

SEQ ID NO: 762747 - RNA, 19 nt, Artificial Sequence
  Description of Artificial Sequence: Synthetic oligonucleotide
  Antisense strand to SEQ ID NO: 762746
cauuacugacacaaacgcu

SEQ ID NO: 762748 - RNA, 19 nt, Artificial Sequence
  Description of Artificial Sequence: Synthetic oligonucleotide
  Sense strand starting at position 1990 of SEQ ID NO: 587047
gugucaguaaugggaaauc

SEQ ID NO: 762749 - RNA, 19 nt, Artificial Sequence
  Description of Artificial Sequence: Synthetic oligonucleotide
  Antisense strand to SEQ ID NO: 762748
gauuucccauuacugacac

SEQ ID NO: 762750 - RNA, 19 nt, Artificial Sequence
  Description of Artificial Sequence: Synthetic oligonucleotide
  Sense strand starting at position 1999 of SEQ ID NO: 587047
augggaaaucugcaagcua

SEQ ID NO: 762751 - RNA, 19 nt, Artificial Sequence
  Description of Artificial Sequence: Synthetic oligonucleotide
  Antisense strand to SEQ ID NO: 762750
uagcuugcagauuucccau

SEQ ID NO: 762752 - RNA, 19 nt, Artificial Sequence
  Description of Artificial Sequence: Synthetic oligonucleotide
  Sense strand starting at position 2256 of SEQ ID NO: 587047
aauauaucguagguggaca

SEQ ID NO: 762753 - RNA, 19 nt, Artificial Sequence
  Description of Artificial Sequence: Synthetic oligonucleotide
  Antisense strand to SEQ ID NO: 762752
uguccaccuacgauauauu

SEQ ID NO: 762754 - RNA, 19 nt, Artificial Sequence
  Description of Artificial Sequence: Synthetic oligonucleotide
  Sense strand starting at position 2269 of SEQ ID NO: 587047
uggacaguuugauaaauuu

SEQ ID NO: 762755 - RNA, 19 nt, Artificial Sequence
  Description of Artificial Sequence: Synthetic oligonucleotide
  Antisense strand to SEQ ID NO: 762754
aaauuuaucaaacugucca

SEQ ID NO: 762756 - RNA, 19 nt, Artificial Sequence
  Description of Artificial Sequence: Synthetic oligonucleotide
  Sense strand starting at position 2294 of SEQ ID NO: 587047
cuguguagccaccaauaaa

SEQ ID NO: 762757 - RNA, 19 nt, Artificial Sequence
  Description of Artificial Sequence: Synthetic oligonucleotide
  Antisense strand to SEQ ID NO: 762756
uuuauugguggcuacacag

SEQ ID NO: 762758 - RNA, 19 nt, Artificial Sequence
  Description of Artificial Sequence: Synthetic oligonucleotide
  Sense strand starting at position 2855 of SEQ ID NO: 587047
aggucacugcaucaauagu

SEQ ID NO: 762759 - RNA, 19 nt, Artificial Sequence
  Description of Artificial Sequence: Synthetic oligonucleotide
  Antisense strand to SEQ ID NO: 762758
acuauugaugcagugaccu

SEQ ID NO: 762760 - RNA, 19 nt, Artificial Sequence
  Description of Artificial Sequence: Synthetic oligonucleotide
  Sense strand starting at position 2893 of SEQ ID NO: 587047
cguaguccaagguaugaau

SEQ ID NO: 762761 - RNA, 19 nt, Artificial Sequence
  Description of Artificial Sequence: Synthetic oligonucleotide
  Antisense strand to SEQ ID NO: 762760
auucauaccuuggacuacg

SEQ ID NO: 762762 - RNA, 19 nt, Artificial Sequence
  Description of Artificial Sequence: Synthetic oligonucleotide
  Sense strand starting at position 2896 of SEQ ID NO: 587047
aguccaagguaugaauuua

SEQ ID NO: 762763 - RNA, 19 nt, Artificial Sequence
  Description of Artificial Sequence: Synthetic oligonucleotide
  Antisense strand to SEQ ID NO: 762762
uaaauucauaccuuggacu

SEQ ID NO: 762764 - RNA, 19 nt, Artificial Sequence
  Description of Artificial Sequence: Synthetic oligonucleotide
  Sense strand starting at position 2920 of SEQ ID NO: 587047
acguaugaauaucccacaa

SEQ ID NO: 762765 - RNA, 19 nt, Artificial Sequence
  Description of Artificial Sequence: Synthetic oligonucleotide
  Antisense strand to SEQ ID NO: 762764
uugugggauauucauacgu

SEQ ID NO: 762766 - RNA, 19 nt, Artificial Sequence
  Description of Artificial Sequence: Synthetic oligonucleotide
  Sense strand starting at position 3023 of SEQ ID NO: 587047
acuggaauuuguguuguuu

SEQ ID NO: 762767 - RNA, 19 nt, Artificial Sequence
  Description of Artificial Sequence: Synthetic oligonucleotide
  Antisense strand to SEQ ID NO: 762766
aaacaacacaaauuccagu

SEQ ID NO: 762768 - RNA, 19 nt, Artificial Sequence
  Description of Artificial Sequence: Synthetic oligonucleotide
  Sense strand starting at position 3027 of SEQ ID NO: 587047
gaauuuguguuguuucuag

SEQ ID NO: 762769 - RNA, 19 nt, Artificial Sequence
  Description of Artificial Sequence: Synthetic oligonucleotide
  Antisense strand to SEQ ID NO: 762768
cuagaaacaacacaaauuc

SEQ ID NO: 762770 - RNA, 19 nt, Artificial Sequence
  Description of Artificial Sequence: Synthetic oligonucleotide
  Sense strand starting at position 3266 of SEQ ID NO: 587047
uucugaagauuugaccaga

SEQ ID NO: 762771 - RNA, 19 nt, Artificial Sequence
  Description of Artificial Sequence: Synthetic oligonucleotide
  Antisense strand to SEQ ID NO: 762770
ucuggucaaaucuucagaa

SEQ ID NO: 762772 - RNA, 19 nt, Artificial Sequence
  Description of Artificial Sequence: Synthetic oligonucleotide
  Sense strand starting at position 3276 of SEQ ID NO: 587047
uugaccagaucaguguauu

SEQ ID NO: 762773 - RNA, 19 nt, Artificial Sequence
  Description of Artificial Sequence: Synthetic oligonucleotide
  Antisense strand to SEQ ID NO: 762772
aauacacugaucuggucaa

SEQ ID NO: 762774 - RNA, 19 nt, Artificial Sequence
  Description of Artificial Sequence: Synthetic oligonucleotide
  Sense strand starting at position 3277 of SEQ ID NO: 587047
ugaccagaucaguguauuc

SEQ ID NO: 762775 - RNA, 19 nt, Artificial Sequence
  Description of Artificial Sequence: Synthetic oligonucleotide
  Antisense strand to SEQ ID NO: 762774
gaauacacugaucugguca

SEQ ID NO: 762776 - RNA, 19 nt, Artificial Sequence
  Description of Artificial Sequence: Synthetic oligonucleotide
  Sense strand starting at position 3282 of SEQ ID NO: 587047
agaucaguguauucccaca

SEQ ID NO: 762777 - RNA, 19 nt, Artificial Sequence
  Description of Artificial Sequence: Synthetic oligonucleotide
  Antisense strand to SEQ ID NO: 762776
ugugggaauacacugaucu

SEQ ID NO: 762778 - RNA, 19 nt, Artificial Sequence
  Description of Artificial Sequence: Synthetic oligonucleotide
  Sense strand starting at position 3284 of SEQ ID NO: 587047
aucaguguauucccacaca

SEQ ID NO: 762779 - RNA, 19 nt, Artificial Sequence
  Description of Artificial Sequence: Synthetic oligonucleotide
  Antisense strand to SEQ ID NO: 762778
ugugugggaauacacugau

SEQ ID NO: 762780 - RNA, 19 nt, Artificial Sequence
  Description of Artificial Sequence: Synthetic oligonucleotide
  Sense strand starting at position 3343 of SEQ ID NO: 587047
uugacauauuagcuuguga

SEQ ID NO: 762781 - RNA, 19 nt, Artificial Sequence
  Description of Artificial Sequence: Synthetic oligonucleotide
  Antisense strand to SEQ ID NO: 762780
ucacaagcuaauaugucaa

SEQ ID NO: 762782 - RNA, 19 nt, Artificial Sequence
  Description of Artificial Sequence: Synthetic oligonucleotide
  Sense strand starting at position 3581 of SEQ ID NO: 587047
ggacacacuugcucaaagu

SEQ ID NO: 762783 - RNA, 19 nt, Artificial Sequence
  Description of Artificial Sequence: Synthetic oligonucleotide
  Antisense strand to SEQ ID NO: 762782
acuuugagcaagugugucc

SEQ ID NO: 762784 - RNA, 19 nt, Artificial Sequence
  Description of Artificial Sequence: Synthetic oligonucleotide
  Sense strand starting at position 3600 of SEQ ID NO: 587047
ggguuaauaaucugaggua

SEQ ID NO: 762785 - RNA, 19 nt, Artificial Sequence
  Description of Artificial Sequence: Synthetic oligonucleotide
  Antisense strand to SEQ ID NO: 762784
uaccucagauuauuaaccc

SEQ ID NO: 762786 - RNA, 19 nt, Artificial Sequence
  Description of Artificial Sequence: Synthetic oligonucleotide
  Sense strand starting at position 3714 of SEQ ID NO: 587047
gucagcuuugauuagcaga

SEQ ID NO: 762787 - RNA, 19 nt, Artificial Sequence
  Description of Artificial Sequence: Synthetic oligonucleotide
  Antisense strand to SEQ ID NO: 762786
ucugcuaaucaaagcugac

SEQ ID NO: 762788 - RNA, 19 nt, Artificial Sequence
  Description of Artificial Sequence: Synthetic oligonucleotide
  Sense strand starting at position 3719 of SEQ ID NO: 587047
cuuugauuagcagaugucu

SEQ ID NO: 762789 - RNA, 19 nt, Artificial Sequence
  Description of Artificial Sequence: Synthetic oligonucleotide
  Antisense strand to SEQ ID NO: 762788
agacaucugcuaaucaaag

SEQ ID NO: 762790 - RNA, 19 nt, Artificial Sequence
  Description of Artificial Sequence: Synthetic oligonucleotide
  Sense strand starting at position 3724 of SEQ ID NO: 587047
auuagcagaugucuaugau

SEQ ID NO: 762791 - RNA, 19 nt, Artificial Sequence
  Description of Artificial Sequence: Synthetic oligonucleotide
  Antisense strand to SEQ ID NO: 762790
aucauagacaucugcuaau

SEQ ID NO: 762792 - RNA, 19 nt, Artificial Sequence
  Description of Artificial Sequence: Synthetic oligonucleotide
  Sense strand starting at position 3725 of SEQ ID NO: 587047
uuagcagaugucuaugauu

SEQ ID NO: 762793 - RNA, 19 nt, Artificial Sequence
  Description of Artificial Sequence: Synthetic oligonucleotide
  Antisense strand to SEQ ID NO: 762792
aaucauagacaucugcuaa

SEQ ID NO: 762794 - RNA, 19 nt, Artificial Sequence
  Description of Artificial Sequence: Synthetic oligonucleotide
  Sense strand starting at position 3727 of SEQ ID NO: 587047
agcagaugucuaugauuaa

SEQ ID NO: 762795 - RNA, 19 nt, Artificial Sequence
  Description of Artificial Sequence: Synthetic oligonucleotide
  Antisense strand to SEQ ID NO: 762794
uuaaucauagacaucugcu

SEQ ID NO: 762796 - RNA, 19 nt, Artificial Sequence
  Description of Artificial Sequence: Synthetic oligonucleotide
  Sense strand starting at position 3818 of SEQ ID NO: 587047
ggaugcuuuguauaguuaa

SEQ ID NO: 762797 - RNA, 19 nt, Artificial Sequence
  Description of Artificial Sequence: Synthetic oligonucleotide
  Antisense strand to SEQ ID NO: 762796
uuaacuauacaaagcaucc

SEQ ID NO: 762798 - RNA, 19 nt, Artificial Sequence
  Description of Artificial Sequence: Synthetic oligonucleotide
  Sense strand starting at position 168 of SEQ ID NO: 587048
gaggcaaugucugcacuga

SEQ ID NO: 762799 - RNA, 19 nt, Artificial Sequence
  Description of Artificial Sequence: Synthetic oligonucleotide
  Antisense strand to SEQ ID NO: 762798
ucagugcagacauugccuc

SEQ ID NO: 762800 - RNA, 19 nt, Artificial Sequence
  Description of Artificial Sequence: Synthetic oligonucleotide
  Sense strand starting at position 169 of SEQ ID NO: 587048
aggcaaugucugcacugau

SEQ ID NO: 762801 - RNA, 19 nt, Artificial Sequence
  Description of Artificial Sequence: Synthetic oligonucleotide
  Antisense strand to SEQ ID NO: 762800
aucagugcagacauugccu

SEQ ID NO: 762802 - RNA, 19 nt, Artificial Sequence
  Description of Artificial Sequence: Synthetic oligonucleotide
  Sense strand starting at position 231 of SEQ ID NO: 587048
gggaacuggguuugauuga

SEQ ID NO: 762803 - RNA, 19 nt, Artificial Sequence
  Description of Artificial Sequence: Synthetic oligonucleotide
  Antisense strand to SEQ ID NO: 762802
ucaaucaaacccaguuccc

SEQ ID NO: 762804 - RNA, 19 nt, Artificial Sequence
  Description of Artificial Sequence: Synthetic oligonucleotide
  Sense strand starting at position 232 of SEQ ID NO: 587048
ggaacuggguuugauugaa

SEQ ID NO: 762805 - RNA, 19 nt, Artificial Sequence
  Description of Artificial Sequence: Synthetic oligonucleotide
  Antisense strand to SEQ ID NO: 762804
uucaaucaaacccaguucc

SEQ ID NO: 762806 - RNA, 19 nt, Artificial Sequence
  Description of Artificial Sequence: Synthetic oligonucleotide
  Sense strand starting at position 363 of SEQ ID NO: 587048
gcccuauucugagcaagaa

SEQ ID NO: 762807 - RNA, 19 nt, Artificial Sequence
  Description of Artificial Sequence: Synthetic oligonucleotide
  Antisense strand to SEQ ID NO: 762806
uucuugcucagaauagggc

SEQ ID NO: 762808 - RNA, 19 nt, Artificial Sequence
  Description of Artificial Sequence: Synthetic oligonucleotide
  Sense strand starting at position 472 of SEQ ID NO: 587048
gguggguccugggagaagu

SEQ ID NO: 762809 - RNA, 19 nt, Artificial Sequence
  Description of Artificial Sequence: Synthetic oligonucleotide
  Antisense strand to SEQ ID NO: 762808
acuucucccaggacccacc

SEQ ID NO: 762810 - RNA, 19 nt, Artificial Sequence
  Description of Artificial Sequence: Synthetic oligonucleotide
  Sense strand starting at position 493 of SEQ ID NO: 587048
gcuggcucuggguauauga

SEQ ID NO: 762811 - RNA, 19 nt, Artificial Sequence
  Description of Artificial Sequence: Synthetic oligonucleotide
  Antisense strand to SEQ ID NO: 762810
ucauauacccagagccagc

SEQ ID NO: 762812 - RNA, 19 nt, Artificial Sequence
  Description of Artificial Sequence: Synthetic oligonucleotide
  Sense strand starting at position 1279 of SEQ ID NO: 587048
gaacgauucucacuggcag

SEQ ID NO: 762813 - RNA, 19 nt, Artificial Sequence
  Description of Artificial Sequence: Synthetic oligonucleotide
  Antisense strand to SEQ ID NO: 762812
cugccagugagaaucguuc

SEQ ID NO: 762814 - RNA, 19 nt, Artificial Sequence
  Description of Artificial Sequence: Synthetic oligonucleotide
  Sense strand starting at position 1280 of SEQ ID NO: 587048
aacgauucucacuggcagu

SEQ ID NO: 762815 - RNA, 19 nt, Artificial Sequence
  Description of Artificial Sequence: Synthetic oligonucleotide
  Antisense strand to SEQ ID NO: 762814
acugccagugagaaucguu

SEQ ID NO: 762816 - RNA, 19 nt, Artificial Sequence
  Description of Artificial Sequence: Synthetic oligonucleotide
  Sense strand starting at position 1569 of SEQ ID NO: 587048
gggugcucaccgugacguu

SEQ ID NO: 762817 - RNA, 19 nt, Artificial Sequence
  Description of Artificial Sequence: Synthetic oligonucleotide
  Antisense strand to SEQ ID NO: 762816
aacgucacggugagcaccc

SEQ ID NO: 762818 - RNA, 19 nt, Artificial Sequence
  Description of Artificial Sequence: Synthetic oligonucleotide
  Sense strand starting at position 1838 of SEQ ID NO: 587048
gcgcgaauguccugaguca

SEQ ID NO: 762819 - RNA, 19 nt, Artificial Sequence
  Description of Artificial Sequence: Synthetic oligonucleotide
  Antisense strand to SEQ ID NO: 762818
ugacucaggacauucgcgc

SEQ ID NO: 762820 - RNA, 19 nt, Artificial Sequence
  Description of Artificial Sequence: Synthetic oligonucleotide
  Sense strand starting at position 1839 of SEQ ID NO: 587048
cgcgaauguccugagucag

SEQ ID NO: 762821 - RNA, 19 nt, Artificial Sequence
  Description of Artificial Sequence: Synthetic oligonucleotide
  Antisense strand to SEQ ID NO: 762820
cugacucaggacauucgcg

SEQ ID NO: 762822 - RNA, 19 nt, Artificial Sequence
  Description of Artificial Sequence: Synthetic oligonucleotide
  Sense strand starting at position 2010 of SEQ ID NO: 587048
gguuccugaguuuaggaaa

SEQ ID NO: 762823 - RNA, 19 nt, Artificial Sequence
  Description of Artificial Sequence: Synthetic oligonucleotide
  Antisense strand to SEQ ID NO: 762822
uuuccuaaacucaggaacc

SEQ ID NO: 762824 - RNA, 19 nt, Artificial Sequence
  Description of Artificial Sequence: Synthetic oligonucleotide
  Sense strand starting at position 2180 of SEQ ID NO: 587048
ucccucguaucagggauua

SEQ ID NO: 762825 - RNA, 19 nt, Artificial Sequence
  Description of Artificial Sequence: Synthetic oligonucleotide
  Antisense strand to SEQ ID NO: 762824
uaaucccugauacgaggga

SEQ ID NO: 762826 - RNA, 19 nt, Artificial Sequence
  Description of Artificial Sequence: Synthetic oligonucleotide
  Sense strand starting at position 2182 of SEQ ID NO: 587048
ccucguaucagggauuaca

SEQ ID NO: 762827 - RNA, 19 nt, Artificial Sequence
  Description of Artificial Sequence: Synthetic oligonucleotide
  Antisense strand to SEQ ID NO: 762826
uguaaucccugauacgagg

SEQ ID NO: 762828 - RNA, 19 nt, Artificial Sequence
  Description of Artificial Sequence: Synthetic oligonucleotide
  Sense strand starting at position 2411 of SEQ ID NO: 587048
ggaccucacucugcuuaaa

SEQ ID NO: 762829 - RNA, 19 nt, Artificial Sequence
  Description of Artificial Sequence: Synthetic oligonucleotide
  Antisense strand to SEQ ID NO: 762828
uuuaagcagagugaggucc

SEQ ID NO: 762830 - RNA, 19 nt, Artificial Sequence
  Description of Artificial Sequence: Synthetic oligonucleotide
  Sense strand starting at position 2579 of SEQ ID NO: 587048
acacuuuccuucgaaagag

SEQ ID NO: 762831 - RNA, 19 nt, Artificial Sequence
  Description of Artificial Sequence: Synthetic oligonucleotide
  Antisense strand to SEQ ID NO: 762830
cucuuucgaaggaaagugu

SEQ ID NO: 762832 - RNA, 19 nt, Artificial Sequence
  Description of Artificial Sequence: Synthetic oligonucleotide
  Sense strand starting at position 2958 of SEQ ID NO: 587048
gaggaucacucagggauga

SEQ ID NO: 762833 - RNA, 19 nt, Artificial Sequence
  Description of Artificial Sequence: Synthetic oligonucleotide
  Antisense strand to SEQ ID NO: 762832
ucaucccugagugauccuc

SEQ ID NO: 762834 - RNA, 19 nt, Artificial Sequence
  Description of Artificial Sequence: Synthetic oligonucleotide
  Sense strand starting at position 2999 of SEQ ID NO: 587048
caguuaaaguagccaguaa

SEQ ID NO: 762835 - RNA, 19 nt, Artificial Sequence
  Description of Artificial Sequence: Synthetic oligonucleotide
  Antisense strand to SEQ ID NO: 762834
uuacuggcuacuuuaacug

SEQ ID NO: 762836 - RNA, 19 nt, Artificial Sequence
  Description of Artificial Sequence: Synthetic oligonucleotide
  Sense strand starting at position 3119 of SEQ ID NO: 587048
uggugaaucucagccugaa

SEQ ID NO: 762837 - RNA, 19 nt, Artificial Sequence
  Description of Artificial Sequence: Synthetic oligonucleotide
  Antisense strand to SEQ ID NO: 762836
uucaggcugagauucacca

SEQ ID NO: 762838 - RNA, 19 nt, Artificial Sequence
  Description of Artificial Sequence: Synthetic oligonucleotide
  Sense strand starting at position 3122 of SEQ ID NO: 587048
ugaaucucagccugaaugu

SEQ ID NO: 762839 - RNA, 19 nt, Artificial Sequence
  Description of Artificial Sequence: Synthetic oligonucleotide
  Antisense strand to SEQ ID NO: 762838
acauucaggcugagauuca

SEQ ID NO: 762840 - RNA, 19 nt, Artificial Sequence
  Description of Artificial Sequence: Synthetic oligonucleotide
  Sense strand starting at position 3123 of SEQ ID NO: 587048
gaaucucagccugaauguu

SEQ ID NO: 762841 - RNA, 19 nt, Artificial Sequence
  Description of Artificial Sequence: Synthetic oligonucleotide
  Antisense strand to SEQ ID NO: 762840
aacauucaggcugagauuc

SEQ ID NO: 762842 - RNA, 19 nt, Artificial Sequence
  Description of Artificial Sequence: Synthetic oligonucleotide
  Sense strand starting at position 3149 of SEQ ID NO: 587048
agucucuuugccuggcaaa

SEQ ID NO: 762843 - RNA, 19 nt, Artificial Sequence
  Description of Artificial Sequence: Synthetic oligonucleotide
  Antisense strand to SEQ ID NO: 762842
uuugccaggcaaagagacu

SEQ ID NO: 762844 - RNA, 19 nt, Artificial Sequence
  Description of Artificial Sequence: Synthetic oligonucleotide
  Sense strand starting at position 3150 of SEQ ID NO: 587048
gucucuuugccuggcaaau

SEQ ID NO: 762845 - RNA, 19 nt, Artificial Sequence
  Description of Artificial Sequence: Synthetic oligonucleotide
  Antisense strand to SEQ ID NO: 762844
auuugccaggcaaagagac

SEQ ID NO: 762846 - RNA, 19 nt, Artificial Sequence
  Description of Artificial Sequence: Synthetic oligonucleotide
  Sense strand starting at position 3152 of SEQ ID NO: 587048
cucuuugccuggcaaauua

SEQ ID NO: 762847 - RNA, 19 nt, Artificial Sequence
  Description of Artificial Sequence: Synthetic oligonucleotide
  Antisense strand to SEQ ID NO: 762846
uaauuugccaggcaaagag

SEQ ID NO: 762848 - RNA, 19 nt, Artificial Sequence
  Description of Artificial Sequence: Synthetic oligonucleotide
  Sense strand starting at position 3168 of SEQ ID NO: 587048
uuacucaucuuggcaguuu

SEQ ID NO: 762849 - RNA, 19 nt, Artificial Sequence
  Description of Artificial Sequence: Synthetic oligonucleotide
  Antisense strand to SEQ ID NO: 762848
aaacugccaagaugaguaa

SEQ ID NO: 762850 - RNA, 19 nt, Artificial Sequence
  Description of Artificial Sequence: Synthetic oligonucleotide
  Sense strand starting at position 3180 of SEQ ID NO: 587048
gcaguuuagacucgucagu

SEQ ID NO: 762851 - RNA, 19 nt, Artificial Sequence
  Description of Artificial Sequence: Synthetic oligonucleotide
  Antisense strand to SEQ ID NO: 762850
acugacgagucuaaacugc

SEQ ID NO: 762852 - RNA, 19 nt, Artificial Sequence
  Description of Artificial Sequence: Synthetic oligonucleotide
  Sense strand starting at position 3182 of SEQ ID NO: 587048
aguuuagacucgucaguuc

SEQ ID NO: 762853 - RNA, 19 nt, Artificial Sequence
  Description of Artificial Sequence: Synthetic oligonucleotide
  Antisense strand to SEQ ID NO: 762852
gaacugacgagucuaaacu

SEQ ID NO: 762854 - RNA, 19 nt, Artificial Sequence
  Description of Artificial Sequence: Synthetic oligonucleotide
  Sense strand starting at position 3190 of SEQ ID NO: 587048
cucgucaguuccucaacga

SEQ ID NO: 762855 - RNA, 19 nt, Artificial Sequence
  Description of Artificial Sequence: Synthetic oligonucleotide
  Antisense strand to SEQ ID NO: 762854
ucguugaggaacugacgag

SEQ ID NO: 762856 - RNA, 19 nt, Artificial Sequence
  Description of Artificial Sequence: Synthetic oligonucleotide
  Sense strand starting at position 3191 of SEQ ID NO: 587048
ucgucaguuccucaacgaa

SEQ ID NO: 762857 - RNA, 19 nt, Artificial Sequence
  Description of Artificial Sequence: Synthetic oligonucleotide
  Antisense strand to SEQ ID NO: 762856
uucguugaggaacugacga

SEQ ID NO: 762858 - RNA, 19 nt, Artificial Sequence
  Description of Artificial Sequence: Synthetic oligonucleotide
  Sense strand starting at position 3231 of SEQ ID NO: 587048
aaaucaggauccugguuau

SEQ ID NO: 762859 - RNA, 19 nt, Artificial Sequence
  Description of Artificial Sequence: Synthetic oligonucleotide
  Antisense strand to SEQ ID NO: 762858
auaaccaggauccugauuu

SEQ ID NO: 762860 - RNA, 19 nt, Artificial Sequence
  Description of Artificial Sequence: Synthetic oligonucleotide
  Sense strand starting at position 3234 of SEQ ID NO: 587048
ucaggauccugguuauagu

SEQ ID NO: 762861 - RNA, 19 nt, Artificial Sequence
  Description of Artificial Sequence: Synthetic oligonucleotide
  Antisense strand to SEQ ID NO: 762860
acuauaaccaggauccuga

SEQ ID NO: 762862 - RNA, 19 nt, Artificial Sequence
  Description of Artificial Sequence: Synthetic oligonucleotide
  Sense strand starting at position 3243 of SEQ ID NO: 587048
ugguuauagucuuucuuua

SEQ ID NO: 762863 - RNA, 19 nt, Artificial Sequence
  Description of Artificial Sequence: Synthetic oligonucleotide
  Antisense strand to SEQ ID NO: 762862
uaaagaaagacuauaacca

SEQ ID NO: 762864 - RNA, 19 nt, Artificial Sequence
  Description of Artificial Sequence: Synthetic oligonucleotide
  Sense strand starting at position 3336 of SEQ ID NO: 587048
ugguguguagucgugcaau

SEQ ID NO: 762865 - RNA, 19 nt, Artificial Sequence
  Description of Artificial Sequence: Synthetic oligonucleotide
  Antisense strand to SEQ ID NO: 762864
auugcacgacuacacacca

SEQ ID NO: 762866 - RNA, 19 nt, Artificial Sequence
  Description of Artificial Sequence: Synthetic oligonucleotide
  Sense strand starting at position 3337 of SEQ ID NO: 587048
gguguguagucgugcaauc

SEQ ID NO: 762867 - RNA, 19 nt, Artificial Sequence
  Description of Artificial Sequence: Synthetic oligonucleotide
  Antisense strand to SEQ ID NO: 762866
gauugcacgacuacacacc

SEQ ID NO: 762868 - RNA, 19 nt, Artificial Sequence
  Description of Artificial Sequence: Synthetic oligonucleotide
  Sense strand starting at position 3338 of SEQ ID NO: 587048
guguguagucgugcaaucu

SEQ ID NO: 762869 - RNA, 19 nt, Artificial Sequence
  Description of Artificial Sequence: Synthetic oligonucleotide
  Antisense strand to SEQ ID NO: 762868
agauugcacgacuacacac

SEQ ID NO: 762870 - RNA, 19 nt, Artificial Sequence
  Description of Artificial Sequence: Synthetic oligonucleotide
  Sense strand starting at position 3339 of SEQ ID NO: 587048
uguguagucgugcaaucuc

SEQ ID NO: 762871 - RNA, 19 nt, Artificial Sequence
  Description of Artificial Sequence: Synthetic oligonucleotide
  Antisense strand to SEQ ID NO: 762870
gagauugcacgacuacaca

SEQ ID NO: 762872 - RNA, 19 nt, Artificial Sequence
  Description of Artificial Sequence: Synthetic oligonucleotide
  Sense strand starting at position 81 of SEQ ID NO: 587049
uccuacuaucuguagcuua

SEQ ID NO: 762873 - RNA, 19 nt, Artificial Sequence
  Description of Artificial Sequence: Synthetic oligonucleotide
  Antisense strand to SEQ ID NO: 762872
uaagcuacagauaguagga

SEQ ID NO: 762874 - RNA, 19 nt, Artificial Sequence
  Description of Artificial Sequence: Synthetic oligonucleotide
  Sense strand starting at position 642 of SEQ ID NO: 587049
ccgucaagcucccaaguaa

SEQ ID NO: 762875 - RNA, 19 nt, Artificial Sequence
  Description of Artificial Sequence: Synthetic oligonucleotide
  Antisense strand to SEQ ID NO: 762874
uuacuugggagcuugacgg

SEQ ID NO: 762876 - RNA, 19 nt, Artificial Sequence
  Description of Artificial Sequence: Synthetic oligonucleotide
  Sense strand starting at position 852 of SEQ ID NO: 587049
gucuguccagucugauacu

SEQ ID NO: 762877 - RNA, 19 nt, Artificial Sequence
  Description of Artificial Sequence: Synthetic oligonucleotide
  Antisense strand to SEQ ID NO: 762876
aguaucagacuggacagac

SEQ ID NO: 762878 - RNA, 19 nt, Artificial Sequence
  Description of Artificial Sequence: Synthetic oligonucleotide
  Sense strand starting at position 1224 of SEQ ID NO: 587049
ccaggucaggcucauaguu

SEQ ID NO: 762879 - RNA, 19 nt, Artificial Sequence
  Description of Artificial Sequence: Synthetic oligonucleotide
  Antisense strand to SEQ ID NO: 762878
aacuaugagccugaccugg

SEQ ID NO: 762880 - RNA, 19 nt, Artificial Sequence
  Description of Artificial Sequence: Synthetic oligonucleotide
  Sense strand starting at position 1226 of SEQ ID NO: 587049
aggucaggcucauaguuga

SEQ ID NO: 762881 - RNA, 19 nt, Artificial Sequence
  Description of Artificial Sequence: Synthetic oligonucleotide
  Antisense strand to SEQ ID NO: 762880
ucaacuaugagccugaccu

SEQ ID NO: 762882 - RNA, 19 nt, Artificial Sequence
  Description of Artificial Sequence: Synthetic oligonucleotide
  Sense strand starting at position 1646 of SEQ ID NO: 587049
gacggucugagaggaucuu

SEQ ID NO: 762883 - RNA, 19 nt, Artificial Sequence
  Description of Artificial Sequence: Synthetic oligonucleotide
  Antisense strand to SEQ ID NO: 762882
aagauccucucagaccguc

SEQ ID NO: 762884 - RNA, 19 nt, Artificial Sequence
  Description of Artificial Sequence: Synthetic oligonucleotide
  Sense strand starting at position 1687 of SEQ ID NO: 587049
gcgaggugggcaugagauu

SEQ ID NO: 762885 - RNA, 19 nt, Artificial Sequence
  Description of Artificial Sequence: Synthetic oligonucleotide
  Antisense strand to SEQ ID NO: 762884
aaucucaugcccaccucgc

SEQ ID NO: 762886 - RNA, 19 nt, Artificial Sequence
  Description of Artificial Sequence: Synthetic oligonucleotide
  Sense strand starting at position 1729 of SEQ ID NO: 587049
ggaggcaucuggcaauaau

SEQ ID NO: 762887 - RNA, 19 nt, Artificial Sequence
  Description of Artificial Sequence: Synthetic oligonucleotide
  Antisense strand to SEQ ID NO: 762886
auuauugccagaugccucc

SEQ ID NO: 762888 - RNA, 19 nt, Artificial Sequence
  Description of Artificial Sequence: Synthetic oligonucleotide
  Sense strand starting at position 1738 of SEQ ID NO: 587049
uggcaauaaugaggucagu

SEQ ID NO: 762889 - RNA, 19 nt, Artificial Sequence
  Description of Artificial Sequence: Synthetic oligonucleotide
  Antisense strand to SEQ ID NO: 762888
acugaccucauuauugcca

SEQ ID NO: 762890 - RNA, 19 nt, Artificial Sequence
  Description of Artificial Sequence: Synthetic oligonucleotide
  Sense strand starting at position 1744 of SEQ ID NO: 587049
uaaugaggucagugacuug

SEQ ID NO: 762891 - RNA, 19 nt, Artificial Sequence
  Description of Artificial Sequence: Synthetic oligonucleotide
  Antisense strand to SEQ ID NO: 762890
caagucacugaccucauua

SEQ ID NO: 762892 - RNA, 19 nt, Artificial Sequence
  Description of Artificial Sequence: Synthetic oligonucleotide
  Sense strand starting at position 1922 of SEQ ID NO: 587049
cuuaccgcucucuggaaua

SEQ ID NO: 762893 - RNA, 19 nt, Artificial Sequence
  Description of Artificial Sequence: Synthetic oligonucleotide
  Antisense strand to SEQ ID NO: 762892
uauuccagagagcgguaag

SEQ ID NO: 762894 - RNA, 19 nt, Artificial Sequence
  Description of Artificial Sequence: Synthetic oligonucleotide
  Sense strand starting at position 1924 of SEQ ID NO: 587049
uaccgcucucuggaauaga

SEQ ID NO: 762895 - RNA, 19 nt, Artificial Sequence
  Description of Artificial Sequence: Synthetic oligonucleotide
  Antisense strand to SEQ ID NO: 762894
ucuauuccagagagcggua

SEQ ID NO: 762896 - RNA, 19 nt, Artificial Sequence
  Description of Artificial Sequence: Synthetic oligonucleotide
  Sense strand starting at position 2007 of SEQ ID NO: 587049
cgauaaaccguuuguggga

SEQ ID NO: 762897 - RNA, 19 nt, Artificial Sequence
  Description of Artificial Sequence: Synthetic oligonucleotide
  Antisense strand to SEQ ID NO: 762896
ucccacaaacgguuuaucg

SEQ ID NO: 762898 - RNA, 19 nt, Artificial Sequence
  Description of Artificial Sequence: Synthetic oligonucleotide
  Sense strand starting at position 2581 of SEQ ID NO: 587049
uuugaaaggucguucucag

SEQ ID NO: 762899 - RNA, 19 nt, Artificial Sequence
  Description of Artificial Sequence: Synthetic oligonucleotide
  Antisense strand to SEQ ID NO: 762898
cugagaacgaccuuucaaa

SEQ ID NO: 762900 - RNA, 19 nt, Artificial Sequence
  Description of Artificial Sequence: Synthetic oligonucleotide
  Sense strand starting at position 2639 of SEQ ID NO: 587049
agcacauggucagaugaga

SEQ ID NO: 762901 - RNA, 19 nt, Artificial Sequence
  Description of Artificial Sequence: Synthetic oligonucleotide
  Antisense strand to SEQ ID NO: 762900
ucucaucugaccaugugcu

SEQ ID NO: 762902 - RNA, 19 nt, Artificial Sequence
  Description of Artificial Sequence: Synthetic oligonucleotide
  Sense strand starting at position 2691 of SEQ ID NO: 587049
cagggauaugugggucagu

SEQ ID NO: 762903 - RNA, 19 nt, Artificial Sequence
  Description of Artificial Sequence: Synthetic oligonucleotide
  Antisense strand to SEQ ID NO: 762902
acugacccacauaucccug

SEQ ID NO: 762904 - RNA, 19 nt, Artificial Sequence
  Description of Artificial Sequence: Synthetic oligonucleotide
  Sense strand starting at position 2794 of SEQ ID NO: 587049
ccguuuggucaccgaagga

SEQ ID NO: 762905 - RNA, 19 nt, Artificial Sequence
  Description of Artificial Sequence: Synthetic oligonucleotide
  Antisense strand to SEQ ID NO: 762904
uccuucggugaccaaacgg

SEQ ID NO: 762906 - RNA, 19 nt, Artificial Sequence
  Description of Artificial Sequence: Synthetic oligonucleotide
  Sense strand starting at position 2841 of SEQ ID NO: 587049
ggguucugaggcugaugaa

SEQ ID NO: 762907 - RNA, 19 nt, Artificial Sequence
  Description of Artificial Sequence: Synthetic oligonucleotide
  Antisense strand to SEQ ID NO: 762906
uucaucagccucagaaccc

SEQ ID NO: 762908 - RNA, 19 nt, Artificial Sequence
  Description of Artificial Sequence: Synthetic oligonucleotide
  Sense strand starting at position 2842 of SEQ ID NO: 587049
gguucugaggcugaugaaa

SEQ ID NO: 762909 - RNA, 19 nt, Artificial Sequence
  Description of Artificial Sequence: Synthetic oligonucleotide
  Antisense strand to SEQ ID NO: 762908
uuucaucagccucagaacc

SEQ ID NO: 762910 - RNA, 19 nt, Artificial Sequence
  Description of Artificial Sequence: Synthetic oligonucleotide
  Sense strand starting at position 2880 of SEQ ID NO: 587049
agaaacaugucacaggcau

SEQ ID NO: 762911 - RNA, 19 nt, Artificial Sequence
  Description of Artificial Sequence: Synthetic oligonucleotide
  Antisense strand to SEQ ID NO: 762910
augccugugacauguuucu

SEQ ID NO: 762912 - RNA, 19 nt, Artificial Sequence
  Description of Artificial Sequence: Synthetic oligonucleotide
  Sense strand starting at position 3014 of SEQ ID NO: 587049
ugggaaacaucagcuccua

SEQ ID NO: 762913 - RNA, 19 nt, Artificial Sequence
  Description of Artificial Sequence: Synthetic oligonucleotide
  Antisense strand to SEQ ID NO: 762912
uaggagcugauguuuccca

SEQ ID NO: 762914 - RNA, 19 nt, Artificial Sequence
  Description of Artificial Sequence: Synthetic oligonucleotide
  Sense strand starting at position 3463 of SEQ ID NO: 587049
ucggcauggguguagaagu

SEQ ID NO: 762915 - RNA, 19 nt, Artificial Sequence
  Description of Artificial Sequence: Synthetic oligonucleotide
  Antisense strand to SEQ ID NO: 762914
acuucuacacccaugccga

SEQ ID NO: 762916 - RNA, 19 nt, Artificial Sequence
  Description of Artificial Sequence: Synthetic oligonucleotide
  Sense strand starting at position 3649 of SEQ ID NO: 587049
gggacuuccaucugagcuu

SEQ ID NO: 762917 - RNA, 19 nt, Artificial Sequence
  Description of Artificial Sequence: Synthetic oligonucleotide
  Antisense strand to SEQ ID NO: 762916
aagcucagauggaaguccc

SEQ ID NO: 762918 - RNA, 19 nt, Artificial Sequence
  Description of Artificial Sequence: Synthetic oligonucleotide
  Sense strand starting at position 3736 of SEQ ID NO: 587049
ucauauuccugcuuggaga

SEQ ID NO: 762919 - RNA, 19 nt, Artificial Sequence
  Description of Artificial Sequence: Synthetic oligonucleotide
  Antisense strand to SEQ ID NO: 762918
ucuccaagcaggaauauga

SEQ ID NO: 762920 - RNA, 19 nt, Artificial Sequence
  Description of Artificial Sequence: Synthetic oligonucleotide
  Sense strand starting at position 3737 of SEQ ID NO: 587049
cauauuccugcuuggagau

SEQ ID NO: 762921 - RNA, 19 nt, Artificial Sequence
  Description of Artificial Sequence: Synthetic oligonucleotide
  Antisense strand to SEQ ID NO: 762920
aucuccaagcaggaauaug

SEQ ID NO: 762922 - RNA, 19 nt, Artificial Sequence
  Description of Artificial Sequence: Synthetic oligonucleotide
  Sense strand starting at position 149 of SEQ ID NO: 587050
cuguaagguccacaaaguu

SEQ ID NO: 762923 - RNA, 19 nt, Artificial Sequence
  Description of Artificial Sequence: Synthetic oligonucleotide
  Antisense strand to SEQ ID NO: 762922
aacuuuguggaccuuacag

SEQ ID NO: 762924 - RNA, 19 nt, Artificial Sequence
  Description of Artificial Sequence: Synthetic oligonucleotide
  Sense strand starting at position 156 of SEQ ID NO: 587050
guccacaaaguuuaguuaa

SEQ ID NO: 762925 - RNA, 19 nt, Artificial Sequence
  Description of Artificial Sequence: Synthetic oligonucleotide
  Antisense strand to SEQ ID NO: 762924
uuaacuaaacuuuguggac

SEQ ID NO: 762926 - RNA, 19 nt, Artificial Sequence
  Description of Artificial Sequence: Synthetic oligonucleotide
  Sense strand starting at position 290 of SEQ ID NO: 587050
gagccauuaguacaguagu

SEQ ID NO: 762927 - RNA, 19 nt, Artificial Sequence
  Description of Artificial Sequence: Synthetic oligonucleotide
  Antisense strand to SEQ ID NO: 762926
acuacuguacuaauggcuc

SEQ ID NO: 762928 - RNA, 19 nt, Artificial Sequence
  Description of Artificial Sequence: Synthetic oligonucleotide
  Sense strand starting at position 293 of SEQ ID NO: 587050
ccauuaguacaguaguauu

SEQ ID NO: 762929 - RNA, 19 nt, Artificial Sequence
  Description of Artificial Sequence: Synthetic oligonucleotide
  Antisense strand to SEQ ID NO: 762928
aauacuacuguacuaaugg

SEQ ID NO: 762930 - RNA, 19 nt, Artificial Sequence
  Description of Artificial Sequence: Synthetic oligonucleotide
  Sense strand starting at position 398 of SEQ ID NO: 587050
cuggaaauauugccaugga

SEQ ID NO: 762931 - RNA, 19 nt, Artificial Sequence
  Description of Artificial Sequence: Synthetic oligonucleotide
  Antisense strand to SEQ ID NO: 762930
uccauggcaauauuuccag

SEQ ID NO: 762932 - RNA, 19 nt, Artificial Sequence
  Description of Artificial Sequence: Synthetic oligonucleotide
  Sense strand starting at position 401 of SEQ ID NO: 587050
gaaauauugccauggauug

SEQ ID NO: 762933 - RNA, 19 nt, Artificial Sequence
  Description of Artificial Sequence: Synthetic oligonucleotide
  Antisense strand to SEQ ID NO: 762932
caauccauggcaauauuuc

SEQ ID NO: 762934 - RNA, 19 nt, Artificial Sequence
  Description of Artificial Sequence: Synthetic oligonucleotide
  Sense strand starting at position 402 of SEQ ID NO: 587050
aaauauugccauggauugu

SEQ ID NO: 762935 - RNA, 19 nt, Artificial Sequence
  Description of Artificial Sequence: Synthetic oligonucleotide
  Antisense strand to SEQ ID NO: 762934
acaauccauggcaauauuu

SEQ ID NO: 762936 - RNA, 19 nt, Artificial Sequence
  Description of Artificial Sequence: Synthetic oligonucleotide
  Sense strand starting at position 406 of SEQ ID NO: 587050
auugccauggauugugaau

SEQ ID NO: 762937 - RNA, 19 nt, Artificial Sequence
  Description of Artificial Sequence: Synthetic oligonucleotide
  Antisense strand to SEQ ID NO: 762936
auucacaauccauggcaau

SEQ ID NO: 762938 - RNA, 19 nt, Artificial Sequence
  Description of Artificial Sequence: Synthetic oligonucleotide
  Sense strand starting at position 929 of SEQ ID NO: 587050
uguguuauuaaucauguga

SEQ ID NO: 762939 - RNA, 19 nt, Artificial Sequence
  Description of Artificial Sequence: Synthetic oligonucleotide
  Antisense strand to SEQ ID NO: 762938
ucacaugauuaauaacaca

SEQ ID NO: 762940 - RNA, 19 nt, Artificial Sequence
  Description of Artificial Sequence: Synthetic oligonucleotide
  Sense strand starting at position 936 of SEQ ID NO: 587050
uuaaucaugugaguacuau

SEQ ID NO: 762941 - RNA, 19 nt, Artificial Sequence
  Description of Artificial Sequence: Synthetic oligonucleotide
  Antisense strand to SEQ ID NO: 762940
auaguacucacaugauuaa

SEQ ID NO: 762942 - RNA, 19 nt, Artificial Sequence
  Description of Artificial Sequence: Synthetic oligonucleotide
  Sense strand starting at position 1009 of SEQ ID NO: 587050
ccaagaggucauuaagcua

SEQ ID NO: 762943 - RNA, 19 nt, Artificial Sequence
  Description of Artificial Sequence: Synthetic oligonucleotide
  Antisense strand to SEQ ID NO: 762942
uagcuuaaugaccucuugg

SEQ ID NO: 762944 - RNA, 19 nt, Artificial Sequence
  Description of Artificial Sequence: Synthetic oligonucleotide
  Sense strand starting at position 1210 of SEQ ID NO: 587050
gcagaagacuaguuuauaa

SEQ ID NO: 762945 - RNA, 19 nt, Artificial Sequence
  Description of Artificial Sequence: Synthetic oligonucleotide
  Antisense strand to SEQ ID NO: 762944
uuauaaacuagucuucugc

SEQ ID NO: 762946 - RNA, 19 nt, Artificial Sequence
  Description of Artificial Sequence: Synthetic oligonucleotide
  Sense strand starting at position 1223 of SEQ ID NO: 587050
uuauaauucuggcucugac

SEQ ID NO: 762947 - RNA, 19 nt, Artificial Sequence
  Description of Artificial Sequence: Synthetic oligonucleotide
  Antisense strand to SEQ ID NO: 762946
gucagagccagaauuauaa

SEQ ID NO: 762948 - RNA, 19 nt, Artificial Sequence
  Description of Artificial Sequence: Synthetic oligonucleotide
  Sense strand starting at position 1232 of SEQ ID NO: 587050
uggcucugacacuaaacuu

SEQ ID NO: 762949 - RNA, 19 nt, Artificial Sequence
  Description of Artificial Sequence: Synthetic oligonucleotide
  Antisense strand to SEQ ID NO: 762948
aaguuuagugucagagcca

SEQ ID NO: 762950 - RNA, 19 nt, Artificial Sequence
  Description of Artificial Sequence: Synthetic oligonucleotide
  Sense strand starting at position 1388 of SEQ ID NO: 587050
aucuuaaauggugguuaau

SEQ ID NO: 762951 - RNA, 19 nt, Artificial Sequence
  Description of Artificial Sequence: Synthetic oligonucleotide
  Antisense strand to SEQ ID NO: 762950
auuaaccaccauuuaagau

SEQ ID NO: 762952 - RNA, 19 nt, Artificial Sequence
  Description of Artificial Sequence: Synthetic oligonucleotide
  Sense strand starting at position 1390 of SEQ ID NO: 587050
cuuaaauggugguuaaugu

SEQ ID NO: 762953 - RNA, 19 nt, Artificial Sequence
  Description of Artificial Sequence: Synthetic oligonucleotide
  Antisense strand to SEQ ID NO: 762952
acauuaaccaccauuuaag

SEQ ID NO: 762954 - RNA, 19 nt, Artificial Sequence
  Description of Artificial Sequence: Synthetic oligonucleotide
  Sense strand starting at position 1528 of SEQ ID NO: 587050
agcaguccucgcgcaagaa

SEQ ID NO: 762955 - RNA, 19 nt, Artificial Sequence
  Description of Artificial Sequence: Synthetic oligonucleotide
  Antisense strand to SEQ ID NO: 762954
uucuugcgcgaggacugcu

SEQ ID NO: 762956 - RNA, 19 nt, Artificial Sequence
  Description of Artificial Sequence: Synthetic oligonucleotide
  Sense strand starting at position 1698 of SEQ ID NO: 587050
gcuucugcuccagaaacaa

SEQ ID NO: 762957 - RNA, 19 nt, Artificial Sequence
  Description of Artificial Sequence: Synthetic oligonucleotide
  Antisense strand to SEQ ID NO: 762956
uuguuucuggagcagaagc

SEQ ID NO: 762958 - RNA, 19 nt, Artificial Sequence
  Description of Artificial Sequence: Synthetic oligonucleotide
  Sense strand starting at position 2701 of SEQ ID NO: 587050
ggaugagaagucuguacaa

SEQ ID NO: 762959 - RNA, 19 nt, Artificial Sequence
  Description of Artificial Sequence: Synthetic oligonucleotide
  Antisense strand to SEQ ID NO: 762958
uuguacagacuucucaucc

SEQ ID NO: 762960 - RNA, 19 nt, Artificial Sequence
  Description of Artificial Sequence: Synthetic oligonucleotide
  Sense strand starting at position 2760 of SEQ ID NO: 587050
ccuugagaccguggaauaa

SEQ ID NO: 762961 - RNA, 19 nt, Artificial Sequence
  Description of Artificial Sequence: Synthetic oligonucleotide
  Antisense strand to SEQ ID NO: 762960
uuauuccacggucucaagg

SEQ ID NO: 762962 - RNA, 19 nt, Artificial Sequence
  Description of Artificial Sequence: Synthetic oligonucleotide
  Sense strand starting at position 2771 of SEQ ID NO: 587050
uggaauaacgucugcugaa

SEQ ID NO: 762963 - RNA, 19 nt, Artificial Sequence
  Description of Artificial Sequence: Synthetic oligonucleotide
  Antisense strand to SEQ ID NO: 762962
uucagcagacguuauucca

SEQ ID NO: 762964 - RNA, 19 nt, Artificial Sequence
  Description of Artificial Sequence: Synthetic oligonucleotide
  Sense strand starting at position 2772 of SEQ ID NO: 587050
ggaauaacgucugcugaac

SEQ ID NO: 762965 - RNA, 19 nt, Artificial Sequence
  Description of Artificial Sequence: Synthetic oligonucleotide
  Antisense strand to SEQ ID NO: 762964
guucagcagacguuauucc

SEQ ID NO: 762966 - RNA, 19 nt, Artificial Sequence
  Description of Artificial Sequence: Synthetic oligonucleotide
  Sense strand starting at position 2881 of SEQ ID NO: 587050
guuccuuaaaccgagaagu

SEQ ID NO: 762967 - RNA, 19 nt, Artificial Sequence
  Description of Artificial Sequence: Synthetic oligonucleotide
  Antisense strand to SEQ ID NO: 762966
acuucucgguuuaaggaac

SEQ ID NO: 762968 - RNA, 19 nt, Artificial Sequence
  Description of Artificial Sequence: Synthetic oligonucleotide
  Sense strand starting at position 2927 of SEQ ID NO: 587050
acgaguaacucucuggaaa

SEQ ID NO: 762969 - RNA, 19 nt, Artificial Sequence
  Description of Artificial Sequence: Synthetic oligonucleotide
  Antisense strand to SEQ ID NO: 762968
uuuccagagaguuacucgu

SEQ ID NO: 762970 - RNA, 19 nt, Artificial Sequence
  Description of Artificial Sequence: Synthetic oligonucleotide
  Sense strand starting at position 2928 of SEQ ID NO: 587050
cgaguaacucucuggaaau

SEQ ID NO: 762971 - RNA, 19 nt, Artificial Sequence
  Description of Artificial Sequence: Synthetic oligonucleotide
  Antisense strand to SEQ ID NO: 762970
auuuccagagaguuacucg

SEQ ID NO: 762972 - RNA, 19 nt, Artificial Sequence
  Description of Artificial Sequence: Synthetic oligonucleotide
  Sense strand starting at position 3039 of SEQ ID NO: 587050
uuauuauggcauuauaggu

SEQ ID NO: 762973 - RNA, 19 nt, Artificial Sequence
  Description of Artificial Sequence: Synthetic oligonucleotide
  Antisense strand to SEQ ID NO: 762972
accuauaaugccauaauaa

SEQ ID NO: 762974 - RNA, 19 nt, Artificial Sequence
  Description of Artificial Sequence: Synthetic oligonucleotide
  Sense strand starting at position 3044 of SEQ ID NO: 587050
auggcauuauagguuacua

SEQ ID NO: 762975 - RNA, 19 nt, Artificial Sequence
  Description of Artificial Sequence: Synthetic oligonucleotide
  Antisense strand to SEQ ID NO: 762974
uaguaaccuauaaugccau

SEQ ID NO: 762976 - RNA, 19 nt, Artificial Sequence
  Description of Artificial Sequence: Synthetic oligonucleotide
  Sense strand starting at position 3046 of SEQ ID NO: 587050
ggcauuauagguuacuaag

SEQ ID NO: 762977 - RNA, 19 nt, Artificial Sequence
  Description of Artificial Sequence: Synthetic oligonucleotide
  Antisense strand to SEQ ID NO: 762976
cuuaguaaccuauaaugcc

SEQ ID NO: 762978 - RNA, 19 nt, Artificial Sequence
  Description of Artificial Sequence: Synthetic oligonucleotide
  Sense strand starting at position 3048 of SEQ ID NO: 587050
cauuauagguuacuaagga

SEQ ID NO: 762979 - RNA, 19 nt, Artificial Sequence
  Description of Artificial Sequence: Synthetic oligonucleotide
  Antisense strand to SEQ ID NO: 762978
uccuuaguaaccuauaaug

SEQ ID NO: 762980 - RNA, 19 nt, Artificial Sequence
  Description of Artificial Sequence: Synthetic oligonucleotide
  Sense strand starting at position 3162 of SEQ ID NO: 587050
ucuuuaaugguuuaaaggu

SEQ ID NO: 762981 - RNA, 19 nt, Artificial Sequence
  Description of Artificial Sequence: Synthetic oligonucleotide
  Antisense strand to SEQ ID NO: 762980
accuuuaaaccauuaaaga

SEQ ID NO: 762982 - RNA, 19 nt, Artificial Sequence
  Description of Artificial Sequence: Synthetic oligonucleotide
  Sense strand starting at position 3195 of SEQ ID NO: 587050
aacuacugaguuugugaaa

SEQ ID NO: 762983 - RNA, 19 nt, Artificial Sequence
  Description of Artificial Sequence: Synthetic oligonucleotide
  Antisense strand to SEQ ID NO: 762982
uuucacaaacucaguaguu

SEQ ID NO: 762984 - RNA, 19 nt, Artificial Sequence
  Description of Artificial Sequence: Synthetic oligonucleotide
  Sense strand starting at position 3196 of SEQ ID NO: 587050
acuacugaguuugugaaag

SEQ ID NO: 762985 - RNA, 19 nt, Artificial Sequence
  Description of Artificial Sequence: Synthetic oligonucleotide
  Antisense strand to SEQ ID NO: 762984
cuuucacaaacucaguagu

SEQ ID NO: 762986 - RNA, 19 nt, Artificial Sequence
  Description of Artificial Sequence: Synthetic oligonucleotide
  Sense strand starting at position 3214 of SEQ ID NO: 587050
guaagaaucugccuuaacc

SEQ ID NO: 762987 - RNA, 19 nt, Artificial Sequence
  Description of Artificial Sequence: Synthetic oligonucleotide
  Antisense strand to SEQ ID NO: 762986
gguuaaggcagauucuuac

SEQ ID NO: 762988 - RNA, 19 nt, Artificial Sequence
  Description of Artificial Sequence: Synthetic oligonucleotide
  Sense strand starting at position 3264 of SEQ ID NO: 587050
gcagcuuuagcagaaaucu

SEQ ID NO: 762989 - RNA, 19 nt, Artificial Sequence
  Description of Artificial Sequence: Synthetic oligonucleotide
  Antisense strand to SEQ ID NO: 762988
agauuucugcuaaagcugc

SEQ ID NO: 762990 - RNA, 19 nt, Artificial Sequence
  Description of Artificial Sequence: Synthetic oligonucleotide
  Sense strand starting at position 3322 of SEQ ID NO: 587050
augcuuccugguuaaacau

SEQ ID NO: 762991 - RNA, 19 nt, Artificial Sequence
  Description of Artificial Sequence: Synthetic oligonucleotide
  Antisense strand to SEQ ID NO: 762990
auguuuaaccaggaagcau

SEQ ID NO: 762992 - RNA, 19 nt, Artificial Sequence
  Description of Artificial Sequence: Synthetic oligonucleotide
  Sense strand starting at position 3430 of SEQ ID NO: 587050
ggcucaccugcugaaauga

SEQ ID NO: 762993 - RNA, 19 nt, Artificial Sequence
  Description of Artificial Sequence: Synthetic oligonucleotide
  Antisense strand to SEQ ID NO: 762992
ucauuucagcaggugagcc

SEQ ID NO: 762994 - RNA, 19 nt, Artificial Sequence
  Description of Artificial Sequence: Synthetic oligonucleotide
  Sense strand starting at position 3485 of SEQ ID NO: 587050
uuagauauacugggcuauu

SEQ ID NO: 762995 - RNA, 19 nt, Artificial Sequence
  Description of Artificial Sequence: Synthetic oligonucleotide
  Antisense strand to SEQ ID NO: 762994
aauagcccaguauaucuaa

SEQ ID NO: 762996 - RNA, 19 nt, Artificial Sequence
  Description of Artificial Sequence: Synthetic oligonucleotide
  Sense strand starting at position 3642 of SEQ ID NO: 587050
cuugcauaugaugaaucuu

SEQ ID NO: 762997 - RNA, 19 nt, Artificial Sequence
  Description of Artificial Sequence: Synthetic oligonucleotide
  Antisense strand to SEQ ID NO: 762996
aagauucaucauaugcaag

SEQ ID NO: 762998 - RNA, 19 nt, Artificial Sequence
  Description of Artificial Sequence: Synthetic oligonucleotide
  Sense strand starting at position 3717 of SEQ ID NO: 587050
gccagaguauuaguagaca

SEQ ID NO: 762999 - RNA, 19 nt, Artificial Sequence
  Description of Artificial Sequence: Synthetic oligonucleotide
  Antisense strand to SEQ ID NO: 762998
ugucuacuaauacucuggc

SEQ ID NO: 763000 - RNA, 19 nt, Artificial Sequence
  Description of Artificial Sequence: Synthetic oligonucleotide
  Sense strand starting at position 3801 of SEQ ID NO: 587050
agugaaauuacauguggac

SEQ ID NO: 763001 - RNA, 19 nt, Artificial Sequence
  Description of Artificial Sequence: Synthetic oligonucleotide
  Antisense strand to SEQ ID NO: 763000
guccacauguaauuucacu

SEQ ID NO: 763002 - RNA, 19 nt, Artificial Sequence
  Description of Artificial Sequence: Synthetic oligonucleotide
  Sense strand starting at position 37 of SEQ ID NO: 587051
ugugaauauccuuauuguu

SEQ ID NO: 763003 - RNA, 19 nt, Artificial Sequence
  Description of Artificial Sequence: Synthetic oligonucleotide
  Antisense strand to SEQ ID NO: 763002
aacaauaaggauauucaca

SEQ ID NO: 763004 - RNA, 19 nt, Artificial Sequence
  Description of Artificial Sequence: Synthetic oligonucleotide
  Sense strand starting at position 49 of SEQ ID NO: 587051
uauuguuuacuggauugua

SEQ ID NO: 763005 - RNA, 19 nt, Artificial Sequence
  Description of Artificial Sequence: Synthetic oligonucleotide
  Antisense strand to SEQ ID NO: 763004
uacaauccaguaaacaaua

SEQ ID NO: 763006 - RNA, 19 nt, Artificial Sequence
  Description of Artificial Sequence: Synthetic oligonucleotide
  Sense strand starting at position 96 of SEQ ID NO: 587051
ucuugaucauguuuccuga

SEQ ID NO: 763007 - RNA, 19 nt, Artificial Sequence
  Description of Artificial Sequence: Synthetic oligonucleotide
  Antisense strand to SEQ ID NO: 763006
ucaggaaacaugaucaaga

SEQ ID NO: 763008 - RNA, 19 nt, Artificial Sequence
  Description of Artificial Sequence: Synthetic oligonucleotide
  Sense strand starting at position 98 of SEQ ID NO: 587051
uugaucauguuuccugaau

SEQ ID NO: 763009 - RNA, 19 nt, Artificial Sequence
  Description of Artificial Sequence: Synthetic oligonucleotide
  Antisense strand to SEQ ID NO: 763008
auucaggaaacaugaucaa

SEQ ID NO: 763010 - RNA, 19 nt, Artificial Sequence
  Description of Artificial Sequence: Synthetic oligonucleotide
  Sense strand starting at position 99 of SEQ ID NO: 587051
ugaucauguuuccugaaua

SEQ ID NO: 763011 - RNA, 19 nt, Artificial Sequence
  Description of Artificial Sequence: Synthetic oligonucleotide
  Antisense strand to SEQ ID NO: 763010
uauucaggaaacaugauca

SEQ ID NO: 763012 - RNA, 19 nt, Artificial Sequence
  Description of Artificial Sequence: Synthetic oligonucleotide
  Sense strand starting at position 269 of SEQ ID NO: 587051
uaguguuaacaugagcaaa

SEQ ID NO: 763013 - RNA, 19 nt, Artificial Sequence
  Description of Artificial Sequence: Synthetic oligonucleotide
  Antisense strand to SEQ ID NO: 763012
uuugcucauguuaacacua

SEQ ID NO: 763014 - RNA, 19 nt, Artificial Sequence
  Description of Artificial Sequence: Synthetic oligonucleotide
  Sense strand starting at position 464 of SEQ ID NO: 587051
cuguaagguccacaaaguu

SEQ ID NO: 763015 - RNA, 19 nt, Artificial Sequence
  Description of Artificial Sequence: Synthetic oligonucleotide
  Antisense strand to SEQ ID NO: 763014
aacuuuguggaccuuacag

SEQ ID NO: 763016 - RNA, 19 nt, Artificial Sequence
  Description of Artificial Sequence: Synthetic oligonucleotide
  Sense strand starting at position 471 of SEQ ID NO: 587051
guccacaaaguuuaguuaa

SEQ ID NO: 763017 - RNA, 19 nt, Artificial Sequence
  Description of Artificial Sequence: Synthetic oligonucleotide
  Antisense strand to SEQ ID NO: 763016
uuaacuaaacuuuguggac

SEQ ID NO: 763018 - RNA, 19 nt, Artificial Sequence
  Description of Artificial Sequence: Synthetic oligonucleotide
  Sense strand starting at position 605 of SEQ ID NO: 587051
gagccauuaguacaguagu

SEQ ID NO: 763019 - RNA, 19 nt, Artificial Sequence
  Description of Artificial Sequence: Synthetic oligonucleotide
  Antisense strand to SEQ ID NO: 763018
acuacuguacuaauggcuc

SEQ ID NO: 763020 - RNA, 19 nt, Artificial Sequence
  Description of Artificial Sequence: Synthetic oligonucleotide
  Sense strand starting at position 608 of SEQ ID NO: 587051
ccauuaguacaguaguauu

SEQ ID NO: 763021 - RNA, 19 nt, Artificial Sequence
  Description of Artificial Sequence: Synthetic oligonucleotide
  Antisense strand to SEQ ID NO: 763020
aauacuacuguacuaaugg

SEQ ID NO: 763022 - RNA, 19 nt, Artificial Sequence
  Description of Artificial Sequence: Synthetic oligonucleotide
  Sense strand starting at position 713 of SEQ ID NO: 587051
cuggaaauauugccaugga

SEQ ID NO: 763023 - RNA, 19 nt, Artificial Sequence
  Description of Artificial Sequence: Synthetic oligonucleotide
  Antisense strand to SEQ ID NO: 763022
uccauggcaauauuuccag

SEQ ID NO: 763024 - RNA, 19 nt, Artificial Sequence
  Description of Artificial Sequence: Synthetic oligonucleotide
  Sense strand starting at position 716 of SEQ ID NO: 587051
gaaauauugccauggauug

SEQ ID NO: 763025 - RNA, 19 nt, Artificial Sequence
  Description of Artificial Sequence: Synthetic oligonucleotide
  Antisense strand to SEQ ID NO: 763024
caauccauggcaauauuuc

SEQ ID NO: 763026 - RNA, 19 nt, Artificial Sequence
  Description of Artificial Sequence: Synthetic oligonucleotide
  Sense strand starting at position 717 of SEQ ID NO: 587051
aaauauugccauggauugu

SEQ ID NO: 763027 - RNA, 19 nt, Artificial Sequence
  Description of Artificial Sequence: Synthetic oligonucleotide
  Antisense strand to SEQ ID NO: 763026
acaauccauggcaauauuu

SEQ ID NO: 763028 - RNA, 19 nt, Artificial Sequence
  Description of Artificial Sequence: Synthetic oligonucleotide
  Sense strand starting at position 721 of SEQ ID NO: 587051
auugccauggauugugaau

SEQ ID NO: 763029 - RNA, 19 nt, Artificial Sequence
  Description of Artificial Sequence: Synthetic oligonucleotide
  Antisense strand to SEQ ID NO: 763028
auucacaauccauggcaau

SEQ ID NO: 763030 - RNA, 19 nt, Artificial Sequence
  Description of Artificial Sequence: Synthetic oligonucleotide
  Sense strand starting at position 1244 of SEQ ID NO: 587051
uguguuauuaaucauguga

SEQ ID NO: 763031 - RNA, 19 nt, Artificial Sequence
  Description of Artificial Sequence: Synthetic oligonucleotide
  Antisense strand to SEQ ID NO: 763030
ucacaugauuaauaacaca

SEQ ID NO: 763032 - RNA, 19 nt, Artificial Sequence
  Description of Artificial Sequence: Synthetic oligonucleotide
  Sense strand starting at position 1251 of SEQ ID NO: 587051
uuaaucaugugaguacuau

SEQ ID NO: 763033 - RNA, 19 nt, Artificial Sequence
  Description of Artificial Sequence: Synthetic oligonucleotide
  Antisense strand to SEQ ID NO: 763032
auaguacucacaugauuaa

SEQ ID NO: 763034 - RNA, 19 nt, Artificial Sequence
  Description of Artificial Sequence: Synthetic oligonucleotide
  Sense strand starting at position 1324 of SEQ ID NO: 587051
ccaagaggucauuaagcua

SEQ ID NO: 763035 - RNA, 19 nt, Artificial Sequence
  Description of Artificial Sequence: Synthetic oligonucleotide
  Antisense strand to SEQ ID NO: 763034
uagcuuaaugaccucuugg

SEQ ID NO: 763036 - RNA, 19 nt, Artificial Sequence
  Description of Artificial Sequence: Synthetic oligonucleotide
  Sense strand starting at position 1525 of SEQ ID NO: 587051
gcagaagacuaguuuauaa

SEQ ID NO: 763037 - RNA, 19 nt, Artificial Sequence
  Description of Artificial Sequence: Synthetic oligonucleotide
  Antisense strand to SEQ ID NO: 763036
uuauaaacuagucuucugc

SEQ ID NO: 763038 - RNA, 19 nt, Artificial Sequence
  Description of Artificial Sequence: Synthetic oligonucleotide
  Sense strand starting at position 1538 of SEQ ID NO: 587051
uuauaauucuggcucugac

SEQ ID NO: 763039 - RNA, 19 nt, Artificial Sequence
  Description of Artificial Sequence: Synthetic oligonucleotide
  Antisense strand to SEQ ID NO: 763038
gucagagccagaauuauaa

SEQ ID NO: 763040 - RNA, 19 nt, Artificial Sequence
  Description of Artificial Sequence: Synthetic oligonucleotide
  Sense strand starting at position 1547 of SEQ ID NO: 587051
uggcucugacacuaaacuu

SEQ ID NO: 763041 - RNA, 19 nt, Artificial Sequence
  Description of Artificial Sequence: Synthetic oligonucleotide
  Antisense strand to SEQ ID NO: 763040
aaguuuagugucagagcca

SEQ ID NO: 763042 - RNA, 19 nt, Artificial Sequence
  Description of Artificial Sequence: Synthetic oligonucleotide
  Sense strand starting at position 1703 of SEQ ID NO: 587051
aucuuaaauggugguuaau

SEQ ID NO: 763043 - RNA, 19 nt, Artificial Sequence
  Description of Artificial Sequence: Synthetic oligonucleotide
  Antisense strand to SEQ ID NO: 763042
auuaaccaccauuuaagau

SEQ ID NO: 763044 - RNA, 19 nt, Artificial Sequence
  Description of Artificial Sequence: Synthetic oligonucleotide
  Sense strand starting at position 1843 of SEQ ID NO: 587051
agcaguccucgcgcaagaa

SEQ ID NO: 763045 - RNA, 19 nt, Artificial Sequence
  Description of Artificial Sequence: Synthetic oligonucleotide
  Antisense strand to SEQ ID NO: 763044
uucuugcgcgaggacugcu

SEQ ID NO: 763046 - RNA, 19 nt, Artificial Sequence
  Description of Artificial Sequence: Synthetic oligonucleotide
  Sense strand starting at position 2013 of SEQ ID NO: 587051
gcuucugcuccagaaacaa

SEQ ID NO: 763047 - RNA, 19 nt, Artificial Sequence
  Description of Artificial Sequence: Synthetic oligonucleotide
  Antisense strand to SEQ ID NO: 763046
uuguuucuggagcagaagc

SEQ ID NO: 763048 - RNA, 19 nt, Artificial Sequence
  Description of Artificial Sequence: Synthetic oligonucleotide
  Sense strand starting at position 3016 of SEQ ID NO: 587051
ggaugagaagucuguacaa

SEQ ID NO: 763049 - RNA, 19 nt, Artificial Sequence
  Description of Artificial Sequence: Synthetic oligonucleotide
  Antisense strand to SEQ ID NO: 763048
uuguacagacuucucaucc

SEQ ID NO: 763050 - RNA, 19 nt, Artificial Sequence
  Description of Artificial Sequence: Synthetic oligonucleotide
  Sense strand starting at position 3075 of SEQ ID NO: 587051
ccuugagaccguggaauaa

SEQ ID NO: 763051 - RNA, 19 nt, Artificial Sequence
  Description of Artificial Sequence: Synthetic oligonucleotide
  Antisense strand to SEQ ID NO: 763050
uuauuccacggucucaagg

SEQ ID NO: 763052 - RNA, 19 nt, Artificial Sequence
  Description of Artificial Sequence: Synthetic oligonucleotide
  Sense strand starting at position 3196 of SEQ ID NO: 587051
guuccuuaaaccgagaagu

SEQ ID NO: 763053 - RNA, 19 nt, Artificial Sequence
  Description of Artificial Sequence: Synthetic oligonucleotide
  Antisense strand to SEQ ID NO: 763052
acuucucgguuuaaggaac

SEQ ID NO: 763054 - RNA, 19 nt, Artificial Sequence
  Description of Artificial Sequence: Synthetic oligonucleotide
  Sense strand starting at position 3242 of SEQ ID NO: 587051
acgaguaacucucuggaaa

SEQ ID NO: 763055 - RNA, 19 nt, Artificial Sequence
  Description of Artificial Sequence: Synthetic oligonucleotide
  Antisense strand to SEQ ID NO: 763054
uuuccagagaguuacucgu

SEQ ID NO: 763056 - RNA, 19 nt, Artificial Sequence
  Description of Artificial Sequence: Synthetic oligonucleotide
  Sense strand starting at position 3243 of SEQ ID NO: 587051
cgaguaacucucuggaaau

SEQ ID NO: 763057 - RNA, 19 nt, Artificial Sequence
  Description of Artificial Sequence: Synthetic oligonucleotide
  Antisense strand to SEQ ID NO: 763056
auuuccagagaguuacucg

SEQ ID NO: 763058 - RNA, 19 nt, Artificial Sequence
  Description of Artificial Sequence: Synthetic oligonucleotide
  Sense strand starting at position 3354 of SEQ ID NO: 587051
uuauuauggcauuauaggu

SEQ ID NO: 763059 - RNA, 19 nt, Artificial Sequence
  Description of Artificial Sequence: Synthetic oligonucleotide
  Antisense strand to SEQ ID NO: 763058
accuauaaugccauaauaa

SEQ ID NO: 763060 - RNA, 19 nt, Artificial Sequence
  Description of Artificial Sequence: Synthetic oligonucleotide
  Sense strand starting at position 3359 of SEQ ID NO: 587051
auggcauuauagguuacua

SEQ ID NO: 763061 - RNA, 19 nt, Artificial Sequence
  Description of Artificial Sequence: Synthetic oligonucleotide
  Antisense strand to SEQ ID NO: 763060
uaguaaccuauaaugccau

SEQ ID NO: 763062 - RNA, 19 nt, Artificial Sequence
  Description of Artificial Sequence: Synthetic oligonucleotide
  Sense strand starting at position 3361 of SEQ ID NO: 587051
ggcauuauagguuacuaag

SEQ ID NO: 763063 - RNA, 19 nt, Artificial Sequence
  Description of Artificial Sequence: Synthetic oligonucleotide
  Antisense strand to SEQ ID NO: 763062
cuuaguaaccuauaaugcc

SEQ ID NO: 763064 - RNA, 19 nt, Artificial Sequence
  Description of Artificial Sequence: Synthetic oligonucleotide
  Sense strand starting at position 3363 of SEQ ID NO: 587051
cauuauagguuacuaagga

SEQ ID NO: 763065 - RNA, 19 nt, Artificial Sequence
  Description of Artificial Sequence: Synthetic oligonucleotide
  Antisense strand to SEQ ID NO: 763064
uccuuaguaaccuauaaug

SEQ ID NO: 763066 - RNA, 19 nt, Artificial Sequence
  Description of Artificial Sequence: Synthetic oligonucleotide
  Sense strand starting at position 3477 of SEQ ID NO: 587051
ucuuuaaugguuuaaaggu

SEQ ID NO: 763067 - RNA, 19 nt, Artificial Sequence
  Description of Artificial Sequence: Synthetic oligonucleotide
  Antisense strand to SEQ ID NO: 763066
accuuuaaaccauuaaaga

SEQ ID NO: 763068 - RNA, 19 nt, Artificial Sequence
  Description of Artificial Sequence: Synthetic oligonucleotide
  Sense strand starting at position 3510 of SEQ ID NO: 587051
aacuacugaguuugugaaa

SEQ ID NO: 763069 - RNA, 19 nt, Artificial Sequence
  Description of Artificial Sequence: Synthetic oligonucleotide
  Antisense strand to SEQ ID NO: 763068
uuucacaaacucaguaguu

SEQ ID NO: 763070 - RNA, 19 nt, Artificial Sequence
  Description of Artificial Sequence: Synthetic oligonucleotide
  Sense strand starting at position 3511 of SEQ ID NO: 587051
acuacugaguuugugaaag

SEQ ID NO: 763071 - RNA, 19 nt, Artificial Sequence
  Description of Artificial Sequence: Synthetic oligonucleotide
  Antisense strand to SEQ ID NO: 763070
cuuucacaaacucaguagu

SEQ ID NO: 763072 - RNA, 19 nt, Artificial Sequence
  Description of Artificial Sequence: Synthetic oligonucleotide
  Sense strand starting at position 3529 of SEQ ID NO: 587051
guaagaaucugccuuaacc

SEQ ID NO: 763073 - RNA, 19 nt, Artificial Sequence
  Description of Artificial Sequence: Synthetic oligonucleotide
  Antisense strand to SEQ ID NO: 763072
gguuaaggcagauucuuac

SEQ ID NO: 763074 - RNA, 19 nt, Artificial Sequence
  Description of Artificial Sequence: Synthetic oligonucleotide
  Sense strand starting at position 3637 of SEQ ID NO: 587051
augcuuccugguuaaacau

SEQ ID NO: 763075 - RNA, 19 nt, Artificial Sequence
  Description of Artificial Sequence: Synthetic oligonucleotide
  Antisense strand to SEQ ID NO: 763074
auguuuaaccaggaagcau

SEQ ID NO: 763076 - RNA, 19 nt, Artificial Sequence
  Description of Artificial Sequence: Synthetic oligonucleotide
  Sense strand starting at position 3745 of SEQ ID NO: 587051
ggcucaccugcugaaauga

SEQ ID NO: 763077 - RNA, 19 nt, Artificial Sequence
  Description of Artificial Sequence: Synthetic oligonucleotide
  Antisense strand to SEQ ID NO: 763076
ucauuucagcaggugagcc

SEQ ID NO: 763078 - RNA, 19 nt, Artificial Sequence
  Description of Artificial Sequence: Synthetic oligonucleotide
  Sense strand starting at position 3800 of SEQ ID NO: 587051
uuagauauacugggcuauu

SEQ ID NO: 763079 - RNA, 19 nt, Artificial Sequence
  Description of Artificial Sequence: Synthetic oligonucleotide
  Antisense strand to SEQ ID NO: 763078
aauagcccaguauaucuaa

SEQ ID NO: 763080 - RNA, 19 nt, Artificial Sequence
  Description of Artificial Sequence: Synthetic oligonucleotide
  Sense strand starting at position 3957 of SEQ ID NO: 587051
cuugcauaugaugaaucuu

SEQ ID NO: 763081 - RNA, 19 nt, Artificial Sequence
  Description of Artificial Sequence: Synthetic oligonucleotide
  Antisense strand to SEQ ID NO: 763080
aagauucaucauaugcaag

SEQ ID NO: 763082 - RNA, 19 nt, Artificial Sequence
  Description of Artificial Sequence: Synthetic oligonucleotide
  Sense strand starting at position 334 of SEQ ID NO: 587052
agguguuagcaagaauaau

SEQ ID NO: 763083 - RNA, 19 nt, Artificial Sequence
  Description of Artificial Sequence: Synthetic oligonucleotide
  Antisense strand to SEQ ID NO: 763082
auuauucuugcuaacaccu

SEQ ID NO: 763084 - RNA, 19 nt, Artificial Sequence
  Description of Artificial Sequence: Synthetic oligonucleotide
  Sense strand starting at position 394 of SEQ ID NO: 587052
agacaaauuguguacuuug

SEQ ID NO: 763085 - RNA, 19 nt, Artificial Sequence
  Description of Artificial Sequence: Synthetic oligonucleotide
  Antisense strand to SEQ ID NO: 763084
caaaguacacaauuugucu

SEQ ID NO: 763086 - RNA, 19 nt, Artificial Sequence
  Description of Artificial Sequence: Synthetic oligonucleotide
  Sense strand starting at position 479 of SEQ ID NO: 587052
uccagauaucgauagugau

SEQ ID NO: 763087 - RNA, 19 nt, Artificial Sequence
  Description of Artificial Sequence: Synthetic oligonucleotide
  Antisense strand to SEQ ID NO: 763086
aucacuaucgauaucugga

SEQ ID NO: 763088 - RNA, 19 nt, Artificial Sequence
  Description of Artificial Sequence: Synthetic oligonucleotide
  Sense strand starting at position 495 of SEQ ID NO: 587052
gaugcaauuguagaguaga

SEQ ID NO: 763089 - RNA, 19 nt, Artificial Sequence
  Description of Artificial Sequence: Synthetic oligonucleotide
  Antisense strand to SEQ ID NO: 763088
ucuacucuacaauugcauc

SEQ ID NO: 763090 - RNA, 19 nt, Artificial Sequence
  Description of Artificial Sequence: Synthetic oligonucleotide
  Sense strand starting at position 637 of SEQ ID NO: 587052
uaauguuuggcaugaccaa

SEQ ID NO: 763091 - RNA, 19 nt, Artificial Sequence
  Description of Artificial Sequence: Synthetic oligonucleotide
  Antisense strand to SEQ ID NO: 763090
uuggucaugccaaacauua

SEQ ID NO: 763092 - RNA, 19 nt, Artificial Sequence
  Description of Artificial Sequence: Synthetic oligonucleotide
  Sense strand starting at position 875 of SEQ ID NO: 587052
ggguaaugaugggcaguua

SEQ ID NO: 763093 - RNA, 19 nt, Artificial Sequence
  Description of Artificial Sequence: Synthetic oligonucleotide
  Antisense strand to SEQ ID NO: 763092
uaacugcccaucauuaccc

SEQ ID NO: 763094 - RNA, 19 nt, Artificial Sequence
  Description of Artificial Sequence: Synthetic oligonucleotide
  Sense strand starting at position 1103 of SEQ ID NO: 587052
ugaggugucccacauauca

SEQ ID NO: 763095 - RNA, 19 nt, Artificial Sequence
  Description of Artificial Sequence: Synthetic oligonucleotide
  Antisense strand to SEQ ID NO: 763094
ugauaugugggacaccuca

SEQ ID NO: 763096 - RNA, 19 nt, Artificial Sequence
  Description of Artificial Sequence: Synthetic oligonucleotide
  Sense strand starting at position 1161 of SEQ ID NO: 587052
ugucaugacagugagcaua

SEQ ID NO: 763097 - RNA, 19 nt, Artificial Sequence
  Description of Artificial Sequence: Synthetic oligonucleotide
  Antisense strand to SEQ ID NO: 763096
uaugcucacugucaugaca

SEQ ID NO: 763098 - RNA, 19 nt, Artificial Sequence
  Description of Artificial Sequence: Synthetic oligonucleotide
  Sense strand starting at position 1163 of SEQ ID NO: 587052
ucaugacagugagcauauu

SEQ ID NO: 763099 - RNA, 19 nt, Artificial Sequence
  Description of Artificial Sequence: Synthetic oligonucleotide
  Antisense strand to SEQ ID NO: 763098
aauaugcucacugucauga

SEQ ID NO: 763100 - RNA, 19 nt, Artificial Sequence
  Description of Artificial Sequence: Synthetic oligonucleotide
  Sense strand starting at position 1223 of SEQ ID NO: 587052
uguucuuugcuagaaaucu

SEQ ID NO: 763101 - RNA, 19 nt, Artificial Sequence
  Description of Artificial Sequence: Synthetic oligonucleotide
  Antisense strand to SEQ ID NO: 763100
agauuucuagcaaagaaca

SEQ ID NO: 763102 - RNA, 19 nt, Artificial Sequence
  Description of Artificial Sequence: Synthetic oligonucleotide
  Sense strand starting at position 1232 of SEQ ID NO: 587052
cuagaaaucuguuugagaa

SEQ ID NO: 763103 - RNA, 19 nt, Artificial Sequence
  Description of Artificial Sequence: Synthetic oligonucleotide
  Antisense strand to SEQ ID NO: 763102
uucucaaacagauuucuag

SEQ ID NO: 763104 - RNA, 19 nt, Artificial Sequence
  Description of Artificial Sequence: Synthetic oligonucleotide
  Sense strand starting at position 1325 of SEQ ID NO: 587052
agagcugcgagagaaauau

SEQ ID NO: 763105 - RNA, 19 nt, Artificial Sequence
  Description of Artificial Sequence: Synthetic oligonucleotide
  Antisense strand to SEQ ID NO: 763104
auauuucucucgcagcucu

SEQ ID NO: 763106 - RNA, 19 nt, Artificial Sequence
  Description of Artificial Sequence: Synthetic oligonucleotide
  Sense strand starting at position 2270 of SEQ ID NO: 587052
auauguuuggaaggaugca

SEQ ID NO: 763107 - RNA, 19 nt, Artificial Sequence
  Description of Artificial Sequence: Synthetic oligonucleotide
  Antisense strand to SEQ ID NO: 763106
ugcauccuuccaaacauau

SEQ ID NO: 763108 - RNA, 19 nt, Artificial Sequence
  Description of Artificial Sequence: Synthetic oligonucleotide
  Sense strand starting at position 2298 of SEQ ID NO: 587052
agaaucaucacccggcaga

SEQ ID NO: 763109 - RNA, 19 nt, Artificial Sequence
  Description of Artificial Sequence: Synthetic oligonucleotide
  Antisense strand to SEQ ID NO: 763108
ucugccgggugaugauucu

SEQ ID NO: 763110 - RNA, 19 nt, Artificial Sequence
  Description of Artificial Sequence: Synthetic oligonucleotide
  Sense strand starting at position 2350 of SEQ ID NO: 587052
acugucauccaaggaguca

SEQ ID NO: 763111 - RNA, 19 nt, Artificial Sequence
  Description of Artificial Sequence: Synthetic oligonucleotide
  Antisense strand to SEQ ID NO: 763110
ugacuccuuggaugacagu

SEQ ID NO: 763112 - RNA, 19 nt, Artificial Sequence
  Description of Artificial Sequence: Synthetic oligonucleotide
  Sense strand starting at position 2364 of SEQ ID NO: 587052
agucaaaugcuagaucuag

SEQ ID NO: 763113 - RNA, 19 nt, Artificial Sequence
  Description of Artificial Sequence: Synthetic oligonucleotide
  Antisense strand to SEQ ID NO: 763112
cuagaucuagcauuugacu

SEQ ID NO: 763114 - RNA, 19 nt, Artificial Sequence
  Description of Artificial Sequence: Synthetic oligonucleotide
  Sense strand starting at position 2506 of SEQ ID NO: 587052
agcagaaauguugacuugu

SEQ ID NO: 763115 - RNA, 19 nt, Artificial Sequence
  Description of Artificial Sequence: Synthetic oligonucleotide
  Antisense strand to SEQ ID NO: 763114
acaagucaacauuucugcu

SEQ ID NO: 763116 - RNA, 19 nt, Artificial Sequence
  Description of Artificial Sequence: Synthetic oligonucleotide
  Sense strand starting at position 2508 of SEQ ID NO: 587052
cagaaauguugacuuguca

SEQ ID NO: 763117 - RNA, 19 nt, Artificial Sequence
  Description of Artificial Sequence: Synthetic oligonucleotide
  Antisense strand to SEQ ID NO: 763116
ugacaagucaacauuucug

SEQ ID NO: 763118 - RNA, 19 nt, Artificial Sequence
  Description of Artificial Sequence: Synthetic oligonucleotide
  Sense strand starting at position 2596 of SEQ ID NO: 587052
auugaugcucugugacaaa

SEQ ID NO: 763119 - RNA, 19 nt, Artificial Sequence
  Description of Artificial Sequence: Synthetic oligonucleotide
  Antisense strand to SEQ ID NO: 763118
uuugucacagagcaucaau

SEQ ID NO: 763120 - RNA, 19 nt, Artificial Sequence
  Description of Artificial Sequence: Synthetic oligonucleotide
  Sense strand starting at position 2801 of SEQ ID NO: 587052
auaguugugagucaaacug

SEQ ID NO: 763121 - RNA, 19 nt, Artificial Sequence
  Description of Artificial Sequence: Synthetic oligonucleotide
  Antisense strand to SEQ ID NO: 763120
caguuugacucacaacuau

SEQ ID NO: 763122 - RNA, 19 nt, Artificial Sequence
  Description of Artificial Sequence: Synthetic oligonucleotide
  Sense strand starting at position 2809 of SEQ ID NO: 587052
gagucaaacugagucagua

SEQ ID NO: 763123 - RNA, 19 nt, Artificial Sequence
  Description of Artificial Sequence: Synthetic oligonucleotide
  Antisense strand to SEQ ID NO: 763122
uacugacucaguuugacuc

SEQ ID NO: 763124 - RNA, 19 nt, Artificial Sequence
  Description of Artificial Sequence: Synthetic oligonucleotide
  Sense strand starting at position 2826 of SEQ ID NO: 587052
uaaugcugucuggauaucu

SEQ ID NO: 763125 - RNA, 19 nt, Artificial Sequence
  Description of Artificial Sequence: Synthetic oligonucleotide
  Antisense strand to SEQ ID NO: 763124
agauauccagacagcauua

SEQ ID NO: 763126 - RNA, 19 nt, Artificial Sequence
  Description of Artificial Sequence: Synthetic oligonucleotide
  Sense strand starting at position 2831 of SEQ ID NO: 587052
cugucuggauaucuuggaa

SEQ ID NO: 763127 - RNA, 19 nt, Artificial Sequence
  Description of Artificial Sequence: Synthetic oligonucleotide
  Antisense strand to SEQ ID NO: 763126
uuccaagauauccagacag

SEQ ID NO: 763128 - RNA, 19 nt, Artificial Sequence
  Description of Artificial Sequence: Synthetic oligonucleotide
  Sense strand starting at position 2834 of SEQ ID NO: 587052
ucuggauaucuuggaauua

SEQ ID NO: 763129 - RNA, 19 nt, Artificial Sequence
  Description of Artificial Sequence: Synthetic oligonucleotide
  Antisense strand to SEQ ID NO: 763128
uaauuccaagauauccaga

SEQ ID NO: 763130 - RNA, 19 nt, Artificial Sequence
  Description of Artificial Sequence: Synthetic oligonucleotide
  Sense strand starting at position 2978 of SEQ ID NO: 587052
uucuucuaccaguaguaau

SEQ ID NO: 763131 - RNA, 19 nt, Artificial Sequence
  Description of Artificial Sequence: Synthetic oligonucleotide
  Antisense strand to SEQ ID NO: 763130
auuacuacugguagaagaa

SEQ ID NO: 763132 - RNA, 19 nt, Artificial Sequence
  Description of Artificial Sequence: Synthetic oligonucleotide
  Sense strand starting at position 3233 of SEQ ID NO: 587052
auagcuacccuagaguuua

SEQ ID NO: 763133 - RNA, 19 nt, Artificial Sequence
  Description of Artificial Sequence: Synthetic oligonucleotide
  Antisense strand to SEQ ID NO: 763132
uaaacucuaggguagcuau

SEQ ID NO: 763134 - RNA, 19 nt, Artificial Sequence
  Description of Artificial Sequence: Synthetic oligonucleotide
  Sense strand starting at position 3258 of SEQ ID NO: 587052
ggaagcuacucuuucugaa

SEQ ID NO: 763135 - RNA, 19 nt, Artificial Sequence
  Description of Artificial Sequence: Synthetic oligonucleotide
  Antisense strand to SEQ ID NO: 763134
uucagaaagaguagcuucc

SEQ ID NO: 763136 - RNA, 19 nt, Artificial Sequence
  Description of Artificial Sequence: Synthetic oligonucleotide
  Sense strand starting at position 3344 of SEQ ID NO: 587052
cucugcaugcauuagauua

SEQ ID NO: 763137 - RNA, 19 nt, Artificial Sequence
  Description of Artificial Sequence: Synthetic oligonucleotide
  Antisense strand to SEQ ID NO: 763136
uaaucuaaugcaugcagag

SEQ ID NO: 763138 - RNA, 19 nt, Artificial Sequence
  Description of Artificial Sequence: Synthetic oligonucleotide
  Sense strand starting at position 3419 of SEQ ID NO: 587052
agaggaaauuagcuacguu

SEQ ID NO: 763139 - RNA, 19 nt, Artificial Sequence
  Description of Artificial Sequence: Synthetic oligonucleotide
  Antisense strand to SEQ ID NO: 763138
aacguagcuaauuuccucu

SEQ ID NO: 763140 - RNA, 19 nt, Artificial Sequence
  Description of Artificial Sequence: Synthetic oligonucleotide
  Sense strand starting at position 3420 of SEQ ID NO: 587052
gaggaaauuagcuacguug

SEQ ID NO: 763141 - RNA, 19 nt, Artificial Sequence
  Description of Artificial Sequence: Synthetic oligonucleotide
  Antisense strand to SEQ ID NO: 763140
caacguagcuaauuuccuc

SEQ ID NO: 763142 - RNA, 19 nt, Artificial Sequence
  Description of Artificial Sequence: Synthetic oligonucleotide
  Sense strand starting at position 3423 of SEQ ID NO: 587052
gaaauuagcuacguugaag

SEQ ID NO: 763143 - RNA, 19 nt, Artificial Sequence
  Description of Artificial Sequence: Synthetic oligonucleotide
  Antisense strand to SEQ ID NO: 763142
cuucaacguagcuaauuuc

SEQ ID NO: 763144 - RNA, 19 nt, Artificial Sequence
  Description of Artificial Sequence: Synthetic oligonucleotide
  Sense strand starting at position 3443 of SEQ ID NO: 587052
uugcaaauuuggucuuugu

SEQ ID NO: 763145 - RNA, 19 nt, Artificial Sequence
  Description of Artificial Sequence: Synthetic oligonucleotide
  Antisense strand to SEQ ID NO: 763144
acaaagaccaaauuugcaa

SEQ ID NO: 763146 - RNA, 19 nt, Artificial Sequence
  Description of Artificial Sequence: Synthetic oligonucleotide
  Sense strand starting at position 3470 of SEQ ID NO: 587052
cgcucuguuaggccucuaa

SEQ ID NO: 763147 - RNA, 19 nt, Artificial Sequence
  Description of Artificial Sequence: Synthetic oligonucleotide
  Antisense strand to SEQ ID NO: 763146
uuagaggccuaacagagcg

SEQ ID NO: 763148 - RNA, 19 nt, Artificial Sequence
  Description of Artificial Sequence: Synthetic oligonucleotide
  Sense strand starting at position 3474 of SEQ ID NO: 587052
cuguuaggccucuaagaag

SEQ ID NO: 763149 - RNA, 19 nt, Artificial Sequence
  Description of Artificial Sequence: Synthetic oligonucleotide
  Antisense strand to SEQ ID NO: 763148
cuucuuagaggccuaacag

SEQ ID NO: 763150 - RNA, 19 nt, Artificial Sequence
  Description of Artificial Sequence: Synthetic oligonucleotide
  Sense strand starting at position 3480 of SEQ ID NO: 587052
ggccucuaagaaggaauua

SEQ ID NO: 763151 - RNA, 19 nt, Artificial Sequence
  Description of Artificial Sequence: Synthetic oligonucleotide
  Antisense strand to SEQ ID NO: 763150
uaauuccuucuuagaggcc

SEQ ID NO: 763152 - RNA, 19 nt, Artificial Sequence
  Description of Artificial Sequence: Synthetic oligonucleotide
  Sense strand starting at position 3643 of SEQ ID NO: 587052
aauguaugguucccugaag

SEQ ID NO: 763153 - RNA, 19 nt, Artificial Sequence
  Description of Artificial Sequence: Synthetic oligonucleotide
  Antisense strand to SEQ ID NO: 763152
cuucagggaaccauacauu

SEQ ID NO: 763154 - RNA, 19 nt, Artificial Sequence
  Description of Artificial Sequence: Synthetic oligonucleotide
  Sense strand starting at position 3655 of SEQ ID NO: 587052
ccugaaggaucacuucuuu

SEQ ID NO: 763155 - RNA, 19 nt, Artificial Sequence
  Description of Artificial Sequence: Synthetic oligonucleotide
  Antisense strand to SEQ ID NO: 763154
aaagaagugauccuucagg

SEQ ID NO: 763156 - RNA, 19 nt, Artificial Sequence
  Description of Artificial Sequence: Synthetic oligonucleotide
  Sense strand starting at position 3693 of SEQ ID NO: 587052
ggaaaugggaccugcuauu

SEQ ID NO: 763157 - RNA, 19 nt, Artificial Sequence
  Description of Artificial Sequence: Synthetic oligonucleotide
  Antisense strand to SEQ ID NO: 763156
aauagcaggucccauuucc

SEQ ID NO: 763158 - RNA, 19 nt, Artificial Sequence
  Description of Artificial Sequence: Synthetic oligonucleotide
  Sense strand starting at position 3775 of SEQ ID NO: 587052
auccuuucugcuuguauuu

SEQ ID NO: 763159 - RNA, 19 nt, Artificial Sequence
  Description of Artificial Sequence: Synthetic oligonucleotide
  Antisense strand to SEQ ID NO: 763158
aaauacaagcagaaaggau

SEQ ID NO: 763160 - RNA, 19 nt, Artificial Sequence
  Description of Artificial Sequence: Synthetic oligonucleotide
  Sense strand starting at position 3859 of SEQ ID NO: 587052
uggacauacucugcuaaca

SEQ ID NO: 763161 - RNA, 19 nt, Artificial Sequence
  Description of Artificial Sequence: Synthetic oligonucleotide
  Antisense strand to SEQ ID NO: 763160
uguuagcagaguaugucca

SEQ ID NO: 763162 - RNA, 19 nt, Artificial Sequence
  Description of Artificial Sequence: Synthetic oligonucleotide
  Sense strand starting at position 379 of SEQ ID NO: 587053
ugacacauuugguguuaua

SEQ ID NO: 763163 - RNA, 19 nt, Artificial Sequence
  Description of Artificial Sequence: Synthetic oligonucleotide
  Antisense strand to SEQ ID NO: 763162
uauaacaccaaauguguca

SEQ ID NO: 763164 - RNA, 19 nt, Artificial Sequence
  Description of Artificial Sequence: Synthetic oligonucleotide
  Sense strand starting at position 792 of SEQ ID NO: 587053
gcagaaacuugaguaggua

SEQ ID NO: 763165 - RNA, 19 nt, Artificial Sequence
  Description of Artificial Sequence: Synthetic oligonucleotide
  Antisense strand to SEQ ID NO: 763164
uaccuacucaaguuucugc

SEQ ID NO: 763166 - RNA, 19 nt, Artificial Sequence
  Description of Artificial Sequence: Synthetic oligonucleotide
  Sense strand starting at position 796 of SEQ ID NO: 587053
aaacuugaguagguauagu

SEQ ID NO: 763167 - RNA, 19 nt, Artificial Sequence
  Description of Artificial Sequence: Synthetic oligonucleotide
  Antisense strand to SEQ ID NO: 763166
acuauaccuacucaaguuu

SEQ ID NO: 763168 - RNA, 19 nt, Artificial Sequence
  Description of Artificial Sequence: Synthetic oligonucleotide
  Sense strand starting at position 804 of SEQ ID NO: 587053
guagguauaguggguauaa

SEQ ID NO: 763169 - RNA, 19 nt, Artificial Sequence
  Description of Artificial Sequence: Synthetic oligonucleotide
  Antisense strand to SEQ ID NO: 763168
uuauacccacuauaccuac

SEQ ID NO: 763170 - RNA, 19 nt, Artificial Sequence
  Description of Artificial Sequence: Synthetic oligonucleotide
  Sense strand starting at position 805 of SEQ ID NO: 587053
uagguauaguggguauaaa

SEQ ID NO: 763171 - RNA, 19 nt, Artificial Sequence
  Description of Artificial Sequence: Synthetic oligonucleotide
  Antisense strand to SEQ ID NO: 763170
uuuauacccacuauaccua

SEQ ID NO: 763172 - RNA, 19 nt, Artificial Sequence
  Description of Artificial Sequence: Synthetic oligonucleotide
  Sense strand starting at position 857 of SEQ ID NO: 587053
gcacuugcccuuugguaau

SEQ ID NO: 763173 - RNA, 19 nt, Artificial Sequence
  Description of Artificial Sequence: Synthetic oligonucleotide
  Antisense strand to SEQ ID NO: 763172
auuaccaaagggcaagugc

SEQ ID NO: 763174 - RNA, 19 nt, Artificial Sequence
  Description of Artificial Sequence: Synthetic oligonucleotide
  Sense strand starting at position 953 of SEQ ID NO: 587053
gcagcaaucucaggguagu

SEQ ID NO: 763175 - RNA, 19 nt, Artificial Sequence
  Description of Artificial Sequence: Synthetic oligonucleotide
  Antisense strand to SEQ ID NO: 763174
acuacccugagauugcugc

SEQ ID NO: 763176 - RNA, 19 nt, Artificial Sequence
  Description of Artificial Sequence: Synthetic oligonucleotide
  Sense strand starting at position 954 of SEQ ID NO: 587053
cagcaaucucaggguaguu

SEQ ID NO: 763177 - RNA, 19 nt, Artificial Sequence
  Description of Artificial Sequence: Synthetic oligonucleotide
  Antisense strand to SEQ ID NO: 763176
aacuacccugagauugcug

SEQ ID NO: 763178 - RNA, 19 nt, Artificial Sequence
  Description of Artificial Sequence: Synthetic oligonucleotide
  Sense strand starting at position 1120 of SEQ ID NO: 587053
cccaauucugacugugcua

SEQ ID NO: 763179 - RNA, 19 nt, Artificial Sequence
  Description of Artificial Sequence: Synthetic oligonucleotide
  Antisense strand to SEQ ID NO: 763178
uagcacagucagaauuggg

SEQ ID NO: 763180 - RNA, 19 nt, Artificial Sequence
  Description of Artificial Sequence: Synthetic oligonucleotide
  Sense strand starting at position 1127 of SEQ ID NO: 587053
cugacugugcuacaaaguu

SEQ ID NO: 763181 - RNA, 19 nt, Artificial Sequence
  Description of Artificial Sequence: Synthetic oligonucleotide
  Antisense strand to SEQ ID NO: 763180
aacuuuguagcacagucag

SEQ ID NO: 763182 - RNA, 19 nt, Artificial Sequence
  Description of Artificial Sequence: Synthetic oligonucleotide
  Sense strand starting at position 1239 of SEQ ID NO: 587053
gagagccauccugguagaa

SEQ ID NO: 763183 - RNA, 19 nt, Artificial Sequence
  Description of Artificial Sequence: Synthetic oligonucleotide
  Antisense strand to SEQ ID NO: 763182
uucuaccaggauggcucuc

SEQ ID NO: 763184 - RNA, 19 nt, Artificial Sequence
  Description of Artificial Sequence: Synthetic oligonucleotide
  Sense strand starting at position 1241 of SEQ ID NO: 587053
gagccauccugguagaauu

SEQ ID NO: 763185 - RNA, 19 nt, Artificial Sequence
  Description of Artificial Sequence: Synthetic oligonucleotide
  Antisense strand to SEQ ID NO: 763184
aauucuaccaggauggcuc

SEQ ID NO: 763186 - RNA, 19 nt, Artificial Sequence
  Description of Artificial Sequence: Synthetic oligonucleotide
  Sense strand starting at position 1252 of SEQ ID NO: 587053
guagaauuggagugcagac

SEQ ID NO: 763187 - RNA, 19 nt, Artificial Sequence
  Description of Artificial Sequence: Synthetic oligonucleotide
  Antisense strand to SEQ ID NO: 763186
gucugcacuccaauucuac

SEQ ID NO: 763188 - RNA, 19 nt, Artificial Sequence
  Description of Artificial Sequence: Synthetic oligonucleotide
  Sense strand starting at position 1348 of SEQ ID NO: 587053
ugcaacauaugugagugaa

SEQ ID NO: 763189 - RNA, 19 nt, Artificial Sequence
  Description of Artificial Sequence: Synthetic oligonucleotide
  Antisense strand to SEQ ID NO: 763188
uucacucacauauguugca

SEQ ID NO: 763190 - RNA, 19 nt, Artificial Sequence
  Description of Artificial Sequence: Synthetic oligonucleotide
  Sense strand starting at position 1399 of SEQ ID NO: 587053
gcaaguuccugucccuuga

SEQ ID NO: 763191 - RNA, 19 nt, Artificial Sequence
  Description of Artificial Sequence: Synthetic oligonucleotide
  Antisense strand to SEQ ID NO: 763190
ucaagggacaggaacuugc

SEQ ID NO: 763192 - RNA, 19 nt, Artificial Sequence
  Description of Artificial Sequence: Synthetic oligonucleotide
  Sense strand starting at position 1572 of SEQ ID NO: 587053
cccacaucuggguacgaua

SEQ ID NO: 763193 - RNA, 19 nt, Artificial Sequence
  Description of Artificial Sequence: Synthetic oligonucleotide
  Antisense strand to SEQ ID NO: 763192
uaucguacccagauguggg

SEQ ID NO: 763194 - RNA, 19 nt, Artificial Sequence
  Description of Artificial Sequence: Synthetic oligonucleotide
  Sense strand starting at position 2067 of SEQ ID NO: 587053
ggacgccugcgcagugaua

SEQ ID NO: 763195 - RNA, 19 nt, Artificial Sequence
  Description of Artificial Sequence: Synthetic oligonucleotide
  Antisense strand to SEQ ID NO: 763194
uaucacugcgcaggcgucc

SEQ ID NO: 763196 - RNA, 19 nt, Artificial Sequence
  Description of Artificial Sequence: Synthetic oligonucleotide
  Sense strand starting at position 2196 of SEQ ID NO: 587053
caaugacguucgcccuuaa

SEQ ID NO: 763197 - RNA, 19 nt, Artificial Sequence
  Description of Artificial Sequence: Synthetic oligonucleotide
  Antisense strand to SEQ ID NO: 763196
uuaagggcgaacgucauug

SEQ ID NO: 763198 - RNA, 19 nt, Artificial Sequence
  Description of Artificial Sequence: Synthetic oligonucleotide
  Sense strand starting at position 2461 of SEQ ID NO: 587053
ccaccuaucugacucguaa

SEQ ID NO: 763199 - RNA, 19 nt, Artificial Sequence
  Description of Artificial Sequence: Synthetic oligonucleotide
  Antisense strand to SEQ ID NO: 763198
uuacgagucagauaggugg

SEQ ID NO: 763200 - RNA, 19 nt, Artificial Sequence
  Description of Artificial Sequence: Synthetic oligonucleotide
  Sense strand starting at position 2465 of SEQ ID NO: 587053
cuaucugacucguaagaac

SEQ ID NO: 763201 - RNA, 19 nt, Artificial Sequence
  Description of Artificial Sequence: Synthetic oligonucleotide
  Antisense strand to SEQ ID NO: 763200
guucuuacgagucagauag

SEQ ID NO: 763202 - RNA, 19 nt, Artificial Sequence
  Description of Artificial Sequence: Synthetic oligonucleotide
  Sense strand starting at position 2584 of SEQ ID NO: 587053
cugccauaguuucggauca

SEQ ID NO: 763203 - RNA, 19 nt, Artificial Sequence
  Description of Artificial Sequence: Synthetic oligonucleotide
  Antisense strand to SEQ ID NO: 763202
ugauccgaaacuauggcag

SEQ ID NO: 763204 - RNA, 19 nt, Artificial Sequence
  Description of Artificial Sequence: Synthetic oligonucleotide
  Sense strand starting at position 2585 of SEQ ID NO: 587053
ugccauaguuucggaucau

SEQ ID NO: 763205 - RNA, 19 nt, Artificial Sequence
  Description of Artificial Sequence: Synthetic oligonucleotide
  Antisense strand to SEQ ID NO: 763204
augauccgaaacuauggca

SEQ ID NO: 763206 - RNA, 19 nt, Artificial Sequence
  Description of Artificial Sequence: Synthetic oligonucleotide
  Sense strand starting at position 2586 of SEQ ID NO: 587053
gccauaguuucggaucauu

SEQ ID NO: 763207 - RNA, 19 nt, Artificial Sequence
  Description of Artificial Sequence: Synthetic oligonucleotide
  Antisense strand to SEQ ID NO: 763206
aaugauccgaaacuauggc

SEQ ID NO: 763208 - RNA, 19 nt, Artificial Sequence
  Description of Artificial Sequence: Synthetic oligonucleotide
  Sense strand starting at position 2820 of SEQ ID NO: 587053
ggaggucgaggaugcauua

SEQ ID NO: 763209 - RNA, 19 nt, Artificial Sequence
  Description of Artificial Sequence: Synthetic oligonucleotide
  Antisense strand to SEQ ID NO: 763208
uaaugcauccucgaccucc

SEQ ID NO: 763210 - RNA, 19 nt, Artificial Sequence
  Description of Artificial Sequence: Synthetic oligonucleotide
  Sense strand starting at position 2829 of SEQ ID NO: 587053
ggaugcauuaagcagugau

SEQ ID NO: 763211 - RNA, 19 nt, Artificial Sequence
  Description of Artificial Sequence: Synthetic oligonucleotide
  Antisense strand to SEQ ID NO: 763210
aucacugcuuaaugcaucc

SEQ ID NO: 763212 - RNA, 19 nt, Artificial Sequence
  Description of Artificial Sequence: Synthetic oligonucleotide
  Sense strand starting at position 2872 of SEQ ID NO: 587053
ggugauaccuugucuuaaa

SEQ ID NO: 763213 - RNA, 19 nt, Artificial Sequence
  Description of Artificial Sequence: Synthetic oligonucleotide
  Antisense strand to SEQ ID NO: 763212
uuuaagacaagguaucacc

SEQ ID NO: 763214 - RNA, 19 nt, Artificial Sequence
  Description of Artificial Sequence: Synthetic oligonucleotide
  Sense strand starting at position 2995 of SEQ ID NO: 587053
gaauguuacuuagugggca

SEQ ID NO: 763215 - RNA, 19 nt, Artificial Sequence
  Description of Artificial Sequence: Synthetic oligonucleotide
  Antisense strand to SEQ ID NO: 763214
ugcccacuaaguaacauuc

SEQ ID NO: 763216 - RNA, 19 nt, Artificial Sequence
  Description of Artificial Sequence: Synthetic oligonucleotide
  Sense strand starting at position 2996 of SEQ ID NO: 587053
aauguuacuuagugggcau

SEQ ID NO: 763217 - RNA, 19 nt, Artificial Sequence
  Description of Artificial Sequence: Synthetic oligonucleotide
  Antisense strand to SEQ ID NO: 763216
augcccacuaaguaacauu

SEQ ID NO: 763218 - RNA, 19 nt, Artificial Sequence
  Description of Artificial Sequence: Synthetic oligonucleotide
  Sense strand starting at position 3000 of SEQ ID NO: 587053
uuacuuagugggcauggaa

SEQ ID NO: 763219 - RNA, 19 nt, Artificial Sequence
  Description of Artificial Sequence: Synthetic oligonucleotide
  Antisense strand to SEQ ID NO: 763218
uuccaugcccacuaaguaa

SEQ ID NO: 763220 - RNA, 19 nt, Artificial Sequence
  Description of Artificial Sequence: Synthetic oligonucleotide
  Sense strand starting at position 3193 of SEQ ID NO: 587053
ucaacagaauuucgaaacu

SEQ ID NO: 763221 - RNA, 19 nt, Artificial Sequence
  Description of Artificial Sequence: Synthetic oligonucleotide
  Antisense strand to SEQ ID NO: 763220
aguuucgaaauucuguuga

SEQ ID NO: 763222 - RNA, 19 nt, Artificial Sequence
  Description of Artificial Sequence: Synthetic oligonucleotide
  Sense strand starting at position 3319 of SEQ ID NO: 587053
ggcuguacucaucauccaa

SEQ ID NO: 763223 - RNA, 19 nt, Artificial Sequence
  Description of Artificial Sequence: Synthetic oligonucleotide
  Antisense strand to SEQ ID NO: 763222
uuggaugaugaguacagcc

SEQ ID NO: 763224 - RNA, 19 nt, Artificial Sequence
  Description of Artificial Sequence: Synthetic oligonucleotide
  Sense strand starting at position 3349 of SEQ ID NO: 587053
guuugcugccuuucucauu

SEQ ID NO: 763225 - RNA, 19 nt, Artificial Sequence
  Description of Artificial Sequence: Synthetic oligonucleotide
  Antisense strand to SEQ ID NO: 763224
aaugagaaaggcagcaaac

SEQ ID NO: 763226 - RNA, 19 nt, Artificial Sequence
  Description of Artificial Sequence: Synthetic oligonucleotide
  Sense strand starting at position 3530 of SEQ ID NO: 587053
cuuaauaccuaguaugugu

SEQ ID NO: 763227 - RNA, 19 nt, Artificial Sequence
  Description of Artificial Sequence: Synthetic oligonucleotide
  Antisense strand to SEQ ID NO: 763226
acacauacuagguauuaag

SEQ ID NO: 763228 - RNA, 19 nt, Artificial Sequence
  Description of Artificial Sequence: Synthetic oligonucleotide
  Sense strand starting at position 3537 of SEQ ID NO: 587053
ccuaguauguguuuaauuu

SEQ ID NO: 763229 - RNA, 19 nt, Artificial Sequence
  Description of Artificial Sequence: Synthetic oligonucleotide
  Antisense strand to SEQ ID NO: 763228
aaauuaaacacauacuagg

SEQ ID NO: 763230 - RNA, 19 nt, Artificial Sequence
  Description of Artificial Sequence: Synthetic oligonucleotide
  Sense strand starting at position 3583 of SEQ ID NO: 587053
auuagauauuuagggucca

SEQ ID NO: 763231 - RNA, 19 nt, Artificial Sequence
  Description of Artificial Sequence: Synthetic oligonucleotide
  Antisense strand to SEQ ID NO: 763230
uggacccuaaauaucuaau

SEQ ID NO: 763232 - RNA, 19 nt, Artificial Sequence
  Description of Artificial Sequence: Synthetic oligonucleotide
  Sense strand starting at position 3584 of SEQ ID NO: 587053
uuagauauuuaggguccaa

SEQ ID NO: 763233 - RNA, 19 nt, Artificial Sequence
  Description of Artificial Sequence: Synthetic oligonucleotide
  Antisense strand to SEQ ID NO: 763232
uuggacccuaaauaucuaa

SEQ ID NO: 763234 - RNA, 19 nt, Artificial Sequence
  Description of Artificial Sequence: Synthetic oligonucleotide
  Sense strand starting at position 95 of SEQ ID NO: 587054
aguacuagugccuacacaa

SEQ ID NO: 763235 - RNA, 19 nt, Artificial Sequence
  Description of Artificial Sequence: Synthetic oligonucleotide
  Antisense strand to SEQ ID NO: 763234
uuguguaggcacuaguacu

SEQ ID NO: 763236 - RNA, 19 nt, Artificial Sequence
  Description of Artificial Sequence: Synthetic oligonucleotide
  Sense strand starting at position 116 of SEQ ID NO: 587054
auaacuucugcagguagau

SEQ ID NO: 763237 - RNA, 19 nt, Artificial Sequence
  Description of Artificial Sequence: Synthetic oligonucleotide
  Antisense strand to SEQ ID NO: 763236
aucuaccugcagaaguuau

SEQ ID NO: 763238 - RNA, 19 nt, Artificial Sequence
  Description of Artificial Sequence: Synthetic oligonucleotide
  Sense strand starting at position 141 of SEQ ID NO: 587054
guaacuuuauacuuaaggu

SEQ ID NO: 763239 - RNA, 19 nt, Artificial Sequence
  Description of Artificial Sequence: Synthetic oligonucleotide
  Antisense strand to SEQ ID NO: 763238
accuuaaguauaaaguuac

SEQ ID NO: 763240 - RNA, 19 nt, Artificial Sequence
  Description of Artificial Sequence: Synthetic oligonucleotide
  Sense strand starting at position 530 of SEQ ID NO: 587054
caggauguuguguaucaau

SEQ ID NO: 763241 - RNA, 19 nt, Artificial Sequence
  Description of Artificial Sequence: Synthetic oligonucleotide
  Antisense strand to SEQ ID NO: 763240
auugauacacaacauccug

SEQ ID NO: 763242 - RNA, 19 nt, Artificial Sequence
  Description of Artificial Sequence: Synthetic oligonucleotide
  Sense strand starting at position 900 of SEQ ID NO: 587054
ugggaucauugggccuuau

SEQ ID NO: 763243 - RNA, 19 nt, Artificial Sequence
  Description of Artificial Sequence: Synthetic oligonucleotide
  Antisense strand to SEQ ID NO: 763242
auaaggcccaaugauccca

SEQ ID NO: 763244 - RNA, 19 nt, Artificial Sequence
  Description of Artificial Sequence: Synthetic oligonucleotide
  Sense strand starting at position 1094 of SEQ ID NO: 587054
aggguagguguuuggacaa

SEQ ID NO: 763245 - RNA, 19 nt, Artificial Sequence
  Description of Artificial Sequence: Synthetic oligonucleotide
  Antisense strand to SEQ ID NO: 763244
uuguccaaacaccuacccu

SEQ ID NO: 763246 - RNA, 19 nt, Artificial Sequence
  Description of Artificial Sequence: Synthetic oligonucleotide
  Sense strand starting at position 1176 of SEQ ID NO: 587054
ugacaaguguaaccacuuu

SEQ ID NO: 763247 - RNA, 19 nt, Artificial Sequence
  Description of Artificial Sequence: Synthetic oligonucleotide
  Antisense strand to SEQ ID NO: 763246
aaagugguuacacuuguca

SEQ ID NO: 763248 - RNA, 19 nt, Artificial Sequence
  Description of Artificial Sequence: Synthetic oligonucleotide
  Sense strand starting at position 1280 of SEQ ID NO: 587054
gguuccuuaguuuacugaa

SEQ ID NO: 763249 - RNA, 19 nt, Artificial Sequence
  Description of Artificial Sequence: Synthetic oligonucleotide
  Antisense strand to SEQ ID NO: 763248
uucaguaaacuaaggaacc

SEQ ID NO: 763250 - RNA, 19 nt, Artificial Sequence
  Description of Artificial Sequence: Synthetic oligonucleotide
  Sense strand starting at position 1614 of SEQ ID NO: 587054
cuggcugggccucauuaga

SEQ ID NO: 763251 - RNA, 19 nt, Artificial Sequence
  Description of Artificial Sequence: Synthetic oligonucleotide
  Antisense strand to SEQ ID NO: 763250
ucuaaugaggcccagccag

SEQ ID NO: 763252 - RNA, 19 nt, Artificial Sequence
  Description of Artificial Sequence: Synthetic oligonucleotide
  Sense strand starting at position 2079 of SEQ ID NO: 587054
ggcgucgaucgugugagau

SEQ ID NO: 763253 - RNA, 19 nt, Artificial Sequence
  Description of Artificial Sequence: Synthetic oligonucleotide
  Antisense strand to SEQ ID NO: 763252
aucucacacgaucgacgcc

SEQ ID NO: 763254 - RNA, 19 nt, Artificial Sequence
  Description of Artificial Sequence: Synthetic oligonucleotide
  Sense strand starting at position 2082 of SEQ ID NO: 587054
gucgaucgugugagauugu

SEQ ID NO: 763255 - RNA, 19 nt, Artificial Sequence
  Description of Artificial Sequence: Synthetic oligonucleotide
  Antisense strand to SEQ ID NO: 763254
acaaucucacacgaucgac

SEQ ID NO: 763256 - RNA, 19 nt, Artificial Sequence
  Description of Artificial Sequence: Synthetic oligonucleotide
  Sense strand starting at position 2281 of SEQ ID NO: 587054
augcgaguugucgcugaca

SEQ ID NO: 763257 - RNA, 19 nt, Artificial Sequence
  Description of Artificial Sequence: Synthetic oligonucleotide
  Antisense strand to SEQ ID NO: 763256
ugucagcgacaacucgcau

SEQ ID NO: 763258 - RNA, 19 nt, Artificial Sequence
  Description of Artificial Sequence: Synthetic oligonucleotide
  Sense strand starting at position 2297 of SEQ ID NO: 587054
acagucugguccuuaggaa

SEQ ID NO: 763259 - RNA, 19 nt, Artificial Sequence
  Description of Artificial Sequence: Synthetic oligonucleotide
  Antisense strand to SEQ ID NO: 763258
uuccuaaggaccagacugu

SEQ ID NO: 763260 - RNA, 19 nt, Artificial Sequence
  Description of Artificial Sequence: Synthetic oligonucleotide
  Sense strand starting at position 2298 of SEQ ID NO: 587054
cagucugguccuuaggaau

SEQ ID NO: 763261 - RNA, 19 nt, Artificial Sequence
  Description of Artificial Sequence: Synthetic oligonucleotide
  Antisense strand to SEQ ID NO: 763260
auuccuaaggaccagacug

SEQ ID NO: 763262 - RNA, 19 nt, Artificial Sequence
  Description of Artificial Sequence: Synthetic oligonucleotide
  Sense strand starting at position 2515 of SEQ ID NO: 587054
cucggaucccaguacuuaa

SEQ ID NO: 763263 - RNA, 19 nt, Artificial Sequence
  Description of Artificial Sequence: Synthetic oligonucleotide
  Antisense strand to SEQ ID NO: 763262
uuaaguacugggauccgag

SEQ ID NO: 763264 - RNA, 19 nt, Artificial Sequence
  Description of Artificial Sequence: Synthetic oligonucleotide
  Sense strand starting at position 2629 of SEQ ID NO: 587054
augagaugccgguaauaau

SEQ ID NO: 763265 - RNA, 19 nt, Artificial Sequence
  Description of Artificial Sequence: Synthetic oligonucleotide
  Antisense strand to SEQ ID NO: 763264
auuauuaccggcaucucau

SEQ ID NO: 763266 - RNA, 19 nt, Artificial Sequence
  Description of Artificial Sequence: Synthetic oligonucleotide
  Sense strand starting at position 2679 of SEQ ID NO: 587054
gaguuuaacguuuaaugaa

SEQ ID NO: 763267 - RNA, 19 nt, Artificial Sequence
  Description of Artificial Sequence: Synthetic oligonucleotide
  Antisense strand to SEQ ID NO: 763266
uucauuaaacguuaaacuc

SEQ ID NO: 763268 - RNA, 19 nt, Artificial Sequence
  Description of Artificial Sequence: Synthetic oligonucleotide
  Sense strand starting at position 2756 of SEQ ID NO: 587054
cuaacaggaucagugugau

SEQ ID NO: 763269 - RNA, 19 nt, Artificial Sequence
  Description of Artificial Sequence: Synthetic oligonucleotide
  Antisense strand to SEQ ID NO: 763268
aucacacugauccuguuag

SEQ ID NO: 763270 - RNA, 19 nt, Artificial Sequence
  Description of Artificial Sequence: Synthetic oligonucleotide
  Sense strand starting at position 2759 of SEQ ID NO: 587054
acaggaucagugugauccu

SEQ ID NO: 763271 - RNA, 19 nt, Artificial Sequence
  Description of Artificial Sequence: Synthetic oligonucleotide
  Antisense strand to SEQ ID NO: 763270
aggaucacacugauccugu

SEQ ID NO: 763272 - RNA, 19 nt, Artificial Sequence
  Description of Artificial Sequence: Synthetic oligonucleotide
  Sense strand starting at position 2870 of SEQ ID NO: 587054
acuguagauccauauguga

SEQ ID NO: 763273 - RNA, 19 nt, Artificial Sequence
  Description of Artificial Sequence: Synthetic oligonucleotide
  Antisense strand to SEQ ID NO: 763272
ucacauauggaucuacagu

SEQ ID NO: 763274 - RNA, 19 nt, Artificial Sequence
  Description of Artificial Sequence: Synthetic oligonucleotide
  Sense strand starting at position 2872 of SEQ ID NO: 587054
uguagauccauaugugaga

SEQ ID NO: 763275 - RNA, 19 nt, Artificial Sequence
  Description of Artificial Sequence: Synthetic oligonucleotide
  Antisense strand to SEQ ID NO: 763274
ucucacauauggaucuaca

SEQ ID NO: 763276 - RNA, 19 nt, Artificial Sequence
  Description of Artificial Sequence: Synthetic oligonucleotide
  Sense strand starting at position 2873 of SEQ ID NO: 587054
guagauccauaugugagau

SEQ ID NO: 763277 - RNA, 19 nt, Artificial Sequence
  Description of Artificial Sequence: Synthetic oligonucleotide
  Antisense strand to SEQ ID NO: 763276
aucucacauauggaucuac

SEQ ID NO: 763278 - RNA, 19 nt, Artificial Sequence
  Description of Artificial Sequence: Synthetic oligonucleotide
  Sense strand starting at position 2883 of SEQ ID NO: 587054
augugagauaaugagcuuu

SEQ ID NO: 763279 - RNA, 19 nt, Artificial Sequence
  Description of Artificial Sequence: Synthetic oligonucleotide
  Antisense strand to SEQ ID NO: 763278
aaagcucauuaucucacau

SEQ ID NO: 763280 - RNA, 19 nt, Artificial Sequence
  Description of Artificial Sequence: Synthetic oligonucleotide
  Sense strand starting at position 2885 of SEQ ID NO: 587054
gugagauaaugagcuuucu

SEQ ID NO: 763281 - RNA, 19 nt, Artificial Sequence
  Description of Artificial Sequence: Synthetic oligonucleotide
  Antisense strand to SEQ ID NO: 763280
agaaagcucauuaucucac

SEQ ID NO: 763282 - RNA, 19 nt, Artificial Sequence
  Description of Artificial Sequence: Synthetic oligonucleotide
  Sense strand starting at position 2948 of SEQ ID NO: 587054
gacagucaguauguaucaa

SEQ ID NO: 763283 - RNA, 19 nt, Artificial Sequence
  Description of Artificial Sequence: Synthetic oligonucleotide
  Antisense strand to SEQ ID NO: 763282
uugauacauacugacuguc

SEQ ID NO: 763284 - RNA, 19 nt, Artificial Sequence
  Description of Artificial Sequence: Synthetic oligonucleotide
  Sense strand starting at position 3053 of SEQ ID NO: 587054
ggguaugagguguauccau

SEQ ID NO: 763285 - RNA, 19 nt, Artificial Sequence
  Description of Artificial Sequence: Synthetic oligonucleotide
  Antisense strand to SEQ ID NO: 763284
auggauacaccucauaccc

SEQ ID NO: 763286 - RNA, 19 nt, Artificial Sequence
  Description of Artificial Sequence: Synthetic oligonucleotide
  Sense strand starting at position 3166 of SEQ ID NO: 587054
ggugucuuccauuaacacu

SEQ ID NO: 763287 - RNA, 19 nt, Artificial Sequence
  Description of Artificial Sequence: Synthetic oligonucleotide
  Antisense strand to SEQ ID NO: 763286
aguguuaauggaagacacc

SEQ ID NO: 763288 - RNA, 19 nt, Artificial Sequence
  Description of Artificial Sequence: Synthetic oligonucleotide
  Sense strand starting at position 3262 of SEQ ID NO: 587054
aguccaccuguggagauau

SEQ ID NO: 763289 - RNA, 19 nt, Artificial Sequence
  Description of Artificial Sequence: Synthetic oligonucleotide
  Antisense strand to SEQ ID NO: 763288
auaucuccacagguggacu

SEQ ID NO: 763290 - RNA, 19 nt, Artificial Sequence
  Description of Artificial Sequence: Synthetic oligonucleotide
  Sense strand starting at position 3372 of SEQ ID NO: 587054
uguuauacgcggagugaua

SEQ ID NO: 763291 - RNA, 19 nt, Artificial Sequence
  Description of Artificial Sequence: Synthetic oligonucleotide
  Antisense strand to SEQ ID NO: 763290
uaucacuccgcguauaaca

SEQ ID NO: 763292 - RNA, 19 nt, Artificial Sequence
  Description of Artificial Sequence: Synthetic oligonucleotide
  Sense strand starting at position 3427 of SEQ ID NO: 587054
gguauuguaauaggaugua

SEQ ID NO: 763293 - RNA, 19 nt, Artificial Sequence
  Description of Artificial Sequence: Synthetic oligonucleotide
  Antisense strand to SEQ ID NO: 763292
uacauccuauuacaauacc

SEQ ID NO: 763294 - RNA, 19 nt, Artificial Sequence
  Description of Artificial Sequence: Synthetic oligonucleotide
  Sense strand starting at position 3430 of SEQ ID NO: 587054
auuguaauaggauguaaac

SEQ ID NO: 763295 - RNA, 19 nt, Artificial Sequence
  Description of Artificial Sequence: Synthetic oligonucleotide
  Antisense strand to SEQ ID NO: 763294
guuuacauccuauuacaau

SEQ ID NO: 763296 - RNA, 19 nt, Artificial Sequence
  Description of Artificial Sequence: Synthetic oligonucleotide
  Sense strand starting at position 3539 of SEQ ID NO: 587054
guaguuugagagcauggau

SEQ ID NO: 763297 - RNA, 19 nt, Artificial Sequence
  Description of Artificial Sequence: Synthetic oligonucleotide
  Antisense strand to SEQ ID NO: 763296
auccaugcucucaaacuac

SEQ ID NO: 763298 - RNA, 19 nt, Artificial Sequence
  Description of Artificial Sequence: Synthetic oligonucleotide
  Sense strand starting at position 3748 of SEQ ID NO: 587054
gaauaagucuuccugggag

SEQ ID NO: 763299 - RNA, 19 nt, Artificial Sequence
  Description of Artificial Sequence: Synthetic oligonucleotide
  Antisense strand to SEQ ID NO: 763298
cucccaggaagacuuauuc

SEQ ID NO: 763300 - RNA, 19 nt, Artificial Sequence
  Description of Artificial Sequence: Synthetic oligonucleotide
  Sense strand starting at position 3750 of SEQ ID NO: 587054
auaagucuuccugggagaa

SEQ ID NO: 763301 - RNA, 19 nt, Artificial Sequence
  Description of Artificial Sequence: Synthetic oligonucleotide
  Antisense strand to SEQ ID NO: 763300
uucucccaggaagacuuau

SEQ ID NO: 763302 - RNA, 19 nt, Artificial Sequence
  Description of Artificial Sequence: Synthetic oligonucleotide
  Sense strand starting at position 3751 of SEQ ID NO: 587054
uaagucuuccugggagaau

SEQ ID NO: 763303 - RNA, 19 nt, Artificial Sequence
  Description of Artificial Sequence: Synthetic oligonucleotide
  Antisense strand to SEQ ID NO: 763302
auucucccaggaagacuua

SEQ ID NO: 763304 - RNA, 19 nt, Artificial Sequence
  Description of Artificial Sequence: Synthetic oligonucleotide
  Sense strand starting at position 3754 of SEQ ID NO: 587054
gucuuccugggagaauguu

SEQ ID NO: 763305 - RNA, 19 nt, Artificial Sequence
  Description of Artificial Sequence: Synthetic oligonucleotide
  Antisense strand to SEQ ID NO: 763304
aacauucucccaggaagac

SEQ ID NO: 763306 - RNA, 19 nt, Artificial Sequence
  Description of Artificial Sequence: Synthetic oligonucleotide
  Sense strand starting at position 3762 of SEQ ID NO: 587054
gggagaauguugcuguaag

SEQ ID NO: 763307 - RNA, 19 nt, Artificial Sequence
  Description of Artificial Sequence: Synthetic oligonucleotide
  Antisense strand to SEQ ID NO: 763306
cuuacagcaacauucuccc

SEQ ID NO: 763308 - RNA, 19 nt, Artificial Sequence
  Description of Artificial Sequence: Synthetic oligonucleotide
  Sense strand starting at position 3817 of SEQ ID NO: 587054
ggagccauauggccugaaa

SEQ ID NO: 763309 - RNA, 19 nt, Artificial Sequence
  Description of Artificial Sequence: Synthetic oligonucleotide
  Antisense strand to SEQ ID NO: 763308
uuucaggccauauggcucc

SEQ ID NO: 763310 - RNA, 19 nt, Artificial Sequence
  Description of Artificial Sequence: Synthetic oligonucleotide
  Sense strand starting at position 3948 of SEQ ID NO: 587054
gucucaaaggguuauggau

SEQ ID NO: 763311 - RNA, 19 nt, Artificial Sequence
  Description of Artificial Sequence: Synthetic oligonucleotide
  Antisense strand to SEQ ID NO: 763310
auccauaacccuuugagac

SEQ ID NO: 763312 - RNA, 19 nt, Artificial Sequence
  Description of Artificial Sequence: Synthetic oligonucleotide
  Sense strand starting at position 3972 of SEQ ID NO: 587054
cugauaccugcagagcaau

SEQ ID NO: 763313 - RNA, 19 nt, Artificial Sequence
  Description of Artificial Sequence: Synthetic oligonucleotide
  Antisense strand to SEQ ID NO: 763312
auugcucugcagguaucag

SEQ ID NO: 763314 - RNA, 19 nt, Artificial Sequence
  Description of Artificial Sequence: Synthetic oligonucleotide
  Sense strand starting at position 609 of SEQ ID NO: 587055
gagcucagguucucaggaa

SEQ ID NO: 763315 - RNA, 19 nt, Artificial Sequence
  Description of Artificial Sequence: Synthetic oligonucleotide
  Antisense strand to SEQ ID NO: 763314
uuccugagaaccugagcuc

SEQ ID NO: 763316 - RNA, 19 nt, Artificial Sequence
  Description of Artificial Sequence: Synthetic oligonucleotide
  Sense strand starting at position 610 of SEQ ID NO: 587055
agcucagguucucaggaau

SEQ ID NO: 763317 - RNA, 19 nt, Artificial Sequence
  Description of Artificial Sequence: Synthetic oligonucleotide
  Antisense strand to SEQ ID NO: 763316
auuccugagaaccugagcu

SEQ ID NO: 763318 - RNA, 19 nt, Artificial Sequence
  Description of Artificial Sequence: Synthetic oligonucleotide
  Sense strand starting at position 634 of SEQ ID NO: 587055
acaucuucuucccagguua

SEQ ID NO: 763319 - RNA, 19 nt, Artificial Sequence
  Description of Artificial Sequence: Synthetic oligonucleotide
  Antisense strand to SEQ ID NO: 763318
uaaccugggaagaagaugu

SEQ ID NO: 763320 - RNA, 19 nt, Artificial Sequence
  Description of Artificial Sequence: Synthetic oligonucleotide
  Sense strand starting at position 648 of SEQ ID NO: 587055
gguuaaaggucaucagguu

SEQ ID NO: 763321 - RNA, 19 nt, Artificial Sequence
  Description of Artificial Sequence: Synthetic oligonucleotide
  Antisense strand to SEQ ID NO: 763320
aaccugaugaccuuuaacc

SEQ ID NO: 763322 - RNA, 19 nt, Artificial Sequence
  Description of Artificial Sequence: Synthetic oligonucleotide
  Sense strand starting at position 649 of SEQ ID NO: 587055
guuaaaggucaucagguuu

SEQ ID NO: 763323 - RNA, 19 nt, Artificial Sequence
  Description of Artificial Sequence: Synthetic oligonucleotide
  Antisense strand to SEQ ID NO: 763322
aaaccugaugaccuuuaac

SEQ ID NO: 763324 - RNA, 19 nt, Artificial Sequence
  Description of Artificial Sequence: Synthetic oligonucleotide
  Sense strand starting at position 716 of SEQ ID NO: 587055
gcaccuuuggcccaaggau

SEQ ID NO: 763325 - RNA, 19 nt, Artificial Sequence
  Description of Artificial Sequence: Synthetic oligonucleotide
  Antisense strand to SEQ ID NO: 763324
auccuugggccaaaggugc

SEQ ID NO: 763326 - RNA, 19 nt, Artificial Sequence
  Description of Artificial Sequence: Synthetic oligonucleotide
  Sense strand starting at position 755 of SEQ ID NO: 587055
guaggugagucucaagaag

SEQ ID NO: 763327 - RNA, 19 nt, Artificial Sequence
  Description of Artificial Sequence: Synthetic oligonucleotide
  Antisense strand to SEQ ID NO: 763326
cuucuugagacucaccuac

SEQ ID NO: 763328 - RNA, 19 nt, Artificial Sequence
  Description of Artificial Sequence: Synthetic oligonucleotide
  Sense strand starting at position 1014 of SEQ ID NO: 587055
ucuggaucuuguuucucau

SEQ ID NO: 763329 - RNA, 19 nt, Artificial Sequence
  Description of Artificial Sequence: Synthetic oligonucleotide
  Antisense strand to SEQ ID NO: 763328
augagaaacaagauccaga

SEQ ID NO: 763330 - RNA, 19 nt, Artificial Sequence
  Description of Artificial Sequence: Synthetic oligonucleotide
  Sense strand starting at position 1178 of SEQ ID NO: 587055
gagcucaguccagacaauu

SEQ ID NO: 763331 - RNA, 19 nt, Artificial Sequence
  Description of Artificial Sequence: Synthetic oligonucleotide
  Antisense strand to SEQ ID NO: 763330
aauugucuggacugagcuc

SEQ ID NO: 763332 - RNA, 19 nt, Artificial Sequence
  Description of Artificial Sequence: Synthetic oligonucleotide
  Sense strand starting at position 1187 of SEQ ID NO: 587055
ccagacaauuccucccgua

SEQ ID NO: 763333 - RNA, 19 nt, Artificial Sequence
  Description of Artificial Sequence: Synthetic oligonucleotide
  Antisense strand to SEQ ID NO: 763332
uacgggaggaauugucugg

SEQ ID NO: 763334 - RNA, 19 nt, Artificial Sequence
  Description of Artificial Sequence: Synthetic oligonucleotide
  Sense strand starting at position 1190 of SEQ ID NO: 587055
gacaauuccucccguagcu

SEQ ID NO: 763335 - RNA, 19 nt, Artificial Sequence
  Description of Artificial Sequence: Synthetic oligonucleotide
  Antisense strand to SEQ ID NO: 763334
agcuacgggaggaauuguc

SEQ ID NO: 763336 - RNA, 19 nt, Artificial Sequence
  Description of Artificial Sequence: Synthetic oligonucleotide
  Sense strand starting at position 1304 of SEQ ID NO: 587055
ccugguucuccuugaugca

SEQ ID NO: 763337 - RNA, 19 nt, Artificial Sequence
  Description of Artificial Sequence: Synthetic oligonucleotide
  Antisense strand to SEQ ID NO: 763336
ugcaucaaggagaaccagg

SEQ ID NO: 763338 - RNA, 19 nt, Artificial Sequence
  Description of Artificial Sequence: Synthetic oligonucleotide
  Sense strand starting at position 1532 of SEQ ID NO: 587055
gcucucuucugggaaggga

SEQ ID NO: 763339 - RNA, 19 nt, Artificial Sequence
  Description of Artificial Sequence: Synthetic oligonucleotide
  Antisense strand to SEQ ID NO: 763338
ucccuucccagaagagagc

SEQ ID NO: 763340 - RNA, 19 nt, Artificial Sequence
  Description of Artificial Sequence: Synthetic oligonucleotide
  Sense strand starting at position 2197 of SEQ ID NO: 587055
ccgucaugcugagagcaaa

SEQ ID NO: 763341 - RNA, 19 nt, Artificial Sequence
  Description of Artificial Sequence: Synthetic oligonucleotide
  Antisense strand to SEQ ID NO: 763340
uuugcucucagcaugacgg

SEQ ID NO: 763342 - RNA, 19 nt, Artificial Sequence
  Description of Artificial Sequence: Synthetic oligonucleotide
  Sense strand starting at position 2231 of SEQ ID NO: 587055
gugacaccugcuugcaaca

SEQ ID NO: 763343 - RNA, 19 nt, Artificial Sequence
  Description of Artificial Sequence: Synthetic oligonucleotide
  Antisense strand to SEQ ID NO: 763342
uguugcaagcaggugucac

SEQ ID NO: 763344 - RNA, 19 nt, Artificial Sequence
  Description of Artificial Sequence: Synthetic oligonucleotide
  Sense strand starting at position 2285 of SEQ ID NO: 587055
gggaguuagagcugcuucu

SEQ ID NO: 763345 - RNA, 19 nt, Artificial Sequence
  Description of Artificial Sequence: Synthetic oligonucleotide
  Antisense strand to SEQ ID NO: 763344
agaagcagcucuaacuccc

SEQ ID NO: 763346 - RNA, 19 nt, Artificial Sequence
  Description of Artificial Sequence: Synthetic oligonucleotide
  Sense strand starting at position 2298 of SEQ ID NO: 587055
gcuucucucgcuuggauuu

SEQ ID NO: 763347 - RNA, 19 nt, Artificial Sequence
  Description of Artificial Sequence: Synthetic oligonucleotide
  Antisense strand to SEQ ID NO: 763346
aaauccaagcgagagaagc

SEQ ID NO: 763348 - RNA, 19 nt, Artificial Sequence
  Description of Artificial Sequence: Synthetic oligonucleotide
  Sense strand starting at position 2807 of SEQ ID NO: 587055
cugccagcuuuggagaagu

SEQ ID NO: 763349 - RNA, 19 nt, Artificial Sequence
  Description of Artificial Sequence: Synthetic oligonucleotide
  Antisense strand to SEQ ID NO: 763348
acuucuccaaagcuggcag

SEQ ID NO: 763350 - RNA, 19 nt, Artificial Sequence
  Description of Artificial Sequence: Synthetic oligonucleotide
  Sense strand starting at position 3187 of SEQ ID NO: 587055
uuucuagaaacguggauag

SEQ ID NO: 763351 - RNA, 19 nt, Artificial Sequence
  Description of Artificial Sequence: Synthetic oligonucleotide
  Antisense strand to SEQ ID NO: 763350
cuauccacguuucuagaaa

SEQ ID NO: 763352 - RNA, 19 nt, Artificial Sequence
  Description of Artificial Sequence: Synthetic oligonucleotide
  Sense strand starting at position 3220 of SEQ ID NO: 587055
gggugagaaucucuccuug

SEQ ID NO: 763353 - RNA, 19 nt, Artificial Sequence
  Description of Artificial Sequence: Synthetic oligonucleotide
  Antisense strand to SEQ ID NO: 763352
caaggagagauucucaccc

SEQ ID NO: 763354 - RNA, 19 nt, Artificial Sequence
  Description of Artificial Sequence: Synthetic oligonucleotide
  Sense strand starting at position 3222 of SEQ ID NO: 587055
gugagaaucucuccuuggu

SEQ ID NO: 763355 - RNA, 19 nt, Artificial Sequence
  Description of Artificial Sequence: Synthetic oligonucleotide
  Antisense strand to SEQ ID NO: 763354
accaaggagagauucucac

SEQ ID NO: 763356 - RNA, 19 nt, Artificial Sequence
  Description of Artificial Sequence: Synthetic oligonucleotide
  Sense strand starting at position 3225 of SEQ ID NO: 587055
agaaucucuccuuggugaa

SEQ ID NO: 763357 - RNA, 19 nt, Artificial Sequence
  Description of Artificial Sequence: Synthetic oligonucleotide
  Antisense strand to SEQ ID NO: 763356
uucaccaaggagagauucu

SEQ ID NO: 763358 - RNA, 19 nt, Artificial Sequence
  Description of Artificial Sequence: Synthetic oligonucleotide
  Sense strand starting at position 3226 of SEQ ID NO: 587055
gaaucucuccuuggugaac

SEQ ID NO: 763359 - RNA, 19 nt, Artificial Sequence
  Description of Artificial Sequence: Synthetic oligonucleotide
  Antisense strand to SEQ ID NO: 763358
guucaccaaggagagauuc

SEQ ID NO: 763360 - RNA, 19 nt, Artificial Sequence
  Description of Artificial Sequence: Synthetic oligonucleotide
  Sense strand starting at position 3374 of SEQ ID NO: 587055
cuugguaucucugggacua

SEQ ID NO: 763361 - RNA, 19 nt, Artificial Sequence
  Description of Artificial Sequence: Synthetic oligonucleotide
  Antisense strand to SEQ ID NO: 763360
uagucccagagauaccaag

SEQ ID NO: 763362 - RNA, 19 nt, Artificial Sequence
  Description of Artificial Sequence: Synthetic oligonucleotide
  Sense strand starting at position 3375 of SEQ ID NO: 587055
uugguaucucugggacuag

SEQ ID NO: 763363 - RNA, 19 nt, Artificial Sequence
  Description of Artificial Sequence: Synthetic oligonucleotide
  Antisense strand to SEQ ID NO: 763362
cuagucccagagauaccaa

SEQ ID NO: 763364 - RNA, 19 nt, Artificial Sequence
  Description of Artificial Sequence: Synthetic oligonucleotide
  Sense strand starting at position 3416 of SEQ ID NO: 587055
ugugacauccucugugaac

SEQ ID NO: 763365 - RNA, 19 nt, Artificial Sequence
  Description of Artificial Sequence: Synthetic oligonucleotide
  Antisense strand to SEQ ID NO: 763364
guucacagaggaugucaca

SEQ ID NO: 763366 - RNA, 19 nt, Artificial Sequence
  Description of Artificial Sequence: Synthetic oligonucleotide
  Sense strand starting at position 3418 of SEQ ID NO: 587055
ugacauccucugugaacca

SEQ ID NO: 763367 - RNA, 19 nt, Artificial Sequence
  Description of Artificial Sequence: Synthetic oligonucleotide
  Antisense strand to SEQ ID NO: 763366
ugguucacagaggauguca

SEQ ID NO: 763368 - RNA, 19 nt, Artificial Sequence
  Description of Artificial Sequence: Synthetic oligonucleotide
  Sense strand starting at position 3469 of SEQ ID NO: 587055
cuccaaagggucuaaguca

SEQ ID NO: 763369 - RNA, 19 nt, Artificial Sequence
  Description of Artificial Sequence: Synthetic oligonucleotide
  Antisense strand to SEQ ID NO: 763368
ugacuuagacccuuuggag

SEQ ID NO: 763370 - RNA, 19 nt, Artificial Sequence
  Description of Artificial Sequence: Synthetic oligonucleotide
  Sense strand starting at position 3631 of SEQ ID NO: 587055
acaggcacuugggaagaau

SEQ ID NO: 763371 - RNA, 19 nt, Artificial Sequence
  Description of Artificial Sequence: Synthetic oligonucleotide
  Antisense strand to SEQ ID NO: 763370
auucuucccaagugccugu

SEQ ID NO: 763372 - RNA, 19 nt, Artificial Sequence
  Description of Artificial Sequence: Synthetic oligonucleotide
  Sense strand starting at position 3700 of SEQ ID NO: 587055
ccagacaagccuggguaua

SEQ ID NO: 763373 - RNA, 19 nt, Artificial Sequence
  Description of Artificial Sequence: Synthetic oligonucleotide
  Antisense strand to SEQ ID NO: 763372
uauacccaggcuugucugg

SEQ ID NO: 763374 - RNA, 19 nt, Artificial Sequence
  Description of Artificial Sequence: Synthetic oligonucleotide
  Sense strand starting at position 3805 of SEQ ID NO: 587055
gauccaugauguuugugau

SEQ ID NO: 763375 - RNA, 19 nt, Artificial Sequence
  Description of Artificial Sequence: Synthetic oligonucleotide
  Antisense strand to SEQ ID NO: 763374
aucacaaacaucauggauc

SEQ ID NO: 763376 - RNA, 19 nt, Artificial Sequence
  Description of Artificial Sequence: Synthetic oligonucleotide
  Sense strand starting at position 3806 of SEQ ID NO: 587055
auccaugauguuugugaug

SEQ ID NO: 763377 - RNA, 19 nt, Artificial Sequence
  Description of Artificial Sequence: Synthetic oligonucleotide
  Antisense strand to SEQ ID NO: 763376
caucacaaacaucauggau

SEQ ID NO: 763378 - RNA, 19 nt, Artificial Sequence
  Description of Artificial Sequence: Synthetic oligonucleotide
  Sense strand starting at position 3808 of SEQ ID NO: 587055
ccaugauguuugugaugga

SEQ ID NO: 763379 - RNA, 19 nt, Artificial Sequence
  Description of Artificial Sequence: Synthetic oligonucleotide
  Antisense strand to SEQ ID NO: 763378
uccaucacaaacaucaugg

SEQ ID NO: 763380 - RNA, 19 nt, Artificial Sequence
  Description of Artificial Sequence: Synthetic oligonucleotide
  Sense strand starting at position 3809 of SEQ ID NO: 587055
caugauguuugugauggaa

SEQ ID NO: 763381 - RNA, 19 nt, Artificial Sequence
  Description of Artificial Sequence: Synthetic oligonucleotide
  Antisense strand to SEQ ID NO: 763380
uuccaucacaaacaucaug

SEQ ID NO: 763382 - RNA, 19 nt, Artificial Sequence
  Description of Artificial Sequence: Synthetic oligonucleotide
  Sense strand starting at position 3811 of SEQ ID NO: 587055
ugauguuugugauggaauc

SEQ ID NO: 763383 - RNA, 19 nt, Artificial Sequence
  Description of Artificial Sequence: Synthetic oligonucleotide
  Antisense strand to SEQ ID NO: 763382
gauuccaucacaaacauca

SEQ ID NO: 763384 - RNA, 19 nt, Artificial Sequence
  Description of Artificial Sequence: Synthetic oligonucleotide
  Sense strand starting at position 3812 of SEQ ID NO: 587055
gauguuugugauggaaucu

SEQ ID NO: 763385 - RNA, 19 nt, Artificial Sequence
  Description of Artificial Sequence: Synthetic oligonucleotide
  Antisense strand to SEQ ID NO: 763384
agauuccaucacaaacauc

SEQ ID NO: 763386 - RNA, 19 nt, Artificial Sequence
  Description of Artificial Sequence: Synthetic oligonucleotide
  Sense strand starting at position 3823 of SEQ ID NO: 587055
uggaaucuccaaggauagu

SEQ ID NO: 763387 - RNA, 19 nt, Artificial Sequence
  Description of Artificial Sequence: Synthetic oligonucleotide
  Antisense strand to SEQ ID NO: 763386
acuauccuuggagauucca

SEQ ID NO: 763388 - RNA, 19 nt, Artificial Sequence
  Description of Artificial Sequence: Synthetic oligonucleotide
  Sense strand starting at position 3834 of SEQ ID NO: 587055
aggauagucuucucccauu

SEQ ID NO: 763389 - RNA, 19 nt, Artificial Sequence
  Description of Artificial Sequence: Synthetic oligonucleotide
  Antisense strand to SEQ ID NO: 763388
aaugggagaagacuauccu

SEQ ID NO: 763390 - RNA, 19 nt, Artificial Sequence
  Description of Artificial Sequence: Synthetic oligonucleotide
  Sense strand starting at position 3917 of SEQ ID NO: 587055
ccaggaccucuaugaauac

SEQ ID NO: 763391 - RNA, 19 nt, Artificial Sequence
  Description of Artificial Sequence: Synthetic oligonucleotide
  Antisense strand to SEQ ID NO: 763390
guauucauagagguccugg

SEQ ID NO: 763392 - RNA, 19 nt, Artificial Sequence
  Description of Artificial Sequence: Synthetic oligonucleotide
  Sense strand starting at position 3946 of SEQ ID NO: 587055
agugaacuucacgauuggu

SEQ ID NO: 763393 - RNA, 19 nt, Artificial Sequence
  Description of Artificial Sequence: Synthetic oligonucleotide
  Antisense strand to SEQ ID NO: 763392
accaaucgugaaguucacu

SEQ ID NO: 763394 - RNA, 19 nt, Artificial Sequence
  Description of Artificial Sequence: Synthetic oligonucleotide
  Sense strand starting at position 211 of SEQ ID NO: 587056
guccaugugacauggaguu

SEQ ID NO: 763395 - RNA, 19 nt, Artificial Sequence
  Description of Artificial Sequence: Synthetic oligonucleotide
  Antisense strand to SEQ ID NO: 763394
aacuccaugucacauggac

SEQ ID NO: 763396 - RNA, 19 nt, Artificial Sequence
  Description of Artificial Sequence: Synthetic oligonucleotide
  Sense strand starting at position 334 of SEQ ID NO: 587056
aagcuuggcccauggaaga

SEQ ID NO: 763397 - RNA, 19 nt, Artificial Sequence
  Description of Artificial Sequence: Synthetic oligonucleotide
  Antisense strand to SEQ ID NO: 763396
ucuuccaugggccaagcuu

SEQ ID NO: 763398 - RNA, 19 nt, Artificial Sequence
  Description of Artificial Sequence: Synthetic oligonucleotide
  Sense strand starting at position 380 of SEQ ID NO: 587056
augugcagcccugaacauu

SEQ ID NO: 763399 - RNA, 19 nt, Artificial Sequence
  Description of Artificial Sequence: Synthetic oligonucleotide
  Antisense strand to SEQ ID NO: 763398
aauguucagggcugcacau

SEQ ID NO: 763400 - RNA, 19 nt, Artificial Sequence
  Description of Artificial Sequence: Synthetic oligonucleotide
  Sense strand starting at position 466 of SEQ ID NO: 587056
accucuaaagucuggauaa

SEQ ID NO: 763401 - RNA, 19 nt, Artificial Sequence
  Description of Artificial Sequence: Synthetic oligonucleotide
  Antisense strand to SEQ ID NO: 763400
uuauccagacuuuagaggu

SEQ ID NO: 763402 - RNA, 19 nt, Artificial Sequence
  Description of Artificial Sequence: Synthetic oligonucleotide
  Sense strand starting at position 467 of SEQ ID NO: 587056
ccucuaaagucuggauaac

SEQ ID NO: 763403 - RNA, 19 nt, Artificial Sequence
  Description of Artificial Sequence: Synthetic oligonucleotide
  Antisense strand to SEQ ID NO: 763402
guuauccagacuuuagagg

SEQ ID NO: 763404 - RNA, 19 nt, Artificial Sequence
  Description of Artificial Sequence: Synthetic oligonucleotide
  Sense strand starting at position 596 of SEQ ID NO: 587056
agaagauguuucccaacuc

SEQ ID NO: 763405 - RNA, 19 nt, Artificial Sequence
  Description of Artificial Sequence: Synthetic oligonucleotide
  Antisense strand to SEQ ID NO: 763404
gaguugggaaacaucuucu

SEQ ID NO: 763406 - RNA, 19 nt, Artificial Sequence
  Description of Artificial Sequence: Synthetic oligonucleotide
  Sense strand starting at position 616 of SEQ ID NO: 587056
acucuuagccacugugauu

SEQ ID NO: 763407 - RNA, 19 nt, Artificial Sequence
  Description of Artificial Sequence: Synthetic oligonucleotide
  Antisense strand to SEQ ID NO: 763406
aaucacaguggcuaagagu

SEQ ID NO: 763408 - RNA, 19 nt, Artificial Sequence
  Description of Artificial Sequence: Synthetic oligonucleotide
  Sense strand starting at position 639 of SEQ ID NO: 587056
ccacaucaagggugcaauu

SEQ ID NO: 763409 - RNA, 19 nt, Artificial Sequence
  Description of Artificial Sequence: Synthetic oligonucleotide
  Antisense strand to SEQ ID NO: 763408
aauugcacccuugaugugg

SEQ ID NO: 763410 - RNA, 19 nt, Artificial Sequence
  Description of Artificial Sequence: Synthetic oligonucleotide
  Sense strand starting at position 648 of SEQ ID NO: 587056
gggugcaauuggcuagaau

SEQ ID NO: 763411 - RNA, 19 nt, Artificial Sequence
  Description of Artificial Sequence: Synthetic oligonucleotide
  Antisense strand to SEQ ID NO: 763410
auucuagccaauugcaccc

SEQ ID NO: 763412 - RNA, 19 nt, Artificial Sequence
  Description of Artificial Sequence: Synthetic oligonucleotide
  Sense strand starting at position 649 of SEQ ID NO: 587056
ggugcaauuggcuagaaug

SEQ ID NO: 763413 - RNA, 19 nt, Artificial Sequence
  Description of Artificial Sequence: Synthetic oligonucleotide
  Antisense strand to SEQ ID NO: 763412
cauucuagccaauugcacc

SEQ ID NO: 763414 - RNA, 19 nt, Artificial Sequence
  Description of Artificial Sequence: Synthetic oligonucleotide
  Sense strand starting at position 725 of SEQ ID NO: 587056
uuugcaauuuaggacacau

SEQ ID NO: 763415 - RNA, 19 nt, Artificial Sequence
  Description of Artificial Sequence: Synthetic oligonucleotide
  Antisense strand to SEQ ID NO: 763414
auguguccuaaauugcaaa

SEQ ID NO: 763416 - RNA, 19 nt, Artificial Sequence
  Description of Artificial Sequence: Synthetic oligonucleotide
  Sense strand starting at position 810 of SEQ ID NO: 587056
uagguaaucuuguccaagu

SEQ ID NO: 763417 - RNA, 19 nt, Artificial Sequence
  Description of Artificial Sequence: Synthetic oligonucleotide
  Antisense strand to SEQ ID NO: 763416
acuuggacaagauuaccua

SEQ ID NO: 763418 - RNA, 19 nt, Artificial Sequence
  Description of Artificial Sequence: Synthetic oligonucleotide
  Sense strand starting at position 811 of SEQ ID NO: 587056
agguaaucuuguccaagug

SEQ ID NO: 763419 - RNA, 19 nt, Artificial Sequence
  Description of Artificial Sequence: Synthetic oligonucleotide
  Antisense strand to SEQ ID NO: 763418
cacuuggacaagauuaccu

SEQ ID NO: 763420 - RNA, 19 nt, Artificial Sequence
  Description of Artificial Sequence: Synthetic oligonucleotide
  Sense strand starting at position 967 of SEQ ID NO: 587056
agugguggauaguauucaa

SEQ ID NO: 763421 - RNA, 19 nt, Artificial Sequence
  Description of Artificial Sequence: Synthetic oligonucleotide
  Antisense strand to SEQ ID NO: 763420
uugaauacuauccaccacu

SEQ ID NO: 763422 - RNA, 19 nt, Artificial Sequence
  Description of Artificial Sequence: Synthetic oligonucleotide
  Sense strand starting at position 1004 of SEQ ID NO: 587056
ucccaucugucccucgaau

SEQ ID NO: 763423 - RNA, 19 nt, Artificial Sequence
  Description of Artificial Sequence: Synthetic oligonucleotide
  Antisense strand to SEQ ID NO: 763422
auucgagggacagauggga

SEQ ID NO: 763424 - RNA, 19 nt, Artificial Sequence
  Description of Artificial Sequence: Synthetic oligonucleotide
  Sense strand starting at position 1006 of SEQ ID NO: 587056
ccaucugucccucgaauag

SEQ ID NO: 763425 - RNA, 19 nt, Artificial Sequence
  Description of Artificial Sequence: Synthetic oligonucleotide
  Antisense strand to SEQ ID NO: 763424
cuauucgagggacagaugg

SEQ ID NO: 763426 - RNA, 19 nt, Artificial Sequence
  Description of Artificial Sequence: Synthetic oligonucleotide
  Sense strand starting at position 1013 of SEQ ID NO: 587056
ucccucgaauagucuuaaa

SEQ ID NO: 763427 - RNA, 19 nt, Artificial Sequence
  Description of Artificial Sequence: Synthetic oligonucleotide
  Antisense strand to SEQ ID NO: 763426
uuuaagacuauucgaggga

SEQ ID NO: 763428 - RNA, 19 nt, Artificial Sequence
  Description of Artificial Sequence: Synthetic oligonucleotide
  Sense strand starting at position 1016 of SEQ ID NO: 587056
cucgaauagucuuaaaucu

SEQ ID NO: 763429 - RNA, 19 nt, Artificial Sequence
  Description of Artificial Sequence: Synthetic oligonucleotide
  Antisense strand to SEQ ID NO: 763428
agauuuaagacuauucgag

SEQ ID NO: 763430 - RNA, 19 nt, Artificial Sequence
  Description of Artificial Sequence: Synthetic oligonucleotide
  Sense strand starting at position 1024 of SEQ ID NO: 587056
gucuuaaaucuggguccuu

SEQ ID NO: 763431 - RNA, 19 nt, Artificial Sequence
  Description of Artificial Sequence: Synthetic oligonucleotide
  Antisense strand to SEQ ID NO: 763430
aaggacccagauuuaagac

SEQ ID NO: 763432 - RNA, 19 nt, Artificial Sequence
  Description of Artificial Sequence: Synthetic oligonucleotide
  Sense strand starting at position 1025 of SEQ ID NO: 587056
ucuuaaaucuggguccuuu

SEQ ID NO: 763433 - RNA, 19 nt, Artificial Sequence
  Description of Artificial Sequence: Synthetic oligonucleotide
  Antisense strand to SEQ ID NO: 763432
aaaggacccagauuuaaga

SEQ ID NO: 763434 - RNA, 19 nt, Artificial Sequence
  Description of Artificial Sequence: Synthetic oligonucleotide
  Sense strand starting at position 1341 of SEQ ID NO: 587056
ggaauuguggcgcgaugac

SEQ ID NO: 763435 - RNA, 19 nt, Artificial Sequence
  Description of Artificial Sequence: Synthetic oligonucleotide
  Antisense strand to SEQ ID NO: 763434
gucaucgcgccacaauucc

SEQ ID NO: 763436 - RNA, 19 nt, Artificial Sequence
  Description of Artificial Sequence: Synthetic oligonucleotide
  Sense strand starting at position 2442 of SEQ ID NO: 587056
ccgagaugcuacuccucau

SEQ ID NO: 763437 - RNA, 19 nt, Artificial Sequence
  Description of Artificial Sequence: Synthetic oligonucleotide
  Antisense strand to SEQ ID NO: 763436
augaggaguagcaucucgg

SEQ ID NO: 763438 - RNA, 19 nt, Artificial Sequence
  Description of Artificial Sequence: Synthetic oligonucleotide
  Sense strand starting at position 2461 of SEQ ID NO: 587056
ucaagaacuguugagagcu

SEQ ID NO: 763439 - RNA, 19 nt, Artificial Sequence
  Description of Artificial Sequence: Synthetic oligonucleotide
  Antisense strand to SEQ ID NO: 763438
agcucucaacaguucuuga

SEQ ID NO: 763440 - RNA, 19 nt, Artificial Sequence
  Description of Artificial Sequence: Synthetic oligonucleotide
  Sense strand starting at position 2499 of SEQ ID NO: 587056
ggcgaaaggccucgaaauu

SEQ ID NO: 763441 - RNA, 19 nt, Artificial Sequence
  Description of Artificial Sequence: Synthetic oligonucleotide
  Antisense strand to SEQ ID NO: 763440
aauuucgaggccuuucgcc

SEQ ID NO: 763442 - RNA, 19 nt, Artificial Sequence
  Description of Artificial Sequence: Synthetic oligonucleotide
  Sense strand starting at position 2500 of SEQ ID NO: 587056
gcgaaaggccucgaaauuc

SEQ ID NO: 763443 - RNA, 19 nt, Artificial Sequence
  Description of Artificial Sequence: Synthetic oligonucleotide
  Antisense strand to SEQ ID NO: 763442
gaauuucgaggccuuucgc

SEQ ID NO: 763444 - RNA, 19 nt, Artificial Sequence
  Description of Artificial Sequence: Synthetic oligonucleotide
  Sense strand starting at position 2508 of SEQ ID NO: 587056
ccucgaaauuccucuugcu

SEQ ID NO: 763445 - RNA, 19 nt, Artificial Sequence
  Description of Artificial Sequence: Synthetic oligonucleotide
  Antisense strand to SEQ ID NO: 763444
agcaagaggaauuucgagg

SEQ ID NO: 763446 - RNA, 19 nt, Artificial Sequence
  Description of Artificial Sequence: Synthetic oligonucleotide
  Sense strand starting at position 2668 of SEQ ID NO: 587056
ucccuaguaagaugggauu

SEQ ID NO: 763447 - RNA, 19 nt, Artificial Sequence
  Description of Artificial Sequence: Synthetic oligonucleotide
  Antisense strand to SEQ ID NO: 763446
aaucccaucuuacuaggga

SEQ ID NO: 763448 - RNA, 19 nt, Artificial Sequence
  Description of Artificial Sequence: Synthetic oligonucleotide
  Sense strand starting at position 2671 of SEQ ID NO: 587056
cuaguaagaugggauuaca

SEQ ID NO: 763449 - RNA, 19 nt, Artificial Sequence
  Description of Artificial Sequence: Synthetic oligonucleotide
  Antisense strand to SEQ ID NO: 763448
uguaaucccaucuuacuag

SEQ ID NO: 763450 - RNA, 19 nt, Artificial Sequence
  Description of Artificial Sequence: Synthetic oligonucleotide
  Sense strand starting at position 2970 of SEQ ID NO: 587056
gggcaacuucuuugucacu

SEQ ID NO: 763451 - RNA, 19 nt, Artificial Sequence
  Description of Artificial Sequence: Synthetic oligonucleotide
  Antisense strand to SEQ ID NO: 763450
agugacaaagaaguugccc

SEQ ID NO: 763452 - RNA, 19 nt, Artificial Sequence
  Description of Artificial Sequence: Synthetic oligonucleotide
  Sense strand starting at position 3143 of SEQ ID NO: 587056
cuaugcuuccgcuuugcua

SEQ ID NO: 763453 - RNA, 19 nt, Artificial Sequence
  Description of Artificial Sequence: Synthetic oligonucleotide
  Antisense strand to SEQ ID NO: 763452
uagcaaagcggaagcauag

SEQ ID NO: 763454 - RNA, 19 nt, Artificial Sequence
  Description of Artificial Sequence: Synthetic oligonucleotide
  Sense strand starting at position 3261 of SEQ ID NO: 587056
uugacaucaaggcgucuaa

SEQ ID NO: 763455 - RNA, 19 nt, Artificial Sequence
  Description of Artificial Sequence: Synthetic oligonucleotide
  Antisense strand to SEQ ID NO: 763454
uuagacgccuugaugucaa

SEQ ID NO: 763456 - RNA, 19 nt, Artificial Sequence
  Description of Artificial Sequence: Synthetic oligonucleotide
  Sense strand starting at position 3436 of SEQ ID NO: 587056
cugugaacugcucacguga

SEQ ID NO: 763457 - RNA, 19 nt, Artificial Sequence
  Description of Artificial Sequence: Synthetic oligonucleotide
  Antisense strand to SEQ ID NO: 763456
ucacgugagcaguucacag

SEQ ID NO: 763458 - RNA, 19 nt, Artificial Sequence
  Description of Artificial Sequence: Synthetic oligonucleotide
  Sense strand starting at position 3574 of SEQ ID NO: 587056
ucuacaugauggugaguau

SEQ ID NO: 763459 - RNA, 19 nt, Artificial Sequence
  Description of Artificial Sequence: Synthetic oligonucleotide
  Antisense strand to SEQ ID NO: 763458
auacucaccaucauguaga

SEQ ID NO: 763460 - RNA, 19 nt, Artificial Sequence
  Description of Artificial Sequence: Synthetic oligonucleotide
  Sense strand starting at position 3577 of SEQ ID NO: 587056
acaugauggugaguaugua

SEQ ID NO: 763461 - RNA, 19 nt, Artificial Sequence
  Description of Artificial Sequence: Synthetic oligonucleotide
  Antisense strand to SEQ ID NO: 763460
uacauacucaccaucaugu

SEQ ID NO: 763462 - RNA, 19 nt, Artificial Sequence
  Description of Artificial Sequence: Synthetic oligonucleotide
  Sense strand starting at position 3578 of SEQ ID NO: 587056
caugauggugaguauguaa

SEQ ID NO: 763463 - RNA, 19 nt, Artificial Sequence
  Description of Artificial Sequence: Synthetic oligonucleotide
  Antisense strand to SEQ ID NO: 763462
uuacauacucaccaucaug

SEQ ID NO: 763464 - RNA, 19 nt, Artificial Sequence
  Description of Artificial Sequence: Synthetic oligonucleotide
  Sense strand starting at position 3581 of SEQ ID NO: 587056
gauggugaguauguaauca

SEQ ID NO: 763465 - RNA, 19 nt, Artificial Sequence
  Description of Artificial Sequence: Synthetic oligonucleotide
  Antisense strand to SEQ ID NO: 763464
ugauuacauacucaccauc

SEQ ID NO: 763466 - RNA, 19 nt, Artificial Sequence
  Description of Artificial Sequence: Synthetic oligonucleotide
  Sense strand starting at position 3585 of SEQ ID NO: 587056
gugaguauguaaucauaau

SEQ ID NO: 763467 - RNA, 19 nt, Artificial Sequence
  Description of Artificial Sequence: Synthetic oligonucleotide
  Antisense strand to SEQ ID NO: 763466
auuaugauuacauacucac

SEQ ID NO: 763468 - RNA, 19 nt, Artificial Sequence
  Description of Artificial Sequence: Synthetic oligonucleotide
  Sense strand starting at position 3664 of SEQ ID NO: 587056
cccucauucguggaaacau

SEQ ID NO: 763469 - RNA, 19 nt, Artificial Sequence
  Description of Artificial Sequence: Synthetic oligonucleotide
  Antisense strand to SEQ ID NO: 763468
auguuuccacgaaugaggg

SEQ ID NO: 763470 - RNA, 19 nt, Artificial Sequence
  Description of Artificial Sequence: Synthetic oligonucleotide
  Sense strand starting at position 3744 of SEQ ID NO: 587056
cugugagcuucccuaagaa

SEQ ID NO: 763471 - RNA, 19 nt, Artificial Sequence
  Description of Artificial Sequence: Synthetic oligonucleotide
  Antisense strand to SEQ ID NO: 763470
uucuuagggaagcucacag

SEQ ID NO: 763472 - RNA, 19 nt, Artificial Sequence
  Description of Artificial Sequence: Synthetic oligonucleotide
  Sense strand starting at position 3781 of SEQ ID NO: 587056
cugcuauguucagggaaug

SEQ ID NO: 763473 - RNA, 19 nt, Artificial Sequence
  Description of Artificial Sequence: Synthetic oligonucleotide
  Antisense strand to SEQ ID NO: 763472
cauucccugaacauagcag

SEQ ID NO: 763474 - RNA, 19 nt, Artificial Sequence
  Description of Artificial Sequence: Synthetic oligonucleotide
  Sense strand starting at position 976 of SEQ ID NO: 587057
agcuauugugucuacacua

SEQ ID NO: 763475 - RNA, 19 nt, Artificial Sequence
  Description of Artificial Sequence: Synthetic oligonucleotide
  Antisense strand to SEQ ID NO: 763474
uaguguagacacaauagcu

SEQ ID NO: 763476 - RNA, 19 nt, Artificial Sequence
  Description of Artificial Sequence: Synthetic oligonucleotide
  Sense strand starting at position 981 of SEQ ID NO: 587057
uugugucuacacuagcaau

SEQ ID NO: 763477 - RNA, 19 nt, Artificial Sequence
  Description of Artificial Sequence: Synthetic oligonucleotide
  Antisense strand to SEQ ID NO: 763476
auugcuaguguagacacaa

SEQ ID NO: 763478 - RNA, 19 nt, Artificial Sequence
  Description of Artificial Sequence: Synthetic oligonucleotide
  Sense strand starting at position 1009 of SEQ ID NO: 587057
ggcugugucagauaccaaa

SEQ ID NO: 763479 - RNA, 19 nt, Artificial Sequence
  Description of Artificial Sequence: Synthetic oligonucleotide
  Antisense strand to SEQ ID NO: 763478
uuugguaucugacacagcc

SEQ ID NO: 763480 - RNA, 19 nt, Artificial Sequence
  Description of Artificial Sequence: Synthetic oligonucleotide
  Sense strand starting at position 1038 of SEQ ID NO: 587057
gauauuucuuuguuugguu

SEQ ID NO: 763481 - RNA, 19 nt, Artificial Sequence
  Description of Artificial Sequence: Synthetic oligonucleotide
  Antisense strand to SEQ ID NO: 763480
aaccaaacaaagaaauauc

SEQ ID NO: 763482 - RNA, 19 nt, Artificial Sequence
  Description of Artificial Sequence: Synthetic oligonucleotide
  Sense strand starting at position 1077 of SEQ ID NO: 587057
auaaaucaucuguagaguc

SEQ ID NO: 763483 - RNA, 19 nt, Artificial Sequence
  Description of Artificial Sequence: Synthetic oligonucleotide
  Antisense strand to SEQ ID NO: 763482
gacucuacagaugauuuau

SEQ ID NO: 763484 - RNA, 19 nt, Artificial Sequence
  Description of Artificial Sequence: Synthetic oligonucleotide
  Sense strand starting at position 1104 of SEQ ID NO: 587057
uuccgaaauucucucuaug

SEQ ID NO: 763485 - RNA, 19 nt, Artificial Sequence
  Description of Artificial Sequence: Synthetic oligonucleotide
  Antisense strand to SEQ ID NO: 763484
cauagagagaauuucggaa

SEQ ID NO: 763486 - RNA, 19 nt, Artificial Sequence
  Description of Artificial Sequence: Synthetic oligonucleotide
  Sense strand starting at position 1106 of SEQ ID NO: 587057
ccgaaauucucucuauguc

SEQ ID NO: 763487 - RNA, 19 nt, Artificial Sequence
  Description of Artificial Sequence: Synthetic oligonucleotide
  Antisense strand to SEQ ID NO: 763486
gacauagagagaauuucgg

SEQ ID NO: 763488 - RNA, 19 nt, Artificial Sequence
  Description of Artificial Sequence: Synthetic oligonucleotide
  Sense strand starting at position 1107 of SEQ ID NO: 587057
cgaaauucucucuaugucu

SEQ ID NO: 763489 - RNA, 19 nt, Artificial Sequence
  Description of Artificial Sequence: Synthetic oligonucleotide
  Antisense strand to SEQ ID NO: 763488
agacauagagagaauuucg

SEQ ID NO: 763490 - RNA, 19 nt, Artificial Sequence
  Description of Artificial Sequence: Synthetic oligonucleotide
  Sense strand starting at position 2176 of SEQ ID NO: 587057
guacuuaggaccggaguua

SEQ ID NO: 763491 - RNA, 19 nt, Artificial Sequence
  Description of Artificial Sequence: Synthetic oligonucleotide
  Antisense strand to SEQ ID NO: 763490
uaacuccgguccuaaguac

SEQ ID NO: 763492 - RNA, 19 nt, Artificial Sequence
  Description of Artificial Sequence: Synthetic oligonucleotide
  Sense strand starting at position 2187 of SEQ ID NO: 587057
cggaguuagcauuaaccuu

SEQ ID NO: 763493 - RNA, 19 nt, Artificial Sequence
  Description of Artificial Sequence: Synthetic oligonucleotide
  Antisense strand to SEQ ID NO: 763492
aagguuaaugcuaacuccg

SEQ ID NO: 763494 - RNA, 19 nt, Artificial Sequence
  Description of Artificial Sequence: Synthetic oligonucleotide
  Sense strand starting at position 2264 of SEQ ID NO: 587057
gguaauuuaccuugugcgu

SEQ ID NO: 763495 - RNA, 19 nt, Artificial Sequence
  Description of Artificial Sequence: Synthetic oligonucleotide
  Antisense strand to SEQ ID NO: 763494
acgcacaagguaaauuacc

SEQ ID NO: 763496 - RNA, 19 nt, Artificial Sequence
  Description of Artificial Sequence: Synthetic oligonucleotide
  Sense strand starting at position 2325 of SEQ ID NO: 587057
cucuguagaucaucacaca

SEQ ID NO: 763497 - RNA, 19 nt, Artificial Sequence
  Description of Artificial Sequence: Synthetic oligonucleotide
  Antisense strand to SEQ ID NO: 763496
ugugugaugaucuacagag

SEQ ID NO: 763498 - RNA, 19 nt, Artificial Sequence
  Description of Artificial Sequence: Synthetic oligonucleotide
  Sense strand starting at position 2384 of SEQ ID NO: 587057
guguguccugcuuccauua

SEQ ID NO: 763499 - RNA, 19 nt, Artificial Sequence
  Description of Artificial Sequence: Synthetic oligonucleotide
  Antisense strand to SEQ ID NO: 763498
uaauggaagcaggacacac

SEQ ID NO: 763500 - RNA, 19 nt, Artificial Sequence
  Description of Artificial Sequence: Synthetic oligonucleotide
  Sense strand starting at position 2426 of SEQ ID NO: 587057
cccuguauucugcagaccu

SEQ ID NO: 763501 - RNA, 19 nt, Artificial Sequence
  Description of Artificial Sequence: Synthetic oligonucleotide
  Antisense strand to SEQ ID NO: 763500
aggucugcagaauacaggg

SEQ ID NO: 763502 - RNA, 19 nt, Artificial Sequence
  Description of Artificial Sequence: Synthetic oligonucleotide
  Sense strand starting at position 2445 of SEQ ID NO: 587057
gucagaaguguuagugugu

SEQ ID NO: 763503 - RNA, 19 nt, Artificial Sequence
  Description of Artificial Sequence: Synthetic oligonucleotide
  Antisense strand to SEQ ID NO: 763502
acacacuaacacuucugac

SEQ ID NO: 763504 - RNA, 19 nt, Artificial Sequence
  Description of Artificial Sequence: Synthetic oligonucleotide
  Sense strand starting at position 2451 of SEQ ID NO: 587057
aguguuaguguguauauuu

SEQ ID NO: 763505 - RNA, 19 nt, Artificial Sequence
  Description of Artificial Sequence: Synthetic oligonucleotide
  Antisense strand to SEQ ID NO: 763504
aaauauacacacuaacacu

SEQ ID NO: 763506 - RNA, 19 nt, Artificial Sequence
  Description of Artificial Sequence: Synthetic oligonucleotide
  Sense strand starting at position 2456 of SEQ ID NO: 587057
uaguguguauauuucuuga

SEQ ID NO: 763507 - RNA, 19 nt, Artificial Sequence
  Description of Artificial Sequence: Synthetic oligonucleotide
  Antisense strand to SEQ ID NO: 763506
ucaagaaauauacacacua

SEQ ID NO: 763508 - RNA, 19 nt, Artificial Sequence
  Description of Artificial Sequence: Synthetic oligonucleotide
  Sense strand starting at position 2570 of SEQ ID NO: 587057
cccagcauuuaccugguua

SEQ ID NO: 763509 - RNA, 19 nt, Artificial Sequence
  Description of Artificial Sequence: Synthetic oligonucleotide
  Antisense strand to SEQ ID NO: 763508
uaaccagguaaaugcuggg

SEQ ID NO: 763510 - RNA, 19 nt, Artificial Sequence
  Description of Artificial Sequence: Synthetic oligonucleotide
  Sense strand starting at position 2574 of SEQ ID NO: 587057
gcauuuaccugguuaugua

SEQ ID NO: 763511 - RNA, 19 nt, Artificial Sequence
  Description of Artificial Sequence: Synthetic oligonucleotide
  Antisense strand to SEQ ID NO: 763510
uacauaaccagguaaaugc

SEQ ID NO: 763512 - RNA, 19 nt, Artificial Sequence
  Description of Artificial Sequence: Synthetic oligonucleotide
  Sense strand starting at position 2677 of SEQ ID NO: 587057
cuaacaugguuccugaaac

SEQ ID NO: 763513 - RNA, 19 nt, Artificial Sequence
  Description of Artificial Sequence: Synthetic oligonucleotide
  Antisense strand to SEQ ID NO: 763512
guuucaggaaccauguuag

SEQ ID NO: 763514 - RNA, 19 nt, Artificial Sequence
  Description of Artificial Sequence: Synthetic oligonucleotide
  Sense strand starting at position 2695 of SEQ ID NO: 587057
cgugguaggucacuaacua

SEQ ID NO: 763515 - RNA, 19 nt, Artificial Sequence
  Description of Artificial Sequence: Synthetic oligonucleotide
  Antisense strand to SEQ ID NO: 763514
uaguuagugaccuaccacg

SEQ ID NO: 763516 - RNA, 19 nt, Artificial Sequence
  Description of Artificial Sequence: Synthetic oligonucleotide
  Sense strand starting at position 2737 of SEQ ID NO: 587057
ucaccacaccugugaagau

SEQ ID NO: 763517 - RNA, 19 nt, Artificial Sequence
  Description of Artificial Sequence: Synthetic oligonucleotide
  Antisense strand to SEQ ID NO: 763516
aucuucacaggugugguga

SEQ ID NO: 763518 - RNA, 19 nt, Artificial Sequence
  Description of Artificial Sequence: Synthetic oligonucleotide
  Sense strand starting at position 2790 of SEQ ID NO: 587057
guuaagucggaguagggua

SEQ ID NO: 763519 - RNA, 19 nt, Artificial Sequence
  Description of Artificial Sequence: Synthetic oligonucleotide
  Antisense strand to SEQ ID NO: 763518
uacccuacuccgacuuaac

SEQ ID NO: 763520 - RNA, 19 nt, Artificial Sequence
  Description of Artificial Sequence: Synthetic oligonucleotide
  Sense strand starting at position 2839 of SEQ ID NO: 587057
auacuugguccuugagcca

SEQ ID NO: 763521 - RNA, 19 nt, Artificial Sequence
  Description of Artificial Sequence: Synthetic oligonucleotide
  Antisense strand to SEQ ID NO: 763520
uggcucaaggaccaaguau

SEQ ID NO: 763522 - RNA, 19 nt, Artificial Sequence
  Description of Artificial Sequence: Synthetic oligonucleotide
  Sense strand starting at position 3039 of SEQ ID NO: 587057
ugagaauaacugugucugu

SEQ ID NO: 763523 - RNA, 19 nt, Artificial Sequence
  Description of Artificial Sequence: Synthetic oligonucleotide
  Antisense strand to SEQ ID NO: 763522
acagacacaguuauucuca

SEQ ID NO: 763524 - RNA, 19 nt, Artificial Sequence
  Description of Artificial Sequence: Synthetic oligonucleotide
  Sense strand starting at position 3040 of SEQ ID NO: 587057
gagaauaacugugucugua

SEQ ID NO: 763525 - RNA, 19 nt, Artificial Sequence
  Description of Artificial Sequence: Synthetic oligonucleotide
  Antisense strand to SEQ ID NO: 763524
uacagacacaguuauucuc

SEQ ID NO: 763526 - RNA, 19 nt, Artificial Sequence
  Description of Artificial Sequence: Synthetic oligonucleotide
  Sense strand starting at position 3042 of SEQ ID NO: 587057
gaauaacugugucuguagu

SEQ ID NO: 763527 - RNA, 19 nt, Artificial Sequence
  Description of Artificial Sequence: Synthetic oligonucleotide
  Antisense strand to SEQ ID NO: 763526
acuacagacacaguuauuc

SEQ ID NO: 763528 - RNA, 19 nt, Artificial Sequence
  Description of Artificial Sequence: Synthetic oligonucleotide
  Sense strand starting at position 3090 of SEQ ID NO: 587057
ugaagauucucugucccag

SEQ ID NO: 763529 - RNA, 19 nt, Artificial Sequence
  Description of Artificial Sequence: Synthetic oligonucleotide
  Antisense strand to SEQ ID NO: 763528
cugggacagagaaucuuca

SEQ ID NO: 763530 - RNA, 19 nt, Artificial Sequence
  Description of Artificial Sequence: Synthetic oligonucleotide
  Sense strand starting at position 3176 of SEQ ID NO: 587057
ugugucucuaugcaaagua

SEQ ID NO: 763531 - RNA, 19 nt, Artificial Sequence
  Description of Artificial Sequence: Synthetic oligonucleotide
  Antisense strand to SEQ ID NO: 763530
uacuuugcauagagacaca

SEQ ID NO: 763532 - RNA, 19 nt, Artificial Sequence
  Description of Artificial Sequence: Synthetic oligonucleotide
  Sense strand starting at position 3265 of SEQ ID NO: 587057
gaaaguacagcuggaauca

SEQ ID NO: 763533 - RNA, 19 nt, Artificial Sequence
  Description of Artificial Sequence: Synthetic oligonucleotide
  Antisense strand to SEQ ID NO: 763532
ugauuccagcuguacuuuc

SEQ ID NO: 763534 - RNA, 19 nt, Artificial Sequence
  Description of Artificial Sequence: Synthetic oligonucleotide
  Sense strand starting at position 3285 of SEQ ID NO: 587057
gacugcagucuacaguuaa

SEQ ID NO: 763535 - RNA, 19 nt, Artificial Sequence
  Description of Artificial Sequence: Synthetic oligonucleotide
  Antisense strand to SEQ ID NO: 763534
uuaacuguagacugcaguc

SEQ ID NO: 763536 - RNA, 19 nt, Artificial Sequence
  Description of Artificial Sequence: Synthetic oligonucleotide
  Sense strand starting at position 3318 of SEQ ID NO: 587057
gaaauuggccaagggucau

SEQ ID NO: 763537 - RNA, 19 nt, Artificial Sequence
  Description of Artificial Sequence: Synthetic oligonucleotide
  Antisense strand to SEQ ID NO: 763536
augacccuuggccaauuuc

SEQ ID NO: 763538 - RNA, 19 nt, Artificial Sequence
  Description of Artificial Sequence: Synthetic oligonucleotide
  Sense strand starting at position 3461 of SEQ ID NO: 587057
ggaccuuuguagcuuaagu

SEQ ID NO: 763539 - RNA, 19 nt, Artificial Sequence
  Description of Artificial Sequence: Synthetic oligonucleotide
  Antisense strand to SEQ ID NO: 763538
acuuaagcuacaaaggucc

SEQ ID NO: 763540 - RNA, 19 nt, Artificial Sequence
  Description of Artificial Sequence: Synthetic oligonucleotide
  Sense strand starting at position 3549 of SEQ ID NO: 587057
cuggcugugcccguucaua

SEQ ID NO: 763541 - RNA, 19 nt, Artificial Sequence
  Description of Artificial Sequence: Synthetic oligonucleotide
  Antisense strand to SEQ ID NO: 763540
uaugaacgggcacagccag

SEQ ID NO: 763542 - RNA, 19 nt, Artificial Sequence
  Description of Artificial Sequence: Synthetic oligonucleotide
  Sense strand starting at position 3551 of SEQ ID NO: 587057
ggcugugcccguucauaca

SEQ ID NO: 763543 - RNA, 19 nt, Artificial Sequence
  Description of Artificial Sequence: Synthetic oligonucleotide
  Antisense strand to SEQ ID NO: 763542
uguaugaacgggcacagcc

SEQ ID NO: 763544 - RNA, 19 nt, Artificial Sequence
  Description of Artificial Sequence: Synthetic oligonucleotide
  Sense strand starting at position 3571 of SEQ ID NO: 587057
ucucaauuccaguaaugua

SEQ ID NO: 763545 - RNA, 19 nt, Artificial Sequence
  Description of Artificial Sequence: Synthetic oligonucleotide
  Antisense strand to SEQ ID NO: 763544
uacauuacuggaauugaga

SEQ ID NO: 763546 - RNA, 19 nt, Artificial Sequence
  Description of Artificial Sequence: Synthetic oligonucleotide
  Sense strand starting at position 3851 of SEQ ID NO: 587057
uugaaucgauaugccauaa

SEQ ID NO: 763547 - RNA, 19 nt, Artificial Sequence
  Description of Artificial Sequence: Synthetic oligonucleotide
  Antisense strand to SEQ ID NO: 763546
uuauggcauaucgauucaa

SEQ ID NO: 763548 - RNA, 19 nt, Artificial Sequence
  Description of Artificial Sequence: Synthetic oligonucleotide
  Sense strand starting at position 3887 of SEQ ID NO: 587057
caugauacguugcucaaua

SEQ ID NO: 763549 - RNA, 19 nt, Artificial Sequence
  Description of Artificial Sequence: Synthetic oligonucleotide
  Antisense strand to SEQ ID NO: 763548
uauugagcaacguaucaug

SEQ ID NO: 763550 - RNA, 19 nt, Artificial Sequence
  Description of Artificial Sequence: Synthetic oligonucleotide
  Sense strand starting at position 3888 of SEQ ID NO: 587057
augauacguugcucaauaa

SEQ ID NO: 763551 - RNA, 19 nt, Artificial Sequence
  Description of Artificial Sequence: Synthetic oligonucleotide
  Antisense strand to SEQ ID NO: 763550
uuauugagcaacguaucau

SEQ ID NO: 763552 - RNA, 19 nt, Artificial Sequence
  Description of Artificial Sequence: Synthetic oligonucleotide
  Sense strand starting at position 3889 of SEQ ID NO: 587057
ugauacguugcucaauaac

SEQ ID NO: 763553 - RNA, 19 nt, Artificial Sequence
  Description of Artificial Sequence: Synthetic oligonucleotide
  Antisense strand to SEQ ID NO: 763552
guuauugagcaacguauca

SEQ ID NO: 763554 - RNA, 19 nt, Artificial Sequence
  Description of Artificial Sequence: Synthetic oligonucleotide
  Sense strand starting at position 1027 of SEQ ID NO: 587058
agcuauugugucuacacua

SEQ ID NO: 763555 - RNA, 19 nt, Artificial Sequence
  Description of Artificial Sequence: Synthetic oligonucleotide
  Antisense strand to SEQ ID NO: 763554
uaguguagacacaauagcu

SEQ ID NO: 763556 - RNA, 19 nt, Artificial Sequence
  Description of Artificial Sequence: Synthetic oligonucleotide
  Sense strand starting at position 1032 of SEQ ID NO: 587058
uugugucuacacuagcaau

SEQ ID NO: 763557 - RNA, 19 nt, Artificial Sequence
  Description of Artificial Sequence: Synthetic oligonucleotide
  Antisense strand to SEQ ID NO: 763556
auugcuaguguagacacaa

SEQ ID NO: 763558 - RNA, 19 nt, Artificial Sequence
  Description of Artificial Sequence: Synthetic oligonucleotide
  Sense strand starting at position 1060 of SEQ ID NO: 587058
ggcugugucagauaccaaa

SEQ ID NO: 763559 - RNA, 19 nt, Artificial Sequence
  Description of Artificial Sequence: Synthetic oligonucleotide
  Antisense strand to SEQ ID NO: 763558
uuugguaucugacacagcc

SEQ ID NO: 763560 - RNA, 19 nt, Artificial Sequence
  Description of Artificial Sequence: Synthetic oligonucleotide
  Sense strand starting at position 1089 of SEQ ID NO: 587058
gauauuucuuuguuugguu

SEQ ID NO: 763561 - RNA, 19 nt, Artificial Sequence
  Description of Artificial Sequence: Synthetic oligonucleotide
  Antisense strand to SEQ ID NO: 763560
aaccaaacaaagaaauauc

SEQ ID NO: 763562 - RNA, 19 nt, Artificial Sequence
  Description of Artificial Sequence: Synthetic oligonucleotide
  Sense strand starting at position 1128 of SEQ ID NO: 587058
auaaaucaucuguagaguc

SEQ ID NO: 763563 - RNA, 19 nt, Artificial Sequence
  Description of Artificial Sequence: Synthetic oligonucleotide
  Antisense strand to SEQ ID NO: 763562
gacucuacagaugauuuau

SEQ ID NO: 763564 - RNA, 19 nt, Artificial Sequence
  Description of Artificial Sequence: Synthetic oligonucleotide
  Sense strand starting at position 1155 of SEQ ID NO: 587058
uuccgaaauucucucuaug

SEQ ID NO: 763565 - RNA, 19 nt, Artificial Sequence
  Description of Artificial Sequence: Synthetic oligonucleotide
  Antisense strand to SEQ ID NO: 763564
cauagagagaauuucggaa

SEQ ID NO: 763566 - RNA, 19 nt, Artificial Sequence
  Description of Artificial Sequence: Synthetic oligonucleotide
  Sense strand starting at position 1157 of SEQ ID NO: 587058
ccgaaauucucucuauguc

SEQ ID NO: 763567 - RNA, 19 nt, Artificial Sequence
  Description of Artificial Sequence: Synthetic oligonucleotide
  Antisense strand to SEQ ID NO: 763566
gacauagagagaauuucgg

SEQ ID NO: 763568 - RNA, 19 nt, Artificial Sequence
  Description of Artificial Sequence: Synthetic oligonucleotide
  Sense strand starting at position 1158 of SEQ ID NO: 587058
cgaaauucucucuaugucu

SEQ ID NO: 763569 - RNA, 19 nt, Artificial Sequence
  Description of Artificial Sequence: Synthetic oligonucleotide
  Antisense strand to SEQ ID NO: 763568
agacauagagagaauuucg

SEQ ID NO: 763570 - RNA, 19 nt, Artificial Sequence
  Description of Artificial Sequence: Synthetic oligonucleotide
  Sense strand starting at position 2227 of SEQ ID NO: 587058
guacuuaggaccggaguua

SEQ ID NO: 763571 - RNA, 19 nt, Artificial Sequence
  Description of Artificial Sequence: Synthetic oligonucleotide
  Antisense strand to SEQ ID NO: 763570
uaacuccgguccuaaguac

SEQ ID NO: 763572 - RNA, 19 nt, Artificial Sequence
  Description of Artificial Sequence: Synthetic oligonucleotide
  Sense strand starting at position 2238 of SEQ ID NO: 587058
cggaguuagcauuaaccuu

SEQ ID NO: 763573 - RNA, 19 nt, Artificial Sequence
  Description of Artificial Sequence: Synthetic oligonucleotide
  Antisense strand to SEQ ID NO: 763572
aagguuaaugcuaacuccg

SEQ ID NO: 763574 - RNA, 19 nt, Artificial Sequence
  Description of Artificial Sequence: Synthetic oligonucleotide
  Sense strand starting at position 2315 of SEQ ID NO: 587058
gguaauuuaccuugugcgu

SEQ ID NO: 763575 - RNA, 19 nt, Artificial Sequence
  Description of Artificial Sequence: Synthetic oligonucleotide
  Antisense strand to SEQ ID NO: 763574
acgcacaagguaaauuacc

SEQ ID NO: 763576 - RNA, 19 nt, Artificial Sequence
  Description of Artificial Sequence: Synthetic oligonucleotide
  Sense strand starting at position 2376 of SEQ ID NO: 587058
cucuguagaucaucacaca

SEQ ID NO: 763577 - RNA, 19 nt, Artificial Sequence
  Description of Artificial Sequence: Synthetic oligonucleotide
  Antisense strand to SEQ ID NO: 763576
ugugugaugaucuacagag

SEQ ID NO: 763578 - RNA, 19 nt, Artificial Sequence
  Description of Artificial Sequence: Synthetic oligonucleotide
  Sense strand starting at position 2435 of SEQ ID NO: 587058
guguguccugcuuccauua

SEQ ID NO: 763579 - RNA, 19 nt, Artificial Sequence
  Description of Artificial Sequence: Synthetic oligonucleotide
  Antisense strand to SEQ ID NO: 763578
uaauggaagcaggacacac

SEQ ID NO: 763580 - RNA, 19 nt, Artificial Sequence
  Description of Artificial Sequence: Synthetic oligonucleotide
  Sense strand starting at position 2477 of SEQ ID NO: 587058
cccuguauucugcagaccu

SEQ ID NO: 763581 - RNA, 19 nt, Artificial Sequence
  Description of Artificial Sequence: Synthetic oligonucleotide
  Antisense strand to SEQ ID NO: 763580
aggucugcagaauacaggg

SEQ ID NO: 763582 - RNA, 19 nt, Artificial Sequence
  Description of Artificial Sequence: Synthetic oligonucleotide
  Sense strand starting at position 2496 of SEQ ID NO: 587058
gucagaaguguuagugugu

SEQ ID NO: 763583 - RNA, 19 nt, Artificial Sequence
  Description of Artificial Sequence: Synthetic oligonucleotide
  Antisense strand to SEQ ID NO: 763582
acacacuaacacuucugac

SEQ ID NO: 763584 - RNA, 19 nt, Artificial Sequence
  Description of Artificial Sequence: Synthetic oligonucleotide
  Sense strand starting at position 2502 of SEQ ID NO: 587058
aguguuaguguguauauuu

SEQ ID NO: 763585 - RNA, 19 nt, Artificial Sequence
  Description of Artificial Sequence: Synthetic oligonucleotide
  Antisense strand to SEQ ID NO: 763584
aaauauacacacuaacacu

SEQ ID NO: 763586 - RNA, 19 nt, Artificial Sequence
  Description of Artificial Sequence: Synthetic oligonucleotide
  Sense strand starting at position 2507 of SEQ ID NO: 587058
uaguguguauauuucuuga

SEQ ID NO: 763587 - RNA, 19 nt, Artificial Sequence
  Description of Artificial Sequence: Synthetic oligonucleotide
  Antisense strand to SEQ ID NO: 763586
ucaagaaauauacacacua

SEQ ID NO: 763588 - RNA, 19 nt, Artificial Sequence
  Description of Artificial Sequence: Synthetic oligonucleotide
  Sense strand starting at position 2621 of SEQ ID NO: 587058
cccagcauuuaccugguua

SEQ ID NO: 763589 - RNA, 19 nt, Artificial Sequence
  Description of Artificial Sequence: Synthetic oligonucleotide
  Antisense strand to SEQ ID NO: 763588
uaaccagguaaaugcuggg

SEQ ID NO: 763590 - RNA, 19 nt, Artificial Sequence
  Description of Artificial Sequence: Synthetic oligonucleotide
  Sense strand starting at position 2625 of SEQ ID NO: 587058
gcauuuaccugguuaugua

SEQ ID NO: 763591 - RNA, 19 nt, Artificial Sequence
  Description of Artificial Sequence: Synthetic oligonucleotide
  Antisense strand to SEQ ID NO: 763590
uacauaaccagguaaaugc

SEQ ID NO: 763592 - RNA, 19 nt, Artificial Sequence
  Description of Artificial Sequence: Synthetic oligonucleotide
  Sense strand starting at position 2728 of SEQ ID NO: 587058
cuaacaugguuccugaaac

SEQ ID NO: 763593 - RNA, 19 nt, Artificial Sequence
  Description of Artificial Sequence: Synthetic oligonucleotide
  Antisense strand to SEQ ID NO: 763592
guuucaggaaccauguuag

SEQ ID NO: 763594 - RNA, 19 nt, Artificial Sequence
  Description of Artificial Sequence: Synthetic oligonucleotide
  Sense strand starting at position 2746 of SEQ ID NO: 587058
cgugguaggucacuaacua

SEQ ID NO: 763595 - RNA, 19 nt, Artificial Sequence
  Description of Artificial Sequence: Synthetic oligonucleotide
  Antisense strand to SEQ ID NO: 763594
uaguuagugaccuaccacg

SEQ ID NO: 763596 - RNA, 19 nt, Artificial Sequence
  Description of Artificial Sequence: Synthetic oligonucleotide
  Sense strand starting at position 2788 of SEQ ID NO: 587058
ucaccacaccugugaagau

SEQ ID NO: 763597 - RNA, 19 nt, Artificial Sequence
  Description of Artificial Sequence: Synthetic oligonucleotide
  Antisense strand to SEQ ID NO: 763596
aucuucacaggugugguga

SEQ ID NO: 763598 - RNA, 19 nt, Artificial Sequence
  Description of Artificial Sequence: Synthetic oligonucleotide
  Sense strand starting at position 2841 of SEQ ID NO: 587058
guuaagucggaguagggua

SEQ ID NO: 763599 - RNA, 19 nt, Artificial Sequence
  Description of Artificial Sequence: Synthetic oligonucleotide
  Antisense strand to SEQ ID NO: 763598
uacccuacuccgacuuaac

SEQ ID NO: 763600 - RNA, 19 nt, Artificial Sequence
  Description of Artificial Sequence: Synthetic oligonucleotide
  Sense strand starting at position 2890 of SEQ ID NO: 587058
auacuugguccuugagcca

SEQ ID NO: 763601 - RNA, 19 nt, Artificial Sequence
  Description of Artificial Sequence: Synthetic oligonucleotide
  Antisense strand to SEQ ID NO: 763600
uggcucaaggaccaaguau

SEQ ID NO: 763602 - RNA, 19 nt, Artificial Sequence
  Description of Artificial Sequence: Synthetic oligonucleotide
  Sense strand starting at position 3090 of SEQ ID NO: 587058
ugagaauaacugugucugu

SEQ ID NO: 763603 - RNA, 19 nt, Artificial Sequence
  Description of Artificial Sequence: Synthetic oligonucleotide
  Antisense strand to SEQ ID NO: 763602
acagacacaguuauucuca

SEQ ID NO: 763604 - RNA, 19 nt, Artificial Sequence
  Description of Artificial Sequence: Synthetic oligonucleotide
  Sense strand starting at position 3091 of SEQ ID NO: 587058
gagaauaacugugucugua

SEQ ID NO: 763605 - RNA, 19 nt, Artificial Sequence
  Description of Artificial Sequence: Synthetic oligonucleotide
  Antisense strand to SEQ ID NO: 763604
uacagacacaguuauucuc

SEQ ID NO: 763606 - RNA, 19 nt, Artificial Sequence
  Description of Artificial Sequence: Synthetic oligonucleotide
  Sense strand starting at position 3093 of SEQ ID NO: 587058
gaauaacugugucuguagu

SEQ ID NO: 763607 - RNA, 19 nt, Artificial Sequence
  Description of Artificial Sequence: Synthetic oligonucleotide
  Antisense strand to SEQ ID NO: 763606
acuacagacacaguuauuc

SEQ ID NO: 763608 - RNA, 19 nt, Artificial Sequence
  Description of Artificial Sequence: Synthetic oligonucleotide
  Sense strand starting at position 3141 of SEQ ID NO: 587058
ugaagauucucugucccag

SEQ ID NO: 763609 - RNA, 19 nt, Artificial Sequence
  Description of Artificial Sequence: Synthetic oligonucleotide
  Antisense strand to SEQ ID NO: 763608
cugggacagagaaucuuca

SEQ ID NO: 763610 - RNA, 19 nt, Artificial Sequence
  Description of Artificial Sequence: Synthetic oligonucleotide
  Sense strand starting at position 3227 of SEQ ID NO: 587058
ugugucucuaugcaaagua

SEQ ID NO: 763611 - RNA, 19 nt, Artificial Sequence
  Description of Artificial Sequence: Synthetic oligonucleotide
  Antisense strand to SEQ ID NO: 763610
uacuuugcauagagacaca

SEQ ID NO: 763612 - RNA, 19 nt, Artificial Sequence
  Description of Artificial Sequence: Synthetic oligonucleotide
  Sense strand starting at position 3316 of SEQ ID NO: 587058
gaaaguacagcuggaauca

SEQ ID NO: 763613 - RNA, 19 nt, Artificial Sequence
  Description of Artificial Sequence: Synthetic oligonucleotide
  Antisense strand to SEQ ID NO: 763612
ugauuccagcuguacuuuc

SEQ ID NO: 763614 - RNA, 19 nt, Artificial Sequence
  Description of Artificial Sequence: Synthetic oligonucleotide
  Sense strand starting at position 3336 of SEQ ID NO: 587058
gacugcagucuacaguuaa

SEQ ID NO: 763615 - RNA, 19 nt, Artificial Sequence
  Description of Artificial Sequence: Synthetic oligonucleotide
  Antisense strand to SEQ ID NO: 763614
uuaacuguagacugcaguc

SEQ ID NO: 763616 - RNA, 19 nt, Artificial Sequence
  Description of Artificial Sequence: Synthetic oligonucleotide
  Sense strand starting at position 3369 of SEQ ID NO: 587058
gaaauuggccaagggucau

SEQ ID NO: 763617 - RNA, 19 nt, Artificial Sequence
  Description of Artificial Sequence: Synthetic oligonucleotide
  Antisense strand to SEQ ID NO: 763616
augacccuuggccaauuuc

SEQ ID NO: 763618 - RNA, 19 nt, Artificial Sequence
  Description of Artificial Sequence: Synthetic oligonucleotide
  Sense strand starting at position 3512 of SEQ ID NO: 587058
ggaccuuuguagcuuaagu

SEQ ID NO: 763619 - RNA, 19 nt, Artificial Sequence
  Description of Artificial Sequence: Synthetic oligonucleotide
  Antisense strand to SEQ ID NO: 763618
acuuaagcuacaaaggucc

SEQ ID NO: 763620 - RNA, 19 nt, Artificial Sequence
  Description of Artificial Sequence: Synthetic oligonucleotide
  Sense strand starting at position 3600 of SEQ ID NO: 587058
cuggcugugcccguucaua

SEQ ID NO: 763621 - RNA, 19 nt, Artificial Sequence
  Description of Artificial Sequence: Synthetic oligonucleotide
  Antisense strand to SEQ ID NO: 763620
uaugaacgggcacagccag

SEQ ID NO: 763622 - RNA, 19 nt, Artificial Sequence
  Description of Artificial Sequence: Synthetic oligonucleotide
  Sense strand starting at position 3602 of SEQ ID NO: 587058
ggcugugcccguucauaca

SEQ ID NO: 763623 - RNA, 19 nt, Artificial Sequence
  Description of Artificial Sequence: Synthetic oligonucleotide
  Antisense strand to SEQ ID NO: 763622
uguaugaacgggcacagcc

SEQ ID NO: 763624 - RNA, 19 nt, Artificial Sequence
  Description of Artificial Sequence: Synthetic oligonucleotide
  Sense strand starting at position 3622 of SEQ ID NO: 587058
ucucaauuccaguaaugua

SEQ ID NO: 763625 - RNA, 19 nt, Artificial Sequence
  Description of Artificial Sequence: Synthetic oligonucleotide
  Antisense strand to SEQ ID NO: 763624
uacauuacuggaauugaga

SEQ ID NO: 763626 - RNA, 19 nt, Artificial Sequence
  Description of Artificial Sequence: Synthetic oligonucleotide
  Sense strand starting at position 3902 of SEQ ID NO: 587058
uugaaucgauaugccauaa

SEQ ID NO: 763627 - RNA, 19 nt, Artificial Sequence
  Description of Artificial Sequence: Synthetic oligonucleotide
  Antisense strand to SEQ ID NO: 763626
uuauggcauaucgauucaa

SEQ ID NO: 763628 - RNA, 19 nt, Artificial Sequence
  Description of Artificial Sequence: Synthetic oligonucleotide
  Sense strand starting at position 3938 of SEQ ID NO: 587058
caugauacguugcucaaua

SEQ ID NO: 763629 - RNA, 19 nt, Artificial Sequence
  Description of Artificial Sequence: Synthetic oligonucleotide
  Antisense strand to SEQ ID NO: 763628
uauugagcaacguaucaug

SEQ ID NO: 763630 - RNA, 19 nt, Artificial Sequence
  Description of Artificial Sequence: Synthetic oligonucleotide
  Sense strand starting at position 3939 of SEQ ID NO: 587058
augauacguugcucaauaa

SEQ ID NO: 763631 - RNA, 19 nt, Artificial Sequence
  Description of Artificial Sequence: Synthetic oligonucleotide
  Antisense strand to SEQ ID NO: 763630
uuauugagcaacguaucau

SEQ ID NO: 763632 - RNA, 19 nt, Artificial Sequence
  Description of Artificial Sequence: Synthetic oligonucleotide
  Sense strand starting at position 3940 of SEQ ID NO: 587058
ugauacguugcucaauaac

SEQ ID NO: 763633 - RNA, 19 nt, Artificial Sequence
  Description of Artificial Sequence: Synthetic oligonucleotide
  Antisense strand to SEQ ID NO: 763632
guuauugagcaacguauca

SEQ ID NO: 763634 - RNA, 19 nt, Artificial Sequence
  Description of Artificial Sequence: Synthetic oligonucleotide
  Sense strand starting at position 6 of SEQ ID NO: 587059
uaaagaauugcacagguuu

SEQ ID NO: 763635 - RNA, 19 nt, Artificial Sequence
  Description of Artificial Sequence: Synthetic oligonucleotide
  Antisense strand to SEQ ID NO: 763634
aaaccugugcaauucuuua

SEQ ID NO: 763636 - RNA, 19 nt, Artificial Sequence
  Description of Artificial Sequence: Synthetic oligonucleotide
  Sense strand starting at position 304 of SEQ ID NO: 587059
cuaucaacacuguagguaa

SEQ ID NO: 763637 - RNA, 19 nt, Artificial Sequence
  Description of Artificial Sequence: Synthetic oligonucleotide
  Antisense strand to SEQ ID NO: 763636
uuaccuacaguguugauag

SEQ ID NO: 763638 - RNA, 19 nt, Artificial Sequence
  Description of Artificial Sequence: Synthetic oligonucleotide
  Sense strand starting at position 411 of SEQ ID NO: 587059
gcagauuggcaauaaacau

SEQ ID NO: 763639 - RNA, 19 nt, Artificial Sequence
  Description of Artificial Sequence: Synthetic oligonucleotide
  Antisense strand to SEQ ID NO: 763638
auguuuauugccaaucugc

SEQ ID NO: 763640 - RNA, 19 nt, Artificial Sequence
  Description of Artificial Sequence: Synthetic oligonucleotide
  Sense strand starting at position 585 of SEQ ID NO: 587059
agaaguaaacuaugaugua

SEQ ID NO: 763641 - RNA, 19 nt, Artificial Sequence
  Description of Artificial Sequence: Synthetic oligonucleotide
  Antisense strand to SEQ ID NO: 763640
uacaucauaguuuacuucu

SEQ ID NO: 763642 - RNA, 19 nt, Artificial Sequence
  Description of Artificial Sequence: Synthetic oligonucleotide
  Sense strand starting at position 750 of SEQ ID NO: 587059
ggugacauuacaggcaauu

SEQ ID NO: 763643 - RNA, 19 nt, Artificial Sequence
  Description of Artificial Sequence: Synthetic oligonucleotide
  Antisense strand to SEQ ID NO: 763642
aauugccuguaaugucacc

SEQ ID NO: 763644 - RNA, 19 nt, Artificial Sequence
  Description of Artificial Sequence: Synthetic oligonucleotide
  Sense strand starting at position 761 of SEQ ID NO: 587059
aggcaauuguucucuauuu

SEQ ID NO: 763645 - RNA, 19 nt, Artificial Sequence
  Description of Artificial Sequence: Synthetic oligonucleotide
  Antisense strand to SEQ ID NO: 763644
aaauagagaacaauugccu

SEQ ID NO: 763646 - RNA, 19 nt, Artificial Sequence
  Description of Artificial Sequence: Synthetic oligonucleotide
  Sense strand starting at position 762 of SEQ ID NO: 587059
ggcaauuguucucuauuug

SEQ ID NO: 763647 - RNA, 19 nt, Artificial Sequence
  Description of Artificial Sequence: Synthetic oligonucleotide
  Antisense strand to SEQ ID NO: 763646
caaauagagaacaauugcc

SEQ ID NO: 763648 - RNA, 19 nt, Artificial Sequence
  Description of Artificial Sequence: Synthetic oligonucleotide
  Sense strand starting at position 768 of SEQ ID NO: 587059
uguucucuauuugcaguaa

SEQ ID NO: 763649 - RNA, 19 nt, Artificial Sequence
  Description of Artificial Sequence: Synthetic oligonucleotide
  Antisense strand to SEQ ID NO: 763648
uuacugcaaauagagaaca

SEQ ID NO: 763650 - RNA, 19 nt, Artificial Sequence
  Description of Artificial Sequence: Synthetic oligonucleotide
  Sense strand starting at position 1188 of SEQ ID NO: 587059
ggagcaaucuggucuaaug

SEQ ID NO: 763651 - RNA, 19 nt, Artificial Sequence
  Description of Artificial Sequence: Synthetic oligonucleotide
  Antisense strand to SEQ ID NO: 763650
cauuagaccagauugcucc

SEQ ID NO: 763652 - RNA, 19 nt, Artificial Sequence
  Description of Artificial Sequence: Synthetic oligonucleotide
  Sense strand starting at position 1196 of SEQ ID NO: 587059
cuggucuaaugacuaacau

SEQ ID NO: 763653 - RNA, 19 nt, Artificial Sequence
  Description of Artificial Sequence: Synthetic oligonucleotide
  Antisense strand to SEQ ID NO: 763652
auguuagucauuagaccag

SEQ ID NO: 763654 - RNA, 19 nt, Artificial Sequence
  Description of Artificial Sequence: Synthetic oligonucleotide
  Sense strand starting at position 1328 of SEQ ID NO: 587059
ugaauagugguuuaguuag

SEQ ID NO: 763655 - RNA, 19 nt, Artificial Sequence
  Description of Artificial Sequence: Synthetic oligonucleotide
  Antisense strand to SEQ ID NO: 763654
cuaacuaaaccacuauuca

SEQ ID NO: 763656 - RNA, 19 nt, Artificial Sequence
  Description of Artificial Sequence: Synthetic oligonucleotide
  Sense strand starting at position 1382 of SEQ ID NO: 587059
ugaugaacaguguauugca

SEQ ID NO: 763657 - RNA, 19 nt, Artificial Sequence
  Description of Artificial Sequence: Synthetic oligonucleotide
  Antisense strand to SEQ ID NO: 763656
ugcaauacacuguucauca

SEQ ID NO: 763658 - RNA, 19 nt, Artificial Sequence
  Description of Artificial Sequence: Synthetic oligonucleotide
  Sense strand starting at position 1643 of SEQ ID NO: 587059
uguggauugccagaacaug

SEQ ID NO: 763659 - RNA, 19 nt, Artificial Sequence
  Description of Artificial Sequence: Synthetic oligonucleotide
  Antisense strand to SEQ ID NO: 763658
cauguucuggcaauccaca

SEQ ID NO: 763660 - RNA, 19 nt, Artificial Sequence
  Description of Artificial Sequence: Synthetic oligonucleotide
  Sense strand starting at position 1660 of SEQ ID NO: 587059
ugaaauaucugagaagaaa

SEQ ID NO: 763661 - RNA, 19 nt, Artificial Sequence
  Description of Artificial Sequence: Synthetic oligonucleotide
  Antisense strand to SEQ ID NO: 763660
uuucuucucagauauuuca

SEQ ID NO: 763662 - RNA, 19 nt, Artificial Sequence
  Description of Artificial Sequence: Synthetic oligonucleotide
  Sense strand starting at position 1686 of SEQ ID NO: 587059
ugucuuacaagguaguaga

SEQ ID NO: 763663 - RNA, 19 nt, Artificial Sequence
  Description of Artificial Sequence: Synthetic oligonucleotide
  Antisense strand to SEQ ID NO: 763662
ucuacuaccuuguaagaca

SEQ ID NO: 763664 - RNA, 19 nt, Artificial Sequence
  Description of Artificial Sequence: Synthetic oligonucleotide
  Sense strand starting at position 1729 of SEQ ID NO: 587059
caggaucgguacuuacaga

SEQ ID NO: 763665 - RNA, 19 nt, Artificial Sequence
  Description of Artificial Sequence: Synthetic oligonucleotide
  Antisense strand to SEQ ID NO: 763664
ucuguaaguaccgauccug

SEQ ID NO: 763666 - RNA, 19 nt, Artificial Sequence
  Description of Artificial Sequence: Synthetic oligonucleotide
  Sense strand starting at position 2054 of SEQ ID NO: 587059
uuuauuguccauuaugaca

SEQ ID NO: 763667 - RNA, 19 nt, Artificial Sequence
  Description of Artificial Sequence: Synthetic oligonucleotide
  Antisense strand to SEQ ID NO: 763666
ugucauaauggacaauaaa

SEQ ID NO: 763668 - RNA, 19 nt, Artificial Sequence
  Description of Artificial Sequence: Synthetic oligonucleotide
  Sense strand starting at position 2110 of SEQ ID NO: 587059
uuuaaagagccagguaaau

SEQ ID NO: 763669 - RNA, 19 nt, Artificial Sequence
  Description of Artificial Sequence: Synthetic oligonucleotide
  Antisense strand to SEQ ID NO: 763668
auuuaccuggcucuuuaaa

SEQ ID NO: 763670 - RNA, 19 nt, Artificial Sequence
  Description of Artificial Sequence: Synthetic oligonucleotide
  Sense strand starting at position 2119 of SEQ ID NO: 587059
ccagguaaaugucuugauu

SEQ ID NO: 763671 - RNA, 19 nt, Artificial Sequence
  Description of Artificial Sequence: Synthetic oligonucleotide
  Antisense strand to SEQ ID NO: 763670
aaucaagacauuuaccugg

SEQ ID NO: 763672 - RNA, 19 nt, Artificial Sequence
  Description of Artificial Sequence: Synthetic oligonucleotide
  Sense strand starting at position 2122 of SEQ ID NO: 587059
gguaaaugucuugauuaua

SEQ ID NO: 763673 - RNA, 19 nt, Artificial Sequence
  Description of Artificial Sequence: Synthetic oligonucleotide
  Antisense strand to SEQ ID NO: 763672
uauaaucaagacauuuacc

SEQ ID NO: 763674 - RNA, 19 nt, Artificial Sequence
  Description of Artificial Sequence: Synthetic oligonucleotide
  Sense strand starting at position 2182 of SEQ ID NO: 587059
cgaagcucccagugauuua

SEQ ID NO: 763675 - RNA, 19 nt, Artificial Sequence
  Description of Artificial Sequence: Synthetic oligonucleotide
  Antisense strand to SEQ ID NO: 763674
uaaaucacugggagcuucg

SEQ ID NO: 763676 - RNA, 19 nt, Artificial Sequence
  Description of Artificial Sequence: Synthetic oligonucleotide
  Sense strand starting at position 2572 of SEQ ID NO: 587059
ucaacuguggguuaaacuu

SEQ ID NO: 763677 - RNA, 19 nt, Artificial Sequence
  Description of Artificial Sequence: Synthetic oligonucleotide
  Antisense strand to SEQ ID NO: 763676
aaguuuaacccacaguuga

SEQ ID NO: 763678 - RNA, 19 nt, Artificial Sequence
  Description of Artificial Sequence: Synthetic oligonucleotide
  Sense strand starting at position 2579 of SEQ ID NO: 587059
uggguuaaacuugguuaca

SEQ ID NO: 763679 - RNA, 19 nt, Artificial Sequence
  Description of Artificial Sequence: Synthetic oligonucleotide
  Antisense strand to SEQ ID NO: 763678
uguaaccaaguuuaaccca

SEQ ID NO: 763680 - RNA, 19 nt, Artificial Sequence
  Description of Artificial Sequence: Synthetic oligonucleotide
  Sense strand starting at position 2580 of SEQ ID NO: 587059
ggguuaaacuugguuacau

SEQ ID NO: 763681 - RNA, 19 nt, Artificial Sequence
  Description of Artificial Sequence: Synthetic oligonucleotide
  Antisense strand to SEQ ID NO: 763680
auguaaccaaguuuaaccc

SEQ ID NO: 763682 - RNA, 19 nt, Artificial Sequence
  Description of Artificial Sequence: Synthetic oligonucleotide
  Sense strand starting at position 2581 of SEQ ID NO: 587059
gguuaaacuugguuacaug

SEQ ID NO: 763683 - RNA, 19 nt, Artificial Sequence
  Description of Artificial Sequence: Synthetic oligonucleotide
  Antisense strand to SEQ ID NO: 763682
cauguaaccaaguuuaacc

SEQ ID NO: 763684 - RNA, 19 nt, Artificial Sequence
  Description of Artificial Sequence: Synthetic oligonucleotide
  Sense strand starting at position 2582 of SEQ ID NO: 587059
guuaaacuugguuacauga

SEQ ID NO: 763685 - RNA, 19 nt, Artificial Sequence
  Description of Artificial Sequence: Synthetic oligonucleotide
  Antisense strand to SEQ ID NO: 763684
ucauguaaccaaguuuaac

SEQ ID NO: 763686 - RNA, 19 nt, Artificial Sequence
  Description of Artificial Sequence: Synthetic oligonucleotide
  Sense strand starting at position 2787 of SEQ ID NO: 587059
agaguucugcuacauacua

SEQ ID NO: 763687 - RNA, 19 nt, Artificial Sequence
  Description of Artificial Sequence: Synthetic oligonucleotide
  Antisense strand to SEQ ID NO: 763686
uaguauguagcagaacucu

SEQ ID NO: 763688 - RNA, 19 nt, Artificial Sequence
  Description of Artificial Sequence: Synthetic oligonucleotide
  Sense strand starting at position 2891 of SEQ ID NO: 587059
gagauaauauaagugcuua

SEQ ID NO: 763689 - RNA, 19 nt, Artificial Sequence
  Description of Artificial Sequence: Synthetic oligonucleotide
  Antisense strand to SEQ ID NO: 763688
uaagcacuuauauuaucuc

SEQ ID NO: 763690 - RNA, 19 nt, Artificial Sequence
  Description of Artificial Sequence: Synthetic oligonucleotide
  Sense strand starting at position 2963 of SEQ ID NO: 587059
cuguauauuuagucuagca

SEQ ID NO: 763691 - RNA, 19 nt, Artificial Sequence
  Description of Artificial Sequence: Synthetic oligonucleotide
  Antisense strand to SEQ ID NO: 763690
ugcuagacuaaauauacag

SEQ ID NO: 763692 - RNA, 19 nt, Artificial Sequence
  Description of Artificial Sequence: Synthetic oligonucleotide
  Sense strand starting at position 3058 of SEQ ID NO: 587059
uggugagugaagugauaua

SEQ ID NO: 763693 - RNA, 19 nt, Artificial Sequence
  Description of Artificial Sequence: Synthetic oligonucleotide
  Antisense strand to SEQ ID NO: 763692
uauaucacuucacucacca

SEQ ID NO: 763694 - RNA, 19 nt, Artificial Sequence
  Description of Artificial Sequence: Synthetic oligonucleotide
  Sense strand starting at position 3239 of SEQ ID NO: 587059
gcauuuaccucaguucucu

SEQ ID NO: 763695 - RNA, 19 nt, Artificial Sequence
  Description of Artificial Sequence: Synthetic oligonucleotide
  Antisense strand to SEQ ID NO: 763694
agagaacugagguaaaugc

SEQ ID NO: 763696 - RNA, 19 nt, Artificial Sequence
  Description of Artificial Sequence: Synthetic oligonucleotide
  Sense strand starting at position 3269 of SEQ ID NO: 587059
uuggauugguacuucuuga

SEQ ID NO: 763697 - RNA, 19 nt, Artificial Sequence
  Description of Artificial Sequence: Synthetic oligonucleotide
  Antisense strand to SEQ ID NO: 763696
ucaagaaguaccaauccaa

SEQ ID NO: 763698 - RNA, 19 nt, Artificial Sequence
  Description of Artificial Sequence: Synthetic oligonucleotide
  Sense strand starting at position 3359 of SEQ ID NO: 587059
cugcauguuccagaaguau

SEQ ID NO: 763699 - RNA, 19 nt, Artificial Sequence
  Description of Artificial Sequence: Synthetic oligonucleotide
  Antisense strand to SEQ ID NO: 763698
auacuucuggaacaugcag

SEQ ID NO: 763700 - RNA, 19 nt, Artificial Sequence
  Description of Artificial Sequence: Synthetic oligonucleotide
  Sense strand starting at position 3398 of SEQ ID NO: 587059
auccaaauugguuauaguu

SEQ ID NO: 763701 - RNA, 19 nt, Artificial Sequence
  Description of Artificial Sequence: Synthetic oligonucleotide
  Antisense strand to SEQ ID NO: 763700
aacuauaaccaauuuggau

SEQ ID NO: 763702 - RNA, 19 nt, Artificial Sequence
  Description of Artificial Sequence: Synthetic oligonucleotide
  Sense strand starting at position 3434 of SEQ ID NO: 587059
caguguuuacaauauugga

SEQ ID NO: 763703 - RNA, 19 nt, Artificial Sequence
  Description of Artificial Sequence: Synthetic oligonucleotide
  Antisense strand to SEQ ID NO: 763702
uccaauauuguaaacacug

SEQ ID NO: 763704 - RNA, 19 nt, Artificial Sequence
  Description of Artificial Sequence: Synthetic oligonucleotide
  Sense strand starting at position 3448 of SEQ ID NO: 587059
uuggaauaugcacagguau

SEQ ID NO: 763705 - RNA, 19 nt, Artificial Sequence
  Description of Artificial Sequence: Synthetic oligonucleotide
  Antisense strand to SEQ ID NO: 763704
auaccugugcauauuccaa

SEQ ID NO: 763706 - RNA, 19 nt, Artificial Sequence
  Description of Artificial Sequence: Synthetic oligonucleotide
  Sense strand starting at position 3450 of SEQ ID NO: 587059
ggaauaugcacagguauac

SEQ ID NO: 763707 - RNA, 19 nt, Artificial Sequence
  Description of Artificial Sequence: Synthetic oligonucleotide
  Antisense strand to SEQ ID NO: 763706
guauaccugugcauauucc

SEQ ID NO: 763708 - RNA, 19 nt, Artificial Sequence
  Description of Artificial Sequence: Synthetic oligonucleotide
  Sense strand starting at position 3710 of SEQ ID NO: 587059
cccauaugacggugaacuu

SEQ ID NO: 763709 - RNA, 19 nt, Artificial Sequence
  Description of Artificial Sequence: Synthetic oligonucleotide
  Antisense strand to SEQ ID NO: 763708
aaguucaccgucauauggg

SEQ ID NO: 763710 - RNA, 19 nt, Artificial Sequence
  Description of Artificial Sequence: Synthetic oligonucleotide
  Sense strand starting at position 3711 of SEQ ID NO: 587059
ccauaugacggugaacuua

SEQ ID NO: 763711 - RNA, 19 nt, Artificial Sequence
  Description of Artificial Sequence: Synthetic oligonucleotide
  Antisense strand to SEQ ID NO: 763710
uaaguucaccgucauaugg

SEQ ID NO: 763712 - RNA, 19 nt, Artificial Sequence
  Description of Artificial Sequence: Synthetic oligonucleotide
  Sense strand starting at position 3770 of SEQ ID NO: 587059
gguguucugaccguguguu

SEQ ID NO: 763713 - RNA, 19 nt, Artificial Sequence
  Description of Artificial Sequence: Synthetic oligonucleotide
  Antisense strand to SEQ ID NO: 763712
aacacacggucagaacacc

SEQ ID NO: 763714 - RNA, 19 nt, Artificial Sequence
  Description of Artificial Sequence: Synthetic oligonucleotide
  Sense strand starting at position 163 of SEQ ID NO: 587060
aucgguuugccgucacuaa

SEQ ID NO: 763715 - RNA, 19 nt, Artificial Sequence
  Description of Artificial Sequence: Synthetic oligonucleotide
  Antisense strand to SEQ ID NO: 763714
uuagugacggcaaaccgau

SEQ ID NO: 763716 - RNA, 19 nt, Artificial Sequence
  Description of Artificial Sequence: Synthetic oligonucleotide
  Sense strand starting at position 265 of SEQ ID NO: 587060
acugccagagucugauuau

SEQ ID NO: 763717 - RNA, 19 nt, Artificial Sequence
  Description of Artificial Sequence: Synthetic oligonucleotide
  Antisense strand to SEQ ID NO: 763716
auaaucagacucuggcagu

SEQ ID NO: 763718 - RNA, 19 nt, Artificial Sequence
  Description of Artificial Sequence: Synthetic oligonucleotide
  Sense strand starting at position 346 of SEQ ID NO: 587060
ccaaguccugucuacuauu

SEQ ID NO: 763719 - RNA, 19 nt, Artificial Sequence
  Description of Artificial Sequence: Synthetic oligonucleotide
  Antisense strand to SEQ ID NO: 763718
aauaguagacaggacuugg

SEQ ID NO: 763720 - RNA, 19 nt, Artificial Sequence
  Description of Artificial Sequence: Synthetic oligonucleotide
  Sense strand starting at position 1114 of SEQ ID NO: 587060
caugaauguuugguuucua

SEQ ID NO: 763721 - RNA, 19 nt, Artificial Sequence
  Description of Artificial Sequence: Synthetic oligonucleotide
  Antisense strand to SEQ ID NO: 763720
uagaaaccaaacauucaug

SEQ ID NO: 763722 - RNA, 19 nt, Artificial Sequence
  Description of Artificial Sequence: Synthetic oligonucleotide
  Sense strand starting at position 1115 of SEQ ID NO: 587060
augaauguuugguuucuau

SEQ ID NO: 763723 - RNA, 19 nt, Artificial Sequence
  Description of Artificial Sequence: Synthetic oligonucleotide
  Antisense strand to SEQ ID NO: 763722
auagaaaccaaacauucau

SEQ ID NO: 763724 - RNA, 19 nt, Artificial Sequence
  Description of Artificial Sequence: Synthetic oligonucleotide
  Sense strand starting at position 1208 of SEQ ID NO: 587060
agggaauggcuugaggcau

SEQ ID NO: 763725 - RNA, 19 nt, Artificial Sequence
  Description of Artificial Sequence: Synthetic oligonucleotide
  Antisense strand to SEQ ID NO: 763724
augccucaagccauucccu

SEQ ID NO: 763726 - RNA, 19 nt, Artificial Sequence
  Description of Artificial Sequence: Synthetic oligonucleotide
  Sense strand starting at position 1219 of SEQ ID NO: 587060
ugaggcauaccguaucacu

SEQ ID NO: 763727 - RNA, 19 nt, Artificial Sequence
  Description of Artificial Sequence: Synthetic oligonucleotide
  Antisense strand to SEQ ID NO: 763726
agugauacgguaugccuca

SEQ ID NO: 763728 - RNA, 19 nt, Artificial Sequence
  Description of Artificial Sequence: Synthetic oligonucleotide
  Sense strand starting at position 1275 of SEQ ID NO: 587060
aagugucaaggcugaaaga

SEQ ID NO: 763729 - RNA, 19 nt, Artificial Sequence
  Description of Artificial Sequence: Synthetic oligonucleotide
  Antisense strand to SEQ ID NO: 763728
ucuuucagccuugacacuu

SEQ ID NO: 763730 - RNA, 19 nt, Artificial Sequence
  Description of Artificial Sequence: Synthetic oligonucleotide
  Sense strand starting at position 1328 of SEQ ID NO: 587060
aguucugaauuacugauaa

SEQ ID NO: 763731 - RNA, 19 nt, Artificial Sequence
  Description of Artificial Sequence: Synthetic oligonucleotide
  Antisense strand to SEQ ID NO: 763730
uuaucaguaauucagaacu

SEQ ID NO: 763732 - RNA, 19 nt, Artificial Sequence
  Description of Artificial Sequence: Synthetic oligonucleotide
  Sense strand starting at position 1340 of SEQ ID NO: 587060
cugauaacucuuugagcca

SEQ ID NO: 763733 - RNA, 19 nt, Artificial Sequence
  Description of Artificial Sequence: Synthetic oligonucleotide
  Antisense strand to SEQ ID NO: 763732
uggcucaaagaguuaucag

SEQ ID NO: 763734 - RNA, 19 nt, Artificial Sequence
  Description of Artificial Sequence: Synthetic oligonucleotide
  Sense strand starting at position 1354 of SEQ ID NO: 587060
agccaucucauacgaggaa

SEQ ID NO: 763735 - RNA, 19 nt, Artificial Sequence
  Description of Artificial Sequence: Synthetic oligonucleotide
  Antisense strand to SEQ ID NO: 763734
uuccucguaugagauggcu

SEQ ID NO: 763736 - RNA, 19 nt, Artificial Sequence
  Description of Artificial Sequence: Synthetic oligonucleotide
  Sense strand starting at position 1686 of SEQ ID NO: 587060
agugucuaugccuagaucu

SEQ ID NO: 763737 - RNA, 19 nt, Artificial Sequence
  Description of Artificial Sequence: Synthetic oligonucleotide
  Antisense strand to SEQ ID NO: 763736
agaucuaggcauagacacu

SEQ ID NO: 763738 - RNA, 19 nt, Artificial Sequence
  Description of Artificial Sequence: Synthetic oligonucleotide
  Sense strand starting at position 1899 of SEQ ID NO: 587060
gccagugucggcguaaacu

SEQ ID NO: 763739 - RNA, 19 nt, Artificial Sequence
  Description of Artificial Sequence: Synthetic oligonucleotide
  Antisense strand to SEQ ID NO: 763738
aguuuacgccgacacuggc

SEQ ID NO: 763740 - RNA, 19 nt, Artificial Sequence
  Description of Artificial Sequence: Synthetic oligonucleotide
  Sense strand starting at position 1947 of SEQ ID NO: 587060
cauguuuccgccgccgaaa

SEQ ID NO: 763741 - RNA, 19 nt, Artificial Sequence
  Description of Artificial Sequence: Synthetic oligonucleotide
  Antisense strand to SEQ ID NO: 763740
uuucggcggcggaaacaug

SEQ ID NO: 763742 - RNA, 19 nt, Artificial Sequence
  Description of Artificial Sequence: Synthetic oligonucleotide
  Sense strand starting at position 1948 of SEQ ID NO: 587060
auguuuccgccgccgaaau

SEQ ID NO: 763743 - RNA, 19 nt, Artificial Sequence
  Description of Artificial Sequence: Synthetic oligonucleotide
  Antisense strand to SEQ ID NO: 763742
auuucggcggcggaaacau

SEQ ID NO: 763744 - RNA, 19 nt, Artificial Sequence
  Description of Artificial Sequence: Synthetic oligonucleotide
  Sense strand starting at position 2188 of SEQ ID NO: 587060
caaagaucaggcugacagu

SEQ ID NO: 763745 - RNA, 19 nt, Artificial Sequence
  Description of Artificial Sequence: Synthetic oligonucleotide
  Antisense strand to SEQ ID NO: 763744
acugucagccugaucuuug

SEQ ID NO: 763746 - RNA, 19 nt, Artificial Sequence
  Description of Artificial Sequence: Synthetic oligonucleotide
  Sense strand starting at position 2201 of SEQ ID NO: 587060
gacagugcccaucaagcau

SEQ ID NO: 763747 - RNA, 19 nt, Artificial Sequence
  Description of Artificial Sequence: Synthetic oligonucleotide
  Antisense strand to SEQ ID NO: 763746
augcuugaugggcacuguc

SEQ ID NO: 763748 - RNA, 19 nt, Artificial Sequence
  Description of Artificial Sequence: Synthetic oligonucleotide
  Sense strand starting at position 2296 of SEQ ID NO: 587060
ggaggcguugcugcucauu

SEQ ID NO: 763749 - RNA, 19 nt, Artificial Sequence
  Description of Artificial Sequence: Synthetic oligonucleotide
  Antisense strand to SEQ ID NO: 763748
aaugagcagcaacgccucc

SEQ ID NO: 763750 - RNA, 19 nt, Artificial Sequence
  Description of Artificial Sequence: Synthetic oligonucleotide
  Sense strand starting at position 2330 of SEQ ID NO: 587060
auauauggcuuuguaacca

SEQ ID NO: 763751 - RNA, 19 nt, Artificial Sequence
  Description of Artificial Sequence: Synthetic oligonucleotide
  Antisense strand to SEQ ID NO: 763750
ugguuacaaagccauauau

SEQ ID NO: 763752 - RNA, 19 nt, Artificial Sequence
  Description of Artificial Sequence: Synthetic oligonucleotide
  Sense strand starting at position 2570 of SEQ ID NO: 587060
uccauaauagagugugaau

SEQ ID NO: 763753 - RNA, 19 nt, Artificial Sequence
  Description of Artificial Sequence: Synthetic oligonucleotide
  Antisense strand to SEQ ID NO: 763752
auucacacucuauuaugga

SEQ ID NO: 763754 - RNA, 19 nt, Artificial Sequence
  Description of Artificial Sequence: Synthetic oligonucleotide
  Sense strand starting at position 2658 of SEQ ID NO: 587060
gauugagauucugcauaug

SEQ ID NO: 763755 - RNA, 19 nt, Artificial Sequence
  Description of Artificial Sequence: Synthetic oligonucleotide
  Antisense strand to SEQ ID NO: 763754
cauaugcagaaucucaauc

SEQ ID NO: 763756 - RNA, 19 nt, Artificial Sequence
  Description of Artificial Sequence: Synthetic oligonucleotide
  Sense strand starting at position 2663 of SEQ ID NO: 587060
agauucugcauauguggau

SEQ ID NO: 763757 - RNA, 19 nt, Artificial Sequence
  Description of Artificial Sequence: Synthetic oligonucleotide
  Antisense strand to SEQ ID NO: 763756
auccacauaugcagaaucu

SEQ ID NO: 763758 - RNA, 19 nt, Artificial Sequence
  Description of Artificial Sequence: Synthetic oligonucleotide
  Sense strand starting at position 2667 of SEQ ID NO: 587060
ucugcauauguggaugaaa

SEQ ID NO: 763759 - RNA, 19 nt, Artificial Sequence
  Description of Artificial Sequence: Synthetic oligonucleotide
  Antisense strand to SEQ ID NO: 763758
uuucauccacauaugcaga

SEQ ID NO: 763760 - RNA, 19 nt, Artificial Sequence
  Description of Artificial Sequence: Synthetic oligonucleotide
  Sense strand starting at position 2690 of SEQ ID NO: 587060
ugaguuagauucucucuag

SEQ ID NO: 763761 - RNA, 19 nt, Artificial Sequence
  Description of Artificial Sequence: Synthetic oligonucleotide
  Antisense strand to SEQ ID NO: 763760
cuagagagaaucuaacuca

SEQ ID NO: 763762 - RNA, 19 nt, Artificial Sequence
  Description of Artificial Sequence: Synthetic oligonucleotide
  Sense strand starting at position 2691 of SEQ ID NO: 587060
gaguuagauucucucuaga

SEQ ID NO: 763763 - RNA, 19 nt, Artificial Sequence
  Description of Artificial Sequence: Synthetic oligonucleotide
  Antisense strand to SEQ ID NO: 763762
ucuagagagaaucuaacuc

SEQ ID NO: 763764 - RNA, 19 nt, Artificial Sequence
  Description of Artificial Sequence: Synthetic oligonucleotide
  Sense strand starting at position 2693 of SEQ ID NO: 587060
guuagauucucucuagacu

SEQ ID NO: 763765 - RNA, 19 nt, Artificial Sequence
  Description of Artificial Sequence: Synthetic oligonucleotide
  Antisense strand to SEQ ID NO: 763764
agucuagagagaaucuaac

SEQ ID NO: 763766 - RNA, 19 nt, Artificial Sequence
  Description of Artificial Sequence: Synthetic oligonucleotide
  Sense strand starting at position 2839 of SEQ ID NO: 587060
ucaacuugccuuuaaugga

SEQ ID NO: 763767 - RNA, 19 nt, Artificial Sequence
  Description of Artificial Sequence: Synthetic oligonucleotide
  Antisense strand to SEQ ID NO: 763766
uccauuaaaggcaaguuga

SEQ ID NO: 763768 - RNA, 19 nt, Artificial Sequence
  Description of Artificial Sequence: Synthetic oligonucleotide
  Sense strand starting at position 2945 of SEQ ID NO: 587060
cgcugaaaugcugaacacu

SEQ ID NO: 763769 - RNA, 19 nt, Artificial Sequence
  Description of Artificial Sequence: Synthetic oligonucleotide
  Antisense strand to SEQ ID NO: 763768
aguguucagcauuucagcg

SEQ ID NO: 763770 - RNA, 19 nt, Artificial Sequence
  Description of Artificial Sequence: Synthetic oligonucleotide
  Sense strand starting at position 2954 of SEQ ID NO: 587060
gcugaacacuuguuuaacu

SEQ ID NO: 763771 - RNA, 19 nt, Artificial Sequence
  Description of Artificial Sequence: Synthetic oligonucleotide
  Antisense strand to SEQ ID NO: 763770
aguuaaacaaguguucagc

SEQ ID NO: 763772 - RNA, 19 nt, Artificial Sequence
  Description of Artificial Sequence: Synthetic oligonucleotide
  Sense strand starting at position 2987 of SEQ ID NO: 587060
gcuggaagccaugagucaa

SEQ ID NO: 763773 - RNA, 19 nt, Artificial Sequence
  Description of Artificial Sequence: Synthetic oligonucleotide
  Antisense strand to SEQ ID NO: 763772
uugacucauggcuuccagc

SEQ ID NO: 763774 - RNA, 19 nt, Artificial Sequence
  Description of Artificial Sequence: Synthetic oligonucleotide
  Sense strand starting at position 3029 of SEQ ID NO: 587060
ccaggucaccuguaggagu

SEQ ID NO: 763775 - RNA, 19 nt, Artificial Sequence
  Description of Artificial Sequence: Synthetic oligonucleotide
  Antisense strand to SEQ ID NO: 763774
acuccuacaggugaccugg

SEQ ID NO: 763776 - RNA, 19 nt, Artificial Sequence
  Description of Artificial Sequence: Synthetic oligonucleotide
  Sense strand starting at position 3031 of SEQ ID NO: 587060
aggucaccuguaggaguau

SEQ ID NO: 763777 - RNA, 19 nt, Artificial Sequence
  Description of Artificial Sequence: Synthetic oligonucleotide
  Antisense strand to SEQ ID NO: 763776
auacuccuacaggugaccu

SEQ ID NO: 763778 - RNA, 19 nt, Artificial Sequence
  Description of Artificial Sequence: Synthetic oligonucleotide
  Sense strand starting at position 3044 of SEQ ID NO: 587060
gaguauagcaaguguagag

SEQ ID NO: 763779 - RNA, 19 nt, Artificial Sequence
  Description of Artificial Sequence: Synthetic oligonucleotide
  Antisense strand to SEQ ID NO: 763778
cucuacacuugcuauacuc

SEQ ID NO: 763780 - RNA, 19 nt, Artificial Sequence
  Description of Artificial Sequence: Synthetic oligonucleotide
  Sense strand starting at position 3133 of SEQ ID NO: 587060
acaugucagagaugcaaga

SEQ ID NO: 763781 - RNA, 19 nt, Artificial Sequence
  Description of Artificial Sequence: Synthetic oligonucleotide
  Antisense strand to SEQ ID NO: 763780
ucuugcaucucugacaugu

SEQ ID NO: 763782 - RNA, 19 nt, Artificial Sequence
  Description of Artificial Sequence: Synthetic oligonucleotide
  Sense strand starting at position 3222 of SEQ ID NO: 587060
cuguguacauuucugggua

SEQ ID NO: 763783 - RNA, 19 nt, Artificial Sequence
  Description of Artificial Sequence: Synthetic oligonucleotide
  Antisense strand to SEQ ID NO: 763782
uacccagaaauguacacag

SEQ ID NO: 763784 - RNA, 19 nt, Artificial Sequence
  Description of Artificial Sequence: Synthetic oligonucleotide
  Sense strand starting at position 3244 of SEQ ID NO: 587060
ugugacagacucuguacua

SEQ ID NO: 763785 - RNA, 19 nt, Artificial Sequence
  Description of Artificial Sequence: Synthetic oligonucleotide
  Antisense strand to SEQ ID NO: 763784
uaguacagagucugucaca

SEQ ID NO: 763786 - RNA, 19 nt, Artificial Sequence
  Description of Artificial Sequence: Synthetic oligonucleotide
  Sense strand starting at position 3451 of SEQ ID NO: 587060
gguugcuuuccauaacuaa

SEQ ID NO: 763787 - RNA, 19 nt, Artificial Sequence
  Description of Artificial Sequence: Synthetic oligonucleotide
  Antisense strand to SEQ ID NO: 763786
uuaguuauggaaagcaacc

SEQ ID NO: 763788 - RNA, 19 nt, Artificial Sequence
  Description of Artificial Sequence: Synthetic oligonucleotide
  Sense strand starting at position 3542 of SEQ ID NO: 587060
cugauugugggccacuaua

SEQ ID NO: 763789 - RNA, 19 nt, Artificial Sequence
  Description of Artificial Sequence: Synthetic oligonucleotide
  Antisense strand to SEQ ID NO: 763788
uauaguggcccacaaucag

SEQ ID NO: 763790 - RNA, 19 nt, Artificial Sequence
  Description of Artificial Sequence: Synthetic oligonucleotide
  Sense strand starting at position 3596 of SEQ ID NO: 587060
accucuagaggguguuuau

SEQ ID NO: 763791 - RNA, 19 nt, Artificial Sequence
  Description of Artificial Sequence: Synthetic oligonucleotide
  Antisense strand to SEQ ID NO: 763790
auaaacacccucuagaggu

SEQ ID NO: 763792 - RNA, 19 nt, Artificial Sequence
  Description of Artificial Sequence: Synthetic oligonucleotide
  Sense strand starting at position 3945 of SEQ ID NO: 587060
cucacuaaaucagugguuu

SEQ ID NO: 763793 - RNA, 19 nt, Artificial Sequence
  Description of Artificial Sequence: Synthetic oligonucleotide
  Antisense strand to SEQ ID NO: 763792
aaaccacugauuuagugag

SEQ ID NO: 763794 - RNA, 19 nt, Artificial Sequence
  Description of Artificial Sequence: Synthetic oligonucleotide
  Sense strand starting at position 29 of SEQ ID NO: 587061
cuggguuuccauuguguac

SEQ ID NO: 763795 - RNA, 19 nt, Artificial Sequence
  Description of Artificial Sequence: Synthetic oligonucleotide
  Antisense strand to SEQ ID NO: 763794
guacacaauggaaacccag

SEQ ID NO: 763796 - RNA, 19 nt, Artificial Sequence
  Description of Artificial Sequence: Synthetic oligonucleotide
  Sense strand starting at position 163 of SEQ ID NO: 587061
uccuuagauccuuaguuga

SEQ ID NO: 763797 - RNA, 19 nt, Artificial Sequence
  Description of Artificial Sequence: Synthetic oligonucleotide
  Antisense strand to SEQ ID NO: 763796
ucaacuaaggaucuaagga

SEQ ID NO: 763798 - RNA, 19 nt, Artificial Sequence
  Description of Artificial Sequence: Synthetic oligonucleotide
  Sense strand starting at position 165 of SEQ ID NO: 587061
cuuagauccuuaguugaca

SEQ ID NO: 763799 - RNA, 19 nt, Artificial Sequence
  Description of Artificial Sequence: Synthetic oligonucleotide
  Antisense strand to SEQ ID NO: 763798
ugucaacuaaggaucuaag

SEQ ID NO: 763800 - RNA, 19 nt, Artificial Sequence
  Description of Artificial Sequence: Synthetic oligonucleotide
  Sense strand starting at position 166 of SEQ ID NO: 587061
uuagauccuuaguugacau

SEQ ID NO: 763801 - RNA, 19 nt, Artificial Sequence
  Description of Artificial Sequence: Synthetic oligonucleotide
  Antisense strand to SEQ ID NO: 763800
augucaacuaaggaucuaa

SEQ ID NO: 763802 - RNA, 19 nt, Artificial Sequence
  Description of Artificial Sequence: Synthetic oligonucleotide
  Sense strand starting at position 173 of SEQ ID NO: 587061
cuuaguugacauuaacugu

SEQ ID NO: 763803 - RNA, 19 nt, Artificial Sequence
  Description of Artificial Sequence: Synthetic oligonucleotide
  Antisense strand to SEQ ID NO: 763802
acaguuaaugucaacuaag

SEQ ID NO: 763804 - RNA, 19 nt, Artificial Sequence
  Description of Artificial Sequence: Synthetic oligonucleotide
  Sense strand starting at position 246 of SEQ ID NO: 587061
gagagcagacagugugaau

SEQ ID NO: 763805 - RNA, 19 nt, Artificial Sequence
  Description of Artificial Sequence: Synthetic oligonucleotide
  Antisense strand to SEQ ID NO: 763804
auucacacugucugcucuc

SEQ ID NO: 763806 - RNA, 19 nt, Artificial Sequence
  Description of Artificial Sequence: Synthetic oligonucleotide
  Sense strand starting at position 311 of SEQ ID NO: 587061
agggaaugguccuagauaa

SEQ ID NO: 763807 - RNA, 19 nt, Artificial Sequence
  Description of Artificial Sequence: Synthetic oligonucleotide
  Antisense strand to SEQ ID NO: 763806
uuaucuaggaccauucccu

SEQ ID NO: 763808 - RNA, 19 nt, Artificial Sequence
  Description of Artificial Sequence: Synthetic oligonucleotide
  Sense strand starting at position 318 of SEQ ID NO: 587061
gguccuagauaaucagauc

SEQ ID NO: 763809 - RNA, 19 nt, Artificial Sequence
  Description of Artificial Sequence: Synthetic oligonucleotide
  Antisense strand to SEQ ID NO: 763808
gaucugauuaucuaggacc

SEQ ID NO: 763810 - RNA, 19 nt, Artificial Sequence
  Description of Artificial Sequence: Synthetic oligonucleotide
  Sense strand starting at position 540 of SEQ ID NO: 587061
cgaucugcaucaccugaaa

SEQ ID NO: 763811 - RNA, 19 nt, Artificial Sequence
  Description of Artificial Sequence: Synthetic oligonucleotide
  Antisense strand to SEQ ID NO: 763810
uuucaggugaugcagaucg

SEQ ID NO: 763812 - RNA, 19 nt, Artificial Sequence
  Description of Artificial Sequence: Synthetic oligonucleotide
  Sense strand starting at position 783 of SEQ ID NO: 587061
cugaguuuggcccagagga

SEQ ID NO: 763813 - RNA, 19 nt, Artificial Sequence
  Description of Artificial Sequence: Synthetic oligonucleotide
  Antisense strand to SEQ ID NO: 763812
uccucugggccaaacucag

SEQ ID NO: 763814 - RNA, 19 nt, Artificial Sequence
  Description of Artificial Sequence: Synthetic oligonucleotide
  Sense strand starting at position 908 of SEQ ID NO: 587061
agagaaucacaucgcuaag

SEQ ID NO: 763815 - RNA, 19 nt, Artificial Sequence
  Description of Artificial Sequence: Synthetic oligonucleotide
  Antisense strand to SEQ ID NO: 763814
cuuagcgaugugauucucu

SEQ ID NO: 763816 - RNA, 19 nt, Artificial Sequence
  Description of Artificial Sequence: Synthetic oligonucleotide
  Sense strand starting at position 910 of SEQ ID NO: 587061
agaaucacaucgcuaagua

SEQ ID NO: 763817 - RNA, 19 nt, Artificial Sequence
  Description of Artificial Sequence: Synthetic oligonucleotide
  Antisense strand to SEQ ID NO: 763816
uacuuagcgaugugauucu

SEQ ID NO: 763818 - RNA, 19 nt, Artificial Sequence
  Description of Artificial Sequence: Synthetic oligonucleotide
  Sense strand starting at position 914 of SEQ ID NO: 587061
ucacaucgcuaaguaagaa

SEQ ID NO: 763819 - RNA, 19 nt, Artificial Sequence
  Description of Artificial Sequence: Synthetic oligonucleotide
  Antisense strand to SEQ ID NO: 763818
uucuuacuuagcgauguga

SEQ ID NO: 763820 - RNA, 19 nt, Artificial Sequence
  Description of Artificial Sequence: Synthetic oligonucleotide
  Sense strand starting at position 1278 of SEQ ID NO: 587061
cgcagauuucauuggaguu

SEQ ID NO: 763821 - RNA, 19 nt, Artificial Sequence
  Description of Artificial Sequence: Synthetic oligonucleotide
  Antisense strand to SEQ ID NO: 763820
aacuccaaugaaaucugcg

SEQ ID NO: 763822 - RNA, 19 nt, Artificial Sequence
  Description of Artificial Sequence: Synthetic oligonucleotide
  Sense strand starting at position 1991 of SEQ ID NO: 587061
ggagaaguggguugagagu

SEQ ID NO: 763823 - RNA, 19 nt, Artificial Sequence
  Description of Artificial Sequence: Synthetic oligonucleotide
  Antisense strand to SEQ ID NO: 763822
acucucaacccacuucucc

SEQ ID NO: 763824 - RNA, 19 nt, Artificial Sequence
  Description of Artificial Sequence: Synthetic oligonucleotide
  Sense strand starting at position 2588 of SEQ ID NO: 587061
ccugguuuccaggaggacu

SEQ ID NO: 763825 - RNA, 19 nt, Artificial Sequence
  Description of Artificial Sequence: Synthetic oligonucleotide
  Antisense strand to SEQ ID NO: 763824
aguccuccuggaaaccagg

SEQ ID NO: 763826 - RNA, 19 nt, Artificial Sequence
  Description of Artificial Sequence: Synthetic oligonucleotide
  Sense strand starting at position 3089 of SEQ ID NO: 587061
gucugaagcuccuuuguac

SEQ ID NO: 763827 - RNA, 19 nt, Artificial Sequence
  Description of Artificial Sequence: Synthetic oligonucleotide
  Antisense strand to SEQ ID NO: 763826
guacaaaggagcuucagac

SEQ ID NO: 763828 - RNA, 19 nt, Artificial Sequence
  Description of Artificial Sequence: Synthetic oligonucleotide
  Sense strand starting at position 3106 of SEQ ID NO: 587061
acgugugcggaauugucua

SEQ ID NO: 763829 - RNA, 19 nt, Artificial Sequence
  Description of Artificial Sequence: Synthetic oligonucleotide
  Antisense strand to SEQ ID NO: 763828
uagacaauuccgcacacgu

SEQ ID NO: 763830 - RNA, 19 nt, Artificial Sequence
  Description of Artificial Sequence: Synthetic oligonucleotide
  Sense strand starting at position 3114 of SEQ ID NO: 587061
ggaauugucuaacuccugu

SEQ ID NO: 763831 - RNA, 19 nt, Artificial Sequence
  Description of Artificial Sequence: Synthetic oligonucleotide
  Antisense strand to SEQ ID NO: 763830
acaggaguuagacaauucc

SEQ ID NO: 763832 - RNA, 19 nt, Artificial Sequence
  Description of Artificial Sequence: Synthetic oligonucleotide
  Sense strand starting at position 3167 of SEQ ID NO: 587061
gagugaaacugcuuugaaa

SEQ ID NO: 763833 - RNA, 19 nt, Artificial Sequence
  Description of Artificial Sequence: Synthetic oligonucleotide
  Antisense strand to SEQ ID NO: 763832
uuucaaagcaguuucacuc

SEQ ID NO: 763834 - RNA, 19 nt, Artificial Sequence
  Description of Artificial Sequence: Synthetic oligonucleotide
  Sense strand starting at position 3196 of SEQ ID NO: 587061
guacgaaugggagguguua

SEQ ID NO: 763835 - RNA, 19 nt, Artificial Sequence
  Description of Artificial Sequence: Synthetic oligonucleotide
  Antisense strand to SEQ ID NO: 763834
uaacaccucccauucguac

SEQ ID NO: 763836 - RNA, 19 nt, Artificial Sequence
  Description of Artificial Sequence: Synthetic oligonucleotide
  Sense strand starting at position 3198 of SEQ ID NO: 587061
acgaaugggagguguuauu

SEQ ID NO: 763837 - RNA, 19 nt, Artificial Sequence
  Description of Artificial Sequence: Synthetic oligonucleotide
  Antisense strand to SEQ ID NO: 763836
aauaacaccucccauucgu

SEQ ID NO: 763838 - RNA, 19 nt, Artificial Sequence
  Description of Artificial Sequence: Synthetic oligonucleotide
  Sense strand starting at position 3244 of SEQ ID NO: 587061
cugugauacuuagccagga

SEQ ID NO: 763839 - RNA, 19 nt, Artificial Sequence
  Description of Artificial Sequence: Synthetic oligonucleotide
  Antisense strand to SEQ ID NO: 763838
uccuggcuaaguaucacag

SEQ ID NO: 763840 - RNA, 19 nt, Artificial Sequence
  Description of Artificial Sequence: Synthetic oligonucleotide
  Sense strand starting at position 3245 of SEQ ID NO: 587061
ugugauacuuagccaggau

SEQ ID NO: 763841 - RNA, 19 nt, Artificial Sequence
  Description of Artificial Sequence: Synthetic oligonucleotide
  Antisense strand to SEQ ID NO: 763840
auccuggcuaaguaucaca

SEQ ID NO: 763842 - RNA, 19 nt, Artificial Sequence
  Description of Artificial Sequence: Synthetic oligonucleotide
  Sense strand starting at position 3246 of SEQ ID NO: 587061
gugauacuuagccaggaug

SEQ ID NO: 763843 - RNA, 19 nt, Artificial Sequence
  Description of Artificial Sequence: Synthetic oligonucleotide
  Antisense strand to SEQ ID NO: 763842
cauccuggcuaaguaucac

SEQ ID NO: 763844 - RNA, 19 nt, Artificial Sequence
  Description of Artificial Sequence: Synthetic oligonucleotide
  Sense strand starting at position 3268 of SEQ ID NO: 587061
auuagaauugccuaugcag

SEQ ID NO: 763845 - RNA, 19 nt, Artificial Sequence
  Description of Artificial Sequence: Synthetic oligonucleotide
  Antisense strand to SEQ ID NO: 763844
cugcauaggcaauucuaau

SEQ ID NO: 763846 - RNA, 19 nt, Artificial Sequence
  Description of Artificial Sequence: Synthetic oligonucleotide
  Sense strand starting at position 3270 of SEQ ID NO: 587061
uagaauugccuaugcagga

SEQ ID NO: 763847 - RNA, 19 nt, Artificial Sequence
  Description of Artificial Sequence: Synthetic oligonucleotide
  Antisense strand to SEQ ID NO: 763846
uccugcauaggcaauucua

SEQ ID NO: 763848 - RNA, 19 nt, Artificial Sequence
  Description of Artificial Sequence: Synthetic oligonucleotide
  Sense strand starting at position 3271 of SEQ ID NO: 587061
agaauugccuaugcaggau

SEQ ID NO: 763849 - RNA, 19 nt, Artificial Sequence
  Description of Artificial Sequence: Synthetic oligonucleotide
  Antisense strand to SEQ ID NO: 763848
auccugcauaggcaauucu

SEQ ID NO: 763850 - RNA, 19 nt, Artificial Sequence
  Description of Artificial Sequence: Synthetic oligonucleotide
  Sense strand starting at position 3314 of SEQ ID NO: 587061
uucuaaagugcaugugaag

SEQ ID NO: 763851 - RNA, 19 nt, Artificial Sequence
  Description of Artificial Sequence: Synthetic oligonucleotide
  Antisense strand to SEQ ID NO: 763850
cuucacaugcacuuuagaa

SEQ ID NO: 763852 - RNA, 19 nt, Artificial Sequence
  Description of Artificial Sequence: Synthetic oligonucleotide
  Sense strand starting at position 3407 of SEQ ID NO: 587061
agcauuaagcuccauguua

SEQ ID NO: 763853 - RNA, 19 nt, Artificial Sequence
  Description of Artificial Sequence: Synthetic oligonucleotide
  Antisense strand to SEQ ID NO: 763852
uaacauggagcuuaaugcu

SEQ ID NO: 763854 - RNA, 19 nt, Artificial Sequence
  Description of Artificial Sequence: Synthetic oligonucleotide
  Sense strand starting at position 3433 of SEQ ID NO: 587061
gguaaugaugccuagccca

SEQ ID NO: 763855 - RNA, 19 nt, Artificial Sequence
  Description of Artificial Sequence: Synthetic oligonucleotide
  Antisense strand to SEQ ID NO: 763854
ugggcuaggcaucauuacc

SEQ ID NO: 763856 - RNA, 19 nt, Artificial Sequence
  Description of Artificial Sequence: Synthetic oligonucleotide
  Sense strand starting at position 3440 of SEQ ID NO: 587061
augccuagcccaugagaca

SEQ ID NO: 763857 - RNA, 19 nt, Artificial Sequence
  Description of Artificial Sequence: Synthetic oligonucleotide
  Antisense strand to SEQ ID NO: 763856
ugucucaugggcuaggcau

SEQ ID NO: 763858 - RNA, 19 nt, Artificial Sequence
  Description of Artificial Sequence: Synthetic oligonucleotide
  Sense strand starting at position 3441 of SEQ ID NO: 587061
ugccuagcccaugagacau

SEQ ID NO: 763859 - RNA, 19 nt, Artificial Sequence
  Description of Artificial Sequence: Synthetic oligonucleotide
  Antisense strand to SEQ ID NO: 763858
augucucaugggcuaggca

SEQ ID NO: 763860 - RNA, 19 nt, Artificial Sequence
  Description of Artificial Sequence: Synthetic oligonucleotide
  Sense strand starting at position 3459 of SEQ ID NO: 587061
ugccaaugggcagaauaua

SEQ ID NO: 763861 - RNA, 19 nt, Artificial Sequence
  Description of Artificial Sequence: Synthetic oligonucleotide
  Antisense strand to SEQ ID NO: 763860
uauauucugcccauuggca

SEQ ID NO: 763862 - RNA, 19 nt, Artificial Sequence
  Description of Artificial Sequence: Synthetic oligonucleotide
  Sense strand starting at position 3482 of SEQ ID NO: 587061
cuagaauaggccuacauuc

SEQ ID NO: 763863 - RNA, 19 nt, Artificial Sequence
  Description of Artificial Sequence: Synthetic oligonucleotide
  Antisense strand to SEQ ID NO: 763862
gaauguaggccuauucuag

SEQ ID NO: 763864 - RNA, 19 nt, Artificial Sequence
  Description of Artificial Sequence: Synthetic oligonucleotide
  Sense strand starting at position 3513 of SEQ ID NO: 587061
cauuucugcucaggagaga

SEQ ID NO: 763865 - RNA, 19 nt, Artificial Sequence
  Description of Artificial Sequence: Synthetic oligonucleotide
  Antisense strand to SEQ ID NO: 763864
ucucuccugagcagaaaug

SEQ ID NO: 763866 - RNA, 19 nt, Artificial Sequence
  Description of Artificial Sequence: Synthetic oligonucleotide
  Sense strand starting at position 3568 of SEQ ID NO: 587061
gcaaauggaacguaucuuu

SEQ ID NO: 763867 - RNA, 19 nt, Artificial Sequence
  Description of Artificial Sequence: Synthetic oligonucleotide
  Antisense strand to SEQ ID NO: 763866
aaagauacguuccauuugc

SEQ ID NO: 763868 - RNA, 19 nt, Artificial Sequence
  Description of Artificial Sequence: Synthetic oligonucleotide
  Sense strand starting at position 3591 of SEQ ID NO: 587061
aguuaaacaucugaaugac

SEQ ID NO: 763869 - RNA, 19 nt, Artificial Sequence
  Description of Artificial Sequence: Synthetic oligonucleotide
  Antisense strand to SEQ ID NO: 763868
gucauucagauguuuaacu

SEQ ID NO: 763870 - RNA, 19 nt, Artificial Sequence
  Description of Artificial Sequence: Synthetic oligonucleotide
  Sense strand starting at position 3670 of SEQ ID NO: 587061
uccagauggucggcauuua

SEQ ID NO: 763871 - RNA, 19 nt, Artificial Sequence
  Description of Artificial Sequence: Synthetic oligonucleotide
  Antisense strand to SEQ ID NO: 763870
uaaaugccgaccaucugga

SEQ ID NO: 763872 - RNA, 19 nt, Artificial Sequence
  Description of Artificial Sequence: Synthetic oligonucleotide
  Sense strand starting at position 3809 of SEQ ID NO: 587061
gaacauggauuguaugaau

SEQ ID NO: 763873 - RNA, 19 nt, Artificial Sequence
  Description of Artificial Sequence: Synthetic oligonucleotide
  Antisense strand to SEQ ID NO: 763872
auucauacaauccauguuc

SEQ ID NO: 763874 - RNA, 19 nt, Artificial Sequence
  Description of Artificial Sequence: Synthetic oligonucleotide
  Sense strand starting at position 175 of SEQ ID NO: 587062
ggcccauaguucucuuauu

SEQ ID NO: 763875 - RNA, 19 nt, Artificial Sequence
  Description of Artificial Sequence: Synthetic oligonucleotide
  Antisense strand to SEQ ID NO: 763874
aauaagagaacuaugggcc

SEQ ID NO: 763876 - RNA, 19 nt, Artificial Sequence
  Description of Artificial Sequence: Synthetic oligonucleotide
  Sense strand starting at position 176 of SEQ ID NO: 587062
gcccauaguucucuuauua

SEQ ID NO: 763877 - RNA, 19 nt, Artificial Sequence
  Description of Artificial Sequence: Synthetic oligonucleotide
  Antisense strand to SEQ ID NO: 763876
uaauaagagaacuaugggc

SEQ ID NO: 763878 - RNA, 19 nt, Artificial Sequence
  Description of Artificial Sequence: Synthetic oligonucleotide
  Sense strand starting at position 180 of SEQ ID NO: 587062
auaguucucuuauuaugag

SEQ ID NO: 763879 - RNA, 19 nt, Artificial Sequence
  Description of Artificial Sequence: Synthetic oligonucleotide
  Antisense strand to SEQ ID NO: 763878
cucauaauaagagaacuau

SEQ ID NO: 763880 - RNA, 19 nt, Artificial Sequence
  Description of Artificial Sequence: Synthetic oligonucleotide
  Sense strand starting at position 186 of SEQ ID NO: 587062
cucuuauuaugagugaggu

SEQ ID NO: 763881 - RNA, 19 nt, Artificial Sequence
  Description of Artificial Sequence: Synthetic oligonucleotide
  Antisense strand to SEQ ID NO: 763880
accucacucauaauaagag

SEQ ID NO: 763882 - RNA, 19 nt, Artificial Sequence
  Description of Artificial Sequence: Synthetic oligonucleotide
  Sense strand starting at position 196 of SEQ ID NO: 587062
gagugagguugguugucuu

SEQ ID NO: 763883 - RNA, 19 nt, Artificial Sequence
  Description of Artificial Sequence: Synthetic oligonucleotide
  Antisense strand to SEQ ID NO: 763882
aagacaaccaaccucacuc

SEQ ID NO: 763884 - RNA, 19 nt, Artificial Sequence
  Description of Artificial Sequence: Synthetic oligonucleotide
  Sense strand starting at position 310 of SEQ ID NO: 587062
auggaaguucuuuaucuau

SEQ ID NO: 763885 - RNA, 19 nt, Artificial Sequence
  Description of Artificial Sequence: Synthetic oligonucleotide
  Antisense strand to SEQ ID NO: 763884
auagauaaagaacuuccau

SEQ ID NO: 763886 - RNA, 19 nt, Artificial Sequence
  Description of Artificial Sequence: Synthetic oligonucleotide
  Sense strand starting at position 312 of SEQ ID NO: 587062
ggaaguucuuuaucuauuc

SEQ ID NO: 763887 - RNA, 19 nt, Artificial Sequence
  Description of Artificial Sequence: Synthetic oligonucleotide
  Antisense strand to SEQ ID NO: 763886
gaauagauaaagaacuucc

SEQ ID NO: 763888 - RNA, 19 nt, Artificial Sequence
  Description of Artificial Sequence: Synthetic oligonucleotide
  Sense strand starting at position 334 of SEQ ID NO: 587062
aaauuaccguuugugauau

SEQ ID NO: 763889 - RNA, 19 nt, Artificial Sequence
  Description of Artificial Sequence: Synthetic oligonucleotide
  Antisense strand to SEQ ID NO: 763888
auaucacaaacgguaauuu

SEQ ID NO: 763890 - RNA, 19 nt, Artificial Sequence
  Description of Artificial Sequence: Synthetic oligonucleotide
  Sense strand starting at position 340 of SEQ ID NO: 587062
ccguuugugauaugaguuu

SEQ ID NO: 763891 - RNA, 19 nt, Artificial Sequence
  Description of Artificial Sequence: Synthetic oligonucleotide
  Antisense strand to SEQ ID NO: 763890
aaacucauaucacaaacgg

SEQ ID NO: 763892 - RNA, 19 nt, Artificial Sequence
  Description of Artificial Sequence: Synthetic oligonucleotide
  Sense strand starting at position 390 of SEQ ID NO: 587062
uuugaccuugcuuguauau

SEQ ID NO: 763893 - RNA, 19 nt, Artificial Sequence
  Description of Artificial Sequence: Synthetic oligonucleotide
  Antisense strand to SEQ ID NO: 763892
auauacaagcaaggucaaa

SEQ ID NO: 763894 - RNA, 19 nt, Artificial Sequence
  Description of Artificial Sequence: Synthetic oligonucleotide
  Sense strand starting at position 611 of SEQ ID NO: 587062
caaguucuguugcugucau

SEQ ID NO: 763895 - RNA, 19 nt, Artificial Sequence
  Description of Artificial Sequence: Synthetic oligonucleotide
  Antisense strand to SEQ ID NO: 763894
augacagcaacagaacuug

SEQ ID NO: 763896 - RNA, 19 nt, Artificial Sequence
  Description of Artificial Sequence: Synthetic oligonucleotide
  Sense strand starting at position 630 of SEQ ID NO: 587062
ucagauguuuaacuucuga

SEQ ID NO: 763897 - RNA, 19 nt, Artificial Sequence
  Description of Artificial Sequence: Synthetic oligonucleotide
  Antisense strand to SEQ ID NO: 763896
ucagaaguuaaacaucuga

SEQ ID NO: 763898 - RNA, 19 nt, Artificial Sequence
  Description of Artificial Sequence: Synthetic oligonucleotide
  Sense strand starting at position 634 of SEQ ID NO: 587062
auguuuaacuucugaaaga

SEQ ID NO: 763899 - RNA, 19 nt, Artificial Sequence
  Description of Artificial Sequence: Synthetic oligonucleotide
  Antisense strand to SEQ ID NO: 763898
ucuuucagaaguuaaacau

SEQ ID NO: 763900 - RNA, 19 nt, Artificial Sequence
  Description of Artificial Sequence: Synthetic oligonucleotide
  Sense strand starting at position 635 of SEQ ID NO: 587062
uguuuaacuucugaaagau

SEQ ID NO: 763901 - RNA, 19 nt, Artificial Sequence
  Description of Artificial Sequence: Synthetic oligonucleotide
  Antisense strand to SEQ ID NO: 763900
aucuuucagaaguuaaaca

SEQ ID NO: 763902 - RNA, 19 nt, Artificial Sequence
  Description of Artificial Sequence: Synthetic oligonucleotide
  Sense strand starting at position 644 of SEQ ID NO: 587062
ucugaaagauacguuccau

SEQ ID NO: 763903 - RNA, 19 nt, Artificial Sequence
  Description of Artificial Sequence: Synthetic oligonucleotide
  Antisense strand to SEQ ID NO: 763902
auggaacguaucuuucaga

SEQ ID NO: 763904 - RNA, 19 nt, Artificial Sequence
  Description of Artificial Sequence: Synthetic oligonucleotide
  Sense strand starting at position 652 of SEQ ID NO: 587062
auacguuccauuugcggaa

SEQ ID NO: 763905 - RNA, 19 nt, Artificial Sequence
  Description of Artificial Sequence: Synthetic oligonucleotide
  Antisense strand to SEQ ID NO: 763904
uuccgcaaauggaacguau

SEQ ID NO: 763906 - RNA, 19 nt, Artificial Sequence
  Description of Artificial Sequence: Synthetic oligonucleotide
  Sense strand starting at position 701 of SEQ ID NO: 587062
auucucuccugagcagaaa

SEQ ID NO: 763907 - RNA, 19 nt, Artificial Sequence
  Description of Artificial Sequence: Synthetic oligonucleotide
  Antisense strand to SEQ ID NO: 763906
uuucugcucaggagagaau

SEQ ID NO: 763908 - RNA, 19 nt, Artificial Sequence
  Description of Artificial Sequence: Synthetic oligonucleotide
  Sense strand starting at position 702 of SEQ ID NO: 587062
uucucuccugagcagaaau

SEQ ID NO: 763909 - RNA, 19 nt, Artificial Sequence
  Description of Artificial Sequence: Synthetic oligonucleotide
  Antisense strand to SEQ ID NO: 763908
auuucugcucaggagagaa

SEQ ID NO: 763910 - RNA, 19 nt, Artificial Sequence
  Description of Artificial Sequence: Synthetic oligonucleotide
  Sense strand starting at position 730 of SEQ ID NO: 587062
cuaggaauguaggccuauu

SEQ ID NO: 763911 - RNA, 19 nt, Artificial Sequence
  Description of Artificial Sequence: Synthetic oligonucleotide
  Antisense strand to SEQ ID NO: 763910
aauaggccuacauuccuag

SEQ ID NO: 763912 - RNA, 19 nt, Artificial Sequence
  Description of Artificial Sequence: Synthetic oligonucleotide
  Sense strand starting at position 741 of SEQ ID NO: 587062
ggccuauucuaguccuuau

SEQ ID NO: 763913 - RNA, 19 nt, Artificial Sequence
  Description of Artificial Sequence: Synthetic oligonucleotide
  Antisense strand to SEQ ID NO: 763912
auaaggacuagaauaggcc

SEQ ID NO: 763914 - RNA, 19 nt, Artificial Sequence
  Description of Artificial Sequence: Synthetic oligonucleotide
  Sense strand starting at position 868 of SEQ ID NO: 587062
cagaauugucauggccauu

SEQ ID NO: 763915 - RNA, 19 nt, Artificial Sequence
  Description of Artificial Sequence: Synthetic oligonucleotide
  Antisense strand to SEQ ID NO: 763914
aauggccaugacaauucug

SEQ ID NO: 763916 - RNA, 19 nt, Artificial Sequence
  Description of Artificial Sequence: Synthetic oligonucleotide
  Sense strand starting at position 941 of SEQ ID NO: 587062
auaaauccugcauaggcaa

SEQ ID NO: 763917 - RNA, 19 nt, Artificial Sequence
  Description of Artificial Sequence: Synthetic oligonucleotide
  Antisense strand to SEQ ID NO: 763916
uugccuaugcaggauuuau

SEQ ID NO: 763918 - RNA, 19 nt, Artificial Sequence
  Description of Artificial Sequence: Synthetic oligonucleotide
  Sense strand starting at position 954 of SEQ ID NO: 587062
aggcaauucuaauggacau

SEQ ID NO: 763919 - RNA, 19 nt, Artificial Sequence
  Description of Artificial Sequence: Synthetic oligonucleotide
  Antisense strand to SEQ ID NO: 763918
auguccauuagaauugccu

SEQ ID NO: 763920 - RNA, 19 nt, Artificial Sequence
  Description of Artificial Sequence: Synthetic oligonucleotide
  Sense strand starting at position 966 of SEQ ID NO: 587062
uggacauccuggcuaagua

SEQ ID NO: 763921 - RNA, 19 nt, Artificial Sequence
  Description of Artificial Sequence: Synthetic oligonucleotide
  Antisense strand to SEQ ID NO: 763920
uacuuagccaggaugucca

SEQ ID NO: 763922 - RNA, 19 nt, Artificial Sequence
  Description of Artificial Sequence: Synthetic oligonucleotide
  Sense strand starting at position 967 of SEQ ID NO: 587062
ggacauccuggcuaaguau

SEQ ID NO: 763923 - RNA, 19 nt, Artificial Sequence
  Description of Artificial Sequence: Synthetic oligonucleotide
  Antisense strand to SEQ ID NO: 763922
auacuuagccaggaugucc

SEQ ID NO: 763924 - RNA, 19 nt, Artificial Sequence
  Description of Artificial Sequence: Synthetic oligonucleotide
  Sense strand starting at position 976 of SEQ ID NO: 587062
ggcuaaguaucacaguuua

SEQ ID NO: 763925 - RNA, 19 nt, Artificial Sequence
  Description of Artificial Sequence: Synthetic oligonucleotide
  Antisense strand to SEQ ID NO: 763924
uaaacugugauacuuagcc

SEQ ID NO: 763926 - RNA, 19 nt, Artificial Sequence
  Description of Artificial Sequence: Synthetic oligonucleotide
  Sense strand starting at position 1621 of SEQ ID NO: 587062
cuacgugaguccuccugga

SEQ ID NO: 763927 - RNA, 19 nt, Artificial Sequence
  Description of Artificial Sequence: Synthetic oligonucleotide
  Antisense strand to SEQ ID NO: 763926
uccaggaggacucacguag

SEQ ID NO: 763928 - RNA, 19 nt, Artificial Sequence
  Description of Artificial Sequence: Synthetic oligonucleotide
  Sense strand starting at position 1886 of SEQ ID NO: 587062
cgcgguuucccgaaaccag

SEQ ID NO: 763929 - RNA, 19 nt, Artificial Sequence
  Description of Artificial Sequence: Synthetic oligonucleotide
  Antisense strand to SEQ ID NO: 763928
cugguuucgggaaaccgcg

SEQ ID NO: 763930 - RNA, 19 nt, Artificial Sequence
  Description of Artificial Sequence: Synthetic oligonucleotide
  Sense strand starting at position 2985 of SEQ ID NO: 587062
gugcucccuuccucauaga

SEQ ID NO: 763931 - RNA, 19 nt, Artificial Sequence
  Description of Artificial Sequence: Synthetic oligonucleotide
  Antisense strand to SEQ ID NO: 763930
ucuaugaggaagggagcac

SEQ ID NO: 763932 - RNA, 19 nt, Artificial Sequence
  Description of Artificial Sequence: Synthetic oligonucleotide
  Sense strand starting at position 3291 of SEQ ID NO: 587062
ccaguuaugucuucuuacu

SEQ ID NO: 763933 - RNA, 19 nt, Artificial Sequence
  Description of Artificial Sequence: Synthetic oligonucleotide
  Antisense strand to SEQ ID NO: 763932
aguaagaagacauaacugg

SEQ ID NO: 763934 - RNA, 19 nt, Artificial Sequence
  Description of Artificial Sequence: Synthetic oligonucleotide
  Sense strand starting at position 3293 of SEQ ID NO: 587062
aguuaugucuucuuacuua

SEQ ID NO: 763935 - RNA, 19 nt, Artificial Sequence
  Description of Artificial Sequence: Synthetic oligonucleotide
  Antisense strand to SEQ ID NO: 763934
uaaguaagaagacauaacu

SEQ ID NO: 763936 - RNA, 19 nt, Artificial Sequence
  Description of Artificial Sequence: Synthetic oligonucleotide
  Sense strand starting at position 3297 of SEQ ID NO: 587062
augucuucuuacuuagcga

SEQ ID NO: 763937 - RNA, 19 nt, Artificial Sequence
  Description of Artificial Sequence: Synthetic oligonucleotide
  Antisense strand to SEQ ID NO: 763936
ucgcuaaguaagaagacau

SEQ ID NO: 763938 - RNA, 19 nt, Artificial Sequence
  Description of Artificial Sequence: Synthetic oligonucleotide
  Sense strand starting at position 3302 of SEQ ID NO: 587062
uucuuacuuagcgauguga

SEQ ID NO: 763939 - RNA, 19 nt, Artificial Sequence
  Description of Artificial Sequence: Synthetic oligonucleotide
  Antisense strand to SEQ ID NO: 763938
ucacaucgcuaaguaagaa

SEQ ID NO: 763940 - RNA, 19 nt, Artificial Sequence
  Description of Artificial Sequence: Synthetic oligonucleotide
  Sense strand starting at position 3304 of SEQ ID NO: 587062
cuuacuuagcgaugugauu

SEQ ID NO: 763941 - RNA, 19 nt, Artificial Sequence
  Description of Artificial Sequence: Synthetic oligonucleotide
  Antisense strand to SEQ ID NO: 763940
aaucacaucgcuaaguaag

SEQ ID NO: 763942 - RNA, 19 nt, Artificial Sequence
  Description of Artificial Sequence: Synthetic oligonucleotide
  Sense strand starting at position 3617 of SEQ ID NO: 587062
agcgguuaaucccugcagu

SEQ ID NO: 763943 - RNA, 19 nt, Artificial Sequence
  Description of Artificial Sequence: Synthetic oligonucleotide
  Antisense strand to SEQ ID NO: 763942
acugcagggauuaaccgcu

SEQ ID NO: 763944 - RNA, 19 nt, Artificial Sequence
  Description of Artificial Sequence: Synthetic oligonucleotide
  Sense strand starting at position 3618 of SEQ ID NO: 587062
gcgguuaaucccugcagug

SEQ ID NO: 763945 - RNA, 19 nt, Artificial Sequence
  Description of Artificial Sequence: Synthetic oligonucleotide
  Antisense strand to SEQ ID NO: 763944
cacugcagggauuaaccgc

SEQ ID NO: 763946 - RNA, 19 nt, Artificial Sequence
  Description of Artificial Sequence: Synthetic oligonucleotide
  Sense strand starting at position 3836 of SEQ ID NO: 587062
gggcauugcucuccugauu

SEQ ID NO: 763947 - RNA, 19 nt, Artificial Sequence
  Description of Artificial Sequence: Synthetic oligonucleotide
  Antisense strand to SEQ ID NO: 763946
aaucaggagagcaaugccc

SEQ ID NO: 763948 - RNA, 19 nt, Artificial Sequence
  Description of Artificial Sequence: Synthetic oligonucleotide
  Sense strand starting at position 3890 of SEQ ID NO: 587062
gucggagagaucugauuau

SEQ ID NO: 763949 - RNA, 19 nt, Artificial Sequence
  Description of Artificial Sequence: Synthetic oligonucleotide
  Antisense strand to SEQ ID NO: 763948
auaaucagaucucuccgac

SEQ ID NO: 763950 - RNA, 19 nt, Artificial Sequence
  Description of Artificial Sequence: Synthetic oligonucleotide
  Sense strand starting at position 3900 of SEQ ID NO: 587062
ucugauuaucuaggaccau

SEQ ID NO: 763951 - RNA, 19 nt, Artificial Sequence
  Description of Artificial Sequence: Synthetic oligonucleotide
  Antisense strand to SEQ ID NO: 763950
augguccuagauaaucaga

SEQ ID NO: 763952 - RNA, 19 nt, Artificial Sequence
  Description of Artificial Sequence: Synthetic oligonucleotide
  Sense strand starting at position 3901 of SEQ ID NO: 587062
cugauuaucuaggaccauu

SEQ ID NO: 763953 - RNA, 19 nt, Artificial Sequence
  Description of Artificial Sequence: Synthetic oligonucleotide
  Antisense strand to SEQ ID NO: 763952
aaugguccuagauaaucag

SEQ ID NO: 763954 - RNA, 19 nt, Artificial Sequence
  Description of Artificial Sequence: Synthetic oligonucleotide
  Sense strand starting at position 40 of SEQ ID NO: 587063
ucagaauugucauggccau

SEQ ID NO: 763955 - RNA, 19 nt, Artificial Sequence
  Description of Artificial Sequence: Synthetic oligonucleotide
  Antisense strand to SEQ ID NO: 763954
auggccaugacaauucuga

SEQ ID NO: 763956 - RNA, 19 nt, Artificial Sequence
  Description of Artificial Sequence: Synthetic oligonucleotide
  Sense strand starting at position 41 of SEQ ID NO: 587063
cagaauugucauggccauu

SEQ ID NO: 763957 - RNA, 19 nt, Artificial Sequence
  Description of Artificial Sequence: Synthetic oligonucleotide
  Antisense strand to SEQ ID NO: 763956
aauggccaugacaauucug

SEQ ID NO: 763958 - RNA, 19 nt, Artificial Sequence
  Description of Artificial Sequence: Synthetic oligonucleotide
  Sense strand starting at position 114 of SEQ ID NO: 587063
auaaauccugcauaggcaa

SEQ ID NO: 763959 - RNA, 19 nt, Artificial Sequence
  Description of Artificial Sequence: Synthetic oligonucleotide
  Antisense strand to SEQ ID NO: 763958
uugccuaugcaggauuuau

SEQ ID NO: 763960 - RNA, 19 nt, Artificial Sequence
  Description of Artificial Sequence: Synthetic oligonucleotide
  Sense strand starting at position 127 of SEQ ID NO: 587063
aggcaauucuaauggacau

SEQ ID NO: 763961 - RNA, 19 nt, Artificial Sequence
  Description of Artificial Sequence: Synthetic oligonucleotide
  Antisense strand to SEQ ID NO: 763960
auguccauuagaauugccu

SEQ ID NO: 763962 - RNA, 19 nt, Artificial Sequence
  Description of Artificial Sequence: Synthetic oligonucleotide
  Sense strand starting at position 139 of SEQ ID NO: 587063
uggacauccuggcuaagua

SEQ ID NO: 763963 - RNA, 19 nt, Artificial Sequence
  Description of Artificial Sequence: Synthetic oligonucleotide
  Antisense strand to SEQ ID NO: 763962
uacuuagccaggaugucca

SEQ ID NO: 763964 - RNA, 19 nt, Artificial Sequence
  Description of Artificial Sequence: Synthetic oligonucleotide
  Sense strand starting at position 140 of SEQ ID NO: 587063
ggacauccuggcuaaguau

SEQ ID NO: 763965 - RNA, 19 nt, Artificial Sequence
  Description of Artificial Sequence: Synthetic oligonucleotide
  Antisense strand to SEQ ID NO: 763964
auacuuagccaggaugucc

SEQ ID NO: 763966 - RNA, 19 nt, Artificial Sequence
  Description of Artificial Sequence: Synthetic oligonucleotide
  Sense strand starting at position 149 of SEQ ID NO: 587063
ggcuaaguaucacaguuua

SEQ ID NO: 763967 - RNA, 19 nt, Artificial Sequence
  Description of Artificial Sequence: Synthetic oligonucleotide
  Antisense strand to SEQ ID NO: 763966
uaaacugugauacuuagcc

SEQ ID NO: 763968 - RNA, 19 nt, Artificial Sequence
  Description of Artificial Sequence: Synthetic oligonucleotide
  Sense strand starting at position 794 of SEQ ID NO: 587063
cuacgugaguccuccugga

SEQ ID NO: 763969 - RNA, 19 nt, Artificial Sequence
  Description of Artificial Sequence: Synthetic oligonucleotide
  Antisense strand to SEQ ID NO: 763968
uccaggaggacucacguag

SEQ ID NO: 763970 - RNA, 19 nt, Artificial Sequence
  Description of Artificial Sequence: Synthetic oligonucleotide
  Sense strand starting at position 1059 of SEQ ID NO: 587063
cgcgguuucccgaaaccag

SEQ ID NO: 763971 - RNA, 19 nt, Artificial Sequence
  Description of Artificial Sequence: Synthetic oligonucleotide
  Antisense strand to SEQ ID NO: 763970
cugguuucgggaaaccgcg

SEQ ID NO: 763972 - RNA, 19 nt, Artificial Sequence
  Description of Artificial Sequence: Synthetic oligonucleotide
  Sense strand starting at position 2158 of SEQ ID NO: 587063
gugcucccuuccucauaga

SEQ ID NO: 763973 - RNA, 19 nt, Artificial Sequence
  Description of Artificial Sequence: Synthetic oligonucleotide
  Antisense strand to SEQ ID NO: 763972
ucuaugaggaagggagcac

SEQ ID NO: 763974 - RNA, 19 nt, Artificial Sequence
  Description of Artificial Sequence: Synthetic oligonucleotide
  Sense strand starting at position 2464 of SEQ ID NO: 587063
ccaguuaugucuucuuacu

SEQ ID NO: 763975 - RNA, 19 nt, Artificial Sequence
  Description of Artificial Sequence: Synthetic oligonucleotide
  Antisense strand to SEQ ID NO: 763974
aguaagaagacauaacugg

SEQ ID NO: 763976 - RNA, 19 nt, Artificial Sequence
  Description of Artificial Sequence: Synthetic oligonucleotide
  Sense strand starting at position 2466 of SEQ ID NO: 587063
aguuaugucuucuuacuua

SEQ ID NO: 763977 - RNA, 19 nt, Artificial Sequence
  Description of Artificial Sequence: Synthetic oligonucleotide
  Antisense strand to SEQ ID NO: 763976
uaaguaagaagacauaacu

SEQ ID NO: 763978 - RNA, 19 nt, Artificial Sequence
  Description of Artificial Sequence: Synthetic oligonucleotide
  Sense strand starting at position 2470 of SEQ ID NO: 587063
augucuucuuacuuagcga

SEQ ID NO: 763979 - RNA, 19 nt, Artificial Sequence
  Description of Artificial Sequence: Synthetic oligonucleotide
  Antisense strand to SEQ ID NO: 763978
ucgcuaaguaagaagacau

SEQ ID NO: 763980 - RNA, 19 nt, Artificial Sequence
  Description of Artificial Sequence: Synthetic oligonucleotide
  Sense strand starting at position 2475 of SEQ ID NO: 587063
uucuuacuuagcgauguga

SEQ ID NO: 763981 - RNA, 19 nt, Artificial Sequence
  Description of Artificial Sequence: Synthetic oligonucleotide
  Antisense strand to SEQ ID NO: 763980
ucacaucgcuaaguaagaa

SEQ ID NO: 763982 - RNA, 19 nt, Artificial Sequence
  Description of Artificial Sequence: Synthetic oligonucleotide
  Sense strand starting at position 2477 of SEQ ID NO: 587063
cuuacuuagcgaugugauu

SEQ ID NO: 763983 - RNA, 19 nt, Artificial Sequence
  Description of Artificial Sequence: Synthetic oligonucleotide
  Antisense strand to SEQ ID NO: 763982
aaucacaucgcuaaguaag

SEQ ID NO: 763984 - RNA, 19 nt, Artificial Sequence
  Description of Artificial Sequence: Synthetic oligonucleotide
  Sense strand starting at position 2790 of SEQ ID NO: 587063
agcgguuaaucccugcagu

SEQ ID NO: 763985 - RNA, 19 nt, Artificial Sequence
  Description of Artificial Sequence: Synthetic oligonucleotide
  Antisense strand to SEQ ID NO: 763984
acugcagggauuaaccgcu

SEQ ID NO: 763986 - RNA, 19 nt, Artificial Sequence
  Description of Artificial Sequence: Synthetic oligonucleotide
  Sense strand starting at position 2791 of SEQ ID NO: 587063
gcgguuaaucccugcagug

SEQ ID NO: 763987 - RNA, 19 nt, Artificial Sequence
  Description of Artificial Sequence: Synthetic oligonucleotide
  Antisense strand to SEQ ID NO: 763986
cacugcagggauuaaccgc

SEQ ID NO: 763988 - RNA, 19 nt, Artificial Sequence
  Description of Artificial Sequence: Synthetic oligonucleotide
  Sense strand starting at position 3009 of SEQ ID NO: 587063
gggcauugcucuccugauu

SEQ ID NO: 763989 - RNA, 19 nt, Artificial Sequence
  Description of Artificial Sequence: Synthetic oligonucleotide
  Antisense strand to SEQ ID NO: 763988
aaucaggagagcaaugccc

SEQ ID NO: 763990 - RNA, 19 nt, Artificial Sequence
  Description of Artificial Sequence: Synthetic oligonucleotide
  Sense strand starting at position 3063 of SEQ ID NO: 587063
gucggagagaucugauuau

SEQ ID NO: 763991 - RNA, 19 nt, Artificial Sequence
  Description of Artificial Sequence: Synthetic oligonucleotide
  Antisense strand to SEQ ID NO: 763990
auaaucagaucucuccgac

SEQ ID NO: 763992 - RNA, 19 nt, Artificial Sequence
  Description of Artificial Sequence: Synthetic oligonucleotide
  Sense strand starting at position 3073 of SEQ ID NO: 587063
ucugauuaucuaggaccau

SEQ ID NO: 763993 - RNA, 19 nt, Artificial Sequence
  Description of Artificial Sequence: Synthetic oligonucleotide
  Antisense strand to SEQ ID NO: 763992
augguccuagauaaucaga

SEQ ID NO: 763994 - RNA, 19 nt, Artificial Sequence
  Description of Artificial Sequence: Synthetic oligonucleotide
  Sense strand starting at position 3074 of SEQ ID NO: 587063
cugauuaucuaggaccauu

SEQ ID NO: 763995 - RNA, 19 nt, Artificial Sequence
  Description of Artificial Sequence: Synthetic oligonucleotide
  Antisense strand to SEQ ID NO: 763994
aaugguccuagauaaucag

SEQ ID NO: 763996 - RNA, 19 nt, Artificial Sequence
  Description of Artificial Sequence: Synthetic oligonucleotide
  Sense strand starting at position 3258 of SEQ ID NO: 587063
agauacuugcauugagaug

SEQ ID NO: 763997 - RNA, 19 nt, Artificial Sequence
  Description of Artificial Sequence: Synthetic oligonucleotide
  Antisense strand to SEQ ID NO: 763996
caucucaaugcaaguaucu

SEQ ID NO: 763998 - RNA, 19 nt, Artificial Sequence
  Description of Artificial Sequence: Synthetic oligonucleotide
  Sense strand starting at position 3284 of SEQ ID NO: 587063
cagagcguuccagauagua

SEQ ID NO: 763999 - RNA, 19 nt, Artificial Sequence
  Description of Artificial Sequence: Synthetic oligonucleotide
  Antisense strand to SEQ ID NO: 763998
uacuaucuggaacgcucug

SEQ ID NO: 764000 - RNA, 19 nt, Artificial Sequence
  Description of Artificial Sequence: Synthetic oligonucleotide
  Sense strand starting at position 3286 of SEQ ID NO: 587063
gagcguuccagauaguaug

SEQ ID NO: 764001 - RNA, 19 nt, Artificial Sequence
  Description of Artificial Sequence: Synthetic oligonucleotide
  Antisense strand to SEQ ID NO: 764000
cauacuaucuggaacgcuc

SEQ ID NO: 764002 - RNA, 19 nt, Artificial Sequence
  Description of Artificial Sequence: Synthetic oligonucleotide
  Sense strand starting at position 3330 of SEQ ID NO: 587063
ugguuauucucauuguccu

SEQ ID NO: 764003 - RNA, 19 nt, Artificial Sequence
  Description of Artificial Sequence: Synthetic oligonucleotide
  Antisense strand to SEQ ID NO: 764002
aggacaaugagaauaacca

SEQ ID NO: 764004 - RNA, 19 nt, Artificial Sequence
  Description of Artificial Sequence: Synthetic oligonucleotide
  Sense strand starting at position 3376 of SEQ ID NO: 587063
caggaauuguugucaacag

SEQ ID NO: 764005 - RNA, 19 nt, Artificial Sequence
  Description of Artificial Sequence: Synthetic oligonucleotide
  Antisense strand to SEQ ID NO: 764004
cuguugacaacaauuccug

SEQ ID NO: 764006 - RNA, 19 nt, Artificial Sequence
  Description of Artificial Sequence: Synthetic oligonucleotide
  Sense strand starting at position 3377 of SEQ ID NO: 587063
aggaauuguugucaacaga

SEQ ID NO: 764007 - RNA, 19 nt, Artificial Sequence
  Description of Artificial Sequence: Synthetic oligonucleotide
  Antisense strand to SEQ ID NO: 764006
ucuguugacaacaauuccu

SEQ ID NO: 764008 - RNA, 19 nt, Artificial Sequence
  Description of Artificial Sequence: Synthetic oligonucleotide
  Sense strand starting at position 3488 of SEQ ID NO: 587063
agccgagaguaauuaccuu

SEQ ID NO: 764009 - RNA, 19 nt, Artificial Sequence
  Description of Artificial Sequence: Synthetic oligonucleotide
  Antisense strand to SEQ ID NO: 764008
aagguaauuacucucggcu

SEQ ID NO: 764010 - RNA, 19 nt, Artificial Sequence
  Description of Artificial Sequence: Synthetic oligonucleotide
  Sense strand starting at position 3569 of SEQ ID NO: 587063
accuguccacugggacaua

SEQ ID NO: 764011 - RNA, 19 nt, Artificial Sequence
  Description of Artificial Sequence: Synthetic oligonucleotide
  Antisense strand to SEQ ID NO: 764010
uaugucccaguggacaggu

SEQ ID NO: 764012 - RNA, 19 nt, Artificial Sequence
  Description of Artificial Sequence: Synthetic oligonucleotide
  Sense strand starting at position 3619 of SEQ ID NO: 587063
uggauuauugggcacuguu

SEQ ID NO: 764013 - RNA, 19 nt, Artificial Sequence
  Description of Artificial Sequence: Synthetic oligonucleotide
  Antisense strand to SEQ ID NO: 764012
aacagugcccaauaaucca

SEQ ID NO: 764014 - RNA, 19 nt, Artificial Sequence
  Description of Artificial Sequence: Synthetic oligonucleotide
  Sense strand starting at position 3690 of SEQ ID NO: 587063
uugagaucuucuccagcac

SEQ ID NO: 764015 - RNA, 19 nt, Artificial Sequence
  Description of Artificial Sequence: Synthetic oligonucleotide
  Antisense strand to SEQ ID NO: 764014
gugcuggagaagaucucaa

SEQ ID NO: 764016 - RNA, 19 nt, Artificial Sequence
  Description of Artificial Sequence: Synthetic oligonucleotide
  Sense strand starting at position 3757 of SEQ ID NO: 587063
agcacuugguguuguuuaa

SEQ ID NO: 764017 - RNA, 19 nt, Artificial Sequence
  Description of Artificial Sequence: Synthetic oligonucleotide
  Antisense strand to SEQ ID NO: 764016
uuaaacaacaccaagugcu

SEQ ID NO: 764018 - RNA, 19 nt, Artificial Sequence
  Description of Artificial Sequence: Synthetic oligonucleotide
  Sense strand starting at position 3825 of SEQ ID NO: 587063
gcucuuaggugucacuaaa

SEQ ID NO: 764019 - RNA, 19 nt, Artificial Sequence
  Description of Artificial Sequence: Synthetic oligonucleotide
  Antisense strand to SEQ ID NO: 764018
uuuagugacaccuaagagc

SEQ ID NO: 764020 - RNA, 19 nt, Artificial Sequence
  Description of Artificial Sequence: Synthetic oligonucleotide
  Sense strand starting at position 3893 of SEQ ID NO: 587063
gcaauuaucuuaccaugga

SEQ ID NO: 764021 - RNA, 19 nt, Artificial Sequence
  Description of Artificial Sequence: Synthetic oligonucleotide
  Antisense strand to SEQ ID NO: 764020
uccaugguaagauaauugc

SEQ ID NO: 764022 - RNA, 19 nt, Artificial Sequence
  Description of Artificial Sequence: Synthetic oligonucleotide
  Sense strand starting at position 3971 of SEQ ID NO: 587063
gaggcucucucgugggaga

SEQ ID NO: 764023 - RNA, 19 nt, Artificial Sequence
  Description of Artificial Sequence: Synthetic oligonucleotide
  Antisense strand to SEQ ID NO: 764022
ucucccacgagagagccuc

SEQ ID NO: 764024 - RNA, 19 nt, Artificial Sequence
  Description of Artificial Sequence: Synthetic oligonucleotide
  Sense strand starting at position 97 of SEQ ID NO: 587064
ugggucaccuuguuccaau

SEQ ID NO: 764025 - RNA, 19 nt, Artificial Sequence
  Description of Artificial Sequence: Synthetic oligonucleotide
  Antisense strand to SEQ ID NO: 764024
auuggaacaaggugaccca

SEQ ID NO: 764026 - RNA, 19 nt, Artificial Sequence
  Description of Artificial Sequence: Synthetic oligonucleotide
  Sense strand starting at position 98 of SEQ ID NO: 587064
gggucaccuuguuccaaua

SEQ ID NO: 764027 - RNA, 19 nt, Artificial Sequence
  Description of Artificial Sequence: Synthetic oligonucleotide
  Antisense strand to SEQ ID NO: 764026
uauuggaacaaggugaccc

SEQ ID NO: 764028 - RNA, 19 nt, Artificial Sequence
  Description of Artificial Sequence: Synthetic oligonucleotide
  Sense strand starting at position 126 of SEQ ID NO: 587064
uugugaagcaaaugggaua

SEQ ID NO: 764029 - RNA, 19 nt, Artificial Sequence
  Description of Artificial Sequence: Synthetic oligonucleotide
  Antisense strand to SEQ ID NO: 764028
uaucccauuugcuucacaa

SEQ ID NO: 764030 - RNA, 19 nt, Artificial Sequence
  Description of Artificial Sequence: Synthetic oligonucleotide
  Sense strand starting at position 138 of SEQ ID NO: 587064
ugggauauugguuguauua

SEQ ID NO: 764031 - RNA, 19 nt, Artificial Sequence
  Description of Artificial Sequence: Synthetic oligonucleotide
  Antisense strand to SEQ ID NO: 764030
uaauacaaccaauauccca

SEQ ID NO: 764032 - RNA, 19 nt, Artificial Sequence
  Description of Artificial Sequence: Synthetic oligonucleotide
  Sense strand starting at position 219 of SEQ ID NO: 587064
gauagauucugucucugaa

SEQ ID NO: 764033 - RNA, 19 nt, Artificial Sequence
  Description of Artificial Sequence: Synthetic oligonucleotide
  Antisense strand to SEQ ID NO: 764032
uucagagacagaaucuauc

SEQ ID NO: 764034 - RNA, 19 nt, Artificial Sequence
  Description of Artificial Sequence: Synthetic oligonucleotide
  Sense strand starting at position 274 of SEQ ID NO: 587064
agacccacugcuugucauu

SEQ ID NO: 764035 - RNA, 19 nt, Artificial Sequence
  Description of Artificial Sequence: Synthetic oligonucleotide
  Antisense strand to SEQ ID NO: 764034
aaugacaagcagugggucu

SEQ ID NO: 764036 - RNA, 19 nt, Artificial Sequence
  Description of Artificial Sequence: Synthetic oligonucleotide
  Sense strand starting at position 467 of SEQ ID NO: 587064
auaauaguaucuuugucac

SEQ ID NO: 764037 - RNA, 19 nt, Artificial Sequence
  Description of Artificial Sequence: Synthetic oligonucleotide
  Antisense strand to SEQ ID NO: 764036
gugacaaagauacuauuau

SEQ ID NO: 764038 - RNA, 19 nt, Artificial Sequence
  Description of Artificial Sequence: Synthetic oligonucleotide
  Sense strand starting at position 470 of SEQ ID NO: 587064
auaguaucuuugucaccuu

SEQ ID NO: 764039 - RNA, 19 nt, Artificial Sequence
  Description of Artificial Sequence: Synthetic oligonucleotide
  Antisense strand to SEQ ID NO: 764038
aaggugacaaagauacuau

SEQ ID NO: 764040 - RNA, 19 nt, Artificial Sequence
  Description of Artificial Sequence: Synthetic oligonucleotide
  Sense strand starting at position 473 of SEQ ID NO: 587064
guaucuuugucaccuugac

SEQ ID NO: 764041 - RNA, 19 nt, Artificial Sequence
  Description of Artificial Sequence: Synthetic oligonucleotide
  Antisense strand to SEQ ID NO: 764040
gucaaggugacaaagauac

SEQ ID NO: 764042 - RNA, 19 nt, Artificial Sequence
  Description of Artificial Sequence: Synthetic oligonucleotide
  Sense strand starting at position 477 of SEQ ID NO: 587064
cuuugucaccuugacauca

SEQ ID NO: 764043 - RNA, 19 nt, Artificial Sequence
  Description of Artificial Sequence: Synthetic oligonucleotide
  Antisense strand to SEQ ID NO: 764042
ugaugucaaggugacaaag

SEQ ID NO: 764044 - RNA, 19 nt, Artificial Sequence
  Description of Artificial Sequence: Synthetic oligonucleotide
  Sense strand starting at position 631 of SEQ ID NO: 587064
acaauauuccaguggguug

SEQ ID NO: 764045 - RNA, 19 nt, Artificial Sequence
  Description of Artificial Sequence: Synthetic oligonucleotide
  Antisense strand to SEQ ID NO: 764044
caacccacuggaauauugu

SEQ ID NO: 764046 - RNA, 19 nt, Artificial Sequence
  Description of Artificial Sequence: Synthetic oligonucleotide
  Sense strand starting at position 653 of SEQ ID NO: 587064
acaggaugguucccaaagu

SEQ ID NO: 764047 - RNA, 19 nt, Artificial Sequence
  Description of Artificial Sequence: Synthetic oligonucleotide
  Antisense strand to SEQ ID NO: 764046
acuuugggaaccauccugu

SEQ ID NO: 764048 - RNA, 19 nt, Artificial Sequence
  Description of Artificial Sequence: Synthetic oligonucleotide
  Sense strand starting at position 791 of SEQ ID NO: 587064
acauacacuuugggaauuu

SEQ ID NO: 764049 - RNA, 19 nt, Artificial Sequence
  Description of Artificial Sequence: Synthetic oligonucleotide
  Antisense strand to SEQ ID NO: 764048
aaauucccaaaguguaugu

SEQ ID NO: 764050 - RNA, 19 nt, Artificial Sequence
  Description of Artificial Sequence: Synthetic oligonucleotide
  Sense strand starting at position 891 of SEQ ID NO: 587064
cuuauuagaccuuguugau

SEQ ID NO: 764051 - RNA, 19 nt, Artificial Sequence
  Description of Artificial Sequence: Synthetic oligonucleotide
  Antisense strand to SEQ ID NO: 764050
aucaacaaggucuaauaag

SEQ ID NO: 764052 - RNA, 19 nt, Artificial Sequence
  Description of Artificial Sequence: Synthetic oligonucleotide
  Sense strand starting at position 904 of SEQ ID NO: 587064
guugauauucgaugcacag

SEQ ID NO: 764053 - RNA, 19 nt, Artificial Sequence
  Description of Artificial Sequence: Synthetic oligonucleotide
  Antisense strand to SEQ ID NO: 764052
cugugcaucgaauaucaac

SEQ ID NO: 764054 - RNA, 19 nt, Artificial Sequence
  Description of Artificial Sequence: Synthetic oligonucleotide
  Sense strand starting at position 906 of SEQ ID NO: 587064
ugauauucgaugcacagaa

SEQ ID NO: 764055 - RNA, 19 nt, Artificial Sequence
  Description of Artificial Sequence: Synthetic oligonucleotide
  Antisense strand to SEQ ID NO: 764054
uucugugcaucgaauauca

SEQ ID NO: 764056 - RNA, 19 nt, Artificial Sequence
  Description of Artificial Sequence: Synthetic oligonucleotide
  Sense strand starting at position 910 of SEQ ID NO: 587064
auucgaugcacagaaguca

SEQ ID NO: 764057 - RNA, 19 nt, Artificial Sequence
  Description of Artificial Sequence: Synthetic oligonucleotide
  Antisense strand to SEQ ID NO: 764056
ugacuucugugcaucgaau

SEQ ID NO: 764058 - RNA, 19 nt, Artificial Sequence
  Description of Artificial Sequence: Synthetic oligonucleotide
  Sense strand starting at position 961 of SEQ ID NO: 587064
aaagaauugugauaugaug

SEQ ID NO: 764059 - RNA, 19 nt, Artificial Sequence
  Description of Artificial Sequence: Synthetic oligonucleotide
  Antisense strand to SEQ ID NO: 764058
caucauaucacaauucuuu

SEQ ID NO: 764060 - RNA, 19 nt, Artificial Sequence
  Description of Artificial Sequence: Synthetic oligonucleotide
  Sense strand starting at position 963 of SEQ ID NO: 587064
agaauugugauaugaugcu

SEQ ID NO: 764061 - RNA, 19 nt, Artificial Sequence
  Description of Artificial Sequence: Synthetic oligonucleotide
  Antisense strand to SEQ ID NO: 764060
agcaucauaucacaauucu

SEQ ID NO: 764062 - RNA, 19 nt, Artificial Sequence
  Description of Artificial Sequence: Synthetic oligonucleotide
  Sense strand starting at position 1018 of SEQ ID NO: 587064
ggcugugauuuauugaugu

SEQ ID NO: 764063 - RNA, 19 nt, Artificial Sequence
  Description of Artificial Sequence: Synthetic oligonucleotide
  Antisense strand to SEQ ID NO: 764062
acaucaauaaaucacagcc

SEQ ID NO: 764064 - RNA, 19 nt, Artificial Sequence
  Description of Artificial Sequence: Synthetic oligonucleotide
  Sense strand starting at position 1057 of SEQ ID NO: 587064
ccauaucugguauaguaua

SEQ ID NO: 764065 - RNA, 19 nt, Artificial Sequence
  Description of Artificial Sequence: Synthetic oligonucleotide
  Antisense strand to SEQ ID NO: 764064
uauacuauaccagauaugg

SEQ ID NO: 764066 - RNA, 19 nt, Artificial Sequence
  Description of Artificial Sequence: Synthetic oligonucleotide
  Sense strand starting at position 1069 of SEQ ID NO: 587064
uaguauagcgcucagcaaa

SEQ ID NO: 764067 - RNA, 19 nt, Artificial Sequence
  Description of Artificial Sequence: Synthetic oligonucleotide
  Antisense strand to SEQ ID NO: 764066
uuugcugagcgcuauacua

SEQ ID NO: 764068 - RNA, 19 nt, Artificial Sequence
  Description of Artificial Sequence: Synthetic oligonucleotide
  Sense strand starting at position 1087 of SEQ ID NO: 587064
acguuucugguaugaauaa

SEQ ID NO: 764069 - RNA, 19 nt, Artificial Sequence
  Description of Artificial Sequence: Synthetic oligonucleotide
  Antisense strand to SEQ ID NO: 764068
uuauucauaccagaaacgu

SEQ ID NO: 764070 - RNA, 19 nt, Artificial Sequence
  Description of Artificial Sequence: Synthetic oligonucleotide
  Sense strand starting at position 1103 of SEQ ID NO: 587064
uaaggccuucucugugaaa

SEQ ID NO: 764071 - RNA, 19 nt, Artificial Sequence
  Description of Artificial Sequence: Synthetic oligonucleotide
  Antisense strand to SEQ ID NO: 764070
uuucacagagaaggccuua

SEQ ID NO: 764072 - RNA, 19 nt, Artificial Sequence
  Description of Artificial Sequence: Synthetic oligonucleotide
  Sense strand starting at position 1104 of SEQ ID NO: 587064
aaggccuucucugugaaau

SEQ ID NO: 764073 - RNA, 19 nt, Artificial Sequence
  Description of Artificial Sequence: Synthetic oligonucleotide
  Antisense strand to SEQ ID NO: 764072
auuucacagagaaggccuu

SEQ ID NO: 764074 - RNA, 19 nt, Artificial Sequence
  Description of Artificial Sequence: Synthetic oligonucleotide
  Sense strand starting at position 1341 of SEQ ID NO: 587064
gagaguuaagccugcacca

SEQ ID NO: 764075 - RNA, 19 nt, Artificial Sequence
  Description of Artificial Sequence: Synthetic oligonucleotide
  Antisense strand to SEQ ID NO: 764074
uggugcaggcuuaacucuc

SEQ ID NO: 764076 - RNA, 19 nt, Artificial Sequence
  Description of Artificial Sequence: Synthetic oligonucleotide
  Sense strand starting at position 1371 of SEQ ID NO: 587064
cagcuauugggaggcaagu

SEQ ID NO: 764077 - RNA, 19 nt, Artificial Sequence
  Description of Artificial Sequence: Synthetic oligonucleotide
  Antisense strand to SEQ ID NO: 764076
acuugccucccaauagcug

SEQ ID NO: 764078 - RNA, 19 nt, Artificial Sequence
  Description of Artificial Sequence: Synthetic oligonucleotide
  Sense strand starting at position 1532 of SEQ ID NO: 587064
ggcgcuuaccuuuccgaau

SEQ ID NO: 764079 - RNA, 19 nt, Artificial Sequence
  Description of Artificial Sequence: Synthetic oligonucleotide
  Antisense strand to SEQ ID NO: 764078
auucggaaagguaagcgcc

SEQ ID NO: 764080 - RNA, 19 nt, Artificial Sequence
  Description of Artificial Sequence: Synthetic oligonucleotide
  Sense strand starting at position 2586 of SEQ ID NO: 587064
ugggucggguccucuuaaa

SEQ ID NO: 764081 - RNA, 19 nt, Artificial Sequence
  Description of Artificial Sequence: Synthetic oligonucleotide
  Antisense strand to SEQ ID NO: 764080
uuuaagaggacccgaccca

SEQ ID NO: 764082 - RNA, 19 nt, Artificial Sequence
  Description of Artificial Sequence: Synthetic oligonucleotide
  Sense strand starting at position 3370 of SEQ ID NO: 587064
gguggucgccgagaugaau

SEQ ID NO: 764083 - RNA, 19 nt, Artificial Sequence
  Description of Artificial Sequence: Synthetic oligonucleotide
  Antisense strand to SEQ ID NO: 764082
auucaucucggcgaccacc

SEQ ID NO: 764084 - RNA, 19 nt, Artificial Sequence
  Description of Artificial Sequence: Synthetic oligonucleotide
  Sense strand starting at position 3657 of SEQ ID NO: 587064
gaugucauccgugcaacgu

SEQ ID NO: 764085 - RNA, 19 nt, Artificial Sequence
  Description of Artificial Sequence: Synthetic oligonucleotide
  Antisense strand to SEQ ID NO: 764084
acguugcacggaugacauc

SEQ ID NO: 764086 - RNA, 19 nt, Artificial Sequence
  Description of Artificial Sequence: Synthetic oligonucleotide
  Sense strand starting at position 3728 of SEQ ID NO: 587064
ccaggcacgaaaugucuaa

SEQ ID NO: 764087 - RNA, 19 nt, Artificial Sequence
  Description of Artificial Sequence: Synthetic oligonucleotide
  Antisense strand to SEQ ID NO: 764086
uuagacauuucgugccugg

SEQ ID NO: 764088 - RNA, 19 nt, Artificial Sequence
  Description of Artificial Sequence: Synthetic oligonucleotide
  Sense strand starting at position 3732 of SEQ ID NO: 587064
gcacgaaaugucuaagucu

SEQ ID NO: 764089 - RNA, 19 nt, Artificial Sequence
  Description of Artificial Sequence: Synthetic oligonucleotide
  Antisense strand to SEQ ID NO: 764088
agacuuagacauuucgugc

SEQ ID NO: 764090 - RNA, 19 nt, Artificial Sequence
  Description of Artificial Sequence: Synthetic oligonucleotide
  Sense strand starting at position 3735 of SEQ ID NO: 587064
cgaaaugucuaagucuuau

SEQ ID NO: 764091 - RNA, 19 nt, Artificial Sequence
  Description of Artificial Sequence: Synthetic oligonucleotide
  Antisense strand to SEQ ID NO: 764090
auaagacuuagacauuucg

SEQ ID NO: 764092 - RNA, 19 nt, Artificial Sequence
  Description of Artificial Sequence: Synthetic oligonucleotide
  Sense strand starting at position 3746 of SEQ ID NO: 587064
agucuuauucuuugaccag

SEQ ID NO: 764093 - RNA, 19 nt, Artificial Sequence
  Description of Artificial Sequence: Synthetic oligonucleotide
  Antisense strand to SEQ ID NO: 764092
cuggucaaagaauaagacu

SEQ ID NO: 764094 - RNA, 19 nt, Artificial Sequence
  Description of Artificial Sequence: Synthetic oligonucleotide
  Sense strand starting at position 3750 of SEQ ID NO: 587064
uuauucuuugaccaggcaa

SEQ ID NO: 764095 - RNA, 19 nt, Artificial Sequence
  Description of Artificial Sequence: Synthetic oligonucleotide
  Antisense strand to SEQ ID NO: 764094
uugccuggucaaagaauaa

SEQ ID NO: 764096 - RNA, 19 nt, Artificial Sequence
  Description of Artificial Sequence: Synthetic oligonucleotide
  Sense strand starting at position 3752 of SEQ ID NO: 587064
auucuuugaccaggcaagu

SEQ ID NO: 764097 - RNA, 19 nt, Artificial Sequence
  Description of Artificial Sequence: Synthetic oligonucleotide
  Antisense strand to SEQ ID NO: 764096
acuugccuggucaaagaau

SEQ ID NO: 764098 - RNA, 19 nt, Artificial Sequence
  Description of Artificial Sequence: Synthetic oligonucleotide
  Sense strand starting at position 3768 of SEQ ID NO: 587064
agucaauggugucuagaua

SEQ ID NO: 764099 - RNA, 19 nt, Artificial Sequence
  Description of Artificial Sequence: Synthetic oligonucleotide
  Antisense strand to SEQ ID NO: 764098
uaucuagacaccauugacu

SEQ ID NO: 764100 - RNA, 19 nt, Artificial Sequence
  Description of Artificial Sequence: Synthetic oligonucleotide
  Sense strand starting at position 3769 of SEQ ID NO: 587064
gucaauggugucuagauag

SEQ ID NO: 764101 - RNA, 19 nt, Artificial Sequence
  Description of Artificial Sequence: Synthetic oligonucleotide
  Antisense strand to SEQ ID NO: 764100
cuaucuagacaccauugac

SEQ ID NO: 764102 - RNA, 19 nt, Artificial Sequence
  Description of Artificial Sequence: Synthetic oligonucleotide
  Sense strand starting at position 3775 of SEQ ID NO: 587064
ggugucuagauagguaugu

SEQ ID NO: 764103 - RNA, 19 nt, Artificial Sequence
  Description of Artificial Sequence: Synthetic oligonucleotide
  Antisense strand to SEQ ID NO: 764102
acauaccuaucuagacacc

SEQ ID NO: 764104 - RNA, 19 nt, Artificial Sequence
  Description of Artificial Sequence: Synthetic oligonucleotide
  Sense strand starting at position 25 of SEQ ID NO: 587065
ggucaagggcucuggacaa

SEQ ID NO: 764105 - RNA, 19 nt, Artificial Sequence
  Description of Artificial Sequence: Synthetic oligonucleotide
  Antisense strand to SEQ ID NO: 764104
uuguccagagcccuugacc

SEQ ID NO: 764106 - RNA, 19 nt, Artificial Sequence
  Description of Artificial Sequence: Synthetic oligonucleotide
  Sense strand starting at position 125 of SEQ ID NO: 587065
guaucugagucucucagga

SEQ ID NO: 764107 - RNA, 19 nt, Artificial Sequence
  Description of Artificial Sequence: Synthetic oligonucleotide
  Antisense strand to SEQ ID NO: 764106
uccugagagacucagauac

SEQ ID NO: 764108 - RNA, 19 nt, Artificial Sequence
  Description of Artificial Sequence: Synthetic oligonucleotide
  Sense strand starting at position 533 of SEQ ID NO: 587065
ucagucuucuugucuguga

SEQ ID NO: 764109 - RNA, 19 nt, Artificial Sequence
  Description of Artificial Sequence: Synthetic oligonucleotide
  Antisense strand to SEQ ID NO: 764108
ucacagacaagaagacuga

SEQ ID NO: 764110 - RNA, 19 nt, Artificial Sequence
  Description of Artificial Sequence: Synthetic oligonucleotide
  Sense strand starting at position 583 of SEQ ID NO: 587065
gagugacgagccugugaaa

SEQ ID NO: 764111 - RNA, 19 nt, Artificial Sequence
  Description of Artificial Sequence: Synthetic oligonucleotide
  Antisense strand to SEQ ID NO: 764110
uuucacaggcucgucacuc

SEQ ID NO: 764112 - RNA, 19 nt, Artificial Sequence
  Description of Artificial Sequence: Synthetic oligonucleotide
  Sense strand starting at position 586 of SEQ ID NO: 587065
ugacgagccugugaaauag

SEQ ID NO: 764113 - RNA, 19 nt, Artificial Sequence
  Description of Artificial Sequence: Synthetic oligonucleotide
  Antisense strand to SEQ ID NO: 764112
cuauuucacaggcucguca

SEQ ID NO: 764114 - RNA, 19 nt, Artificial Sequence
  Description of Artificial Sequence: Synthetic oligonucleotide
  Sense strand starting at position 630 of SEQ ID NO: 587065
cccucagccuggcagagau

SEQ ID NO: 764115 - RNA, 19 nt, Artificial Sequence
  Description of Artificial Sequence: Synthetic oligonucleotide
  Antisense strand to SEQ ID NO: 764114
aucucugccaggcugaggg

SEQ ID NO: 764116 - RNA, 19 nt, Artificial Sequence
  Description of Artificial Sequence: Synthetic oligonucleotide
  Sense strand starting at position 1031 of SEQ ID NO: 587065
caggaucccugagacauua

SEQ ID NO: 764117 - RNA, 19 nt, Artificial Sequence
  Description of Artificial Sequence: Synthetic oligonucleotide
  Antisense strand to SEQ ID NO: 764116
uaaugucucagggauccug

SEQ ID NO: 764118 - RNA, 19 nt, Artificial Sequence
  Description of Artificial Sequence: Synthetic oligonucleotide
  Sense strand starting at position 1042 of SEQ ID NO: 587065
agacauuacucaucugcag

SEQ ID NO: 764119 - RNA, 19 nt, Artificial Sequence
  Description of Artificial Sequence: Synthetic oligonucleotide
  Antisense strand to SEQ ID NO: 764118
cugcagaugaguaaugucu

SEQ ID NO: 764120 - RNA, 19 nt, Artificial Sequence
  Description of Artificial Sequence: Synthetic oligonucleotide
  Sense strand starting at position 2128 of SEQ ID NO: 587065
ggaguccugaaaugaggua

SEQ ID NO: 764121 - RNA, 19 nt, Artificial Sequence
  Description of Artificial Sequence: Synthetic oligonucleotide
  Antisense strand to SEQ ID NO: 764120
uaccucauuucaggacucc

SEQ ID NO: 764122 - RNA, 19 nt, Artificial Sequence
  Description of Artificial Sequence: Synthetic oligonucleotide
  Sense strand starting at position 2197 of SEQ ID NO: 587065
ucacuuaaaccuggguaaa

SEQ ID NO: 764123 - RNA, 19 nt, Artificial Sequence
  Description of Artificial Sequence: Synthetic oligonucleotide
  Antisense strand to SEQ ID NO: 764122
uuuacccagguuuaaguga

SEQ ID NO: 764124 - RNA, 19 nt, Artificial Sequence
  Description of Artificial Sequence: Synthetic oligonucleotide
  Sense strand starting at position 2199 of SEQ ID NO: 587065
acuuaaaccuggguaaauu

SEQ ID NO: 764125 - RNA, 19 nt, Artificial Sequence
  Description of Artificial Sequence: Synthetic oligonucleotide
  Antisense strand to SEQ ID NO: 764124
aauuuacccagguuuaagu

SEQ ID NO: 764126 - RNA, 19 nt, Artificial Sequence
  Description of Artificial Sequence: Synthetic oligonucleotide
  Sense strand starting at position 2208 of SEQ ID NO: 587065
uggguaaauugauguuaug

SEQ ID NO: 764127 - RNA, 19 nt, Artificial Sequence
  Description of Artificial Sequence: Synthetic oligonucleotide
  Antisense strand to SEQ ID NO: 764126
cauaacaucaauuuaccca

SEQ ID NO: 764128 - RNA, 19 nt, Artificial Sequence
  Description of Artificial Sequence: Synthetic oligonucleotide
  Sense strand starting at position 2211 of SEQ ID NO: 587065
guaaauugauguuauguga

SEQ ID NO: 764129 - RNA, 19 nt, Artificial Sequence
  Description of Artificial Sequence: Synthetic oligonucleotide
  Antisense strand to SEQ ID NO: 764128
ucacauaacaucaauuuac

SEQ ID NO: 764130 - RNA, 19 nt, Artificial Sequence
  Description of Artificial Sequence: Synthetic oligonucleotide
  Sense strand starting at position 3632 of SEQ ID NO: 587065
ggcgucaccucuggagaga

SEQ ID NO: 764131 - RNA, 19 nt, Artificial Sequence
  Description of Artificial Sequence: Synthetic oligonucleotide
  Antisense strand to SEQ ID NO: 764130
ucucuccagaggugacgcc

SEQ ID NO: 764132 - RNA, 19 nt, Artificial Sequence
  Description of Artificial Sequence: Synthetic oligonucleotide
  Sense strand starting at position 3753 of SEQ ID NO: 587065
agagcugugcccuguccau

SEQ ID NO: 764133 - RNA, 19 nt, Artificial Sequence
  Description of Artificial Sequence: Synthetic oligonucleotide
  Antisense strand to SEQ ID NO: 764132
auggacagggcacagcucu

SEQ ID NO: 764134 - RNA, 19 nt, Artificial Sequence
  Description of Artificial Sequence: Synthetic oligonucleotide
  Sense strand starting at position 12 of SEQ ID NO: 587066
uaguaaauagucugagaaa

SEQ ID NO: 764135 - RNA, 19 nt, Artificial Sequence
  Description of Artificial Sequence: Synthetic oligonucleotide
  Antisense strand to SEQ ID NO: 764134
uuucucagacuauuuacua

SEQ ID NO: 764136 - RNA, 19 nt, Artificial Sequence
  Description of Artificial Sequence: Synthetic oligonucleotide
  Sense strand starting at position 114 of SEQ ID NO: 587066
cuuugauauuaucuaggga

SEQ ID NO: 764137 - RNA, 19 nt, Artificial Sequence
  Description of Artificial Sequence: Synthetic oligonucleotide
  Antisense strand to SEQ ID NO: 764136
ucccuagauaauaucaaag

SEQ ID NO: 764138 - RNA, 19 nt, Artificial Sequence
  Description of Artificial Sequence: Synthetic oligonucleotide
  Sense strand starting at position 178 of SEQ ID NO: 587066
gggauugagcuguagagua

SEQ ID NO: 764139 - RNA, 19 nt, Artificial Sequence
  Description of Artificial Sequence: Synthetic oligonucleotide
  Antisense strand to SEQ ID NO: 764138
uacucuacagcucaauccc

SEQ ID NO: 764140 - RNA, 19 nt, Artificial Sequence
  Description of Artificial Sequence: Synthetic oligonucleotide
  Sense strand starting at position 180 of SEQ ID NO: 587066
gauugagcuguagaguauu

SEQ ID NO: 764141 - RNA, 19 nt, Artificial Sequence
  Description of Artificial Sequence: Synthetic oligonucleotide
  Antisense strand to SEQ ID NO: 764140
aauacucuacagcucaauc

SEQ ID NO: 764142 - RNA, 19 nt, Artificial Sequence
  Description of Artificial Sequence: Synthetic oligonucleotide
  Sense strand starting at position 304 of SEQ ID NO: 587066
cguuauuucuguuuauaug

SEQ ID NO: 764143 - RNA, 19 nt, Artificial Sequence
  Description of Artificial Sequence: Synthetic oligonucleotide
  Antisense strand to SEQ ID NO: 764142
cauauaaacagaaauaacg

SEQ ID NO: 764144 - RNA, 19 nt, Artificial Sequence
  Description of Artificial Sequence: Synthetic oligonucleotide
  Sense strand starting at position 536 of SEQ ID NO: 587066
caauguuaggauugaacac

SEQ ID NO: 764145 - RNA, 19 nt, Artificial Sequence
  Description of Artificial Sequence: Synthetic oligonucleotide
  Antisense strand to SEQ ID NO: 764144
guguucaauccuaacauug

SEQ ID NO: 764146 - RNA, 19 nt, Artificial Sequence
  Description of Artificial Sequence: Synthetic oligonucleotide
  Sense strand starting at position 701 of SEQ ID NO: 587066
ucuugaacuccguaauaau

SEQ ID NO: 764147 - RNA, 19 nt, Artificial Sequence
  Description of Artificial Sequence: Synthetic oligonucleotide
  Antisense strand to SEQ ID NO: 764146
auuauuacggaguucaaga

SEQ ID NO: 764148 - RNA, 19 nt, Artificial Sequence
  Description of Artificial Sequence: Synthetic oligonucleotide
  Sense strand starting at position 733 of SEQ ID NO: 587066
ugacuuaaagcucaaguga

SEQ ID NO: 764149 - RNA, 19 nt, Artificial Sequence
  Description of Artificial Sequence: Synthetic oligonucleotide
  Antisense strand to SEQ ID NO: 764148
ucacuugagcuuuaaguca

SEQ ID NO: 764150 - RNA, 19 nt, Artificial Sequence
  Description of Artificial Sequence: Synthetic oligonucleotide
  Sense strand starting at position 744 of SEQ ID NO: 587066
ucaagugauuaagccauga

SEQ ID NO: 764151 - RNA, 19 nt, Artificial Sequence
  Description of Artificial Sequence: Synthetic oligonucleotide
  Antisense strand to SEQ ID NO: 764150
ucauggcuuaaucacuuga

SEQ ID NO: 764152 - RNA, 19 nt, Artificial Sequence
  Description of Artificial Sequence: Synthetic oligonucleotide
  Sense strand starting at position 749 of SEQ ID NO: 587066
ugauuaagccaugaugguu

SEQ ID NO: 764153 - RNA, 19 nt, Artificial Sequence
  Description of Artificial Sequence: Synthetic oligonucleotide
  Antisense strand to SEQ ID NO: 764152
aaccaucauggcuuaauca

SEQ ID NO: 764154 - RNA, 19 nt, Artificial Sequence
  Description of Artificial Sequence: Synthetic oligonucleotide
  Sense strand starting at position 754 of SEQ ID NO: 587066
aagccaugaugguuaaaca

SEQ ID NO: 764155 - RNA, 19 nt, Artificial Sequence
  Description of Artificial Sequence: Synthetic oligonucleotide
  Antisense strand to SEQ ID NO: 764154
uguuuaaccaucauggcuu

SEQ ID NO: 764156 - RNA, 19 nt, Artificial Sequence
  Description of Artificial Sequence: Synthetic oligonucleotide
  Sense strand starting at position 755 of SEQ ID NO: 587066
agccaugaugguuaaacau

SEQ ID NO: 764157 - RNA, 19 nt, Artificial Sequence
  Description of Artificial Sequence: Synthetic oligonucleotide
  Antisense strand to SEQ ID NO: 764156
auguuuaaccaucauggcu

SEQ ID NO: 764158 - RNA, 19 nt, Artificial Sequence
  Description of Artificial Sequence: Synthetic oligonucleotide
  Sense strand starting at position 776 of SEQ ID NO: 587066
uacagauuaucagugacag

SEQ ID NO: 764159 - RNA, 19 nt, Artificial Sequence
  Description of Artificial Sequence: Synthetic oligonucleotide
  Antisense strand to SEQ ID NO: 764158
cugucacugauaaucugua

SEQ ID NO: 764160 - RNA, 19 nt, Artificial Sequence
  Description of Artificial Sequence: Synthetic oligonucleotide
  Sense strand starting at position 788 of SEQ ID NO: 587066
gugacagaauacuuucuau

SEQ ID NO: 764161 - RNA, 19 nt, Artificial Sequence
  Description of Artificial Sequence: Synthetic oligonucleotide
  Antisense strand to SEQ ID NO: 764160
auagaaaguauucugucac

SEQ ID NO: 764162 - RNA, 19 nt, Artificial Sequence
  Description of Artificial Sequence: Synthetic oligonucleotide
  Sense strand starting at position 823 of SEQ ID NO: 587066
guaggaucaagcuaggcau

SEQ ID NO: 764163 - RNA, 19 nt, Artificial Sequence
  Description of Artificial Sequence: Synthetic oligonucleotide
  Antisense strand to SEQ ID NO: 764162
augccuagcuugauccuac

SEQ ID NO: 764164 - RNA, 19 nt, Artificial Sequence
  Description of Artificial Sequence: Synthetic oligonucleotide
  Sense strand starting at position 857 of SEQ ID NO: 587066
acauauauagcuugaagga

SEQ ID NO: 764165 - RNA, 19 nt, Artificial Sequence
  Description of Artificial Sequence: Synthetic oligonucleotide
  Antisense strand to SEQ ID NO: 764164
uccuucaagcuauauaugu

SEQ ID NO: 764166 - RNA, 19 nt, Artificial Sequence
  Description of Artificial Sequence: Synthetic oligonucleotide
  Sense strand starting at position 907 of SEQ ID NO: 587066
aggaauggugcugaguuau

SEQ ID NO: 764167 - RNA, 19 nt, Artificial Sequence
  Description of Artificial Sequence: Synthetic oligonucleotide
  Antisense strand to SEQ ID NO: 764166
auaacucagcaccauuccu

SEQ ID NO: 764168 - RNA, 19 nt, Artificial Sequence
  Description of Artificial Sequence: Synthetic oligonucleotide
  Sense strand starting at position 928 of SEQ ID NO: 587066
uauugaaucuugguggaag

SEQ ID NO: 764169 - RNA, 19 nt, Artificial Sequence
  Description of Artificial Sequence: Synthetic oligonucleotide
  Antisense strand to SEQ ID NO: 764168
cuuccaccaagauucaaua

SEQ ID NO: 764170 - RNA, 19 nt, Artificial Sequence
  Description of Artificial Sequence: Synthetic oligonucleotide
  Sense strand starting at position 1291 of SEQ ID NO: 587066
ggcauuauugcccagggau

SEQ ID NO: 764171 - RNA, 19 nt, Artificial Sequence
  Description of Artificial Sequence: Synthetic oligonucleotide
  Antisense strand to SEQ ID NO: 764170
aucccugggcaauaaugcc

SEQ ID NO: 764172 - RNA, 19 nt, Artificial Sequence
  Description of Artificial Sequence: Synthetic oligonucleotide
  Sense strand starting at position 1478 of SEQ ID NO: 587066
uguagaaucagccagugga

SEQ ID NO: 764173 - RNA, 19 nt, Artificial Sequence
  Description of Artificial Sequence: Synthetic oligonucleotide
  Antisense strand to SEQ ID NO: 764172
uccacuggcugauucuaca

SEQ ID NO: 764174 - RNA, 19 nt, Artificial Sequence
  Description of Artificial Sequence: Synthetic oligonucleotide
  Sense strand starting at position 1664 of SEQ ID NO: 587066
uuuguuucccagggaggga

SEQ ID NO: 764175 - RNA, 19 nt, Artificial Sequence
  Description of Artificial Sequence: Synthetic oligonucleotide
  Antisense strand to SEQ ID NO: 764174
ucccucccugggaaacaaa

SEQ ID NO: 764176 - RNA, 19 nt, Artificial Sequence
  Description of Artificial Sequence: Synthetic oligonucleotide
  Sense strand starting at position 2132 of SEQ ID NO: 587066
ucagauagggaucguagaa

SEQ ID NO: 764177 - RNA, 19 nt, Artificial Sequence
  Description of Artificial Sequence: Synthetic oligonucleotide
  Antisense strand to SEQ ID NO: 764176
uucuacgaucccuaucuga

SEQ ID NO: 764178 - RNA, 19 nt, Artificial Sequence
  Description of Artificial Sequence: Synthetic oligonucleotide
  Sense strand starting at position 2267 of SEQ ID NO: 587066
aguucugccgcgucccaaa

SEQ ID NO: 764179 - RNA, 19 nt, Artificial Sequence
  Description of Artificial Sequence: Synthetic oligonucleotide
  Antisense strand to SEQ ID NO: 764178
uuugggacgcggcagaacu

SEQ ID NO: 764180 - RNA, 19 nt, Artificial Sequence
  Description of Artificial Sequence: Synthetic oligonucleotide
  Sense strand starting at position 2280 of SEQ ID NO: 587066
cccaaaucuccgcagggaa

SEQ ID NO: 764181 - RNA, 19 nt, Artificial Sequence
  Description of Artificial Sequence: Synthetic oligonucleotide
  Antisense strand to SEQ ID NO: 764180
uucccugcggagauuuggg

SEQ ID NO: 764182 - RNA, 19 nt, Artificial Sequence
  Description of Artificial Sequence: Synthetic oligonucleotide
  Sense strand starting at position 2453 of SEQ ID NO: 587066
augcgaagugcuucugcaa

SEQ ID NO: 764183 - RNA, 19 nt, Artificial Sequence
  Description of Artificial Sequence: Synthetic oligonucleotide
  Antisense strand to SEQ ID NO: 764182
uugcagaagcacuucgcau

SEQ ID NO: 764184 - RNA, 19 nt, Artificial Sequence
  Description of Artificial Sequence: Synthetic oligonucleotide
  Sense strand starting at position 2454 of SEQ ID NO: 587066
ugcgaagugcuucugcaag

SEQ ID NO: 764185 - RNA, 19 nt, Artificial Sequence
  Description of Artificial Sequence: Synthetic oligonucleotide
  Antisense strand to SEQ ID NO: 764184
cuugcagaagcacuucgca

SEQ ID NO: 764186 - RNA, 19 nt, Artificial Sequence
  Description of Artificial Sequence: Synthetic oligonucleotide
  Sense strand starting at position 2527 of SEQ ID NO: 587066
aguugcuuugucgccagaa

SEQ ID NO: 764187 - RNA, 19 nt, Artificial Sequence
  Description of Artificial Sequence: Synthetic oligonucleotide
  Antisense strand to SEQ ID NO: 764186
uucuggcgacaaagcaacu

SEQ ID NO: 764188 - RNA, 19 nt, Artificial Sequence
  Description of Artificial Sequence: Synthetic oligonucleotide
  Sense strand starting at position 2958 of SEQ ID NO: 587066
uccuaaugucacuaggacu

SEQ ID NO: 764189 - RNA, 19 nt, Artificial Sequence
  Description of Artificial Sequence: Synthetic oligonucleotide
  Antisense strand to SEQ ID NO: 764188
aguccuagugacauuagga

SEQ ID NO: 764190 - RNA, 19 nt, Artificial Sequence
  Description of Artificial Sequence: Synthetic oligonucleotide
  Sense strand starting at position 3238 of SEQ ID NO: 587066
ucaagagauguguaugcau

SEQ ID NO: 764191 - RNA, 19 nt, Artificial Sequence
  Description of Artificial Sequence: Synthetic oligonucleotide
  Antisense strand to SEQ ID NO: 764190
augcauacacaucucuuga

SEQ ID NO: 764192 - RNA, 19 nt, Artificial Sequence
  Description of Artificial Sequence: Synthetic oligonucleotide
  Sense strand starting at position 3245 of SEQ ID NO: 587066
auguguaugcauuagaaca

SEQ ID NO: 764193 - RNA, 19 nt, Artificial Sequence
  Description of Artificial Sequence: Synthetic oligonucleotide
  Antisense strand to SEQ ID NO: 764192
uguucuaaugcauacacau

SEQ ID NO: 764194 - RNA, 19 nt, Artificial Sequence
  Description of Artificial Sequence: Synthetic oligonucleotide
  Sense strand starting at position 3290 of SEQ ID NO: 587066
uggcuuaaugcacaauuau

SEQ ID NO: 764195 - RNA, 19 nt, Artificial Sequence
  Description of Artificial Sequence: Synthetic oligonucleotide
  Antisense strand to SEQ ID NO: 764194
auaauugugcauuaagcca

SEQ ID NO: 764196 - RNA, 19 nt, Artificial Sequence
  Description of Artificial Sequence: Synthetic oligonucleotide
  Sense strand starting at position 3400 of SEQ ID NO: 587066
gacucuagaugucuaggga

SEQ ID NO: 764197 - RNA, 19 nt, Artificial Sequence
  Description of Artificial Sequence: Synthetic oligonucleotide
  Antisense strand to SEQ ID NO: 764196
ucccuagacaucuagaguc

SEQ ID NO: 764198 - RNA, 19 nt, Artificial Sequence
  Description of Artificial Sequence: Synthetic oligonucleotide
  Sense strand starting at position 3472 of SEQ ID NO: 587066
guauucuaucaaggagauc

SEQ ID NO: 764199 - RNA, 19 nt, Artificial Sequence
  Description of Artificial Sequence: Synthetic oligonucleotide
  Antisense strand to SEQ ID NO: 764198
gaucuccuugauagaauac

SEQ ID NO: 764200 - RNA, 19 nt, Artificial Sequence
  Description of Artificial Sequence: Synthetic oligonucleotide
  Sense strand starting at position 3621 of SEQ ID NO: 587066
agggaauguugacuucuau

SEQ ID NO: 764201 - RNA, 19 nt, Artificial Sequence
  Description of Artificial Sequence: Synthetic oligonucleotide
  Antisense strand to SEQ ID NO: 764200
auagaagucaacauucccu

SEQ ID NO: 764202 - RNA, 19 nt, Artificial Sequence
  Description of Artificial Sequence: Synthetic oligonucleotide
  Sense strand starting at position 3627 of SEQ ID NO: 587066
uguugacuucuauacauca

SEQ ID NO: 764203 - RNA, 19 nt, Artificial Sequence
  Description of Artificial Sequence: Synthetic oligonucleotide
  Antisense strand to SEQ ID NO: 764202
ugauguauagaagucaaca

SEQ ID NO: 764204 - RNA, 19 nt, Artificial Sequence
  Description of Artificial Sequence: Synthetic oligonucleotide
  Sense strand starting at position 3650 of SEQ ID NO: 587066
agugcaggcgccucuauua

SEQ ID NO: 764205 - RNA, 19 nt, Artificial Sequence
  Description of Artificial Sequence: Synthetic oligonucleotide
  Antisense strand to SEQ ID NO: 764204
uaauagaggcgccugcacu

SEQ ID NO: 764206 - RNA, 19 nt, Artificial Sequence
  Description of Artificial Sequence: Synthetic oligonucleotide
  Sense strand starting at position 3720 of SEQ ID NO: 587066
gcauaaguucuguaacaua

SEQ ID NO: 764207 - RNA, 19 nt, Artificial Sequence
  Description of Artificial Sequence: Synthetic oligonucleotide
  Antisense strand to SEQ ID NO: 764206
uauguuacagaacuuaugc

SEQ ID NO: 764208 - RNA, 19 nt, Artificial Sequence
  Description of Artificial Sequence: Synthetic oligonucleotide
  Sense strand starting at position 3884 of SEQ ID NO: 587066
gaagaagaguuacaauuug

SEQ ID NO: 764209 - RNA, 19 nt, Artificial Sequence
  Description of Artificial Sequence: Synthetic oligonucleotide
  Antisense strand to SEQ ID NO: 764208
caaauuguaacucuucuuc

SEQ ID NO: 764210 - RNA, 19 nt, Artificial Sequence
  Description of Artificial Sequence: Synthetic oligonucleotide
  Sense strand starting at position 3899 of SEQ ID NO: 587066
uuuguuaggccuuaaagag

SEQ ID NO: 764211 - RNA, 19 nt, Artificial Sequence
  Description of Artificial Sequence: Synthetic oligonucleotide
  Antisense strand to SEQ ID NO: 764210
cucuuuaaggccuaacaaa

SEQ ID NO: 764212 - RNA, 19 nt, Artificial Sequence
  Description of Artificial Sequence: Synthetic oligonucleotide
  Sense strand starting at position 3953 of SEQ ID NO: 587066
auugguacugaaugauaau

SEQ ID NO: 764213 - RNA, 19 nt, Artificial Sequence
  Description of Artificial Sequence: Synthetic oligonucleotide
  Antisense strand to SEQ ID NO: 764212
auuaucauucaguaccaau

SEQ ID NO: 764214 - RNA, 19 nt, Artificial Sequence
  Description of Artificial Sequence: Synthetic oligonucleotide
  Sense strand starting at position 70 of SEQ ID NO: 587067
ucauaauuaccugaagugu

SEQ ID NO: 764215 - RNA, 19 nt, Artificial Sequence
  Description of Artificial Sequence: Synthetic oligonucleotide
  Antisense strand to SEQ ID NO: 764214
acacuucagguaauuauga

SEQ ID NO: 764216 - RNA, 19 nt, Artificial Sequence
  Description of Artificial Sequence: Synthetic oligonucleotide
  Sense strand starting at position 79 of SEQ ID NO: 587067
ccugaaguguuauuaaucu

SEQ ID NO: 764217 - RNA, 19 nt, Artificial Sequence
  Description of Artificial Sequence: Synthetic oligonucleotide
  Antisense strand to SEQ ID NO: 764216
agauuaauaacacuucagg

SEQ ID NO: 764218 - RNA, 19 nt, Artificial Sequence
  Description of Artificial Sequence: Synthetic oligonucleotide
  Sense strand starting at position 214 of SEQ ID NO: 587067
guauacuaagcugaauuaa

SEQ ID NO: 764219 - RNA, 19 nt, Artificial Sequence
  Description of Artificial Sequence: Synthetic oligonucleotide
  Antisense strand to SEQ ID NO: 764218
uuaauucagcuuaguauac

SEQ ID NO: 764220 - RNA, 19 nt, Artificial Sequence
  Description of Artificial Sequence: Synthetic oligonucleotide
  Sense strand starting at position 361 of SEQ ID NO: 587067
uagaaaggcuuuccaguga

SEQ ID NO: 764221 - RNA, 19 nt, Artificial Sequence
  Description of Artificial Sequence: Synthetic oligonucleotide
  Antisense strand to SEQ ID NO: 764220
ucacuggaaagccuuucua

SEQ ID NO: 764222 - RNA, 19 nt, Artificial Sequence
  Description of Artificial Sequence: Synthetic oligonucleotide
  Sense strand starting at position 562 of SEQ ID NO: 587067
cuugaugguucugucaaua

SEQ ID NO: 764223 - RNA, 19 nt, Artificial Sequence
  Description of Artificial Sequence: Synthetic oligonucleotide
  Antisense strand to SEQ ID NO: 764222
uauugacagaaccaucaag

SEQ ID NO: 764224 - RNA, 19 nt, Artificial Sequence
  Description of Artificial Sequence: Synthetic oligonucleotide
  Sense strand starting at position 567 of SEQ ID NO: 587067
ugguucugucaauaaggga

SEQ ID NO: 764225 - RNA, 19 nt, Artificial Sequence
  Description of Artificial Sequence: Synthetic oligonucleotide
  Antisense strand to SEQ ID NO: 764224
ucccuuauugacagaacca

SEQ ID NO: 764226 - RNA, 19 nt, Artificial Sequence
  Description of Artificial Sequence: Synthetic oligonucleotide
  Sense strand starting at position 807 of SEQ ID NO: 587067
ggcaucacaguguaaucaa

SEQ ID NO: 764227 - RNA, 19 nt, Artificial Sequence
  Description of Artificial Sequence: Synthetic oligonucleotide
  Antisense strand to SEQ ID NO: 764226
uugauuacacugugaugcc

SEQ ID NO: 764228 - RNA, 19 nt, Artificial Sequence
  Description of Artificial Sequence: Synthetic oligonucleotide
  Sense strand starting at position 826 of SEQ ID NO: 587067
cagagaaguggcugguuau

SEQ ID NO: 764229 - RNA, 19 nt, Artificial Sequence
  Description of Artificial Sequence: Synthetic oligonucleotide
  Antisense strand to SEQ ID NO: 764228
auaaccagccacuucucug

SEQ ID NO: 764230 - RNA, 19 nt, Artificial Sequence
  Description of Artificial Sequence: Synthetic oligonucleotide
  Sense strand starting at position 827 of SEQ ID NO: 587067
agagaaguggcugguuauu

SEQ ID NO: 764231 - RNA, 19 nt, Artificial Sequence
  Description of Artificial Sequence: Synthetic oligonucleotide
  Antisense strand to SEQ ID NO: 764230
aauaaccagccacuucucu

SEQ ID NO: 764232 - RNA, 19 nt, Artificial Sequence
  Description of Artificial Sequence: Synthetic oligonucleotide
  Sense strand starting at position 833 of SEQ ID NO: 587067
guggcugguuauuuaucua

SEQ ID NO: 764233 - RNA, 19 nt, Artificial Sequence
  Description of Artificial Sequence: Synthetic oligonucleotide
  Antisense strand to SEQ ID NO: 764232
uagauaaauaaccagccac

SEQ ID NO: 764234 - RNA, 19 nt, Artificial Sequence
  Description of Artificial Sequence: Synthetic oligonucleotide
  Sense strand starting at position 1141 of SEQ ID NO: 587067
cguggcugguuauuuaaga

SEQ ID NO: 764235 - RNA, 19 nt, Artificial Sequence
  Description of Artificial Sequence: Synthetic oligonucleotide
  Antisense strand to SEQ ID NO: 764234
ucuuaaauaaccagccacg

SEQ ID NO: 764236 - RNA, 19 nt, Artificial Sequence
  Description of Artificial Sequence: Synthetic oligonucleotide
  Sense strand starting at position 1146 of SEQ ID NO: 587067
cugguuauuuaagaacaau

SEQ ID NO: 764237 - RNA, 19 nt, Artificial Sequence
  Description of Artificial Sequence: Synthetic oligonucleotide
  Antisense strand to SEQ ID NO: 764236
auuguucuuaaauaaccag

SEQ ID NO: 764238 - RNA, 19 nt, Artificial Sequence
  Description of Artificial Sequence: Synthetic oligonucleotide
  Sense strand starting at position 1244 of SEQ ID NO: 587067
ggguauguuacacggacua

SEQ ID NO: 764239 - RNA, 19 nt, Artificial Sequence
  Description of Artificial Sequence: Synthetic oligonucleotide
  Antisense strand to SEQ ID NO: 764238
uaguccguguaacauaccc

SEQ ID NO: 764240 - RNA, 19 nt, Artificial Sequence
  Description of Artificial Sequence: Synthetic oligonucleotide
  Sense strand starting at position 1316 of SEQ ID NO: 587067
ccauaucugcuguaaguca

SEQ ID NO: 764241 - RNA, 19 nt, Artificial Sequence
  Description of Artificial Sequence: Synthetic oligonucleotide
  Antisense strand to SEQ ID NO: 764240
ugacuuacagcagauaugg

SEQ ID NO: 764242 - RNA, 19 nt, Artificial Sequence
  Description of Artificial Sequence: Synthetic oligonucleotide
  Sense strand starting at position 1330 of SEQ ID NO: 587067
agucauaaagacuguugua

SEQ ID NO: 764243 - RNA, 19 nt, Artificial Sequence
  Description of Artificial Sequence: Synthetic oligonucleotide
  Antisense strand to SEQ ID NO: 764242
uacaacagucuuuaugacu

SEQ ID NO: 764244 - RNA, 19 nt, Artificial Sequence
  Description of Artificial Sequence: Synthetic oligonucleotide
  Sense strand starting at position 1526 of SEQ ID NO: 587067
gguccacauuugggauuua

SEQ ID NO: 764245 - RNA, 19 nt, Artificial Sequence
  Description of Artificial Sequence: Synthetic oligonucleotide
  Antisense strand to SEQ ID NO: 764244
uaaaucccaaauguggacc

SEQ ID NO: 764246 - RNA, 19 nt, Artificial Sequence
  Description of Artificial Sequence: Synthetic oligonucleotide
  Sense strand starting at position 1612 of SEQ ID NO: 587067
agucguaucccacagagga

SEQ ID NO: 764247 - RNA, 19 nt, Artificial Sequence
  Description of Artificial Sequence: Synthetic oligonucleotide
  Antisense strand to SEQ ID NO: 764246
uccucugugggauacgacu

SEQ ID NO: 764248 - RNA, 19 nt, Artificial Sequence
  Description of Artificial Sequence: Synthetic oligonucleotide
  Sense strand starting at position 1965 of SEQ ID NO: 587067
ucuaaaguuaccggaagaa

SEQ ID NO: 764249 - RNA, 19 nt, Artificial Sequence
  Description of Artificial Sequence: Synthetic oligonucleotide
  Antisense strand to SEQ ID NO: 764248
uucuuccgguaacuuuaga

SEQ ID NO: 764250 - RNA, 19 nt, Artificial Sequence
  Description of Artificial Sequence: Synthetic oligonucleotide
  Sense strand starting at position 2036 of SEQ ID NO: 587067
gagcguuaccagggaaaca

SEQ ID NO: 764251 - RNA, 19 nt, Artificial Sequence
  Description of Artificial Sequence: Synthetic oligonucleotide
  Antisense strand to SEQ ID NO: 764250
uguuucccugguaacgcuc

SEQ ID NO: 764252 - RNA, 19 nt, Artificial Sequence
  Description of Artificial Sequence: Synthetic oligonucleotide
  Sense strand starting at position 2205 of SEQ ID NO: 587067
ggacucacauguguaaacu

SEQ ID NO: 764253 - RNA, 19 nt, Artificial Sequence
  Description of Artificial Sequence: Synthetic oligonucleotide
  Antisense strand to SEQ ID NO: 764252
aguuuacacaugugagucc

SEQ ID NO: 764254 - RNA, 19 nt, Artificial Sequence
  Description of Artificial Sequence: Synthetic oligonucleotide
  Sense strand starting at position 2214 of SEQ ID NO: 587067
uguguaaacugauuaagua

SEQ ID NO: 764255 - RNA, 19 nt, Artificial Sequence
  Description of Artificial Sequence: Synthetic oligonucleotide
  Antisense strand to SEQ ID NO: 764254
uacuuaaucaguuuacaca

SEQ ID NO: 764256 - RNA, 19 nt, Artificial Sequence
  Description of Artificial Sequence: Synthetic oligonucleotide
  Sense strand starting at position 2215 of SEQ ID NO: 587067
guguaaacugauuaaguag

SEQ ID NO: 764257 - RNA, 19 nt, Artificial Sequence
  Description of Artificial Sequence: Synthetic oligonucleotide
  Antisense strand to SEQ ID NO: 764256
cuacuuaaucaguuuacac

SEQ ID NO: 764258 - RNA, 19 nt, Artificial Sequence
  Description of Artificial Sequence: Synthetic oligonucleotide
  Sense strand starting at position 2249 of SEQ ID NO: 587067
gauagaguggcgugauaaa

SEQ ID NO: 764259 - RNA, 19 nt, Artificial Sequence
  Description of Artificial Sequence: Synthetic oligonucleotide
  Antisense strand to SEQ ID NO: 764258
uuuaucacgccacucuauc

SEQ ID NO: 764260 - RNA, 19 nt, Artificial Sequence
  Description of Artificial Sequence: Synthetic oligonucleotide
  Sense strand starting at position 2260 of SEQ ID NO: 587067
gugauaaaguggccagaca

SEQ ID NO: 764261 - RNA, 19 nt, Artificial Sequence
  Description of Artificial Sequence: Synthetic oligonucleotide
  Antisense strand to SEQ ID NO: 764260
ugucuggccacuuuaucac

SEQ ID NO: 764262 - RNA, 19 nt, Artificial Sequence
  Description of Artificial Sequence: Synthetic oligonucleotide
  Sense strand starting at position 2624 of SEQ ID NO: 587067
gcugcucauccugaggaaa

SEQ ID NO: 764263 - RNA, 19 nt, Artificial Sequence
  Description of Artificial Sequence: Synthetic oligonucleotide
  Antisense strand to SEQ ID NO: 764262
uuuccucaggaugagcagc

SEQ ID NO: 764264 - RNA, 19 nt, Artificial Sequence
  Description of Artificial Sequence: Synthetic oligonucleotide
  Sense strand starting at position 2718 of SEQ ID NO: 587067
agaccuuccugguuauuac

SEQ ID NO: 764265 - RNA, 19 nt, Artificial Sequence
  Description of Artificial Sequence: Synthetic oligonucleotide
  Antisense strand to SEQ ID NO: 764264
guaauaaccaggaaggucu

SEQ ID NO: 764266 - RNA, 19 nt, Artificial Sequence
  Description of Artificial Sequence: Synthetic oligonucleotide
  Sense strand starting at position 2728 of SEQ ID NO: 587067
gguuauuacccagaggagc

SEQ ID NO: 764267 - RNA, 19 nt, Artificial Sequence
  Description of Artificial Sequence: Synthetic oligonucleotide
  Antisense strand to SEQ ID NO: 764266
gcuccucuggguaauaacc

SEQ ID NO: 764268 - RNA, 19 nt, Artificial Sequence
  Description of Artificial Sequence: Synthetic oligonucleotide
  Sense strand starting at position 2842 of SEQ ID NO: 587067
gcgagcuuccuggaggaga

SEQ ID NO: 764269 - RNA, 19 nt, Artificial Sequence
  Description of Artificial Sequence: Synthetic oligonucleotide
  Antisense strand to SEQ ID NO: 764268
ucuccuccaggaagcucgc

SEQ ID NO: 764270 - RNA, 19 nt, Artificial Sequence
  Description of Artificial Sequence: Synthetic oligonucleotide
  Sense strand starting at position 2957 of SEQ ID NO: 587067
aguggauuacaucauguau

SEQ ID NO: 764271 - RNA, 19 nt, Artificial Sequence
  Description of Artificial Sequence: Synthetic oligonucleotide
  Antisense strand to SEQ ID NO: 764270
auacaugauguaauccacu

SEQ ID NO: 764272 - RNA, 19 nt, Artificial Sequence
  Description of Artificial Sequence: Synthetic oligonucleotide
  Sense strand starting at position 2963 of SEQ ID NO: 587067
uuacaucauguauguccaa

SEQ ID NO: 764273 - RNA, 19 nt, Artificial Sequence
  Description of Artificial Sequence: Synthetic oligonucleotide
  Antisense strand to SEQ ID NO: 764272
uuggacauacaugauguaa

SEQ ID NO: 764274 - RNA, 19 nt, Artificial Sequence
  Description of Artificial Sequence: Synthetic oligonucleotide
  Sense strand starting at position 3011 of SEQ ID NO: 587067
agauuaauaccacguggua

SEQ ID NO: 764275 - RNA, 19 nt, Artificial Sequence
  Description of Artificial Sequence: Synthetic oligonucleotide
  Antisense strand to SEQ ID NO: 764274
uaccacgugguauuaaucu

SEQ ID NO: 764276 - RNA, 19 nt, Artificial Sequence
  Description of Artificial Sequence: Synthetic oligonucleotide
  Sense strand starting at position 3535 of SEQ ID NO: 587067
augugacucuuuccuaaga

SEQ ID NO: 764277 - RNA, 19 nt, Artificial Sequence
  Description of Artificial Sequence: Synthetic oligonucleotide
  Antisense strand to SEQ ID NO: 764276
ucuuaggaaagagucacau

SEQ ID NO: 764278 - RNA, 19 nt, Artificial Sequence
  Description of Artificial Sequence: Synthetic oligonucleotide
  Sense strand starting at position 3536 of SEQ ID NO: 587067
ugugacucuuuccuaagaa

SEQ ID NO: 764279 - RNA, 19 nt, Artificial Sequence
  Description of Artificial Sequence: Synthetic oligonucleotide
  Antisense strand to SEQ ID NO: 764278
uucuuaggaaagagucaca

SEQ ID NO: 764280 - RNA, 19 nt, Artificial Sequence
  Description of Artificial Sequence: Synthetic oligonucleotide
  Sense strand starting at position 3627 of SEQ ID NO: 587067
uaagcuguugugcauuuau

SEQ ID NO: 764281 - RNA, 19 nt, Artificial Sequence
  Description of Artificial Sequence: Synthetic oligonucleotide
  Antisense strand to SEQ ID NO: 764280
auaaaugcacaacagcuua

SEQ ID NO: 764282 - RNA, 19 nt, Artificial Sequence
  Description of Artificial Sequence: Synthetic oligonucleotide
  Sense strand starting at position 3701 of SEQ ID NO: 587067
gccauaacgcaauaucaca

SEQ ID NO: 764283 - RNA, 19 nt, Artificial Sequence
  Description of Artificial Sequence: Synthetic oligonucleotide
  Antisense strand to SEQ ID NO: 764282
ugugauauugcguuauggc

SEQ ID NO: 764284 - RNA, 19 nt, Artificial Sequence
  Description of Artificial Sequence: Synthetic oligonucleotide
  Sense strand starting at position 3708 of SEQ ID NO: 587067
cgcaauaucacagacaggu

SEQ ID NO: 764285 - RNA, 19 nt, Artificial Sequence
  Description of Artificial Sequence: Synthetic oligonucleotide
  Antisense strand to SEQ ID NO: 764284
accugucugugauauugcg

SEQ ID NO: 764286 - RNA, 19 nt, Artificial Sequence
  Description of Artificial Sequence: Synthetic oligonucleotide
  Sense strand starting at position 3782 of SEQ ID NO: 587067
ucaaauugucagcaggguu

SEQ ID NO: 764287 - RNA, 19 nt, Artificial Sequence
  Description of Artificial Sequence: Synthetic oligonucleotide
  Antisense strand to SEQ ID NO: 764286
aacccugcugacaauuuga

SEQ ID NO: 764288 - RNA, 19 nt, Artificial Sequence
  Description of Artificial Sequence: Synthetic oligonucleotide
  Sense strand starting at position 3853 of SEQ ID NO: 587067
ugauuucugugcucgugaa

SEQ ID NO: 764289 - RNA, 19 nt, Artificial Sequence
  Description of Artificial Sequence: Synthetic oligonucleotide
  Antisense strand to SEQ ID NO: 764288
uucacgagcacagaaauca

SEQ ID NO: 764290 - RNA, 19 nt, Artificial Sequence
  Description of Artificial Sequence: Synthetic oligonucleotide
  Sense strand starting at position 3854 of SEQ ID NO: 587067
gauuucugugcucgugaau

SEQ ID NO: 764291 - RNA, 19 nt, Artificial Sequence
  Description of Artificial Sequence: Synthetic oligonucleotide
  Antisense strand to SEQ ID NO: 764290
auucacgagcacagaaauc

SEQ ID NO: 764292 - RNA, 19 nt, Artificial Sequence
  Description of Artificial Sequence: Synthetic oligonucleotide
  Sense strand starting at position 3865 of SEQ ID NO: 587067
ucgugaauccuugcugucu

SEQ ID NO: 764293 - RNA, 19 nt, Artificial Sequence
  Description of Artificial Sequence: Synthetic oligonucleotide
  Antisense strand to SEQ ID NO: 764292
agacagcaaggauucacga

SEQ ID NO: 764294 - RNA, 19 nt, Artificial Sequence
  Description of Artificial Sequence: Synthetic oligonucleotide
  Sense strand starting at position 73 of SEQ ID NO: 587068
gcaggacgaguucagaaga

SEQ ID NO: 764295 - RNA, 19 nt, Artificial Sequence
  Description of Artificial Sequence: Synthetic oligonucleotide
  Antisense strand to SEQ ID NO: 764294
ucuucugaacucguccugc

SEQ ID NO: 764296 - RNA, 19 nt, Artificial Sequence
  Description of Artificial Sequence: Synthetic oligonucleotide
  Sense strand starting at position 116 of SEQ ID NO: 587068
gaaguugcugcugagacua

SEQ ID NO: 764297 - RNA, 19 nt, Artificial Sequence
  Description of Artificial Sequence: Synthetic oligonucleotide
  Antisense strand to SEQ ID NO: 764296
uagucucagcagcaacuuc

SEQ ID NO: 764298 - RNA, 19 nt, Artificial Sequence
  Description of Artificial Sequence: Synthetic oligonucleotide
  Sense strand starting at position 172 of SEQ ID NO: 587068
cugcuuaaaguauaguaau

SEQ ID NO: 764299 - RNA, 19 nt, Artificial Sequence
  Description of Artificial Sequence: Synthetic oligonucleotide
  Antisense strand to SEQ ID NO: 764298
auuacuauacuuuaagcag

SEQ ID NO: 764300 - RNA, 19 nt, Artificial Sequence
  Description of Artificial Sequence: Synthetic oligonucleotide
  Sense strand starting at position 240 of SEQ ID NO: 587068
gagccuggucuuuauuugu

SEQ ID NO: 764301 - RNA, 19 nt, Artificial Sequence
  Description of Artificial Sequence: Synthetic oligonucleotide
  Antisense strand to SEQ ID NO: 764300
acaaauaaagaccaggcuc

SEQ ID NO: 764302 - RNA, 19 nt, Artificial Sequence
  Description of Artificial Sequence: Synthetic oligonucleotide
  Sense strand starting at position 364 of SEQ ID NO: 587068
cuuccaaagugaguggaaa

SEQ ID NO: 764303 - RNA, 19 nt, Artificial Sequence
  Description of Artificial Sequence: Synthetic oligonucleotide
  Antisense strand to SEQ ID NO: 764302
uuuccacucacuuuggaag

SEQ ID NO: 764304 - RNA, 19 nt, Artificial Sequence
  Description of Artificial Sequence: Synthetic oligonucleotide
  Sense strand starting at position 411 of SEQ ID NO: 587068
uagguucgagcuuaugaaa

SEQ ID NO: 764305 - RNA, 19 nt, Artificial Sequence
  Description of Artificial Sequence: Synthetic oligonucleotide
  Antisense strand to SEQ ID NO: 764304
uuucauaagcucgaaccua

SEQ ID NO: 764306 - RNA, 19 nt, Artificial Sequence
  Description of Artificial Sequence: Synthetic oligonucleotide
  Sense strand starting at position 627 of SEQ ID NO: 587068
aguuaaacuugucuucuga

SEQ ID NO: 764307 - RNA, 19 nt, Artificial Sequence
  Description of Artificial Sequence: Synthetic oligonucleotide
  Antisense strand to SEQ ID NO: 764306
ucagaagacaaguuuaacu

SEQ ID NO: 764308 - RNA, 19 nt, Artificial Sequence
  Description of Artificial Sequence: Synthetic oligonucleotide
  Sense strand starting at position 775 of SEQ ID NO: 587068
uguguucuaugggcuauuu

SEQ ID NO: 764309 - RNA, 19 nt, Artificial Sequence
  Description of Artificial Sequence: Synthetic oligonucleotide
  Antisense strand to SEQ ID NO: 764308
aaauagcccauagaacaca

SEQ ID NO: 764310 - RNA, 19 nt, Artificial Sequence
  Description of Artificial Sequence: Synthetic oligonucleotide
  Sense strand starting at position 786 of SEQ ID NO: 587068
ggcuauuucuaaguucuuu

SEQ ID NO: 764311 - RNA, 19 nt, Artificial Sequence
  Description of Artificial Sequence: Synthetic oligonucleotide
  Antisense strand to SEQ ID NO: 764310
aaagaacuuagaaauagcc

SEQ ID NO: 764312 - RNA, 19 nt, Artificial Sequence
  Description of Artificial Sequence: Synthetic oligonucleotide
  Sense strand starting at position 827 of SEQ ID NO: 587068
cuugacaagcacuaugauu

SEQ ID NO: 764313 - RNA, 19 nt, Artificial Sequence
  Description of Artificial Sequence: Synthetic oligonucleotide
  Antisense strand to SEQ ID NO: 764312
aaucauagugcuugucaag

SEQ ID NO: 764314 - RNA, 19 nt, Artificial Sequence
  Description of Artificial Sequence: Synthetic oligonucleotide
  Sense strand starting at position 883 of SEQ ID NO: 587068
gguaaagucauuugcucga

SEQ ID NO: 764315 - RNA, 19 nt, Artificial Sequence
  Description of Artificial Sequence: Synthetic oligonucleotide
  Antisense strand to SEQ ID NO: 764314
ucgagcaaaugacuuuacc

SEQ ID NO: 764316 - RNA, 19 nt, Artificial Sequence
  Description of Artificial Sequence: Synthetic oligonucleotide
  Sense strand starting at position 886 of SEQ ID NO: 587068
aaagucauuugcucgaggu

SEQ ID NO: 764317 - RNA, 19 nt, Artificial Sequence
  Description of Artificial Sequence: Synthetic oligonucleotide
  Antisense strand to SEQ ID NO: 764316
accucgagcaaaugacuuu

SEQ ID NO: 764318 - RNA, 19 nt, Artificial Sequence
  Description of Artificial Sequence: Synthetic oligonucleotide
  Sense strand starting at position 902 of SEQ ID NO: 587068
ggucgcauagcuagugagu

SEQ ID NO: 764319 - RNA, 19 nt, Artificial Sequence
  Description of Artificial Sequence: Synthetic oligonucleotide
  Antisense strand to SEQ ID NO: 764318
acucacuagcuaugcgacc

SEQ ID NO: 764320 - RNA, 19 nt, Artificial Sequence
  Description of Artificial Sequence: Synthetic oligonucleotide
  Sense strand starting at position 909 of SEQ ID NO: 587068
uagcuagugagucauggaa

SEQ ID NO: 764321 - RNA, 19 nt, Artificial Sequence
  Description of Artificial Sequence: Synthetic oligonucleotide
  Antisense strand to SEQ ID NO: 764320
uuccaugacucacuagcua

SEQ ID NO: 764322 - RNA, 19 nt, Artificial Sequence
  Description of Artificial Sequence: Synthetic oligonucleotide
  Sense strand starting at position 1328 of SEQ ID NO: 587068
gugaaagucgcagagaaag

SEQ ID NO: 764323 - RNA, 19 nt, Artificial Sequence
  Description of Artificial Sequence: Synthetic oligonucleotide
  Antisense strand to SEQ ID NO: 764322
cuuucucugcgacuuucac

SEQ ID NO: 764324 - RNA, 19 nt, Artificial Sequence
  Description of Artificial Sequence: Synthetic oligonucleotide
  Sense strand starting at position 1330 of SEQ ID NO: 587068
gaaagucgcagagaaagua

SEQ ID NO: 764325 - RNA, 19 nt, Artificial Sequence
  Description of Artificial Sequence: Synthetic oligonucleotide
  Antisense strand to SEQ ID NO: 764324
uacuuucucugcgacuuuc

SEQ ID NO: 764326 - RNA, 19 nt, Artificial Sequence
  Description of Artificial Sequence: Synthetic oligonucleotide
  Sense strand starting at position 1562 of SEQ ID NO: 587068
ccugccuuagcugaggaau

SEQ ID NO: 764327 - RNA, 19 nt, Artificial Sequence
  Description of Artificial Sequence: Synthetic oligonucleotide
  Antisense strand to SEQ ID NO: 764326
auuccucagcuaaggcagg

SEQ ID NO: 764328 - RNA, 19 nt, Artificial Sequence
  Description of Artificial Sequence: Synthetic oligonucleotide
  Sense strand starting at position 1565 of SEQ ID NO: 587068
gccuuagcugaggaauuga

SEQ ID NO: 764329 - RNA, 19 nt, Artificial Sequence
  Description of Artificial Sequence: Synthetic oligonucleotide
  Antisense strand to SEQ ID NO: 764328
ucaauuccucagcuaaggc

SEQ ID NO: 764330 - RNA, 19 nt, Artificial Sequence
  Description of Artificial Sequence: Synthetic oligonucleotide
  Sense strand starting at position 1576 of SEQ ID NO: 587068
ggaauugaguaucugaucu

SEQ ID NO: 764331 - RNA, 19 nt, Artificial Sequence
  Description of Artificial Sequence: Synthetic oligonucleotide
  Antisense strand to SEQ ID NO: 764330
agaucagauacucaauucc

SEQ ID NO: 764332 - RNA, 19 nt, Artificial Sequence
  Description of Artificial Sequence: Synthetic oligonucleotide
  Sense strand starting at position 1775 of SEQ ID NO: 587068
ccagccuggccaugaauaa

SEQ ID NO: 764333 - RNA, 19 nt, Artificial Sequence
  Description of Artificial Sequence: Synthetic oligonucleotide
  Antisense strand to SEQ ID NO: 764332
uuauucauggccaggcugg

SEQ ID NO: 764334 - RNA, 19 nt, Artificial Sequence
  Description of Artificial Sequence: Synthetic oligonucleotide
  Sense strand starting at position 1994 of SEQ ID NO: 587068
gcaacucugccagagguga

SEQ ID NO: 764335 - RNA, 19 nt, Artificial Sequence
  Description of Artificial Sequence: Synthetic oligonucleotide
  Antisense strand to SEQ ID NO: 764334
ucaccucuggcagaguugc

SEQ ID NO: 764336 - RNA, 19 nt, Artificial Sequence
  Description of Artificial Sequence: Synthetic oligonucleotide
  Sense strand starting at position 2057 of SEQ ID NO: 587068
ggaaacuuggccugucaca

SEQ ID NO: 764337 - RNA, 19 nt, Artificial Sequence
  Description of Artificial Sequence: Synthetic oligonucleotide
  Antisense strand to SEQ ID NO: 764336
ugugacaggccaaguuucc

SEQ ID NO: 764338 - RNA, 19 nt, Artificial Sequence
  Description of Artificial Sequence: Synthetic oligonucleotide
  Sense strand starting at position 2194 of SEQ ID NO: 587068
acaagagagaucuguguca

SEQ ID NO: 764339 - RNA, 19 nt, Artificial Sequence
  Description of Artificial Sequence: Synthetic oligonucleotide
  Antisense strand to SEQ ID NO: 764338
ugacacagaucucucuugu

SEQ ID NO: 764340 - RNA, 19 nt, Artificial Sequence
  Description of Artificial Sequence: Synthetic oligonucleotide
  Sense strand starting at position 2196 of SEQ ID NO: 587068
aagagagaucugugucaug

SEQ ID NO: 764341 - RNA, 19 nt, Artificial Sequence
  Description of Artificial Sequence: Synthetic oligonucleotide
  Antisense strand to SEQ ID NO: 764340
caugacacagaucucucuu

SEQ ID NO: 764342 - RNA, 19 nt, Artificial Sequence
  Description of Artificial Sequence: Synthetic oligonucleotide
  Sense strand starting at position 2334 of SEQ ID NO: 587068
ugucgaagugcguuaauua

SEQ ID NO: 764343 - RNA, 19 nt, Artificial Sequence
  Description of Artificial Sequence: Synthetic oligonucleotide
  Antisense strand to SEQ ID NO: 764342
uaauuaacgcacuucgaca

SEQ ID NO: 764344 - RNA, 19 nt, Artificial Sequence
  Description of Artificial Sequence: Synthetic oligonucleotide
  Sense strand starting at position 2889 of SEQ ID NO: 587068
gagguaaggaagugucaga

SEQ ID NO: 764345 - RNA, 19 nt, Artificial Sequence
  Description of Artificial Sequence: Synthetic oligonucleotide
  Antisense strand to SEQ ID NO: 764344
ucugacacuuccuuaccuc

SEQ ID NO: 764346 - RNA, 19 nt, Artificial Sequence
  Description of Artificial Sequence: Synthetic oligonucleotide
  Sense strand starting at position 3070 of SEQ ID NO: 587068
gaguaacuugacuagagcu

SEQ ID NO: 764347 - RNA, 19 nt, Artificial Sequence
  Description of Artificial Sequence: Synthetic oligonucleotide
  Antisense strand to SEQ ID NO: 764346
agcucuagucaaguuacuc

SEQ ID NO: 764348 - RNA, 19 nt, Artificial Sequence
  Description of Artificial Sequence: Synthetic oligonucleotide
  Sense strand starting at position 3268 of SEQ ID NO: 587068
uuccacugugaugggaaua

SEQ ID NO: 764349 - RNA, 19 nt, Artificial Sequence
  Description of Artificial Sequence: Synthetic oligonucleotide
  Antisense strand to SEQ ID NO: 764348
uauucccaucacaguggaa

SEQ ID NO: 764350 - RNA, 19 nt, Artificial Sequence
  Description of Artificial Sequence: Synthetic oligonucleotide
  Sense strand starting at position 3269 of SEQ ID NO: 587068
uccacugugaugggaauaa

SEQ ID NO: 764351 - RNA, 19 nt, Artificial Sequence
  Description of Artificial Sequence: Synthetic oligonucleotide
  Antisense strand to SEQ ID NO: 764350
uuauucccaucacagugga

SEQ ID NO: 764352 - RNA, 19 nt, Artificial Sequence
  Description of Artificial Sequence: Synthetic oligonucleotide
  Sense strand starting at position 3297 of SEQ ID NO: 587068
ugggaugaacucugccuga

SEQ ID NO: 764353 - RNA, 19 nt, Artificial Sequence
  Description of Artificial Sequence: Synthetic oligonucleotide
  Antisense strand to SEQ ID NO: 764352
ucaggcagaguucauccca

SEQ ID NO: 764354 - RNA, 19 nt, Artificial Sequence
  Description of Artificial Sequence: Synthetic oligonucleotide
  Sense strand starting at position 3300 of SEQ ID NO: 587068
gaugaacucugccugagag

SEQ ID NO: 764355 - RNA, 19 nt, Artificial Sequence
  Description of Artificial Sequence: Synthetic oligonucleotide
  Antisense strand to SEQ ID NO: 764354
cucucaggcagaguucauc

SEQ ID NO: 764356 - RNA, 19 nt, Artificial Sequence
  Description of Artificial Sequence: Synthetic oligonucleotide
  Sense strand starting at position 3302 of SEQ ID NO: 587068
ugaacucugccugagaggu

SEQ ID NO: 764357 - RNA, 19 nt, Artificial Sequence
  Description of Artificial Sequence: Synthetic oligonucleotide
  Antisense strand to SEQ ID NO: 764356
accucucaggcagaguuca

SEQ ID NO: 764358 - RNA, 19 nt, Artificial Sequence
  Description of Artificial Sequence: Synthetic oligonucleotide
  Sense strand starting at position 3370 of SEQ ID NO: 587068
uuuguaugugcagauuaga

SEQ ID NO: 764359 - RNA, 19 nt, Artificial Sequence
  Description of Artificial Sequence: Synthetic oligonucleotide
  Antisense strand to SEQ ID NO: 764358
ucuaaucugcacauacaaa

SEQ ID NO: 764360 - RNA, 19 nt, Artificial Sequence
  Description of Artificial Sequence: Synthetic oligonucleotide
  Sense strand starting at position 3373 of SEQ ID NO: 587068
guaugugcagauuagaguu

SEQ ID NO: 764361 - RNA, 19 nt, Artificial Sequence
  Description of Artificial Sequence: Synthetic oligonucleotide
  Antisense strand to SEQ ID NO: 764360
aacucuaaucugcacauac

SEQ ID NO: 764362 - RNA, 19 nt, Artificial Sequence
  Description of Artificial Sequence: Synthetic oligonucleotide
  Sense strand starting at position 3484 of SEQ ID NO: 587068
caugaaugggccugguaag

SEQ ID NO: 764363 - RNA, 19 nt, Artificial Sequence
  Description of Artificial Sequence: Synthetic oligonucleotide
  Antisense strand to SEQ ID NO: 764362
cuuaccaggcccauucaug

SEQ ID NO: 764364 - RNA, 19 nt, Artificial Sequence
  Description of Artificial Sequence: Synthetic oligonucleotide
  Sense strand starting at position 3513 of SEQ ID NO: 587068
ggacuccagcucuguggaa

SEQ ID NO: 764365 - RNA, 19 nt, Artificial Sequence
  Description of Artificial Sequence: Synthetic oligonucleotide
  Antisense strand to SEQ ID NO: 764364
uuccacagagcuggagucc

SEQ ID NO: 764366 - RNA, 19 nt, Artificial Sequence
  Description of Artificial Sequence: Synthetic oligonucleotide
  Sense strand starting at position 3607 of SEQ ID NO: 587068
ucuaauuggcucuaagaua

SEQ ID NO: 764367 - RNA, 19 nt, Artificial Sequence
  Description of Artificial Sequence: Synthetic oligonucleotide
  Antisense strand to SEQ ID NO: 764366
uaucuuagagccaauuaga

SEQ ID NO: 764368 - RNA, 19 nt, Artificial Sequence
  Description of Artificial Sequence: Synthetic oligonucleotide
  Sense strand starting at position 3639 of SEQ ID NO: 587068
gccuauguuccuggauuug

SEQ ID NO: 764369 - RNA, 19 nt, Artificial Sequence
  Description of Artificial Sequence: Synthetic oligonucleotide
  Antisense strand to SEQ ID NO: 764368
caaauccaggaacauaggc

SEQ ID NO: 764370 - RNA, 19 nt, Artificial Sequence
  Description of Artificial Sequence: Synthetic oligonucleotide
  Sense strand starting at position 3719 of SEQ ID NO: 587068
aggcauuaccacuaguuga

SEQ ID NO: 764371 - RNA, 19 nt, Artificial Sequence
  Description of Artificial Sequence: Synthetic oligonucleotide
  Antisense strand to SEQ ID NO: 764370
ucaacuagugguaaugccu

SEQ ID NO: 764372 - RNA, 19 nt, Artificial Sequence
  Description of Artificial Sequence: Synthetic oligonucleotide
  Sense strand starting at position 3804 of SEQ ID NO: 587068
agcccuugugcucaaggaa

SEQ ID NO: 764373 - RNA, 19 nt, Artificial Sequence
  Description of Artificial Sequence: Synthetic oligonucleotide
  Antisense strand to SEQ ID NO: 764372
uuccuugagcacaagggcu

SEQ ID NO: 764374 - RNA, 19 nt, Artificial Sequence
  Description of Artificial Sequence: Synthetic oligonucleotide
  Sense strand starting at position 55 of SEQ ID NO: 587069
ucuguugccagauggguaa

SEQ ID NO: 764375 - RNA, 19 nt, Artificial Sequence
  Description of Artificial Sequence: Synthetic oligonucleotide
  Antisense strand to SEQ ID NO: 764374
uuacccaucuggcaacaga

SEQ ID NO: 764376 - RNA, 19 nt, Artificial Sequence
  Description of Artificial Sequence: Synthetic oligonucleotide
  Sense strand starting at position 113 of SEQ ID NO: 587069
ugcuguuugggcguguaaa

SEQ ID NO: 764377 - RNA, 19 nt, Artificial Sequence
  Description of Artificial Sequence: Synthetic oligonucleotide
  Antisense strand to SEQ ID NO: 764376
uuuacacgcccaaacagca

SEQ ID NO: 764378 - RNA, 19 nt, Artificial Sequence
  Description of Artificial Sequence: Synthetic oligonucleotide
  Sense strand starting at position 206 of SEQ ID NO: 587069
guauauuauacacggguuu

SEQ ID NO: 764379 - RNA, 19 nt, Artificial Sequence
  Description of Artificial Sequence: Synthetic oligonucleotide
  Antisense strand to SEQ ID NO: 764378
aaacccguguauaauauac

SEQ ID NO: 764380 - RNA, 19 nt, Artificial Sequence
  Description of Artificial Sequence: Synthetic oligonucleotide
  Sense strand starting at position 418 of SEQ ID NO: 587069
uccacaacacguuggaaau

SEQ ID NO: 764381 - RNA, 19 nt, Artificial Sequence
  Description of Artificial Sequence: Synthetic oligonucleotide
  Antisense strand to SEQ ID NO: 764380
auuuccaacguguugugga

SEQ ID NO: 764382 - RNA, 19 nt, Artificial Sequence
  Description of Artificial Sequence: Synthetic oligonucleotide
  Sense strand starting at position 419 of SEQ ID NO: 587069
ccacaacacguuggaaauu

SEQ ID NO: 764383 - RNA, 19 nt, Artificial Sequence
  Description of Artificial Sequence: Synthetic oligonucleotide
  Antisense strand to SEQ ID NO: 764382
aauuuccaacguguugugg

SEQ ID NO: 764384 - RNA, 19 nt, Artificial Sequence
  Description of Artificial Sequence: Synthetic oligonucleotide
  Sense strand starting at position 1017 of SEQ ID NO: 587069
aacacuuggcagugguaga

SEQ ID NO: 764385 - RNA, 19 nt, Artificial Sequence
  Description of Artificial Sequence: Synthetic oligonucleotide
  Antisense strand to SEQ ID NO: 764384
ucuaccacugccaaguguu

SEQ ID NO: 764386 - RNA, 19 nt, Artificial Sequence
  Description of Artificial Sequence: Synthetic oligonucleotide
  Sense strand starting at position 1214 of SEQ ID NO: 587069
caccuucuccagggcgaaa

SEQ ID NO: 764387 - RNA, 19 nt, Artificial Sequence
  Description of Artificial Sequence: Synthetic oligonucleotide
  Antisense strand to SEQ ID NO: 764386
uuucgcccuggagaaggug

SEQ ID NO: 764388 - RNA, 19 nt, Artificial Sequence
  Description of Artificial Sequence: Synthetic oligonucleotide
  Sense strand starting at position 1227 of SEQ ID NO: 587069
gcgaaaugggugagcgagu

SEQ ID NO: 764389 - RNA, 19 nt, Artificial Sequence
  Description of Artificial Sequence: Synthetic oligonucleotide
  Antisense strand to SEQ ID NO: 764388
acucgcucacccauuucgc

SEQ ID NO: 764390 - RNA, 19 nt, Artificial Sequence
  Description of Artificial Sequence: Synthetic oligonucleotide
  Sense strand starting at position 2312 of SEQ ID NO: 587069
uauggugcuguauacuuaa

SEQ ID NO: 764391 - RNA, 19 nt, Artificial Sequence
  Description of Artificial Sequence: Synthetic oligonucleotide
  Antisense strand to SEQ ID NO: 764390
uuaaguauacagcaccaua

SEQ ID NO: 764392 - RNA, 19 nt, Artificial Sequence
  Description of Artificial Sequence: Synthetic oligonucleotide
  Sense strand starting at position 2350 of SEQ ID NO: 587069
cugugucccagucauagag

SEQ ID NO: 764393 - RNA, 19 nt, Artificial Sequence
  Description of Artificial Sequence: Synthetic oligonucleotide
  Antisense strand to SEQ ID NO: 764392
cucuaugacugggacacag

SEQ ID NO: 764394 - RNA, 19 nt, Artificial Sequence
  Description of Artificial Sequence: Synthetic oligonucleotide
  Sense strand starting at position 2517 of SEQ ID NO: 587069
cccagaauuugugaaauga

SEQ ID NO: 764395 - RNA, 19 nt, Artificial Sequence
  Description of Artificial Sequence: Synthetic oligonucleotide
  Antisense strand to SEQ ID NO: 764394
ucauuucacaaauucuggg

SEQ ID NO: 764396 - RNA, 19 nt, Artificial Sequence
  Description of Artificial Sequence: Synthetic oligonucleotide
  Sense strand starting at position 2572 of SEQ ID NO: 587069
gaggaaaugcuuuguucua

SEQ ID NO: 764397 - RNA, 19 nt, Artificial Sequence
  Description of Artificial Sequence: Synthetic oligonucleotide
  Antisense strand to SEQ ID NO: 764396
uagaacaaagcauuuccuc

SEQ ID NO: 764398 - RNA, 19 nt, Artificial Sequence
  Description of Artificial Sequence: Synthetic oligonucleotide
  Sense strand starting at position 2573 of SEQ ID NO: 587069
aggaaaugcuuuguucuag

SEQ ID NO: 764399 - RNA, 19 nt, Artificial Sequence
  Description of Artificial Sequence: Synthetic oligonucleotide
  Antisense strand to SEQ ID NO: 764398
cuagaacaaagcauuuccu

SEQ ID NO: 764400 - RNA, 19 nt, Artificial Sequence
  Description of Artificial Sequence: Synthetic oligonucleotide
  Sense strand starting at position 2602 of SEQ ID NO: 587069
gucucagguggagaauagu

SEQ ID NO: 764401 - RNA, 19 nt, Artificial Sequence
  Description of Artificial Sequence: Synthetic oligonucleotide
  Antisense strand to SEQ ID NO: 764400
acuauucuccaccugagac

SEQ ID NO: 764402 - RNA, 19 nt, Artificial Sequence
  Description of Artificial Sequence: Synthetic oligonucleotide
  Sense strand starting at position 2663 of SEQ ID NO: 587069
agaacuaggucaucccaga

SEQ ID NO: 764403 - RNA, 19 nt, Artificial Sequence
  Description of Artificial Sequence: Synthetic oligonucleotide
  Antisense strand to SEQ ID NO: 764402
ucugggaugaccuaguucu

SEQ ID NO: 764404 - RNA, 19 nt, Artificial Sequence
  Description of Artificial Sequence: Synthetic oligonucleotide
  Sense strand starting at position 2885 of SEQ ID NO: 587069
cuuccuuccuugguugaga

SEQ ID NO: 764405 - RNA, 19 nt, Artificial Sequence
  Description of Artificial Sequence: Synthetic oligonucleotide
  Antisense strand to SEQ ID NO: 764404
ucucaaccaaggaaggaag

SEQ ID NO: 764406 - RNA, 19 nt, Artificial Sequence
  Description of Artificial Sequence: Synthetic oligonucleotide
  Sense strand starting at position 2887 of SEQ ID NO: 587069
uccuuccuugguugagaga

SEQ ID NO: 764407 - RNA, 19 nt, Artificial Sequence
  Description of Artificial Sequence: Synthetic oligonucleotide
  Antisense strand to SEQ ID NO: 764406
ucucucaaccaaggaagga

SEQ ID NO: 764408 - RNA, 19 nt, Artificial Sequence
  Description of Artificial Sequence: Synthetic oligonucleotide
  Sense strand starting at position 3053 of SEQ ID NO: 587069
auaacaguucuguguuaga

SEQ ID NO: 764409 - RNA, 19 nt, Artificial Sequence
  Description of Artificial Sequence: Synthetic oligonucleotide
  Antisense strand to SEQ ID NO: 764408
ucuaacacagaacuguuau

SEQ ID NO: 764410 - RNA, 19 nt, Artificial Sequence
  Description of Artificial Sequence: Synthetic oligonucleotide
  Sense strand starting at position 3073 of SEQ ID NO: 587069
uuuagauccucccuugaug

SEQ ID NO: 764411 - RNA, 19 nt, Artificial Sequence
  Description of Artificial Sequence: Synthetic oligonucleotide
  Antisense strand to SEQ ID NO: 764410
caucaagggaggaucuaaa

SEQ ID NO: 764412 - RNA, 19 nt, Artificial Sequence
  Description of Artificial Sequence: Synthetic oligonucleotide
  Sense strand starting at position 3117 of SEQ ID NO: 587069
uuuccuucuggcgaauaga

SEQ ID NO: 764413 - RNA, 19 nt, Artificial Sequence
  Description of Artificial Sequence: Synthetic oligonucleotide
  Antisense strand to SEQ ID NO: 764412
ucuauucgccagaaggaaa

SEQ ID NO: 764414 - RNA, 19 nt, Artificial Sequence
  Description of Artificial Sequence: Synthetic oligonucleotide
  Sense strand starting at position 3120 of SEQ ID NO: 587069
ccuucuggcgaauagacau

SEQ ID NO: 764415 - RNA, 19 nt, Artificial Sequence
  Description of Artificial Sequence: Synthetic oligonucleotide
  Antisense strand to SEQ ID NO: 764414
augucuauucgccagaagg

SEQ ID NO: 764416 - RNA, 19 nt, Artificial Sequence
  Description of Artificial Sequence: Synthetic oligonucleotide
  Sense strand starting at position 3225 of SEQ ID NO: 587069
uagcuaaguugacugugaa

SEQ ID NO: 764417 - RNA, 19 nt, Artificial Sequence
  Description of Artificial Sequence: Synthetic oligonucleotide
  Antisense strand to SEQ ID NO: 764416
uucacagucaacuuagcua

SEQ ID NO: 764418 - RNA, 19 nt, Artificial Sequence
  Description of Artificial Sequence: Synthetic oligonucleotide
  Sense strand starting at position 3226 of SEQ ID NO: 587069
agcuaaguugacugugaau

SEQ ID NO: 764419 - RNA, 19 nt, Artificial Sequence
  Description of Artificial Sequence: Synthetic oligonucleotide
  Antisense strand to SEQ ID NO: 764418
auucacagucaacuuagcu

SEQ ID NO: 764420 - RNA, 19 nt, Artificial Sequence
  Description of Artificial Sequence: Synthetic oligonucleotide
  Sense strand starting at position 3228 of SEQ ID NO: 587069
cuaaguugacugugaauua

SEQ ID NO: 764421 - RNA, 19 nt, Artificial Sequence
  Description of Artificial Sequence: Synthetic oligonucleotide
  Antisense strand to SEQ ID NO: 764420
uaauucacagucaacuuag

SEQ ID NO: 764422 - RNA, 19 nt, Artificial Sequence
  Description of Artificial Sequence: Synthetic oligonucleotide
  Sense strand starting at position 3335 of SEQ ID NO: 587069
gcaaaccagguuugaucua

SEQ ID NO: 764423 - RNA, 19 nt, Artificial Sequence
  Description of Artificial Sequence: Synthetic oligonucleotide
  Antisense strand to SEQ ID NO: 764422
uagaucaaaccugguuugc

SEQ ID NO: 764424 - RNA, 19 nt, Artificial Sequence
  Description of Artificial Sequence: Synthetic oligonucleotide
  Sense strand starting at position 3357 of SEQ ID NO: 587069
gcccaagugccugagcaaa

SEQ ID NO: 764425 - RNA, 19 nt, Artificial Sequence
  Description of Artificial Sequence: Synthetic oligonucleotide
  Antisense strand to SEQ ID NO: 764424
uuugcucaggcacuugggc

SEQ ID NO: 764426 - RNA, 19 nt, Artificial Sequence
  Description of Artificial Sequence: Synthetic oligonucleotide
  Sense strand starting at position 3359 of SEQ ID NO: 587069
ccaagugccugagcaaaua

SEQ ID NO: 764427 - RNA, 19 nt, Artificial Sequence
  Description of Artificial Sequence: Synthetic oligonucleotide
  Antisense strand to SEQ ID NO: 764426
uauuugcucaggcacuugg

SEQ ID NO: 764428 - RNA, 19 nt, Artificial Sequence
  Description of Artificial Sequence: Synthetic oligonucleotide
  Sense strand starting at position 3437 of SEQ ID NO: 587069
aauaaaggguuauaagaug

SEQ ID NO: 764429 - RNA, 19 nt, Artificial Sequence
  Description of Artificial Sequence: Synthetic oligonucleotide
  Antisense strand to SEQ ID NO: 764428
caucuuauaacccuuuauu

SEQ ID NO: 764430 - RNA, 19 nt, Artificial Sequence
  Description of Artificial Sequence: Synthetic oligonucleotide
  Sense strand starting at position 3445 of SEQ ID NO: 587069
guuauaagaugcucucuuu

SEQ ID NO: 764431 - RNA, 19 nt, Artificial Sequence
  Description of Artificial Sequence: Synthetic oligonucleotide
  Antisense strand to SEQ ID NO: 764430
aaagagagcaucuuauaac

SEQ ID NO: 764432 - RNA, 19 nt, Artificial Sequence
  Description of Artificial Sequence: Synthetic oligonucleotide
  Sense strand starting at position 3448 of SEQ ID NO: 587069
auaagaugcucucuuuaag

SEQ ID NO: 764433 - RNA, 19 nt, Artificial Sequence
  Description of Artificial Sequence: Synthetic oligonucleotide
  Antisense strand to SEQ ID NO: 764432
cuuaaagagagcaucuuau

SEQ ID NO: 764434 - RNA, 19 nt, Artificial Sequence
  Description of Artificial Sequence: Synthetic oligonucleotide
  Sense strand starting at position 3460 of SEQ ID NO: 587069
cuuuaagaaguguguaauc

SEQ ID NO: 764435 - RNA, 19 nt, Artificial Sequence
  Description of Artificial Sequence: Synthetic oligonucleotide
  Antisense strand to SEQ ID NO: 764434
gauuacacacuucuuaaag

SEQ ID NO: 764436 - RNA, 19 nt, Artificial Sequence
  Description of Artificial Sequence: Synthetic oligonucleotide
  Sense strand starting at position 3462 of SEQ ID NO: 587069
uuaagaaguguguaaucua

SEQ ID NO: 764437 - RNA, 19 nt, Artificial Sequence
  Description of Artificial Sequence: Synthetic oligonucleotide
  Antisense strand to SEQ ID NO: 764436
uagauuacacacuucuuaa

SEQ ID NO: 764438 - RNA, 19 nt, Artificial Sequence
  Description of Artificial Sequence: Synthetic oligonucleotide
  Sense strand starting at position 3465 of SEQ ID NO: 587069
agaaguguguaaucuaguu

SEQ ID NO: 764439 - RNA, 19 nt, Artificial Sequence
  Description of Artificial Sequence: Synthetic oligonucleotide
  Antisense strand to SEQ ID NO: 764438
aacuagauuacacacuucu

SEQ ID NO: 764440 - RNA, 19 nt, Artificial Sequence
  Description of Artificial Sequence: Synthetic oligonucleotide
  Sense strand starting at position 3537 of SEQ ID NO: 587069
auaauaacugaucgugauc

SEQ ID NO: 764441 - RNA, 19 nt, Artificial Sequence
  Description of Artificial Sequence: Synthetic oligonucleotide
  Antisense strand to SEQ ID NO: 764440
gaucacgaucaguuauuau

SEQ ID NO: 764442 - RNA, 19 nt, Artificial Sequence
  Description of Artificial Sequence: Synthetic oligonucleotide
  Sense strand starting at position 3540 of SEQ ID NO: 587069
auaacugaucgugaucauu

SEQ ID NO: 764443 - RNA, 19 nt, Artificial Sequence
  Description of Artificial Sequence: Synthetic oligonucleotide
  Antisense strand to SEQ ID NO: 764442
aaugaucacgaucaguuau

SEQ ID NO: 764444 - RNA, 19 nt, Artificial Sequence
  Description of Artificial Sequence: Synthetic oligonucleotide
  Sense strand starting at position 3564 of SEQ ID NO: 587069
guaaauacuagauguuugu

SEQ ID NO: 764445 - RNA, 19 nt, Artificial Sequence
  Description of Artificial Sequence: Synthetic oligonucleotide
  Antisense strand to SEQ ID NO: 764444
acaaacaucuaguauuuac

SEQ ID NO: 764446 - RNA, 19 nt, Artificial Sequence
  Description of Artificial Sequence: Synthetic oligonucleotide
  Sense strand starting at position 3568 of SEQ ID NO: 587069
auacuagauguuuguacua

SEQ ID NO: 764447 - RNA, 19 nt, Artificial Sequence
  Description of Artificial Sequence: Synthetic oligonucleotide
  Antisense strand to SEQ ID NO: 764446
uaguacaaacaucuaguau

SEQ ID NO: 764448 - RNA, 19 nt, Artificial Sequence
  Description of Artificial Sequence: Synthetic oligonucleotide
  Sense strand starting at position 3581 of SEQ ID NO: 587069
guacuacuagauuaauguu

SEQ ID NO: 764449 - RNA, 19 nt, Artificial Sequence
  Description of Artificial Sequence: Synthetic oligonucleotide
  Antisense strand to SEQ ID NO: 764448
aacauuaaucuaguaguac

SEQ ID NO: 764450 - RNA, 19 nt, Artificial Sequence
  Description of Artificial Sequence: Synthetic oligonucleotide
  Sense strand starting at position 3639 of SEQ ID NO: 587069
ggcccaauuuaucagauau

SEQ ID NO: 764451 - RNA, 19 nt, Artificial Sequence
  Description of Artificial Sequence: Synthetic oligonucleotide
  Antisense strand to SEQ ID NO: 764450
auaucugauaaauugggcc

SEQ ID NO: 764452 - RNA, 19 nt, Artificial Sequence
  Description of Artificial Sequence: Synthetic oligonucleotide
  Sense strand starting at position 3807 of SEQ ID NO: 587069
gggcccaagucuucuauuu

SEQ ID NO: 764453 - RNA, 19 nt, Artificial Sequence
  Description of Artificial Sequence: Synthetic oligonucleotide
  Antisense strand to SEQ ID NO: 764452
aaauagaagacuugggccc

SEQ ID NO: 764454 - RNA, 19 nt, Artificial Sequence
  Description of Artificial Sequence: Synthetic oligonucleotide
  Sense strand starting at position 81 of SEQ ID NO: 587070
aaaguucuugaauggguuu

SEQ ID NO: 764455 - RNA, 19 nt, Artificial Sequence
  Description of Artificial Sequence: Synthetic oligonucleotide
  Antisense strand to SEQ ID NO: 764454
aaacccauucaagaacuuu

SEQ ID NO: 764456 - RNA, 19 nt, Artificial Sequence
  Description of Artificial Sequence: Synthetic oligonucleotide
  Sense strand starting at position 123 of SEQ ID NO: 587070
aacugaaaucauuggacgu

SEQ ID NO: 764457 - RNA, 19 nt, Artificial Sequence
  Description of Artificial Sequence: Synthetic oligonucleotide
  Antisense strand to SEQ ID NO: 764456
acguccaaugauuucaguu

SEQ ID NO: 764458 - RNA, 19 nt, Artificial Sequence
  Description of Artificial Sequence: Synthetic oligonucleotide
  Sense strand starting at position 124 of SEQ ID NO: 587070
acugaaaucauuggacguu

SEQ ID NO: 764459 - RNA, 19 nt, Artificial Sequence
  Description of Artificial Sequence: Synthetic oligonucleotide
  Antisense strand to SEQ ID NO: 764458
aacguccaaugauuucagu

SEQ ID NO: 764460 - RNA, 19 nt, Artificial Sequence
  Description of Artificial Sequence: Synthetic oligonucleotide
  Sense strand starting at position 172 of SEQ ID NO: 587070
auuucuaaguguuugcaua

SEQ ID NO: 764461 - RNA, 19 nt, Artificial Sequence
  Description of Artificial Sequence: Synthetic oligonucleotide
  Antisense strand to SEQ ID NO: 764460
uaugcaaacacuuagaaau

SEQ ID NO: 764462 - RNA, 19 nt, Artificial Sequence
  Description of Artificial Sequence: Synthetic oligonucleotide
  Sense strand starting at position 231 of SEQ ID NO: 587070
uuacaagagcuaugaguua

SEQ ID NO: 764463 - RNA, 19 nt, Artificial Sequence
  Description of Artificial Sequence: Synthetic oligonucleotide
  Antisense strand to SEQ ID NO: 764462
uaacucauagcucuuguaa

SEQ ID NO: 764464 - RNA, 19 nt, Artificial Sequence
  Description of Artificial Sequence: Synthetic oligonucleotide
  Sense strand starting at position 254 of SEQ ID NO: 587070
aggucaaaggucuggauca

SEQ ID NO: 764465 - RNA, 19 nt, Artificial Sequence
  Description of Artificial Sequence: Synthetic oligonucleotide
  Antisense strand to SEQ ID NO: 764464
ugauccagaccuuugaccu

SEQ ID NO: 764466 - RNA, 19 nt, Artificial Sequence
  Description of Artificial Sequence: Synthetic oligonucleotide
  Sense strand starting at position 317 of SEQ ID NO: 587070
cucuuaguucuugggacag

SEQ ID NO: 764467 - RNA, 19 nt, Artificial Sequence
  Description of Artificial Sequence: Synthetic oligonucleotide
  Antisense strand to SEQ ID NO: 764466
cugucccaagaacuaagag

SEQ ID NO: 764468 - RNA, 19 nt, Artificial Sequence
  Description of Artificial Sequence: Synthetic oligonucleotide
  Sense strand starting at position 393 of SEQ ID NO: 587070
ugucguagcacagauccaa

SEQ ID NO: 764469 - RNA, 19 nt, Artificial Sequence
  Description of Artificial Sequence: Synthetic oligonucleotide
  Antisense strand to SEQ ID NO: 764468
uuggaucugugcuacgaca

SEQ ID NO: 764470 - RNA, 19 nt, Artificial Sequence
  Description of Artificial Sequence: Synthetic oligonucleotide
  Sense strand starting at position 476 of SEQ ID NO: 587070
aguacauaauggucaauaa

SEQ ID NO: 764471 - RNA, 19 nt, Artificial Sequence
  Description of Artificial Sequence: Synthetic oligonucleotide
  Antisense strand to SEQ ID NO: 764470
uuauugaccauuauguacu

SEQ ID NO: 764472 - RNA, 19 nt, Artificial Sequence
  Description of Artificial Sequence: Synthetic oligonucleotide
  Sense strand starting at position 553 of SEQ ID NO: 587070
gugggcugggauuauacaa

SEQ ID NO: 764473 - RNA, 19 nt, Artificial Sequence
  Description of Artificial Sequence: Synthetic oligonucleotide
  Antisense strand to SEQ ID NO: 764472
uuguauaaucccagcccac

SEQ ID NO: 764474 - RNA, 19 nt, Artificial Sequence
  Description of Artificial Sequence: Synthetic oligonucleotide
  Sense strand starting at position 588 of SEQ ID NO: 587070
aggugcaucuuccuggaga

SEQ ID NO: 764475 - RNA, 19 nt, Artificial Sequence
  Description of Artificial Sequence: Synthetic oligonucleotide
  Antisense strand to SEQ ID NO: 764474
ucuccaggaagaugcaccu

SEQ ID NO: 764476 - RNA, 19 nt, Artificial Sequence
  Description of Artificial Sequence: Synthetic oligonucleotide
  Sense strand starting at position 784 of SEQ ID NO: 587070
cuaagaaaucccggaagcu

SEQ ID NO: 764477 - RNA, 19 nt, Artificial Sequence
  Description of Artificial Sequence: Synthetic oligonucleotide
  Antisense strand to SEQ ID NO: 764476
agcuuccgggauuucuuag

SEQ ID NO: 764478 - RNA, 19 nt, Artificial Sequence
  Description of Artificial Sequence: Synthetic oligonucleotide
  Sense strand starting at position 785 of SEQ ID NO: 587070
uaagaaaucccggaagcuc

SEQ ID NO: 764479 - RNA, 19 nt, Artificial Sequence
  Description of Artificial Sequence: Synthetic oligonucleotide
  Antisense strand to SEQ ID NO: 764478
gagcuuccgggauuucuua

SEQ ID NO: 764480 - RNA, 19 nt, Artificial Sequence
  Description of Artificial Sequence: Synthetic oligonucleotide
  Sense strand starting at position 816 of SEQ ID NO: 587070
gugcauuaccuuuggagag

SEQ ID NO: 764481 - RNA, 19 nt, Artificial Sequence
  Description of Artificial Sequence: Synthetic oligonucleotide
  Antisense strand to SEQ ID NO: 764480
cucuccaaagguaaugcac

SEQ ID NO: 764482 - RNA, 19 nt, Artificial Sequence
  Description of Artificial Sequence: Synthetic oligonucleotide
  Sense strand starting at position 957 of SEQ ID NO: 587070
augaucaauuaguugucaa

SEQ ID NO: 764483 - RNA, 19 nt, Artificial Sequence
  Description of Artificial Sequence: Synthetic oligonucleotide
  Antisense strand to SEQ ID NO: 764482
uugacaacuaauugaucau

SEQ ID NO: 764484 - RNA, 19 nt, Artificial Sequence
  Description of Artificial Sequence: Synthetic oligonucleotide
  Sense strand starting at position 1033 of SEQ ID NO: 587070
gcagaucuugcccaaacua

SEQ ID NO: 764485 - RNA, 19 nt, Artificial Sequence
  Description of Artificial Sequence: Synthetic oligonucleotide
  Antisense strand to SEQ ID NO: 764484
uaguuugggcaagaucugc

SEQ ID NO: 764486 - RNA, 19 nt, Artificial Sequence
  Description of Artificial Sequence: Synthetic oligonucleotide
  Sense strand starting at position 1057 of SEQ ID NO: 587070
aaaguuaaugcugacgaua

SEQ ID NO: 764487 - RNA, 19 nt, Artificial Sequence
  Description of Artificial Sequence: Synthetic oligonucleotide
  Antisense strand to SEQ ID NO: 764486
uaucgucagcauuaacuuu

SEQ ID NO: 764488 - RNA, 19 nt, Artificial Sequence
  Description of Artificial Sequence: Synthetic oligonucleotide
  Sense strand starting at position 1060 of SEQ ID NO: 587070
guuaaugcugacgauagaa

SEQ ID NO: 764489 - RNA, 19 nt, Artificial Sequence
  Description of Artificial Sequence: Synthetic oligonucleotide
  Antisense strand to SEQ ID NO: 764488
uucuaucgucagcauuaac

SEQ ID NO: 764490 - RNA, 19 nt, Artificial Sequence
  Description of Artificial Sequence: Synthetic oligonucleotide
  Sense strand starting at position 1090 of SEQ ID NO: 587070
cucaauuguuggcccaaga

SEQ ID NO: 764491 - RNA, 19 nt, Artificial Sequence
  Description of Artificial Sequence: Synthetic oligonucleotide
  Antisense strand to SEQ ID NO: 764490
ucuugggccaacaauugag

SEQ ID NO: 764492 - RNA, 19 nt, Artificial Sequence
  Description of Artificial Sequence: Synthetic oligonucleotide
  Sense strand starting at position 1154 of SEQ ID NO: 587070
ccuagaauaacguauggua

SEQ ID NO: 764493 - RNA, 19 nt, Artificial Sequence
  Description of Artificial Sequence: Synthetic oligonucleotide
  Antisense strand to SEQ ID NO: 764492
uaccauacguuauucuagg

SEQ ID NO: 764494 - RNA, 19 nt, Artificial Sequence
  Description of Artificial Sequence: Synthetic oligonucleotide
  Sense strand starting at position 1195 of SEQ ID NO: 587070
cuugaucacuuccuggaau

SEQ ID NO: 764495 - RNA, 19 nt, Artificial Sequence
  Description of Artificial Sequence: Synthetic oligonucleotide
  Antisense strand to SEQ ID NO: 764494
auuccaggaagugaucaag

SEQ ID NO: 764496 - RNA, 19 nt, Artificial Sequence
  Description of Artificial Sequence: Synthetic oligonucleotide
  Sense strand starting at position 1295 of SEQ ID NO: 587070
uuaugaguucuauguaaac

SEQ ID NO: 764497 - RNA, 19 nt, Artificial Sequence
  Description of Artificial Sequence: Synthetic oligonucleotide
  Antisense strand to SEQ ID NO: 764496
guuuacauagaacucauaa

SEQ ID NO: 764498 - RNA, 19 nt, Artificial Sequence
  Description of Artificial Sequence: Synthetic oligonucleotide
  Sense strand starting at position 1772 of SEQ ID NO: 587070
guagcaaaguccuccauuu

SEQ ID NO: 764499 - RNA, 19 nt, Artificial Sequence
  Description of Artificial Sequence: Synthetic oligonucleotide
  Antisense strand to SEQ ID NO: 764498
aaauggaggacuuugcuac

SEQ ID NO: 764500 - RNA, 19 nt, Artificial Sequence
  Description of Artificial Sequence: Synthetic oligonucleotide
  Sense strand starting at position 2309 of SEQ ID NO: 587070
ggaagaacgcauugagaac

SEQ ID NO: 764501 - RNA, 19 nt, Artificial Sequence
  Description of Artificial Sequence: Synthetic oligonucleotide
  Antisense strand to SEQ ID NO: 764500
guucucaaugcguucuucc

SEQ ID NO: 764502 - RNA, 19 nt, Artificial Sequence
  Description of Artificial Sequence: Synthetic oligonucleotide
  Sense strand starting at position 3180 of SEQ ID NO: 587070
gcauguuugccuugauuug

SEQ ID NO: 764503 - RNA, 19 nt, Artificial Sequence
  Description of Artificial Sequence: Synthetic oligonucleotide
  Antisense strand to SEQ ID NO: 764502
caaaucaaggcaaacaugc

SEQ ID NO: 764504 - RNA, 19 nt, Artificial Sequence
  Description of Artificial Sequence: Synthetic oligonucleotide
  Sense strand starting at position 3181 of SEQ ID NO: 587070
cauguuugccuugauuugu

SEQ ID NO: 764505 - RNA, 19 nt, Artificial Sequence
  Description of Artificial Sequence: Synthetic oligonucleotide
  Antisense strand to SEQ ID NO: 764504
acaaaucaaggcaaacaug

SEQ ID NO: 764506 - RNA, 19 nt, Artificial Sequence
  Description of Artificial Sequence: Synthetic oligonucleotide
  Sense strand starting at position 3207 of SEQ ID NO: 587070
cagggaucuuauguguuua

SEQ ID NO: 764507 - RNA, 19 nt, Artificial Sequence
  Description of Artificial Sequence: Synthetic oligonucleotide
  Antisense strand to SEQ ID NO: 764506
uaaacacauaagaucccug

SEQ ID NO: 764508 - RNA, 19 nt, Artificial Sequence
  Description of Artificial Sequence: Synthetic oligonucleotide
  Sense strand starting at position 3208 of SEQ ID NO: 587070
agggaucuuauguguuuau

SEQ ID NO: 764509 - RNA, 19 nt, Artificial Sequence
  Description of Artificial Sequence: Synthetic oligonucleotide
  Antisense strand to SEQ ID NO: 764508
auaaacacauaagaucccu

SEQ ID NO: 764510 - RNA, 19 nt, Artificial Sequence
  Description of Artificial Sequence: Synthetic oligonucleotide
  Sense strand starting at position 3209 of SEQ ID NO: 587070
gggaucuuauguguuuaua

SEQ ID NO: 764511 - RNA, 19 nt, Artificial Sequence
  Description of Artificial Sequence: Synthetic oligonucleotide
  Antisense strand to SEQ ID NO: 764510
uauaaacacauaagauccc

SEQ ID NO: 764512 - RNA, 19 nt, Artificial Sequence
  Description of Artificial Sequence: Synthetic oligonucleotide
  Sense strand starting at position 3211 of SEQ ID NO: 587070
gaucuuauguguuuauaga

SEQ ID NO: 764513 - RNA, 19 nt, Artificial Sequence
  Description of Artificial Sequence: Synthetic oligonucleotide
  Antisense strand to SEQ ID NO: 764512
ucuauaaacacauaagauc

SEQ ID NO: 764514 - RNA, 19 nt, Artificial Sequence
  Description of Artificial Sequence: Synthetic oligonucleotide
  Sense strand starting at position 3287 of SEQ ID NO: 587070
gauggugcugacuaagcaa

SEQ ID NO: 764515 - RNA, 19 nt, Artificial Sequence
  Description of Artificial Sequence: Synthetic oligonucleotide
  Antisense strand to SEQ ID NO: 764514
uugcuuagucagcaccauc

SEQ ID NO: 764516 - RNA, 19 nt, Artificial Sequence
  Description of Artificial Sequence: Synthetic oligonucleotide
  Sense strand starting at position 3445 of SEQ ID NO: 587070
cuggauucucagggcacua

SEQ ID NO: 764517 - RNA, 19 nt, Artificial Sequence
  Description of Artificial Sequence: Synthetic oligonucleotide
  Antisense strand to SEQ ID NO: 764516
uagugcccugagaauccag

SEQ ID NO: 764518 - RNA, 19 nt, Artificial Sequence
  Description of Artificial Sequence: Synthetic oligonucleotide
  Sense strand starting at position 3616 of SEQ ID NO: 587070
auacauagaucuggaauuu

SEQ ID NO: 764519 - RNA, 19 nt, Artificial Sequence
  Description of Artificial Sequence: Synthetic oligonucleotide
  Antisense strand to SEQ ID NO: 764518
aaauuccagaucuauguau

SEQ ID NO: 764520 - RNA, 19 nt, Artificial Sequence
  Description of Artificial Sequence: Synthetic oligonucleotide
  Sense strand starting at position 3659 of SEQ ID NO: 587070
gugcauaucugaccuacaa

SEQ ID NO: 764521 - RNA, 19 nt, Artificial Sequence
  Description of Artificial Sequence: Synthetic oligonucleotide
  Antisense strand to SEQ ID NO: 764520
uuguaggucagauaugcac

SEQ ID NO: 764522 - RNA, 19 nt, Artificial Sequence
  Description of Artificial Sequence: Synthetic oligonucleotide
  Sense strand starting at position 3748 of SEQ ID NO: 587070
gcacccaguuaucuuagaa

SEQ ID NO: 764523 - RNA, 19 nt, Artificial Sequence
  Description of Artificial Sequence: Synthetic oligonucleotide
  Antisense strand to SEQ ID NO: 764522
uucuaagauaacugggugc

SEQ ID NO: 764524 - RNA, 19 nt, Artificial Sequence
  Description of Artificial Sequence: Synthetic oligonucleotide
  Sense strand starting at position 3763 of SEQ ID NO: 587070
agaagauugaauggcggua

SEQ ID NO: 764525 - RNA, 19 nt, Artificial Sequence
  Description of Artificial Sequence: Synthetic oligonucleotide
  Antisense strand to SEQ ID NO: 764524
uaccgccauucaaucuucu

SEQ ID NO: 764526 - RNA, 19 nt, Artificial Sequence
  Description of Artificial Sequence: Synthetic oligonucleotide
  Sense strand starting at position 3768 of SEQ ID NO: 587070
auugaauggcgguacaaau

SEQ ID NO: 764527 - RNA, 19 nt, Artificial Sequence
  Description of Artificial Sequence: Synthetic oligonucleotide
  Antisense strand to SEQ ID NO: 764526
auuuguaccgccauucaau

SEQ ID NO: 764528 - RNA, 19 nt, Artificial Sequence
  Description of Artificial Sequence: Synthetic oligonucleotide
  Sense strand starting at position 3838 of SEQ ID NO: 587070
ugcuauguaccagacaacu

SEQ ID NO: 764529 - RNA, 19 nt, Artificial Sequence
  Description of Artificial Sequence: Synthetic oligonucleotide
  Antisense strand to SEQ ID NO: 764528
aguugucugguacauagca

SEQ ID NO: 764530 - RNA, 19 nt, Artificial Sequence
  Description of Artificial Sequence: Synthetic oligonucleotide
  Sense strand starting at position 3865 of SEQ ID NO: 587070
ugguaauauaguggugaag

SEQ ID NO: 764531 - RNA, 19 nt, Artificial Sequence
  Description of Artificial Sequence: Synthetic oligonucleotide
  Antisense strand to SEQ ID NO: 764530
cuucaccacuauauuacca

SEQ ID NO: 764532 - RNA, 19 nt, Artificial Sequence
  Description of Artificial Sequence: Synthetic oligonucleotide
  Sense strand starting at position 3894 of SEQ ID NO: 587070
agucauagucuugaagcua

SEQ ID NO: 764533 - RNA, 19 nt, Artificial Sequence
  Description of Artificial Sequence: Synthetic oligonucleotide
  Antisense strand to SEQ ID NO: 764532
uagcuucaagacuaugacu

SEQ ID NO: 764534 - RNA, 19 nt, Artificial Sequence
  Description of Artificial Sequence: Synthetic oligonucleotide
  Sense strand starting at position 69 of SEQ ID NO: 587071
guuaguuucugauccuaac

SEQ ID NO: 764535 - RNA, 19 nt, Artificial Sequence
  Description of Artificial Sequence: Synthetic oligonucleotide
  Antisense strand to SEQ ID NO: 764534
guuaggaucagaaacuaac

SEQ ID NO: 764536 - RNA, 19 nt, Artificial Sequence
  Description of Artificial Sequence: Synthetic oligonucleotide
  Sense strand starting at position 110 of SEQ ID NO: 587071
gguauaccacuauggcaau

SEQ ID NO: 764537 - RNA, 19 nt, Artificial Sequence
  Description of Artificial Sequence: Synthetic oligonucleotide
  Antisense strand to SEQ ID NO: 764536
auugccauagugguauacc

SEQ ID NO: 764538 - RNA, 19 nt, Artificial Sequence
  Description of Artificial Sequence: Synthetic oligonucleotide
  Sense strand starting at position 150 of SEQ ID NO: 587071
gccuauugcuuccucuaag

SEQ ID NO: 764539 - RNA, 19 nt, Artificial Sequence
  Description of Artificial Sequence: Synthetic oligonucleotide
  Antisense strand to SEQ ID NO: 764538
cuuagaggaagcaauaggc

SEQ ID NO: 764540 - RNA, 19 nt, Artificial Sequence
  Description of Artificial Sequence: Synthetic oligonucleotide
  Sense strand starting at position 182 of SEQ ID NO: 587071
ggcagaaacuauuaauaua

SEQ ID NO: 764541 - RNA, 19 nt, Artificial Sequence
  Description of Artificial Sequence: Synthetic oligonucleotide
  Antisense strand to SEQ ID NO: 764540
uauauuaauaguuucugcc

SEQ ID NO: 764542 - RNA, 19 nt, Artificial Sequence
  Description of Artificial Sequence: Synthetic oligonucleotide
  Sense strand starting at position 571 of SEQ ID NO: 587071
uuaacuagccuuuggugau

SEQ ID NO: 764543 - RNA, 19 nt, Artificial Sequence
  Description of Artificial Sequence: Synthetic oligonucleotide
  Antisense strand to SEQ ID NO: 764542
aucaccaaaggcuaguuaa

SEQ ID NO: 764544 - RNA, 19 nt, Artificial Sequence
  Description of Artificial Sequence: Synthetic oligonucleotide
  Sense strand starting at position 755 of SEQ ID NO: 587071
aggucuauuuccugucaga

SEQ ID NO: 764545 - RNA, 19 nt, Artificial Sequence
  Description of Artificial Sequence: Synthetic oligonucleotide
  Antisense strand to SEQ ID NO: 764544
ucugacaggaaauagaccu

SEQ ID NO: 764546 - RNA, 19 nt, Artificial Sequence
  Description of Artificial Sequence: Synthetic oligonucleotide
  Sense strand starting at position 766 of SEQ ID NO: 587071
cugucagaaucccuagaug

SEQ ID NO: 764547 - RNA, 19 nt, Artificial Sequence
  Description of Artificial Sequence: Synthetic oligonucleotide
  Antisense strand to SEQ ID NO: 764546
caucuagggauucugacag

SEQ ID NO: 764548 - RNA, 19 nt, Artificial Sequence
  Description of Artificial Sequence: Synthetic oligonucleotide
  Sense strand starting at position 884 of SEQ ID NO: 587071
gauggugcuaucgagacaa

SEQ ID NO: 764549 - RNA, 19 nt, Artificial Sequence
  Description of Artificial Sequence: Synthetic oligonucleotide
  Antisense strand to SEQ ID NO: 764548
uugucucgauagcaccauc

SEQ ID NO: 764550 - RNA, 19 nt, Artificial Sequence
  Description of Artificial Sequence: Synthetic oligonucleotide
  Sense strand starting at position 886 of SEQ ID NO: 587071
uggugcuaucgagacaaac

SEQ ID NO: 764551 - RNA, 19 nt, Artificial Sequence
  Description of Artificial Sequence: Synthetic oligonucleotide
  Antisense strand to SEQ ID NO: 764550
guuugucucgauagcacca

SEQ ID NO: 764552 - RNA, 19 nt, Artificial Sequence
  Description of Artificial Sequence: Synthetic oligonucleotide
  Sense strand starting at position 888 of SEQ ID NO: 587071
gugcuaucgagacaaacca

SEQ ID NO: 764553 - RNA, 19 nt, Artificial Sequence
  Description of Artificial Sequence: Synthetic oligonucleotide
  Antisense strand to SEQ ID NO: 764552
ugguuugucucgauagcac

SEQ ID NO: 764554 - RNA, 19 nt, Artificial Sequence
  Description of Artificial Sequence: Synthetic oligonucleotide
  Sense strand starting at position 1064 of SEQ ID NO: 587071
gucaccugcuaguugagaa

SEQ ID NO: 764555 - RNA, 19 nt, Artificial Sequence
  Description of Artificial Sequence: Synthetic oligonucleotide
  Antisense strand to SEQ ID NO: 764554
uucucaacuagcaggugac

SEQ ID NO: 764556 - RNA, 19 nt, Artificial Sequence
  Description of Artificial Sequence: Synthetic oligonucleotide
  Sense strand starting at position 1224 of SEQ ID NO: 587071
ucuagauuaccuugcgauc

SEQ ID NO: 764557 - RNA, 19 nt, Artificial Sequence
  Description of Artificial Sequence: Synthetic oligonucleotide
  Antisense strand to SEQ ID NO: 764556
gaucgcaagguaaucuaga

SEQ ID NO: 764558 - RNA, 19 nt, Artificial Sequence
  Description of Artificial Sequence: Synthetic oligonucleotide
  Sense strand starting at position 1287 of SEQ ID NO: 587071
ccggauauuuaccaagcuu

SEQ ID NO: 764559 - RNA, 19 nt, Artificial Sequence
  Description of Artificial Sequence: Synthetic oligonucleotide
  Antisense strand to SEQ ID NO: 764558
aagcuugguaaauauccgg

SEQ ID NO: 764560 - RNA, 19 nt, Artificial Sequence
  Description of Artificial Sequence: Synthetic oligonucleotide
  Sense strand starting at position 1445 of SEQ ID NO: 587071
agauguuucccgugccaaa

SEQ ID NO: 764561 - RNA, 19 nt, Artificial Sequence
  Description of Artificial Sequence: Synthetic oligonucleotide
  Antisense strand to SEQ ID NO: 764560
uuuggcacgggaaacaucu

SEQ ID NO: 764562 - RNA, 19 nt, Artificial Sequence
  Description of Artificial Sequence: Synthetic oligonucleotide
  Sense strand starting at position 2069 of SEQ ID NO: 587071
cgggacaagcuucgucaga

SEQ ID NO: 764563 - RNA, 19 nt, Artificial Sequence
  Description of Artificial Sequence: Synthetic oligonucleotide
  Antisense strand to SEQ ID NO: 764562
ucugacgaagcuugucccg

SEQ ID NO: 764564 - RNA, 19 nt, Artificial Sequence
  Description of Artificial Sequence: Synthetic oligonucleotide
  Sense strand starting at position 2213 of SEQ ID NO: 587071
cguguauguggcuuguagu

SEQ ID NO: 764565 - RNA, 19 nt, Artificial Sequence
  Description of Artificial Sequence: Synthetic oligonucleotide
  Antisense strand to SEQ ID NO: 764564
acuacaagccacauacacg

SEQ ID NO: 764566 - RNA, 19 nt, Artificial Sequence
  Description of Artificial Sequence: Synthetic oligonucleotide
  Sense strand starting at position 2382 of SEQ ID NO: 587071
uguugaugugcuuguauau

SEQ ID NO: 764567 - RNA, 19 nt, Artificial Sequence
  Description of Artificial Sequence: Synthetic oligonucleotide
  Antisense strand to SEQ ID NO: 764566
auauacaagcacaucaaca

SEQ ID NO: 764568 - RNA, 19 nt, Artificial Sequence
  Description of Artificial Sequence: Synthetic oligonucleotide
  Sense strand starting at position 2395 of SEQ ID NO: 587071
guauauuaaucacugcuga

SEQ ID NO: 764569 - RNA, 19 nt, Artificial Sequence
  Description of Artificial Sequence: Synthetic oligonucleotide
  Antisense strand to SEQ ID NO: 764568
ucagcagugauuaauauac

SEQ ID NO: 764570 - RNA, 19 nt, Artificial Sequence
  Description of Artificial Sequence: Synthetic oligonucleotide
  Sense strand starting at position 2531 of SEQ ID NO: 587071
gggagucucugacucuauu

SEQ ID NO: 764571 - RNA, 19 nt, Artificial Sequence
  Description of Artificial Sequence: Synthetic oligonucleotide
  Antisense strand to SEQ ID NO: 764570
aauagagucagagacuccc

SEQ ID NO: 764572 - RNA, 19 nt, Artificial Sequence
  Description of Artificial Sequence: Synthetic oligonucleotide
  Sense strand starting at position 2596 of SEQ ID NO: 587071
guacaaucacuuugcaaag

SEQ ID NO: 764573 - RNA, 19 nt, Artificial Sequence
  Description of Artificial Sequence: Synthetic oligonucleotide
  Antisense strand to SEQ ID NO: 764572
cuuugcaaagugauuguac

SEQ ID NO: 764574 - RNA, 19 nt, Artificial Sequence
  Description of Artificial Sequence: Synthetic oligonucleotide
  Sense strand starting at position 2611 of SEQ ID NO: 587071
aaaguaauuuggcauuaug

SEQ ID NO: 764575 - RNA, 19 nt, Artificial Sequence
  Description of Artificial Sequence: Synthetic oligonucleotide
  Antisense strand to SEQ ID NO: 764574
cauaaugccaaauuacuuu

SEQ ID NO: 764576 - RNA, 19 nt, Artificial Sequence
  Description of Artificial Sequence: Synthetic oligonucleotide
  Sense strand starting at position 2621 of SEQ ID NO: 587071
ggcauuaugcaguacacuu

SEQ ID NO: 764577 - RNA, 19 nt, Artificial Sequence
  Description of Artificial Sequence: Synthetic oligonucleotide
  Antisense strand to SEQ ID NO: 764576
aaguguacugcauaaugcc

SEQ ID NO: 764578 - RNA, 19 nt, Artificial Sequence
  Description of Artificial Sequence: Synthetic oligonucleotide
  Sense strand starting at position 2778 of SEQ ID NO: 587071
agcagauguccauacaguc

SEQ ID NO: 764579 - RNA, 19 nt, Artificial Sequence
  Description of Artificial Sequence: Synthetic oligonucleotide
  Antisense strand to SEQ ID NO: 764578
gacuguauggacaucugcu

SEQ ID NO: 764580 - RNA, 19 nt, Artificial Sequence
  Description of Artificial Sequence: Synthetic oligonucleotide
  Sense strand starting at position 3014 of SEQ ID NO: 587071
caauuaugguagucaauug

SEQ ID NO: 764581 - RNA, 19 nt, Artificial Sequence
  Description of Artificial Sequence: Synthetic oligonucleotide
  Antisense strand to SEQ ID NO: 764580
caauugacuaccauaauug

SEQ ID NO: 764582 - RNA, 19 nt, Artificial Sequence
  Description of Artificial Sequence: Synthetic oligonucleotide
  Sense strand starting at position 3140 of SEQ ID NO: 587071
acauaauuguuugaacuga

SEQ ID NO: 764583 - RNA, 19 nt, Artificial Sequence
  Description of Artificial Sequence: Synthetic oligonucleotide
  Antisense strand to SEQ ID NO: 764582
ucaguucaaacaauuaugu

SEQ ID NO: 764584 - RNA, 19 nt, Artificial Sequence
  Description of Artificial Sequence: Synthetic oligonucleotide
  Sense strand starting at position 3221 of SEQ ID NO: 587071
aggaguacagggugcuuua

SEQ ID NO: 764585 - RNA, 19 nt, Artificial Sequence
  Description of Artificial Sequence: Synthetic oligonucleotide
  Antisense strand to SEQ ID NO: 764584
uaaagcacccuguacuccu

SEQ ID NO: 764586 - RNA, 19 nt, Artificial Sequence
  Description of Artificial Sequence: Synthetic oligonucleotide
  Sense strand starting at position 3230 of SEQ ID NO: 587071
gggugcuuuaaagguaaua

SEQ ID NO: 764587 - RNA, 19 nt, Artificial Sequence
  Description of Artificial Sequence: Synthetic oligonucleotide
  Antisense strand to SEQ ID NO: 764586
uauuaccuuuaaagcaccc

SEQ ID NO: 764588 - RNA, 19 nt, Artificial Sequence
  Description of Artificial Sequence: Synthetic oligonucleotide
  Sense strand starting at position 3572 of SEQ ID NO: 587071
ucaggugaagccuguaaug

SEQ ID NO: 764589 - RNA, 19 nt, Artificial Sequence
  Description of Artificial Sequence: Synthetic oligonucleotide
  Antisense strand to SEQ ID NO: 764588
cauuacaggcuucaccuga

SEQ ID NO: 764590 - RNA, 19 nt, Artificial Sequence
  Description of Artificial Sequence: Synthetic oligonucleotide
  Sense strand starting at position 3574 of SEQ ID NO: 587071
aggugaagccuguaauguu

SEQ ID NO: 764591 - RNA, 19 nt, Artificial Sequence
  Description of Artificial Sequence: Synthetic oligonucleotide
  Antisense strand to SEQ ID NO: 764590
aacauuacaggcuucaccu

SEQ ID NO: 764592 - RNA, 19 nt, Artificial Sequence
  Description of Artificial Sequence: Synthetic oligonucleotide
  Sense strand starting at position 3672 of SEQ ID NO: 587071
ugaauuaucuuccuuguug

SEQ ID NO: 764593 - RNA, 19 nt, Artificial Sequence
  Description of Artificial Sequence: Synthetic oligonucleotide
  Antisense strand to SEQ ID NO: 764592
caacaaggaagauaauuca

SEQ ID NO: 764594 - RNA, 19 nt, Artificial Sequence
  Description of Artificial Sequence: Synthetic oligonucleotide
  Sense strand starting at position 3676 of SEQ ID NO: 587071
uuaucuuccuuguuguaau

SEQ ID NO: 764595 - RNA, 19 nt, Artificial Sequence
  Description of Artificial Sequence: Synthetic oligonucleotide
  Antisense strand to SEQ ID NO: 764594
auuacaacaaggaagauaa

SEQ ID NO: 764596 - RNA, 19 nt, Artificial Sequence
  Description of Artificial Sequence: Synthetic oligonucleotide
  Sense strand starting at position 3686 of SEQ ID NO: 587071
uguuguaaugggugugaca

SEQ ID NO: 764597 - RNA, 19 nt, Artificial Sequence
  Description of Artificial Sequence: Synthetic oligonucleotide
  Antisense strand to SEQ ID NO: 764596
ugucacacccauuacaaca

SEQ ID NO: 764598 - RNA, 19 nt, Artificial Sequence
  Description of Artificial Sequence: Synthetic oligonucleotide
  Sense strand starting at position 3688 of SEQ ID NO: 587071
uuguaaugggugugacauu

SEQ ID NO: 764599 - RNA, 19 nt, Artificial Sequence
  Description of Artificial Sequence: Synthetic oligonucleotide
  Antisense strand to SEQ ID NO: 764598
aaugucacacccauuacaa

SEQ ID NO: 764600 - RNA, 19 nt, Artificial Sequence
  Description of Artificial Sequence: Synthetic oligonucleotide
  Sense strand starting at position 3697 of SEQ ID NO: 587071
gugugacauuaucugcaag

SEQ ID NO: 764601 - RNA, 19 nt, Artificial Sequence
  Description of Artificial Sequence: Synthetic oligonucleotide
  Antisense strand to SEQ ID NO: 764600
cuugcagauaaugucacac

SEQ ID NO: 764602 - RNA, 19 nt, Artificial Sequence
  Description of Artificial Sequence: Synthetic oligonucleotide
  Sense strand starting at position 3699 of SEQ ID NO: 587071
gugacauuaucugcaagug

SEQ ID NO: 764603 - RNA, 19 nt, Artificial Sequence
  Description of Artificial Sequence: Synthetic oligonucleotide
  Antisense strand to SEQ ID NO: 764602
cacuugcagauaaugucac

SEQ ID NO: 764604 - RNA, 19 nt, Artificial Sequence
  Description of Artificial Sequence: Synthetic oligonucleotide
  Sense strand starting at position 3721 of SEQ ID NO: 587071
gcaguauugaauuguguau

SEQ ID NO: 764605 - RNA, 19 nt, Artificial Sequence
  Description of Artificial Sequence: Synthetic oligonucleotide
  Antisense strand to SEQ ID NO: 764604
auacacaauucaauacugc

SEQ ID NO: 764606 - RNA, 19 nt, Artificial Sequence
  Description of Artificial Sequence: Synthetic oligonucleotide
  Sense strand starting at position 3779 of SEQ ID NO: 587071
ccaggcuaggacugauaau

SEQ ID NO: 764607 - RNA, 19 nt, Artificial Sequence
  Description of Artificial Sequence: Synthetic oligonucleotide
  Antisense strand to SEQ ID NO: 764606
auuaucaguccuagccugg

SEQ ID NO: 764608 - RNA, 19 nt, Artificial Sequence
  Description of Artificial Sequence: Synthetic oligonucleotide
  Sense strand starting at position 3830 of SEQ ID NO: 587071
auauaugacuuagugauug

SEQ ID NO: 764609 - RNA, 19 nt, Artificial Sequence
  Description of Artificial Sequence: Synthetic oligonucleotide
  Antisense strand to SEQ ID NO: 764608
caaucacuaagucauauau

SEQ ID NO: 764610 - RNA, 19 nt, Artificial Sequence
  Description of Artificial Sequence: Synthetic oligonucleotide
  Sense strand starting at position 3834 of SEQ ID NO: 587071
augacuuagugauugagac

SEQ ID NO: 764611 - RNA, 19 nt, Artificial Sequence
  Description of Artificial Sequence: Synthetic oligonucleotide
  Antisense strand to SEQ ID NO: 764610
gucucaaucacuaagucau

SEQ ID NO: 764612 - RNA, 19 nt, Artificial Sequence
  Description of Artificial Sequence: Synthetic oligonucleotide
  Sense strand starting at position 3841 of SEQ ID NO: 587071
agugauugagaccguagga

SEQ ID NO: 764613 - RNA, 19 nt, Artificial Sequence
  Description of Artificial Sequence: Synthetic oligonucleotide
  Antisense strand to SEQ ID NO: 764612
uccuacggucucaaucacu

SEQ ID NO: 764614 - RNA, 19 nt, Artificial Sequence
  Description of Artificial Sequence: Synthetic oligonucleotide
  Sense strand starting at position 82 of SEQ ID NO: 587072
ggaaacaauugagaacauu

SEQ ID NO: 764615 - RNA, 19 nt, Artificial Sequence
  Description of Artificial Sequence: Synthetic oligonucleotide
  Antisense strand to SEQ ID NO: 764614
aauguucucaauuguuucc

SEQ ID NO: 764616 - RNA, 19 nt, Artificial Sequence
  Description of Artificial Sequence: Synthetic oligonucleotide
  Sense strand starting at position 348 of SEQ ID NO: 587072
cuggcuaauugagccaaau

SEQ ID NO: 764617 - RNA, 19 nt, Artificial Sequence
  Description of Artificial Sequence: Synthetic oligonucleotide
  Antisense strand to SEQ ID NO: 764616
auuuggcucaauuagccag

SEQ ID NO: 764618 - RNA, 19 nt, Artificial Sequence
  Description of Artificial Sequence: Synthetic oligonucleotide
  Sense strand starting at position 465 of SEQ ID NO: 587072
gaggacacaucuguucuau

SEQ ID NO: 764619 - RNA, 19 nt, Artificial Sequence
  Description of Artificial Sequence: Synthetic oligonucleotide
  Antisense strand to SEQ ID NO: 764618
auagaacagauguguccuc

SEQ ID NO: 764620 - RNA, 19 nt, Artificial Sequence
  Description of Artificial Sequence: Synthetic oligonucleotide
  Sense strand starting at position 698 of SEQ ID NO: 587072
guugauuaauaaccaugga

SEQ ID NO: 764621 - RNA, 19 nt, Artificial Sequence
  Description of Artificial Sequence: Synthetic oligonucleotide
  Antisense strand to SEQ ID NO: 764620
uccaugguuauuaaucaac

SEQ ID NO: 764622 - RNA, 19 nt, Artificial Sequence
  Description of Artificial Sequence: Synthetic oligonucleotide
  Sense strand starting at position 787 of SEQ ID NO: 587072
aacgguuuaugauuauaca

SEQ ID NO: 764623 - RNA, 19 nt, Artificial Sequence
  Description of Artificial Sequence: Synthetic oligonucleotide
  Antisense strand to SEQ ID NO: 764622
uguauaaucauaaaccguu

SEQ ID NO: 764624 - RNA, 19 nt, Artificial Sequence
  Description of Artificial Sequence: Synthetic oligonucleotide
  Sense strand starting at position 829 of SEQ ID NO: 587072
ucugcuaucggauaagaca

SEQ ID NO: 764625 - RNA, 19 nt, Artificial Sequence
  Description of Artificial Sequence: Synthetic oligonucleotide
  Antisense strand to SEQ ID NO: 764624
ugucuuauccgauagcaga

SEQ ID NO: 764626 - RNA, 19 nt, Artificial Sequence
  Description of Artificial Sequence: Synthetic oligonucleotide
  Sense strand starting at position 925 of SEQ ID NO: 587072
aucuuauugugccuacaag

SEQ ID NO: 764627 - RNA, 19 nt, Artificial Sequence
  Description of Artificial Sequence: Synthetic oligonucleotide
  Antisense strand to SEQ ID NO: 764626
cuuguaggcacaauaagau

SEQ ID NO: 764628 - RNA, 19 nt, Artificial Sequence
  Description of Artificial Sequence: Synthetic oligonucleotide
  Sense strand starting at position 926 of SEQ ID NO: 587072
ucuuauugugccuacaaga

SEQ ID NO: 764629 - RNA, 19 nt, Artificial Sequence
  Description of Artificial Sequence: Synthetic oligonucleotide
  Antisense strand to SEQ ID NO: 764628
ucuuguaggcacaauaaga

SEQ ID NO: 764630 - RNA, 19 nt, Artificial Sequence
  Description of Artificial Sequence: Synthetic oligonucleotide
  Sense strand starting at position 937 of SEQ ID NO: 587072
cuacaagauuuauaaugug

SEQ ID NO: 764631 - RNA, 19 nt, Artificial Sequence
  Description of Artificial Sequence: Synthetic oligonucleotide
  Antisense strand to SEQ ID NO: 764630
cacauuauaaaucuuguag

SEQ ID NO: 764632 - RNA, 19 nt, Artificial Sequence
  Description of Artificial Sequence: Synthetic oligonucleotide
  Sense strand starting at position 940 of SEQ ID NO: 587072
caagauuuauaauguggga

SEQ ID NO: 764633 - RNA, 19 nt, Artificial Sequence
  Description of Artificial Sequence: Synthetic oligonucleotide
  Antisense strand to SEQ ID NO: 764632
ucccacauuauaaaucuug

SEQ ID NO: 764634 - RNA, 19 nt, Artificial Sequence
  Description of Artificial Sequence: Synthetic oligonucleotide
  Sense strand starting at position 947 of SEQ ID NO: 587072
uauaaugugggaugcaaca

SEQ ID NO: 764635 - RNA, 19 nt, Artificial Sequence
  Description of Artificial Sequence: Synthetic oligonucleotide
  Antisense strand to SEQ ID NO: 764634
uguugcaucccacauuaua

SEQ ID NO: 764636 - RNA, 19 nt, Artificial Sequence
  Description of Artificial Sequence: Synthetic oligonucleotide
  Sense strand starting at position 976 of SEQ ID NO: 587072
auguucuugcacggaaaua

SEQ ID NO: 764637 - RNA, 19 nt, Artificial Sequence
  Description of Artificial Sequence: Synthetic oligonucleotide
  Antisense strand to SEQ ID NO: 764636
uauuuccgugcaagaacau

SEQ ID NO: 764638 - RNA, 19 nt, Artificial Sequence
  Description of Artificial Sequence: Synthetic oligonucleotide
  Sense strand starting at position 977 of SEQ ID NO: 587072
uguucuugcacggaaauac

SEQ ID NO: 764639 - RNA, 19 nt, Artificial Sequence
  Description of Artificial Sequence: Synthetic oligonucleotide
  Antisense strand to SEQ ID NO: 764638
guauuuccgugcaagaaca

SEQ ID NO: 764640 - RNA, 19 nt, Artificial Sequence
  Description of Artificial Sequence: Synthetic oligonucleotide
  Sense strand starting at position 1005 of SEQ ID NO: 587072
ggaagcacugcugauacuu

SEQ ID NO: 764641 - RNA, 19 nt, Artificial Sequence
  Description of Artificial Sequence: Synthetic oligonucleotide
  Antisense strand to SEQ ID NO: 764640
aaguaucagcagugcuucc

SEQ ID NO: 764642 - RNA, 19 nt, Artificial Sequence
  Description of Artificial Sequence: Synthetic oligonucleotide
  Sense strand starting at position 1058 of SEQ ID NO: 587072
gagcuacaacgaugacaua

SEQ ID NO: 764643 - RNA, 19 nt, Artificial Sequence
  Description of Artificial Sequence: Synthetic oligonucleotide
  Antisense strand to SEQ ID NO: 764642
uaugucaucguuguagcuc

SEQ ID NO: 764644 - RNA, 19 nt, Artificial Sequence
  Description of Artificial Sequence: Synthetic oligonucleotide
  Sense strand starting at position 1114 of SEQ ID NO: 587072
gcagucguuauguuuccua

SEQ ID NO: 764645 - RNA, 19 nt, Artificial Sequence
  Description of Artificial Sequence: Synthetic oligonucleotide
  Antisense strand to SEQ ID NO: 764644
uaggaaacauaacgacugc

SEQ ID NO: 764646 - RNA, 19 nt, Artificial Sequence
  Description of Artificial Sequence: Synthetic oligonucleotide
  Sense strand starting at position 1857 of SEQ ID NO: 587072
acgcgaagaucagcaaauu

SEQ ID NO: 764647 - RNA, 19 nt, Artificial Sequence
  Description of Artificial Sequence: Synthetic oligonucleotide
  Antisense strand to SEQ ID NO: 764646
aauuugcugaucuucgcgu

SEQ ID NO: 764648 - RNA, 19 nt, Artificial Sequence
  Description of Artificial Sequence: Synthetic oligonucleotide
  Sense strand starting at position 1984 of SEQ ID NO: 587072
gguagaggaucucucaguu

SEQ ID NO: 764649 - RNA, 19 nt, Artificial Sequence
  Description of Artificial Sequence: Synthetic oligonucleotide
  Antisense strand to SEQ ID NO: 764648
aacugagagauccucuacc

SEQ ID NO: 764650 - RNA, 19 nt, Artificial Sequence
  Description of Artificial Sequence: Synthetic oligonucleotide
  Sense strand starting at position 1988 of SEQ ID NO: 587072
gaggaucucucaguucuac

SEQ ID NO: 764651 - RNA, 19 nt, Artificial Sequence
  Description of Artificial Sequence: Synthetic oligonucleotide
  Antisense strand to SEQ ID NO: 764650
guagaacugagagauccuc

SEQ ID NO: 764652 - RNA, 19 nt, Artificial Sequence
  Description of Artificial Sequence: Synthetic oligonucleotide
  Sense strand starting at position 2114 of SEQ ID NO: 587072
ggaccauuuguccgccagu

SEQ ID NO: 764653 - RNA, 19 nt, Artificial Sequence
  Description of Artificial Sequence: Synthetic oligonucleotide
  Antisense strand to SEQ ID NO: 764652
acuggcggacaaauggucc

SEQ ID NO: 764654 - RNA, 19 nt, Artificial Sequence
  Description of Artificial Sequence: Synthetic oligonucleotide
  Sense strand starting at position 2117 of SEQ ID NO: 587072
ccauuuguccgccagugca

SEQ ID NO: 764655 - RNA, 19 nt, Artificial Sequence
  Description of Artificial Sequence: Synthetic oligonucleotide
  Antisense strand to SEQ ID NO: 764654
ugcacuggcggacaaaugg

SEQ ID NO: 764656 - RNA, 19 nt, Artificial Sequence
  Description of Artificial Sequence: Synthetic oligonucleotide
  Sense strand starting at position 2154 of SEQ ID NO: 587072
uacuuucggguucgacaga

SEQ ID NO: 764657 - RNA, 19 nt, Artificial Sequence
  Description of Artificial Sequence: Synthetic oligonucleotide
  Antisense strand to SEQ ID NO: 764656
ucugucgaacccgaaagua

SEQ ID NO: 764658 - RNA, 19 nt, Artificial Sequence
  Description of Artificial Sequence: Synthetic oligonucleotide
  Sense strand starting at position 2239 of SEQ ID NO: 587072
ccaagaucagccuggaguu

SEQ ID NO: 764659 - RNA, 19 nt, Artificial Sequence
  Description of Artificial Sequence: Synthetic oligonucleotide
  Antisense strand to SEQ ID NO: 764658
aacuccaggcugaucuugg

SEQ ID NO: 764660 - RNA, 19 nt, Artificial Sequence
  Description of Artificial Sequence: Synthetic oligonucleotide
  Sense strand starting at position 2596 of SEQ ID NO: 587072
cugacagaauuucgaggau

SEQ ID NO: 764661 - RNA, 19 nt, Artificial Sequence
  Description of Artificial Sequence: Synthetic oligonucleotide
  Antisense strand to SEQ ID NO: 764660
auccucgaaauucugucag

SEQ ID NO: 764662 - RNA, 19 nt, Artificial Sequence
  Description of Artificial Sequence: Synthetic oligonucleotide
  Sense strand starting at position 3135 of SEQ ID NO: 587072
auaguucccgucuggaaac

SEQ ID NO: 764663 - RNA, 19 nt, Artificial Sequence
  Description of Artificial Sequence: Synthetic oligonucleotide
  Antisense strand to SEQ ID NO: 764662
guuuccagacgggaacuau

SEQ ID NO: 764664 - RNA, 19 nt, Artificial Sequence
  Description of Artificial Sequence: Synthetic oligonucleotide
  Sense strand starting at position 3149 of SEQ ID NO: 587072
gaaacaauaccgugcucca

SEQ ID NO: 764665 - RNA, 19 nt, Artificial Sequence
  Description of Artificial Sequence: Synthetic oligonucleotide
  Antisense strand to SEQ ID NO: 764664
uggagcacgguauuguuuc

SEQ ID NO: 764666 - RNA, 19 nt, Artificial Sequence
  Description of Artificial Sequence: Synthetic oligonucleotide
  Sense strand starting at position 3204 of SEQ ID NO: 587072
aguguugacagccagcauu

SEQ ID NO: 764667 - RNA, 19 nt, Artificial Sequence
  Description of Artificial Sequence: Synthetic oligonucleotide
  Antisense strand to SEQ ID NO: 764666
aaugcuggcugucaacacu

SEQ ID NO: 764668 - RNA, 19 nt, Artificial Sequence
  Description of Artificial Sequence: Synthetic oligonucleotide
  Sense strand starting at position 3279 of SEQ ID NO: 587072
agggaucauucugucacua

SEQ ID NO: 764669 - RNA, 19 nt, Artificial Sequence
  Description of Artificial Sequence: Synthetic oligonucleotide
  Antisense strand to SEQ ID NO: 764668
uagugacagaaugaucccu

SEQ ID NO: 764670 - RNA, 19 nt, Artificial Sequence
  Description of Artificial Sequence: Synthetic oligonucleotide
  Sense strand starting at position 3381 of SEQ ID NO: 587072
uuauuaaucucagugugua

SEQ ID NO: 764671 - RNA, 19 nt, Artificial Sequence
  Description of Artificial Sequence: Synthetic oligonucleotide
  Antisense strand to SEQ ID NO: 764670
uacacacugagauuaauaa

SEQ ID NO: 764672 - RNA, 19 nt, Artificial Sequence
  Description of Artificial Sequence: Synthetic oligonucleotide
  Sense strand starting at position 3483 of SEQ ID NO: 587072
uccuccuugcuuugagacu

SEQ ID NO: 764673 - RNA, 19 nt, Artificial Sequence
  Description of Artificial Sequence: Synthetic oligonucleotide
  Antisense strand to SEQ ID NO: 764672
agucucaaagcaaggagga

SEQ ID NO: 764674 - RNA, 19 nt, Artificial Sequence
  Description of Artificial Sequence: Synthetic oligonucleotide
  Sense strand starting at position 3513 of SEQ ID NO: 587072
gugauacuuuaaucuuaag

SEQ ID NO: 764675 - RNA, 19 nt, Artificial Sequence
  Description of Artificial Sequence: Synthetic oligonucleotide
  Antisense strand to SEQ ID NO: 764674
cuuaagauuaaaguaucac

SEQ ID NO: 764676 - RNA, 19 nt, Artificial Sequence
  Description of Artificial Sequence: Synthetic oligonucleotide
  Sense strand starting at position 3593 of SEQ ID NO: 587072
uggcaagagacuuaguauu

SEQ ID NO: 764677 - RNA, 19 nt, Artificial Sequence
  Description of Artificial Sequence: Synthetic oligonucleotide
  Antisense strand to SEQ ID NO: 764676
aauacuaagucucuugcca

SEQ ID NO: 764678 - RNA, 19 nt, Artificial Sequence
  Description of Artificial Sequence: Synthetic oligonucleotide
  Sense strand starting at position 3603 of SEQ ID NO: 587072
cuuaguauuugaucuuguu

SEQ ID NO: 764679 - RNA, 19 nt, Artificial Sequence
  Description of Artificial Sequence: Synthetic oligonucleotide
  Antisense strand to SEQ ID NO: 764678
aacaagaucaaauacuaag

SEQ ID NO: 764680 - RNA, 19 nt, Artificial Sequence
  Description of Artificial Sequence: Synthetic oligonucleotide
  Sense strand starting at position 3776 of SEQ ID NO: 587072
ugguguauggacugcaaau

SEQ ID NO: 764681 - RNA, 19 nt, Artificial Sequence
  Description of Artificial Sequence: Synthetic oligonucleotide
  Antisense strand to SEQ ID NO: 764680
auuugcaguccauacacca

SEQ ID NO: 764682 - RNA, 19 nt, Artificial Sequence
  Description of Artificial Sequence: Synthetic oligonucleotide
  Sense strand starting at position 3804 of SEQ ID NO: 587072
aggaaauggauaugcguua

SEQ ID NO: 764683 - RNA, 19 nt, Artificial Sequence
  Description of Artificial Sequence: Synthetic oligonucleotide
  Antisense strand to SEQ ID NO: 764682
uaacgcauauccauuuccu

SEQ ID NO: 764684 - RNA, 19 nt, Artificial Sequence
  Description of Artificial Sequence: Synthetic oligonucleotide
  Sense strand starting at position 3805 of SEQ ID NO: 587072
ggaaauggauaugcguuau

SEQ ID NO: 764685 - RNA, 19 nt, Artificial Sequence
  Description of Artificial Sequence: Synthetic oligonucleotide
  Antisense strand to SEQ ID NO: 764684
auaacgcauauccauuucc

SEQ ID NO: 764686 - RNA, 19 nt, Artificial Sequence
  Description of Artificial Sequence: Synthetic oligonucleotide
  Sense strand starting at position 3809 of SEQ ID NO: 587072
auggauaugcguuaucagu

SEQ ID NO: 764687 - RNA, 19 nt, Artificial Sequence
  Description of Artificial Sequence: Synthetic oligonucleotide
  Antisense strand to SEQ ID NO: 764686
acugauaacgcauauccau

SEQ ID NO: 764688 - RNA, 19 nt, Artificial Sequence
  Description of Artificial Sequence: Synthetic oligonucleotide
  Sense strand starting at position 3815 of SEQ ID NO: 587072
augcguuaucaguuguagu

SEQ ID NO: 764689 - RNA, 19 nt, Artificial Sequence
  Description of Artificial Sequence: Synthetic oligonucleotide
  Antisense strand to SEQ ID NO: 764688
acuacaacugauaacgcau

SEQ ID NO: 764690 - RNA, 19 nt, Artificial Sequence
  Description of Artificial Sequence: Synthetic oligonucleotide
  Sense strand starting at position 3877 of SEQ ID NO: 587072
cggagaaugagccaugucu

SEQ ID NO: 764691 - RNA, 19 nt, Artificial Sequence
  Description of Artificial Sequence: Synthetic oligonucleotide
  Antisense strand to SEQ ID NO: 764690
agacauggcucauucuccg

SEQ ID NO: 764692 - RNA, 19 nt, Artificial Sequence
  Description of Artificial Sequence: Synthetic oligonucleotide
  Sense strand starting at position 3899 of SEQ ID NO: 587072
gccagaaacagugguucca

SEQ ID NO: 764693 - RNA, 19 nt, Artificial Sequence
  Description of Artificial Sequence: Synthetic oligonucleotide
  Antisense strand to SEQ ID NO: 764692
uggaaccacuguuucuggc

SEQ ID NO: 764694 - RNA, 19 nt, Artificial Sequence
  Description of Artificial Sequence: Synthetic oligonucleotide
  Sense strand starting at position 687 of SEQ ID NO: 587073
ugcucugaaucauugagga

SEQ ID NO: 764695 - RNA, 19 nt, Artificial Sequence
  Description of Artificial Sequence: Synthetic oligonucleotide
  Antisense strand to SEQ ID NO: 764694
uccucaaugauucagagca

SEQ ID NO: 764696 - RNA, 19 nt, Artificial Sequence
  Description of Artificial Sequence: Synthetic oligonucleotide
  Sense strand starting at position 691 of SEQ ID NO: 587073
cugaaucauugaggaauuu

SEQ ID NO: 764697 - RNA, 19 nt, Artificial Sequence
  Description of Artificial Sequence: Synthetic oligonucleotide
  Antisense strand to SEQ ID NO: 764696
aaauuccucaaugauucag

SEQ ID NO: 764698 - RNA, 19 nt, Artificial Sequence
  Description of Artificial Sequence: Synthetic oligonucleotide
  Sense strand starting at position 1263 of SEQ ID NO: 587073
aguccuaacuuucugucau

SEQ ID NO: 764699 - RNA, 19 nt, Artificial Sequence
  Description of Artificial Sequence: Synthetic oligonucleotide
  Antisense strand to SEQ ID NO: 764698
augacagaaaguuaggacu

SEQ ID NO: 764700 - RNA, 19 nt, Artificial Sequence
  Description of Artificial Sequence: Synthetic oligonucleotide
  Sense strand starting at position 1468 of SEQ ID NO: 587073
cugcuaaaguuucuaagag

SEQ ID NO: 764701 - RNA, 19 nt, Artificial Sequence
  Description of Artificial Sequence: Synthetic oligonucleotide
  Antisense strand to SEQ ID NO: 764700
cucuuagaaacuuuagcag

SEQ ID NO: 764702 - RNA, 19 nt, Artificial Sequence
  Description of Artificial Sequence: Synthetic oligonucleotide
  Sense strand starting at position 1523 of SEQ ID NO: 587073
ccgcguuacgguucaccua

SEQ ID NO: 764703 - RNA, 19 nt, Artificial Sequence
  Description of Artificial Sequence: Synthetic oligonucleotide
  Antisense strand to SEQ ID NO: 764702
uaggugaaccguaacgcgg

SEQ ID NO: 764704 - RNA, 19 nt, Artificial Sequence
  Description of Artificial Sequence: Synthetic oligonucleotide
  Sense strand starting at position 2268 of SEQ ID NO: 587073
uguggaaggcucugaggaa

SEQ ID NO: 764705 - RNA, 19 nt, Artificial Sequence
  Description of Artificial Sequence: Synthetic oligonucleotide
  Antisense strand to SEQ ID NO: 764704
uuccucagagccuuccaca

SEQ ID NO: 764706 - RNA, 19 nt, Artificial Sequence
  Description of Artificial Sequence: Synthetic oligonucleotide
  Sense strand starting at position 2505 of SEQ ID NO: 587073
ggcagaaauccugaucccu

SEQ ID NO: 764707 - RNA, 19 nt, Artificial Sequence
  Description of Artificial Sequence: Synthetic oligonucleotide
  Antisense strand to SEQ ID NO: 764706
agggaucaggauuucugcc

SEQ ID NO: 764708 - RNA, 19 nt, Artificial Sequence
  Description of Artificial Sequence: Synthetic oligonucleotide
  Sense strand starting at position 2612 of SEQ ID NO: 587073
agucaaucauaaggaagaa

SEQ ID NO: 764709 - RNA, 19 nt, Artificial Sequence
  Description of Artificial Sequence: Synthetic oligonucleotide
  Antisense strand to SEQ ID NO: 764708
uucuuccuuaugauugacu

SEQ ID NO: 764710 - RNA, 19 nt, Artificial Sequence
  Description of Artificial Sequence: Synthetic oligonucleotide
  Sense strand starting at position 2764 of SEQ ID NO: 587073
gccuguggauaucuggauu

SEQ ID NO: 764711 - RNA, 19 nt, Artificial Sequence
  Description of Artificial Sequence: Synthetic oligonucleotide
  Antisense strand to SEQ ID NO: 764710
aauccagauauccacaggc

SEQ ID NO: 764712 - RNA, 19 nt, Artificial Sequence
  Description of Artificial Sequence: Synthetic oligonucleotide
  Sense strand starting at position 2893 of SEQ ID NO: 587073
gagcaaguggcccaaauau

SEQ ID NO: 764713 - RNA, 19 nt, Artificial Sequence
  Description of Artificial Sequence: Synthetic oligonucleotide
  Antisense strand to SEQ ID NO: 764712
auauuugggccacuugcuc

SEQ ID NO: 764714 - RNA, 19 nt, Artificial Sequence
  Description of Artificial Sequence: Synthetic oligonucleotide
  Sense strand starting at position 2903 of SEQ ID NO: 587073
cccaaauauugccuuagga

SEQ ID NO: 764715 - RNA, 19 nt, Artificial Sequence
  Description of Artificial Sequence: Synthetic oligonucleotide
  Antisense strand to SEQ ID NO: 764714
uccuaaggcaauauuuggg

SEQ ID NO: 764716 - RNA, 19 nt, Artificial Sequence
  Description of Artificial Sequence: Synthetic oligonucleotide
  Sense strand starting at position 2911 of SEQ ID NO: 587073
uugccuuaggaaugucagu

SEQ ID NO: 764717 - RNA, 19 nt, Artificial Sequence
  Description of Artificial Sequence: Synthetic oligonucleotide
  Antisense strand to SEQ ID NO: 764716
acugacauuccuaaggcaa

SEQ ID NO: 764718 - RNA, 19 nt, Artificial Sequence
  Description of Artificial Sequence: Synthetic oligonucleotide
  Sense strand starting at position 2916 of SEQ ID NO: 587073
uuaggaaugucagucuaga

SEQ ID NO: 764719 - RNA, 19 nt, Artificial Sequence
  Description of Artificial Sequence: Synthetic oligonucleotide
  Antisense strand to SEQ ID NO: 764718
ucuagacugacauuccuaa

SEQ ID NO: 764720 - RNA, 19 nt, Artificial Sequence
  Description of Artificial Sequence: Synthetic oligonucleotide
  Sense strand starting at position 2921 of SEQ ID NO: 587073
aaugucagucuagauugau

SEQ ID NO: 764721 - RNA, 19 nt, Artificial Sequence
  Description of Artificial Sequence: Synthetic oligonucleotide
  Antisense strand to SEQ ID NO: 764720
aucaaucuagacugacauu

SEQ ID NO: 764722 - RNA, 19 nt, Artificial Sequence
  Description of Artificial Sequence: Synthetic oligonucleotide
  Sense strand starting at position 3360 of SEQ ID NO: 587073
ccaggcauugugcaagaua

SEQ ID NO: 764723 - RNA, 19 nt, Artificial Sequence
  Description of Artificial Sequence: Synthetic oligonucleotide
  Antisense strand to SEQ ID NO: 764722
uaucuugcacaaugccugg

SEQ ID NO: 764724 - RNA, 19 nt, Artificial Sequence
  Description of Artificial Sequence: Synthetic oligonucleotide
  Sense strand starting at position 3363 of SEQ ID NO: 587073
ggcauugugcaagauacug

SEQ ID NO: 764725 - RNA, 19 nt, Artificial Sequence
  Description of Artificial Sequence: Synthetic oligonucleotide
  Antisense strand to SEQ ID NO: 764724
caguaucuugcacaaugcc

SEQ ID NO: 764726 - RNA, 19 nt, Artificial Sequence
  Description of Artificial Sequence: Synthetic oligonucleotide
  Sense strand starting at position 3369 of SEQ ID NO: 587073
gugcaagauacugggaaua

SEQ ID NO: 764727 - RNA, 19 nt, Artificial Sequence
  Description of Artificial Sequence: Synthetic oligonucleotide
  Antisense strand to SEQ ID NO: 764726
uauucccaguaucuugcac

SEQ ID NO: 764728 - RNA, 19 nt, Artificial Sequence
  Description of Artificial Sequence: Synthetic oligonucleotide
  Sense strand starting at position 3371 of SEQ ID NO: 587073
gcaagauacugggaauaaa

SEQ ID NO: 764729 - RNA, 19 nt, Artificial Sequence
  Description of Artificial Sequence: Synthetic oligonucleotide
  Antisense strand to SEQ ID NO: 764728
uuuauucccaguaucuugc

SEQ ID NO: 764730 - RNA, 19 nt, Artificial Sequence
  Description of Artificial Sequence: Synthetic oligonucleotide
  Sense strand starting at position 3426 of SEQ ID NO: 587073
uccauauacuaguagaaga

SEQ ID NO: 764731 - RNA, 19 nt, Artificial Sequence
  Description of Artificial Sequence: Synthetic oligonucleotide
  Antisense strand to SEQ ID NO: 764730
ucuucuacuaguauaugga

SEQ ID NO: 764732 - RNA, 19 nt, Artificial Sequence
  Description of Artificial Sequence: Synthetic oligonucleotide
  Sense strand starting at position 3443 of SEQ ID NO: 587073
gagcuagacgugugaacag

SEQ ID NO: 764733 - RNA, 19 nt, Artificial Sequence
  Description of Artificial Sequence: Synthetic oligonucleotide
  Antisense strand to SEQ ID NO: 764732
cuguucacacgucuagcuc

SEQ ID NO: 764734 - RNA, 19 nt, Artificial Sequence
  Description of Artificial Sequence: Synthetic oligonucleotide
  Sense strand starting at position 3510 of SEQ ID NO: 587073
ugaggagcucuuugcucuu

SEQ ID NO: 764735 - RNA, 19 nt, Artificial Sequence
  Description of Artificial Sequence: Synthetic oligonucleotide
  Antisense strand to SEQ ID NO: 764734
aagagcaaagagcuccuca

SEQ ID NO: 764736 - RNA, 19 nt, Artificial Sequence
  Description of Artificial Sequence: Synthetic oligonucleotide
  Sense strand starting at position 3515 of SEQ ID NO: 587073
agcucuuugcucuuagugu

SEQ ID NO: 764737 - RNA, 19 nt, Artificial Sequence
  Description of Artificial Sequence: Synthetic oligonucleotide
  Antisense strand to SEQ ID NO: 764736
acacuaagagcaaagagcu

SEQ ID NO: 764738 - RNA, 19 nt, Artificial Sequence
  Description of Artificial Sequence: Synthetic oligonucleotide
  Sense strand starting at position 3526 of SEQ ID NO: 587073
cuuagugucucucuuggga

SEQ ID NO: 764739 - RNA, 19 nt, Artificial Sequence
  Description of Artificial Sequence: Synthetic oligonucleotide
  Antisense strand to SEQ ID NO: 764738
ucccaagagagacacuaag

SEQ ID NO: 764740 - RNA, 19 nt, Artificial Sequence
  Description of Artificial Sequence: Synthetic oligonucleotide
  Sense strand starting at position 3542 of SEQ ID NO: 587073
ggagguauaccuggugcua

SEQ ID NO: 764741 - RNA, 19 nt, Artificial Sequence
  Description of Artificial Sequence: Synthetic oligonucleotide
  Antisense strand to SEQ ID NO: 764740
uagcaccagguauaccucc

SEQ ID NO: 764742 - RNA, 19 nt, Artificial Sequence
  Description of Artificial Sequence: Synthetic oligonucleotide
  Sense strand starting at position 3555 of SEQ ID NO: 587073
gugcuacuuccugcuguca

SEQ ID NO: 764743 - RNA, 19 nt, Artificial Sequence
  Description of Artificial Sequence: Synthetic oligonucleotide
  Antisense strand to SEQ ID NO: 764742
ugacagcaggaaguagcac

SEQ ID NO: 764744 - RNA, 19 nt, Artificial Sequence
  Description of Artificial Sequence: Synthetic oligonucleotide
  Sense strand starting at position 3594 of SEQ ID NO: 587073
agagauguuggauguuacu

SEQ ID NO: 764745 - RNA, 19 nt, Artificial Sequence
  Description of Artificial Sequence: Synthetic oligonucleotide
  Antisense strand to SEQ ID NO: 764744
aguaacauccaacaucucu

SEQ ID NO: 764746 - RNA, 19 nt, Artificial Sequence
  Description of Artificial Sequence: Synthetic oligonucleotide
  Sense strand starting at position 3654 of SEQ ID NO: 587073
cacuauauuucgcagauga

SEQ ID NO: 764747 - RNA, 19 nt, Artificial Sequence
  Description of Artificial Sequence: Synthetic oligonucleotide
  Antisense strand to SEQ ID NO: 764746
ucaucugcgaaauauagug

SEQ ID NO: 764748 - RNA, 19 nt, Artificial Sequence
  Description of Artificial Sequence: Synthetic oligonucleotide
  Sense strand starting at position 3684 of SEQ ID NO: 587073
ggcacaagauauccuuaag

SEQ ID NO: 764749 - RNA, 19 nt, Artificial Sequence
  Description of Artificial Sequence: Synthetic oligonucleotide
  Antisense strand to SEQ ID NO: 764748
cuuaaggauaucuugugcc

SEQ ID NO: 764750 - RNA, 19 nt, Artificial Sequence
  Description of Artificial Sequence: Synthetic oligonucleotide
  Sense strand starting at position 3699 of SEQ ID NO: 587073
uaagcuuaugcagggagau

SEQ ID NO: 764751 - RNA, 19 nt, Artificial Sequence
  Description of Artificial Sequence: Synthetic oligonucleotide
  Antisense strand to SEQ ID NO: 764750
aucucccugcauaagcuua

SEQ ID NO: 764752 - RNA, 19 nt, Artificial Sequence
  Description of Artificial Sequence: Synthetic oligonucleotide
  Sense strand starting at position 3700 of SEQ ID NO: 587073
aagcuuaugcagggagaua

SEQ ID NO: 764753 - RNA, 19 nt, Artificial Sequence
  Description of Artificial Sequence: Synthetic oligonucleotide
  Antisense strand to SEQ ID NO: 764752
uaucucccugcauaagcuu

SEQ ID NO: 764754 - RNA, 19 nt, Artificial Sequence
  Description of Artificial Sequence: Synthetic oligonucleotide
  Sense strand starting at position 3745 of SEQ ID NO: 587073
gagacccuguguguugauu

SEQ ID NO: 764755 - RNA, 19 nt, Artificial Sequence
  Description of Artificial Sequence: Synthetic oligonucleotide
  Antisense strand to SEQ ID NO: 764754
aaucaacacacagggucuc

SEQ ID NO: 764756 - RNA, 19 nt, Artificial Sequence
  Description of Artificial Sequence: Synthetic oligonucleotide
  Sense strand starting at position 3756 of SEQ ID NO: 587073
uguugauuagcuugcacca

SEQ ID NO: 764757 - RNA, 19 nt, Artificial Sequence
  Description of Artificial Sequence: Synthetic oligonucleotide
  Antisense strand to SEQ ID NO: 764756
uggugcaagcuaaucaaca

SEQ ID NO: 764758 - RNA, 19 nt, Artificial Sequence
  Description of Artificial Sequence: Synthetic oligonucleotide
  Sense strand starting at position 3775 of SEQ ID NO: 587073
ggugcuuuggaagguacaa

SEQ ID NO: 764759 - RNA, 19 nt, Artificial Sequence
  Description of Artificial Sequence: Synthetic oligonucleotide
  Antisense strand to SEQ ID NO: 764758
uuguaccuuccaaagcacc

SEQ ID NO: 764760 - RNA, 19 nt, Artificial Sequence
  Description of Artificial Sequence: Synthetic oligonucleotide
  Sense strand starting at position 3800 of SEQ ID NO: 587073
cgggaauagugacuggguu

SEQ ID NO: 764761 - RNA, 19 nt, Artificial Sequence
  Description of Artificial Sequence: Synthetic oligonucleotide
  Antisense strand to SEQ ID NO: 764760
aacccagucacuauucccg

SEQ ID NO: 764762 - RNA, 19 nt, Artificial Sequence
  Description of Artificial Sequence: Synthetic oligonucleotide
  Sense strand starting at position 3829 of SEQ ID NO: 587073
cugaguuguguggguaauc

SEQ ID NO: 764763 - RNA, 19 nt, Artificial Sequence
  Description of Artificial Sequence: Synthetic oligonucleotide
  Antisense strand to SEQ ID NO: 764762
gauuacccacacaacucag

SEQ ID NO: 764764 - RNA, 19 nt, Artificial Sequence
  Description of Artificial Sequence: Synthetic oligonucleotide
  Sense strand starting at position 3830 of SEQ ID NO: 587073
ugaguuguguggguaauca

SEQ ID NO: 764765 - RNA, 19 nt, Artificial Sequence
  Description of Artificial Sequence: Synthetic oligonucleotide
  Antisense strand to SEQ ID NO: 764764
ugauuacccacacaacuca

SEQ ID NO: 764766 - RNA, 19 nt, Artificial Sequence
  Description of Artificial Sequence: Synthetic oligonucleotide
  Sense strand starting at position 3834 of SEQ ID NO: 587073
uuguguggguaaucaaaca

SEQ ID NO: 764767 - RNA, 19 nt, Artificial Sequence
  Description of Artificial Sequence: Synthetic oligonucleotide
  Antisense strand to SEQ ID NO: 764766
uguuugauuacccacacaa

SEQ ID NO: 764768 - RNA, 19 nt, Artificial Sequence
  Description of Artificial Sequence: Synthetic oligonucleotide
  Sense strand starting at position 3897 of SEQ ID NO: 587073
guggaagugugcguaagaa

SEQ ID NO: 764769 - RNA, 19 nt, Artificial Sequence
  Description of Artificial Sequence: Synthetic oligonucleotide
  Antisense strand to SEQ ID NO: 764768
uucuuacgcacacuuccac

SEQ ID NO: 764770 - RNA, 19 nt, Artificial Sequence
  Description of Artificial Sequence: Synthetic oligonucleotide
  Sense strand starting at position 3898 of SEQ ID NO: 587073
uggaagugugcguaagaag

SEQ ID NO: 764771 - RNA, 19 nt, Artificial Sequence
  Description of Artificial Sequence: Synthetic oligonucleotide
  Antisense strand to SEQ ID NO: 764770
cuucuuacgcacacuucca

SEQ ID NO: 764772 - RNA, 19 nt, Artificial Sequence
  Description of Artificial Sequence: Synthetic oligonucleotide
  Sense strand starting at position 3966 of SEQ ID NO: 587073
cugcaacaucucuggcaga

SEQ ID NO: 764773 - RNA, 19 nt, Artificial Sequence
  Description of Artificial Sequence: Synthetic oligonucleotide
  Antisense strand to SEQ ID NO: 764772
ucugccagagauguugcag

SEQ ID NO: 764774 - RNA, 19 nt, Artificial Sequence
  Description of Artificial Sequence: Synthetic oligonucleotide
  Sense strand starting at position 894 of SEQ ID NO: 587074
ugcucugaaucauugagga

SEQ ID NO: 764775 - RNA, 19 nt, Artificial Sequence
  Description of Artificial Sequence: Synthetic oligonucleotide
  Antisense strand to SEQ ID NO: 764774
uccucaaugauucagagca

SEQ ID NO: 764776 - RNA, 19 nt, Artificial Sequence
  Description of Artificial Sequence: Synthetic oligonucleotide
  Sense strand starting at position 898 of SEQ ID NO: 587074
cugaaucauugaggaauuu

SEQ ID NO: 764777 - RNA, 19 nt, Artificial Sequence
  Description of Artificial Sequence: Synthetic oligonucleotide
  Antisense strand to SEQ ID NO: 764776
aaauuccucaaugauucag

SEQ ID NO: 764778 - RNA, 19 nt, Artificial Sequence
  Description of Artificial Sequence: Synthetic oligonucleotide
  Sense strand starting at position 999 of SEQ ID NO: 587074
gcuugaccucugugucuca

SEQ ID NO: 764779 - RNA, 19 nt, Artificial Sequence
  Description of Artificial Sequence: Synthetic oligonucleotide
  Antisense strand to SEQ ID NO: 764778
ugagacacagaggucaagc

SEQ ID NO: 764780 - RNA, 19 nt, Artificial Sequence
  Description of Artificial Sequence: Synthetic oligonucleotide
  Sense strand starting at position 1470 of SEQ ID NO: 587074
aguccuaacuuucugucau

SEQ ID NO: 764781 - RNA, 19 nt, Artificial Sequence
  Description of Artificial Sequence: Synthetic oligonucleotide
  Antisense strand to SEQ ID NO: 764780
augacagaaaguuaggacu

SEQ ID NO: 764782 - RNA, 19 nt, Artificial Sequence
  Description of Artificial Sequence: Synthetic oligonucleotide
  Sense strand starting at position 1675 of SEQ ID NO: 587074
cugcuaaaguuucuaagag

SEQ ID NO: 764783 - RNA, 19 nt, Artificial Sequence
  Description of Artificial Sequence: Synthetic oligonucleotide
  Antisense strand to SEQ ID NO: 764782
cucuuagaaacuuuagcag

SEQ ID NO: 764784 - RNA, 19 nt, Artificial Sequence
  Description of Artificial Sequence: Synthetic oligonucleotide
  Sense strand starting at position 1730 of SEQ ID NO: 587074
ccgcguuacgguucaccua

SEQ ID NO: 764785 - RNA, 19 nt, Artificial Sequence
  Description of Artificial Sequence: Synthetic oligonucleotide
  Antisense strand to SEQ ID NO: 764784
uaggugaaccguaacgcgg

SEQ ID NO: 764786 - RNA, 19 nt, Artificial Sequence
  Description of Artificial Sequence: Synthetic oligonucleotide
  Sense strand starting at position 2475 of SEQ ID NO: 587074
uguggaaggcucugaggaa

SEQ ID NO: 764787 - RNA, 19 nt, Artificial Sequence
  Description of Artificial Sequence: Synthetic oligonucleotide
  Antisense strand to SEQ ID NO: 764786
uuccucagagccuuccaca

SEQ ID NO: 764788 - RNA, 19 nt, Artificial Sequence
  Description of Artificial Sequence: Synthetic oligonucleotide
  Sense strand starting at position 2702 of SEQ ID NO: 587074
cuuggaaccuggcagaaau

SEQ ID NO: 764789 - RNA, 19 nt, Artificial Sequence
  Description of Artificial Sequence: Synthetic oligonucleotide
  Antisense strand to SEQ ID NO: 764788
auuucugccagguuccaag

SEQ ID NO: 764790 - RNA, 19 nt, Artificial Sequence
  Description of Artificial Sequence: Synthetic oligonucleotide
  Sense strand starting at position 2712 of SEQ ID NO: 587074
ggcagaaauccugaucccu

SEQ ID NO: 764791 - RNA, 19 nt, Artificial Sequence
  Description of Artificial Sequence: Synthetic oligonucleotide
  Antisense strand to SEQ ID NO: 764790
agggaucaggauuucugcc

SEQ ID NO: 764792 - RNA, 19 nt, Artificial Sequence
  Description of Artificial Sequence: Synthetic oligonucleotide
  Sense strand starting at position 2816 of SEQ ID NO: 587074
guaagucaaucauaaggaa

SEQ ID NO: 764793 - RNA, 19 nt, Artificial Sequence
  Description of Artificial Sequence: Synthetic oligonucleotide
  Antisense strand to SEQ ID NO: 764792
uuccuuaugauugacuuac

SEQ ID NO: 764794 - RNA, 19 nt, Artificial Sequence
  Description of Artificial Sequence: Synthetic oligonucleotide
  Sense strand starting at position 2819 of SEQ ID NO: 587074
agucaaucauaaggaagaa

SEQ ID NO: 764795 - RNA, 19 nt, Artificial Sequence
  Description of Artificial Sequence: Synthetic oligonucleotide
  Antisense strand to SEQ ID NO: 764794
uucuuccuuaugauugacu

SEQ ID NO: 764796 - RNA, 19 nt, Artificial Sequence
  Description of Artificial Sequence: Synthetic oligonucleotide
  Sense strand starting at position 2929 of SEQ ID NO: 587074
gggucuuugguguguuacu

SEQ ID NO: 764797 - RNA, 19 nt, Artificial Sequence
  Description of Artificial Sequence: Synthetic oligonucleotide
  Antisense strand to SEQ ID NO: 764796
aguaacacaccaaagaccc

SEQ ID NO: 764798 - RNA, 19 nt, Artificial Sequence
  Description of Artificial Sequence: Synthetic oligonucleotide
  Sense strand starting at position 2938 of SEQ ID NO: 587074
guguguuacuguguggaug

SEQ ID NO: 764799 - RNA, 19 nt, Artificial Sequence
  Description of Artificial Sequence: Synthetic oligonucleotide
  Antisense strand to SEQ ID NO: 764798
cauccacacaguaacacac

SEQ ID NO: 764800 - RNA, 19 nt, Artificial Sequence
  Description of Artificial Sequence: Synthetic oligonucleotide
  Sense strand starting at position 2971 of SEQ ID NO: 587074
gccuguggauaucuggauu

SEQ ID NO: 764801 - RNA, 19 nt, Artificial Sequence
  Description of Artificial Sequence: Synthetic oligonucleotide
  Antisense strand to SEQ ID NO: 764800
aauccagauauccacaggc

SEQ ID NO: 764802 - RNA, 19 nt, Artificial Sequence
  Description of Artificial Sequence: Synthetic oligonucleotide
  Sense strand starting at position 3038 of SEQ ID NO: 587074
acaggccagucuugauuua

SEQ ID NO: 764803 - RNA, 19 nt, Artificial Sequence
  Description of Artificial Sequence: Synthetic oligonucleotide
  Antisense strand to SEQ ID NO: 764802
uaaaucaagacuggccugu

SEQ ID NO: 764804 - RNA, 19 nt, Artificial Sequence
  Description of Artificial Sequence: Synthetic oligonucleotide
  Sense strand starting at position 3100 of SEQ ID NO: 587074
gagcaaguggcccaaauau

SEQ ID NO: 764805 - RNA, 19 nt, Artificial Sequence
  Description of Artificial Sequence: Synthetic oligonucleotide
  Antisense strand to SEQ ID NO: 764804
auauuugggccacuugcuc

SEQ ID NO: 764806 - RNA, 19 nt, Artificial Sequence
  Description of Artificial Sequence: Synthetic oligonucleotide
  Sense strand starting at position 3110 of SEQ ID NO: 587074
cccaaauauugccuuagga

SEQ ID NO: 764807 - RNA, 19 nt, Artificial Sequence
  Description of Artificial Sequence: Synthetic oligonucleotide
  Antisense strand to SEQ ID NO: 764806
uccuaaggcaauauuuggg

SEQ ID NO: 764808 - RNA, 19 nt, Artificial Sequence
  Description of Artificial Sequence: Synthetic oligonucleotide
  Sense strand starting at position 3118 of SEQ ID NO: 587074
uugccuuaggaaugucagu

SEQ ID NO: 764809 - RNA, 19 nt, Artificial Sequence
  Description of Artificial Sequence: Synthetic oligonucleotide
  Antisense strand to SEQ ID NO: 764808
acugacauuccuaaggcaa

SEQ ID NO: 764810 - RNA, 19 nt, Artificial Sequence
  Description of Artificial Sequence: Synthetic oligonucleotide
  Sense strand starting at position 3123 of SEQ ID NO: 587074
uuaggaaugucagucuaga

SEQ ID NO: 764811 - RNA, 19 nt, Artificial Sequence
  Description of Artificial Sequence: Synthetic oligonucleotide
  Antisense strand to SEQ ID NO: 764810
ucuagacugacauuccuaa

SEQ ID NO: 764812 - RNA, 19 nt, Artificial Sequence
  Description of Artificial Sequence: Synthetic oligonucleotide
  Sense strand starting at position 3128 of SEQ ID NO: 587074
aaugucagucuagauugau

SEQ ID NO: 764813 - RNA, 19 nt, Artificial Sequence
  Description of Artificial Sequence: Synthetic oligonucleotide
  Antisense strand to SEQ ID NO: 764812
aucaaucuagacugacauu

SEQ ID NO: 764814 - RNA, 19 nt, Artificial Sequence
  Description of Artificial Sequence: Synthetic oligonucleotide
  Sense strand starting at position 3134 of SEQ ID NO: 587074
agucuagauugauaccaua

SEQ ID NO: 764815 - RNA, 19 nt, Artificial Sequence
  Description of Artificial Sequence: Synthetic oligonucleotide
  Antisense strand to SEQ ID NO: 764814
uaugguaucaaucuagacu

SEQ ID NO: 764816 - RNA, 19 nt, Artificial Sequence
  Description of Artificial Sequence: Synthetic oligonucleotide
  Sense strand starting at position 3567 of SEQ ID NO: 587074
ccaggcauugugcaagaua

SEQ ID NO: 764817 - RNA, 19 nt, Artificial Sequence
  Description of Artificial Sequence: Synthetic oligonucleotide
  Antisense strand to SEQ ID NO: 764816
uaucuugcacaaugccugg

SEQ ID NO: 764818 - RNA, 19 nt, Artificial Sequence
  Description of Artificial Sequence: Synthetic oligonucleotide
  Sense strand starting at position 3570 of SEQ ID NO: 587074
ggcauugugcaagauacug

SEQ ID NO: 764819 - RNA, 19 nt, Artificial Sequence
  Description of Artificial Sequence: Synthetic oligonucleotide
  Antisense strand to SEQ ID NO: 764818
caguaucuugcacaaugcc

SEQ ID NO: 764820 - RNA, 19 nt, Artificial Sequence
  Description of Artificial Sequence: Synthetic oligonucleotide
  Sense strand starting at position 3576 of SEQ ID NO: 587074
gugcaagauacugggaaua

SEQ ID NO: 764821 - RNA, 19 nt, Artificial Sequence
  Description of Artificial Sequence: Synthetic oligonucleotide
  Antisense strand to SEQ ID NO: 764820
uauucccaguaucuugcac

SEQ ID NO: 764822 - RNA, 19 nt, Artificial Sequence
  Description of Artificial Sequence: Synthetic oligonucleotide
  Sense strand starting at position 3578 of SEQ ID NO: 587074
gcaagauacugggaauaaa

SEQ ID NO: 764823 - RNA, 19 nt, Artificial Sequence
  Description of Artificial Sequence: Synthetic oligonucleotide
  Antisense strand to SEQ ID NO: 764822
uuuauucccaguaucuugc

SEQ ID NO: 764824 - RNA, 19 nt, Artificial Sequence
  Description of Artificial Sequence: Synthetic oligonucleotide
  Sense strand starting at position 3633 of SEQ ID NO: 587074
uccauauacuaguagaaga

SEQ ID NO: 764825 - RNA, 19 nt, Artificial Sequence
  Description of Artificial Sequence: Synthetic oligonucleotide
  Antisense strand to SEQ ID NO: 764824
ucuucuacuaguauaugga

SEQ ID NO: 764826 - RNA, 19 nt, Artificial Sequence
  Description of Artificial Sequence: Synthetic oligonucleotide
  Sense strand starting at position 3650 of SEQ ID NO: 587074
gagcuagacgugugaacag

SEQ ID NO: 764827 - RNA, 19 nt, Artificial Sequence
  Description of Artificial Sequence: Synthetic oligonucleotide
  Antisense strand to SEQ ID NO: 764826
cuguucacacgucuagcuc

SEQ ID NO: 764828 - RNA, 19 nt, Artificial Sequence
  Description of Artificial Sequence: Synthetic oligonucleotide
  Sense strand starting at position 3717 of SEQ ID NO: 587074
ugaggagcucuuugcucuu

SEQ ID NO: 764829 - RNA, 19 nt, Artificial Sequence
  Description of Artificial Sequence: Synthetic oligonucleotide
  Antisense strand to SEQ ID NO: 764828
aagagcaaagagcuccuca

SEQ ID NO: 764830 - RNA, 19 nt, Artificial Sequence
  Description of Artificial Sequence: Synthetic oligonucleotide
  Sense strand starting at position 3722 of SEQ ID NO: 587074
agcucuuugcucuuagugu

SEQ ID NO: 764831 - RNA, 19 nt, Artificial Sequence
  Description of Artificial Sequence: Synthetic oligonucleotide
  Antisense strand to SEQ ID NO: 764830
acacuaagagcaaagagcu

SEQ ID NO: 764832 - RNA, 19 nt, Artificial Sequence
  Description of Artificial Sequence: Synthetic oligonucleotide
  Sense strand starting at position 3733 of SEQ ID NO: 587074
cuuagugucucucuuggga

SEQ ID NO: 764833 - RNA, 19 nt, Artificial Sequence
  Description of Artificial Sequence: Synthetic oligonucleotide
  Antisense strand to SEQ ID NO: 764832
ucccaagagagacacuaag

SEQ ID NO: 764834 - RNA, 19 nt, Artificial Sequence
  Description of Artificial Sequence: Synthetic oligonucleotide
  Sense strand starting at position 3749 of SEQ ID NO: 587074
ggagguauaccuggugcua

SEQ ID NO: 764835 - RNA, 19 nt, Artificial Sequence
  Description of Artificial Sequence: Synthetic oligonucleotide
  Antisense strand to SEQ ID NO: 764834
uagcaccagguauaccucc

SEQ ID NO: 764836 - RNA, 19 nt, Artificial Sequence
  Description of Artificial Sequence: Synthetic oligonucleotide
  Sense strand starting at position 3762 of SEQ ID NO: 587074
gugcuacuuccugcuguca

SEQ ID NO: 764837 - RNA, 19 nt, Artificial Sequence
  Description of Artificial Sequence: Synthetic oligonucleotide
  Antisense strand to SEQ ID NO: 764836
ugacagcaggaaguagcac

SEQ ID NO: 764838 - RNA, 19 nt, Artificial Sequence
  Description of Artificial Sequence: Synthetic oligonucleotide
  Sense strand starting at position 3801 of SEQ ID NO: 587074
agagauguuggauguuacu

SEQ ID NO: 764839 - RNA, 19 nt, Artificial Sequence
  Description of Artificial Sequence: Synthetic oligonucleotide
  Antisense strand to SEQ ID NO: 764838
aguaacauccaacaucucu

SEQ ID NO: 764840 - RNA, 19 nt, Artificial Sequence
  Description of Artificial Sequence: Synthetic oligonucleotide
  Sense strand starting at position 3861 of SEQ ID NO: 587074
cacuauauuucgcagauga

SEQ ID NO: 764841 - RNA, 19 nt, Artificial Sequence
  Description of Artificial Sequence: Synthetic oligonucleotide
  Antisense strand to SEQ ID NO: 764840
ucaucugcgaaauauagug

SEQ ID NO: 764842 - RNA, 19 nt, Artificial Sequence
  Description of Artificial Sequence: Synthetic oligonucleotide
  Sense strand starting at position 3891 of SEQ ID NO: 587074
ggcacaagauauccuuaag

SEQ ID NO: 764843 - RNA, 19 nt, Artificial Sequence
  Description of Artificial Sequence: Synthetic oligonucleotide
  Antisense strand to SEQ ID NO: 764842
cuuaaggauaucuugugcc

SEQ ID NO: 764844 - RNA, 19 nt, Artificial Sequence
  Description of Artificial Sequence: Synthetic oligonucleotide
  Sense strand starting at position 3906 of SEQ ID NO: 587074
uaagcuuaugcagggagau

SEQ ID NO: 764845 - RNA, 19 nt, Artificial Sequence
  Description of Artificial Sequence: Synthetic oligonucleotide
  Antisense strand to SEQ ID NO: 764844
aucucccugcauaagcuua

SEQ ID NO: 764846 - RNA, 19 nt, Artificial Sequence
  Description of Artificial Sequence: Synthetic oligonucleotide
  Sense strand starting at position 3907 of SEQ ID NO: 587074
aagcuuaugcagggagaua

SEQ ID NO: 764847 - RNA, 19 nt, Artificial Sequence
  Description of Artificial Sequence: Synthetic oligonucleotide
  Antisense strand to SEQ ID NO: 764846
uaucucccugcauaagcuu

SEQ ID NO: 764848 - RNA, 19 nt, Artificial Sequence
  Description of Artificial Sequence: Synthetic oligonucleotide
  Sense strand starting at position 3952 of SEQ ID NO: 587074
gagacccuguguguugauu

SEQ ID NO: 764849 - RNA, 19 nt, Artificial Sequence
  Description of Artificial Sequence: Synthetic oligonucleotide
  Antisense strand to SEQ ID NO: 764848
aaucaacacacagggucuc

SEQ ID NO: 764850 - RNA, 19 nt, Artificial Sequence
  Description of Artificial Sequence: Synthetic oligonucleotide
  Sense strand starting at position 3963 of SEQ ID NO: 587074
uguugauuagcuugcacca

SEQ ID NO: 764851 - RNA, 19 nt, Artificial Sequence
  Description of Artificial Sequence: Synthetic oligonucleotide
  Antisense strand to SEQ ID NO: 764850
uggugcaagcuaaucaaca

SEQ ID NO: 764852 - RNA, 19 nt, Artificial Sequence
  Description of Artificial Sequence: Synthetic oligonucleotide
  Sense strand starting at position 3982 of SEQ ID NO: 587074
ggugcuuuggaagguacaa

SEQ ID NO: 764853 - RNA, 19 nt, Artificial Sequence
  Description of Artificial Sequence: Synthetic oligonucleotide
  Antisense strand to SEQ ID NO: 764852
uuguaccuuccaaagcacc

SEQ ID NO: 764854 - RNA, 19 nt, Artificial Sequence
  Description of Artificial Sequence: Synthetic oligonucleotide
  Sense strand starting at position 340 of SEQ ID NO: 587075
aaggcaaaguugcuccaua

SEQ ID NO: 764855 - RNA, 19 nt, Artificial Sequence
  Description of Artificial Sequence: Synthetic oligonucleotide
  Antisense strand to SEQ ID NO: 764854
uauggagcaacuuugccuu

SEQ ID NO: 764856 - RNA, 19 nt, Artificial Sequence
  Description of Artificial Sequence: Synthetic oligonucleotide
  Sense strand starting at position 446 of SEQ ID NO: 587075
accuuuaaguaucaguuau

SEQ ID NO: 764857 - RNA, 19 nt, Artificial Sequence
  Description of Artificial Sequence: Synthetic oligonucleotide
  Antisense strand to SEQ ID NO: 764856
auaacugauacuuaaaggu

SEQ ID NO: 764858 - RNA, 19 nt, Artificial Sequence
  Description of Artificial Sequence: Synthetic oligonucleotide
  Sense strand starting at position 450 of SEQ ID NO: 587075
uuaaguaucaguuaugagu

SEQ ID NO: 764859 - RNA, 19 nt, Artificial Sequence
  Description of Artificial Sequence: Synthetic oligonucleotide
  Antisense strand to SEQ ID NO: 764858
acucauaacugauacuuaa

SEQ ID NO: 764860 - RNA, 19 nt, Artificial Sequence
  Description of Artificial Sequence: Synthetic oligonucleotide
  Sense strand starting at position 452 of SEQ ID NO: 587075
aaguaucaguuaugaguua

SEQ ID NO: 764861 - RNA, 19 nt, Artificial Sequence
  Description of Artificial Sequence: Synthetic oligonucleotide
  Antisense strand to SEQ ID NO: 764860
uaacucauaacugauacuu

SEQ ID NO: 764862 - RNA, 19 nt, Artificial Sequence
  Description of Artificial Sequence: Synthetic oligonucleotide
  Sense strand starting at position 495 of SEQ ID NO: 587075
aaauaugguugugaguaua

SEQ ID NO: 764863 - RNA, 19 nt, Artificial Sequence
  Description of Artificial Sequence: Synthetic oligonucleotide
  Antisense strand to SEQ ID NO: 764862
uauacucacaaccauauuu

SEQ ID NO: 764864 - RNA, 19 nt, Artificial Sequence
  Description of Artificial Sequence: Synthetic oligonucleotide
  Sense strand starting at position 613 of SEQ ID NO: 587075
gaaccuaagucagccagau

SEQ ID NO: 764865 - RNA, 19 nt, Artificial Sequence
  Description of Artificial Sequence: Synthetic oligonucleotide
  Antisense strand to SEQ ID NO: 764864
aucuggcugacuuagguuc

SEQ ID NO: 764866 - RNA, 19 nt, Artificial Sequence
  Description of Artificial Sequence: Synthetic oligonucleotide
  Sense strand starting at position 746 of SEQ ID NO: 587075
uuaaauaucucaccggaug

SEQ ID NO: 764867 - RNA, 19 nt, Artificial Sequence
  Description of Artificial Sequence: Synthetic oligonucleotide
  Antisense strand to SEQ ID NO: 764866
cauccggugagauauuuaa

SEQ ID NO: 764868 - RNA, 19 nt, Artificial Sequence
  Description of Artificial Sequence: Synthetic oligonucleotide
  Sense strand starting at position 955 of SEQ ID NO: 587075
ucgcaugaguaagaaucua

SEQ ID NO: 764869 - RNA, 19 nt, Artificial Sequence
  Description of Artificial Sequence: Synthetic oligonucleotide
  Antisense strand to SEQ ID NO: 764868
uagauucuuacucaugcga

SEQ ID NO: 764870 - RNA, 19 nt, Artificial Sequence
  Description of Artificial Sequence: Synthetic oligonucleotide
  Sense strand starting at position 971 of SEQ ID NO: 587075
cuagaaaccugagaaguuu

SEQ ID NO: 764871 - RNA, 19 nt, Artificial Sequence
  Description of Artificial Sequence: Synthetic oligonucleotide
  Antisense strand to SEQ ID NO: 764870
aaacuucucagguuucuag

SEQ ID NO: 764872 - RNA, 19 nt, Artificial Sequence
  Description of Artificial Sequence: Synthetic oligonucleotide
  Sense strand starting at position 979 of SEQ ID NO: 587075
cugagaaguuucgagaaga

SEQ ID NO: 764873 - RNA, 19 nt, Artificial Sequence
  Description of Artificial Sequence: Synthetic oligonucleotide
  Antisense strand to SEQ ID NO: 764872
ucuucucgaaacuucucag

SEQ ID NO: 764874 - RNA, 19 nt, Artificial Sequence
  Description of Artificial Sequence: Synthetic oligonucleotide
  Sense strand starting at position 1212 of SEQ ID NO: 587075
agauuagauugaugccaca

SEQ ID NO: 764875 - RNA, 19 nt, Artificial Sequence
  Description of Artificial Sequence: Synthetic oligonucleotide
  Antisense strand to SEQ ID NO: 764874
uguggcaucaaucuaaucu

SEQ ID NO: 764876 - RNA, 19 nt, Artificial Sequence
  Description of Artificial Sequence: Synthetic oligonucleotide
  Sense strand starting at position 1215 of SEQ ID NO: 587075
uuagauugaugccacaauc

SEQ ID NO: 764877 - RNA, 19 nt, Artificial Sequence
  Description of Artificial Sequence: Synthetic oligonucleotide
  Antisense strand to SEQ ID NO: 764876
gauuguggcaucaaucuaa

SEQ ID NO: 764878 - RNA, 19 nt, Artificial Sequence
  Description of Artificial Sequence: Synthetic oligonucleotide
  Sense strand starting at position 1225 of SEQ ID NO: 587075
gccacaaucgaagaguaua

SEQ ID NO: 764879 - RNA, 19 nt, Artificial Sequence
  Description of Artificial Sequence: Synthetic oligonucleotide
  Antisense strand to SEQ ID NO: 764878
uauacucuucgauuguggc

SEQ ID NO: 764880 - RNA, 19 nt, Artificial Sequence
  Description of Artificial Sequence: Synthetic oligonucleotide
  Sense strand starting at position 1278 of SEQ ID NO: 587075
gggccaguucgcgaccgau

SEQ ID NO: 764881 - RNA, 19 nt, Artificial Sequence
  Description of Artificial Sequence: Synthetic oligonucleotide
  Antisense strand to SEQ ID NO: 764880
aucggucgcgaacuggccc

SEQ ID NO: 764882 - RNA, 19 nt, Artificial Sequence
  Description of Artificial Sequence: Synthetic oligonucleotide
  Sense strand starting at position 1280 of SEQ ID NO: 587075
gccaguucgcgaccgauca

SEQ ID NO: 764883 - RNA, 19 nt, Artificial Sequence
  Description of Artificial Sequence: Synthetic oligonucleotide
  Antisense strand to SEQ ID NO: 764882
ugaucggucgcgaacuggc

SEQ ID NO: 764884 - RNA, 19 nt, Artificial Sequence
  Description of Artificial Sequence: Synthetic oligonucleotide
  Sense strand starting at position 1527 of SEQ ID NO: 587075
ggaucugggucgugguaaa

SEQ ID NO: 764885 - RNA, 19 nt, Artificial Sequence
  Description of Artificial Sequence: Synthetic oligonucleotide
  Antisense strand to SEQ ID NO: 764884
uuuaccacgacccagaucc

SEQ ID NO: 764886 - RNA, 19 nt, Artificial Sequence
  Description of Artificial Sequence: Synthetic oligonucleotide
  Sense strand starting at position 1629 of SEQ ID NO: 587075
cugauucuucuccggagga

SEQ ID NO: 764887 - RNA, 19 nt, Artificial Sequence
  Description of Artificial Sequence: Synthetic oligonucleotide
  Antisense strand to SEQ ID NO: 764886
uccuccggagaagaaucag

SEQ ID NO: 764888 - RNA, 19 nt, Artificial Sequence
  Description of Artificial Sequence: Synthetic oligonucleotide
  Sense strand starting at position 1630 of SEQ ID NO: 587075
ugauucuucuccggaggau

SEQ ID NO: 764889 - RNA, 19 nt, Artificial Sequence
  Description of Artificial Sequence: Synthetic oligonucleotide
  Antisense strand to SEQ ID NO: 764888
auccuccggagaagaauca

SEQ ID NO: 764890 - RNA, 19 nt, Artificial Sequence
  Description of Artificial Sequence: Synthetic oligonucleotide
  Sense strand starting at position 1631 of SEQ ID NO: 587075
gauucuucuccggaggauu

SEQ ID NO: 764891 - RNA, 19 nt, Artificial Sequence
  Description of Artificial Sequence: Synthetic oligonucleotide
  Antisense strand to SEQ ID NO: 764890
aauccuccggagaagaauc

SEQ ID NO: 764892 - RNA, 19 nt, Artificial Sequence
  Description of Artificial Sequence: Synthetic oligonucleotide
  Sense strand starting at position 1642 of SEQ ID NO: 587075
ggaggauuccucgguugcu

SEQ ID NO: 764893 - RNA, 19 nt, Artificial Sequence
  Description of Artificial Sequence: Synthetic oligonucleotide
  Antisense strand to SEQ ID NO: 764892
agcaaccgaggaauccucc

SEQ ID NO: 764894 - RNA, 19 nt, Artificial Sequence
  Description of Artificial Sequence: Synthetic oligonucleotide
  Sense strand starting at position 1744 of SEQ ID NO: 587075
gaaggcucuccguggaagu

SEQ ID NO: 764895 - RNA, 19 nt, Artificial Sequence
  Description of Artificial Sequence: Synthetic oligonucleotide
  Antisense strand to SEQ ID NO: 764894
acuuccacggagagccuuc

SEQ ID NO: 764896 - RNA, 19 nt, Artificial Sequence
  Description of Artificial Sequence: Synthetic oligonucleotide
  Sense strand starting at position 1745 of SEQ ID NO: 587075
aaggcucuccguggaaguu

SEQ ID NO: 764897 - RNA, 19 nt, Artificial Sequence
  Description of Artificial Sequence: Synthetic oligonucleotide
  Antisense strand to SEQ ID NO: 764896
aacuuccacggagagccuu

SEQ ID NO: 764898 - RNA, 19 nt, Artificial Sequence
  Description of Artificial Sequence: Synthetic oligonucleotide
  Sense strand starting at position 1777 of SEQ ID NO: 587075
cagcuauuaggucguauuc

SEQ ID NO: 764899 - RNA, 19 nt, Artificial Sequence
  Description of Artificial Sequence: Synthetic oligonucleotide
  Antisense strand to SEQ ID NO: 764898
gaauacgaccuaauagcug

SEQ ID NO: 764900 - RNA, 19 nt, Artificial Sequence
  Description of Artificial Sequence: Synthetic oligonucleotide
  Sense strand starting at position 1779 of SEQ ID NO: 587075
gcuauuaggucguauucag

SEQ ID NO: 764901 - RNA, 19 nt, Artificial Sequence
  Description of Artificial Sequence: Synthetic oligonucleotide
  Antisense strand to SEQ ID NO: 764900
cugaauacgaccuaauagc

SEQ ID NO: 764902 - RNA, 19 nt, Artificial Sequence
  Description of Artificial Sequence: Synthetic oligonucleotide
  Sense strand starting at position 1959 of SEQ ID NO: 587075
caccgauaccuuuggcaca

SEQ ID NO: 764903 - RNA, 19 nt, Artificial Sequence
  Description of Artificial Sequence: Synthetic oligonucleotide
  Antisense strand to SEQ ID NO: 764902
ugugccaaagguaucggug

SEQ ID NO: 764904 - RNA, 19 nt, Artificial Sequence
  Description of Artificial Sequence: Synthetic oligonucleotide
  Sense strand starting at position 328 of SEQ ID NO: 587076
cgugaagccuugccacaaa

SEQ ID NO: 764905 - RNA, 19 nt, Artificial Sequence
  Description of Artificial Sequence: Synthetic oligonucleotide
  Antisense strand to SEQ ID NO: 764904
uuuguggcaaggcuucacg

SEQ ID NO: 764906 - RNA, 19 nt, Artificial Sequence
  Description of Artificial Sequence: Synthetic oligonucleotide
  Sense strand starting at position 375 of SEQ ID NO: 587076
ggcacuaucugauccgcaa

SEQ ID NO: 764907 - RNA, 19 nt, Artificial Sequence
  Description of Artificial Sequence: Synthetic oligonucleotide
  Antisense strand to SEQ ID NO: 764906
uugcggaucagauagugcc

SEQ ID NO: 764908 - RNA, 19 nt, Artificial Sequence
  Description of Artificial Sequence: Synthetic oligonucleotide
  Sense strand starting at position 378 of SEQ ID NO: 587076
acuaucugauccgcaaagu

SEQ ID NO: 764909 - RNA, 19 nt, Artificial Sequence
  Description of Artificial Sequence: Synthetic oligonucleotide
  Antisense strand to SEQ ID NO: 764908
acuuugcggaucagauagu

SEQ ID NO: 764910 - RNA, 19 nt, Artificial Sequence
  Description of Artificial Sequence: Synthetic oligonucleotide
  Sense strand starting at position 379 of SEQ ID NO: 587076
cuaucugauccgcaaaguu

SEQ ID NO: 764911 - RNA, 19 nt, Artificial Sequence
  Description of Artificial Sequence: Synthetic oligonucleotide
  Antisense strand to SEQ ID NO: 764910
aacuuugcggaucagauag

SEQ ID NO: 764912 - RNA, 19 nt, Artificial Sequence
  Description of Artificial Sequence: Synthetic oligonucleotide
  Sense strand starting at position 386 of SEQ ID NO: 587076
auccgcaaaguuuaauauu

SEQ ID NO: 764913 - RNA, 19 nt, Artificial Sequence
  Description of Artificial Sequence: Synthetic oligonucleotide
  Antisense strand to SEQ ID NO: 764912
aauauuaaacuuugcggau

SEQ ID NO: 764914 - RNA, 19 nt, Artificial Sequence
  Description of Artificial Sequence: Synthetic oligonucleotide
  Sense strand starting at position 614 of SEQ ID NO: 587076
ggcauucucgccuaaggac

SEQ ID NO: 764915 - RNA, 19 nt, Artificial Sequence
  Description of Artificial Sequence: Synthetic oligonucleotide
  Antisense strand to SEQ ID NO: 764914
guccuuaggcgagaaugcc

SEQ ID NO: 764916 - RNA, 19 nt, Artificial Sequence
  Description of Artificial Sequence: Synthetic oligonucleotide
  Sense strand starting at position 879 of SEQ ID NO: 587076
ccuguaguuccagguuaaa

SEQ ID NO: 764917 - RNA, 19 nt, Artificial Sequence
  Description of Artificial Sequence: Synthetic oligonucleotide
  Antisense strand to SEQ ID NO: 764916
uuuaaccuggaacuacagg

SEQ ID NO: 764918 - RNA, 19 nt, Artificial Sequence
  Description of Artificial Sequence: Synthetic oligonucleotide
  Sense strand starting at position 891 of SEQ ID NO: 587076
gguuaaagcuguuuguuua

SEQ ID NO: 764919 - RNA, 19 nt, Artificial Sequence
  Description of Artificial Sequence: Synthetic oligonucleotide
  Antisense strand to SEQ ID NO: 764918
uaaacaaacagcuuuaacc

SEQ ID NO: 764920 - RNA, 19 nt, Artificial Sequence
  Description of Artificial Sequence: Synthetic oligonucleotide
  Sense strand starting at position 892 of SEQ ID NO: 587076
guuaaagcuguuuguuuaa

SEQ ID NO: 764921 - RNA, 19 nt, Artificial Sequence
  Description of Artificial Sequence: Synthetic oligonucleotide
  Antisense strand to SEQ ID NO: 764920
uuaaacaaacagcuuuaac

SEQ ID NO: 764922 - RNA, 19 nt, Artificial Sequence
  Description of Artificial Sequence: Synthetic oligonucleotide
  Sense strand starting at position 912 of SEQ ID NO: 587076
agauuuguccuuugccgau

SEQ ID NO: 764923 - RNA, 19 nt, Artificial Sequence
  Description of Artificial Sequence: Synthetic oligonucleotide
  Antisense strand to SEQ ID NO: 764922
aucggcaaaggacaaaucu

SEQ ID NO: 764924 - RNA, 19 nt, Artificial Sequence
  Description of Artificial Sequence: Synthetic oligonucleotide
  Sense strand starting at position 925 of SEQ ID NO: 587076
gccgauucucgugaggaug

SEQ ID NO: 764925 - RNA, 19 nt, Artificial Sequence
  Description of Artificial Sequence: Synthetic oligonucleotide
  Antisense strand to SEQ ID NO: 764924
cauccucacgagaaucggc

SEQ ID NO: 764926 - RNA, 19 nt, Artificial Sequence
  Description of Artificial Sequence: Synthetic oligonucleotide
  Sense strand starting at position 1245 of SEQ ID NO: 587076
aggcucugguuaccagauu

SEQ ID NO: 764927 - RNA, 19 nt, Artificial Sequence
  Description of Artificial Sequence: Synthetic oligonucleotide
  Antisense strand to SEQ ID NO: 764926
aaucugguaaccagagccu

SEQ ID NO: 764928 - RNA, 19 nt, Artificial Sequence
  Description of Artificial Sequence: Synthetic oligonucleotide
  Sense strand starting at position 1292 of SEQ ID NO: 587076
gccacauccgaggauacau

SEQ ID NO: 764929 - RNA, 19 nt, Artificial Sequence
  Description of Artificial Sequence: Synthetic oligonucleotide
  Antisense strand to SEQ ID NO: 764928
auguauccucggauguggc

SEQ ID NO: 764930 - RNA, 19 nt, Artificial Sequence
  Description of Artificial Sequence: Synthetic oligonucleotide
  Sense strand starting at position 1303 of SEQ ID NO: 587076
ggauacaugucuuaaggag

SEQ ID NO: 764931 - RNA, 19 nt, Artificial Sequence
  Description of Artificial Sequence: Synthetic oligonucleotide
  Antisense strand to SEQ ID NO: 764930
cuccuuaagacauguaucc

SEQ ID NO: 764932 - RNA, 19 nt, Artificial Sequence
  Description of Artificial Sequence: Synthetic oligonucleotide
  Sense strand starting at position 1349 of SEQ ID NO: 587076
guaagagauucuuugggua

SEQ ID NO: 764933 - RNA, 19 nt, Artificial Sequence
  Description of Artificial Sequence: Synthetic oligonucleotide
  Antisense strand to SEQ ID NO: 764932
uacccaaagaaucucuuac

SEQ ID NO: 764934 - RNA, 19 nt, Artificial Sequence
  Description of Artificial Sequence: Synthetic oligonucleotide
  Sense strand starting at position 1352 of SEQ ID NO: 587076
agagauucuuuggguagcu

SEQ ID NO: 764935 - RNA, 19 nt, Artificial Sequence
  Description of Artificial Sequence: Synthetic oligonucleotide
  Antisense strand to SEQ ID NO: 764934
agcuacccaaagaaucucu

SEQ ID NO: 764936 - RNA, 19 nt, Artificial Sequence
  Description of Artificial Sequence: Synthetic oligonucleotide
  Sense strand starting at position 1353 of SEQ ID NO: 587076
gagauucuuuggguagcuu

SEQ ID NO: 764937 - RNA, 19 nt, Artificial Sequence
  Description of Artificial Sequence: Synthetic oligonucleotide
  Antisense strand to SEQ ID NO: 764936
aagcuacccaaagaaucuc

SEQ ID NO: 764938 - RNA, 19 nt, Artificial Sequence
  Description of Artificial Sequence: Synthetic oligonucleotide
  Sense strand starting at position 1361 of SEQ ID NO: 587076
uuggguagcuuucuuuaaa

SEQ ID NO: 764939 - RNA, 19 nt, Artificial Sequence
  Description of Artificial Sequence: Synthetic oligonucleotide
  Antisense strand to SEQ ID NO: 764938
uuuaaagaaagcuacccaa

SEQ ID NO: 764940 - RNA, 19 nt, Artificial Sequence
  Description of Artificial Sequence: Synthetic oligonucleotide
  Sense strand starting at position 2187 of SEQ ID NO: 587076
ccagguagcgccgguuuaa

SEQ ID NO: 764941 - RNA, 19 nt, Artificial Sequence
  Description of Artificial Sequence: Synthetic oligonucleotide
  Antisense strand to SEQ ID NO: 764940
uuaaaccggcgcuaccugg

SEQ ID NO: 764942 - RNA, 19 nt, Artificial Sequence
  Description of Artificial Sequence: Synthetic oligonucleotide
  Sense strand starting at position 2188 of SEQ ID NO: 587076
cagguagcgccgguuuaaa

SEQ ID NO: 764943 - RNA, 19 nt, Artificial Sequence
  Description of Artificial Sequence: Synthetic oligonucleotide
  Antisense strand to SEQ ID NO: 764942
uuuaaaccggcgcuaccug

SEQ ID NO: 764944 - RNA, 19 nt, Artificial Sequence
  Description of Artificial Sequence: Synthetic oligonucleotide
  Sense strand starting at position 2347 of SEQ ID NO: 587076
agcccucuccggcaaagaa

SEQ ID NO: 764945 - RNA, 19 nt, Artificial Sequence
  Description of Artificial Sequence: Synthetic oligonucleotide
  Antisense strand to SEQ ID NO: 764944
uucuuugccggagagggcu

SEQ ID NO: 764946 - RNA, 19 nt, Artificial Sequence
  Description of Artificial Sequence: Synthetic oligonucleotide
  Sense strand starting at position 2667 of SEQ ID NO: 587076
gcgucugggcugagugauc

SEQ ID NO: 764947 - RNA, 19 nt, Artificial Sequence
  Description of Artificial Sequence: Synthetic oligonucleotide
  Antisense strand to SEQ ID NO: 764946
gaucacucagcccagacgc

SEQ ID NO: 764948 - RNA, 19 nt, Artificial Sequence
  Description of Artificial Sequence: Synthetic oligonucleotide
  Sense strand starting at position 2698 of SEQ ID NO: 587076
gaugguugucgccgcaauc

SEQ ID NO: 764949 - RNA, 19 nt, Artificial Sequence
  Description of Artificial Sequence: Synthetic oligonucleotide
  Antisense strand to SEQ ID NO: 764948
gauugcggcgacaaccauc

SEQ ID NO: 764950 - RNA, 19 nt, Artificial Sequence
  Description of Artificial Sequence: Synthetic oligonucleotide
  Sense strand starting at position 2724 of SEQ ID NO: 587076
uugcaaggcgcgguuuaau

SEQ ID NO: 764951 - RNA, 19 nt, Artificial Sequence
  Description of Artificial Sequence: Synthetic oligonucleotide
  Antisense strand to SEQ ID NO: 764950
auuaaaccgcgccuugcaa

SEQ ID NO: 764952 - RNA, 19 nt, Artificial Sequence
  Description of Artificial Sequence: Synthetic oligonucleotide
  Sense strand starting at position 3042 of SEQ ID NO: 587076
ccugaaacgcggugucaga

SEQ ID NO: 764953 - RNA, 19 nt, Artificial Sequence
  Description of Artificial Sequence: Synthetic oligonucleotide
  Antisense strand to SEQ ID NO: 764952
ucugacaccgcguuucagg

SEQ ID NO: 764954 - RNA, 19 nt, Artificial Sequence
  Description of Artificial Sequence: Synthetic oligonucleotide
  Sense strand starting at position 3052 of SEQ ID NO: 587076
ggugucagaugguuacuga

SEQ ID NO: 764955 - RNA, 19 nt, Artificial Sequence
  Description of Artificial Sequence: Synthetic oligonucleotide
  Antisense strand to SEQ ID NO: 764954
ucaguaaccaucugacacc

SEQ ID NO: 764956 - RNA, 19 nt, Artificial Sequence
  Description of Artificial Sequence: Synthetic oligonucleotide
  Sense strand starting at position 3053 of SEQ ID NO: 587076
gugucagaugguuacugau

SEQ ID NO: 764957 - RNA, 19 nt, Artificial Sequence
  Description of Artificial Sequence: Synthetic oligonucleotide
  Antisense strand to SEQ ID NO: 764956
aucaguaaccaucugacac

SEQ ID NO: 764958 - RNA, 19 nt, Artificial Sequence
  Description of Artificial Sequence: Synthetic oligonucleotide
  Sense strand starting at position 3055 of SEQ ID NO: 587076
gucagaugguuacugauua

SEQ ID NO: 764959 - RNA, 19 nt, Artificial Sequence
  Description of Artificial Sequence: Synthetic oligonucleotide
  Antisense strand to SEQ ID NO: 764958
uaaucaguaaccaucugac

SEQ ID NO: 764960 - RNA, 19 nt, Artificial Sequence
  Description of Artificial Sequence: Synthetic oligonucleotide
  Sense strand starting at position 3056 of SEQ ID NO: 587076
ucagaugguuacugauuaa

SEQ ID NO: 764961 - RNA, 19 nt, Artificial Sequence
  Description of Artificial Sequence: Synthetic oligonucleotide
  Antisense strand to SEQ ID NO: 764960
uuaaucaguaaccaucuga

SEQ ID NO: 764962 - RNA, 19 nt, Artificial Sequence
  Description of Artificial Sequence: Synthetic oligonucleotide
  Sense strand starting at position 3059 of SEQ ID NO: 587076
gaugguuacugauuaauau

SEQ ID NO: 764963 - RNA, 19 nt, Artificial Sequence
  Description of Artificial Sequence: Synthetic oligonucleotide
  Antisense strand to SEQ ID NO: 764962
auauuaaucaguaaccauc

SEQ ID NO: 764964 - RNA, 19 nt, Artificial Sequence
  Description of Artificial Sequence: Synthetic oligonucleotide
  Sense strand starting at position 3103 of SEQ ID NO: 587076
gcgggugagucucuaaucu

SEQ ID NO: 764965 - RNA, 19 nt, Artificial Sequence
  Description of Artificial Sequence: Synthetic oligonucleotide
  Antisense strand to SEQ ID NO: 764964
agauuagagacucacccgc

SEQ ID NO: 764966 - RNA, 19 nt, Artificial Sequence
  Description of Artificial Sequence: Synthetic oligonucleotide
  Sense strand starting at position 3107 of SEQ ID NO: 587076
gugagucucuaaucuucua

SEQ ID NO: 764967 - RNA, 19 nt, Artificial Sequence
  Description of Artificial Sequence: Synthetic oligonucleotide
  Antisense strand to SEQ ID NO: 764966
uagaagauuagagacucac

SEQ ID NO: 764968 - RNA, 19 nt, Artificial Sequence
  Description of Artificial Sequence: Synthetic oligonucleotide
  Sense strand starting at position 3283 of SEQ ID NO: 587076
aaaggauuagaucggcuga

SEQ ID NO: 764969 - RNA, 19 nt, Artificial Sequence
  Description of Artificial Sequence: Synthetic oligonucleotide
  Antisense strand to SEQ ID NO: 764968
ucagccgaucuaauccuuu

SEQ ID NO: 764970 - RNA, 19 nt, Artificial Sequence
  Description of Artificial Sequence: Synthetic oligonucleotide
  Sense strand starting at position 3316 of SEQ ID NO: 587076
ccucucgauucugacauuu

SEQ ID NO: 764971 - RNA, 19 nt, Artificial Sequence
  Description of Artificial Sequence: Synthetic oligonucleotide
  Antisense strand to SEQ ID NO: 764970
aaaugucagaaucgagagg

SEQ ID NO: 764972 - RNA, 19 nt, Artificial Sequence
  Description of Artificial Sequence: Synthetic oligonucleotide
  Sense strand starting at position 3364 of SEQ ID NO: 587076
ucugaaaccuauuaaagug

SEQ ID NO: 764973 - RNA, 19 nt, Artificial Sequence
  Description of Artificial Sequence: Synthetic oligonucleotide
  Antisense strand to SEQ ID NO: 764972
cacuuuaauagguuucaga

SEQ ID NO: 764974 - RNA, 19 nt, Artificial Sequence
  Description of Artificial Sequence: Synthetic oligonucleotide
  Sense strand starting at position 3472 of SEQ ID NO: 587076
aucuguugagcucagagga

SEQ ID NO: 764975 - RNA, 19 nt, Artificial Sequence
  Description of Artificial Sequence: Synthetic oligonucleotide
  Antisense strand to SEQ ID NO: 764974
uccucugagcucaacagau

SEQ ID NO: 764976 - RNA, 19 nt, Artificial Sequence
  Description of Artificial Sequence: Synthetic oligonucleotide
  Sense strand starting at position 3595 of SEQ ID NO: 587076
aauccuuucuggguugagu

SEQ ID NO: 764977 - RNA, 19 nt, Artificial Sequence
  Description of Artificial Sequence: Synthetic oligonucleotide
  Antisense strand to SEQ ID NO: 764976
acucaacccagaaaggauu

SEQ ID NO: 764978 - RNA, 19 nt, Artificial Sequence
  Description of Artificial Sequence: Synthetic oligonucleotide
  Sense strand starting at position 3795 of SEQ ID NO: 587076
gagcaacugcagugauaag

SEQ ID NO: 764979 - RNA, 19 nt, Artificial Sequence
  Description of Artificial Sequence: Synthetic oligonucleotide
  Antisense strand to SEQ ID NO: 764978
cuuaucacugcaguugcuc

SEQ ID NO: 764980 - RNA, 19 nt, Artificial Sequence
  Description of Artificial Sequence: Synthetic oligonucleotide
  Sense strand starting at position 3796 of SEQ ID NO: 587076
agcaacugcagugauaaga

SEQ ID NO: 764981 - RNA, 19 nt, Artificial Sequence
  Description of Artificial Sequence: Synthetic oligonucleotide
  Antisense strand to SEQ ID NO: 764980
ucuuaucacugcaguugcu

SEQ ID NO: 764982 - RNA, 19 nt, Artificial Sequence
  Description of Artificial Sequence: Synthetic oligonucleotide
  Sense strand starting at position 3941 of SEQ ID NO: 587076
cgaguuagugcccauucgu

SEQ ID NO: 764983 - RNA, 19 nt, Artificial Sequence
  Description of Artificial Sequence: Synthetic oligonucleotide
  Antisense strand to SEQ ID NO: 764982
acgaaugggcacuaacucg

SEQ ID NO: 764984 - RNA, 19 nt, Artificial Sequence
  Description of Artificial Sequence: Synthetic oligonucleotide
  Sense strand starting at position 137 of SEQ ID NO: 587077
cuuccuuugccucaguuua

SEQ ID NO: 764985 - RNA, 19 nt, Artificial Sequence
  Description of Artificial Sequence: Synthetic oligonucleotide
  Antisense strand to SEQ ID NO: 764984
uaaacugaggcaaaggaag

SEQ ID NO: 764986 - RNA, 19 nt, Artificial Sequence
  Description of Artificial Sequence: Synthetic oligonucleotide
  Sense strand starting at position 171 of SEQ ID NO: 587077
ggguaaucauaaucccaac

SEQ ID NO: 764987 - RNA, 19 nt, Artificial Sequence
  Description of Artificial Sequence: Synthetic oligonucleotide
  Antisense strand to SEQ ID NO: 764986
guugggauuaugauuaccc

SEQ ID NO: 764988 - RNA, 19 nt, Artificial Sequence
  Description of Artificial Sequence: Synthetic oligonucleotide
  Sense strand starting at position 191 of SEQ ID NO: 587077
cccuccaaggaauguaauu

SEQ ID NO: 764989 - RNA, 19 nt, Artificial Sequence
  Description of Artificial Sequence: Synthetic oligonucleotide
  Antisense strand to SEQ ID NO: 764988
aauuacauuccuuggaggg

SEQ ID NO: 764990 - RNA, 19 nt, Artificial Sequence
  Description of Artificial Sequence: Synthetic oligonucleotide
  Sense strand starting at position 200 of SEQ ID NO: 587077
gaauguaauuugggugaaa

SEQ ID NO: 764991 - RNA, 19 nt, Artificial Sequence
  Description of Artificial Sequence: Synthetic oligonucleotide
  Antisense strand to SEQ ID NO: 764990
uuucacccaaauuacauuc

SEQ ID NO: 764992 - RNA, 19 nt, Artificial Sequence
  Description of Artificial Sequence: Synthetic oligonucleotide
  Sense strand starting at position 263 of SEQ ID NO: 587077
ucgguaugccuguuacuuu

SEQ ID NO: 764993 - RNA, 19 nt, Artificial Sequence
  Description of Artificial Sequence: Synthetic oligonucleotide
  Antisense strand to SEQ ID NO: 764992
aaaguaacaggcauaccga

SEQ ID NO: 764994 - RNA, 19 nt, Artificial Sequence
  Description of Artificial Sequence: Synthetic oligonucleotide
  Sense strand starting at position 345 of SEQ ID NO: 587077
ucaauucccuguguacaca

SEQ ID NO: 764995 - RNA, 19 nt, Artificial Sequence
  Description of Artificial Sequence: Synthetic oligonucleotide
  Antisense strand to SEQ ID NO: 764994
uguguacacagggaauuga

SEQ ID NO: 764996 - RNA, 19 nt, Artificial Sequence
  Description of Artificial Sequence: Synthetic oligonucleotide
  Sense strand starting at position 408 of SEQ ID NO: 587077
accuccaucucuguguaau

SEQ ID NO: 764997 - RNA, 19 nt, Artificial Sequence
  Description of Artificial Sequence: Synthetic oligonucleotide
  Antisense strand to SEQ ID NO: 764996
auuacacagagauggaggu

SEQ ID NO: 764998 - RNA, 19 nt, Artificial Sequence
  Description of Artificial Sequence: Synthetic oligonucleotide
  Sense strand starting at position 409 of SEQ ID NO: 587077
ccuccaucucuguguaaug

SEQ ID NO: 764999 - RNA, 19 nt, Artificial Sequence
  Description of Artificial Sequence: Synthetic oligonucleotide
  Antisense strand to SEQ ID NO: 764998
cauuacacagagauggagg

SEQ ID NO: 765000 - RNA, 19 nt, Artificial Sequence
  Description of Artificial Sequence: Synthetic oligonucleotide
  Sense strand starting at position 507 of SEQ ID NO: 587077
ucuuaauacuuguugauug

SEQ ID NO: 765001 - RNA, 19 nt, Artificial Sequence
  Description of Artificial Sequence: Synthetic oligonucleotide
  Antisense strand to SEQ ID NO: 765000
caaucaacaaguauuaaga

SEQ ID NO: 765002 - RNA, 19 nt, Artificial Sequence
  Description of Artificial Sequence: Synthetic oligonucleotide
  Sense strand starting at position 667 of SEQ ID NO: 587077
gucaaaggguugguuaguu

SEQ ID NO: 765003 - RNA, 19 nt, Artificial Sequence
  Description of Artificial Sequence: Synthetic oligonucleotide
  Antisense strand to SEQ ID NO: 765002
aacuaaccaacccuuugac

SEQ ID NO: 765004 - RNA, 19 nt, Artificial Sequence
  Description of Artificial Sequence: Synthetic oligonucleotide
  Sense strand starting at position 671 of SEQ ID NO: 587077
aaggguugguuaguucaga

SEQ ID NO: 765005 - RNA, 19 nt, Artificial Sequence
  Description of Artificial Sequence: Synthetic oligonucleotide
  Antisense strand to SEQ ID NO: 765004
ucugaacuaaccaacccuu

SEQ ID NO: 765006 - RNA, 19 nt, Artificial Sequence
  Description of Artificial Sequence: Synthetic oligonucleotide
  Sense strand starting at position 672 of SEQ ID NO: 587077
aggguugguuaguucagaa

SEQ ID NO: 765007 - RNA, 19 nt, Artificial Sequence
  Description of Artificial Sequence: Synthetic oligonucleotide
  Antisense strand to SEQ ID NO: 765006
uucugaacuaaccaacccu

SEQ ID NO: 765008 - RNA, 19 nt, Artificial Sequence
  Description of Artificial Sequence: Synthetic oligonucleotide
  Sense strand starting at position 685 of SEQ ID NO: 587077
ucagaagggccaugcaaua

SEQ ID NO: 765009 - RNA, 19 nt, Artificial Sequence
  Description of Artificial Sequence: Synthetic oligonucleotide
  Antisense strand to SEQ ID NO: 765008
uauugcauggcccuucuga

SEQ ID NO: 765010 - RNA, 19 nt, Artificial Sequence
  Description of Artificial Sequence: Synthetic oligonucleotide
  Sense strand starting at position 690 of SEQ ID NO: 587077
agggccaugcaauauuaau

SEQ ID NO: 765011 - RNA, 19 nt, Artificial Sequence
  Description of Artificial Sequence: Synthetic oligonucleotide
  Antisense strand to SEQ ID NO: 765010
auuaauauugcauggcccu

SEQ ID NO: 765012 - RNA, 19 nt, Artificial Sequence
  Description of Artificial Sequence: Synthetic oligonucleotide
  Sense strand starting at position 804 of SEQ ID NO: 587077
ggaagaucaaaguguguga

SEQ ID NO: 765013 - RNA, 19 nt, Artificial Sequence
  Description of Artificial Sequence: Synthetic oligonucleotide
  Antisense strand to SEQ ID NO: 765012
ucacacacuuugaucuucc

SEQ ID NO: 765014 - RNA, 19 nt, Artificial Sequence
  Description of Artificial Sequence: Synthetic oligonucleotide
  Sense strand starting at position 806 of SEQ ID NO: 587077
aagaucaaagugugugaau

SEQ ID NO: 765015 - RNA, 19 nt, Artificial Sequence
  Description of Artificial Sequence: Synthetic oligonucleotide
  Antisense strand to SEQ ID NO: 765014
auucacacacuuugaucuu

SEQ ID NO: 765016 - RNA, 19 nt, Artificial Sequence
  Description of Artificial Sequence: Synthetic oligonucleotide
  Sense strand starting at position 807 of SEQ ID NO: 587077
agaucaaagugugugaaug

SEQ ID NO: 765017 - RNA, 19 nt, Artificial Sequence
  Description of Artificial Sequence: Synthetic oligonucleotide
  Antisense strand to SEQ ID NO: 765016
cauucacacacuuugaucu

SEQ ID NO: 765018 - RNA, 19 nt, Artificial Sequence
  Description of Artificial Sequence: Synthetic oligonucleotide
  Sense strand starting at position 947 of SEQ ID NO: 587077
gcugacacugucuggagaa

SEQ ID NO: 765019 - RNA, 19 nt, Artificial Sequence
  Description of Artificial Sequence: Synthetic oligonucleotide
  Antisense strand to SEQ ID NO: 765018
uucuccagacagugucagc

SEQ ID NO: 765020 - RNA, 19 nt, Artificial Sequence
  Description of Artificial Sequence: Synthetic oligonucleotide
  Sense strand starting at position 1288 of SEQ ID NO: 587077
uggagagcuugccuagaaa

SEQ ID NO: 765021 - RNA, 19 nt, Artificial Sequence
  Description of Artificial Sequence: Synthetic oligonucleotide
  Antisense strand to SEQ ID NO: 765020
uuucuaggcaagcucucca

SEQ ID NO: 765022 - RNA, 19 nt, Artificial Sequence
  Description of Artificial Sequence: Synthetic oligonucleotide
  Sense strand starting at position 1376 of SEQ ID NO: 587077
cggaguccuagggagcaaa

SEQ ID NO: 765023 - RNA, 19 nt, Artificial Sequence
  Description of Artificial Sequence: Synthetic oligonucleotide
  Antisense strand to SEQ ID NO: 765022
uuugcucccuaggacuccg

SEQ ID NO: 765024 - RNA, 19 nt, Artificial Sequence
  Description of Artificial Sequence: Synthetic oligonucleotide
  Sense strand starting at position 2354 of SEQ ID NO: 587077
gugcucuccgggagcaaga

SEQ ID NO: 765025 - RNA, 19 nt, Artificial Sequence
  Description of Artificial Sequence: Synthetic oligonucleotide
  Antisense strand to SEQ ID NO: 765024
ucuugcucccggagagcac

SEQ ID NO: 765026 - RNA, 19 nt, Artificial Sequence
  Description of Artificial Sequence: Synthetic oligonucleotide
  Sense strand starting at position 2405 of SEQ ID NO: 587077
gggagucgcgcauacauaa

SEQ ID NO: 765027 - RNA, 19 nt, Artificial Sequence
  Description of Artificial Sequence: Synthetic oligonucleotide
  Antisense strand to SEQ ID NO: 765026
uuauguaugcgcgacuccc

SEQ ID NO: 765028 - RNA, 19 nt, Artificial Sequence
  Description of Artificial Sequence: Synthetic oligonucleotide
  Sense strand starting at position 2597 of SEQ ID NO: 587077
cagagagauucucagagga

SEQ ID NO: 765029 - RNA, 19 nt, Artificial Sequence
  Description of Artificial Sequence: Synthetic oligonucleotide
  Antisense strand to SEQ ID NO: 765028
uccucugagaaucucucug

SEQ ID NO: 765030 - RNA, 19 nt, Artificial Sequence
  Description of Artificial Sequence: Synthetic oligonucleotide
  Sense strand starting at position 2599 of SEQ ID NO: 587077
gagagauucucagaggagg

SEQ ID NO: 765031 - RNA, 19 nt, Artificial Sequence
  Description of Artificial Sequence: Synthetic oligonucleotide
  Antisense strand to SEQ ID NO: 765030
ccuccucugagaaucucuc

SEQ ID NO: 765032 - RNA, 19 nt, Artificial Sequence
  Description of Artificial Sequence: Synthetic oligonucleotide
  Sense strand starting at position 2642 of SEQ ID NO: 587077
gacuguccaucccugagau

SEQ ID NO: 765033 - RNA, 19 nt, Artificial Sequence
  Description of Artificial Sequence: Synthetic oligonucleotide
  Antisense strand to SEQ ID NO: 765032
aucucagggauggacaguc

SEQ ID NO: 765034 - RNA, 19 nt, Artificial Sequence
  Description of Artificial Sequence: Synthetic oligonucleotide
  Sense strand starting at position 2643 of SEQ ID NO: 587077
acuguccaucccugagauu

SEQ ID NO: 765035 - RNA, 19 nt, Artificial Sequence
  Description of Artificial Sequence: Synthetic oligonucleotide
  Antisense strand to SEQ ID NO: 765034
aaucucagggauggacagu

SEQ ID NO: 765036 - RNA, 19 nt, Artificial Sequence
  Description of Artificial Sequence: Synthetic oligonucleotide
  Sense strand starting at position 2911 of SEQ ID NO: 587077
gcaagucuuggaggacagu

SEQ ID NO: 765037 - RNA, 19 nt, Artificial Sequence
  Description of Artificial Sequence: Synthetic oligonucleotide
  Antisense strand to SEQ ID NO: 765036
acuguccuccaagacuugc

SEQ ID NO: 765038 - RNA, 19 nt, Artificial Sequence
  Description of Artificial Sequence: Synthetic oligonucleotide
  Sense strand starting at position 3042 of SEQ ID NO: 587077
gccugucagagauggcaga

SEQ ID NO: 765039 - RNA, 19 nt, Artificial Sequence
  Description of Artificial Sequence: Synthetic oligonucleotide
  Antisense strand to SEQ ID NO: 765038
ucugccaucucugacaggc

SEQ ID NO: 765040 - RNA, 19 nt, Artificial Sequence
  Description of Artificial Sequence: Synthetic oligonucleotide
  Sense strand starting at position 3267 of SEQ ID NO: 587077
cccagacugaucuggguau

SEQ ID NO: 765041 - RNA, 19 nt, Artificial Sequence
  Description of Artificial Sequence: Synthetic oligonucleotide
  Antisense strand to SEQ ID NO: 765040
auacccagaucagucuggg

SEQ ID NO: 765042 - RNA, 19 nt, Artificial Sequence
  Description of Artificial Sequence: Synthetic oligonucleotide
  Sense strand starting at position 3281 of SEQ ID NO: 587077
gguauuuauucccaggcaa

SEQ ID NO: 765043 - RNA, 19 nt, Artificial Sequence
  Description of Artificial Sequence: Synthetic oligonucleotide
  Antisense strand to SEQ ID NO: 765042
uugccugggaauaaauacc

SEQ ID NO: 765044 - RNA, 19 nt, Artificial Sequence
  Description of Artificial Sequence: Synthetic oligonucleotide
  Sense strand starting at position 3378 of SEQ ID NO: 587077
gagucaaugagaugaguca

SEQ ID NO: 765045 - RNA, 19 nt, Artificial Sequence
  Description of Artificial Sequence: Synthetic oligonucleotide
  Antisense strand to SEQ ID NO: 765044
ugacucaucucauugacuc

SEQ ID NO: 765046 - RNA, 19 nt, Artificial Sequence
  Description of Artificial Sequence: Synthetic oligonucleotide
  Sense strand starting at position 3517 of SEQ ID NO: 587077
cugacauucuaggcaacuu

SEQ ID NO: 765047 - RNA, 19 nt, Artificial Sequence
  Description of Artificial Sequence: Synthetic oligonucleotide
  Antisense strand to SEQ ID NO: 765046
aaguugccuagaaugucag

SEQ ID NO: 765048 - RNA, 19 nt, Artificial Sequence
  Description of Artificial Sequence: Synthetic oligonucleotide
  Sense strand starting at position 3593 of SEQ ID NO: 587077
ccuugaggcuacucuuaac

SEQ ID NO: 765049 - RNA, 19 nt, Artificial Sequence
  Description of Artificial Sequence: Synthetic oligonucleotide
  Antisense strand to SEQ ID NO: 765048
guuaagaguagccucaagg

SEQ ID NO: 765050 - RNA, 19 nt, Artificial Sequence
  Description of Artificial Sequence: Synthetic oligonucleotide
  Sense strand starting at position 3646 of SEQ ID NO: 587077
gugcaauuggacuaaauca

SEQ ID NO: 765051 - RNA, 19 nt, Artificial Sequence
  Description of Artificial Sequence: Synthetic oligonucleotide
  Antisense strand to SEQ ID NO: 765050
ugauuuaguccaauugcac

SEQ ID NO: 765052 - RNA, 19 nt, Artificial Sequence
  Description of Artificial Sequence: Synthetic oligonucleotide
  Sense strand starting at position 3687 of SEQ ID NO: 587077
ccauuaagaccguggugau

SEQ ID NO: 765053 - RNA, 19 nt, Artificial Sequence
  Description of Artificial Sequence: Synthetic oligonucleotide
  Antisense strand to SEQ ID NO: 765052
aucaccacggucuuaaugg

SEQ ID NO: 765054 - RNA, 19 nt, Artificial Sequence
  Description of Artificial Sequence: Synthetic oligonucleotide
  Sense strand starting at position 3688 of SEQ ID NO: 587077
cauuaagaccguggugauc

SEQ ID NO: 765055 - RNA, 19 nt, Artificial Sequence
  Description of Artificial Sequence: Synthetic oligonucleotide
  Antisense strand to SEQ ID NO: 765054
gaucaccacggucuuaaug

SEQ ID NO: 765056 - RNA, 19 nt, Artificial Sequence
  Description of Artificial Sequence: Synthetic oligonucleotide
  Sense strand starting at position 3729 of SEQ ID NO: 587077
ugcuauucugugcaucaca

SEQ ID NO: 765057 - RNA, 19 nt, Artificial Sequence
  Description of Artificial Sequence: Synthetic oligonucleotide
  Antisense strand to SEQ ID NO: 765056
ugugaugcacagaauagca

SEQ ID NO: 765058 - RNA, 19 nt, Artificial Sequence
  Description of Artificial Sequence: Synthetic oligonucleotide
  Sense strand starting at position 3768 of SEQ ID NO: 587077
aaccauguuggcugaauga

SEQ ID NO: 765059 - RNA, 19 nt, Artificial Sequence
  Description of Artificial Sequence: Synthetic oligonucleotide
  Antisense strand to SEQ ID NO: 765058
ucauucagccaacaugguu

SEQ ID NO: 765060 - RNA, 19 nt, Artificial Sequence
  Description of Artificial Sequence: Synthetic oligonucleotide
  Sense strand starting at position 3840 of SEQ ID NO: 587077
cacuguuguuugucugaga

SEQ ID NO: 765061 - RNA, 19 nt, Artificial Sequence
  Description of Artificial Sequence: Synthetic oligonucleotide
  Antisense strand to SEQ ID NO: 765060
ucucagacaaacaacagug

SEQ ID NO: 765062 - RNA, 19 nt, Artificial Sequence
  Description of Artificial Sequence: Synthetic oligonucleotide
  Sense strand starting at position 3841 of SEQ ID NO: 587077
acuguuguuugucugagag

SEQ ID NO: 765063 - RNA, 19 nt, Artificial Sequence
  Description of Artificial Sequence: Synthetic oligonucleotide
  Antisense strand to SEQ ID NO: 765062
cucucagacaaacaacagu

SEQ ID NO: 765064 - RNA, 19 nt, Artificial Sequence
  Description of Artificial Sequence: Synthetic oligonucleotide
  Sense strand starting at position 30 of SEQ ID NO: 587078
cuugcaacucauggagaaa

SEQ ID NO: 765065 - RNA, 19 nt, Artificial Sequence
  Description of Artificial Sequence: Synthetic oligonucleotide
  Antisense strand to SEQ ID NO: 765064
uuucuccaugaguugcaag

SEQ ID NO: 765066 - RNA, 19 nt, Artificial Sequence
  Description of Artificial Sequence: Synthetic oligonucleotide
  Sense strand starting at position 65 of SEQ ID NO: 587078
uuagucagaguguacuuua

SEQ ID NO: 765067 - RNA, 19 nt, Artificial Sequence
  Description of Artificial Sequence: Synthetic oligonucleotide
  Antisense strand to SEQ ID NO: 765066
uaaaguacacucugacuaa

SEQ ID NO: 765068 - RNA, 19 nt, Artificial Sequence
  Description of Artificial Sequence: Synthetic oligonucleotide
  Sense strand starting at position 117 of SEQ ID NO: 587078
gaagcagcaccuuguuaaa

SEQ ID NO: 765069 - RNA, 19 nt, Artificial Sequence
  Description of Artificial Sequence: Synthetic oligonucleotide
  Antisense strand to SEQ ID NO: 765068
uuuaacaaggugcugcuuc

SEQ ID NO: 765070 - RNA, 19 nt, Artificial Sequence
  Description of Artificial Sequence: Synthetic oligonucleotide
  Sense strand starting at position 984 of SEQ ID NO: 587078
aaauccuugcaguaaguga

SEQ ID NO: 765071 - RNA, 19 nt, Artificial Sequence
  Description of Artificial Sequence: Synthetic oligonucleotide
  Antisense strand to SEQ ID NO: 765070
ucacuuacugcaaggauuu

SEQ ID NO: 765072 - RNA, 19 nt, Artificial Sequence
  Description of Artificial Sequence: Synthetic oligonucleotide
  Sense strand starting at position 1055 of SEQ ID NO: 587078
gaaggaucgcuagagcaca

SEQ ID NO: 765073 - RNA, 19 nt, Artificial Sequence
  Description of Artificial Sequence: Synthetic oligonucleotide
  Antisense strand to SEQ ID NO: 765072
ugugcucuagcgauccuuc

SEQ ID NO: 765074 - RNA, 19 nt, Artificial Sequence
  Description of Artificial Sequence: Synthetic oligonucleotide
  Sense strand starting at position 1186 of SEQ ID NO: 587078
cgcuauaaugguuaagacu

SEQ ID NO: 765075 - RNA, 19 nt, Artificial Sequence
  Description of Artificial Sequence: Synthetic oligonucleotide
  Antisense strand to SEQ ID NO: 765074
agucuuaaccauuauagcg

SEQ ID NO: 765076 - RNA, 19 nt, Artificial Sequence
  Description of Artificial Sequence: Synthetic oligonucleotide
  Sense strand starting at position 1362 of SEQ ID NO: 587078
agaggcauccaacgacuau

SEQ ID NO: 765077 - RNA, 19 nt, Artificial Sequence
  Description of Artificial Sequence: Synthetic oligonucleotide
  Antisense strand to SEQ ID NO: 765076
auagucguuggaugccucu

SEQ ID NO: 765078 - RNA, 19 nt, Artificial Sequence
  Description of Artificial Sequence: Synthetic oligonucleotide
  Sense strand starting at position 1366 of SEQ ID NO: 587078
gcauccaacgacuauuauu

SEQ ID NO: 765079 - RNA, 19 nt, Artificial Sequence
  Description of Artificial Sequence: Synthetic oligonucleotide
  Antisense strand to SEQ ID NO: 765078
aauaauagucguuggaugc

SEQ ID NO: 765080 - RNA, 19 nt, Artificial Sequence
  Description of Artificial Sequence: Synthetic oligonucleotide
  Sense strand starting at position 1422 of SEQ ID NO: 587078
ugucucgauucccugaaca

SEQ ID NO: 765081 - RNA, 19 nt, Artificial Sequence
  Description of Artificial Sequence: Synthetic oligonucleotide
  Antisense strand to SEQ ID NO: 765080
uguucagggaaucgagaca

SEQ ID NO: 765082 - RNA, 19 nt, Artificial Sequence
  Description of Artificial Sequence: Synthetic oligonucleotide
  Sense strand starting at position 1497 of SEQ ID NO: 587078
ccuagugcuagagagugaa

SEQ ID NO: 765083 - RNA, 19 nt, Artificial Sequence
  Description of Artificial Sequence: Synthetic oligonucleotide
  Antisense strand to SEQ ID NO: 765082
uucacucucuagcacuagg

SEQ ID NO: 765084 - RNA, 19 nt, Artificial Sequence
  Description of Artificial Sequence: Synthetic oligonucleotide
  Sense strand starting at position 1500 of SEQ ID NO: 587078
agugcuagagagugaauua

SEQ ID NO: 765085 - RNA, 19 nt, Artificial Sequence
  Description of Artificial Sequence: Synthetic oligonucleotide
  Antisense strand to SEQ ID NO: 765084
uaauucacucucuagcacu

SEQ ID NO: 765086 - RNA, 19 nt, Artificial Sequence
  Description of Artificial Sequence: Synthetic oligonucleotide
  Sense strand starting at position 1501 of SEQ ID NO: 587078
gugcuagagagugaauuag

SEQ ID NO: 765087 - RNA, 19 nt, Artificial Sequence
  Description of Artificial Sequence: Synthetic oligonucleotide
  Antisense strand to SEQ ID NO: 765086
cuaauucacucucuagcac

SEQ ID NO: 765088 - RNA, 19 nt, Artificial Sequence
  Description of Artificial Sequence: Synthetic oligonucleotide
  Sense strand starting at position 1507 of SEQ ID NO: 587078
gagagugaauuagugacuu

SEQ ID NO: 765089 - RNA, 19 nt, Artificial Sequence
  Description of Artificial Sequence: Synthetic oligonucleotide
  Antisense strand to SEQ ID NO: 765088
aagucacuaauucacucuc

SEQ ID NO: 765090 - RNA, 19 nt, Artificial Sequence
  Description of Artificial Sequence: Synthetic oligonucleotide
  Sense strand starting at position 1613 of SEQ ID NO: 587078
uugcaagacugcuuaaaga

SEQ ID NO: 765091 - RNA, 19 nt, Artificial Sequence
  Description of Artificial Sequence: Synthetic oligonucleotide
  Antisense strand to SEQ ID NO: 765090
ucuuuaagcagucuugcaa

SEQ ID NO: 765092 - RNA, 19 nt, Artificial Sequence
  Description of Artificial Sequence: Synthetic oligonucleotide
  Sense strand starting at position 1816 of SEQ ID NO: 587078
cccacugacccagguaaau

SEQ ID NO: 765093 - RNA, 19 nt, Artificial Sequence
  Description of Artificial Sequence: Synthetic oligonucleotide
  Antisense strand to SEQ ID NO: 765092
auuuaccugggucaguggg

SEQ ID NO: 765094 - RNA, 19 nt, Artificial Sequence
  Description of Artificial Sequence: Synthetic oligonucleotide
  Sense strand starting at position 2142 of SEQ ID NO: 587078
gguaacuucgcguuucugu

SEQ ID NO: 765095 - RNA, 19 nt, Artificial Sequence
  Description of Artificial Sequence: Synthetic oligonucleotide
  Antisense strand to SEQ ID NO: 765094
acagaaacgcgaaguuacc

SEQ ID NO: 765096 - RNA, 19 nt, Artificial Sequence
  Description of Artificial Sequence: Synthetic oligonucleotide
  Sense strand starting at position 2143 of SEQ ID NO: 587078
guaacuucgcguuucuguu

SEQ ID NO: 765097 - RNA, 19 nt, Artificial Sequence
  Description of Artificial Sequence: Synthetic oligonucleotide
  Antisense strand to SEQ ID NO: 765096
aacagaaacgcgaaguuac

SEQ ID NO: 765098 - RNA, 19 nt, Artificial Sequence
  Description of Artificial Sequence: Synthetic oligonucleotide
  Sense strand starting at position 2144 of SEQ ID NO: 587078
uaacuucgcguuucuguua

SEQ ID NO: 765099 - RNA, 19 nt, Artificial Sequence
  Description of Artificial Sequence: Synthetic oligonucleotide
  Antisense strand to SEQ ID NO: 765098
uaacagaaacgcgaaguua

SEQ ID NO: 765100 - RNA, 19 nt, Artificial Sequence
  Description of Artificial Sequence: Synthetic oligonucleotide
  Sense strand starting at position 2151 of SEQ ID NO: 587078
gcguuucuguuacccauuu

SEQ ID NO: 765101 - RNA, 19 nt, Artificial Sequence
  Description of Artificial Sequence: Synthetic oligonucleotide
  Antisense strand to SEQ ID NO: 765100
aaauggguaacagaaacgc

SEQ ID NO: 765102 - RNA, 19 nt, Artificial Sequence
  Description of Artificial Sequence: Synthetic oligonucleotide
  Sense strand starting at position 2193 of SEQ ID NO: 587078
cuuccuucucauggaagga

SEQ ID NO: 765103 - RNA, 19 nt, Artificial Sequence
  Description of Artificial Sequence: Synthetic oligonucleotide
  Antisense strand to SEQ ID NO: 765102
uccuuccaugagaaggaag

SEQ ID NO: 765104 - RNA, 19 nt, Artificial Sequence
  Description of Artificial Sequence: Synthetic oligonucleotide
  Sense strand starting at position 2501 of SEQ ID NO: 587078
gagacuaaauaggaaauga

SEQ ID NO: 765105 - RNA, 19 nt, Artificial Sequence
  Description of Artificial Sequence: Synthetic oligonucleotide
  Antisense strand to SEQ ID NO: 765104
ucauuuccuauuuagucuc

SEQ ID NO: 765106 - RNA, 19 nt, Artificial Sequence
  Description of Artificial Sequence: Synthetic oligonucleotide
  Sense strand starting at position 2539 of SEQ ID NO: 587078
ugcccucauugguuuagaa

SEQ ID NO: 765107 - RNA, 19 nt, Artificial Sequence
  Description of Artificial Sequence: Synthetic oligonucleotide
  Antisense strand to SEQ ID NO: 765106
uucuaaaccaaugagggca

SEQ ID NO: 765108 - RNA, 19 nt, Artificial Sequence
  Description of Artificial Sequence: Synthetic oligonucleotide
  Sense strand starting at position 2541 of SEQ ID NO: 587078
cccucauugguuuagaaug

SEQ ID NO: 765109 - RNA, 19 nt, Artificial Sequence
  Description of Artificial Sequence: Synthetic oligonucleotide
  Antisense strand to SEQ ID NO: 765108
cauucuaaaccaaugaggg

SEQ ID NO: 765110 - RNA, 19 nt, Artificial Sequence
  Description of Artificial Sequence: Synthetic oligonucleotide
  Sense strand starting at position 2662 of SEQ ID NO: 587078
cugggaacuggccauugau

SEQ ID NO: 765111 - RNA, 19 nt, Artificial Sequence
  Description of Artificial Sequence: Synthetic oligonucleotide
  Antisense strand to SEQ ID NO: 765110
aucaauggccaguucccag

SEQ ID NO: 765112 - RNA, 19 nt, Artificial Sequence
  Description of Artificial Sequence: Synthetic oligonucleotide
  Sense strand starting at position 2736 of SEQ ID NO: 587078
ugcugucguauuugagauu

SEQ ID NO: 765113 - RNA, 19 nt, Artificial Sequence
  Description of Artificial Sequence: Synthetic oligonucleotide
  Antisense strand to SEQ ID NO: 765112
aaucucaaauacgacagca

SEQ ID NO: 765114 - RNA, 19 nt, Artificial Sequence
  Description of Artificial Sequence: Synthetic oligonucleotide
  Sense strand starting at position 2739 of SEQ ID NO: 587078
ugucguauuugagauuuga

SEQ ID NO: 765115 - RNA, 19 nt, Artificial Sequence
  Description of Artificial Sequence: Synthetic oligonucleotide
  Antisense strand to SEQ ID NO: 765114
ucaaaucucaaauacgaca

SEQ ID NO: 765116 - RNA, 19 nt, Artificial Sequence
  Description of Artificial Sequence: Synthetic oligonucleotide
  Sense strand starting at position 2795 of SEQ ID NO: 587078
guaagacauuucuaagacu

SEQ ID NO: 765117 - RNA, 19 nt, Artificial Sequence
  Description of Artificial Sequence: Synthetic oligonucleotide
  Antisense strand to SEQ ID NO: 765116
agucuuagaaaugucuuac

SEQ ID NO: 765118 - RNA, 19 nt, Artificial Sequence
  Description of Artificial Sequence: Synthetic oligonucleotide
  Sense strand starting at position 2798 of SEQ ID NO: 587078
agacauuucuaagacuuug

SEQ ID NO: 765119 - RNA, 19 nt, Artificial Sequence
  Description of Artificial Sequence: Synthetic oligonucleotide
  Antisense strand to SEQ ID NO: 765118
caaagucuuagaaaugucu

SEQ ID NO: 765120 - RNA, 19 nt, Artificial Sequence
  Description of Artificial Sequence: Synthetic oligonucleotide
  Sense strand starting at position 3135 of SEQ ID NO: 587078
aucaguaucccauagcauu

SEQ ID NO: 765121 - RNA, 19 nt, Artificial Sequence
  Description of Artificial Sequence: Synthetic oligonucleotide
  Antisense strand to SEQ ID NO: 765120
aaugcuaugggauacugau

SEQ ID NO: 765122 - RNA, 19 nt, Artificial Sequence
  Description of Artificial Sequence: Synthetic oligonucleotide
  Sense strand starting at position 3422 of SEQ ID NO: 587078
gucagaaucuuaguuccug

SEQ ID NO: 765123 - RNA, 19 nt, Artificial Sequence
  Description of Artificial Sequence: Synthetic oligonucleotide
  Antisense strand to SEQ ID NO: 765122
caggaacuaagauucugac

SEQ ID NO: 765124 - RNA, 19 nt, Artificial Sequence
  Description of Artificial Sequence: Synthetic oligonucleotide
  Sense strand starting at position 3426 of SEQ ID NO: 587078
gaaucuuaguuccuggguu

SEQ ID NO: 765125 - RNA, 19 nt, Artificial Sequence
  Description of Artificial Sequence: Synthetic oligonucleotide
  Antisense strand to SEQ ID NO: 765124
aacccaggaacuaagauuc

SEQ ID NO: 765126 - RNA, 19 nt, Artificial Sequence
  Description of Artificial Sequence: Synthetic oligonucleotide
  Sense strand starting at position 3538 of SEQ ID NO: 587078
uaggcuuuacaauagaguu

SEQ ID NO: 765127 - RNA, 19 nt, Artificial Sequence
  Description of Artificial Sequence: Synthetic oligonucleotide
  Antisense strand to SEQ ID NO: 765126
aacucuauuguaaagccua

SEQ ID NO: 765128 - RNA, 19 nt, Artificial Sequence
  Description of Artificial Sequence: Synthetic oligonucleotide
  Sense strand starting at position 3647 of SEQ ID NO: 587078
ucuguuagccuguauacca

SEQ ID NO: 765129 - RNA, 19 nt, Artificial Sequence
  Description of Artificial Sequence: Synthetic oligonucleotide
  Antisense strand to SEQ ID NO: 765128
ugguauacaggcuaacaga

SEQ ID NO: 765130 - RNA, 19 nt, Artificial Sequence
  Description of Artificial Sequence: Synthetic oligonucleotide
  Sense strand starting at position 3740 of SEQ ID NO: 587078
uuugguggagcucagauaa

SEQ ID NO: 765131 - RNA, 19 nt, Artificial Sequence
  Description of Artificial Sequence: Synthetic oligonucleotide
  Antisense strand to SEQ ID NO: 765130
uuaucugagcuccaccaaa

SEQ ID NO: 765132 - RNA, 19 nt, Artificial Sequence
  Description of Artificial Sequence: Synthetic oligonucleotide
  Sense strand starting at position 3796 of SEQ ID NO: 587078
ccaacugugugaucuuuga

SEQ ID NO: 765133 - RNA, 19 nt, Artificial Sequence
  Description of Artificial Sequence: Synthetic oligonucleotide
  Antisense strand to SEQ ID NO: 765132
ucaaagaucacacaguugg

SEQ ID NO: 765134 - RNA, 19 nt, Artificial Sequence
  Description of Artificial Sequence: Synthetic oligonucleotide
  Sense strand starting at position 3800 of SEQ ID NO: 587078
cugugugaucuuugaucaa

SEQ ID NO: 765135 - RNA, 19 nt, Artificial Sequence
  Description of Artificial Sequence: Synthetic oligonucleotide
  Antisense strand to SEQ ID NO: 765134
uugaucaaagaucacacag

SEQ ID NO: 765136 - RNA, 19 nt, Artificial Sequence
  Description of Artificial Sequence: Synthetic oligonucleotide
  Sense strand starting at position 3803 of SEQ ID NO: 587078
ugugaucuuugaucaauua

SEQ ID NO: 765137 - RNA, 19 nt, Artificial Sequence
  Description of Artificial Sequence: Synthetic oligonucleotide
  Antisense strand to SEQ ID NO: 765136
uaauugaucaaagaucaca

SEQ ID NO: 765138 - RNA, 19 nt, Artificial Sequence
  Description of Artificial Sequence: Synthetic oligonucleotide
  Sense strand starting at position 3804 of SEQ ID NO: 587078
gugaucuuugaucaauuau

SEQ ID NO: 765139 - RNA, 19 nt, Artificial Sequence
  Description of Artificial Sequence: Synthetic oligonucleotide
  Antisense strand to SEQ ID NO: 765138
auaauugaucaaagaucac

SEQ ID NO: 765140 - RNA, 19 nt, Artificial Sequence
  Description of Artificial Sequence: Synthetic oligonucleotide
  Sense strand starting at position 3971 of SEQ ID NO: 587078
gggauuuguuuagggaaag

SEQ ID NO: 765141 - RNA, 19 nt, Artificial Sequence
  Description of Artificial Sequence: Synthetic oligonucleotide
  Antisense strand to SEQ ID NO: 765140
cuuucccuaaacaaauccc

SEQ ID NO: 765142 - RNA, 19 nt, Artificial Sequence
  Description of Artificial Sequence: Synthetic oligonucleotide
  Sense strand starting at position 3972 of SEQ ID NO: 587078
ggauuuguuuagggaaagg

SEQ ID NO: 765143 - RNA, 19 nt, Artificial Sequence
  Description of Artificial Sequence: Synthetic oligonucleotide
  Antisense strand to SEQ ID NO: 765142
ccuuucccuaaacaaaucc

SEQ ID NO: 765144 - RNA, 19 nt, Artificial Sequence
  Description of Artificial Sequence: Synthetic oligonucleotide
  Sense strand starting at position 72 of SEQ ID NO: 587079
cuagcuacuccagaaguua

SEQ ID NO: 765145 - RNA, 19 nt, Artificial Sequence
  Description of Artificial Sequence: Synthetic oligonucleotide
  Antisense strand to SEQ ID NO: 765144
uaacuucuggaguagcuag

SEQ ID NO: 765146 - RNA, 19 nt, Artificial Sequence
  Description of Artificial Sequence: Synthetic oligonucleotide
  Sense strand starting at position 207 of SEQ ID NO: 587079
ggaguaaggagucaauguc

SEQ ID NO: 765147 - RNA, 19 nt, Artificial Sequence
  Description of Artificial Sequence: Synthetic oligonucleotide
  Antisense strand to SEQ ID NO: 765146
gacauugacuccuuacucc

SEQ ID NO: 765148 - RNA, 19 nt, Artificial Sequence
  Description of Artificial Sequence: Synthetic oligonucleotide
  Sense strand starting at position 410 of SEQ ID NO: 587079
aucacacaguagucaauua

SEQ ID NO: 765149 - RNA, 19 nt, Artificial Sequence
  Description of Artificial Sequence: Synthetic oligonucleotide
  Antisense strand to SEQ ID NO: 765148
uaauugacuacugugugau

SEQ ID NO: 765150 - RNA, 19 nt, Artificial Sequence
  Description of Artificial Sequence: Synthetic oligonucleotide
  Sense strand starting at position 417 of SEQ ID NO: 587079
aguagucaauuauuacaca

SEQ ID NO: 765151 - RNA, 19 nt, Artificial Sequence
  Description of Artificial Sequence: Synthetic oligonucleotide
  Antisense strand to SEQ ID NO: 765150
uguguaauaauugacuacu

SEQ ID NO: 765152 - RNA, 19 nt, Artificial Sequence
  Description of Artificial Sequence: Synthetic oligonucleotide
  Sense strand starting at position 475 of SEQ ID NO: 587079
uccaucuauuuccauguga

SEQ ID NO: 765153 - RNA, 19 nt, Artificial Sequence
  Description of Artificial Sequence: Synthetic oligonucleotide
  Antisense strand to SEQ ID NO: 765152
ucacauggaaauagaugga

SEQ ID NO: 765154 - RNA, 19 nt, Artificial Sequence
  Description of Artificial Sequence: Synthetic oligonucleotide
  Sense strand starting at position 488 of SEQ ID NO: 587079
augugaaguaccugaaugu

SEQ ID NO: 765155 - RNA, 19 nt, Artificial Sequence
  Description of Artificial Sequence: Synthetic oligonucleotide
  Antisense strand to SEQ ID NO: 765154
acauucagguacuucacau

SEQ ID NO: 765156 - RNA, 19 nt, Artificial Sequence
  Description of Artificial Sequence: Synthetic oligonucleotide
  Sense strand starting at position 492 of SEQ ID NO: 587079
gaaguaccugaaugucuua

SEQ ID NO: 765157 - RNA, 19 nt, Artificial Sequence
  Description of Artificial Sequence: Synthetic oligonucleotide
  Antisense strand to SEQ ID NO: 765156
uaagacauucagguacuuc

SEQ ID NO: 765158 - RNA, 19 nt, Artificial Sequence
  Description of Artificial Sequence: Synthetic oligonucleotide
  Sense strand starting at position 523 of SEQ ID NO: 587079
uuucucuuuccugugcgau

SEQ ID NO: 765159 - RNA, 19 nt, Artificial Sequence
  Description of Artificial Sequence: Synthetic oligonucleotide
  Antisense strand to SEQ ID NO: 765158
aucgcacaggaaagagaaa

SEQ ID NO: 765160 - RNA, 19 nt, Artificial Sequence
  Description of Artificial Sequence: Synthetic oligonucleotide
  Sense strand starting at position 535 of SEQ ID NO: 587079
gugcgaugccuugucuuac

SEQ ID NO: 765161 - RNA, 19 nt, Artificial Sequence
  Description of Artificial Sequence: Synthetic oligonucleotide
  Antisense strand to SEQ ID NO: 765160
guaagacaaggcaucgcac

SEQ ID NO: 765162 - RNA, 19 nt, Artificial Sequence
  Description of Artificial Sequence: Synthetic oligonucleotide
  Sense strand starting at position 626 of SEQ ID NO: 587079
aauuauguguucgucugaa

SEQ ID NO: 765163 - RNA, 19 nt, Artificial Sequence
  Description of Artificial Sequence: Synthetic oligonucleotide
  Antisense strand to SEQ ID NO: 765162
uucagacgaacacauaauu

SEQ ID NO: 765164 - RNA, 19 nt, Artificial Sequence
  Description of Artificial Sequence: Synthetic oligonucleotide
  Sense strand starting at position 783 of SEQ ID NO: 587079
agauaaauaucugagcaag

SEQ ID NO: 765165 - RNA, 19 nt, Artificial Sequence
  Description of Artificial Sequence: Synthetic oligonucleotide
  Antisense strand to SEQ ID NO: 765164
cuugcucagauauuuaucu

SEQ ID NO: 765166 - RNA, 19 nt, Artificial Sequence
  Description of Artificial Sequence: Synthetic oligonucleotide
  Sense strand starting at position 785 of SEQ ID NO: 587079
auaaauaucugagcaaguc

SEQ ID NO: 765167 - RNA, 19 nt, Artificial Sequence
  Description of Artificial Sequence: Synthetic oligonucleotide
  Antisense strand to SEQ ID NO: 765166
gacuugcucagauauuuau

SEQ ID NO: 765168 - RNA, 19 nt, Artificial Sequence
  Description of Artificial Sequence: Synthetic oligonucleotide
  Sense strand starting at position 923 of SEQ ID NO: 587079
uuuggaaaguagucacuuu

SEQ ID NO: 765169 - RNA, 19 nt, Artificial Sequence
  Description of Artificial Sequence: Synthetic oligonucleotide
  Antisense strand to SEQ ID NO: 765168
aaagugacuacuuuccaaa

SEQ ID NO: 765170 - RNA, 19 nt, Artificial Sequence
  Description of Artificial Sequence: Synthetic oligonucleotide
  Sense strand starting at position 1190 of SEQ ID NO: 587079
cgcuauguuccagauuugu

SEQ ID NO: 765171 - RNA, 19 nt, Artificial Sequence
  Description of Artificial Sequence: Synthetic oligonucleotide
  Antisense strand to SEQ ID NO: 765170
acaaaucuggaacauagcg

SEQ ID NO: 765172 - RNA, 19 nt, Artificial Sequence
  Description of Artificial Sequence: Synthetic oligonucleotide
  Sense strand starting at position 1306 of SEQ ID NO: 587079
acugauacguaagcucauu

SEQ ID NO: 765173 - RNA, 19 nt, Artificial Sequence
  Description of Artificial Sequence: Synthetic oligonucleotide
  Antisense strand to SEQ ID NO: 765172
aaugagcuuacguaucagu

SEQ ID NO: 765174 - RNA, 19 nt, Artificial Sequence
  Description of Artificial Sequence: Synthetic oligonucleotide
  Sense strand starting at position 1369 of SEQ ID NO: 587079
gcgguacagagcuaggaaa

SEQ ID NO: 765175 - RNA, 19 nt, Artificial Sequence
  Description of Artificial Sequence: Synthetic oligonucleotide
  Antisense strand to SEQ ID NO: 765174
uuuccuagcucuguaccgc

SEQ ID NO: 765176 - RNA, 19 nt, Artificial Sequence
  Description of Artificial Sequence: Synthetic oligonucleotide
  Sense strand starting at position 1478 of SEQ ID NO: 587079
acacuaaaccguggaaaga

SEQ ID NO: 765177 - RNA, 19 nt, Artificial Sequence
  Description of Artificial Sequence: Synthetic oligonucleotide
  Antisense strand to SEQ ID NO: 765176
ucuuuccacgguuuagugu

SEQ ID NO: 765178 - RNA, 19 nt, Artificial Sequence
  Description of Artificial Sequence: Synthetic oligonucleotide
  Sense strand starting at position 1537 of SEQ ID NO: 587079
aggcaugcuccauaacgga

SEQ ID NO: 765179 - RNA, 19 nt, Artificial Sequence
  Description of Artificial Sequence: Synthetic oligonucleotide
  Antisense strand to SEQ ID NO: 765178
uccguuauggagcaugccu

SEQ ID NO: 765180 - RNA, 19 nt, Artificial Sequence
  Description of Artificial Sequence: Synthetic oligonucleotide
  Sense strand starting at position 1555 of SEQ ID NO: 587079
auuauuggccucugcauua

SEQ ID NO: 765181 - RNA, 19 nt, Artificial Sequence
  Description of Artificial Sequence: Synthetic oligonucleotide
  Antisense strand to SEQ ID NO: 765180
uaaugcagaggccaauaau

SEQ ID NO: 765182 - RNA, 19 nt, Artificial Sequence
  Description of Artificial Sequence: Synthetic oligonucleotide
  Sense strand starting at position 2656 of SEQ ID NO: 587079
agggaacacuccguuaaga

SEQ ID NO: 765183 - RNA, 19 nt, Artificial Sequence
  Description of Artificial Sequence: Synthetic oligonucleotide
  Antisense strand to SEQ ID NO: 765182
ucuuaacggaguguucccu

SEQ ID NO: 765184 - RNA, 19 nt, Artificial Sequence
  Description of Artificial Sequence: Synthetic oligonucleotide
  Sense strand starting at position 2681 of SEQ ID NO: 587079
cuuacuuugcuuuguggaa

SEQ ID NO: 765185 - RNA, 19 nt, Artificial Sequence
  Description of Artificial Sequence: Synthetic oligonucleotide
  Antisense strand to SEQ ID NO: 765184
uuccacaaagcaaaguaag

SEQ ID NO: 765186 - RNA, 19 nt, Artificial Sequence
  Description of Artificial Sequence: Synthetic oligonucleotide
  Sense strand starting at position 2682 of SEQ ID NO: 587079
uuacuuugcuuuguggaaa

SEQ ID NO: 765187 - RNA, 19 nt, Artificial Sequence
  Description of Artificial Sequence: Synthetic oligonucleotide
  Antisense strand to SEQ ID NO: 765186
uuuccacaaagcaaaguaa

SEQ ID NO: 765188 - RNA, 19 nt, Artificial Sequence
  Description of Artificial Sequence: Synthetic oligonucleotide
  Sense strand starting at position 2778 of SEQ ID NO: 587079
ccaauagugagcgaaccua

SEQ ID NO: 765189 - RNA, 19 nt, Artificial Sequence
  Description of Artificial Sequence: Synthetic oligonucleotide
  Antisense strand to SEQ ID NO: 765188
uagguucgcucacuauugg

SEQ ID NO: 765190 - RNA, 19 nt, Artificial Sequence
  Description of Artificial Sequence: Synthetic oligonucleotide
  Sense strand starting at position 2944 of SEQ ID NO: 587079
cggguuuagcuacaacaaa

SEQ ID NO: 765191 - RNA, 19 nt, Artificial Sequence
  Description of Artificial Sequence: Synthetic oligonucleotide
  Antisense strand to SEQ ID NO: 765190
uuuguuguagcuaaacccg

SEQ ID NO: 765192 - RNA, 19 nt, Artificial Sequence
  Description of Artificial Sequence: Synthetic oligonucleotide
  Sense strand starting at position 3021 of SEQ ID NO: 587079
aggaaacuaucugcacaug

SEQ ID NO: 765193 - RNA, 19 nt, Artificial Sequence
  Description of Artificial Sequence: Synthetic oligonucleotide
  Antisense strand to SEQ ID NO: 765192
caugugcagauaguuuccu

SEQ ID NO: 765194 - RNA, 19 nt, Artificial Sequence
  Description of Artificial Sequence: Synthetic oligonucleotide
  Sense strand starting at position 3022 of SEQ ID NO: 587079
ggaaacuaucugcacaugu

SEQ ID NO: 765195 - RNA, 19 nt, Artificial Sequence
  Description of Artificial Sequence: Synthetic oligonucleotide
  Antisense strand to SEQ ID NO: 765194
acaugugcagauaguuucc

SEQ ID NO: 765196 - RNA, 19 nt, Artificial Sequence
  Description of Artificial Sequence: Synthetic oligonucleotide
  Sense strand starting at position 3057 of SEQ ID NO: 587079
ccauguguuuauccuauga

SEQ ID NO: 765197 - RNA, 19 nt, Artificial Sequence
  Description of Artificial Sequence: Synthetic oligonucleotide
  Antisense strand to SEQ ID NO: 765196
ucauaggauaaacacaugg

SEQ ID NO: 765198 - RNA, 19 nt, Artificial Sequence
  Description of Artificial Sequence: Synthetic oligonucleotide
  Sense strand starting at position 3061 of SEQ ID NO: 587079
guguuuauccuaugaagag

SEQ ID NO: 765199 - RNA, 19 nt, Artificial Sequence
  Description of Artificial Sequence: Synthetic oligonucleotide
  Antisense strand to SEQ ID NO: 765198
cucuucauaggauaaacac

SEQ ID NO: 765200 - RNA, 19 nt, Artificial Sequence
  Description of Artificial Sequence: Synthetic oligonucleotide
  Sense strand starting at position 3292 of SEQ ID NO: 587079
uggcuuaugcccuauguaa

SEQ ID NO: 765201 - RNA, 19 nt, Artificial Sequence
  Description of Artificial Sequence: Synthetic oligonucleotide
  Antisense strand to SEQ ID NO: 765200
uuacauagggcauaagcca

SEQ ID NO: 765202 - RNA, 19 nt, Artificial Sequence
  Description of Artificial Sequence: Synthetic oligonucleotide
  Sense strand starting at position 3347 of SEQ ID NO: 587079
ggauauaagcccuguguaa

SEQ ID NO: 765203 - RNA, 19 nt, Artificial Sequence
  Description of Artificial Sequence: Synthetic oligonucleotide
  Antisense strand to SEQ ID NO: 765202
uuacacagggcuuauaucc

SEQ ID NO: 765204 - RNA, 19 nt, Artificial Sequence
  Description of Artificial Sequence: Synthetic oligonucleotide
  Sense strand starting at position 3349 of SEQ ID NO: 587079
auauaagcccuguguaaau

SEQ ID NO: 765205 - RNA, 19 nt, Artificial Sequence
  Description of Artificial Sequence: Synthetic oligonucleotide
  Antisense strand to SEQ ID NO: 765204
auuuacacagggcuuauau

SEQ ID NO: 765206 - RNA, 19 nt, Artificial Sequence
  Description of Artificial Sequence: Synthetic oligonucleotide
  Sense strand starting at position 3426 of SEQ ID NO: 587079
cagcaugaaucggccuuaa

SEQ ID NO: 765207 - RNA, 19 nt, Artificial Sequence
  Description of Artificial Sequence: Synthetic oligonucleotide
  Antisense strand to SEQ ID NO: 765206
uuaaggccgauucaugcug

SEQ ID NO: 765208 - RNA, 19 nt, Artificial Sequence
  Description of Artificial Sequence: Synthetic oligonucleotide
  Sense strand starting at position 3430 of SEQ ID NO: 587079
augaaucggccuuaacauu

SEQ ID NO: 765209 - RNA, 19 nt, Artificial Sequence
  Description of Artificial Sequence: Synthetic oligonucleotide
  Antisense strand to SEQ ID NO: 765208
aauguuaaggccgauucau

SEQ ID NO: 765210 - RNA, 19 nt, Artificial Sequence
  Description of Artificial Sequence: Synthetic oligonucleotide
  Sense strand starting at position 3480 of SEQ ID NO: 587079
cuacauguccauuaguaaa

SEQ ID NO: 765211 - RNA, 19 nt, Artificial Sequence
  Description of Artificial Sequence: Synthetic oligonucleotide
  Antisense strand to SEQ ID NO: 765210
uuuacuaauggacauguag

SEQ ID NO: 765212 - RNA, 19 nt, Artificial Sequence
  Description of Artificial Sequence: Synthetic oligonucleotide
  Sense strand starting at position 3548 of SEQ ID NO: 587079
uauagaagguagucaaaug

SEQ ID NO: 765213 - RNA, 19 nt, Artificial Sequence
  Description of Artificial Sequence: Synthetic oligonucleotide
  Antisense strand to SEQ ID NO: 765212
cauuugacuaccuucuaua

SEQ ID NO: 765214 - RNA, 19 nt, Artificial Sequence
  Description of Artificial Sequence: Synthetic oligonucleotide
  Sense strand starting at position 3677 of SEQ ID NO: 587079
uuauguuccagucaguguu

SEQ ID NO: 765215 - RNA, 19 nt, Artificial Sequence
  Description of Artificial Sequence: Synthetic oligonucleotide
  Antisense strand to SEQ ID NO: 765214
aacacugacuggaacauaa

SEQ ID NO: 765216 - RNA, 19 nt, Artificial Sequence
  Description of Artificial Sequence: Synthetic oligonucleotide
  Sense strand starting at position 3789 of SEQ ID NO: 587079
agcacaguuuacuuguuaa

SEQ ID NO: 765217 - RNA, 19 nt, Artificial Sequence
  Description of Artificial Sequence: Synthetic oligonucleotide
  Antisense strand to SEQ ID NO: 765216
uuaacaaguaaacugugcu

SEQ ID NO: 765218 - RNA, 19 nt, Artificial Sequence
  Description of Artificial Sequence: Synthetic oligonucleotide
  Sense strand starting at position 3792 of SEQ ID NO: 587079
acaguuuacuuguuaauga

SEQ ID NO: 765219 - RNA, 19 nt, Artificial Sequence
  Description of Artificial Sequence: Synthetic oligonucleotide
  Antisense strand to SEQ ID NO: 765218
ucauuaacaaguaaacugu

SEQ ID NO: 765220 - RNA, 19 nt, Artificial Sequence
  Description of Artificial Sequence: Synthetic oligonucleotide
  Sense strand starting at position 3892 of SEQ ID NO: 587079
cagugugucucaccaagau

SEQ ID NO: 765221 - RNA, 19 nt, Artificial Sequence
  Description of Artificial Sequence: Synthetic oligonucleotide
  Antisense strand to SEQ ID NO: 765220
aucuuggugagacacacug

SEQ ID NO: 765222 - RNA, 19 nt, Artificial Sequence
  Description of Artificial Sequence: Synthetic oligonucleotide
  Sense strand starting at position 3896 of SEQ ID NO: 587079
gugucucaccaagauaagu

SEQ ID NO: 765223 - RNA, 19 nt, Artificial Sequence
  Description of Artificial Sequence: Synthetic oligonucleotide
  Antisense strand to SEQ ID NO: 765222
acuuaucuuggugagacac

SEQ ID NO: 765224 - RNA, 19 nt, Artificial Sequence
  Description of Artificial Sequence: Synthetic oligonucleotide
  Sense strand starting at position 71 of SEQ ID NO: 587080
gguuaagucaaaggaucuc

SEQ ID NO: 765225 - RNA, 19 nt, Artificial Sequence
  Description of Artificial Sequence: Synthetic oligonucleotide
  Antisense strand to SEQ ID NO: 765224
gagauccuuugacuuaacc

SEQ ID NO: 765226 - RNA, 19 nt, Artificial Sequence
  Description of Artificial Sequence: Synthetic oligonucleotide
  Sense strand starting at position 77 of SEQ ID NO: 587080
gucaaaggaucuccaggau

SEQ ID NO: 765227 - RNA, 19 nt, Artificial Sequence
  Description of Artificial Sequence: Synthetic oligonucleotide
  Antisense strand to SEQ ID NO: 765226
auccuggagauccuuugac

SEQ ID NO: 765228 - RNA, 19 nt, Artificial Sequence
  Description of Artificial Sequence: Synthetic oligonucleotide
  Sense strand starting at position 116 of SEQ ID NO: 587080
cccagcaguuuaguuauau

SEQ ID NO: 765229 - RNA, 19 nt, Artificial Sequence
  Description of Artificial Sequence: Synthetic oligonucleotide
  Antisense strand to SEQ ID NO: 765228
auauaacuaaacugcuggg

SEQ ID NO: 765230 - RNA, 19 nt, Artificial Sequence
  Description of Artificial Sequence: Synthetic oligonucleotide
  Sense strand starting at position 117 of SEQ ID NO: 587080
ccagcaguuuaguuauaug

SEQ ID NO: 765231 - RNA, 19 nt, Artificial Sequence
  Description of Artificial Sequence: Synthetic oligonucleotide
  Antisense strand to SEQ ID NO: 765230
cauauaacuaaacugcugg

SEQ ID NO: 765232 - RNA, 19 nt, Artificial Sequence
  Description of Artificial Sequence: Synthetic oligonucleotide
  Sense strand starting at position 179 of SEQ ID NO: 587080
gacugauucguccaggcuu

SEQ ID NO: 765233 - RNA, 19 nt, Artificial Sequence
  Description of Artificial Sequence: Synthetic oligonucleotide
  Antisense strand to SEQ ID NO: 765232
aagccuggacgaaucaguc

SEQ ID NO: 765234 - RNA, 19 nt, Artificial Sequence
  Description of Artificial Sequence: Synthetic oligonucleotide
  Sense strand starting at position 181 of SEQ ID NO: 587080
cugauucguccaggcuuga

SEQ ID NO: 765235 - RNA, 19 nt, Artificial Sequence
  Description of Artificial Sequence: Synthetic oligonucleotide
  Antisense strand to SEQ ID NO: 765234
ucaagccuggacgaaucag

SEQ ID NO: 765236 - RNA, 19 nt, Artificial Sequence
  Description of Artificial Sequence: Synthetic oligonucleotide
  Sense strand starting at position 299 of SEQ ID NO: 587080
cucgcuauuuccuccaaga

SEQ ID NO: 765237 - RNA, 19 nt, Artificial Sequence
  Description of Artificial Sequence: Synthetic oligonucleotide
  Antisense strand to SEQ ID NO: 765236
ucuuggaggaaauagcgag

SEQ ID NO: 765238 - RNA, 19 nt, Artificial Sequence
  Description of Artificial Sequence: Synthetic oligonucleotide
  Sense strand starting at position 348 of SEQ ID NO: 587080
guggauaauuccucucuca

SEQ ID NO: 765239 - RNA, 19 nt, Artificial Sequence
  Description of Artificial Sequence: Synthetic oligonucleotide
  Antisense strand to SEQ ID NO: 765238
ugagagaggaauuauccac

SEQ ID NO: 765240 - RNA, 19 nt, Artificial Sequence
  Description of Artificial Sequence: Synthetic oligonucleotide
  Sense strand starting at position 359 of SEQ ID NO: 587080
cucucucacucuuagagga

SEQ ID NO: 765241 - RNA, 19 nt, Artificial Sequence
  Description of Artificial Sequence: Synthetic oligonucleotide
  Antisense strand to SEQ ID NO: 765240
uccucuaagagugagagag

SEQ ID NO: 765242 - RNA, 19 nt, Artificial Sequence
  Description of Artificial Sequence: Synthetic oligonucleotide
  Sense strand starting at position 361 of SEQ ID NO: 587080
cucucacucuuagaggacu

SEQ ID NO: 765243 - RNA, 19 nt, Artificial Sequence
  Description of Artificial Sequence: Synthetic oligonucleotide
  Antisense strand to SEQ ID NO: 765242
aguccucuaagagugagag

SEQ ID NO: 765244 - RNA, 19 nt, Artificial Sequence
  Description of Artificial Sequence: Synthetic oligonucleotide
  Sense strand starting at position 398 of SEQ ID NO: 587080
uaagcauauuuggucugua

SEQ ID NO: 765245 - RNA, 19 nt, Artificial Sequence
  Description of Artificial Sequence: Synthetic oligonucleotide
  Antisense strand to SEQ ID NO: 765244
uacagaccaaauaugcuua

SEQ ID NO: 765246 - RNA, 19 nt, Artificial Sequence
  Description of Artificial Sequence: Synthetic oligonucleotide
  Sense strand starting at position 401 of SEQ ID NO: 587080
gcauauuuggucuguacag

SEQ ID NO: 765247 - RNA, 19 nt, Artificial Sequence
  Description of Artificial Sequence: Synthetic oligonucleotide
  Antisense strand to SEQ ID NO: 765246
cuguacagaccaaauaugc

SEQ ID NO: 765248 - RNA, 19 nt, Artificial Sequence
  Description of Artificial Sequence: Synthetic oligonucleotide
  Sense strand starting at position 518 of SEQ ID NO: 587080
guaccacauugcuuauaua

SEQ ID NO: 765249 - RNA, 19 nt, Artificial Sequence
  Description of Artificial Sequence: Synthetic oligonucleotide
  Antisense strand to SEQ ID NO: 765248
uauauaagcaaugugguac

SEQ ID NO: 765250 - RNA, 19 nt, Artificial Sequence
  Description of Artificial Sequence: Synthetic oligonucleotide
  Sense strand starting at position 542 of SEQ ID NO: 587080
ccacuuuagcugggaggua

SEQ ID NO: 765251 - RNA, 19 nt, Artificial Sequence
  Description of Artificial Sequence: Synthetic oligonucleotide
  Antisense strand to SEQ ID NO: 765250
uaccucccagcuaaagugg

SEQ ID NO: 765252 - RNA, 19 nt, Artificial Sequence
  Description of Artificial Sequence: Synthetic oligonucleotide
  Sense strand starting at position 627 of SEQ ID NO: 587080
gaguaauuacaccgcaaag

SEQ ID NO: 765253 - RNA, 19 nt, Artificial Sequence
  Description of Artificial Sequence: Synthetic oligonucleotide
  Antisense strand to SEQ ID NO: 765252
cuuugcgguguaauuacuc

SEQ ID NO: 765254 - RNA, 19 nt, Artificial Sequence
  Description of Artificial Sequence: Synthetic oligonucleotide
  Sense strand starting at position 651 of SEQ ID NO: 587080
ugacuagcagccuaagaau

SEQ ID NO: 765255 - RNA, 19 nt, Artificial Sequence
  Description of Artificial Sequence: Synthetic oligonucleotide
  Antisense strand to SEQ ID NO: 765254
auucuuaggcugcuaguca

SEQ ID NO: 765256 - RNA, 19 nt, Artificial Sequence
  Description of Artificial Sequence: Synthetic oligonucleotide
  Sense strand starting at position 714 of SEQ ID NO: 587080
gcagaauuguuucuucuua

SEQ ID NO: 765257 - RNA, 19 nt, Artificial Sequence
  Description of Artificial Sequence: Synthetic oligonucleotide
  Antisense strand to SEQ ID NO: 765256
uaagaagaaacaauucugc

SEQ ID NO: 765258 - RNA, 19 nt, Artificial Sequence
  Description of Artificial Sequence: Synthetic oligonucleotide
  Sense strand starting at position 726 of SEQ ID NO: 587080
cuucuuaaugaaugcagua

SEQ ID NO: 765259 - RNA, 19 nt, Artificial Sequence
  Description of Artificial Sequence: Synthetic oligonucleotide
  Antisense strand to SEQ ID NO: 765258
uacugcauucauuaagaag

SEQ ID NO: 765260 - RNA, 19 nt, Artificial Sequence
  Description of Artificial Sequence: Synthetic oligonucleotide
  Sense strand starting at position 815 of SEQ ID NO: 587080
gagucaaaucccuguggac

SEQ ID NO: 765261 - RNA, 19 nt, Artificial Sequence
  Description of Artificial Sequence: Synthetic oligonucleotide
  Antisense strand to SEQ ID NO: 765260
guccacagggauuugacuc

SEQ ID NO: 765262 - RNA, 19 nt, Artificial Sequence
  Description of Artificial Sequence: Synthetic oligonucleotide
  Sense strand starting at position 817 of SEQ ID NO: 587080
gucaaaucccuguggacac

SEQ ID NO: 765263 - RNA, 19 nt, Artificial Sequence
  Description of Artificial Sequence: Synthetic oligonucleotide
  Antisense strand to SEQ ID NO: 765262
guguccacagggauuugac

SEQ ID NO: 765264 - RNA, 19 nt, Artificial Sequence
  Description of Artificial Sequence: Synthetic oligonucleotide
  Sense strand starting at position 835 of SEQ ID NO: 587080
cuggacuucuugcuaccau

SEQ ID NO: 765265 - RNA, 19 nt, Artificial Sequence
  Description of Artificial Sequence: Synthetic oligonucleotide
  Antisense strand to SEQ ID NO: 765264
augguagcaagaaguccag

SEQ ID NO: 765266 - RNA, 19 nt, Artificial Sequence
  Description of Artificial Sequence: Synthetic oligonucleotide
  Sense strand starting at position 921 of SEQ ID NO: 587080
aggccuacugugugcuaga

SEQ ID NO: 765267 - RNA, 19 nt, Artificial Sequence
  Description of Artificial Sequence: Synthetic oligonucleotide
  Antisense strand to SEQ ID NO: 765266
ucuagcacacaguaggccu

SEQ ID NO: 765268 - RNA, 19 nt, Artificial Sequence
  Description of Artificial Sequence: Synthetic oligonucleotide
  Sense strand starting at position 949 of SEQ ID NO: 587080
agggacuuuacauguuaug

SEQ ID NO: 765269 - RNA, 19 nt, Artificial Sequence
  Description of Artificial Sequence: Synthetic oligonucleotide
  Antisense strand to SEQ ID NO: 765268
cauaacauguaaagucccu

SEQ ID NO: 765270 - RNA, 19 nt, Artificial Sequence
  Description of Artificial Sequence: Synthetic oligonucleotide
  Sense strand starting at position 974 of SEQ ID NO: 587080
agcucauguaaggacgaau

SEQ ID NO: 765271 - RNA, 19 nt, Artificial Sequence
  Description of Artificial Sequence: Synthetic oligonucleotide
  Antisense strand to SEQ ID NO: 765270
auucguccuuacaugagcu

SEQ ID NO: 765272 - RNA, 19 nt, Artificial Sequence
  Description of Artificial Sequence: Synthetic oligonucleotide
  Sense strand starting at position 1148 of SEQ ID NO: 587080
aagcgaugaauccggcauu

SEQ ID NO: 765273 - RNA, 19 nt, Artificial Sequence
  Description of Artificial Sequence: Synthetic oligonucleotide
  Antisense strand to SEQ ID NO: 765272
aaugccggauucaucgcuu

SEQ ID NO: 765274 - RNA, 19 nt, Artificial Sequence
  Description of Artificial Sequence: Synthetic oligonucleotide
  Sense strand starting at position 1151 of SEQ ID NO: 587080
cgaugaauccggcauugca

SEQ ID NO: 765275 - RNA, 19 nt, Artificial Sequence
  Description of Artificial Sequence: Synthetic oligonucleotide
  Antisense strand to SEQ ID NO: 765274
ugcaaugccggauucaucg

SEQ ID NO: 765276 - RNA, 19 nt, Artificial Sequence
  Description of Artificial Sequence: Synthetic oligonucleotide
  Sense strand starting at position 1224 of SEQ ID NO: 587080
gaugguggguggucaaagu

SEQ ID NO: 765277 - RNA, 19 nt, Artificial Sequence
  Description of Artificial Sequence: Synthetic oligonucleotide
  Antisense strand to SEQ ID NO: 765276
acuuugaccacccaccauc

SEQ ID NO: 765278 - RNA, 19 nt, Artificial Sequence
  Description of Artificial Sequence: Synthetic oligonucleotide
  Sense strand starting at position 1368 of SEQ ID NO: 587080
gggcgaugagcucaagaag

SEQ ID NO: 765279 - RNA, 19 nt, Artificial Sequence
  Description of Artificial Sequence: Synthetic oligonucleotide
  Antisense strand to SEQ ID NO: 765278
cuucuugagcucaucgccc

SEQ ID NO: 765280 - RNA, 19 nt, Artificial Sequence
  Description of Artificial Sequence: Synthetic oligonucleotide
  Sense strand starting at position 2033 of SEQ ID NO: 587080
cugcucugauucgugaguu

SEQ ID NO: 765281 - RNA, 19 nt, Artificial Sequence
  Description of Artificial Sequence: Synthetic oligonucleotide
  Antisense strand to SEQ ID NO: 765280
aacucacgaaucagagcag

SEQ ID NO: 765282 - RNA, 19 nt, Artificial Sequence
  Description of Artificial Sequence: Synthetic oligonucleotide
  Sense strand starting at position 2483 of SEQ ID NO: 587080
aguguagacgugcaauagu

SEQ ID NO: 765283 - RNA, 19 nt, Artificial Sequence
  Description of Artificial Sequence: Synthetic oligonucleotide
  Antisense strand to SEQ ID NO: 765282
acuauugcacgucuacacu

SEQ ID NO: 765284 - RNA, 19 nt, Artificial Sequence
  Description of Artificial Sequence: Synthetic oligonucleotide
  Sense strand starting at position 2492 of SEQ ID NO: 587080
gugcaauagucccucccaa

SEQ ID NO: 765285 - RNA, 19 nt, Artificial Sequence
  Description of Artificial Sequence: Synthetic oligonucleotide
  Antisense strand to SEQ ID NO: 765284
uugggagggacuauugcac

SEQ ID NO: 765286 - RNA, 19 nt, Artificial Sequence
  Description of Artificial Sequence: Synthetic oligonucleotide
  Sense strand starting at position 2681 of SEQ ID NO: 587080
uuucuacuccagugacaug

SEQ ID NO: 765287 - RNA, 19 nt, Artificial Sequence
  Description of Artificial Sequence: Synthetic oligonucleotide
  Antisense strand to SEQ ID NO: 765286
caugucacuggaguagaaa

SEQ ID NO: 765288 - RNA, 19 nt, Artificial Sequence
  Description of Artificial Sequence: Synthetic oligonucleotide
  Sense strand starting at position 2955 of SEQ ID NO: 587080
gcuugaacccgggaaggua

SEQ ID NO: 765289 - RNA, 19 nt, Artificial Sequence
  Description of Artificial Sequence: Synthetic oligonucleotide
  Antisense strand to SEQ ID NO: 765288
uaccuucccggguucaagc

SEQ ID NO: 765290 - RNA, 19 nt, Artificial Sequence
  Description of Artificial Sequence: Synthetic oligonucleotide
  Sense strand starting at position 3046 of SEQ ID NO: 587080
ccuuguuacggccgaauaa

SEQ ID NO: 765291 - RNA, 19 nt, Artificial Sequence
  Description of Artificial Sequence: Synthetic oligonucleotide
  Antisense strand to SEQ ID NO: 765290
uuauucggccguaacaagg

SEQ ID NO: 765292 - RNA, 19 nt, Artificial Sequence
  Description of Artificial Sequence: Synthetic oligonucleotide
  Sense strand starting at position 3047 of SEQ ID NO: 587080
cuuguuacggccgaauaau

SEQ ID NO: 765293 - RNA, 19 nt, Artificial Sequence
  Description of Artificial Sequence: Synthetic oligonucleotide
  Antisense strand to SEQ ID NO: 765292
auuauucggccguaacaag

SEQ ID NO: 765294 - RNA, 19 nt, Artificial Sequence
  Description of Artificial Sequence: Synthetic oligonucleotide
  Sense strand starting at position 3056 of SEQ ID NO: 587080
gccgaauaauaguccauua

SEQ ID NO: 765295 - RNA, 19 nt, Artificial Sequence
  Description of Artificial Sequence: Synthetic oligonucleotide
  Antisense strand to SEQ ID NO: 765294
uaauggacuauuauucggc

SEQ ID NO: 765296 - RNA, 19 nt, Artificial Sequence
  Description of Artificial Sequence: Synthetic oligonucleotide
  Sense strand starting at position 3129 of SEQ ID NO: 587080
aguggaguuaugugaucuu

SEQ ID NO: 765297 - RNA, 19 nt, Artificial Sequence
  Description of Artificial Sequence: Synthetic oligonucleotide
  Antisense strand to SEQ ID NO: 765296
aagaucacauaacuccacu

SEQ ID NO: 765298 - RNA, 19 nt, Artificial Sequence
  Description of Artificial Sequence: Synthetic oligonucleotide
  Sense strand starting at position 3415 of SEQ ID NO: 587080
ggacaucuguuucuacuuu

SEQ ID NO: 765299 - RNA, 19 nt, Artificial Sequence
  Description of Artificial Sequence: Synthetic oligonucleotide
  Antisense strand to SEQ ID NO: 765298
aaaguagaaacagaugucc

SEQ ID NO: 765300 - RNA, 19 nt, Artificial Sequence
  Description of Artificial Sequence: Synthetic oligonucleotide
  Sense strand starting at position 3818 of SEQ ID NO: 587080
acagcaacugucuaaggua

SEQ ID NO: 765301 - RNA, 19 nt, Artificial Sequence
  Description of Artificial Sequence: Synthetic oligonucleotide
  Antisense strand to SEQ ID NO: 765300
uaccuuagacaguugcugu

SEQ ID NO: 765302 - RNA, 19 nt, Artificial Sequence
  Description of Artificial Sequence: Synthetic oligonucleotide
  Sense strand starting at position 3825 of SEQ ID NO: 587080
cugucuaagguacauauga

SEQ ID NO: 765303 - RNA, 19 nt, Artificial Sequence
  Description of Artificial Sequence: Synthetic oligonucleotide
  Antisense strand to SEQ ID NO: 765302
ucauauguaccuuagacag

SEQ ID NO: 765304 - RNA, 19 nt, Artificial Sequence
  Description of Artificial Sequence: Synthetic oligonucleotide
  Sense strand starting at position 47 of SEQ ID NO: 587081
aaguuaauugaaggaaugu

SEQ ID NO: 765305 - RNA, 19 nt, Artificial Sequence
  Description of Artificial Sequence: Synthetic oligonucleotide
  Antisense strand to SEQ ID NO: 765304
acauuccuucaauuaacuu

SEQ ID NO: 765306 - RNA, 19 nt, Artificial Sequence
  Description of Artificial Sequence: Synthetic oligonucleotide
  Sense strand starting at position 137 of SEQ ID NO: 587081
aucauauauguuuaucgca

SEQ ID NO: 765307 - RNA, 19 nt, Artificial Sequence
  Description of Artificial Sequence: Synthetic oligonucleotide
  Antisense strand to SEQ ID NO: 765306
ugcgauaaacauauaugau

SEQ ID NO: 765308 - RNA, 19 nt, Artificial Sequence
  Description of Artificial Sequence: Synthetic oligonucleotide
  Sense strand starting at position 139 of SEQ ID NO: 587081
cauauauguuuaucgcaug

SEQ ID NO: 765309 - RNA, 19 nt, Artificial Sequence
  Description of Artificial Sequence: Synthetic oligonucleotide
  Antisense strand to SEQ ID NO: 765308
caugcgauaaacauauaug

SEQ ID NO: 765310 - RNA, 19 nt, Artificial Sequence
  Description of Artificial Sequence: Synthetic oligonucleotide
  Sense strand starting at position 286 of SEQ ID NO: 587081
uuuagucuaccggguaacu

SEQ ID NO: 765311 - RNA, 19 nt, Artificial Sequence
  Description of Artificial Sequence: Synthetic oligonucleotide
  Antisense strand to SEQ ID NO: 765310
aguuacccgguagacuaaa

SEQ ID NO: 765312 - RNA, 19 nt, Artificial Sequence
  Description of Artificial Sequence: Synthetic oligonucleotide
  Sense strand starting at position 288 of SEQ ID NO: 587081
uagucuaccggguaacuau

SEQ ID NO: 765313 - RNA, 19 nt, Artificial Sequence
  Description of Artificial Sequence: Synthetic oligonucleotide
  Antisense strand to SEQ ID NO: 765312
auaguuacccgguagacua

SEQ ID NO: 765314 - RNA, 19 nt, Artificial Sequence
  Description of Artificial Sequence: Synthetic oligonucleotide
  Sense strand starting at position 378 of SEQ ID NO: 587081
gguucuagauguuuauauc

SEQ ID NO: 765315 - RNA, 19 nt, Artificial Sequence
  Description of Artificial Sequence: Synthetic oligonucleotide
  Antisense strand to SEQ ID NO: 765314
gauauaaacaucuagaacc

SEQ ID NO: 765316 - RNA, 19 nt, Artificial Sequence
  Description of Artificial Sequence: Synthetic oligonucleotide
  Sense strand starting at position 379 of SEQ ID NO: 587081
guucuagauguuuauauca

SEQ ID NO: 765317 - RNA, 19 nt, Artificial Sequence
  Description of Artificial Sequence: Synthetic oligonucleotide
  Antisense strand to SEQ ID NO: 765316
ugauauaaacaucuagaac

SEQ ID NO: 765318 - RNA, 19 nt, Artificial Sequence
  Description of Artificial Sequence: Synthetic oligonucleotide
  Sense strand starting at position 577 of SEQ ID NO: 587081
cccuauguaggguaaacuu

SEQ ID NO: 765319 - RNA, 19 nt, Artificial Sequence
  Description of Artificial Sequence: Synthetic oligonucleotide
  Antisense strand to SEQ ID NO: 765318
aaguuuacccuacauaggg

SEQ ID NO: 765320 - RNA, 19 nt, Artificial Sequence
  Description of Artificial Sequence: Synthetic oligonucleotide
  Sense strand starting at position 586 of SEQ ID NO: 587081
ggguaaacuuuggaaauga

SEQ ID NO: 765321 - RNA, 19 nt, Artificial Sequence
  Description of Artificial Sequence: Synthetic oligonucleotide
  Antisense strand to SEQ ID NO: 765320
ucauuuccaaaguuuaccc

SEQ ID NO: 765322 - RNA, 19 nt, Artificial Sequence
  Description of Artificial Sequence: Synthetic oligonucleotide
  Sense strand starting at position 640 of SEQ ID NO: 587081
gggauaucguauucuuugu

SEQ ID NO: 765323 - RNA, 19 nt, Artificial Sequence
  Description of Artificial Sequence: Synthetic oligonucleotide
  Antisense strand to SEQ ID NO: 765322
acaaagaauacgauauccc

SEQ ID NO: 765324 - RNA, 19 nt, Artificial Sequence
  Description of Artificial Sequence: Synthetic oligonucleotide
  Sense strand starting at position 642 of SEQ ID NO: 587081
gauaucguauucuuuguga

SEQ ID NO: 765325 - RNA, 19 nt, Artificial Sequence
  Description of Artificial Sequence: Synthetic oligonucleotide
  Antisense strand to SEQ ID NO: 765324
ucacaaagaauacgauauc

SEQ ID NO: 765326 - RNA, 19 nt, Artificial Sequence
  Description of Artificial Sequence: Synthetic oligonucleotide
  Sense strand starting at position 644 of SEQ ID NO: 587081
uaucguauucuuugugaug

SEQ ID NO: 765327 - RNA, 19 nt, Artificial Sequence
  Description of Artificial Sequence: Synthetic oligonucleotide
  Antisense strand to SEQ ID NO: 765326
caucacaaagaauacgaua

SEQ ID NO: 765328 - RNA, 19 nt, Artificial Sequence
  Description of Artificial Sequence: Synthetic oligonucleotide
  Sense strand starting at position 792 of SEQ ID NO: 587081
aguauauacugacuaguua

SEQ ID NO: 765329 - RNA, 19 nt, Artificial Sequence
  Description of Artificial Sequence: Synthetic oligonucleotide
  Antisense strand to SEQ ID NO: 765328
uaacuagucaguauauacu

SEQ ID NO: 765330 - RNA, 19 nt, Artificial Sequence
  Description of Artificial Sequence: Synthetic oligonucleotide
  Sense strand starting at position 793 of SEQ ID NO: 587081
guauauacugacuaguuau

SEQ ID NO: 765331 - RNA, 19 nt, Artificial Sequence
  Description of Artificial Sequence: Synthetic oligonucleotide
  Antisense strand to SEQ ID NO: 765330
auaacuagucaguauauac

SEQ ID NO: 765332 - RNA, 19 nt, Artificial Sequence
  Description of Artificial Sequence: Synthetic oligonucleotide
  Sense strand starting at position 917 of SEQ ID NO: 587081
gaugaaaggucauaggaag

SEQ ID NO: 765333 - RNA, 19 nt, Artificial Sequence
  Description of Artificial Sequence: Synthetic oligonucleotide
  Antisense strand to SEQ ID NO: 765332
cuuccuaugaccuuucauc

SEQ ID NO: 765334 - RNA, 19 nt, Artificial Sequence
  Description of Artificial Sequence: Synthetic oligonucleotide
  Sense strand starting at position 1516 of SEQ ID NO: 587081
cccagaaguccagguauca

SEQ ID NO: 765335 - RNA, 19 nt, Artificial Sequence
  Description of Artificial Sequence: Synthetic oligonucleotide
  Antisense strand to SEQ ID NO: 765334
ugauaccuggacuucuggg

SEQ ID NO: 765336 - RNA, 19 nt, Artificial Sequence
  Description of Artificial Sequence: Synthetic oligonucleotide
  Sense strand starting at position 1560 of SEQ ID NO: 587081
guguuauccgugguguuug

SEQ ID NO: 765337 - RNA, 19 nt, Artificial Sequence
  Description of Artificial Sequence: Synthetic oligonucleotide
  Antisense strand to SEQ ID NO: 765336
caaacaccacggauaacac

SEQ ID NO: 765338 - RNA, 19 nt, Artificial Sequence
  Description of Artificial Sequence: Synthetic oligonucleotide
  Sense strand starting at position 1614 of SEQ ID NO: 587081
ggaggaaucaaucgcgaug

SEQ ID NO: 765339 - RNA, 19 nt, Artificial Sequence
  Description of Artificial Sequence: Synthetic oligonucleotide
  Antisense strand to SEQ ID NO: 765338
caucgcgauugauuccucc

SEQ ID NO: 765340 - RNA, 19 nt, Artificial Sequence
  Description of Artificial Sequence: Synthetic oligonucleotide
  Sense strand starting at position 1617 of SEQ ID NO: 587081
ggaaucaaucgcgauggcu

SEQ ID NO: 765341 - RNA, 19 nt, Artificial Sequence
  Description of Artificial Sequence: Synthetic oligonucleotide
  Antisense strand to SEQ ID NO: 765340
agccaucgcgauugauucc

SEQ ID NO: 765342 - RNA, 19 nt, Artificial Sequence
  Description of Artificial Sequence: Synthetic oligonucleotide
  Sense strand starting at position 1680 of SEQ ID NO: 587081
gcgcuuguucccgugaaac

SEQ ID NO: 765343 - RNA, 19 nt, Artificial Sequence
  Description of Artificial Sequence: Synthetic oligonucleotide
  Antisense strand to SEQ ID NO: 765342
guuucacgggaacaagcgc

SEQ ID NO: 765344 - RNA, 19 nt, Artificial Sequence
  Description of Artificial Sequence: Synthetic oligonucleotide
  Sense strand starting at position 1814 of SEQ ID NO: 587081
gagacaagucucggcucga

SEQ ID NO: 765345 - RNA, 19 nt, Artificial Sequence
  Description of Artificial Sequence: Synthetic oligonucleotide
  Antisense strand to SEQ ID NO: 765344
ucgagccgagacuugucuc

SEQ ID NO: 765346 - RNA, 19 nt, Artificial Sequence
  Description of Artificial Sequence: Synthetic oligonucleotide
  Sense strand starting at position 2157 of SEQ ID NO: 587081
gcgucaaccucuuugaaga

SEQ ID NO: 765347 - RNA, 19 nt, Artificial Sequence
  Description of Artificial Sequence: Synthetic oligonucleotide
  Antisense strand to SEQ ID NO: 765346
ucuucaaagagguugacgc

SEQ ID NO: 765348 - RNA, 19 nt, Artificial Sequence
  Description of Artificial Sequence: Synthetic oligonucleotide
  Sense strand starting at position 2158 of SEQ ID NO: 587081
cgucaaccucuuugaagac

SEQ ID NO: 765349 - RNA, 19 nt, Artificial Sequence
  Description of Artificial Sequence: Synthetic oligonucleotide
  Antisense strand to SEQ ID NO: 765348
gucuucaaagagguugacg

SEQ ID NO: 765350 - RNA, 19 nt, Artificial Sequence
  Description of Artificial Sequence: Synthetic oligonucleotide
  Sense strand starting at position 2215 of SEQ ID NO: 587081
cuuuaaauauuguccaagu

SEQ ID NO: 765351 - RNA, 19 nt, Artificial Sequence
  Description of Artificial Sequence: Synthetic oligonucleotide
  Antisense strand to SEQ ID NO: 765350
acuuggacaauauuuaaag

SEQ ID NO: 765352 - RNA, 19 nt, Artificial Sequence
  Description of Artificial Sequence: Synthetic oligonucleotide
  Sense strand starting at position 2862 of SEQ ID NO: 587081
gcuggaaucguguauauau

SEQ ID NO: 765353 - RNA, 19 nt, Artificial Sequence
  Description of Artificial Sequence: Synthetic oligonucleotide
  Antisense strand to SEQ ID NO: 765352
auauauacacgauuccagc

SEQ ID NO: 765354 - RNA, 19 nt, Artificial Sequence
  Description of Artificial Sequence: Synthetic oligonucleotide
  Sense strand starting at position 2902 of SEQ ID NO: 587081
uugucagcugacuguauua

SEQ ID NO: 765355 - RNA, 19 nt, Artificial Sequence
  Description of Artificial Sequence: Synthetic oligonucleotide
  Antisense strand to SEQ ID NO: 765354
uaauacagucagcugacaa

SEQ ID NO: 765356 - RNA, 19 nt, Artificial Sequence
  Description of Artificial Sequence: Synthetic oligonucleotide
  Sense strand starting at position 2904 of SEQ ID NO: 587081
gucagcugacuguauuacu

SEQ ID NO: 765357 - RNA, 19 nt, Artificial Sequence
  Description of Artificial Sequence: Synthetic oligonucleotide
  Antisense strand to SEQ ID NO: 765356
aguaauacagucagcugac

SEQ ID NO: 765358 - RNA, 19 nt, Artificial Sequence
  Description of Artificial Sequence: Synthetic oligonucleotide
  Sense strand starting at position 2929 of SEQ ID NO: 587081
ccauauuugcccuguguaa

SEQ ID NO: 765359 - RNA, 19 nt, Artificial Sequence
  Description of Artificial Sequence: Synthetic oligonucleotide
  Antisense strand to SEQ ID NO: 765358
uuacacagggcaaauaugg

SEQ ID NO: 765360 - RNA, 19 nt, Artificial Sequence
  Description of Artificial Sequence: Synthetic oligonucleotide
  Sense strand starting at position 2931 of SEQ ID NO: 587081
auauuugcccuguguaaug

SEQ ID NO: 765361 - RNA, 19 nt, Artificial Sequence
  Description of Artificial Sequence: Synthetic oligonucleotide
  Antisense strand to SEQ ID NO: 765360
cauuacacagggcaaauau

SEQ ID NO: 765362 - RNA, 19 nt, Artificial Sequence
  Description of Artificial Sequence: Synthetic oligonucleotide
  Sense strand starting at position 2941 of SEQ ID NO: 587081
uguguaaugucgacguagu

SEQ ID NO: 765363 - RNA, 19 nt, Artificial Sequence
  Description of Artificial Sequence: Synthetic oligonucleotide
  Antisense strand to SEQ ID NO: 765362
acuacgucgacauuacaca

SEQ ID NO: 765364 - RNA, 19 nt, Artificial Sequence
  Description of Artificial Sequence: Synthetic oligonucleotide
  Sense strand starting at position 3062 of SEQ ID NO: 587081
ugcuuagcucccuacuagu

SEQ ID NO: 765365 - RNA, 19 nt, Artificial Sequence
  Description of Artificial Sequence: Synthetic oligonucleotide
  Antisense strand to SEQ ID NO: 765364
acuaguagggagcuaagca

SEQ ID NO: 765366 - RNA, 19 nt, Artificial Sequence
  Description of Artificial Sequence: Synthetic oligonucleotide
  Sense strand starting at position 3155 of SEQ ID NO: 587081
aguaauaaucucugagaug

SEQ ID NO: 765367 - RNA, 19 nt, Artificial Sequence
  Description of Artificial Sequence: Synthetic oligonucleotide
  Antisense strand to SEQ ID NO: 765366
caucucagagauuauuacu

SEQ ID NO: 765368 - RNA, 19 nt, Artificial Sequence
  Description of Artificial Sequence: Synthetic oligonucleotide
  Sense strand starting at position 3273 of SEQ ID NO: 587081
aguucuaugguaggaaagu

SEQ ID NO: 765369 - RNA, 19 nt, Artificial Sequence
  Description of Artificial Sequence: Synthetic oligonucleotide
  Antisense strand to SEQ ID NO: 765368
acuuuccuaccauagaacu

SEQ ID NO: 765370 - RNA, 19 nt, Artificial Sequence
  Description of Artificial Sequence: Synthetic oligonucleotide
  Sense strand starting at position 3337 of SEQ ID NO: 587081
ucagcauuugaaugucagu

SEQ ID NO: 765371 - RNA, 19 nt, Artificial Sequence
  Description of Artificial Sequence: Synthetic oligonucleotide
  Antisense strand to SEQ ID NO: 765370
acugacauucaaaugcuga

SEQ ID NO: 765372 - RNA, 19 nt, Artificial Sequence
  Description of Artificial Sequence: Synthetic oligonucleotide
  Sense strand starting at position 3346 of SEQ ID NO: 587081
gaaugucaguuauugauag

SEQ ID NO: 765373 - RNA, 19 nt, Artificial Sequence
  Description of Artificial Sequence: Synthetic oligonucleotide
  Antisense strand to SEQ ID NO: 765372
cuaucaauaacugacauuc

SEQ ID NO: 765374 - RNA, 19 nt, Artificial Sequence
  Description of Artificial Sequence: Synthetic oligonucleotide
  Sense strand starting at position 3546 of SEQ ID NO: 587081
uuauuauugagacggagac

SEQ ID NO: 765375 - RNA, 19 nt, Artificial Sequence
  Description of Artificial Sequence: Synthetic oligonucleotide
  Antisense strand to SEQ ID NO: 765374
gucuccgucucaauaauaa

SEQ ID NO: 765376 - RNA, 19 nt, Artificial Sequence
  Description of Artificial Sequence: Synthetic oligonucleotide
  Sense strand starting at position 3547 of SEQ ID NO: 587081
uauuauugagacggagacu

SEQ ID NO: 765377 - RNA, 19 nt, Artificial Sequence
  Description of Artificial Sequence: Synthetic oligonucleotide
  Antisense strand to SEQ ID NO: 765376
agucuccgucucaauaaua

SEQ ID NO: 765378 - RNA, 19 nt, Artificial Sequence
  Description of Artificial Sequence: Synthetic oligonucleotide
  Sense strand starting at position 3832 of SEQ ID NO: 587081
ccagguugauaccauuuga

SEQ ID NO: 765379 - RNA, 19 nt, Artificial Sequence
  Description of Artificial Sequence: Synthetic oligonucleotide
  Antisense strand to SEQ ID NO: 765378
ucaaaugguaucaaccugg

SEQ ID NO: 765380 - RNA, 19 nt, Artificial Sequence
  Description of Artificial Sequence: Synthetic oligonucleotide
  Sense strand starting at position 3932 of SEQ ID NO: 587081
caguuccuccugugaagua

SEQ ID NO: 765381 - RNA, 19 nt, Artificial Sequence
  Description of Artificial Sequence: Synthetic oligonucleotide
  Antisense strand to SEQ ID NO: 765380
uacuucacaggaggaacug

SEQ ID NO: 765382 - RNA, 19 nt, Artificial Sequence
  Description of Artificial Sequence: Synthetic oligonucleotide
  Sense strand starting at position 3944 of SEQ ID NO: 587081
ugaaguauuccugaucccu

SEQ ID NO: 765383 - RNA, 19 nt, Artificial Sequence
  Description of Artificial Sequence: Synthetic oligonucleotide
  Antisense strand to SEQ ID NO: 765382
agggaucaggaauacuuca

SEQ ID NO: 765384 - RNA, 19 nt, Artificial Sequence
  Description of Artificial Sequence: Synthetic oligonucleotide
  Sense strand starting at position 412 of SEQ ID NO: 587082
gcuggucauccagguaauc

SEQ ID NO: 765385 - RNA, 19 nt, Artificial Sequence
  Description of Artificial Sequence: Synthetic oligonucleotide
  Antisense strand to SEQ ID NO: 765384
gauuaccuggaugaccagc

SEQ ID NO: 765386 - RNA, 19 nt, Artificial Sequence
  Description of Artificial Sequence: Synthetic oligonucleotide
  Sense strand starting at position 985 of SEQ ID NO: 587082
gcuguagcucguuggcaga

SEQ ID NO: 765387 - RNA, 19 nt, Artificial Sequence
  Description of Artificial Sequence: Synthetic oligonucleotide
  Antisense strand to SEQ ID NO: 765386
ucugccaacgagcuacagc

SEQ ID NO: 765388 - RNA, 19 nt, Artificial Sequence
  Description of Artificial Sequence: Synthetic oligonucleotide
  Sense strand starting at position 991 of SEQ ID NO: 587082
gcucguuggcagagagguu

SEQ ID NO: 765389 - RNA, 19 nt, Artificial Sequence
  Description of Artificial Sequence: Synthetic oligonucleotide
  Antisense strand to SEQ ID NO: 765388
aaccucucugccaacgagc

SEQ ID NO: 765390 - RNA, 19 nt, Artificial Sequence
  Description of Artificial Sequence: Synthetic oligonucleotide
  Sense strand starting at position 1039 of SEQ ID NO: 587082
aggcguucuugcccagaaa

SEQ ID NO: 765391 - RNA, 19 nt, Artificial Sequence
  Description of Artificial Sequence: Synthetic oligonucleotide
  Antisense strand to SEQ ID NO: 765390
uuucugggcaagaacgccu

SEQ ID NO: 765392 - RNA, 19 nt, Artificial Sequence
  Description of Artificial Sequence: Synthetic oligonucleotide
  Sense strand starting at position 1040 of SEQ ID NO: 587082
ggcguucuugcccagaaag

SEQ ID NO: 765393 - RNA, 19 nt, Artificial Sequence
  Description of Artificial Sequence: Synthetic oligonucleotide
  Antisense strand to SEQ ID NO: 765392
cuuucugggcaagaacgcc

SEQ ID NO: 765394 - RNA, 19 nt, Artificial Sequence
  Description of Artificial Sequence: Synthetic oligonucleotide
  Sense strand starting at position 1201 of SEQ ID NO: 587082
ggcugaucucguucccguu

SEQ ID NO: 765395 - RNA, 19 nt, Artificial Sequence
  Description of Artificial Sequence: Synthetic oligonucleotide
  Antisense strand to SEQ ID NO: 765394
aacgggaacgagaucagcc

SEQ ID NO: 765396 - RNA, 19 nt, Artificial Sequence
  Description of Artificial Sequence: Synthetic oligonucleotide
  Sense strand starting at position 1399 of SEQ ID NO: 587082
agucgaaggccgugauguu

SEQ ID NO: 765397 - RNA, 19 nt, Artificial Sequence
  Description of Artificial Sequence: Synthetic oligonucleotide
  Antisense strand to SEQ ID NO: 765396
aacaucacggccuucgacu

SEQ ID NO: 765398 - RNA, 19 nt, Artificial Sequence
  Description of Artificial Sequence: Synthetic oligonucleotide
  Sense strand starting at position 1408 of SEQ ID NO: 587082
ccgugauguugguuaugaa

SEQ ID NO: 765399 - RNA, 19 nt, Artificial Sequence
  Description of Artificial Sequence: Synthetic oligonucleotide
  Antisense strand to SEQ ID NO: 765398
uucauaaccaacaucacgg

SEQ ID NO: 765400 - RNA, 19 nt, Artificial Sequence
  Description of Artificial Sequence: Synthetic oligonucleotide
  Sense strand starting at position 1409 of SEQ ID NO: 587082
cgugauguugguuaugaag

SEQ ID NO: 765401 - RNA, 19 nt, Artificial Sequence
  Description of Artificial Sequence: Synthetic oligonucleotide
  Antisense strand to SEQ ID NO: 765400
cuucauaaccaacaucacg

SEQ ID NO: 765402 - RNA, 19 nt, Artificial Sequence
  Description of Artificial Sequence: Synthetic oligonucleotide
  Sense strand starting at position 1411 of SEQ ID NO: 587082
ugauguugguuaugaaguu

SEQ ID NO: 765403 - RNA, 19 nt, Artificial Sequence
  Description of Artificial Sequence: Synthetic oligonucleotide
  Antisense strand to SEQ ID NO: 765402
aacuucauaaccaacauca

SEQ ID NO: 765404 - RNA, 19 nt, Artificial Sequence
  Description of Artificial Sequence: Synthetic oligonucleotide
  Sense strand starting at position 1857 of SEQ ID NO: 587082
ggguacuacuuguugcauu

SEQ ID NO: 765405 - RNA, 19 nt, Artificial Sequence
  Description of Artificial Sequence: Synthetic oligonucleotide
  Antisense strand to SEQ ID NO: 765404
aaugcaacaaguaguaccc

SEQ ID NO: 765406 - RNA, 19 nt, Artificial Sequence
  Description of Artificial Sequence: Synthetic oligonucleotide
  Sense strand starting at position 1858 of SEQ ID NO: 587082
gguacuacuuguugcauuu

SEQ ID NO: 765407 - RNA, 19 nt, Artificial Sequence
  Description of Artificial Sequence: Synthetic oligonucleotide
  Antisense strand to SEQ ID NO: 765406
aaaugcaacaaguaguacc

SEQ ID NO: 765408 - RNA, 19 nt, Artificial Sequence
  Description of Artificial Sequence: Synthetic oligonucleotide
  Sense strand starting at position 1865 of SEQ ID NO: 587082
cuuguugcauuucuguaua

SEQ ID NO: 765409 - RNA, 19 nt, Artificial Sequence
  Description of Artificial Sequence: Synthetic oligonucleotide
  Antisense strand to SEQ ID NO: 765408
uauacagaaaugcaacaag

SEQ ID NO: 765410 - RNA, 19 nt, Artificial Sequence
  Description of Artificial Sequence: Synthetic oligonucleotide
  Sense strand starting at position 1867 of SEQ ID NO: 587082
uguugcauuucuguauaaa

SEQ ID NO: 765411 - RNA, 19 nt, Artificial Sequence
  Description of Artificial Sequence: Synthetic oligonucleotide
  Antisense strand to SEQ ID NO: 765410
uuuauacagaaaugcaaca

SEQ ID NO: 765412 - RNA, 19 nt, Artificial Sequence
  Description of Artificial Sequence: Synthetic oligonucleotide
  Sense strand starting at position 2336 of SEQ ID NO: 587082
cgggaugccaagugagaaa

SEQ ID NO: 765413 - RNA, 19 nt, Artificial Sequence
  Description of Artificial Sequence: Synthetic oligonucleotide
  Antisense strand to SEQ ID NO: 765412
uuucucacuuggcaucccg

SEQ ID NO: 765414 - RNA, 19 nt, Artificial Sequence
  Description of Artificial Sequence: Synthetic oligonucleotide
  Sense strand starting at position 2410 of SEQ ID NO: 587082
ggauuaccgggcuagcaaa

SEQ ID NO: 765415 - RNA, 19 nt, Artificial Sequence
  Description of Artificial Sequence: Synthetic oligonucleotide
  Antisense strand to SEQ ID NO: 765414
uuugcuagcccgguaaucc

SEQ ID NO: 765416 - RNA, 19 nt, Artificial Sequence
  Description of Artificial Sequence: Synthetic oligonucleotide
  Sense strand starting at position 2501 of SEQ ID NO: 587082
uggccuuccucguuguuaa

SEQ ID NO: 765417 - RNA, 19 nt, Artificial Sequence
  Description of Artificial Sequence: Synthetic oligonucleotide
  Antisense strand to SEQ ID NO: 765416
uuaacaacgaggaaggcca

SEQ ID NO: 765418 - RNA, 19 nt, Artificial Sequence
  Description of Artificial Sequence: Synthetic oligonucleotide
  Sense strand starting at position 2502 of SEQ ID NO: 587082
ggccuuccucguuguuaag

SEQ ID NO: 765419 - RNA, 19 nt, Artificial Sequence
  Description of Artificial Sequence: Synthetic oligonucleotide
  Antisense strand to SEQ ID NO: 765418
cuuaacaacgaggaaggcc

SEQ ID NO: 765420 - RNA, 19 nt, Artificial Sequence
  Description of Artificial Sequence: Synthetic oligonucleotide
  Sense strand starting at position 2564 of SEQ ID NO: 587082
cacggaguccgccagcauu

SEQ ID NO: 765421 - RNA, 19 nt, Artificial Sequence
  Description of Artificial Sequence: Synthetic oligonucleotide
  Antisense strand to SEQ ID NO: 765420
aaugcuggcggacuccgug

SEQ ID NO: 765422 - RNA, 19 nt, Artificial Sequence
  Description of Artificial Sequence: Synthetic oligonucleotide
  Sense strand starting at position 2577 of SEQ ID NO: 587082
agcauucuacaggaaguuu

SEQ ID NO: 765423 - RNA, 19 nt, Artificial Sequence
  Description of Artificial Sequence: Synthetic oligonucleotide
  Antisense strand to SEQ ID NO: 765422
aaacuuccuguagaaugcu

SEQ ID NO: 765424 - RNA, 19 nt, Artificial Sequence
  Description of Artificial Sequence: Synthetic oligonucleotide
  Sense strand starting at position 2674 of SEQ ID NO: 587082
ugacgucguuggacuagua

SEQ ID NO: 765425 - RNA, 19 nt, Artificial Sequence
  Description of Artificial Sequence: Synthetic oligonucleotide
  Antisense strand to SEQ ID NO: 765424
uacuaguccaacgacguca

SEQ ID NO: 765426 - RNA, 19 nt, Artificial Sequence
  Description of Artificial Sequence: Synthetic oligonucleotide
  Sense strand starting at position 2717 of SEQ ID NO: 587082
uuaggugucugaagggagu

SEQ ID NO: 765427 - RNA, 19 nt, Artificial Sequence
  Description of Artificial Sequence: Synthetic oligonucleotide
  Antisense strand to SEQ ID NO: 765426
acucccuucagacaccuaa

SEQ ID NO: 765428 - RNA, 19 nt, Artificial Sequence
  Description of Artificial Sequence: Synthetic oligonucleotide
  Sense strand starting at position 2720 of SEQ ID NO: 587082
ggugucugaagggaguauu

SEQ ID NO: 765429 - RNA, 19 nt, Artificial Sequence
  Description of Artificial Sequence: Synthetic oligonucleotide
  Antisense strand to SEQ ID NO: 765428
aauacucccuucagacacc

SEQ ID NO: 765430 - RNA, 19 nt, Artificial Sequence
  Description of Artificial Sequence: Synthetic oligonucleotide
  Sense strand starting at position 2778 of SEQ ID NO: 587082
agaacugguucugccaaca

SEQ ID NO: 765431 - RNA, 19 nt, Artificial Sequence
  Description of Artificial Sequence: Synthetic oligonucleotide
  Antisense strand to SEQ ID NO: 765430
uguuggcagaaccaguucu

SEQ ID NO: 765432 - RNA, 19 nt, Artificial Sequence
  Description of Artificial Sequence: Synthetic oligonucleotide
  Sense strand starting at position 2783 of SEQ ID NO: 587082
ugguucugccaacaugaaa

SEQ ID NO: 765433 - RNA, 19 nt, Artificial Sequence
  Description of Artificial Sequence: Synthetic oligonucleotide
  Antisense strand to SEQ ID NO: 765432
uuucauguuggcagaacca

SEQ ID NO: 765434 - RNA, 19 nt, Artificial Sequence
  Description of Artificial Sequence: Synthetic oligonucleotide
  Sense strand starting at position 2798 of SEQ ID NO: 587082
gaaagugucucugccacau

SEQ ID NO: 765435 - RNA, 19 nt, Artificial Sequence
  Description of Artificial Sequence: Synthetic oligonucleotide
  Antisense strand to SEQ ID NO: 765434
auguggcagagacacuuuc

SEQ ID NO: 765436 - RNA, 19 nt, Artificial Sequence
  Description of Artificial Sequence: Synthetic oligonucleotide
  Sense strand starting at position 2817 of SEQ ID NO: 587082
uuuggugauucagucgcau

SEQ ID NO: 765437 - RNA, 19 nt, Artificial Sequence
  Description of Artificial Sequence: Synthetic oligonucleotide
  Antisense strand to SEQ ID NO: 765436
augcgacugaaucaccaaa

SEQ ID NO: 765438 - RNA, 19 nt, Artificial Sequence
  Description of Artificial Sequence: Synthetic oligonucleotide
  Sense strand starting at position 2950 of SEQ ID NO: 587082
cuggacuugcagugaucuu

SEQ ID NO: 765439 - RNA, 19 nt, Artificial Sequence
  Description of Artificial Sequence: Synthetic oligonucleotide
  Antisense strand to SEQ ID NO: 765438
aagaucacugcaaguccag

SEQ ID NO: 765440 - RNA, 19 nt, Artificial Sequence
  Description of Artificial Sequence: Synthetic oligonucleotide
  Sense strand starting at position 3026 of SEQ ID NO: 587082
uuauuaucucuagggaaug

SEQ ID NO: 765441 - RNA, 19 nt, Artificial Sequence
  Description of Artificial Sequence: Synthetic oligonucleotide
  Antisense strand to SEQ ID NO: 765440
cauucccuagagauaauaa

SEQ ID NO: 765442 - RNA, 19 nt, Artificial Sequence
  Description of Artificial Sequence: Synthetic oligonucleotide
  Sense strand starting at position 3078 of SEQ ID NO: 587082
cccugcugagaaugagaau

SEQ ID NO: 765443 - RNA, 19 nt, Artificial Sequence
  Description of Artificial Sequence: Synthetic oligonucleotide
  Antisense strand to SEQ ID NO: 765442
auucucauucucagcaggg

SEQ ID NO: 765444 - RNA, 19 nt, Artificial Sequence
  Description of Artificial Sequence: Synthetic oligonucleotide
  Sense strand starting at position 3175 of SEQ ID NO: 587082
uauccaagguguugagaaa

SEQ ID NO: 765445 - RNA, 19 nt, Artificial Sequence
  Description of Artificial Sequence: Synthetic oligonucleotide
  Antisense strand to SEQ ID NO: 765444
uuucucaacaccuuggaua

SEQ ID NO: 765446 - RNA, 19 nt, Artificial Sequence
  Description of Artificial Sequence: Synthetic oligonucleotide
  Sense strand starting at position 3207 of SEQ ID NO: 587082
ggacguacucugcaacaau

SEQ ID NO: 765447 - RNA, 19 nt, Artificial Sequence
  Description of Artificial Sequence: Synthetic oligonucleotide
  Antisense strand to SEQ ID NO: 765446
auuguugcagaguacgucc

SEQ ID NO: 765448 - RNA, 19 nt, Artificial Sequence
  Description of Artificial Sequence: Synthetic oligonucleotide
  Sense strand starting at position 3268 of SEQ ID NO: 587082
augacaaucuagugggaag

SEQ ID NO: 765449 - RNA, 19 nt, Artificial Sequence
  Description of Artificial Sequence: Synthetic oligonucleotide
  Antisense strand to SEQ ID NO: 765448
cuucccacuagauugucau

SEQ ID NO: 765450 - RNA, 19 nt, Artificial Sequence
  Description of Artificial Sequence: Synthetic oligonucleotide
  Sense strand starting at position 3712 of SEQ ID NO: 587082
ucaagugauagagggaagu

SEQ ID NO: 765451 - RNA, 19 nt, Artificial Sequence
  Description of Artificial Sequence: Synthetic oligonucleotide
  Antisense strand to SEQ ID NO: 765450
acuucccucuaucacuuga

SEQ ID NO: 765452 - RNA, 19 nt, Artificial Sequence
  Description of Artificial Sequence: Synthetic oligonucleotide
  Sense strand starting at position 3722 of SEQ ID NO: 587082
gagggaaguucugaauuua

SEQ ID NO: 765453 - RNA, 19 nt, Artificial Sequence
  Description of Artificial Sequence: Synthetic oligonucleotide
  Antisense strand to SEQ ID NO: 765452
uaaauucagaacuucccuc

SEQ ID NO: 765454 - RNA, 19 nt, Artificial Sequence
  Description of Artificial Sequence: Synthetic oligonucleotide
  Sense strand starting at position 3740 of SEQ ID NO: 587082
agagaaagaugagaucguu

SEQ ID NO: 765455 - RNA, 19 nt, Artificial Sequence
  Description of Artificial Sequence: Synthetic oligonucleotide
  Antisense strand to SEQ ID NO: 765454
aacgaucucaucuuucucu

SEQ ID NO: 765456 - RNA, 19 nt, Artificial Sequence
  Description of Artificial Sequence: Synthetic oligonucleotide
  Sense strand starting at position 3749 of SEQ ID NO: 587082
ugagaucguuggcagggua

SEQ ID NO: 765457 - RNA, 19 nt, Artificial Sequence
  Description of Artificial Sequence: Synthetic oligonucleotide
  Antisense strand to SEQ ID NO: 765456
uacccugccaacgaucuca

SEQ ID NO: 765458 - RNA, 19 nt, Artificial Sequence
  Description of Artificial Sequence: Synthetic oligonucleotide
  Sense strand starting at position 3762 of SEQ ID NO: 587082
aggguagucaguggugacu

SEQ ID NO: 765459 - RNA, 19 nt, Artificial Sequence
  Description of Artificial Sequence: Synthetic oligonucleotide
  Antisense strand to SEQ ID NO: 765458
agucaccacugacuacccu

SEQ ID NO: 765460 - RNA, 19 nt, Artificial Sequence
  Description of Artificial Sequence: Synthetic oligonucleotide
  Sense strand starting at position 3772 of SEQ ID NO: 587082
guggugacuucguggguga

SEQ ID NO: 765461 - RNA, 19 nt, Artificial Sequence
  Description of Artificial Sequence: Synthetic oligonucleotide
  Antisense strand to SEQ ID NO: 765460
ucacccacgaagucaccac

SEQ ID NO: 765462 - RNA, 19 nt, Artificial Sequence
  Description of Artificial Sequence: Synthetic oligonucleotide
  Sense strand starting at position 3921 of SEQ ID NO: 587082
ggaaaccugugcugaguuu

SEQ ID NO: 765463 - RNA, 19 nt, Artificial Sequence
  Description of Artificial Sequence: Synthetic oligonucleotide
  Antisense strand to SEQ ID NO: 765462
aaacucagcacagguuucc

SEQ ID NO: 765464 - RNA, 19 nt, Artificial Sequence
  Description of Artificial Sequence: Synthetic oligonucleotide
  Sense strand starting at position 2 of SEQ ID NO: 587083
uugcacuaguucucagaac

SEQ ID NO: 765465 - RNA, 19 nt, Artificial Sequence
  Description of Artificial Sequence: Synthetic oligonucleotide
  Antisense strand to SEQ ID NO: 765464
guucugagaacuagugcaa

SEQ ID NO: 765466 - RNA, 19 nt, Artificial Sequence
  Description of Artificial Sequence: Synthetic oligonucleotide
  Sense strand starting at position 22 of SEQ ID NO: 587083
ccagguucccauuggacaa

SEQ ID NO: 765467 - RNA, 19 nt, Artificial Sequence
  Description of Artificial Sequence: Synthetic oligonucleotide
  Antisense strand to SEQ ID NO: 765466
uuguccaaugggaaccugg

SEQ ID NO: 765468 - RNA, 19 nt, Artificial Sequence
  Description of Artificial Sequence: Synthetic oligonucleotide
  Sense strand starting at position 157 of SEQ ID NO: 587083
uccagagggagacguuauu

SEQ ID NO: 765469 - RNA, 19 nt, Artificial Sequence
  Description of Artificial Sequence: Synthetic oligonucleotide
  Antisense strand to SEQ ID NO: 765468
aauaacgucucccucugga

SEQ ID NO: 765470 - RNA, 19 nt, Artificial Sequence
  Description of Artificial Sequence: Synthetic oligonucleotide
  Sense strand starting at position 163 of SEQ ID NO: 587083
gggagacguuauucuuauu

SEQ ID NO: 765471 - RNA, 19 nt, Artificial Sequence
  Description of Artificial Sequence: Synthetic oligonucleotide
  Antisense strand to SEQ ID NO: 765470
aauaagaauaacgucuccc

SEQ ID NO: 765472 - RNA, 19 nt, Artificial Sequence
  Description of Artificial Sequence: Synthetic oligonucleotide
  Sense strand starting at position 252 of SEQ ID NO: 587083
uuuagauaauauccgugaa

SEQ ID NO: 765473 - RNA, 19 nt, Artificial Sequence
  Description of Artificial Sequence: Synthetic oligonucleotide
  Antisense strand to SEQ ID NO: 765472
uucacggauauuaucuaaa

SEQ ID NO: 765474 - RNA, 19 nt, Artificial Sequence
  Description of Artificial Sequence: Synthetic oligonucleotide
  Sense strand starting at position 291 of SEQ ID NO: 587083
ucaguaucucgcuggcaag

SEQ ID NO: 765475 - RNA, 19 nt, Artificial Sequence
  Description of Artificial Sequence: Synthetic oligonucleotide
  Antisense strand to SEQ ID NO: 765474
cuugccagcgagauacuga

SEQ ID NO: 765476 - RNA, 19 nt, Artificial Sequence
  Description of Artificial Sequence: Synthetic oligonucleotide
  Sense strand starting at position 361 of SEQ ID NO: 587083
aguggauacugcuccuaac

SEQ ID NO: 765477 - RNA, 19 nt, Artificial Sequence
  Description of Artificial Sequence: Synthetic oligonucleotide
  Antisense strand to SEQ ID NO: 765476
guuaggagcaguauccacu

SEQ ID NO: 765478 - RNA, 19 nt, Artificial Sequence
  Description of Artificial Sequence: Synthetic oligonucleotide
  Sense strand starting at position 592 of SEQ ID NO: 587083
aguguucuacccgaaacug

SEQ ID NO: 765479 - RNA, 19 nt, Artificial Sequence
  Description of Artificial Sequence: Synthetic oligonucleotide
  Antisense strand to SEQ ID NO: 765478
caguuucggguagaacacu

SEQ ID NO: 765480 - RNA, 19 nt, Artificial Sequence
  Description of Artificial Sequence: Synthetic oligonucleotide
  Sense strand starting at position 602 of SEQ ID NO: 587083
ccgaaacuguacucaaacu

SEQ ID NO: 765481 - RNA, 19 nt, Artificial Sequence
  Description of Artificial Sequence: Synthetic oligonucleotide
  Antisense strand to SEQ ID NO: 765480
aguuugaguacaguuucgg

SEQ ID NO: 765482 - RNA, 19 nt, Artificial Sequence
  Description of Artificial Sequence: Synthetic oligonucleotide
  Sense strand starting at position 765 of SEQ ID NO: 587083
uucucuucgccgucucaaa

SEQ ID NO: 765483 - RNA, 19 nt, Artificial Sequence
  Description of Artificial Sequence: Synthetic oligonucleotide
  Antisense strand to SEQ ID NO: 765482
uuugagacggcgaagagaa

SEQ ID NO: 765484 - RNA, 19 nt, Artificial Sequence
  Description of Artificial Sequence: Synthetic oligonucleotide
  Sense strand starting at position 865 of SEQ ID NO: 587083
ggaacucauuaagguaaag

SEQ ID NO: 765485 - RNA, 19 nt, Artificial Sequence
  Description of Artificial Sequence: Synthetic oligonucleotide
  Antisense strand to SEQ ID NO: 765484
cuuuaccuuaaugaguucc

SEQ ID NO: 765486 - RNA, 19 nt, Artificial Sequence
  Description of Artificial Sequence: Synthetic oligonucleotide
  Sense strand starting at position 987 of SEQ ID NO: 587083
gcucaaauaacgugaguau

SEQ ID NO: 765487 - RNA, 19 nt, Artificial Sequence
  Description of Artificial Sequence: Synthetic oligonucleotide
  Antisense strand to SEQ ID NO: 765486
auacucacguuauuugagc

SEQ ID NO: 765488 - RNA, 19 nt, Artificial Sequence
  Description of Artificial Sequence: Synthetic oligonucleotide
  Sense strand starting at position 988 of SEQ ID NO: 587083
cucaaauaacgugaguaua

SEQ ID NO: 765489 - RNA, 19 nt, Artificial Sequence
  Description of Artificial Sequence: Synthetic oligonucleotide
  Antisense strand to SEQ ID NO: 765488
uauacucacguuauuugag

SEQ ID NO: 765490 - RNA, 19 nt, Artificial Sequence
  Description of Artificial Sequence: Synthetic oligonucleotide
  Sense strand starting at position 990 of SEQ ID NO: 587083
caaauaacgugaguauaga

SEQ ID NO: 765491 - RNA, 19 nt, Artificial Sequence
  Description of Artificial Sequence: Synthetic oligonucleotide
  Antisense strand to SEQ ID NO: 765490
ucuauacucacguuauuug

SEQ ID NO: 765492 - RNA, 19 nt, Artificial Sequence
  Description of Artificial Sequence: Synthetic oligonucleotide
  Sense strand starting at position 1086 of SEQ ID NO: 587083
cggcaaagaacccgagauu

SEQ ID NO: 765493 - RNA, 19 nt, Artificial Sequence
  Description of Artificial Sequence: Synthetic oligonucleotide
  Antisense strand to SEQ ID NO: 765492
aaucucggguucuuugccg

SEQ ID NO: 765494 - RNA, 19 nt, Artificial Sequence
  Description of Artificial Sequence: Synthetic oligonucleotide
  Sense strand starting at position 1098 of SEQ ID NO: 587083
cgagauuccggcugcagga

SEQ ID NO: 765495 - RNA, 19 nt, Artificial Sequence
  Description of Artificial Sequence: Synthetic oligonucleotide
  Antisense strand to SEQ ID NO: 765494
uccugcagccggaaucucg

SEQ ID NO: 765496 - RNA, 19 nt, Artificial Sequence
  Description of Artificial Sequence: Synthetic oligonucleotide
  Sense strand starting at position 1991 of SEQ ID NO: 587083
ggguaucugucagcggaga

SEQ ID NO: 765497 - RNA, 19 nt, Artificial Sequence
  Description of Artificial Sequence: Synthetic oligonucleotide
  Antisense strand to SEQ ID NO: 765496
ucuccgcugacagauaccc

SEQ ID NO: 765498 - RNA, 19 nt, Artificial Sequence
  Description of Artificial Sequence: Synthetic oligonucleotide
  Sense strand starting at position 2372 of SEQ ID NO: 587083
ggguucauuuguuaacgac

SEQ ID NO: 765499 - RNA, 19 nt, Artificial Sequence
  Description of Artificial Sequence: Synthetic oligonucleotide
  Antisense strand to SEQ ID NO: 765498
gucguuaacaaaugaaccc

SEQ ID NO: 765500 - RNA, 19 nt, Artificial Sequence
  Description of Artificial Sequence: Synthetic oligonucleotide
  Sense strand starting at position 2451 of SEQ ID NO: 587083
acucaaugccguuaauuaa

SEQ ID NO: 765501 - RNA, 19 nt, Artificial Sequence
  Description of Artificial Sequence: Synthetic oligonucleotide
  Antisense strand to SEQ ID NO: 765500
uuaauuaacggcauugagu

SEQ ID NO: 765502 - RNA, 19 nt, Artificial Sequence
  Description of Artificial Sequence: Synthetic oligonucleotide
  Sense strand starting at position 2454 of SEQ ID NO: 587083
caaugccguuaauuaagua

SEQ ID NO: 765503 - RNA, 19 nt, Artificial Sequence
  Description of Artificial Sequence: Synthetic oligonucleotide
  Antisense strand to SEQ ID NO: 765502
uacuuaauuaacggcauug

SEQ ID NO: 765504 - RNA, 19 nt, Artificial Sequence
  Description of Artificial Sequence: Synthetic oligonucleotide
  Sense strand starting at position 2466 of SEQ ID NO: 587083
uuaaguaacugcuuggaaa

SEQ ID NO: 765505 - RNA, 19 nt, Artificial Sequence
  Description of Artificial Sequence: Synthetic oligonucleotide
  Antisense strand to SEQ ID NO: 765504
uuuccaagcaguuacuuaa

SEQ ID NO: 765506 - RNA, 19 nt, Artificial Sequence
  Description of Artificial Sequence: Synthetic oligonucleotide
  Sense strand starting at position 2523 of SEQ ID NO: 587083
guaaauauggucggagggu

SEQ ID NO: 765507 - RNA, 19 nt, Artificial Sequence
  Description of Artificial Sequence: Synthetic oligonucleotide
  Antisense strand to SEQ ID NO: 765506
acccuccgaccauauuuac

SEQ ID NO: 765508 - RNA, 19 nt, Artificial Sequence
  Description of Artificial Sequence: Synthetic oligonucleotide
  Sense strand starting at position 2664 of SEQ ID NO: 587083
augaaugaguaugaagaau

SEQ ID NO: 765509 - RNA, 19 nt, Artificial Sequence
  Description of Artificial Sequence: Synthetic oligonucleotide
  Antisense strand to SEQ ID NO: 765508
auucuucauacucauucau

SEQ ID NO: 765510 - RNA, 19 nt, Artificial Sequence
  Description of Artificial Sequence: Synthetic oligonucleotide
  Sense strand starting at position 2691 of SEQ ID NO: 587083
gaaguucucgugcaaguug

SEQ ID NO: 765511 - RNA, 19 nt, Artificial Sequence
  Description of Artificial Sequence: Synthetic oligonucleotide
  Antisense strand to SEQ ID NO: 765510
caacuugcacgagaacuuc

SEQ ID NO: 765512 - RNA, 19 nt, Artificial Sequence
  Description of Artificial Sequence: Synthetic oligonucleotide
  Sense strand starting at position 2696 of SEQ ID NO: 587083
ucucgugcaaguuggaaau

SEQ ID NO: 765513 - RNA, 19 nt, Artificial Sequence
  Description of Artificial Sequence: Synthetic oligonucleotide
  Antisense strand to SEQ ID NO: 765512
auuuccaacuugcacgaga

SEQ ID NO: 765514 - RNA, 19 nt, Artificial Sequence
  Description of Artificial Sequence: Synthetic oligonucleotide
  Sense strand starting at position 2756 of SEQ ID NO: 587083
uaaagucagugauuugcuu

SEQ ID NO: 765515 - RNA, 19 nt, Artificial Sequence
  Description of Artificial Sequence: Synthetic oligonucleotide
  Antisense strand to SEQ ID NO: 765514
aagcaaaucacugacuuua

SEQ ID NO: 765516 - RNA, 19 nt, Artificial Sequence
  Description of Artificial Sequence: Synthetic oligonucleotide
  Sense strand starting at position 2958 of SEQ ID NO: 587083
ucaccucucuacgcugaua

SEQ ID NO: 765517 - RNA, 19 nt, Artificial Sequence
  Description of Artificial Sequence: Synthetic oligonucleotide
  Antisense strand to SEQ ID NO: 765516
uaucagcguagagagguga

SEQ ID NO: 765518 - RNA, 19 nt, Artificial Sequence
  Description of Artificial Sequence: Synthetic oligonucleotide
  Sense strand starting at position 2961 of SEQ ID NO: 587083
ccucucuacgcugauauca

SEQ ID NO: 765519 - RNA, 19 nt, Artificial Sequence
  Description of Artificial Sequence: Synthetic oligonucleotide
  Antisense strand to SEQ ID NO: 765518
ugauaucagcguagagagg

SEQ ID NO: 765520 - RNA, 19 nt, Artificial Sequence
  Description of Artificial Sequence: Synthetic oligonucleotide
  Sense strand starting at position 2976 of SEQ ID NO: 587083
aucagaaguuacgcacauu

SEQ ID NO: 765521 - RNA, 19 nt, Artificial Sequence
  Description of Artificial Sequence: Synthetic oligonucleotide
  Antisense strand to SEQ ID NO: 765520
aaugugcguaacuucugau

SEQ ID NO: 765522 - RNA, 19 nt, Artificial Sequence
  Description of Artificial Sequence: Synthetic oligonucleotide
  Sense strand starting at position 3144 of SEQ ID NO: 587083
gaaagauggagugggucau

SEQ ID NO: 765523 - RNA, 19 nt, Artificial Sequence
  Description of Artificial Sequence: Synthetic oligonucleotide
  Antisense strand to SEQ ID NO: 765522
augacccacuccaucuuuc

SEQ ID NO: 765524 - RNA, 19 nt, Artificial Sequence
  Description of Artificial Sequence: Synthetic oligonucleotide
  Sense strand starting at position 3197 of SEQ ID NO: 587083
gacuauaugggauggcaau

SEQ ID NO: 765525 - RNA, 19 nt, Artificial Sequence
  Description of Artificial Sequence: Synthetic oligonucleotide
  Antisense strand to SEQ ID NO: 765524
auugccaucccauauaguc

SEQ ID NO: 765526 - RNA, 19 nt, Artificial Sequence
  Description of Artificial Sequence: Synthetic oligonucleotide
  Sense strand starting at position 3270 of SEQ ID NO: 587083
cuccguaggccucaaguga

SEQ ID NO: 765527 - RNA, 19 nt, Artificial Sequence
  Description of Artificial Sequence: Synthetic oligonucleotide
  Antisense strand to SEQ ID NO: 765526
ucacuugaggccuacggag

SEQ ID NO: 765528 - RNA, 19 nt, Artificial Sequence
  Description of Artificial Sequence: Synthetic oligonucleotide
  Sense strand starting at position 3279 of SEQ ID NO: 587083
ccucaagugagagguucuu

SEQ ID NO: 765529 - RNA, 19 nt, Artificial Sequence
  Description of Artificial Sequence: Synthetic oligonucleotide
  Antisense strand to SEQ ID NO: 765528
aagaaccucucacuugagg

SEQ ID NO: 765530 - RNA, 19 nt, Artificial Sequence
  Description of Artificial Sequence: Synthetic oligonucleotide
  Sense strand starting at position 3341 of SEQ ID NO: 587083
acccauugguuccuguuua

SEQ ID NO: 765531 - RNA, 19 nt, Artificial Sequence
  Description of Artificial Sequence: Synthetic oligonucleotide
  Antisense strand to SEQ ID NO: 765530
uaaacaggaaccaaugggu

SEQ ID NO: 765532 - RNA, 19 nt, Artificial Sequence
  Description of Artificial Sequence: Synthetic oligonucleotide
  Sense strand starting at position 3352 of SEQ ID NO: 587083
ccuguuuaagcuugggauu

SEQ ID NO: 765533 - RNA, 19 nt, Artificial Sequence
  Description of Artificial Sequence: Synthetic oligonucleotide
  Antisense strand to SEQ ID NO: 765532
aaucccaagcuuaaacagg

SEQ ID NO: 765534 - RNA, 19 nt, Artificial Sequence
  Description of Artificial Sequence: Synthetic oligonucleotide
  Sense strand starting at position 3504 of SEQ ID NO: 587083
aagugauucugaccugggu

SEQ ID NO: 765535 - RNA, 19 nt, Artificial Sequence
  Description of Artificial Sequence: Synthetic oligonucleotide
  Antisense strand to SEQ ID NO: 765534
acccaggucagaaucacuu

SEQ ID NO: 765536 - RNA, 19 nt, Artificial Sequence
  Description of Artificial Sequence: Synthetic oligonucleotide
  Sense strand starting at position 3577 of SEQ ID NO: 587083
cacgauuucguccguauau

SEQ ID NO: 765537 - RNA, 19 nt, Artificial Sequence
  Description of Artificial Sequence: Synthetic oligonucleotide
  Antisense strand to SEQ ID NO: 765536
auauacggacgaaaucgug

SEQ ID NO: 765538 - RNA, 19 nt, Artificial Sequence
  Description of Artificial Sequence: Synthetic oligonucleotide
  Sense strand starting at position 3578 of SEQ ID NO: 587083
acgauuucguccguauaug

SEQ ID NO: 765539 - RNA, 19 nt, Artificial Sequence
  Description of Artificial Sequence: Synthetic oligonucleotide
  Antisense strand to SEQ ID NO: 765538
cauauacggacgaaaucgu

SEQ ID NO: 765540 - RNA, 19 nt, Artificial Sequence
  Description of Artificial Sequence: Synthetic oligonucleotide
  Sense strand starting at position 3586 of SEQ ID NO: 587083
guccguauaugccucucaa

SEQ ID NO: 765541 - RNA, 19 nt, Artificial Sequence
  Description of Artificial Sequence: Synthetic oligonucleotide
  Antisense strand to SEQ ID NO: 765540
uugagaggcauauacggac

SEQ ID NO: 765542 - RNA, 19 nt, Artificial Sequence
  Description of Artificial Sequence: Synthetic oligonucleotide
  Sense strand starting at position 3976 of SEQ ID NO: 587083
uugaaagaauuccauguaa

SEQ ID NO: 765543 - RNA, 19 nt, Artificial Sequence
  Description of Artificial Sequence: Synthetic oligonucleotide
  Antisense strand to SEQ ID NO: 765542
uuacauggaauucuuucaa

SEQ ID NO: 765544 - RNA, 19 nt, Artificial Sequence
  Description of Artificial Sequence: Synthetic oligonucleotide
  Sense strand starting at position 295 of SEQ ID NO: 587084
agauguggguagagaaaga

SEQ ID NO: 765545 - RNA, 19 nt, Artificial Sequence
  Description of Artificial Sequence: Synthetic oligonucleotide
  Antisense strand to SEQ ID NO: 765544
ucuuucucuacccacaucu

SEQ ID NO: 765546 - RNA, 19 nt, Artificial Sequence
  Description of Artificial Sequence: Synthetic oligonucleotide
  Sense strand starting at position 386 of SEQ ID NO: 587084
ggagcuucuuaacccauga

SEQ ID NO: 765547 - RNA, 19 nt, Artificial Sequence
  Description of Artificial Sequence: Synthetic oligonucleotide
  Antisense strand to SEQ ID NO: 765546
ucauggguuaagaagcucc

SEQ ID NO: 765548 - RNA, 19 nt, Artificial Sequence
  Description of Artificial Sequence: Synthetic oligonucleotide
  Sense strand starting at position 513 of SEQ ID NO: 587084
ucaucagcugucuaugaca

SEQ ID NO: 765549 - RNA, 19 nt, Artificial Sequence
  Description of Artificial Sequence: Synthetic oligonucleotide
  Antisense strand to SEQ ID NO: 765548
ugucauagacagcugauga

SEQ ID NO: 765550 - RNA, 19 nt, Artificial Sequence
  Description of Artificial Sequence: Synthetic oligonucleotide
  Sense strand starting at position 515 of SEQ ID NO: 587084
aucagcugucuaugacauu

SEQ ID NO: 765551 - RNA, 19 nt, Artificial Sequence
  Description of Artificial Sequence: Synthetic oligonucleotide
  Antisense strand to SEQ ID NO: 765550
aaugucauagacagcugau

SEQ ID NO: 765552 - RNA, 19 nt, Artificial Sequence
  Description of Artificial Sequence: Synthetic oligonucleotide
  Sense strand starting at position 584 of SEQ ID NO: 587084
gcaccugaaacguggauau

SEQ ID NO: 765553 - RNA, 19 nt, Artificial Sequence
  Description of Artificial Sequence: Synthetic oligonucleotide
  Antisense strand to SEQ ID NO: 765552
auauccacguuucaggugc

SEQ ID NO: 765554 - RNA, 19 nt, Artificial Sequence
  Description of Artificial Sequence: Synthetic oligonucleotide
  Sense strand starting at position 586 of SEQ ID NO: 587084
accugaaacguggauauuc

SEQ ID NO: 765555 - RNA, 19 nt, Artificial Sequence
  Description of Artificial Sequence: Synthetic oligonucleotide
  Antisense strand to SEQ ID NO: 765554
gaauauccacguuucaggu

SEQ ID NO: 765556 - RNA, 19 nt, Artificial Sequence
  Description of Artificial Sequence: Synthetic oligonucleotide
  Sense strand starting at position 1095 of SEQ ID NO: 587084
uuacauaugugguuucuau

SEQ ID NO: 765557 - RNA, 19 nt, Artificial Sequence
  Description of Artificial Sequence: Synthetic oligonucleotide
  Antisense strand to SEQ ID NO: 765556
auagaaaccacauauguaa

SEQ ID NO: 765558 - RNA, 19 nt, Artificial Sequence
  Description of Artificial Sequence: Synthetic oligonucleotide
  Sense strand starting at position 1267 of SEQ ID NO: 587084
ugcuuaacuucuuugaguu

SEQ ID NO: 765559 - RNA, 19 nt, Artificial Sequence
  Description of Artificial Sequence: Synthetic oligonucleotide
  Antisense strand to SEQ ID NO: 765558
aacucaaagaaguuaagca

SEQ ID NO: 765560 - RNA, 19 nt, Artificial Sequence
  Description of Artificial Sequence: Synthetic oligonucleotide
  Sense strand starting at position 1297 of SEQ ID NO: 587084
ucaugcuuccaguaggaau

SEQ ID NO: 765561 - RNA, 19 nt, Artificial Sequence
  Description of Artificial Sequence: Synthetic oligonucleotide
  Antisense strand to SEQ ID NO: 765560
auuccuacuggaagcauga

SEQ ID NO: 765562 - RNA, 19 nt, Artificial Sequence
  Description of Artificial Sequence: Synthetic oligonucleotide
  Sense strand starting at position 1744 of SEQ ID NO: 587084
ggaaauaguccaggcagau

SEQ ID NO: 765563 - RNA, 19 nt, Artificial Sequence
  Description of Artificial Sequence: Synthetic oligonucleotide
  Antisense strand to SEQ ID NO: 765562
aucugccuggacuauuucc

SEQ ID NO: 765564 - RNA, 19 nt, Artificial Sequence
  Description of Artificial Sequence: Synthetic oligonucleotide
  Sense strand starting at position 2074 of SEQ ID NO: 587084
gugaguggcuccuccaaac

SEQ ID NO: 765565 - RNA, 19 nt, Artificial Sequence
  Description of Artificial Sequence: Synthetic oligonucleotide
  Antisense strand to SEQ ID NO: 765564
guuuggaggagccacucac

SEQ ID NO: 765566 - RNA, 19 nt, Artificial Sequence
  Description of Artificial Sequence: Synthetic oligonucleotide
  Sense strand starting at position 2104 of SEQ ID NO: 587084
cccagaaaugccuguggaa

SEQ ID NO: 765567 - RNA, 19 nt, Artificial Sequence
  Description of Artificial Sequence: Synthetic oligonucleotide
  Antisense strand to SEQ ID NO: 765566
uuccacaggcauuucuggg

SEQ ID NO: 765568 - RNA, 19 nt, Artificial Sequence
  Description of Artificial Sequence: Synthetic oligonucleotide
  Sense strand starting at position 2263 of SEQ ID NO: 587084
uuuagagucccaggaguuc

SEQ ID NO: 765569 - RNA, 19 nt, Artificial Sequence
  Description of Artificial Sequence: Synthetic oligonucleotide
  Antisense strand to SEQ ID NO: 765568
gaacuccugggacucuaaa

SEQ ID NO: 765570 - RNA, 19 nt, Artificial Sequence
  Description of Artificial Sequence: Synthetic oligonucleotide
  Sense strand starting at position 2321 of SEQ ID NO: 587084
acuugaaggaucuguguug

SEQ ID NO: 765571 - RNA, 19 nt, Artificial Sequence
  Description of Artificial Sequence: Synthetic oligonucleotide
  Antisense strand to SEQ ID NO: 765570
caacacagauccuucaagu

SEQ ID NO: 765572 - RNA, 19 nt, Artificial Sequence
  Description of Artificial Sequence: Synthetic oligonucleotide
  Sense strand starting at position 2369 of SEQ ID NO: 587084
ugauuuggauucugagaug

SEQ ID NO: 765573 - RNA, 19 nt, Artificial Sequence
  Description of Artificial Sequence: Synthetic oligonucleotide
  Antisense strand to SEQ ID NO: 765572
caucucagaauccaaauca

SEQ ID NO: 765574 - RNA, 19 nt, Artificial Sequence
  Description of Artificial Sequence: Synthetic oligonucleotide
  Sense strand starting at position 2374 of SEQ ID NO: 587084
uggauucugagaugcagau

SEQ ID NO: 765575 - RNA, 19 nt, Artificial Sequence
  Description of Artificial Sequence: Synthetic oligonucleotide
  Antisense strand to SEQ ID NO: 765574
aucugcaucucagaaucca

SEQ ID NO: 765576 - RNA, 19 nt, Artificial Sequence
  Description of Artificial Sequence: Synthetic oligonucleotide
  Sense strand starting at position 2526 of SEQ ID NO: 587084
gaucuuguguuucugaggu

SEQ ID NO: 765577 - RNA, 19 nt, Artificial Sequence
  Description of Artificial Sequence: Synthetic oligonucleotide
  Antisense strand to SEQ ID NO: 765576
accucagaaacacaagauc

SEQ ID NO: 765578 - RNA, 19 nt, Artificial Sequence
  Description of Artificial Sequence: Synthetic oligonucleotide
  Sense strand starting at position 2694 of SEQ ID NO: 587084
gagagcucuguccagcagu

SEQ ID NO: 765579 - RNA, 19 nt, Artificial Sequence
  Description of Artificial Sequence: Synthetic oligonucleotide
  Antisense strand to SEQ ID NO: 765578
acugcuggacagagcucuc

SEQ ID NO: 765580 - RNA, 19 nt, Artificial Sequence
  Description of Artificial Sequence: Synthetic oligonucleotide
  Sense strand starting at position 2774 of SEQ ID NO: 587084
gugucugccuuauuugaca

SEQ ID NO: 765581 - RNA, 19 nt, Artificial Sequence
  Description of Artificial Sequence: Synthetic oligonucleotide
  Antisense strand to SEQ ID NO: 765580
ugucaaauaaggcagacac

SEQ ID NO: 765582 - RNA, 19 nt, Artificial Sequence
  Description of Artificial Sequence: Synthetic oligonucleotide
  Sense strand starting at position 2793 of SEQ ID NO: 587084
augauaugaugaggcauuu

SEQ ID NO: 765583 - RNA, 19 nt, Artificial Sequence
  Description of Artificial Sequence: Synthetic oligonucleotide
  Antisense strand to SEQ ID NO: 765582
aaaugccucaucauaucau

SEQ ID NO: 765584 - RNA, 19 nt, Artificial Sequence
  Description of Artificial Sequence: Synthetic oligonucleotide
  Sense strand starting at position 3073 of SEQ ID NO: 587084
caguaaguaguaugauuaa

SEQ ID NO: 765585 - RNA, 19 nt, Artificial Sequence
  Description of Artificial Sequence: Synthetic oligonucleotide
  Antisense strand to SEQ ID NO: 765584
uuaaucauacuacuuacug

SEQ ID NO: 765586 - RNA, 19 nt, Artificial Sequence
  Description of Artificial Sequence: Synthetic oligonucleotide
  Sense strand starting at position 3106 of SEQ ID NO: 587084
ggguucuugagguaucugu

SEQ ID NO: 765587 - RNA, 19 nt, Artificial Sequence
  Description of Artificial Sequence: Synthetic oligonucleotide
  Antisense strand to SEQ ID NO: 765586
acagauaccucaagaaccc

SEQ ID NO: 765588 - RNA, 19 nt, Artificial Sequence
  Description of Artificial Sequence: Synthetic oligonucleotide
  Sense strand starting at position 3227 of SEQ ID NO: 587084
gggaucugguucuuuaaua

SEQ ID NO: 765589 - RNA, 19 nt, Artificial Sequence
  Description of Artificial Sequence: Synthetic oligonucleotide
  Antisense strand to SEQ ID NO: 765588
uauuaaagaaccagauccc

SEQ ID NO: 765590 - RNA, 19 nt, Artificial Sequence
  Description of Artificial Sequence: Synthetic oligonucleotide
  Sense strand starting at position 3228 of SEQ ID NO: 587084
ggaucugguucuuuaauag

SEQ ID NO: 765591 - RNA, 19 nt, Artificial Sequence
  Description of Artificial Sequence: Synthetic oligonucleotide
  Antisense strand to SEQ ID NO: 765590
cuauuaaagaaccagaucc

SEQ ID NO: 765592 - RNA, 19 nt, Artificial Sequence
  Description of Artificial Sequence: Synthetic oligonucleotide
  Sense strand starting at position 3281 of SEQ ID NO: 587084
ugauguuuaccaugagugu

SEQ ID NO: 765593 - RNA, 19 nt, Artificial Sequence
  Description of Artificial Sequence: Synthetic oligonucleotide
  Antisense strand to SEQ ID NO: 765592
acacucaugguaaacauca

SEQ ID NO: 765594 - RNA, 19 nt, Artificial Sequence
  Description of Artificial Sequence: Synthetic oligonucleotide
  Sense strand starting at position 3282 of SEQ ID NO: 587084
gauguuuaccaugaguguu

SEQ ID NO: 765595 - RNA, 19 nt, Artificial Sequence
  Description of Artificial Sequence: Synthetic oligonucleotide
  Antisense strand to SEQ ID NO: 765594
aacacucaugguaaacauc

SEQ ID NO: 765596 - RNA, 19 nt, Artificial Sequence
  Description of Artificial Sequence: Synthetic oligonucleotide
  Sense strand starting at position 3284 of SEQ ID NO: 587084
uguuuaccaugaguguuua

SEQ ID NO: 765597 - RNA, 19 nt, Artificial Sequence
  Description of Artificial Sequence: Synthetic oligonucleotide
  Antisense strand to SEQ ID NO: 765596
uaaacacucaugguaaaca

SEQ ID NO: 765598 - RNA, 19 nt, Artificial Sequence
  Description of Artificial Sequence: Synthetic oligonucleotide
  Sense strand starting at position 3285 of SEQ ID NO: 587084
guuuaccaugaguguuuau

SEQ ID NO: 765599 - RNA, 19 nt, Artificial Sequence
  Description of Artificial Sequence: Synthetic oligonucleotide
  Antisense strand to SEQ ID NO: 765598
auaaacacucaugguaaac

SEQ ID NO: 765600 - RNA, 19 nt, Artificial Sequence
  Description of Artificial Sequence: Synthetic oligonucleotide
  Sense strand starting at position 3296 of SEQ ID NO: 587084
guguuuauggcaucugugu

SEQ ID NO: 765601 - RNA, 19 nt, Artificial Sequence
  Description of Artificial Sequence: Synthetic oligonucleotide
  Antisense strand to SEQ ID NO: 765600
acacagaugccauaaacac

SEQ ID NO: 765602 - RNA, 19 nt, Artificial Sequence
  Description of Artificial Sequence: Synthetic oligonucleotide
  Sense strand starting at position 3316 of SEQ ID NO: 587084
ucuauauguuuaccuaagu

SEQ ID NO: 765603 - RNA, 19 nt, Artificial Sequence
  Description of Artificial Sequence: Synthetic oligonucleotide
  Antisense strand to SEQ ID NO: 765602
acuuagguaaacauauaga

SEQ ID NO: 765604 - RNA, 19 nt, Artificial Sequence
  Description of Artificial Sequence: Synthetic oligonucleotide
  Sense strand starting at position 3317 of SEQ ID NO: 587084
cuauauguuuaccuaagua

SEQ ID NO: 765605 - RNA, 19 nt, Artificial Sequence
  Description of Artificial Sequence: Synthetic oligonucleotide
  Antisense strand to SEQ ID NO: 765604
uacuuagguaaacauauag

SEQ ID NO: 765606 - RNA, 19 nt, Artificial Sequence
  Description of Artificial Sequence: Synthetic oligonucleotide
  Sense strand starting at position 3471 of SEQ ID NO: 587084
aagugaggcucccuaauua

SEQ ID NO: 765607 - RNA, 19 nt, Artificial Sequence
  Description of Artificial Sequence: Synthetic oligonucleotide
  Antisense strand to SEQ ID NO: 765606
uaauuagggagccucacuu

SEQ ID NO: 765608 - RNA, 19 nt, Artificial Sequence
  Description of Artificial Sequence: Synthetic oligonucleotide
  Sense strand starting at position 3512 of SEQ ID NO: 587084
ugucuauaagucuguauac

SEQ ID NO: 765609 - RNA, 19 nt, Artificial Sequence
  Description of Artificial Sequence: Synthetic oligonucleotide
  Antisense strand to SEQ ID NO: 765608
guauacagacuuauagaca

SEQ ID NO: 765610 - RNA, 19 nt, Artificial Sequence
  Description of Artificial Sequence: Synthetic oligonucleotide
  Sense strand starting at position 3514 of SEQ ID NO: 587084
ucuauaagucuguauacca

SEQ ID NO: 765611 - RNA, 19 nt, Artificial Sequence
  Description of Artificial Sequence: Synthetic oligonucleotide
  Antisense strand to SEQ ID NO: 765610
ugguauacagacuuauaga

SEQ ID NO: 765612 - RNA, 19 nt, Artificial Sequence
  Description of Artificial Sequence: Synthetic oligonucleotide
  Sense strand starting at position 3553 of SEQ ID NO: 587084
guggaaucacuauguuucu

SEQ ID NO: 765613 - RNA, 19 nt, Artificial Sequence
  Description of Artificial Sequence: Synthetic oligonucleotide
  Antisense strand to SEQ ID NO: 765612
agaaacauagugauuccac

SEQ ID NO: 765614 - RNA, 19 nt, Artificial Sequence
  Description of Artificial Sequence: Synthetic oligonucleotide
  Sense strand starting at position 3554 of SEQ ID NO: 587084
uggaaucacuauguuucuu

SEQ ID NO: 765615 - RNA, 19 nt, Artificial Sequence
  Description of Artificial Sequence: Synthetic oligonucleotide
  Antisense strand to SEQ ID NO: 765614
aagaaacauagugauucca

SEQ ID NO: 765616 - RNA, 19 nt, Artificial Sequence
  Description of Artificial Sequence: Synthetic oligonucleotide
  Sense strand starting at position 3559 of SEQ ID NO: 587084
ucacuauguuucuuuaugu

SEQ ID NO: 765617 - RNA, 19 nt, Artificial Sequence
  Description of Artificial Sequence: Synthetic oligonucleotide
  Antisense strand to SEQ ID NO: 765616
acauaaagaaacauaguga

SEQ ID NO: 765618 - RNA, 19 nt, Artificial Sequence
  Description of Artificial Sequence: Synthetic oligonucleotide
  Sense strand starting at position 3690 of SEQ ID NO: 587084
auaugaguauccuugcuag

SEQ ID NO: 765619 - RNA, 19 nt, Artificial Sequence
  Description of Artificial Sequence: Synthetic oligonucleotide
  Antisense strand to SEQ ID NO: 765618
cuagcaaggauacucauau

SEQ ID NO: 765620 - RNA, 19 nt, Artificial Sequence
  Description of Artificial Sequence: Synthetic oligonucleotide
  Sense strand starting at position 3693 of SEQ ID NO: 587084
ugaguauccuugcuagagg

SEQ ID NO: 765621 - RNA, 19 nt, Artificial Sequence
  Description of Artificial Sequence: Synthetic oligonucleotide
  Antisense strand to SEQ ID NO: 765620
ccucuagcaaggauacuca

SEQ ID NO: 765622 - RNA, 19 nt, Artificial Sequence
  Description of Artificial Sequence: Synthetic oligonucleotide
  Sense strand starting at position 3945 of SEQ ID NO: 587084
gggcuauucuaaccagaaa

SEQ ID NO: 765623 - RNA, 19 nt, Artificial Sequence
  Description of Artificial Sequence: Synthetic oligonucleotide
  Antisense strand to SEQ ID NO: 765622
uuucugguuagaauagccc

SEQ ID NO: 765624 - RNA, 19 nt, Artificial Sequence
  Description of Artificial Sequence: Synthetic oligonucleotide
  Sense strand starting at position 466 of SEQ ID NO: 587085
gauguagagugauuccaga

SEQ ID NO: 765625 - RNA, 19 nt, Artificial Sequence
  Description of Artificial Sequence: Synthetic oligonucleotide
  Antisense strand to SEQ ID NO: 765624
ucuggaaucacucuacauc

SEQ ID NO: 765626 - RNA, 19 nt, Artificial Sequence
  Description of Artificial Sequence: Synthetic oligonucleotide
  Sense strand starting at position 766 of SEQ ID NO: 587085
uggcgcaaucuggcucauu

SEQ ID NO: 765627 - RNA, 19 nt, Artificial Sequence
  Description of Artificial Sequence: Synthetic oligonucleotide
  Antisense strand to SEQ ID NO: 765626
aaugagccagauugcgcca

SEQ ID NO: 765628 - RNA, 19 nt, Artificial Sequence
  Description of Artificial Sequence: Synthetic oligonucleotide
  Sense strand starting at position 997 of SEQ ID NO: 587085
ccgcgccuguccuguuaua

SEQ ID NO: 765629 - RNA, 19 nt, Artificial Sequence
  Description of Artificial Sequence: Synthetic oligonucleotide
  Antisense strand to SEQ ID NO: 765628
uauaacaggacaggcgcgg

SEQ ID NO: 765630 - RNA, 19 nt, Artificial Sequence
  Description of Artificial Sequence: Synthetic oligonucleotide
  Sense strand starting at position 999 of SEQ ID NO: 587085
gcgccuguccuguuauaca

SEQ ID NO: 765631 - RNA, 19 nt, Artificial Sequence
  Description of Artificial Sequence: Synthetic oligonucleotide
  Antisense strand to SEQ ID NO: 765630
uguauaacaggacaggcgc

SEQ ID NO: 765632 - RNA, 19 nt, Artificial Sequence
  Description of Artificial Sequence: Synthetic oligonucleotide
  Sense strand starting at position 1113 of SEQ ID NO: 587085
gaaaguuggcuguagcuua

SEQ ID NO: 765633 - RNA, 19 nt, Artificial Sequence
  Description of Artificial Sequence: Synthetic oligonucleotide
  Antisense strand to SEQ ID NO: 765632
uaagcuacagccaacuuuc

SEQ ID NO: 765634 - RNA, 19 nt, Artificial Sequence
  Description of Artificial Sequence: Synthetic oligonucleotide
  Sense strand starting at position 1386 of SEQ ID NO: 587085
gaacgagccucugucaauc

SEQ ID NO: 765635 - RNA, 19 nt, Artificial Sequence
  Description of Artificial Sequence: Synthetic oligonucleotide
  Antisense strand to SEQ ID NO: 765634
gauugacagaggcucguuc

SEQ ID NO: 765636 - RNA, 19 nt, Artificial Sequence
  Description of Artificial Sequence: Synthetic oligonucleotide
  Sense strand starting at position 1438 of SEQ ID NO: 587085
ggccuaaauucucuagaac

SEQ ID NO: 765637 - RNA, 19 nt, Artificial Sequence
  Description of Artificial Sequence: Synthetic oligonucleotide
  Antisense strand to SEQ ID NO: 765636
guucuagagaauuuaggcc

SEQ ID NO: 765638 - RNA, 19 nt, Artificial Sequence
  Description of Artificial Sequence: Synthetic oligonucleotide
  Sense strand starting at position 1696 of SEQ ID NO: 587085
cgccaugugucucaucaug

SEQ ID NO: 765639 - RNA, 19 nt, Artificial Sequence
  Description of Artificial Sequence: Synthetic oligonucleotide
  Antisense strand to SEQ ID NO: 765638
caugaugagacacauggcg

SEQ ID NO: 765640 - RNA, 19 nt, Artificial Sequence
  Description of Artificial Sequence: Synthetic oligonucleotide
  Sense strand starting at position 2622 of SEQ ID NO: 587085
ggcgguuuguccucaggau

SEQ ID NO: 765641 - RNA, 19 nt, Artificial Sequence
  Description of Artificial Sequence: Synthetic oligonucleotide
  Antisense strand to SEQ ID NO: 765640
auccugaggacaaaccgcc

SEQ ID NO: 765642 - RNA, 19 nt, Artificial Sequence
  Description of Artificial Sequence: Synthetic oligonucleotide
  Sense strand starting at position 2623 of SEQ ID NO: 587085
gcgguuuguccucaggauc

SEQ ID NO: 765643 - RNA, 19 nt, Artificial Sequence
  Description of Artificial Sequence: Synthetic oligonucleotide
  Antisense strand to SEQ ID NO: 765642
gauccugaggacaaaccgc

SEQ ID NO: 765644 - RNA, 19 nt, Artificial Sequence
  Description of Artificial Sequence: Synthetic oligonucleotide
  Sense strand starting at position 2626 of SEQ ID NO: 587085
guuuguccucaggauccau

SEQ ID NO: 765645 - RNA, 19 nt, Artificial Sequence
  Description of Artificial Sequence: Synthetic oligonucleotide
  Antisense strand to SEQ ID NO: 765644
auggauccugaggacaaac

SEQ ID NO: 765646 - RNA, 19 nt, Artificial Sequence
  Description of Artificial Sequence: Synthetic oligonucleotide
  Sense strand starting at position 3009 of SEQ ID NO: 587085
cgcugcuuccggccugaau

SEQ ID NO: 765647 - RNA, 19 nt, Artificial Sequence
  Description of Artificial Sequence: Synthetic oligonucleotide
  Antisense strand to SEQ ID NO: 765646
auucaggccggaagcagcg

SEQ ID NO: 765648 - RNA, 19 nt, Artificial Sequence
  Description of Artificial Sequence: Synthetic oligonucleotide
  Sense strand starting at position 3010 of SEQ ID NO: 587085
gcugcuuccggccugaauu

SEQ ID NO: 765649 - RNA, 19 nt, Artificial Sequence
  Description of Artificial Sequence: Synthetic oligonucleotide
  Antisense strand to SEQ ID NO: 765648
aauucaggccggaagcagc

SEQ ID NO: 765650 - RNA, 19 nt, Artificial Sequence
  Description of Artificial Sequence: Synthetic oligonucleotide
  Sense strand starting at position 3011 of SEQ ID NO: 587085
cugcuuccggccugaauua

SEQ ID NO: 765651 - RNA, 19 nt, Artificial Sequence
  Description of Artificial Sequence: Synthetic oligonucleotide
  Antisense strand to SEQ ID NO: 765650
uaauucaggccggaagcag

SEQ ID NO: 765652 - RNA, 19 nt, Artificial Sequence
  Description of Artificial Sequence: Synthetic oligonucleotide
  Sense strand starting at position 3069 of SEQ ID NO: 587085
uugugugaugcuuccgcaa

SEQ ID NO: 765653 - RNA, 19 nt, Artificial Sequence
  Description of Artificial Sequence: Synthetic oligonucleotide
  Antisense strand to SEQ ID NO: 765652
uugcggaagcaucacacaa

SEQ ID NO: 765654 - RNA, 19 nt, Artificial Sequence
  Description of Artificial Sequence: Synthetic oligonucleotide
  Sense strand starting at position 3071 of SEQ ID NO: 587085
gugugaugcuuccgcaaag

SEQ ID NO: 765655 - RNA, 19 nt, Artificial Sequence
  Description of Artificial Sequence: Synthetic oligonucleotide
  Antisense strand to SEQ ID NO: 765654
cuuugcggaagcaucacac

SEQ ID NO: 765656 - RNA, 19 nt, Artificial Sequence
  Description of Artificial Sequence: Synthetic oligonucleotide
  Sense strand starting at position 3082 of SEQ ID NO: 587085
ccgcaaagcucuugaaccu

SEQ ID NO: 765657 - RNA, 19 nt, Artificial Sequence
  Description of Artificial Sequence: Synthetic oligonucleotide
  Antisense strand to SEQ ID NO: 765656
agguucaagagcuuugcgg

SEQ ID NO: 765658 - RNA, 19 nt, Artificial Sequence
  Description of Artificial Sequence: Synthetic oligonucleotide
  Sense strand starting at position 3185 of SEQ ID NO: 587085
ucacauuguuucuguguga

SEQ ID NO: 765659 - RNA, 19 nt, Artificial Sequence
  Description of Artificial Sequence: Synthetic oligonucleotide
  Antisense strand to SEQ ID NO: 765658
ucacacagaaacaauguga

SEQ ID NO: 765660 - RNA, 19 nt, Artificial Sequence
  Description of Artificial Sequence: Synthetic oligonucleotide
  Sense strand starting at position 3186 of SEQ ID NO: 587085
cacauuguuucugugugau

SEQ ID NO: 765661 - RNA, 19 nt, Artificial Sequence
  Description of Artificial Sequence: Synthetic oligonucleotide
  Antisense strand to SEQ ID NO: 765660
aucacacagaaacaaugug

SEQ ID NO: 765662 - RNA, 19 nt, Artificial Sequence
  Description of Artificial Sequence: Synthetic oligonucleotide
  Sense strand starting at position 3453 of SEQ ID NO: 587085
agcgcagguucuuugaguu

SEQ ID NO: 765663 - RNA, 19 nt, Artificial Sequence
  Description of Artificial Sequence: Synthetic oligonucleotide
  Antisense strand to SEQ ID NO: 765662
aacucaaagaaccugcgcu

SEQ ID NO: 765664 - RNA, 19 nt, Artificial Sequence
  Description of Artificial Sequence: Synthetic oligonucleotide
  Sense strand starting at position 3459 of SEQ ID NO: 587085
gguucuuugaguuggcuuu

SEQ ID NO: 765665 - RNA, 19 nt, Artificial Sequence
  Description of Artificial Sequence: Synthetic oligonucleotide
  Antisense strand to SEQ ID NO: 765664
aaagccaacucaaagaacc

SEQ ID NO: 765666 - RNA, 19 nt, Artificial Sequence
  Description of Artificial Sequence: Synthetic oligonucleotide
  Sense strand starting at position 3815 of SEQ ID NO: 587085
gauuaauucuagcugggag

SEQ ID NO: 765667 - RNA, 19 nt, Artificial Sequence
  Description of Artificial Sequence: Synthetic oligonucleotide
  Antisense strand to SEQ ID NO: 765666
cucccagcuagaauuaauc

SEQ ID NO: 765668 - RNA, 19 nt, Artificial Sequence
  Description of Artificial Sequence: Synthetic oligonucleotide
  Sense strand starting at position 3818 of SEQ ID NO: 587085
uaauucuagcugggagguu

SEQ ID NO: 765669 - RNA, 19 nt, Artificial Sequence
  Description of Artificial Sequence: Synthetic oligonucleotide
  Antisense strand to SEQ ID NO: 765668
aaccucccagcuagaauua

SEQ ID NO: 765670 - RNA, 19 nt, Artificial Sequence
  Description of Artificial Sequence: Synthetic oligonucleotide
  Sense strand starting at position 3867 of SEQ ID NO: 587085
ugaacugagccuggaaguu

SEQ ID NO: 765671 - RNA, 19 nt, Artificial Sequence
  Description of Artificial Sequence: Synthetic oligonucleotide
  Antisense strand to SEQ ID NO: 765670
aacuuccaggcucaguuca

SEQ ID NO: 765672 - RNA, 19 nt, Artificial Sequence
  Description of Artificial Sequence: Synthetic oligonucleotide
  Sense strand starting at position 621 of SEQ ID NO: 587086
cuguucguguggcuucaau

SEQ ID NO: 765673 - RNA, 19 nt, Artificial Sequence
  Description of Artificial Sequence: Synthetic oligonucleotide
  Antisense strand to SEQ ID NO: 765672
auugaagccacacgaacag

SEQ ID NO: 765674 - RNA, 19 nt, Artificial Sequence
  Description of Artificial Sequence: Synthetic oligonucleotide
  Sense strand starting at position 712 of SEQ ID NO: 587086
cgaggauagcuggauccuu

SEQ ID NO: 765675 - RNA, 19 nt, Artificial Sequence
  Description of Artificial Sequence: Synthetic oligonucleotide
  Antisense strand to SEQ ID NO: 765674
aaggauccagcuauccucg

SEQ ID NO: 765676 - RNA, 19 nt, Artificial Sequence
  Description of Artificial Sequence: Synthetic oligonucleotide
  Sense strand starting at position 1097 of SEQ ID NO: 587086
cagcccuugcaguaagagu

SEQ ID NO: 765677 - RNA, 19 nt, Artificial Sequence
  Description of Artificial Sequence: Synthetic oligonucleotide
  Antisense strand to SEQ ID NO: 765676
acucuuacugcaagggcug

SEQ ID NO: 765678 - RNA, 19 nt, Artificial Sequence
  Description of Artificial Sequence: Synthetic oligonucleotide
  Sense strand starting at position 1380 of SEQ ID NO: 587086
ccaguuuccgcagcuguaa

SEQ ID NO: 765679 - RNA, 19 nt, Artificial Sequence
  Description of Artificial Sequence: Synthetic oligonucleotide
  Antisense strand to SEQ ID NO: 765678
uuacagcugcggaaacugg

SEQ ID NO: 765680 - RNA, 19 nt, Artificial Sequence
  Description of Artificial Sequence: Synthetic oligonucleotide
  Sense strand starting at position 1426 of SEQ ID NO: 587086
gucccuugaagauaugugu

SEQ ID NO: 765681 - RNA, 19 nt, Artificial Sequence
  Description of Artificial Sequence: Synthetic oligonucleotide
  Antisense strand to SEQ ID NO: 765680
acacauaucuucaagggac

SEQ ID NO: 765682 - RNA, 19 nt, Artificial Sequence
  Description of Artificial Sequence: Synthetic oligonucleotide
  Sense strand starting at position 1634 of SEQ ID NO: 587086
uucccaaacuuucgggaaa

SEQ ID NO: 765683 - RNA, 19 nt, Artificial Sequence
  Description of Artificial Sequence: Synthetic oligonucleotide
  Antisense strand to SEQ ID NO: 765682
uuucccgaaaguuugggaa

SEQ ID NO: 765684 - RNA, 19 nt, Artificial Sequence
  Description of Artificial Sequence: Synthetic oligonucleotide
  Sense strand starting at position 1636 of SEQ ID NO: 587086
cccaaacuuucgggaaacu

SEQ ID NO: 765685 - RNA, 19 nt, Artificial Sequence
  Description of Artificial Sequence: Synthetic oligonucleotide
  Antisense strand to SEQ ID NO: 765684
aguuucccgaaaguuuggg

SEQ ID NO: 765686 - RNA, 19 nt, Artificial Sequence
  Description of Artificial Sequence: Synthetic oligonucleotide
  Sense strand starting at position 1823 of SEQ ID NO: 587086
uaugaaagcuugucaauga

SEQ ID NO: 765687 - RNA, 19 nt, Artificial Sequence
  Description of Artificial Sequence: Synthetic oligonucleotide
  Antisense strand to SEQ ID NO: 765686
ucauugacaagcuuucaua

SEQ ID NO: 765688 - RNA, 19 nt, Artificial Sequence
  Description of Artificial Sequence: Synthetic oligonucleotide
  Sense strand starting at position 1824 of SEQ ID NO: 587086
augaaagcuugucaaugag

SEQ ID NO: 765689 - RNA, 19 nt, Artificial Sequence
  Description of Artificial Sequence: Synthetic oligonucleotide
  Antisense strand to SEQ ID NO: 765688
cucauugacaagcuuucau

SEQ ID NO: 765690 - RNA, 19 nt, Artificial Sequence
  Description of Artificial Sequence: Synthetic oligonucleotide
  Sense strand starting at position 1827 of SEQ ID NO: 587086
aaagcuugucaaugagaca

SEQ ID NO: 765691 - RNA, 19 nt, Artificial Sequence
  Description of Artificial Sequence: Synthetic oligonucleotide
  Antisense strand to SEQ ID NO: 765690
ugucucauugacaagcuuu

SEQ ID NO: 765692 - RNA, 19 nt, Artificial Sequence
  Description of Artificial Sequence: Synthetic oligonucleotide
  Sense strand starting at position 1830 of SEQ ID NO: 587086
gcuugucaaugagacagaa

SEQ ID NO: 765693 - RNA, 19 nt, Artificial Sequence
  Description of Artificial Sequence: Synthetic oligonucleotide
  Antisense strand to SEQ ID NO: 765692
uucugucucauugacaagc

SEQ ID NO: 765694 - RNA, 19 nt, Artificial Sequence
  Description of Artificial Sequence: Synthetic oligonucleotide
  Sense strand starting at position 1882 of SEQ ID NO: 587086
uggaauaccuggcuucuca

SEQ ID NO: 765695 - RNA, 19 nt, Artificial Sequence
  Description of Artificial Sequence: Synthetic oligonucleotide
  Antisense strand to SEQ ID NO: 765694
ugagaagccagguauucca

SEQ ID NO: 765696 - RNA, 19 nt, Artificial Sequence
  Description of Artificial Sequence: Synthetic oligonucleotide
  Sense strand starting at position 2241 of SEQ ID NO: 587086
gcagauaggugcugggaaa

SEQ ID NO: 765697 - RNA, 19 nt, Artificial Sequence
  Description of Artificial Sequence: Synthetic oligonucleotide
  Antisense strand to SEQ ID NO: 765696
uuucccagcaccuaucugc

SEQ ID NO: 765698 - RNA, 19 nt, Artificial Sequence
  Description of Artificial Sequence: Synthetic oligonucleotide
  Sense strand starting at position 2973 of SEQ ID NO: 587086
gauguagagugauuccaga

SEQ ID NO: 765699 - RNA, 19 nt, Artificial Sequence
  Description of Artificial Sequence: Synthetic oligonucleotide
  Antisense strand to SEQ ID NO: 765698
ucuggaaucacucuacauc

SEQ ID NO: 765700 - RNA, 19 nt, Artificial Sequence
  Description of Artificial Sequence: Synthetic oligonucleotide
  Sense strand starting at position 3273 of SEQ ID NO: 587086
uggcgcaaucuggcucauu

SEQ ID NO: 765701 - RNA, 19 nt, Artificial Sequence
  Description of Artificial Sequence: Synthetic oligonucleotide
  Antisense strand to SEQ ID NO: 765700
aaugagccagauugcgcca

SEQ ID NO: 765702 - RNA, 19 nt, Artificial Sequence
  Description of Artificial Sequence: Synthetic oligonucleotide
  Sense strand starting at position 3504 of SEQ ID NO: 587086
ccgcgccuguccuguuaua

SEQ ID NO: 765703 - RNA, 19 nt, Artificial Sequence
  Description of Artificial Sequence: Synthetic oligonucleotide
  Antisense strand to SEQ ID NO: 765702
uauaacaggacaggcgcgg

SEQ ID NO: 765704 - RNA, 19 nt, Artificial Sequence
  Description of Artificial Sequence: Synthetic oligonucleotide
  Sense strand starting at position 3506 of SEQ ID NO: 587086
gcgccuguccuguuauaca

SEQ ID NO: 765705 - RNA, 19 nt, Artificial Sequence
  Description of Artificial Sequence: Synthetic oligonucleotide
  Antisense strand to SEQ ID NO: 765704
uguauaacaggacaggcgc

SEQ ID NO: 765706 - RNA, 19 nt, Artificial Sequence
  Description of Artificial Sequence: Synthetic oligonucleotide
  Sense strand starting at position 3620 of SEQ ID NO: 587086
gaaaguuggcuguagcuua

SEQ ID NO: 765707 - RNA, 19 nt, Artificial Sequence
  Description of Artificial Sequence: Synthetic oligonucleotide
  Antisense strand to SEQ ID NO: 765706
uaagcuacagccaacuuuc

SEQ ID NO: 765708 - RNA, 19 nt, Artificial Sequence
  Description of Artificial Sequence: Synthetic oligonucleotide
  Sense strand starting at position 3893 of SEQ ID NO: 587086
gaacgagccucugucaauc

SEQ ID NO: 765709 - RNA, 19 nt, Artificial Sequence
  Description of Artificial Sequence: Synthetic oligonucleotide
  Antisense strand to SEQ ID NO: 765708
gauugacagaggcucguuc

SEQ ID NO: 765710 - RNA, 19 nt, Artificial Sequence
  Description of Artificial Sequence: Synthetic oligonucleotide
  Sense strand starting at position 3945 of SEQ ID NO: 587086
ggccuaaauucucuagaac

SEQ ID NO: 765711 - RNA, 19 nt, Artificial Sequence
  Description of Artificial Sequence: Synthetic oligonucleotide
  Antisense strand to SEQ ID NO: 765710
guucuagagaauuuaggcc

SEQ ID NO: 765712 - RNA, 19 nt, Artificial Sequence
  Description of Artificial Sequence: Synthetic oligonucleotide
  Sense strand starting at position 510 of SEQ ID NO: 587087
ccaggagucccuggccuua

SEQ ID NO: 765713 - RNA, 19 nt, Artificial Sequence
  Description of Artificial Sequence: Synthetic oligonucleotide
  Antisense strand to SEQ ID NO: 765712
uaaggccagggacuccugg

SEQ ID NO: 765714 - RNA, 19 nt, Artificial Sequence
  Description of Artificial Sequence: Synthetic oligonucleotide
  Sense strand starting at position 522 of SEQ ID NO: 587087
ggccuuagcuaauaaucga

SEQ ID NO: 765715 - RNA, 19 nt, Artificial Sequence
  Description of Artificial Sequence: Synthetic oligonucleotide
  Antisense strand to SEQ ID NO: 765714
ucgauuauuagcuaaggcc

SEQ ID NO: 765716 - RNA, 19 nt, Artificial Sequence
  Description of Artificial Sequence: Synthetic oligonucleotide
  Sense strand starting at position 562 of SEQ ID NO: 587087
caggccuuguggcaaacau

SEQ ID NO: 765717 - RNA, 19 nt, Artificial Sequence
  Description of Artificial Sequence: Synthetic oligonucleotide
  Antisense strand to SEQ ID NO: 765716
auguuugccacaaggccug

SEQ ID NO: 765718 - RNA, 19 nt, Artificial Sequence
  Description of Artificial Sequence: Synthetic oligonucleotide
  Sense strand starting at position 833 of SEQ ID NO: 587087
gcgugaucguaguucacug

SEQ ID NO: 765719 - RNA, 19 nt, Artificial Sequence
  Description of Artificial Sequence: Synthetic oligonucleotide
  Antisense strand to SEQ ID NO: 765718
cagugaacuacgaucacgc

SEQ ID NO: 765720 - RNA, 19 nt, Artificial Sequence
  Description of Artificial Sequence: Synthetic oligonucleotide
  Sense strand starting at position 1114 of SEQ ID NO: 587087
aauggaguuuggcccuauu

SEQ ID NO: 765721 - RNA, 19 nt, Artificial Sequence
  Description of Artificial Sequence: Synthetic oligonucleotide
  Antisense strand to SEQ ID NO: 765720
aauagggccaaacuccauu

SEQ ID NO: 765722 - RNA, 19 nt, Artificial Sequence
  Description of Artificial Sequence: Synthetic oligonucleotide
  Sense strand starting at position 1391 of SEQ ID NO: 587087
acaccugucuucugcuaga

SEQ ID NO: 765723 - RNA, 19 nt, Artificial Sequence
  Description of Artificial Sequence: Synthetic oligonucleotide
  Antisense strand to SEQ ID NO: 765722
ucuagcagaagacaggugu

SEQ ID NO: 765724 - RNA, 19 nt, Artificial Sequence
  Description of Artificial Sequence: Synthetic oligonucleotide
  Sense strand starting at position 1527 of SEQ ID NO: 587087
uggcucacccucugauaga

SEQ ID NO: 765725 - RNA, 19 nt, Artificial Sequence
  Description of Artificial Sequence: Synthetic oligonucleotide
  Antisense strand to SEQ ID NO: 765724
ucuaucagagggugagcca

SEQ ID NO: 765726 - RNA, 19 nt, Artificial Sequence
  Description of Artificial Sequence: Synthetic oligonucleotide
  Sense strand starting at position 1542 of SEQ ID NO: 587087
uagacuuggccuuggcuua

SEQ ID NO: 765727 - RNA, 19 nt, Artificial Sequence
  Description of Artificial Sequence: Synthetic oligonucleotide
  Antisense strand to SEQ ID NO: 765726
uaagccaaggccaagucua

SEQ ID NO: 765728 - RNA, 19 nt, Artificial Sequence
  Description of Artificial Sequence: Synthetic oligonucleotide
  Sense strand starting at position 1554 of SEQ ID NO: 587087
uggcuuaucuccuggaguc

SEQ ID NO: 765729 - RNA, 19 nt, Artificial Sequence
  Description of Artificial Sequence: Synthetic oligonucleotide
  Antisense strand to SEQ ID NO: 765728
gacuccaggagauaagcca

SEQ ID NO: 765730 - RNA, 19 nt, Artificial Sequence
  Description of Artificial Sequence: Synthetic oligonucleotide
  Sense strand starting at position 1594 of SEQ ID NO: 587087
cugaaugcauuccagaaac

SEQ ID NO: 765731 - RNA, 19 nt, Artificial Sequence
  Description of Artificial Sequence: Synthetic oligonucleotide
  Antisense strand to SEQ ID NO: 765730
guuucuggaaugcauucag

SEQ ID NO: 765732 - RNA, 19 nt, Artificial Sequence
  Description of Artificial Sequence: Synthetic oligonucleotide
  Sense strand starting at position 1658 of SEQ ID NO: 587087
cuacuuguugggcagacua

SEQ ID NO: 765733 - RNA, 19 nt, Artificial Sequence
  Description of Artificial Sequence: Synthetic oligonucleotide
  Antisense strand to SEQ ID NO: 765732
uagucugcccaacaaguag

SEQ ID NO: 765734 - RNA, 19 nt, Artificial Sequence
  Description of Artificial Sequence: Synthetic oligonucleotide
  Sense strand starting at position 2032 of SEQ ID NO: 587087
aauuguacuuguggugcaa

SEQ ID NO: 765735 - RNA, 19 nt, Artificial Sequence
  Description of Artificial Sequence: Synthetic oligonucleotide
  Antisense strand to SEQ ID NO: 765734
uugcaccacaaguacaauu

SEQ ID NO: 765736 - RNA, 19 nt, Artificial Sequence
  Description of Artificial Sequence: Synthetic oligonucleotide
  Sense strand starting at position 2225 of SEQ ID NO: 587087
guguguaugucacaaacag

SEQ ID NO: 765737 - RNA, 19 nt, Artificial Sequence
  Description of Artificial Sequence: Synthetic oligonucleotide
  Antisense strand to SEQ ID NO: 765736
cuguuugugacauacacac

SEQ ID NO: 765738 - RNA, 19 nt, Artificial Sequence
  Description of Artificial Sequence: Synthetic oligonucleotide
  Sense strand starting at position 2257 of SEQ ID NO: 587087
ggcggguucucugaguaga

SEQ ID NO: 765739 - RNA, 19 nt, Artificial Sequence
  Description of Artificial Sequence: Synthetic oligonucleotide
  Antisense strand to SEQ ID NO: 765738
ucuacucagagaacccgcc

SEQ ID NO: 765740 - RNA, 19 nt, Artificial Sequence
  Description of Artificial Sequence: Synthetic oligonucleotide
  Sense strand starting at position 2258 of SEQ ID NO: 587087
gcggguucucugaguagag

SEQ ID NO: 765741 - RNA, 19 nt, Artificial Sequence
  Description of Artificial Sequence: Synthetic oligonucleotide
  Antisense strand to SEQ ID NO: 765740
cucuacucagagaacccgc

SEQ ID NO: 765742 - RNA, 19 nt, Artificial Sequence
  Description of Artificial Sequence: Synthetic oligonucleotide
  Sense strand starting at position 2290 of SEQ ID NO: 587087
aggguuuauuugugggaag

SEQ ID NO: 765743 - RNA, 19 nt, Artificial Sequence
  Description of Artificial Sequence: Synthetic oligonucleotide
  Antisense strand to SEQ ID NO: 765742
cuucccacaaauaaacccu

SEQ ID NO: 765744 - RNA, 19 nt, Artificial Sequence
  Description of Artificial Sequence: Synthetic oligonucleotide
  Sense strand starting at position 2291 of SEQ ID NO: 587087
ggguuuauuugugggaaga

SEQ ID NO: 765745 - RNA, 19 nt, Artificial Sequence
  Description of Artificial Sequence: Synthetic oligonucleotide
  Antisense strand to SEQ ID NO: 765744
ucuucccacaaauaaaccc

SEQ ID NO: 765746 - RNA, 19 nt, Artificial Sequence
  Description of Artificial Sequence: Synthetic oligonucleotide
  Sense strand starting at position 2293 of SEQ ID NO: 587087
guuuauuugugggaagaaa

SEQ ID NO: 765747 - RNA, 19 nt, Artificial Sequence
  Description of Artificial Sequence: Synthetic oligonucleotide
  Antisense strand to SEQ ID NO: 765746
uuucuucccacaaauaaac

SEQ ID NO: 765748 - RNA, 19 nt, Artificial Sequence
  Description of Artificial Sequence: Synthetic oligonucleotide
  Sense strand starting at position 2313 of SEQ ID NO: 587087
gagagcucaucugugauuc

SEQ ID NO: 765749 - RNA, 19 nt, Artificial Sequence
  Description of Artificial Sequence: Synthetic oligonucleotide
  Antisense strand to SEQ ID NO: 765748
gaaucacagaugagcucuc

SEQ ID NO: 765750 - RNA, 19 nt, Artificial Sequence
  Description of Artificial Sequence: Synthetic oligonucleotide
  Sense strand starting at position 2444 of SEQ ID NO: 587087
guugcugagcuguaggaga

SEQ ID NO: 765751 - RNA, 19 nt, Artificial Sequence
  Description of Artificial Sequence: Synthetic oligonucleotide
  Antisense strand to SEQ ID NO: 765750
ucuccuacagcucagcaac

SEQ ID NO: 765752 - RNA, 19 nt, Artificial Sequence
  Description of Artificial Sequence: Synthetic oligonucleotide
  Sense strand starting at position 2484 of SEQ ID NO: 587087
aagccucuugcugagggaa

SEQ ID NO: 765753 - RNA, 19 nt, Artificial Sequence
  Description of Artificial Sequence: Synthetic oligonucleotide
  Antisense strand to SEQ ID NO: 765752
uucccucagcaagaggcuu

SEQ ID NO: 765754 - RNA, 19 nt, Artificial Sequence
  Description of Artificial Sequence: Synthetic oligonucleotide
  Sense strand starting at position 2486 of SEQ ID NO: 587087
gccucuugcugagggaaca

SEQ ID NO: 765755 - RNA, 19 nt, Artificial Sequence
  Description of Artificial Sequence: Synthetic oligonucleotide
  Antisense strand to SEQ ID NO: 765754
uguucccucagcaagaggc

SEQ ID NO: 765756 - RNA, 19 nt, Artificial Sequence
  Description of Artificial Sequence: Synthetic oligonucleotide
  Sense strand starting at position 2523 of SEQ ID NO: 587087
aggcaucaaugagaugagu

SEQ ID NO: 765757 - RNA, 19 nt, Artificial Sequence
  Description of Artificial Sequence: Synthetic oligonucleotide
  Antisense strand to SEQ ID NO: 765756
acucaucucauugaugccu

SEQ ID NO: 765758 - RNA, 19 nt, Artificial Sequence
  Description of Artificial Sequence: Synthetic oligonucleotide
  Sense strand starting at position 2525 of SEQ ID NO: 587087
gcaucaaugagaugaguuu

SEQ ID NO: 765759 - RNA, 19 nt, Artificial Sequence
  Description of Artificial Sequence: Synthetic oligonucleotide
  Antisense strand to SEQ ID NO: 765758
aaacucaucucauugaugc

SEQ ID NO: 765760 - RNA, 19 nt, Artificial Sequence
  Description of Artificial Sequence: Synthetic oligonucleotide
  Sense strand starting at position 2810 of SEQ ID NO: 587087
ggagaacacugagaagaau

SEQ ID NO: 765761 - RNA, 19 nt, Artificial Sequence
  Description of Artificial Sequence: Synthetic oligonucleotide
  Antisense strand to SEQ ID NO: 765760
auucuucucaguguucucc

SEQ ID NO: 765762 - RNA, 19 nt, Artificial Sequence
  Description of Artificial Sequence: Synthetic oligonucleotide
  Sense strand starting at position 2819 of SEQ ID NO: 587087
ugagaagaauguuccuguu

SEQ ID NO: 765763 - RNA, 19 nt, Artificial Sequence
  Description of Artificial Sequence: Synthetic oligonucleotide
  Antisense strand to SEQ ID NO: 765762
aacaggaacauucuucuca

SEQ ID NO: 765764 - RNA, 19 nt, Artificial Sequence
  Description of Artificial Sequence: Synthetic oligonucleotide
  Sense strand starting at position 2822 of SEQ ID NO: 587087
gaagaauguuccuguucca

SEQ ID NO: 765765 - RNA, 19 nt, Artificial Sequence
  Description of Artificial Sequence: Synthetic oligonucleotide
  Antisense strand to SEQ ID NO: 765764
uggaacaggaacauucuuc

SEQ ID NO: 765766 - RNA, 19 nt, Artificial Sequence
  Description of Artificial Sequence: Synthetic oligonucleotide
  Sense strand starting at position 2825 of SEQ ID NO: 587087
gaauguuccuguuccaggu

SEQ ID NO: 765767 - RNA, 19 nt, Artificial Sequence
  Description of Artificial Sequence: Synthetic oligonucleotide
  Antisense strand to SEQ ID NO: 765766
accuggaacaggaacauuc

SEQ ID NO: 765768 - RNA, 19 nt, Artificial Sequence
  Description of Artificial Sequence: Synthetic oligonucleotide
  Sense strand starting at position 2895 of SEQ ID NO: 587087
auacgagaguguuggcaga

SEQ ID NO: 765769 - RNA, 19 nt, Artificial Sequence
  Description of Artificial Sequence: Synthetic oligonucleotide
  Antisense strand to SEQ ID NO: 765768
ucugccaacacucucguau

SEQ ID NO: 765770 - RNA, 19 nt, Artificial Sequence
  Description of Artificial Sequence: Synthetic oligonucleotide
  Sense strand starting at position 2897 of SEQ ID NO: 587087
acgagaguguuggcagaga

SEQ ID NO: 765771 - RNA, 19 nt, Artificial Sequence
  Description of Artificial Sequence: Synthetic oligonucleotide
  Antisense strand to SEQ ID NO: 765770
ucucugccaacacucucgu

SEQ ID NO: 765772 - RNA, 19 nt, Artificial Sequence
  Description of Artificial Sequence: Synthetic oligonucleotide
  Sense strand starting at position 2898 of SEQ ID NO: 587087
cgagaguguuggcagagaa

SEQ ID NO: 765773 - RNA, 19 nt, Artificial Sequence
  Description of Artificial Sequence: Synthetic oligonucleotide
  Antisense strand to SEQ ID NO: 765772
uucucugccaacacucucg

SEQ ID NO: 765774 - RNA, 19 nt, Artificial Sequence
  Description of Artificial Sequence: Synthetic oligonucleotide
  Sense strand starting at position 2908 of SEQ ID NO: 587087
ggcagagaagccugcauuu

SEQ ID NO: 765775 - RNA, 19 nt, Artificial Sequence
  Description of Artificial Sequence: Synthetic oligonucleotide
  Antisense strand to SEQ ID NO: 765774
aaaugcaggcuucucugcc

SEQ ID NO: 765776 - RNA, 19 nt, Artificial Sequence
  Description of Artificial Sequence: Synthetic oligonucleotide
  Sense strand starting at position 2941 of SEQ ID NO: 587087
aaagaaucauugcaggaga

SEQ ID NO: 765777 - RNA, 19 nt, Artificial Sequence
  Description of Artificial Sequence: Synthetic oligonucleotide
  Antisense strand to SEQ ID NO: 765776
ucuccugcaaugauucuuu

SEQ ID NO: 765778 - RNA, 19 nt, Artificial Sequence
  Description of Artificial Sequence: Synthetic oligonucleotide
  Sense strand starting at position 2943 of SEQ ID NO: 587087
agaaucauugcaggagauu

SEQ ID NO: 765779 - RNA, 19 nt, Artificial Sequence
  Description of Artificial Sequence: Synthetic oligonucleotide
  Antisense strand to SEQ ID NO: 765778
aaucuccugcaaugauucu

SEQ ID NO: 765780 - RNA, 19 nt, Artificial Sequence
  Description of Artificial Sequence: Synthetic oligonucleotide
  Sense strand starting at position 3312 of SEQ ID NO: 587087
uugaaagaauugcggugaa

SEQ ID NO: 765781 - RNA, 19 nt, Artificial Sequence
  Description of Artificial Sequence: Synthetic oligonucleotide
  Antisense strand to SEQ ID NO: 765780
uucaccgcaauucuuucaa

SEQ ID NO: 765782 - RNA, 19 nt, Artificial Sequence
  Description of Artificial Sequence: Synthetic oligonucleotide
  Sense strand starting at position 3315 of SEQ ID NO: 587087
aaagaauugcggugaacac

SEQ ID NO: 765783 - RNA, 19 nt, Artificial Sequence
  Description of Artificial Sequence: Synthetic oligonucleotide
  Antisense strand to SEQ ID NO: 765782
guguucaccgcaauucuuu

SEQ ID NO: 765784 - RNA, 19 nt, Artificial Sequence
  Description of Artificial Sequence: Synthetic oligonucleotide
  Sense strand starting at position 3386 of SEQ ID NO: 587087
augacauaccuaugcaugu

SEQ ID NO: 765785 - RNA, 19 nt, Artificial Sequence
  Description of Artificial Sequence: Synthetic oligonucleotide
  Antisense strand to SEQ ID NO: 765784
acaugcauagguaugucau

SEQ ID NO: 765786 - RNA, 19 nt, Artificial Sequence
  Description of Artificial Sequence: Synthetic oligonucleotide
  Sense strand starting at position 3387 of SEQ ID NO: 587087
ugacauaccuaugcauguu

SEQ ID NO: 765787 - RNA, 19 nt, Artificial Sequence
  Description of Artificial Sequence: Synthetic oligonucleotide
  Antisense strand to SEQ ID NO: 765786
aacaugcauagguauguca

SEQ ID NO: 765788 - RNA, 19 nt, Artificial Sequence
  Description of Artificial Sequence: Synthetic oligonucleotide
  Sense strand starting at position 3440 of SEQ ID NO: 587087
ggaaacugaagcuguaaga

SEQ ID NO: 765789 - RNA, 19 nt, Artificial Sequence
  Description of Artificial Sequence: Synthetic oligonucleotide
  Antisense strand to SEQ ID NO: 765788
ucuuacagcuucaguuucc

SEQ ID NO: 765790 - RNA, 19 nt, Artificial Sequence
  Description of Artificial Sequence: Synthetic oligonucleotide
  Sense strand starting at position 71 of SEQ ID NO: 587088
aggcaugagccuuauugca

SEQ ID NO: 765791 - RNA, 19 nt, Artificial Sequence
  Description of Artificial Sequence: Synthetic oligonucleotide
  Antisense strand to SEQ ID NO: 765790
ugcaauaaggcucaugccu

SEQ ID NO: 765792 - RNA, 19 nt, Artificial Sequence
  Description of Artificial Sequence: Synthetic oligonucleotide
  Sense strand starting at position 131 of SEQ ID NO: 587088
ggcagaugaugguucgauc

SEQ ID NO: 765793 - RNA, 19 nt, Artificial Sequence
  Description of Artificial Sequence: Synthetic oligonucleotide
  Antisense strand to SEQ ID NO: 765792
gaucgaaccaucaucugcc

SEQ ID NO: 765794 - RNA, 19 nt, Artificial Sequence
  Description of Artificial Sequence: Synthetic oligonucleotide
  Sense strand starting at position 134 of SEQ ID NO: 587088
agaugaugguucgaucucu

SEQ ID NO: 765795 - RNA, 19 nt, Artificial Sequence
  Description of Artificial Sequence: Synthetic oligonucleotide
  Antisense strand to SEQ ID NO: 765794
agagaucgaaccaucaucu

SEQ ID NO: 765796 - RNA, 19 nt, Artificial Sequence
  Description of Artificial Sequence: Synthetic oligonucleotide
  Sense strand starting at position 139 of SEQ ID NO: 587088
augguucgaucucucgaau

SEQ ID NO: 765797 - RNA, 19 nt, Artificial Sequence
  Description of Artificial Sequence: Synthetic oligonucleotide
  Antisense strand to SEQ ID NO: 765796
auucgagagaucgaaccau

SEQ ID NO: 765798 - RNA, 19 nt, Artificial Sequence
  Description of Artificial Sequence: Synthetic oligonucleotide
  Sense strand starting at position 460 of SEQ ID NO: 587088
gauguacaguguuuccaga

SEQ ID NO: 765799 - RNA, 19 nt, Artificial Sequence
  Description of Artificial Sequence: Synthetic oligonucleotide
  Antisense strand to SEQ ID NO: 765798
ucuggaaacacuguacauc

SEQ ID NO: 765800 - RNA, 19 nt, Artificial Sequence
  Description of Artificial Sequence: Synthetic oligonucleotide
  Sense strand starting at position 462 of SEQ ID NO: 587088
uguacaguguuuccagaaa

SEQ ID NO: 765801 - RNA, 19 nt, Artificial Sequence
  Description of Artificial Sequence: Synthetic oligonucleotide
  Antisense strand to SEQ ID NO: 765800
uuucuggaaacacuguaca

SEQ ID NO: 765802 - RNA, 19 nt, Artificial Sequence
  Description of Artificial Sequence: Synthetic oligonucleotide
  Sense strand starting at position 1113 of SEQ ID NO: 587088
gaaaguuggcuguagccua

SEQ ID NO: 765803 - RNA, 19 nt, Artificial Sequence
  Description of Artificial Sequence: Synthetic oligonucleotide
  Antisense strand to SEQ ID NO: 765802
uaggcuacagccaacuuuc

SEQ ID NO: 765804 - RNA, 19 nt, Artificial Sequence
  Description of Artificial Sequence: Synthetic oligonucleotide
  Sense strand starting at position 1387 of SEQ ID NO: 587088
gagcgagccucugucaauc

SEQ ID NO: 765805 - RNA, 19 nt, Artificial Sequence
  Description of Artificial Sequence: Synthetic oligonucleotide
  Antisense strand to SEQ ID NO: 765804
gauugacagaggcucgcuc

SEQ ID NO: 765806 - RNA, 19 nt, Artificial Sequence
  Description of Artificial Sequence: Synthetic oligonucleotide
  Sense strand starting at position 1397 of SEQ ID NO: 587088
cugucaaucgaucaaucaa

SEQ ID NO: 765807 - RNA, 19 nt, Artificial Sequence
  Description of Artificial Sequence: Synthetic oligonucleotide
  Antisense strand to SEQ ID NO: 765806
uugauugaucgauugacag

SEQ ID NO: 765808 - RNA, 19 nt, Artificial Sequence
  Description of Artificial Sequence: Synthetic oligonucleotide
  Sense strand starting at position 1439 of SEQ ID NO: 587088
ggccuaaauucucuagaau

SEQ ID NO: 765809 - RNA, 19 nt, Artificial Sequence
  Description of Artificial Sequence: Synthetic oligonucleotide
  Antisense strand to SEQ ID NO: 765808
auucuagagaauuuaggcc

SEQ ID NO: 765810 - RNA, 19 nt, Artificial Sequence
  Description of Artificial Sequence: Synthetic oligonucleotide
  Sense strand starting at position 1697 of SEQ ID NO: 587088
cgccaugugucccaucaug

SEQ ID NO: 765811 - RNA, 19 nt, Artificial Sequence
  Description of Artificial Sequence: Synthetic oligonucleotide
  Antisense strand to SEQ ID NO: 765810
caugaugggacacauggcg

SEQ ID NO: 765812 - RNA, 19 nt, Artificial Sequence
  Description of Artificial Sequence: Synthetic oligonucleotide
  Sense strand starting at position 2125 of SEQ ID NO: 587088
ccgugcgaccucuguaguu

SEQ ID NO: 765813 - RNA, 19 nt, Artificial Sequence
  Description of Artificial Sequence: Synthetic oligonucleotide
  Antisense strand to SEQ ID NO: 765812
aacuacagaggucgcacgg

SEQ ID NO: 765814 - RNA, 19 nt, Artificial Sequence
  Description of Artificial Sequence: Synthetic oligonucleotide
  Sense strand starting at position 2130 of SEQ ID NO: 587088
cgaccucuguaguuccaga

SEQ ID NO: 765815 - RNA, 19 nt, Artificial Sequence
  Description of Artificial Sequence: Synthetic oligonucleotide
  Antisense strand to SEQ ID NO: 765814
ucuggaacuacagaggucg

SEQ ID NO: 765816 - RNA, 19 nt, Artificial Sequence
  Description of Artificial Sequence: Synthetic oligonucleotide
  Sense strand starting at position 2620 of SEQ ID NO: 587088
ggcgguuuguccgcaggau

SEQ ID NO: 765817 - RNA, 19 nt, Artificial Sequence
  Description of Artificial Sequence: Synthetic oligonucleotide
  Antisense strand to SEQ ID NO: 765816
auccugcggacaaaccgcc

SEQ ID NO: 765818 - RNA, 19 nt, Artificial Sequence
  Description of Artificial Sequence: Synthetic oligonucleotide
  Sense strand starting at position 2621 of SEQ ID NO: 587088
gcgguuuguccgcaggauc

SEQ ID NO: 765819 - RNA, 19 nt, Artificial Sequence
  Description of Artificial Sequence: Synthetic oligonucleotide
  Antisense strand to SEQ ID NO: 765818
gauccugcggacaaaccgc

SEQ ID NO: 765820 - RNA, 19 nt, Artificial Sequence
  Description of Artificial Sequence: Synthetic oligonucleotide
  Sense strand starting at position 3004 of SEQ ID NO: 587088
cgcugcuucugccaugaau

SEQ ID NO: 765821 - RNA, 19 nt, Artificial Sequence
  Description of Artificial Sequence: Synthetic oligonucleotide
  Antisense strand to SEQ ID NO: 765820
auucauggcagaagcagcg

SEQ ID NO: 765822 - RNA, 19 nt, Artificial Sequence
  Description of Artificial Sequence: Synthetic oligonucleotide
  Sense strand starting at position 3066 of SEQ ID NO: 587088
gcgugaugcuuccaugaag

SEQ ID NO: 765823 - RNA, 19 nt, Artificial Sequence
  Description of Artificial Sequence: Synthetic oligonucleotide
  Antisense strand to SEQ ID NO: 765822
cuucauggaagcaucacgc

SEQ ID NO: 765824 - RNA, 19 nt, Artificial Sequence
  Description of Artificial Sequence: Synthetic oligonucleotide
  Sense strand starting at position 3077 of SEQ ID NO: 587088
ccaugaagcucuugaaccu

SEQ ID NO: 765825 - RNA, 19 nt, Artificial Sequence
  Description of Artificial Sequence: Synthetic oligonucleotide
  Antisense strand to SEQ ID NO: 765824
agguucaagagcuucaugg

SEQ ID NO: 765826 - RNA, 19 nt, Artificial Sequence
  Description of Artificial Sequence: Synthetic oligonucleotide
  Sense strand starting at position 3160 of SEQ ID NO: 587088
agcuuaagcucaucugauc

SEQ ID NO: 765827 - RNA, 19 nt, Artificial Sequence
  Description of Artificial Sequence: Synthetic oligonucleotide
  Antisense strand to SEQ ID NO: 765826
gaucagaugagcuuaagcu

SEQ ID NO: 765828 - RNA, 19 nt, Artificial Sequence
  Description of Artificial Sequence: Synthetic oligonucleotide
  Sense strand starting at position 3177 of SEQ ID NO: 587088
ucgcauuguuucuguguga

SEQ ID NO: 765829 - RNA, 19 nt, Artificial Sequence
  Description of Artificial Sequence: Synthetic oligonucleotide
  Antisense strand to SEQ ID NO: 765828
ucacacagaaacaaugcga

SEQ ID NO: 765830 - RNA, 19 nt, Artificial Sequence
  Description of Artificial Sequence: Synthetic oligonucleotide
  Sense strand starting at position 3178 of SEQ ID NO: 587088
cgcauuguuucugugugau

SEQ ID NO: 765831 - RNA, 19 nt, Artificial Sequence
  Description of Artificial Sequence: Synthetic oligonucleotide
  Antisense strand to SEQ ID NO: 765830
aucacacagaaacaaugcg

SEQ ID NO: 765832 - RNA, 19 nt, Artificial Sequence
  Description of Artificial Sequence: Synthetic oligonucleotide
  Sense strand starting at position 3388 of SEQ ID NO: 587088
agggauuguuuaggagcga

SEQ ID NO: 765833 - RNA, 19 nt, Artificial Sequence
  Description of Artificial Sequence: Synthetic oligonucleotide
  Antisense strand to SEQ ID NO: 765832
ucgcuccuaaacaaucccu

SEQ ID NO: 765834 - RNA, 19 nt, Artificial Sequence
  Description of Artificial Sequence: Synthetic oligonucleotide
  Sense strand starting at position 3392 of SEQ ID NO: 587088
auuguuuaggagcgagaug

SEQ ID NO: 765835 - RNA, 19 nt, Artificial Sequence
  Description of Artificial Sequence: Synthetic oligonucleotide
  Antisense strand to SEQ ID NO: 765834
caucucgcuccuaaacaau

SEQ ID NO: 765836 - RNA, 19 nt, Artificial Sequence
  Description of Artificial Sequence: Synthetic oligonucleotide
  Sense strand starting at position 3393 of SEQ ID NO: 587088
uuguuuaggagcgagauga

SEQ ID NO: 765837 - RNA, 19 nt, Artificial Sequence
  Description of Artificial Sequence: Synthetic oligonucleotide
  Antisense strand to SEQ ID NO: 765836
ucaucucgcuccuaaacaa

SEQ ID NO: 765838 - RNA, 19 nt, Artificial Sequence
  Description of Artificial Sequence: Synthetic oligonucleotide
  Sense strand starting at position 3444 of SEQ ID NO: 587088
gagcgcagguucuuugaau

SEQ ID NO: 765839 - RNA, 19 nt, Artificial Sequence
  Description of Artificial Sequence: Synthetic oligonucleotide
  Antisense strand to SEQ ID NO: 765838
auucaaagaaccugcgcuc

SEQ ID NO: 765840 - RNA, 19 nt, Artificial Sequence
  Description of Artificial Sequence: Synthetic oligonucleotide
  Sense strand starting at position 3445 of SEQ ID NO: 587088
agcgcagguucuuugaauu

SEQ ID NO: 765841 - RNA, 19 nt, Artificial Sequence
  Description of Artificial Sequence: Synthetic oligonucleotide
  Antisense strand to SEQ ID NO: 765840
aauucaaagaaccugcgcu

SEQ ID NO: 765842 - RNA, 19 nt, Artificial Sequence
  Description of Artificial Sequence: Synthetic oligonucleotide
  Sense strand starting at position 3534 of SEQ ID NO: 587088
uggcuuaaugggcaaggua

SEQ ID NO: 765843 - RNA, 19 nt, Artificial Sequence
  Description of Artificial Sequence: Synthetic oligonucleotide
  Antisense strand to SEQ ID NO: 765842
uaccuugcccauuaagcca

SEQ ID NO: 765844 - RNA, 19 nt, Artificial Sequence
  Description of Artificial Sequence: Synthetic oligonucleotide
  Sense strand starting at position 3537 of SEQ ID NO: 587088
cuuaaugggcaagguauaa

SEQ ID NO: 765845 - RNA, 19 nt, Artificial Sequence
  Description of Artificial Sequence: Synthetic oligonucleotide
  Antisense strand to SEQ ID NO: 765844
uuauaccuugcccauuaag

SEQ ID NO: 765846 - RNA, 19 nt, Artificial Sequence
  Description of Artificial Sequence: Synthetic oligonucleotide
  Sense strand starting at position 3571 of SEQ ID NO: 587088
uuaacucaccacugggaau

SEQ ID NO: 765847 - RNA, 19 nt, Artificial Sequence
  Description of Artificial Sequence: Synthetic oligonucleotide
  Antisense strand to SEQ ID NO: 765846
auucccaguggugaguuaa

SEQ ID NO: 765848 - RNA, 19 nt, Artificial Sequence
  Description of Artificial Sequence: Synthetic oligonucleotide
  Sense strand starting at position 3806 of SEQ ID NO: 587088
gauuaauucuagcugggaa

SEQ ID NO: 765849 - RNA, 19 nt, Artificial Sequence
  Description of Artificial Sequence: Synthetic oligonucleotide
  Antisense strand to SEQ ID NO: 765848
uucccagcuagaauuaauc

SEQ ID NO: 765850 - RNA, 19 nt, Artificial Sequence
  Description of Artificial Sequence: Synthetic oligonucleotide
  Sense strand starting at position 3808 of SEQ ID NO: 587088
uuaauucuagcugggaagu

SEQ ID NO: 765851 - RNA, 19 nt, Artificial Sequence
  Description of Artificial Sequence: Synthetic oligonucleotide
  Antisense strand to SEQ ID NO: 765850
acuucccagcuagaauuaa

SEQ ID NO: 765852 - RNA, 19 nt, Artificial Sequence
  Description of Artificial Sequence: Synthetic oligonucleotide
  Sense strand starting at position 3809 of SEQ ID NO: 587088
uaauucuagcugggaaguu

SEQ ID NO: 765853 - RNA, 19 nt, Artificial Sequence
  Description of Artificial Sequence: Synthetic oligonucleotide
  Antisense strand to SEQ ID NO: 765852
aacuucccagcuagaauua

SEQ ID NO: 765854 - RNA, 19 nt, Artificial Sequence
  Description of Artificial Sequence: Synthetic oligonucleotide
  Sense strand starting at position 3865 of SEQ ID NO: 587088
agcccagaaguuugaauaa

SEQ ID NO: 765855 - RNA, 19 nt, Artificial Sequence
  Description of Artificial Sequence: Synthetic oligonucleotide
  Antisense strand to SEQ ID NO: 765854
uuauucaaacuucugggcu

SEQ ID NO: 765856 - RNA, 19 nt, Artificial Sequence
  Description of Artificial Sequence: Synthetic oligonucleotide
  Sense strand starting at position 72 of SEQ ID NO: 587089
aggcaugagccuuauugca

SEQ ID NO: 765857 - RNA, 19 nt, Artificial Sequence
  Description of Artificial Sequence: Synthetic oligonucleotide
  Antisense strand to SEQ ID NO: 765856
ugcaauaaggcucaugccu

SEQ ID NO: 765858 - RNA, 19 nt, Artificial Sequence
  Description of Artificial Sequence: Synthetic oligonucleotide
  Sense strand starting at position 132 of SEQ ID NO: 587089
ggcagaugaugguucgauc

SEQ ID NO: 765859 - RNA, 19 nt, Artificial Sequence
  Description of Artificial Sequence: Synthetic oligonucleotide
  Antisense strand to SEQ ID NO: 765858
gaucgaaccaucaucugcc

SEQ ID NO: 765860 - RNA, 19 nt, Artificial Sequence
  Description of Artificial Sequence: Synthetic oligonucleotide
  Sense strand starting at position 140 of SEQ ID NO: 587089
augguucgaucucucgaau

SEQ ID NO: 765861 - RNA, 19 nt, Artificial Sequence
  Description of Artificial Sequence: Synthetic oligonucleotide
  Antisense strand to SEQ ID NO: 765860
auucgagagaucgaaccau

SEQ ID NO: 765862 - RNA, 19 nt, Artificial Sequence
  Description of Artificial Sequence: Synthetic oligonucleotide
  Sense strand starting at position 461 of SEQ ID NO: 587089
gauguacaguguuuccaga

SEQ ID NO: 765863 - RNA, 19 nt, Artificial Sequence
  Description of Artificial Sequence: Synthetic oligonucleotide
  Antisense strand to SEQ ID NO: 765862
ucuggaaacacuguacauc

SEQ ID NO: 765864 - RNA, 19 nt, Artificial Sequence
  Description of Artificial Sequence: Synthetic oligonucleotide
  Sense strand starting at position 463 of SEQ ID NO: 587089
uguacaguguuuccagaaa

SEQ ID NO: 765865 - RNA, 19 nt, Artificial Sequence
  Description of Artificial Sequence: Synthetic oligonucleotide
  Antisense strand to SEQ ID NO: 765864
uuucuggaaacacuguaca

SEQ ID NO: 765866 - RNA, 19 nt, Artificial Sequence
  Description of Artificial Sequence: Synthetic oligonucleotide
  Sense strand starting at position 1054 of SEQ ID NO: 587089
guuugaauguauccuccua

SEQ ID NO: 765867 - RNA, 19 nt, Artificial Sequence
  Description of Artificial Sequence: Synthetic oligonucleotide
  Antisense strand to SEQ ID NO: 765866
uaggaggauacauucaaac

SEQ ID NO: 765868 - RNA, 19 nt, Artificial Sequence
  Description of Artificial Sequence: Synthetic oligonucleotide
  Sense strand starting at position 1114 of SEQ ID NO: 587089
gaaaguuggcuguagccua

SEQ ID NO: 765869 - RNA, 19 nt, Artificial Sequence
  Description of Artificial Sequence: Synthetic oligonucleotide
  Antisense strand to SEQ ID NO: 765868
uaggcuacagccaacuuuc

SEQ ID NO: 765870 - RNA, 19 nt, Artificial Sequence
  Description of Artificial Sequence: Synthetic oligonucleotide
  Sense strand starting at position 1429 of SEQ ID NO: 587089
ugucuugucugggccuaaa

SEQ ID NO: 765871 - RNA, 19 nt, Artificial Sequence
  Description of Artificial Sequence: Synthetic oligonucleotide
  Antisense strand to SEQ ID NO: 765870
uuuaggcccagacaagaca

SEQ ID NO: 765872 - RNA, 19 nt, Artificial Sequence
  Description of Artificial Sequence: Synthetic oligonucleotide
  Sense strand starting at position 1439 of SEQ ID NO: 587089
gggccuaaauucucuagaa

SEQ ID NO: 765873 - RNA, 19 nt, Artificial Sequence
  Description of Artificial Sequence: Synthetic oligonucleotide
  Antisense strand to SEQ ID NO: 765872
uucuagagaauuuaggccc

SEQ ID NO: 765874 - RNA, 19 nt, Artificial Sequence
  Description of Artificial Sequence: Synthetic oligonucleotide
  Sense strand starting at position 1440 of SEQ ID NO: 587089
ggccuaaauucucuagaau

SEQ ID NO: 765875 - RNA, 19 nt, Artificial Sequence
  Description of Artificial Sequence: Synthetic oligonucleotide
  Antisense strand to SEQ ID NO: 765874
auucuagagaauuuaggcc

SEQ ID NO: 765876 - RNA, 19 nt, Artificial Sequence
  Description of Artificial Sequence: Synthetic oligonucleotide
  Sense strand starting at position 2067 of SEQ ID NO: 587089
ccguuacgugucccaucau

SEQ ID NO: 765877 - RNA, 19 nt, Artificial Sequence
  Description of Artificial Sequence: Synthetic oligonucleotide
  Antisense strand to SEQ ID NO: 765876
augaugggacacguaacgg

SEQ ID NO: 765878 - RNA, 19 nt, Artificial Sequence
  Description of Artificial Sequence: Synthetic oligonucleotide
  Sense strand starting at position 2131 of SEQ ID NO: 587089
cgaccucuguaguuccaga

SEQ ID NO: 765879 - RNA, 19 nt, Artificial Sequence
  Description of Artificial Sequence: Synthetic oligonucleotide
  Antisense strand to SEQ ID NO: 765878
ucuggaacuacagaggucg

SEQ ID NO: 765880 - RNA, 19 nt, Artificial Sequence
  Description of Artificial Sequence: Synthetic oligonucleotide
  Sense strand starting at position 2497 of SEQ ID NO: 587089
ccuguacgagcgguuaagu

SEQ ID NO: 765881 - RNA, 19 nt, Artificial Sequence
  Description of Artificial Sequence: Synthetic oligonucleotide
  Antisense strand to SEQ ID NO: 765880
acuuaaccgcucguacagg

SEQ ID NO: 765882 - RNA, 19 nt, Artificial Sequence
  Description of Artificial Sequence: Synthetic oligonucleotide
  Sense strand starting at position 2508 of SEQ ID NO: 587089
gguuaagucagaggaugcu

SEQ ID NO: 765883 - RNA, 19 nt, Artificial Sequence
  Description of Artificial Sequence: Synthetic oligonucleotide
  Antisense strand to SEQ ID NO: 765882
agcauccucugacuuaacc

SEQ ID NO: 765884 - RNA, 19 nt, Artificial Sequence
  Description of Artificial Sequence: Synthetic oligonucleotide
  Sense strand starting at position 2639 of SEQ ID NO: 587089
ggauccaugucaucgcacu

SEQ ID NO: 765885 - RNA, 19 nt, Artificial Sequence
  Description of Artificial Sequence: Synthetic oligonucleotide
  Antisense strand to SEQ ID NO: 765884
agugcgaugacauggaucc

SEQ ID NO: 765886 - RNA, 19 nt, Artificial Sequence
  Description of Artificial Sequence: Synthetic oligonucleotide
  Sense strand starting at position 2704 of SEQ ID NO: 587089
uuggaaaugcuuuguuuga

SEQ ID NO: 765887 - RNA, 19 nt, Artificial Sequence
  Description of Artificial Sequence: Synthetic oligonucleotide
  Antisense strand to SEQ ID NO: 765886
ucaaacaaagcauuuccaa

SEQ ID NO: 765888 - RNA, 19 nt, Artificial Sequence
  Description of Artificial Sequence: Synthetic oligonucleotide
  Sense strand starting at position 2705 of SEQ ID NO: 587089
uggaaaugcuuuguuugaa

SEQ ID NO: 765889 - RNA, 19 nt, Artificial Sequence
  Description of Artificial Sequence: Synthetic oligonucleotide
  Antisense strand to SEQ ID NO: 765888
uucaaacaaagcauuucca

SEQ ID NO: 765890 - RNA, 19 nt, Artificial Sequence
  Description of Artificial Sequence: Synthetic oligonucleotide
  Sense strand starting at position 2706 of SEQ ID NO: 587089
ggaaaugcuuuguuugaag

SEQ ID NO: 765891 - RNA, 19 nt, Artificial Sequence
  Description of Artificial Sequence: Synthetic oligonucleotide
  Antisense strand to SEQ ID NO: 765890
cuucaaacaaagcauuucc

SEQ ID NO: 765892 - RNA, 19 nt, Artificial Sequence
  Description of Artificial Sequence: Synthetic oligonucleotide
  Sense strand starting at position 3010 of SEQ ID NO: 587089
cugcuucugccaugaauua

SEQ ID NO: 765893 - RNA, 19 nt, Artificial Sequence
  Description of Artificial Sequence: Synthetic oligonucleotide
  Antisense strand to SEQ ID NO: 765892
uaauucauggcagaagcag

SEQ ID NO: 765894 - RNA, 19 nt, Artificial Sequence
  Description of Artificial Sequence: Synthetic oligonucleotide
  Sense strand starting at position 3164 of SEQ ID NO: 587089
agcuuaagcucaucugauc

SEQ ID NO: 765895 - RNA, 19 nt, Artificial Sequence
  Description of Artificial Sequence: Synthetic oligonucleotide
  Antisense strand to SEQ ID NO: 765894
gaucagaugagcuuaagcu

SEQ ID NO: 765896 - RNA, 19 nt, Artificial Sequence
  Description of Artificial Sequence: Synthetic oligonucleotide
  Sense strand starting at position 3184 of SEQ ID NO: 587089
cauuguuucugugugauca

SEQ ID NO: 765897 - RNA, 19 nt, Artificial Sequence
  Description of Artificial Sequence: Synthetic oligonucleotide
  Antisense strand to SEQ ID NO: 765896
ugaucacacagaaacaaug

SEQ ID NO: 765898 - RNA, 19 nt, Artificial Sequence
  Description of Artificial Sequence: Synthetic oligonucleotide
  Sense strand starting at position 3185 of SEQ ID NO: 587089
auuguuucugugugaucau

SEQ ID NO: 765899 - RNA, 19 nt, Artificial Sequence
  Description of Artificial Sequence: Synthetic oligonucleotide
  Antisense strand to SEQ ID NO: 765898
augaucacacagaaacaau

SEQ ID NO: 765900 - RNA, 19 nt, Artificial Sequence
  Description of Artificial Sequence: Synthetic oligonucleotide
  Sense strand starting at position 3188 of SEQ ID NO: 587089
guuucugugugaucaugag

SEQ ID NO: 765901 - RNA, 19 nt, Artificial Sequence
  Description of Artificial Sequence: Synthetic oligonucleotide
  Antisense strand to SEQ ID NO: 765900
cucaugaucacacagaaac

SEQ ID NO: 765902 - RNA, 19 nt, Artificial Sequence
  Description of Artificial Sequence: Synthetic oligonucleotide
  Sense strand starting at position 3192 of SEQ ID NO: 587089
cugugugaucaugagagac

SEQ ID NO: 765903 - RNA, 19 nt, Artificial Sequence
  Description of Artificial Sequence: Synthetic oligonucleotide
  Antisense strand to SEQ ID NO: 765902
gucucucaugaucacacag

SEQ ID NO: 765904 - RNA, 19 nt, Artificial Sequence
  Description of Artificial Sequence: Synthetic oligonucleotide
  Sense strand starting at position 3200 of SEQ ID NO: 587089
ucaugagagacucgauauu

SEQ ID NO: 765905 - RNA, 19 nt, Artificial Sequence
  Description of Artificial Sequence: Synthetic oligonucleotide
  Antisense strand to SEQ ID NO: 765904
aauaucgagucucucauga

SEQ ID NO: 765906 - RNA, 19 nt, Artificial Sequence
  Description of Artificial Sequence: Synthetic oligonucleotide
  Sense strand starting at position 3396 of SEQ ID NO: 587089
auuguuuaggagcgagaug

SEQ ID NO: 765907 - RNA, 19 nt, Artificial Sequence
  Description of Artificial Sequence: Synthetic oligonucleotide
  Antisense strand to SEQ ID NO: 765906
caucucgcuccuaaacaau

SEQ ID NO: 765908 - RNA, 19 nt, Artificial Sequence
  Description of Artificial Sequence: Synthetic oligonucleotide
  Sense strand starting at position 3397 of SEQ ID NO: 587089
uuguuuaggagcgagauga

SEQ ID NO: 765909 - RNA, 19 nt, Artificial Sequence
  Description of Artificial Sequence: Synthetic oligonucleotide
  Antisense strand to SEQ ID NO: 765908
ucaucucgcuccuaaacaa

SEQ ID NO: 765910 - RNA, 19 nt, Artificial Sequence
  Description of Artificial Sequence: Synthetic oligonucleotide
  Sense strand starting at position 3538 of SEQ ID NO: 587089
uggcuuaaugggcaaggua

SEQ ID NO: 765911 - RNA, 19 nt, Artificial Sequence
  Description of Artificial Sequence: Synthetic oligonucleotide
  Antisense strand to SEQ ID NO: 765910
uaccuugcccauuaagcca

SEQ ID NO: 765912 - RNA, 19 nt, Artificial Sequence
  Description of Artificial Sequence: Synthetic oligonucleotide
  Sense strand starting at position 3541 of SEQ ID NO: 587089
cuuaaugggcaagguauaa

SEQ ID NO: 765913 - RNA, 19 nt, Artificial Sequence
  Description of Artificial Sequence: Synthetic oligonucleotide
  Antisense strand to SEQ ID NO: 765912
uuauaccuugcccauuaag

SEQ ID NO: 765914 - RNA, 19 nt, Artificial Sequence
  Description of Artificial Sequence: Synthetic oligonucleotide
  Sense strand starting at position 3553 of SEQ ID NO: 587089
gguauaaucuuugcacucu

SEQ ID NO: 765915 - RNA, 19 nt, Artificial Sequence
  Description of Artificial Sequence: Synthetic oligonucleotide
  Antisense strand to SEQ ID NO: 765914
agagugcaaagauuauacc

SEQ ID NO: 765916 - RNA, 19 nt, Artificial Sequence
  Description of Artificial Sequence: Synthetic oligonucleotide
  Sense strand starting at position 3575 of SEQ ID NO: 587089
uuaacucaccacugggaau

SEQ ID NO: 765917 - RNA, 19 nt, Artificial Sequence
  Description of Artificial Sequence: Synthetic oligonucleotide
  Antisense strand to SEQ ID NO: 765916
auucccaguggugaguuaa

SEQ ID NO: 765918 - RNA, 19 nt, Artificial Sequence
  Description of Artificial Sequence: Synthetic oligonucleotide
  Sense strand starting at position 3586 of SEQ ID NO: 587089
cugggaauguuucuuuguu

SEQ ID NO: 765919 - RNA, 19 nt, Artificial Sequence
  Description of Artificial Sequence: Synthetic oligonucleotide
  Antisense strand to SEQ ID NO: 765918
aacaaagaaacauucccag

SEQ ID NO: 765920 - RNA, 19 nt, Artificial Sequence
  Description of Artificial Sequence: Synthetic oligonucleotide
  Sense strand starting at position 3587 of SEQ ID NO: 587089
ugggaauguuucuuuguuc

SEQ ID NO: 765921 - RNA, 19 nt, Artificial Sequence
  Description of Artificial Sequence: Synthetic oligonucleotide
  Antisense strand to SEQ ID NO: 765920
gaacaaagaaacauuccca

SEQ ID NO: 765922 - RNA, 19 nt, Artificial Sequence
  Description of Artificial Sequence: Synthetic oligonucleotide
  Sense strand starting at position 3735 of SEQ ID NO: 587089
cucagcucacuugguagaa

SEQ ID NO: 765923 - RNA, 19 nt, Artificial Sequence
  Description of Artificial Sequence: Synthetic oligonucleotide
  Antisense strand to SEQ ID NO: 765922
uucuaccaagugagcugag

SEQ ID NO: 765924 - RNA, 19 nt, Artificial Sequence
  Description of Artificial Sequence: Synthetic oligonucleotide
  Sense strand starting at position 3736 of SEQ ID NO: 587089
ucagcucacuugguagaau

SEQ ID NO: 765925 - RNA, 19 nt, Artificial Sequence
  Description of Artificial Sequence: Synthetic oligonucleotide
  Antisense strand to SEQ ID NO: 765924
auucuaccaagugagcuga

SEQ ID NO: 765926 - RNA, 19 nt, Artificial Sequence
  Description of Artificial Sequence: Synthetic oligonucleotide
  Sense strand starting at position 3781 of SEQ ID NO: 587089
aguguugugggugugcuua

SEQ ID NO: 765927 - RNA, 19 nt, Artificial Sequence
  Description of Artificial Sequence: Synthetic oligonucleotide
  Antisense strand to SEQ ID NO: 765926
uaagcacacccacaacacu

SEQ ID NO: 765928 - RNA, 19 nt, Artificial Sequence
  Description of Artificial Sequence: Synthetic oligonucleotide
  Sense strand starting at position 3793 of SEQ ID NO: 587089
gugcuuaaugaaggcauga

SEQ ID NO: 765929 - RNA, 19 nt, Artificial Sequence
  Description of Artificial Sequence: Synthetic oligonucleotide
  Antisense strand to SEQ ID NO: 765928
ucaugccuucauuaagcac

SEQ ID NO: 765930 - RNA, 19 nt, Artificial Sequence
  Description of Artificial Sequence: Synthetic oligonucleotide
  Sense strand starting at position 3810 of SEQ ID NO: 587089
gauuaauucuagcugggaa

SEQ ID NO: 765931 - RNA, 19 nt, Artificial Sequence
  Description of Artificial Sequence: Synthetic oligonucleotide
  Antisense strand to SEQ ID NO: 765930
uucccagcuagaauuaauc

SEQ ID NO: 765932 - RNA, 19 nt, Artificial Sequence
  Description of Artificial Sequence: Synthetic oligonucleotide
  Sense strand starting at position 3812 of SEQ ID NO: 587089
uuaauucuagcugggaagu

SEQ ID NO: 765933 - RNA, 19 nt, Artificial Sequence
  Description of Artificial Sequence: Synthetic oligonucleotide
  Antisense strand to SEQ ID NO: 765932
acuucccagcuagaauuaa

SEQ ID NO: 765934 - RNA, 19 nt, Artificial Sequence
  Description of Artificial Sequence: Synthetic oligonucleotide
  Sense strand starting at position 3813 of SEQ ID NO: 587089
uaauucuagcugggaaguu

SEQ ID NO: 765935 - RNA, 19 nt, Artificial Sequence
  Description of Artificial Sequence: Synthetic oligonucleotide
  Antisense strand to SEQ ID NO: 765934
aacuucccagcuagaauua

SEQ ID NO: 765936 - RNA, 19 nt, Artificial Sequence
  Description of Artificial Sequence: Synthetic oligonucleotide
  Sense strand starting at position 71 of SEQ ID NO: 587090
aggcaugagccuuauugca

SEQ ID NO: 765937 - RNA, 19 nt, Artificial Sequence
  Description of Artificial Sequence: Synthetic oligonucleotide
  Antisense strand to SEQ ID NO: 765936
ugcaauaaggcucaugccu

SEQ ID NO: 765938 - RNA, 19 nt, Artificial Sequence
  Description of Artificial Sequence: Synthetic oligonucleotide
  Sense strand starting at position 131 of SEQ ID NO: 587090
ggcagaugaugguucgauc

SEQ ID NO: 765939 - RNA, 19 nt, Artificial Sequence
  Description of Artificial Sequence: Synthetic oligonucleotide
  Antisense strand to SEQ ID NO: 765938
gaucgaaccaucaucugcc

SEQ ID NO: 765940 - RNA, 19 nt, Artificial Sequence
  Description of Artificial Sequence: Synthetic oligonucleotide
  Sense strand starting at position 134 of SEQ ID NO: 587090
agaugaugguucgaucucu

SEQ ID NO: 765941 - RNA, 19 nt, Artificial Sequence
  Description of Artificial Sequence: Synthetic oligonucleotide
  Antisense strand to SEQ ID NO: 765940
agagaucgaaccaucaucu

SEQ ID NO: 765942 - RNA, 19 nt, Artificial Sequence
  Description of Artificial Sequence: Synthetic oligonucleotide
  Sense strand starting at position 139 of SEQ ID NO: 587090
augguucgaucucucgaau

SEQ ID NO: 765943 - RNA, 19 nt, Artificial Sequence
  Description of Artificial Sequence: Synthetic oligonucleotide
  Antisense strand to SEQ ID NO: 765942
auucgagagaucgaaccau

SEQ ID NO: 765944 - RNA, 19 nt, Artificial Sequence
  Description of Artificial Sequence: Synthetic oligonucleotide
  Sense strand starting at position 460 of SEQ ID NO: 587090
gauguacaguguuuccaga

SEQ ID NO: 765945 - RNA, 19 nt, Artificial Sequence
  Description of Artificial Sequence: Synthetic oligonucleotide
  Antisense strand to SEQ ID NO: 765944
ucuggaaacacuguacauc

SEQ ID NO: 765946 - RNA, 19 nt, Artificial Sequence
  Description of Artificial Sequence: Synthetic oligonucleotide
  Sense strand starting at position 462 of SEQ ID NO: 587090
uguacaguguuuccagaaa

SEQ ID NO: 765947 - RNA, 19 nt, Artificial Sequence
  Description of Artificial Sequence: Synthetic oligonucleotide
  Antisense strand to SEQ ID NO: 765946
uuucuggaaacacuguaca

SEQ ID NO: 765948 - RNA, 19 nt, Artificial Sequence
  Description of Artificial Sequence: Synthetic oligonucleotide
  Sense strand starting at position 1113 of SEQ ID NO: 587090
gaaaguuggcuguagccua

SEQ ID NO: 765949 - RNA, 19 nt, Artificial Sequence
  Description of Artificial Sequence: Synthetic oligonucleotide
  Antisense strand to SEQ ID NO: 765948
uaggcuacagccaacuuuc

SEQ ID NO: 765950 - RNA, 19 nt, Artificial Sequence
  Description of Artificial Sequence: Synthetic oligonucleotide
  Sense strand starting at position 1387 of SEQ ID NO: 587090
gagcgagccucugucaauc

SEQ ID NO: 765951 - RNA, 19 nt, Artificial Sequence
  Description of Artificial Sequence: Synthetic oligonucleotide
  Antisense strand to SEQ ID NO: 765950
gauugacagaggcucgcuc

SEQ ID NO: 765952 - RNA, 19 nt, Artificial Sequence
  Description of Artificial Sequence: Synthetic oligonucleotide
  Sense strand starting at position 1397 of SEQ ID NO: 587090
cugucaaucgaucaaucaa

SEQ ID NO: 765953 - RNA, 19 nt, Artificial Sequence
  Description of Artificial Sequence: Synthetic oligonucleotide
  Antisense strand to SEQ ID NO: 765952
uugauugaucgauugacag

SEQ ID NO: 765954 - RNA, 19 nt, Artificial Sequence
  Description of Artificial Sequence: Synthetic oligonucleotide
  Sense strand starting at position 1439 of SEQ ID NO: 587090
ggccuaaauucucuagaau

SEQ ID NO: 765955 - RNA, 19 nt, Artificial Sequence
  Description of Artificial Sequence: Synthetic oligonucleotide
  Antisense strand to SEQ ID NO: 765954
auucuagagaauuuaggcc

SEQ ID NO: 765956 - RNA, 19 nt, Artificial Sequence
  Description of Artificial Sequence: Synthetic oligonucleotide
  Sense strand starting at position 1697 of SEQ ID NO: 587090
cgccaugugucccaucaug

SEQ ID NO: 765957 - RNA, 19 nt, Artificial Sequence
  Description of Artificial Sequence: Synthetic oligonucleotide
  Antisense strand to SEQ ID NO: 765956
caugaugggacacauggcg

SEQ ID NO: 765958 - RNA, 19 nt, Artificial Sequence
  Description of Artificial Sequence: Synthetic oligonucleotide
  Sense strand starting at position 2125 of SEQ ID NO: 587090
ccgugcgaccucuguaguu

SEQ ID NO: 765959 - RNA, 19 nt, Artificial Sequence
  Description of Artificial Sequence: Synthetic oligonucleotide
  Antisense strand to SEQ ID NO: 765958
aacuacagaggucgcacgg

SEQ ID NO: 765960 - RNA, 19 nt, Artificial Sequence
  Description of Artificial Sequence: Synthetic oligonucleotide
  Sense strand starting at position 2130 of SEQ ID NO: 587090
cgaccucuguaguuccaga

SEQ ID NO: 765961 - RNA, 19 nt, Artificial Sequence
  Description of Artificial Sequence: Synthetic oligonucleotide
  Antisense strand to SEQ ID NO: 765960
ucuggaacuacagaggucg

SEQ ID NO: 765962 - RNA, 19 nt, Artificial Sequence
  Description of Artificial Sequence: Synthetic oligonucleotide
  Sense strand starting at position 2620 of SEQ ID NO: 587090
ggcgguuuguccgcaggau

SEQ ID NO: 765963 - RNA, 19 nt, Artificial Sequence
  Description of Artificial Sequence: Synthetic oligonucleotide
  Antisense strand to SEQ ID NO: 765962
auccugcggacaaaccgcc

SEQ ID NO: 765964 - RNA, 19 nt, Artificial Sequence
  Description of Artificial Sequence: Synthetic oligonucleotide
  Sense strand starting at position 2621 of SEQ ID NO: 587090
gcgguuuguccgcaggauc

SEQ ID NO: 765965 - RNA, 19 nt, Artificial Sequence
  Description of Artificial Sequence: Synthetic oligonucleotide
  Antisense strand to SEQ ID NO: 765964
gauccugcggacaaaccgc

SEQ ID NO: 765966 - RNA, 19 nt, Artificial Sequence
  Description of Artificial Sequence: Synthetic oligonucleotide
  Sense strand starting at position 3004 of SEQ ID NO: 587090
cgcugcuucugccaugaau

SEQ ID NO: 765967 - RNA, 19 nt, Artificial Sequence
  Description of Artificial Sequence: Synthetic oligonucleotide
  Antisense strand to SEQ ID NO: 765966
auucauggcagaagcagcg

SEQ ID NO: 765968 - RNA, 19 nt, Artificial Sequence
  Description of Artificial Sequence: Synthetic oligonucleotide
  Sense strand starting at position 3066 of SEQ ID NO: 587090
gcgugaugcuuccaugaag

SEQ ID NO: 765969 - RNA, 19 nt, Artificial Sequence
  Description of Artificial Sequence: Synthetic oligonucleotide
  Antisense strand to SEQ ID NO: 765968
cuucauggaagcaucacgc

SEQ ID NO: 765970 - RNA, 19 nt, Artificial Sequence
  Description of Artificial Sequence: Synthetic oligonucleotide
  Sense strand starting at position 3077 of SEQ ID NO: 587090
ccaugaagcucuugaaccu

SEQ ID NO: 765971 - RNA, 19 nt, Artificial Sequence
  Description of Artificial Sequence: Synthetic oligonucleotide
  Antisense strand to SEQ ID NO: 765970
agguucaagagcuucaugg

SEQ ID NO: 765972 - RNA, 19 nt, Artificial Sequence
  Description of Artificial Sequence: Synthetic oligonucleotide
  Sense strand starting at position 3160 of SEQ ID NO: 587090
agcuuaagcucaucugauc

SEQ ID NO: 765973 - RNA, 19 nt, Artificial Sequence
  Description of Artificial Sequence: Synthetic oligonucleotide
  Antisense strand to SEQ ID NO: 765972
gaucagaugagcuuaagcu

SEQ ID NO: 765974 - RNA, 19 nt, Artificial Sequence
  Description of Artificial Sequence: Synthetic oligonucleotide
  Sense strand starting at position 3177 of SEQ ID NO: 587090
ucgcauuguuucuguguga

SEQ ID NO: 765975 - RNA, 19 nt, Artificial Sequence
  Description of Artificial Sequence: Synthetic oligonucleotide
  Antisense strand to SEQ ID NO: 765974
ucacacagaaacaaugcga

SEQ ID NO: 765976 - RNA, 19 nt, Artificial Sequence
  Description of Artificial Sequence: Synthetic oligonucleotide
  Sense strand starting at position 3178 of SEQ ID NO: 587090
cgcauuguuucugugugau

SEQ ID NO: 765977 - RNA, 19 nt, Artificial Sequence
  Description of Artificial Sequence: Synthetic oligonucleotide
  Antisense strand to SEQ ID NO: 765976
aucacacagaaacaaugcg

SEQ ID NO: 765978 - RNA, 19 nt, Artificial Sequence
  Description of Artificial Sequence: Synthetic oligonucleotide
  Sense strand starting at position 3388 of SEQ ID NO: 587090
agggauuguuuaggagcga

SEQ ID NO: 765979 - RNA, 19 nt, Artificial Sequence
  Description of Artificial Sequence: Synthetic oligonucleotide
  Antisense strand to SEQ ID NO: 765978
ucgcuccuaaacaaucccu

SEQ ID NO: 765980 - RNA, 19 nt, Artificial Sequence
  Description of Artificial Sequence: Synthetic oligonucleotide
  Sense strand starting at position 3392 of SEQ ID NO: 587090
auuguuuaggagcgagaug

SEQ ID NO: 765981 - RNA, 19 nt, Artificial Sequence
  Description of Artificial Sequence: Synthetic oligonucleotide
  Antisense strand to SEQ ID NO: 765980
caucucgcuccuaaacaau

SEQ ID NO: 765982 - RNA, 19 nt, Artificial Sequence
  Description of Artificial Sequence: Synthetic oligonucleotide
  Sense strand starting at position 3393 of SEQ ID NO: 587090
uuguuuaggagcgagauga

SEQ ID NO: 765983 - RNA, 19 nt, Artificial Sequence
  Description of Artificial Sequence: Synthetic oligonucleotide
  Antisense strand to SEQ ID NO: 765982
ucaucucgcuccuaaacaa

SEQ ID NO: 765984 - RNA, 19 nt, Artificial Sequence
  Description of Artificial Sequence: Synthetic oligonucleotide
  Sense strand starting at position 3444 of SEQ ID NO: 587090
gagcgcagguucuuugaau

SEQ ID NO: 765985 - RNA, 19 nt, Artificial Sequence
  Description of Artificial Sequence: Synthetic oligonucleotide
  Antisense strand to SEQ ID NO: 765984
auucaaagaaccugcgcuc

SEQ ID NO: 765986 - RNA, 19 nt, Artificial Sequence
  Description of Artificial Sequence: Synthetic oligonucleotide
  Sense strand starting at position 3445 of SEQ ID NO: 587090
agcgcagguucuuugaauu

SEQ ID NO: 765987 - RNA, 19 nt, Artificial Sequence
  Description of Artificial Sequence: Synthetic oligonucleotide
  Antisense strand to SEQ ID NO: 765986
aauucaaagaaccugcgcu

SEQ ID NO: 765988 - RNA, 19 nt, Artificial Sequence
  Description of Artificial Sequence: Synthetic oligonucleotide
  Sense strand starting at position 3534 of SEQ ID NO: 587090
uggcuuaaugggcaaggua

SEQ ID NO: 765989 - RNA, 19 nt, Artificial Sequence
  Description of Artificial Sequence: Synthetic oligonucleotide
  Antisense strand to SEQ ID NO: 765988
uaccuugcccauuaagcca

SEQ ID NO: 765990 - RNA, 19 nt, Artificial Sequence
  Description of Artificial Sequence: Synthetic oligonucleotide
  Sense strand starting at position 3537 of SEQ ID NO: 587090
cuuaaugggcaagguauaa

SEQ ID NO: 765991 - RNA, 19 nt, Artificial Sequence
  Description of Artificial Sequence: Synthetic oligonucleotide
  Antisense strand to SEQ ID NO: 765990
uuauaccuugcccauuaag

SEQ ID NO: 765992 - RNA, 19 nt, Artificial Sequence
  Description of Artificial Sequence: Synthetic oligonucleotide
  Sense strand starting at position 3571 of SEQ ID NO: 587090
uuaacucaccacugggaau

SEQ ID NO: 765993 - RNA, 19 nt, Artificial Sequence
  Description of Artificial Sequence: Synthetic oligonucleotide
  Antisense strand to SEQ ID NO: 765992
auucccaguggugaguuaa

SEQ ID NO: 765994 - RNA, 19 nt, Artificial Sequence
  Description of Artificial Sequence: Synthetic oligonucleotide
  Sense strand starting at position 3806 of SEQ ID NO: 587090
gauuaauucuagcugggaa

SEQ ID NO: 765995 - RNA, 19 nt, Artificial Sequence
  Description of Artificial Sequence: Synthetic oligonucleotide
  Antisense strand to SEQ ID NO: 765994
uucccagcuagaauuaauc

SEQ ID NO: 765996 - RNA, 19 nt, Artificial Sequence
  Description of Artificial Sequence: Synthetic oligonucleotide
  Sense strand starting at position 3808 of SEQ ID NO: 587090
uuaauucuagcugggaagu

SEQ ID NO: 765997 - RNA, 19 nt, Artificial Sequence
  Description of Artificial Sequence: Synthetic oligonucleotide
  Antisense strand to SEQ ID NO: 765996
acuucccagcuagaauuaa

SEQ ID NO: 765998 - RNA, 19 nt, Artificial Sequence
  Description of Artificial Sequence: Synthetic oligonucleotide
  Sense strand starting at position 3809 of SEQ ID NO: 587090
uaauucuagcugggaaguu

SEQ ID NO: 765999 - RNA, 19 nt, Artificial Sequence
  Description of Artificial Sequence: Synthetic oligonucleotide
  Antisense strand to SEQ ID NO: 765998
aacuucccagcuagaauua

SEQ ID NO: 766000 - RNA, 19 nt, Artificial Sequence
  Description of Artificial Sequence: Synthetic oligonucleotide
  Sense strand starting at position 3865 of SEQ ID NO: 587090
agcccagaaguuugaauaa

SEQ ID NO: 766001 - RNA, 19 nt, Artificial Sequence
  Description of Artificial Sequence: Synthetic oligonucleotide
  Antisense strand to SEQ ID NO: 766000
uuauucaaacuucugggcu

SEQ ID NO: 766002 - RNA, 19 nt, Artificial Sequence
  Description of Artificial Sequence: Synthetic oligonucleotide
  Sense strand starting at position 72 of SEQ ID NO: 587091
aggcaugagccuuauugca

SEQ ID NO: 766003 - RNA, 19 nt, Artificial Sequence
  Description of Artificial Sequence: Synthetic oligonucleotide
  Antisense strand to SEQ ID NO: 766002
ugcaauaaggcucaugccu

SEQ ID NO: 766004 - RNA, 19 nt, Artificial Sequence
  Description of Artificial Sequence: Synthetic oligonucleotide
  Sense strand starting at position 132 of SEQ ID NO: 587091
ggcagaugaugguucgauc

SEQ ID NO: 766005 - RNA, 19 nt, Artificial Sequence
  Description of Artificial Sequence: Synthetic oligonucleotide
  Antisense strand to SEQ ID NO: 766004
gaucgaaccaucaucugcc

SEQ ID NO: 766006 - RNA, 19 nt, Artificial Sequence
  Description of Artificial Sequence: Synthetic oligonucleotide
  Sense strand starting at position 140 of SEQ ID NO: 587091
augguucgaucucucgaau

SEQ ID NO: 766007 - RNA, 19 nt, Artificial Sequence
  Description of Artificial Sequence: Synthetic oligonucleotide
  Antisense strand to SEQ ID NO: 766006
auucgagagaucgaaccau

SEQ ID NO: 766008 - RNA, 19 nt, Artificial Sequence
  Description of Artificial Sequence: Synthetic oligonucleotide
  Sense strand starting at position 461 of SEQ ID NO: 587091
gauguacaguguuuccaga

SEQ ID NO: 766009 - RNA, 19 nt, Artificial Sequence
  Description of Artificial Sequence: Synthetic oligonucleotide
  Antisense strand to SEQ ID NO: 766008
ucuggaaacacuguacauc

SEQ ID NO: 766010 - RNA, 19 nt, Artificial Sequence
  Description of Artificial Sequence: Synthetic oligonucleotide
  Sense strand starting at position 463 of SEQ ID NO: 587091
uguacaguguuuccagaaa

SEQ ID NO: 766011 - RNA, 19 nt, Artificial Sequence
  Description of Artificial Sequence: Synthetic oligonucleotide
  Antisense strand to SEQ ID NO: 766010
uuucuggaaacacuguaca

SEQ ID NO: 766012 - RNA, 19 nt, Artificial Sequence
  Description of Artificial Sequence: Synthetic oligonucleotide
  Sense strand starting at position 1054 of SEQ ID NO: 587091
guuugaauguauccuccua

SEQ ID NO: 766013 - RNA, 19 nt, Artificial Sequence
  Description of Artificial Sequence: Synthetic oligonucleotide
  Antisense strand to SEQ ID NO: 766012
uaggaggauacauucaaac

SEQ ID NO: 766014 - RNA, 19 nt, Artificial Sequence
  Description of Artificial Sequence: Synthetic oligonucleotide
  Sense strand starting at position 1114 of SEQ ID NO: 587091
gaaaguuggcuguagccua

SEQ ID NO: 766015 - RNA, 19 nt, Artificial Sequence
  Description of Artificial Sequence: Synthetic oligonucleotide
  Antisense strand to SEQ ID NO: 766014
uaggcuacagccaacuuuc

SEQ ID NO: 766016 - RNA, 19 nt, Artificial Sequence
  Description of Artificial Sequence: Synthetic oligonucleotide
  Sense strand starting at position 1429 of SEQ ID NO: 587091
ugucuugucugggccuaaa

SEQ ID NO: 766017 - RNA, 19 nt, Artificial Sequence
  Description of Artificial Sequence: Synthetic oligonucleotide
  Antisense strand to SEQ ID NO: 766016
uuuaggcccagacaagaca

SEQ ID NO: 766018 - RNA, 19 nt, Artificial Sequence
  Description of Artificial Sequence: Synthetic oligonucleotide
  Sense strand starting at position 1439 of SEQ ID NO: 587091
gggccuaaauucucuagaa

SEQ ID NO: 766019 - RNA, 19 nt, Artificial Sequence
  Description of Artificial Sequence: Synthetic oligonucleotide
  Antisense strand to SEQ ID NO: 766018
uucuagagaauuuaggccc

SEQ ID NO: 766020 - RNA, 19 nt, Artificial Sequence
  Description of Artificial Sequence: Synthetic oligonucleotide
  Sense strand starting at position 1440 of SEQ ID NO: 587091
ggccuaaauucucuagaau

SEQ ID NO: 766021 - RNA, 19 nt, Artificial Sequence
  Description of Artificial Sequence: Synthetic oligonucleotide
  Antisense strand to SEQ ID NO: 766020
auucuagagaauuuaggcc

SEQ ID NO: 766022 - RNA, 19 nt, Artificial Sequence
  Description of Artificial Sequence: Synthetic oligonucleotide
  Sense strand starting at position 2067 of SEQ ID NO: 587091
ccguuacgugucccaucau

SEQ ID NO: 766023 - RNA, 19 nt, Artificial Sequence
  Description of Artificial Sequence: Synthetic oligonucleotide
  Antisense strand to SEQ ID NO: 766022
augaugggacacguaacgg

SEQ ID NO: 766024 - RNA, 19 nt, Artificial Sequence
  Description of Artificial Sequence: Synthetic oligonucleotide
  Sense strand starting at position 2131 of SEQ ID NO: 587091
cgaccucuguaguuccaga

SEQ ID NO: 766025 - RNA, 19 nt, Artificial Sequence
  Description of Artificial Sequence: Synthetic oligonucleotide
  Antisense strand to SEQ ID NO: 766024
ucuggaacuacagaggucg

SEQ ID NO: 766026 - RNA, 19 nt, Artificial Sequence
  Description of Artificial Sequence: Synthetic oligonucleotide
  Sense strand starting at position 2497 of SEQ ID NO: 587091
ccuguacgagcgguuaagu

SEQ ID NO: 766027 - RNA, 19 nt, Artificial Sequence
  Description of Artificial Sequence: Synthetic oligonucleotide
  Antisense strand to SEQ ID NO: 766026
acuuaaccgcucguacagg

SEQ ID NO: 766028 - RNA, 19 nt, Artificial Sequence
  Description of Artificial Sequence: Synthetic oligonucleotide
  Sense strand starting at position 2508 of SEQ ID NO: 587091
gguuaagucagaggaugcu

SEQ ID NO: 766029 - RNA, 19 nt, Artificial Sequence
  Description of Artificial Sequence: Synthetic oligonucleotide
  Antisense strand to SEQ ID NO: 766028
agcauccucugacuuaacc

SEQ ID NO: 766030 - RNA, 19 nt, Artificial Sequence
  Description of Artificial Sequence: Synthetic oligonucleotide
  Sense strand starting at position 2639 of SEQ ID NO: 587091
ggauccaugucaucgcacu

SEQ ID NO: 766031 - RNA, 19 nt, Artificial Sequence
  Description of Artificial Sequence: Synthetic oligonucleotide
  Antisense strand to SEQ ID NO: 766030
agugcgaugacauggaucc

SEQ ID NO: 766032 - RNA, 19 nt, Artificial Sequence
  Description of Artificial Sequence: Synthetic oligonucleotide
  Sense strand starting at position 2704 of SEQ ID NO: 587091
uuggaaaugcuuuguuuga

SEQ ID NO: 766033 - RNA, 19 nt, Artificial Sequence
  Description of Artificial Sequence: Synthetic oligonucleotide
  Antisense strand to SEQ ID NO: 766032
ucaaacaaagcauuuccaa

SEQ ID NO: 766034 - RNA, 19 nt, Artificial Sequence
  Description of Artificial Sequence: Synthetic oligonucleotide
  Sense strand starting at position 2705 of SEQ ID NO: 587091
uggaaaugcuuuguuugaa

SEQ ID NO: 766035 - RNA, 19 nt, Artificial Sequence
  Description of Artificial Sequence: Synthetic oligonucleotide
  Antisense strand to SEQ ID NO: 766034
uucaaacaaagcauuucca

SEQ ID NO: 766036 - RNA, 19 nt, Artificial Sequence
  Description of Artificial Sequence: Synthetic oligonucleotide
  Sense strand starting at position 2706 of SEQ ID NO: 587091
ggaaaugcuuuguuugaag

SEQ ID NO: 766037 - RNA, 19 nt, Artificial Sequence
  Description of Artificial Sequence: Synthetic oligonucleotide
  Antisense strand to SEQ ID NO: 766036
cuucaaacaaagcauuucc

SEQ ID NO: 766038 - RNA, 19 nt, Artificial Sequence
  Description of Artificial Sequence: Synthetic oligonucleotide
  Sense strand starting at position 3010 of SEQ ID NO: 587091
cugcuucugccaugaauua

SEQ ID NO: 766039 - RNA, 19 nt, Artificial Sequence
  Description of Artificial Sequence: Synthetic oligonucleotide
  Antisense strand to SEQ ID NO: 766038
uaauucauggcagaagcag

SEQ ID NO: 766040 - RNA, 19 nt, Artificial Sequence
  Description of Artificial Sequence: Synthetic oligonucleotide
  Sense strand starting at position 3164 of SEQ ID NO: 587091
agcuuaagcucaucugauc

SEQ ID NO: 766041 - RNA, 19 nt, Artificial Sequence
  Description of Artificial Sequence: Synthetic oligonucleotide
  Antisense strand to SEQ ID NO: 766040
gaucagaugagcuuaagcu

SEQ ID NO: 766042 - RNA, 19 nt, Artificial Sequence
  Description of Artificial Sequence: Synthetic oligonucleotide
  Sense strand starting at position 3184 of SEQ ID NO: 587091
cauuguuucugugugauca

SEQ ID NO: 766043 - RNA, 19 nt, Artificial Sequence
  Description of Artificial Sequence: Synthetic oligonucleotide
  Antisense strand to SEQ ID NO: 766042
ugaucacacagaaacaaug

SEQ ID NO: 766044 - RNA, 19 nt, Artificial Sequence
  Description of Artificial Sequence: Synthetic oligonucleotide
  Sense strand starting at position 3185 of SEQ ID NO: 587091
auuguuucugugugaucau

SEQ ID NO: 766045 - RNA, 19 nt, Artificial Sequence
  Description of Artificial Sequence: Synthetic oligonucleotide
  Antisense strand to SEQ ID NO: 766044
augaucacacagaaacaau

SEQ ID NO: 766046 - RNA, 19 nt, Artificial Sequence
  Description of Artificial Sequence: Synthetic oligonucleotide
  Sense strand starting at position 3188 of SEQ ID NO: 587091
guuucugugugaucaugag

SEQ ID NO: 766047 - RNA, 19 nt, Artificial Sequence
  Description of Artificial Sequence: Synthetic oligonucleotide
  Antisense strand to SEQ ID NO: 766046
cucaugaucacacagaaac

SEQ ID NO: 766048 - RNA, 19 nt, Artificial Sequence
  Description of Artificial Sequence: Synthetic oligonucleotide
  Sense strand starting at position 3192 of SEQ ID NO: 587091
cugugugaucaugagagac

SEQ ID NO: 766049 - RNA, 19 nt, Artificial Sequence
  Description of Artificial Sequence: Synthetic oligonucleotide
  Antisense strand to SEQ ID NO: 766048
gucucucaugaucacacag

SEQ ID NO: 766050 - RNA, 19 nt, Artificial Sequence
  Description of Artificial Sequence: Synthetic oligonucleotide
  Sense strand starting at position 3200 of SEQ ID NO: 587091
ucaugagagacucgauauu

SEQ ID NO: 766051 - RNA, 19 nt, Artificial Sequence
  Description of Artificial Sequence: Synthetic oligonucleotide
  Antisense strand to SEQ ID NO: 766050
aauaucgagucucucauga

SEQ ID NO: 766052 - RNA, 19 nt, Artificial Sequence
  Description of Artificial Sequence: Synthetic oligonucleotide
  Sense strand starting at position 3396 of SEQ ID NO: 587091
auuguuuaggagcgagaug

SEQ ID NO: 766053 - RNA, 19 nt, Artificial Sequence
  Description of Artificial Sequence: Synthetic oligonucleotide
  Antisense strand to SEQ ID NO: 766052
caucucgcuccuaaacaau

SEQ ID NO: 766054 - RNA, 19 nt, Artificial Sequence
  Description of Artificial Sequence: Synthetic oligonucleotide
  Sense strand starting at position 3397 of SEQ ID NO: 587091
uuguuuaggagcgagauga

SEQ ID NO: 766055 - RNA, 19 nt, Artificial Sequence
  Description of Artificial Sequence: Synthetic oligonucleotide
  Antisense strand to SEQ ID NO: 766054
ucaucucgcuccuaaacaa

SEQ ID NO: 766056 - RNA, 19 nt, Artificial Sequence
  Description of Artificial Sequence: Synthetic oligonucleotide
  Sense strand starting at position 3538 of SEQ ID NO: 587091
uggcuuaaugggcaaggua

SEQ ID NO: 766057 - RNA, 19 nt, Artificial Sequence
  Description of Artificial Sequence: Synthetic oligonucleotide
  Antisense strand to SEQ ID NO: 766056
uaccuugcccauuaagcca

SEQ ID NO: 766058 - RNA, 19 nt, Artificial Sequence
  Description of Artificial Sequence: Synthetic oligonucleotide
  Sense strand starting at position 3541 of SEQ ID NO: 587091
cuuaaugggcaagguauaa

SEQ ID NO: 766059 - RNA, 19 nt, Artificial Sequence
  Description of Artificial Sequence: Synthetic oligonucleotide
  Antisense strand to SEQ ID NO: 766058
uuauaccuugcccauuaag

SEQ ID NO: 766060 - RNA, 19 nt, Artificial Sequence
  Description of Artificial Sequence: Synthetic oligonucleotide
  Sense strand starting at position 3553 of SEQ ID NO: 587091
gguauaaucuuugcacucu

SEQ ID NO: 766061 - RNA, 19 nt, Artificial Sequence
  Description of Artificial Sequence: Synthetic oligonucleotide
  Antisense strand to SEQ ID NO: 766060
agagugcaaagauuauacc

SEQ ID NO: 766062 - RNA, 19 nt, Artificial Sequence
  Description of Artificial Sequence: Synthetic oligonucleotide
  Sense strand starting at position 3575 of SEQ ID NO: 587091
uuaacucaccacugggaau

SEQ ID NO: 766063 - RNA, 19 nt, Artificial Sequence
  Description of Artificial Sequence: Synthetic oligonucleotide
  Antisense strand to SEQ ID NO: 766062
auucccaguggugaguuaa

SEQ ID NO: 766064 - RNA, 19 nt, Artificial Sequence
  Description of Artificial Sequence: Synthetic oligonucleotide
  Sense strand starting at position 3586 of SEQ ID NO: 587091
cugggaauguuucuuuguu

SEQ ID NO: 766065 - RNA, 19 nt, Artificial Sequence
  Description of Artificial Sequence: Synthetic oligonucleotide
  Antisense strand to SEQ ID NO: 766064
aacaaagaaacauucccag

SEQ ID NO: 766066 - RNA, 19 nt, Artificial Sequence
  Description of Artificial Sequence: Synthetic oligonucleotide
  Sense strand starting at position 3587 of SEQ ID NO: 587091
ugggaauguuucuuuguuc

SEQ ID NO: 766067 - RNA, 19 nt, Artificial Sequence
  Description of Artificial Sequence: Synthetic oligonucleotide
  Antisense strand to SEQ ID NO: 766066
gaacaaagaaacauuccca

SEQ ID NO: 766068 - RNA, 19 nt, Artificial Sequence
  Description of Artificial Sequence: Synthetic oligonucleotide
  Sense strand starting at position 3735 of SEQ ID NO: 587091
cucagcucacuugguagaa

SEQ ID NO: 766069 - RNA, 19 nt, Artificial Sequence
  Description of Artificial Sequence: Synthetic oligonucleotide
  Antisense strand to SEQ ID NO: 766068
uucuaccaagugagcugag

SEQ ID NO: 766070 - RNA, 19 nt, Artificial Sequence
  Description of Artificial Sequence: Synthetic oligonucleotide
  Sense strand starting at position 3736 of SEQ ID NO: 587091
ucagcucacuugguagaau

SEQ ID NO: 766071 - RNA, 19 nt, Artificial Sequence
  Description of Artificial Sequence: Synthetic oligonucleotide
  Antisense strand to SEQ ID NO: 766070
auucuaccaagugagcuga

SEQ ID NO: 766072 - RNA, 19 nt, Artificial Sequence
  Description of Artificial Sequence: Synthetic oligonucleotide
  Sense strand starting at position 3781 of SEQ ID NO: 587091
aguguugugggugugcuua

SEQ ID NO: 766073 - RNA, 19 nt, Artificial Sequence
  Description of Artificial Sequence: Synthetic oligonucleotide
  Antisense strand to SEQ ID NO: 766072
uaagcacacccacaacacu

SEQ ID NO: 766074 - RNA, 19 nt, Artificial Sequence
  Description of Artificial Sequence: Synthetic oligonucleotide
  Sense strand starting at position 3793 of SEQ ID NO: 587091
gugcuuaaugaaggcauga

SEQ ID NO: 766075 - RNA, 19 nt, Artificial Sequence
  Description of Artificial Sequence: Synthetic oligonucleotide
  Antisense strand to SEQ ID NO: 766074
ucaugccuucauuaagcac

SEQ ID NO: 766076 - RNA, 19 nt, Artificial Sequence
  Description of Artificial Sequence: Synthetic oligonucleotide
  Sense strand starting at position 3810 of SEQ ID NO: 587091
gauuaauucuagcugggaa

SEQ ID NO: 766077 - RNA, 19 nt, Artificial Sequence
  Description of Artificial Sequence: Synthetic oligonucleotide
  Antisense strand to SEQ ID NO: 766076
uucccagcuagaauuaauc

SEQ ID NO: 766078 - RNA, 19 nt, Artificial Sequence
  Description of Artificial Sequence: Synthetic oligonucleotide
  Sense strand starting at position 3812 of SEQ ID NO: 587091
uuaauucuagcugggaagu

SEQ ID NO: 766079 - RNA, 19 nt, Artificial Sequence
  Description of Artificial Sequence: Synthetic oligonucleotide
  Antisense strand to SEQ ID NO: 766078
acuucccagcuagaauuaa

SEQ ID NO: 766080 - RNA, 19 nt, Artificial Sequence
  Description of Artificial Sequence: Synthetic oligonucleotide
  Sense strand starting at position 3813 of SEQ ID NO: 587091
uaauucuagcugggaaguu

SEQ ID NO: 766081 - RNA, 19 nt, Artificial Sequence
  Description of Artificial Sequence: Synthetic oligonucleotide
  Antisense strand to SEQ ID NO: 766080
aacuucccagcuagaauua

SEQ ID NO: 766082 - RNA, 19 nt, Artificial Sequence
  Description of Artificial Sequence: Synthetic oligonucleotide
  Sense strand starting at position 236 of SEQ ID NO: 587092
gugccuguaauccaguuau

SEQ ID NO: 766083 - RNA, 19 nt, Artificial Sequence
  Description of Artificial Sequence: Synthetic oligonucleotide
  Antisense strand to SEQ ID NO: 766082
auaacuggauuacaggcac

SEQ ID NO: 766084 - RNA, 19 nt, Artificial Sequence
  Description of Artificial Sequence: Synthetic oligonucleotide
  Sense strand starting at position 425 of SEQ ID NO: 587092
gucuguagggccugaaauc

SEQ ID NO: 766085 - RNA, 19 nt, Artificial Sequence
  Description of Artificial Sequence: Synthetic oligonucleotide
  Antisense strand to SEQ ID NO: 766084
gauuucaggcccuacagac

SEQ ID NO: 766086 - RNA, 19 nt, Artificial Sequence
  Description of Artificial Sequence: Synthetic oligonucleotide
  Sense strand starting at position 824 of SEQ ID NO: 587092
ggcucauaugccugaggag

SEQ ID NO: 766087 - RNA, 19 nt, Artificial Sequence
  Description of Artificial Sequence: Synthetic oligonucleotide
  Antisense strand to SEQ ID NO: 766086
cuccucaggcauaugagcc

SEQ ID NO: 766088 - RNA, 19 nt, Artificial Sequence
  Description of Artificial Sequence: Synthetic oligonucleotide
  Sense strand starting at position 825 of SEQ ID NO: 587092
gcucauaugccugaggaga

SEQ ID NO: 766089 - RNA, 19 nt, Artificial Sequence
  Description of Artificial Sequence: Synthetic oligonucleotide
  Antisense strand to SEQ ID NO: 766088
ucuccucaggcauaugagc

SEQ ID NO: 766090 - RNA, 19 nt, Artificial Sequence
  Description of Artificial Sequence: Synthetic oligonucleotide
  Sense strand starting at position 827 of SEQ ID NO: 587092
ucauaugccugaggagaaa

SEQ ID NO: 766091 - RNA, 19 nt, Artificial Sequence
  Description of Artificial Sequence: Synthetic oligonucleotide
  Antisense strand to SEQ ID NO: 766090
uuucuccucaggcauauga

SEQ ID NO: 766092 - RNA, 19 nt, Artificial Sequence
  Description of Artificial Sequence: Synthetic oligonucleotide
  Sense strand starting at position 883 of SEQ ID NO: 587092
gacccacauuuguggaaau

SEQ ID NO: 766093 - RNA, 19 nt, Artificial Sequence
  Description of Artificial Sequence: Synthetic oligonucleotide
  Antisense strand to SEQ ID NO: 766092
auuuccacaaauguggguc

SEQ ID NO: 766094 - RNA, 19 nt, Artificial Sequence
  Description of Artificial Sequence: Synthetic oligonucleotide
  Sense strand starting at position 960 of SEQ ID NO: 587092
ggcugacauguugguacuu

SEQ ID NO: 766095 - RNA, 19 nt, Artificial Sequence
  Description of Artificial Sequence: Synthetic oligonucleotide
  Antisense strand to SEQ ID NO: 766094
aaguaccaacaugucagcc

SEQ ID NO: 766096 - RNA, 19 nt, Artificial Sequence
  Description of Artificial Sequence: Synthetic oligonucleotide
  Sense strand starting at position 1519 of SEQ ID NO: 587092
guguauauuugaggagcca

SEQ ID NO: 766097 - RNA, 19 nt, Artificial Sequence
  Description of Artificial Sequence: Synthetic oligonucleotide
  Antisense strand to SEQ ID NO: 766096
uggcuccucaaauauacac

SEQ ID NO: 766098 - RNA, 19 nt, Artificial Sequence
  Description of Artificial Sequence: Synthetic oligonucleotide
  Sense strand starting at position 2047 of SEQ ID NO: 587092
ugccauuucucccugaguc

SEQ ID NO: 766099 - RNA, 19 nt, Artificial Sequence
  Description of Artificial Sequence: Synthetic oligonucleotide
  Antisense strand to SEQ ID NO: 766098
gacucagggagaaauggca

SEQ ID NO: 766100 - RNA, 19 nt, Artificial Sequence
  Description of Artificial Sequence: Synthetic oligonucleotide
  Sense strand starting at position 2048 of SEQ ID NO: 587092
gccauuucucccugaguca

SEQ ID NO: 766101 - RNA, 19 nt, Artificial Sequence
  Description of Artificial Sequence: Synthetic oligonucleotide
  Antisense strand to SEQ ID NO: 766100
ugacucagggagaaauggc

SEQ ID NO: 766102 - RNA, 19 nt, Artificial Sequence
  Description of Artificial Sequence: Synthetic oligonucleotide
  Sense strand starting at position 3698 of SEQ ID NO: 587092
gugcgucagccauagguau

SEQ ID NO: 766103 - RNA, 19 nt, Artificial Sequence
  Description of Artificial Sequence: Synthetic oligonucleotide
  Antisense strand to SEQ ID NO: 766102
auaccuauggcugacgcac

SEQ ID NO: 766104 - RNA, 19 nt, Artificial Sequence
  Description of Artificial Sequence: Synthetic oligonucleotide
  Sense strand starting at position 3704 of SEQ ID NO: 587092
cagccauagguaugacauu

SEQ ID NO: 766105 - RNA, 19 nt, Artificial Sequence
  Description of Artificial Sequence: Synthetic oligonucleotide
  Antisense strand to SEQ ID NO: 766104
aaugucauaccuauggcug

SEQ ID NO: 766106 - RNA, 19 nt, Artificial Sequence
  Description of Artificial Sequence: Synthetic oligonucleotide
  Sense strand starting at position 3735 of SEQ ID NO: 587092
gggcucuuacggcaacauu

SEQ ID NO: 766107 - RNA, 19 nt, Artificial Sequence
  Description of Artificial Sequence: Synthetic oligonucleotide
  Antisense strand to SEQ ID NO: 766106
aauguugccguaagagccc

SEQ ID NO: 766108 - RNA, 19 nt, Artificial Sequence
  Description of Artificial Sequence: Synthetic oligonucleotide
  Sense strand starting at position 3743 of SEQ ID NO: 587092
acggcaacauucugcauau

SEQ ID NO: 766109 - RNA, 19 nt, Artificial Sequence
  Description of Artificial Sequence: Synthetic oligonucleotide
  Antisense strand to SEQ ID NO: 766108
auaugcagaauguugccgu

SEQ ID NO: 766110 - RNA, 19 nt, Artificial Sequence
  Description of Artificial Sequence: Synthetic oligonucleotide
  Sense strand starting at position 3744 of SEQ ID NO: 587092
cggcaacauucugcauauu

SEQ ID NO: 766111 - RNA, 19 nt, Artificial Sequence
  Description of Artificial Sequence: Synthetic oligonucleotide
  Antisense strand to SEQ ID NO: 766110
aauaugcagaauguugccg

SEQ ID NO: 766112 - RNA, 19 nt, Artificial Sequence
  Description of Artificial Sequence: Synthetic oligonucleotide
  Sense strand starting at position 3753 of SEQ ID NO: 587092
ucugcauauuugcauaaag

SEQ ID NO: 766113 - RNA, 19 nt, Artificial Sequence
  Description of Artificial Sequence: Synthetic oligonucleotide
  Antisense strand to SEQ ID NO: 766112
cuuuaugcaaauaugcaga

SEQ ID NO: 766114 - RNA, 19 nt, Artificial Sequence
  Description of Artificial Sequence: Synthetic oligonucleotide
  Sense strand starting at position 442 of SEQ ID NO: 587093
aguggucagggcugagauu

SEQ ID NO: 766115 - RNA, 19 nt, Artificial Sequence
  Description of Artificial Sequence: Synthetic oligonucleotide
  Antisense strand to SEQ ID NO: 766114
aaucucagcccugaccacu

SEQ ID NO: 766116 - RNA, 19 nt, Artificial Sequence
  Description of Artificial Sequence: Synthetic oligonucleotide
  Sense strand starting at position 448 of SEQ ID NO: 587093
cagggcugagauugcaaau

SEQ ID NO: 766117 - RNA, 19 nt, Artificial Sequence
  Description of Artificial Sequence: Synthetic oligonucleotide
  Antisense strand to SEQ ID NO: 766116
auuugcaaucucagcccug

SEQ ID NO: 766118 - RNA, 19 nt, Artificial Sequence
  Description of Artificial Sequence: Synthetic oligonucleotide
  Sense strand starting at position 610 of SEQ ID NO: 587093
gugagauuccacuggaggu

SEQ ID NO: 766119 - RNA, 19 nt, Artificial Sequence
  Description of Artificial Sequence: Synthetic oligonucleotide
  Antisense strand to SEQ ID NO: 766118
accuccaguggaaucucac

SEQ ID NO: 766120 - RNA, 19 nt, Artificial Sequence
  Description of Artificial Sequence: Synthetic oligonucleotide
  Sense strand starting at position 611 of SEQ ID NO: 587093
ugagauuccacuggaggua

SEQ ID NO: 766121 - RNA, 19 nt, Artificial Sequence
  Description of Artificial Sequence: Synthetic oligonucleotide
  Antisense strand to SEQ ID NO: 766120
uaccuccaguggaaucuca

SEQ ID NO: 766122 - RNA, 19 nt, Artificial Sequence
  Description of Artificial Sequence: Synthetic oligonucleotide
  Sense strand starting at position 950 of SEQ ID NO: 587093
agggcuaagccaugaaaug

SEQ ID NO: 766123 - RNA, 19 nt, Artificial Sequence
  Description of Artificial Sequence: Synthetic oligonucleotide
  Antisense strand to SEQ ID NO: 766122
cauuucauggcuuagcccu

SEQ ID NO: 766124 - RNA, 19 nt, Artificial Sequence
  Description of Artificial Sequence: Synthetic oligonucleotide
  Sense strand starting at position 1038 of SEQ ID NO: 587093
aucuuuaugucauugggau

SEQ ID NO: 766125 - RNA, 19 nt, Artificial Sequence
  Description of Artificial Sequence: Synthetic oligonucleotide
  Antisense strand to SEQ ID NO: 766124
aucccaaugacauaaagau

SEQ ID NO: 766126 - RNA, 19 nt, Artificial Sequence
  Description of Artificial Sequence: Synthetic oligonucleotide
  Sense strand starting at position 1039 of SEQ ID NO: 587093
ucuuuaugucauugggauc

SEQ ID NO: 766127 - RNA, 19 nt, Artificial Sequence
  Description of Artificial Sequence: Synthetic oligonucleotide
  Antisense strand to SEQ ID NO: 766126
gaucccaaugacauaaaga

SEQ ID NO: 766128 - RNA, 19 nt, Artificial Sequence
  Description of Artificial Sequence: Synthetic oligonucleotide
  Sense strand starting at position 1450 of SEQ ID NO: 587093
gggauucuguaauuaggug

SEQ ID NO: 766129 - RNA, 19 nt, Artificial Sequence
  Description of Artificial Sequence: Synthetic oligonucleotide
  Antisense strand to SEQ ID NO: 766128
caccuaauuacagaauccc

SEQ ID NO: 766130 - RNA, 19 nt, Artificial Sequence
  Description of Artificial Sequence: Synthetic oligonucleotide
  Sense strand starting at position 1482 of SEQ ID NO: 587093
ggguaugucugagugacug

SEQ ID NO: 766131 - RNA, 19 nt, Artificial Sequence
  Description of Artificial Sequence: Synthetic oligonucleotide
  Antisense strand to SEQ ID NO: 766130
cagucacucagacauaccc

SEQ ID NO: 766132 - RNA, 19 nt, Artificial Sequence
  Description of Artificial Sequence: Synthetic oligonucleotide
  Sense strand starting at position 1493 of SEQ ID NO: 587093
agugacuggcacugacaau

SEQ ID NO: 766133 - RNA, 19 nt, Artificial Sequence
  Description of Artificial Sequence: Synthetic oligonucleotide
  Antisense strand to SEQ ID NO: 766132
auugucagugccagucacu

SEQ ID NO: 766134 - RNA, 19 nt, Artificial Sequence
  Description of Artificial Sequence: Synthetic oligonucleotide
  Sense strand starting at position 1494 of SEQ ID NO: 587093
gugacuggcacugacaaua

SEQ ID NO: 766135 - RNA, 19 nt, Artificial Sequence
  Description of Artificial Sequence: Synthetic oligonucleotide
  Antisense strand to SEQ ID NO: 766134
uauugucagugccagucac

SEQ ID NO: 766136 - RNA, 19 nt, Artificial Sequence
  Description of Artificial Sequence: Synthetic oligonucleotide
  Sense strand starting at position 1624 of SEQ ID NO: 587093
auaugaagcuuguccaggu

SEQ ID NO: 766137 - RNA, 19 nt, Artificial Sequence
  Description of Artificial Sequence: Synthetic oligonucleotide
  Antisense strand to SEQ ID NO: 766136
accuggacaagcuucauau

SEQ ID NO: 766138 - RNA, 19 nt, Artificial Sequence
  Description of Artificial Sequence: Synthetic oligonucleotide
  Sense strand starting at position 1655 of SEQ ID NO: 587093
cuuguucucugaccagaaa

SEQ ID NO: 766139 - RNA, 19 nt, Artificial Sequence
  Description of Artificial Sequence: Synthetic oligonucleotide
  Antisense strand to SEQ ID NO: 766138
uuucuggucagagaacaag

SEQ ID NO: 766140 - RNA, 19 nt, Artificial Sequence
  Description of Artificial Sequence: Synthetic oligonucleotide
  Sense strand starting at position 1762 of SEQ ID NO: 587093
auuauagaaauguggcgaa

SEQ ID NO: 766141 - RNA, 19 nt, Artificial Sequence
  Description of Artificial Sequence: Synthetic oligonucleotide
  Antisense strand to SEQ ID NO: 766140
uucgccacauuucuauaau

SEQ ID NO: 766142 - RNA, 19 nt, Artificial Sequence
  Description of Artificial Sequence: Synthetic oligonucleotide
  Sense strand starting at position 1834 of SEQ ID NO: 587093
cugggacucugaguuuauc

SEQ ID NO: 766143 - RNA, 19 nt, Artificial Sequence
  Description of Artificial Sequence: Synthetic oligonucleotide
  Antisense strand to SEQ ID NO: 766142
gauaaacucagagucccag

SEQ ID NO: 766144 - RNA, 19 nt, Artificial Sequence
  Description of Artificial Sequence: Synthetic oligonucleotide
  Sense strand starting at position 1846 of SEQ ID NO: 587093
guuuaucuccuguaugacu

SEQ ID NO: 766145 - RNA, 19 nt, Artificial Sequence
  Description of Artificial Sequence: Synthetic oligonucleotide
  Antisense strand to SEQ ID NO: 766144
agucauacaggagauaaac

SEQ ID NO: 766146 - RNA, 19 nt, Artificial Sequence
  Description of Artificial Sequence: Synthetic oligonucleotide
  Sense strand starting at position 1857 of SEQ ID NO: 587093
guaugacuuguguaugcag

SEQ ID NO: 766147 - RNA, 19 nt, Artificial Sequence
  Description of Artificial Sequence: Synthetic oligonucleotide
  Antisense strand to SEQ ID NO: 766146
cugcauacacaagucauac

SEQ ID NO: 766148 - RNA, 19 nt, Artificial Sequence
  Description of Artificial Sequence: Synthetic oligonucleotide
  Sense strand starting at position 2062 of SEQ ID NO: 587093
ggaggagcucuuugcagag

SEQ ID NO: 766149 - RNA, 19 nt, Artificial Sequence
  Description of Artificial Sequence: Synthetic oligonucleotide
  Antisense strand to SEQ ID NO: 766148
cucugcaaagagcuccucc

SEQ ID NO: 766150 - RNA, 19 nt, Artificial Sequence
  Description of Artificial Sequence: Synthetic oligonucleotide
  Sense strand starting at position 2066 of SEQ ID NO: 587093
gagcucuuugcagagcuga

SEQ ID NO: 766151 - RNA, 19 nt, Artificial Sequence
  Description of Artificial Sequence: Synthetic oligonucleotide
  Antisense strand to SEQ ID NO: 766150
ucagcucugcaaagagcuc

SEQ ID NO: 766152 - RNA, 19 nt, Artificial Sequence
  Description of Artificial Sequence: Synthetic oligonucleotide
  Sense strand starting at position 2244 of SEQ ID NO: 587093
caguuaguugcaugaggga

SEQ ID NO: 766153 - RNA, 19 nt, Artificial Sequence
  Description of Artificial Sequence: Synthetic oligonucleotide
  Antisense strand to SEQ ID NO: 766152
ucccucaugcaacuaacug

SEQ ID NO: 766154 - RNA, 19 nt, Artificial Sequence
  Description of Artificial Sequence: Synthetic oligonucleotide
  Sense strand starting at position 2276 of SEQ ID NO: 587093
agacuuccagcucaagagu

SEQ ID NO: 766155 - RNA, 19 nt, Artificial Sequence
  Description of Artificial Sequence: Synthetic oligonucleotide
  Antisense strand to SEQ ID NO: 766154
acucuugagcuggaagucu

SEQ ID NO: 766156 - RNA, 19 nt, Artificial Sequence
  Description of Artificial Sequence: Synthetic oligonucleotide
  Sense strand starting at position 2297 of SEQ ID NO: 587093
ggcagagccugguucaaau

SEQ ID NO: 766157 - RNA, 19 nt, Artificial Sequence
  Description of Artificial Sequence: Synthetic oligonucleotide
  Antisense strand to SEQ ID NO: 766156
auuugaaccaggcucugcc

SEQ ID NO: 766158 - RNA, 19 nt, Artificial Sequence
  Description of Artificial Sequence: Synthetic oligonucleotide
  Sense strand starting at position 2360 of SEQ ID NO: 587093
guuccuaaccugugaaauu

SEQ ID NO: 766159 - RNA, 19 nt, Artificial Sequence
  Description of Artificial Sequence: Synthetic oligonucleotide
  Antisense strand to SEQ ID NO: 766158
aauuucacagguuaggaac

SEQ ID NO: 766160 - RNA, 19 nt, Artificial Sequence
  Description of Artificial Sequence: Synthetic oligonucleotide
  Sense strand starting at position 2579 of SEQ ID NO: 587093
ccaaucccucucugugaga

SEQ ID NO: 766161 - RNA, 19 nt, Artificial Sequence
  Description of Artificial Sequence: Synthetic oligonucleotide
  Antisense strand to SEQ ID NO: 766160
ucucacagagagggauugg

SEQ ID NO: 766162 - RNA, 19 nt, Artificial Sequence
  Description of Artificial Sequence: Synthetic oligonucleotide
  Sense strand starting at position 2592 of SEQ ID NO: 587093
gugagaaguccucaugacc

SEQ ID NO: 766163 - RNA, 19 nt, Artificial Sequence
  Description of Artificial Sequence: Synthetic oligonucleotide
  Antisense strand to SEQ ID NO: 766162
ggucaugaggacuucucac

SEQ ID NO: 766164 - RNA, 19 nt, Artificial Sequence
  Description of Artificial Sequence: Synthetic oligonucleotide
  Sense strand starting at position 2693 of SEQ ID NO: 587093
aguuauuauggagguugaa

SEQ ID NO: 766165 - RNA, 19 nt, Artificial Sequence
  Description of Artificial Sequence: Synthetic oligonucleotide
  Antisense strand to SEQ ID NO: 766164
uucaaccuccauaauaacu

SEQ ID NO: 766166 - RNA, 19 nt, Artificial Sequence
  Description of Artificial Sequence: Synthetic oligonucleotide
  Sense strand starting at position 2736 of SEQ ID NO: 587093
cgacaaauaaaucgugauu

SEQ ID NO: 766167 - RNA, 19 nt, Artificial Sequence
  Description of Artificial Sequence: Synthetic oligonucleotide
  Antisense strand to SEQ ID NO: 766166
aaucacgauuuauuugucg

SEQ ID NO: 766168 - RNA, 19 nt, Artificial Sequence
  Description of Artificial Sequence: Synthetic oligonucleotide
  Sense strand starting at position 2741 of SEQ ID NO: 587093
aauaaaucgugauuccaug

SEQ ID NO: 766169 - RNA, 19 nt, Artificial Sequence
  Description of Artificial Sequence: Synthetic oligonucleotide
  Antisense strand to SEQ ID NO: 766168
cauggaaucacgauuuauu

SEQ ID NO: 766170 - RNA, 19 nt, Artificial Sequence
  Description of Artificial Sequence: Synthetic oligonucleotide
  Sense strand starting at position 2761 of SEQ ID NO: 587093
uugggacucuuuccaggaa

SEQ ID NO: 766171 - RNA, 19 nt, Artificial Sequence
  Description of Artificial Sequence: Synthetic oligonucleotide
  Antisense strand to SEQ ID NO: 766170
uuccuggaaagagucccaa

SEQ ID NO: 766172 - RNA, 19 nt, Artificial Sequence
  Description of Artificial Sequence: Synthetic oligonucleotide
  Sense strand starting at position 2847 of SEQ ID NO: 587093
aguaguuucccuuauccac

SEQ ID NO: 766173 - RNA, 19 nt, Artificial Sequence
  Description of Artificial Sequence: Synthetic oligonucleotide
  Antisense strand to SEQ ID NO: 766172
guggauaagggaaacuacu

SEQ ID NO: 766174 - RNA, 19 nt, Artificial Sequence
  Description of Artificial Sequence: Synthetic oligonucleotide
  Sense strand starting at position 2918 of SEQ ID NO: 587093
aggugaguacaguacuaua

SEQ ID NO: 766175 - RNA, 19 nt, Artificial Sequence
  Description of Artificial Sequence: Synthetic oligonucleotide
  Antisense strand to SEQ ID NO: 766174
uauaguacuguacucaccu

SEQ ID NO: 766176 - RNA, 19 nt, Artificial Sequence
  Description of Artificial Sequence: Synthetic oligonucleotide
  Sense strand starting at position 3440 of SEQ ID NO: 587093
uuuggugcuaucuaagguu

SEQ ID NO: 766177 - RNA, 19 nt, Artificial Sequence
  Description of Artificial Sequence: Synthetic oligonucleotide
  Antisense strand to SEQ ID NO: 766176
aaccuuagauagcaccaaa

SEQ ID NO: 766178 - RNA, 19 nt, Artificial Sequence
  Description of Artificial Sequence: Synthetic oligonucleotide
  Sense strand starting at position 3507 of SEQ ID NO: 587093
gugacuacuguauaugaua

SEQ ID NO: 766179 - RNA, 19 nt, Artificial Sequence
  Description of Artificial Sequence: Synthetic oligonucleotide
  Antisense strand to SEQ ID NO: 766178
uaucauauacaguagucac

SEQ ID NO: 766180 - RNA, 19 nt, Artificial Sequence
  Description of Artificial Sequence: Synthetic oligonucleotide
  Sense strand starting at position 3522 of SEQ ID NO: 587093
gauagcuuguauuuauguu

SEQ ID NO: 766181 - RNA, 19 nt, Artificial Sequence
  Description of Artificial Sequence: Synthetic oligonucleotide
  Antisense strand to SEQ ID NO: 766180
aacauaaauacaagcuauc

SEQ ID NO: 766182 - RNA, 19 nt, Artificial Sequence
  Description of Artificial Sequence: Synthetic oligonucleotide
  Sense strand starting at position 3848 of SEQ ID NO: 587093
aagaauuccgucugugaga

SEQ ID NO: 766183 - RNA, 19 nt, Artificial Sequence
  Description of Artificial Sequence: Synthetic oligonucleotide
  Antisense strand to SEQ ID NO: 766182
ucucacagacggaauucuu

SEQ ID NO: 766184 - RNA, 19 nt, Artificial Sequence
  Description of Artificial Sequence: Synthetic oligonucleotide
  Sense strand starting at position 3849 of SEQ ID NO: 587093
agaauuccgucugugagaa

SEQ ID NO: 766185 - RNA, 19 nt, Artificial Sequence
  Description of Artificial Sequence: Synthetic oligonucleotide
  Antisense strand to SEQ ID NO: 766184
uucucacagacggaauucu

SEQ ID NO: 766186 - RNA, 19 nt, Artificial Sequence
  Description of Artificial Sequence: Synthetic oligonucleotide
  Sense strand starting at position 3850 of SEQ ID NO: 587093
gaauuccgucugugagaau

SEQ ID NO: 766187 - RNA, 19 nt, Artificial Sequence
  Description of Artificial Sequence: Synthetic oligonucleotide
  Antisense strand to SEQ ID NO: 766186
auucucacagacggaauuc

SEQ ID NO: 766188 - RNA, 19 nt, Artificial Sequence
  Description of Artificial Sequence: Synthetic oligonucleotide
  Sense strand starting at position 3861 of SEQ ID NO: 587093
gugagaauucuugggugug

SEQ ID NO: 766189 - RNA, 19 nt, Artificial Sequence
  Description of Artificial Sequence: Synthetic oligonucleotide
  Antisense strand to SEQ ID NO: 766188
cacacccaagaauucucac

SEQ ID NO: 766190 - RNA, 19 nt, Artificial Sequence
  Description of Artificial Sequence: Synthetic oligonucleotide
  Sense strand starting at position 3909 of SEQ ID NO: 587093
gacuguaacuggccaugaa

SEQ ID NO: 766191 - RNA, 19 nt, Artificial Sequence
  Description of Artificial Sequence: Synthetic oligonucleotide
  Antisense strand to SEQ ID NO: 766190
uucauggccaguuacaguc

SEQ ID NO: 766192 - RNA, 19 nt, Artificial Sequence
  Description of Artificial Sequence: Synthetic oligonucleotide
  Sense strand starting at position 3912 of SEQ ID NO: 587093
uguaacuggccaugaacuu

SEQ ID NO: 766193 - RNA, 19 nt, Artificial Sequence
  Description of Artificial Sequence: Synthetic oligonucleotide
  Antisense strand to SEQ ID NO: 766192
aaguucauggccaguuaca

SEQ ID NO: 766194 - RNA, 19 nt, Artificial Sequence
  Description of Artificial Sequence: Synthetic oligonucleotide
  Sense strand starting at position 19 of SEQ ID NO: 587094
aaagaagagucauugcucu

SEQ ID NO: 766195 - RNA, 19 nt, Artificial Sequence
  Description of Artificial Sequence: Synthetic oligonucleotide
  Antisense strand to SEQ ID NO: 766194
agagcaaugacucuucuuu

SEQ ID NO: 766196 - RNA, 19 nt, Artificial Sequence
  Description of Artificial Sequence: Synthetic oligonucleotide
  Sense strand starting at position 25 of SEQ ID NO: 587094
gagucauugcucuggacac

SEQ ID NO: 766197 - RNA, 19 nt, Artificial Sequence
  Description of Artificial Sequence: Synthetic oligonucleotide
  Antisense strand to SEQ ID NO: 766196
guguccagagcaaugacuc

SEQ ID NO: 766198 - RNA, 19 nt, Artificial Sequence
  Description of Artificial Sequence: Synthetic oligonucleotide
  Sense strand starting at position 345 of SEQ ID NO: 587094
gguccuaagagugggaaga

SEQ ID NO: 766199 - RNA, 19 nt, Artificial Sequence
  Description of Artificial Sequence: Synthetic oligonucleotide
  Antisense strand to SEQ ID NO: 766198
ucuucccacucuuaggacc

SEQ ID NO: 766200 - RNA, 19 nt, Artificial Sequence
  Description of Artificial Sequence: Synthetic oligonucleotide
  Sense strand starting at position 422 of SEQ ID NO: 587094
ccaagaugucaucagccaa

SEQ ID NO: 766201 - RNA, 19 nt, Artificial Sequence
  Description of Artificial Sequence: Synthetic oligonucleotide
  Antisense strand to SEQ ID NO: 766200
uuggcugaugacaucuugg

SEQ ID NO: 766202 - RNA, 19 nt, Artificial Sequence
  Description of Artificial Sequence: Synthetic oligonucleotide
  Sense strand starting at position 783 of SEQ ID NO: 587094
cagggauagcccugaguuc

SEQ ID NO: 766203 - RNA, 19 nt, Artificial Sequence
  Description of Artificial Sequence: Synthetic oligonucleotide
  Antisense strand to SEQ ID NO: 766202
gaacucagggcuaucccug

SEQ ID NO: 766204 - RNA, 19 nt, Artificial Sequence
  Description of Artificial Sequence: Synthetic oligonucleotide
  Sense strand starting at position 835 of SEQ ID NO: 587094
agcugucauggugaagaaa

SEQ ID NO: 766205 - RNA, 19 nt, Artificial Sequence
  Description of Artificial Sequence: Synthetic oligonucleotide
  Antisense strand to SEQ ID NO: 766204
uuucuucaccaugacagcu

SEQ ID NO: 766206 - RNA, 19 nt, Artificial Sequence
  Description of Artificial Sequence: Synthetic oligonucleotide
  Sense strand starting at position 897 of SEQ ID NO: 587094
agugaauguccuuagggcu

SEQ ID NO: 766207 - RNA, 19 nt, Artificial Sequence
  Description of Artificial Sequence: Synthetic oligonucleotide
  Antisense strand to SEQ ID NO: 766206
agcccuaaggacauucacu

SEQ ID NO: 766208 - RNA, 19 nt, Artificial Sequence
  Description of Artificial Sequence: Synthetic oligonucleotide
  Sense strand starting at position 1224 of SEQ ID NO: 587094
augcgaacauauguauacu

SEQ ID NO: 766209 - RNA, 19 nt, Artificial Sequence
  Description of Artificial Sequence: Synthetic oligonucleotide
  Antisense strand to SEQ ID NO: 766208
aguauacauauguucgcau

SEQ ID NO: 766210 - RNA, 19 nt, Artificial Sequence
  Description of Artificial Sequence: Synthetic oligonucleotide
  Sense strand starting at position 1368 of SEQ ID NO: 587094
acgccuggcccuuagagaa

SEQ ID NO: 766211 - RNA, 19 nt, Artificial Sequence
  Description of Artificial Sequence: Synthetic oligonucleotide
  Antisense strand to SEQ ID NO: 766210
uucucuaagggccaggcgu

SEQ ID NO: 766212 - RNA, 19 nt, Artificial Sequence
  Description of Artificial Sequence: Synthetic oligonucleotide
  Sense strand starting at position 1391 of SEQ ID NO: 587094
ucacaagaggcuugcagaa

SEQ ID NO: 766213 - RNA, 19 nt, Artificial Sequence
  Description of Artificial Sequence: Synthetic oligonucleotide
  Antisense strand to SEQ ID NO: 766212
uucugcaagccucuuguga

SEQ ID NO: 766214 - RNA, 19 nt, Artificial Sequence
  Description of Artificial Sequence: Synthetic oligonucleotide
  Sense strand starting at position 1721 of SEQ ID NO: 587094
gcuccauaggcagagaauu

SEQ ID NO: 766215 - RNA, 19 nt, Artificial Sequence
  Description of Artificial Sequence: Synthetic oligonucleotide
  Antisense strand to SEQ ID NO: 766214
aauucucugccuauggagc

SEQ ID NO: 766216 - RNA, 19 nt, Artificial Sequence
  Description of Artificial Sequence: Synthetic oligonucleotide
  Sense strand starting at position 1748 of SEQ ID NO: 587094
cuccuugggcagugacaaa

SEQ ID NO: 766217 - RNA, 19 nt, Artificial Sequence
  Description of Artificial Sequence: Synthetic oligonucleotide
  Antisense strand to SEQ ID NO: 766216
uuugucacugcccaaggag

SEQ ID NO: 766218 - RNA, 19 nt, Artificial Sequence
  Description of Artificial Sequence: Synthetic oligonucleotide
  Sense strand starting at position 2254 of SEQ ID NO: 587094
agugaccuacccugagaga

SEQ ID NO: 766219 - RNA, 19 nt, Artificial Sequence
  Description of Artificial Sequence: Synthetic oligonucleotide
  Antisense strand to SEQ ID NO: 766218
ucucucaggguaggucacu

SEQ ID NO: 766220 - RNA, 19 nt, Artificial Sequence
  Description of Artificial Sequence: Synthetic oligonucleotide
  Sense strand starting at position 2271 of SEQ ID NO: 587094
gacucuaggcagugagaaa

SEQ ID NO: 766221 - RNA, 19 nt, Artificial Sequence
  Description of Artificial Sequence: Synthetic oligonucleotide
  Antisense strand to SEQ ID NO: 766220
uuucucacugccuagaguc

SEQ ID NO: 766222 - RNA, 19 nt, Artificial Sequence
  Description of Artificial Sequence: Synthetic oligonucleotide
  Sense strand starting at position 2406 of SEQ ID NO: 587094
ugcuuauguccuggagaau

SEQ ID NO: 766223 - RNA, 19 nt, Artificial Sequence
  Description of Artificial Sequence: Synthetic oligonucleotide
  Antisense strand to SEQ ID NO: 766222
auucuccaggacauaagca

SEQ ID NO: 766224 - RNA, 19 nt, Artificial Sequence
  Description of Artificial Sequence: Synthetic oligonucleotide
  Sense strand starting at position 2407 of SEQ ID NO: 587094
gcuuauguccuggagaauu

SEQ ID NO: 766225 - RNA, 19 nt, Artificial Sequence
  Description of Artificial Sequence: Synthetic oligonucleotide
  Antisense strand to SEQ ID NO: 766224
aauucuccaggacauaagc

SEQ ID NO: 766226 - RNA, 19 nt, Artificial Sequence
  Description of Artificial Sequence: Synthetic oligonucleotide
  Sense strand starting at position 2453 of SEQ ID NO: 587094
ucuugccaggccugaaaua

SEQ ID NO: 766227 - RNA, 19 nt, Artificial Sequence
  Description of Artificial Sequence: Synthetic oligonucleotide
  Antisense strand to SEQ ID NO: 766226
uauuucaggccuggcaaga

SEQ ID NO: 766228 - RNA, 19 nt, Artificial Sequence
  Description of Artificial Sequence: Synthetic oligonucleotide
  Sense strand starting at position 2460 of SEQ ID NO: 587094
aggccugaaauagguauau

SEQ ID NO: 766229 - RNA, 19 nt, Artificial Sequence
  Description of Artificial Sequence: Synthetic oligonucleotide
  Antisense strand to SEQ ID NO: 766228
auauaccuauuucaggccu

SEQ ID NO: 766230 - RNA, 19 nt, Artificial Sequence
  Description of Artificial Sequence: Synthetic oligonucleotide
  Sense strand starting at position 2502 of SEQ ID NO: 587094
cccagacuuuccucucagu

SEQ ID NO: 766231 - RNA, 19 nt, Artificial Sequence
  Description of Artificial Sequence: Synthetic oligonucleotide
  Antisense strand to SEQ ID NO: 766230
acugagaggaaagucuggg

SEQ ID NO: 766232 - RNA, 19 nt, Artificial Sequence
  Description of Artificial Sequence: Synthetic oligonucleotide
  Sense strand starting at position 2526 of SEQ ID NO: 587094
ucaccuuugggucagcaaa

SEQ ID NO: 766233 - RNA, 19 nt, Artificial Sequence
  Description of Artificial Sequence: Synthetic oligonucleotide
  Antisense strand to SEQ ID NO: 766232
uuugcugacccaaagguga

SEQ ID NO: 766234 - RNA, 19 nt, Artificial Sequence
  Description of Artificial Sequence: Synthetic oligonucleotide
  Sense strand starting at position 2559 of SEQ ID NO: 587094
gcugauaggaaauguaaag

SEQ ID NO: 766235 - RNA, 19 nt, Artificial Sequence
  Description of Artificial Sequence: Synthetic oligonucleotide
  Antisense strand to SEQ ID NO: 766234
cuuuacauuuccuaucagc

SEQ ID NO: 766236 - RNA, 19 nt, Artificial Sequence
  Description of Artificial Sequence: Synthetic oligonucleotide
  Sense strand starting at position 2597 of SEQ ID NO: 587094
auguacacucucuaaugua

SEQ ID NO: 766237 - RNA, 19 nt, Artificial Sequence
  Description of Artificial Sequence: Synthetic oligonucleotide
  Antisense strand to SEQ ID NO: 766236
uacauuagagaguguacau

SEQ ID NO: 766238 - RNA, 19 nt, Artificial Sequence
  Description of Artificial Sequence: Synthetic oligonucleotide
  Sense strand starting at position 2607 of SEQ ID NO: 587094
ucuaauguacguuauucuu

SEQ ID NO: 766239 - RNA, 19 nt, Artificial Sequence
  Description of Artificial Sequence: Synthetic oligonucleotide
  Antisense strand to SEQ ID NO: 766238
aagaauaacguacauuaga

SEQ ID NO: 766240 - RNA, 19 nt, Artificial Sequence
  Description of Artificial Sequence: Synthetic oligonucleotide
  Sense strand starting at position 2790 of SEQ ID NO: 587094
caggacacguggucaaauu

SEQ ID NO: 766241 - RNA, 19 nt, Artificial Sequence
  Description of Artificial Sequence: Synthetic oligonucleotide
  Antisense strand to SEQ ID NO: 766240
aauuugaccacguguccug

SEQ ID NO: 766242 - RNA, 19 nt, Artificial Sequence
  Description of Artificial Sequence: Synthetic oligonucleotide
  Sense strand starting at position 3153 of SEQ ID NO: 587094
aagugacucgcacagucau

SEQ ID NO: 766243 - RNA, 19 nt, Artificial Sequence
  Description of Artificial Sequence: Synthetic oligonucleotide
  Antisense strand to SEQ ID NO: 766242
augacugugcgagucacuu

SEQ ID NO: 766244 - RNA, 19 nt, Artificial Sequence
  Description of Artificial Sequence: Synthetic oligonucleotide
  Sense strand starting at position 3161 of SEQ ID NO: 587094
cgcacagucauacagaaga

SEQ ID NO: 766245 - RNA, 19 nt, Artificial Sequence
  Description of Artificial Sequence: Synthetic oligonucleotide
  Antisense strand to SEQ ID NO: 766244
ucuucuguaugacugugcg

SEQ ID NO: 766246 - RNA, 19 nt, Artificial Sequence
  Description of Artificial Sequence: Synthetic oligonucleotide
  Sense strand starting at position 3178 of SEQ ID NO: 587094
gaaugauggcauuaagcau

SEQ ID NO: 766247 - RNA, 19 nt, Artificial Sequence
  Description of Artificial Sequence: Synthetic oligonucleotide
  Antisense strand to SEQ ID NO: 766246
augcuuaaugccaucauuc

SEQ ID NO: 766248 - RNA, 19 nt, Artificial Sequence
  Description of Artificial Sequence: Synthetic oligonucleotide
  Sense strand starting at position 3507 of SEQ ID NO: 587094
guguuuaugcguguguuca

SEQ ID NO: 766249 - RNA, 19 nt, Artificial Sequence
  Description of Artificial Sequence: Synthetic oligonucleotide
  Antisense strand to SEQ ID NO: 766248
ugaacacacgcauaaacac

SEQ ID NO: 766250 - RNA, 19 nt, Artificial Sequence
  Description of Artificial Sequence: Synthetic oligonucleotide
  Sense strand starting at position 3557 of SEQ ID NO: 587094
guaugcuguauguauauga

SEQ ID NO: 766251 - RNA, 19 nt, Artificial Sequence
  Description of Artificial Sequence: Synthetic oligonucleotide
  Antisense strand to SEQ ID NO: 766250
ucauauacauacagcauac

SEQ ID NO: 766252 - RNA, 19 nt, Artificial Sequence
  Description of Artificial Sequence: Synthetic oligonucleotide
  Sense strand starting at position 3579 of SEQ ID NO: 587094
gccugugguguguuuggua

SEQ ID NO: 766253 - RNA, 19 nt, Artificial Sequence
  Description of Artificial Sequence: Synthetic oligonucleotide
  Antisense strand to SEQ ID NO: 766252
uaccaaacacaccacaggc

SEQ ID NO: 766254 - RNA, 19 nt, Artificial Sequence
  Description of Artificial Sequence: Synthetic oligonucleotide
  Sense strand starting at position 3609 of SEQ ID NO: 587094
guguaugauauaugugaua

SEQ ID NO: 766255 - RNA, 19 nt, Artificial Sequence
  Description of Artificial Sequence: Synthetic oligonucleotide
  Antisense strand to SEQ ID NO: 766254
uaucacauauaucauacac

SEQ ID NO: 766256 - RNA, 19 nt, Artificial Sequence
  Description of Artificial Sequence: Synthetic oligonucleotide
  Sense strand starting at position 3611 of SEQ ID NO: 587094
guaugauauaugugauaug

SEQ ID NO: 766257 - RNA, 19 nt, Artificial Sequence
  Description of Artificial Sequence: Synthetic oligonucleotide
  Antisense strand to SEQ ID NO: 766256
cauaucacauauaucauac

SEQ ID NO: 766258 - RNA, 19 nt, Artificial Sequence
  Description of Artificial Sequence: Synthetic oligonucleotide
  Sense strand starting at position 3620 of SEQ ID NO: 587094
augugauauguguagguau

SEQ ID NO: 766259 - RNA, 19 nt, Artificial Sequence
  Description of Artificial Sequence: Synthetic oligonucleotide
  Antisense strand to SEQ ID NO: 766258
auaccuacacauaucacau

SEQ ID NO: 766260 - RNA, 19 nt, Artificial Sequence
  Description of Artificial Sequence: Synthetic oligonucleotide
  Sense strand starting at position 3680 of SEQ ID NO: 587094
gugacauguguguugugua

SEQ ID NO: 766261 - RNA, 19 nt, Artificial Sequence
  Description of Artificial Sequence: Synthetic oligonucleotide
  Antisense strand to SEQ ID NO: 766260
uacacaacacacaugucac

SEQ ID NO: 766262 - RNA, 19 nt, Artificial Sequence
  Description of Artificial Sequence: Synthetic oligonucleotide
  Sense strand starting at position 3700 of SEQ ID NO: 587094
auacguauuguggaaagau

SEQ ID NO: 766263 - RNA, 19 nt, Artificial Sequence
  Description of Artificial Sequence: Synthetic oligonucleotide
  Antisense strand to SEQ ID NO: 766262
aucuuuccacaauacguau

SEQ ID NO: 766264 - RNA, 19 nt, Artificial Sequence
  Description of Artificial Sequence: Synthetic oligonucleotide
  Sense strand starting at position 3709 of SEQ ID NO: 587094
guggaaagauuguugcaug

SEQ ID NO: 766265 - RNA, 19 nt, Artificial Sequence
  Description of Artificial Sequence: Synthetic oligonucleotide
  Antisense strand to SEQ ID NO: 766264
caugcaacaaucuuuccac

SEQ ID NO: 766266 - RNA, 19 nt, Artificial Sequence
  Description of Artificial Sequence: Synthetic oligonucleotide
  Sense strand starting at position 3750 of SEQ ID NO: 587094
gugggugauguauauggua

SEQ ID NO: 766267 - RNA, 19 nt, Artificial Sequence
  Description of Artificial Sequence: Synthetic oligonucleotide
  Antisense strand to SEQ ID NO: 766266
uaccauauacaucacccac

SEQ ID NO: 766268 - RNA, 19 nt, Artificial Sequence
  Description of Artificial Sequence: Synthetic oligonucleotide
  Sense strand starting at position 3758 of SEQ ID NO: 587094
uguauaugguaccuuuaag

SEQ ID NO: 766269 - RNA, 19 nt, Artificial Sequence
  Description of Artificial Sequence: Synthetic oligonucleotide
  Antisense strand to SEQ ID NO: 766268
cuuaaagguaccauauaca

SEQ ID NO: 766270 - RNA, 19 nt, Artificial Sequence
  Description of Artificial Sequence: Synthetic oligonucleotide
  Sense strand starting at position 3779 of SEQ ID NO: 587094
augugugcguguacaugau

SEQ ID NO: 766271 - RNA, 19 nt, Artificial Sequence
  Description of Artificial Sequence: Synthetic oligonucleotide
  Antisense strand to SEQ ID NO: 766270
aucauguacacgcacacau

SEQ ID NO: 766272 - RNA, 19 nt, Artificial Sequence
  Description of Artificial Sequence: Synthetic oligonucleotide
  Sense strand starting at position 3815 of SEQ ID NO: 587094
guguauacaugauuugugu

SEQ ID NO: 766273 - RNA, 19 nt, Artificial Sequence
  Description of Artificial Sequence: Synthetic oligonucleotide
  Antisense strand to SEQ ID NO: 766272
acacaaaucauguauacac

SEQ ID NO: 766274 - RNA, 19 nt, Artificial Sequence
  Description of Artificial Sequence: Synthetic oligonucleotide
  Sense strand starting at position 283 of SEQ ID NO: 587095
acgugugacugguuuccaa

SEQ ID NO: 766275 - RNA, 19 nt, Artificial Sequence
  Description of Artificial Sequence: Synthetic oligonucleotide
  Antisense strand to SEQ ID NO: 766274
uuggaaaccagucacacgu

SEQ ID NO: 766276 - RNA, 19 nt, Artificial Sequence
  Description of Artificial Sequence: Synthetic oligonucleotide
  Sense strand starting at position 286 of SEQ ID NO: 587095
ugugacugguuuccaaacu

SEQ ID NO: 766277 - RNA, 19 nt, Artificial Sequence
  Description of Artificial Sequence: Synthetic oligonucleotide
  Antisense strand to SEQ ID NO: 766276
aguuuggaaaccagucaca

SEQ ID NO: 766278 - RNA, 19 nt, Artificial Sequence
  Description of Artificial Sequence: Synthetic oligonucleotide
  Sense strand starting at position 287 of SEQ ID NO: 587095
gugacugguuuccaaacuu

SEQ ID NO: 766279 - RNA, 19 nt, Artificial Sequence
  Description of Artificial Sequence: Synthetic oligonucleotide
  Antisense strand to SEQ ID NO: 766278
aaguuuggaaaccagucac

SEQ ID NO: 766280 - RNA, 19 nt, Artificial Sequence
  Description of Artificial Sequence: Synthetic oligonucleotide
  Sense strand starting at position 394 of SEQ ID NO: 587095
auaaauucuguuuguagcu

SEQ ID NO: 766281 - RNA, 19 nt, Artificial Sequence
  Description of Artificial Sequence: Synthetic oligonucleotide
  Antisense strand to SEQ ID NO: 766280
agcuacaaacagaauuuau

SEQ ID NO: 766282 - RNA, 19 nt, Artificial Sequence
  Description of Artificial Sequence: Synthetic oligonucleotide
  Sense strand starting at position 456 of SEQ ID NO: 587095
gauggagacuugguuucua

SEQ ID NO: 766283 - RNA, 19 nt, Artificial Sequence
  Description of Artificial Sequence: Synthetic oligonucleotide
  Antisense strand to SEQ ID NO: 766282
uagaaaccaagucuccauc

SEQ ID NO: 766284 - RNA, 19 nt, Artificial Sequence
  Description of Artificial Sequence: Synthetic oligonucleotide
  Sense strand starting at position 488 of SEQ ID NO: 587095
cacaaaguaucccgagaag

SEQ ID NO: 766285 - RNA, 19 nt, Artificial Sequence
  Description of Artificial Sequence: Synthetic oligonucleotide
  Antisense strand to SEQ ID NO: 766284
cuucucgggauacuuugug

SEQ ID NO: 766286 - RNA, 19 nt, Artificial Sequence
  Description of Artificial Sequence: Synthetic oligonucleotide
  Sense strand starting at position 491 of SEQ ID NO: 587095
aaaguaucccgagaagcug

SEQ ID NO: 766287 - RNA, 19 nt, Artificial Sequence
  Description of Artificial Sequence: Synthetic oligonucleotide
  Antisense strand to SEQ ID NO: 766286
cagcuucucgggauacuuu

SEQ ID NO: 766288 - RNA, 19 nt, Artificial Sequence
  Description of Artificial Sequence: Synthetic oligonucleotide
  Sense strand starting at position 497 of SEQ ID NO: 587095
ucccgagaagcuggugaaa

SEQ ID NO: 766289 - RNA, 19 nt, Artificial Sequence
  Description of Artificial Sequence: Synthetic oligonucleotide
  Antisense strand to SEQ ID NO: 766288
uuucaccagcuucucggga

SEQ ID NO: 766290 - RNA, 19 nt, Artificial Sequence
  Description of Artificial Sequence: Synthetic oligonucleotide
  Sense strand starting at position 499 of SEQ ID NO: 587095
ccgagaagcuggugaaaua

SEQ ID NO: 766291 - RNA, 19 nt, Artificial Sequence
  Description of Artificial Sequence: Synthetic oligonucleotide
  Antisense strand to SEQ ID NO: 766290
uauuucaccagcuucucgg

SEQ ID NO: 766292 - RNA, 19 nt, Artificial Sequence
  Description of Artificial Sequence: Synthetic oligonucleotide
  Sense strand starting at position 541 of SEQ ID NO: 587095
gcauaauccugcucugcac

SEQ ID NO: 766293 - RNA, 19 nt, Artificial Sequence
  Description of Artificial Sequence: Synthetic oligonucleotide
  Antisense strand to SEQ ID NO: 766292
gugcagagcaggauuaugc

SEQ ID NO: 766294 - RNA, 19 nt, Artificial Sequence
  Description of Artificial Sequence: Synthetic oligonucleotide
  Sense strand starting at position 1130 of SEQ ID NO: 587095
ccuaguccuguccaaacuu

SEQ ID NO: 766295 - RNA, 19 nt, Artificial Sequence
  Description of Artificial Sequence: Synthetic oligonucleotide
  Antisense strand to SEQ ID NO: 766294
aaguuuggacaggacuagg

SEQ ID NO: 766296 - RNA, 19 nt, Artificial Sequence
  Description of Artificial Sequence: Synthetic oligonucleotide
  Sense strand starting at position 1165 of SEQ ID NO: 587095
gucgucaacucuuccauuu

SEQ ID NO: 766297 - RNA, 19 nt, Artificial Sequence
  Description of Artificial Sequence: Synthetic oligonucleotide
  Antisense strand to SEQ ID NO: 766296
aaauggaagaguugacgac

SEQ ID NO: 766298 - RNA, 19 nt, Artificial Sequence
  Description of Artificial Sequence: Synthetic oligonucleotide
  Sense strand starting at position 2240 of SEQ ID NO: 587095
ccagguauuguccaccacu

SEQ ID NO: 766299 - RNA, 19 nt, Artificial Sequence
  Description of Artificial Sequence: Synthetic oligonucleotide
  Antisense strand to SEQ ID NO: 766298
agugguggacaauaccugg

SEQ ID NO: 766300 - RNA, 19 nt, Artificial Sequence
  Description of Artificial Sequence: Synthetic oligonucleotide
  Sense strand starting at position 2243 of SEQ ID NO: 587095
gguauuguccaccacugga

SEQ ID NO: 766301 - RNA, 19 nt, Artificial Sequence
  Description of Artificial Sequence: Synthetic oligonucleotide
  Antisense strand to SEQ ID NO: 766300
uccagugguggacaauacc

SEQ ID NO: 766302 - RNA, 19 nt, Artificial Sequence
  Description of Artificial Sequence: Synthetic oligonucleotide
  Sense strand starting at position 2363 of SEQ ID NO: 587095
ccaggagggucuuugggaa

SEQ ID NO: 766303 - RNA, 19 nt, Artificial Sequence
  Description of Artificial Sequence: Synthetic oligonucleotide
  Antisense strand to SEQ ID NO: 766302
uucccaaagacccuccugg

SEQ ID NO: 766304 - RNA, 19 nt, Artificial Sequence
  Description of Artificial Sequence: Synthetic oligonucleotide
  Sense strand starting at position 2401 of SEQ ID NO: 587095
ccgagacccuguuaguaaa

SEQ ID NO: 766305 - RNA, 19 nt, Artificial Sequence
  Description of Artificial Sequence: Synthetic oligonucleotide
  Antisense strand to SEQ ID NO: 766304
uuuacuaacagggucucgg

SEQ ID NO: 766306 - RNA, 19 nt, Artificial Sequence
  Description of Artificial Sequence: Synthetic oligonucleotide
  Sense strand starting at position 2629 of SEQ ID NO: 587095
aggugucuccaagggaaag

SEQ ID NO: 766307 - RNA, 19 nt, Artificial Sequence
  Description of Artificial Sequence: Synthetic oligonucleotide
  Antisense strand to SEQ ID NO: 766306
cuuucccuuggagacaccu

SEQ ID NO: 766308 - RNA, 19 nt, Artificial Sequence
  Description of Artificial Sequence: Synthetic oligonucleotide
  Sense strand starting at position 2804 of SEQ ID NO: 587095
guucccuuccuagacacau

SEQ ID NO: 766309 - RNA, 19 nt, Artificial Sequence
  Description of Artificial Sequence: Synthetic oligonucleotide
  Antisense strand to SEQ ID NO: 766308
augugucuaggaagggaac

SEQ ID NO: 766310 - RNA, 19 nt, Artificial Sequence
  Description of Artificial Sequence: Synthetic oligonucleotide
  Sense strand starting at position 2895 of SEQ ID NO: 587095
aagcuccuugcucguuuaa

SEQ ID NO: 766311 - RNA, 19 nt, Artificial Sequence
  Description of Artificial Sequence: Synthetic oligonucleotide
  Antisense strand to SEQ ID NO: 766310
uuaaacgagcaaggagcuu

SEQ ID NO: 766312 - RNA, 19 nt, Artificial Sequence
  Description of Artificial Sequence: Synthetic oligonucleotide
  Sense strand starting at position 2896 of SEQ ID NO: 587095
agcuccuugcucguuuaau

SEQ ID NO: 766313 - RNA, 19 nt, Artificial Sequence
  Description of Artificial Sequence: Synthetic oligonucleotide
  Antisense strand to SEQ ID NO: 766312
auuaaacgagcaaggagcu

SEQ ID NO: 766314 - RNA, 19 nt, Artificial Sequence
  Description of Artificial Sequence: Synthetic oligonucleotide
  Sense strand starting at position 2897 of SEQ ID NO: 587095
gcuccuugcucguuuaaug

SEQ ID NO: 766315 - RNA, 19 nt, Artificial Sequence
  Description of Artificial Sequence: Synthetic oligonucleotide
  Antisense strand to SEQ ID NO: 766314
cauuaaacgagcaaggagc

SEQ ID NO: 766316 - RNA, 19 nt, Artificial Sequence
  Description of Artificial Sequence: Synthetic oligonucleotide
  Sense strand starting at position 2898 of SEQ ID NO: 587095
cuccuugcucguuuaaugu

SEQ ID NO: 766317 - RNA, 19 nt, Artificial Sequence
  Description of Artificial Sequence: Synthetic oligonucleotide
  Antisense strand to SEQ ID NO: 766316
acauuaaacgagcaaggag

SEQ ID NO: 766318 - RNA, 19 nt, Artificial Sequence
  Description of Artificial Sequence: Synthetic oligonucleotide
  Sense strand starting at position 2944 of SEQ ID NO: 587095
aaaugcugggauugugaau

SEQ ID NO: 766319 - RNA, 19 nt, Artificial Sequence
  Description of Artificial Sequence: Synthetic oligonucleotide
  Antisense strand to SEQ ID NO: 766318
auucacaaucccagcauuu

SEQ ID NO: 766320 - RNA, 19 nt, Artificial Sequence
  Description of Artificial Sequence: Synthetic oligonucleotide
  Sense strand starting at position 2950 of SEQ ID NO: 587095
ugggauugugaauggaugu

SEQ ID NO: 766321 - RNA, 19 nt, Artificial Sequence
  Description of Artificial Sequence: Synthetic oligonucleotide
  Antisense strand to SEQ ID NO: 766320
acauccauucacaauccca

SEQ ID NO: 766322 - RNA, 19 nt, Artificial Sequence
  Description of Artificial Sequence: Synthetic oligonucleotide
  Sense strand starting at position 2951 of SEQ ID NO: 587095
gggauugugaauggauguu

SEQ ID NO: 766323 - RNA, 19 nt, Artificial Sequence
  Description of Artificial Sequence: Synthetic oligonucleotide
  Antisense strand to SEQ ID NO: 766322
aacauccauucacaauccc

SEQ ID NO: 766324 - RNA, 19 nt, Artificial Sequence
  Description of Artificial Sequence: Synthetic oligonucleotide
  Sense strand starting at position 3208 of SEQ ID NO: 587095
gcgagaccucgucuuagca

SEQ ID NO: 766325 - RNA, 19 nt, Artificial Sequence
  Description of Artificial Sequence: Synthetic oligonucleotide
  Antisense strand to SEQ ID NO: 766324
ugcuaagacgaggucucgc

SEQ ID NO: 766326 - RNA, 19 nt, Artificial Sequence
  Description of Artificial Sequence: Synthetic oligonucleotide
  Sense strand starting at position 3210 of SEQ ID NO: 587095
gagaccucgucuuagcaaa

SEQ ID NO: 766327 - RNA, 19 nt, Artificial Sequence
  Description of Artificial Sequence: Synthetic oligonucleotide
  Antisense strand to SEQ ID NO: 766326
uuugcuaagacgaggucuc

SEQ ID NO: 766328 - RNA, 19 nt, Artificial Sequence
  Description of Artificial Sequence: Synthetic oligonucleotide
  Sense strand starting at position 3299 of SEQ ID NO: 587095
gcgagacuuugucacagaa

SEQ ID NO: 766329 - RNA, 19 nt, Artificial Sequence
  Description of Artificial Sequence: Synthetic oligonucleotide
  Antisense strand to SEQ ID NO: 766328
uucugugacaaagucucgc

SEQ ID NO: 766330 - RNA, 19 nt, Artificial Sequence
  Description of Artificial Sequence: Synthetic oligonucleotide
  Sense strand starting at position 3301 of SEQ ID NO: 587095
gagacuuugucacagaaga

SEQ ID NO: 766331 - RNA, 19 nt, Artificial Sequence
  Description of Artificial Sequence: Synthetic oligonucleotide
  Antisense strand to SEQ ID NO: 766330
ucuucugugacaaagucuc

SEQ ID NO: 766332 - RNA, 19 nt, Artificial Sequence
  Description of Artificial Sequence: Synthetic oligonucleotide
  Sense strand starting at position 3352 of SEQ ID NO: 587095
ugaaauauuugagggcuga

SEQ ID NO: 766333 - RNA, 19 nt, Artificial Sequence
  Description of Artificial Sequence: Synthetic oligonucleotide
  Antisense strand to SEQ ID NO: 766332
ucagcccucaaauauuuca

SEQ ID NO: 766334 - RNA, 19 nt, Artificial Sequence
  Description of Artificial Sequence: Synthetic oligonucleotide
  Sense strand starting at position 3367 of SEQ ID NO: 587095
cugaaauuagugugcuaaa

SEQ ID NO: 766335 - RNA, 19 nt, Artificial Sequence
  Description of Artificial Sequence: Synthetic oligonucleotide
  Antisense strand to SEQ ID NO: 766334
uuuagcacacuaauuucag

SEQ ID NO: 766336 - RNA, 19 nt, Artificial Sequence
  Description of Artificial Sequence: Synthetic oligonucleotide
  Sense strand starting at position 3368 of SEQ ID NO: 587095
ugaaauuagugugcuaaac

SEQ ID NO: 766337 - RNA, 19 nt, Artificial Sequence
  Description of Artificial Sequence: Synthetic oligonucleotide
  Antisense strand to SEQ ID NO: 766336
guuuagcacacuaauuuca

SEQ ID NO: 766338 - RNA, 19 nt, Artificial Sequence
  Description of Artificial Sequence: Synthetic oligonucleotide
  Sense strand starting at position 3370 of SEQ ID NO: 587095
aaauuagugugcuaaacga

SEQ ID NO: 766339 - RNA, 19 nt, Artificial Sequence
  Description of Artificial Sequence: Synthetic oligonucleotide
  Antisense strand to SEQ ID NO: 766338
ucguuuagcacacuaauuu

SEQ ID NO: 766340 - RNA, 19 nt, Artificial Sequence
  Description of Artificial Sequence: Synthetic oligonucleotide
  Sense strand starting at position 3378 of SEQ ID NO: 587095
gugcuaaacgauuguuuaa

SEQ ID NO: 766341 - RNA, 19 nt, Artificial Sequence
  Description of Artificial Sequence: Synthetic oligonucleotide
  Antisense strand to SEQ ID NO: 766340
uuaaacaaucguuuagcac

SEQ ID NO: 766342 - RNA, 19 nt, Artificial Sequence
  Description of Artificial Sequence: Synthetic oligonucleotide
  Sense strand starting at position 3380 of SEQ ID NO: 587095
gcuaaacgauuguuuaaua

SEQ ID NO: 766343 - RNA, 19 nt, Artificial Sequence
  Description of Artificial Sequence: Synthetic oligonucleotide
  Antisense strand to SEQ ID NO: 766342
uauuaaacaaucguuuagc

SEQ ID NO: 766344 - RNA, 19 nt, Artificial Sequence
  Description of Artificial Sequence: Synthetic oligonucleotide
  Sense strand starting at position 3456 of SEQ ID NO: 587095
ggcucaauugcauaugaua

SEQ ID NO: 766345 - RNA, 19 nt, Artificial Sequence
  Description of Artificial Sequence: Synthetic oligonucleotide
  Antisense strand to SEQ ID NO: 766344
uaucauaugcaauugagcc

SEQ ID NO: 766346 - RNA, 19 nt, Artificial Sequence
  Description of Artificial Sequence: Synthetic oligonucleotide
  Sense strand starting at position 3459 of SEQ ID NO: 587095
ucaauugcauaugauaaag

SEQ ID NO: 766347 - RNA, 19 nt, Artificial Sequence
  Description of Artificial Sequence: Synthetic oligonucleotide
  Antisense strand to SEQ ID NO: 766346
cuuuaucauaugcaauuga

SEQ ID NO: 766348 - RNA, 19 nt, Artificial Sequence
  Description of Artificial Sequence: Synthetic oligonucleotide
  Sense strand starting at position 3533 of SEQ ID NO: 587095
cuaagcgucuuaucaaauu

SEQ ID NO: 766349 - RNA, 19 nt, Artificial Sequence
  Description of Artificial Sequence: Synthetic oligonucleotide
  Antisense strand to SEQ ID NO: 766348
aauuugauaagacgcuuag

SEQ ID NO: 766350 - RNA, 19 nt, Artificial Sequence
  Description of Artificial Sequence: Synthetic oligonucleotide
  Sense strand starting at position 3627 of SEQ ID NO: 587095
ucauccugaucagguaaau

SEQ ID NO: 766351 - RNA, 19 nt, Artificial Sequence
  Description of Artificial Sequence: Synthetic oligonucleotide
  Antisense strand to SEQ ID NO: 766350
auuuaccugaucaggauga

SEQ ID NO: 766352 - RNA, 19 nt, Artificial Sequence
  Description of Artificial Sequence: Synthetic oligonucleotide
  Sense strand starting at position 3636 of SEQ ID NO: 587095
ucagguaaauuagaucaca

SEQ ID NO: 766353 - RNA, 19 nt, Artificial Sequence
  Description of Artificial Sequence: Synthetic oligonucleotide
  Antisense strand to SEQ ID NO: 766352
ugugaucuaauuuaccuga

SEQ ID NO: 766354 - RNA, 19 nt, Artificial Sequence
  Description of Artificial Sequence: Synthetic oligonucleotide
  Sense strand starting at position 47 of SEQ ID NO: 587096
acagcuuuccuccgggaca

SEQ ID NO: 766355 - RNA, 19 nt, Artificial Sequence
  Description of Artificial Sequence: Synthetic oligonucleotide
  Antisense strand to SEQ ID NO: 766354
ugucccggaggaaagcugu

SEQ ID NO: 766356 - RNA, 19 nt, Artificial Sequence
  Description of Artificial Sequence: Synthetic oligonucleotide
  Sense strand starting at position 49 of SEQ ID NO: 587096
agcuuuccuccgggacagu

SEQ ID NO: 766357 - RNA, 19 nt, Artificial Sequence
  Description of Artificial Sequence: Synthetic oligonucleotide
  Antisense strand to SEQ ID NO: 766356
acugucccggaggaaagcu

SEQ ID NO: 766358 - RNA, 19 nt, Artificial Sequence
  Description of Artificial Sequence: Synthetic oligonucleotide
  Sense strand starting at position 421 of SEQ ID NO: 587096
ucgaauucccuccaggagu

SEQ ID NO: 766359 - RNA, 19 nt, Artificial Sequence
  Description of Artificial Sequence: Synthetic oligonucleotide
  Antisense strand to SEQ ID NO: 766358
acuccuggagggaauucga

SEQ ID NO: 766360 - RNA, 19 nt, Artificial Sequence
  Description of Artificial Sequence: Synthetic oligonucleotide
  Sense strand starting at position 456 of SEQ ID NO: 587096
gcuccaggucucgcucaua

SEQ ID NO: 766361 - RNA, 19 nt, Artificial Sequence
  Description of Artificial Sequence: Synthetic oligonucleotide
  Antisense strand to SEQ ID NO: 766360
uaugagcgagaccuggagc

SEQ ID NO: 766362 - RNA, 19 nt, Artificial Sequence
  Description of Artificial Sequence: Synthetic oligonucleotide
  Sense strand starting at position 459 of SEQ ID NO: 587096
ccaggucucgcucauaaac

SEQ ID NO: 766363 - RNA, 19 nt, Artificial Sequence
  Description of Artificial Sequence: Synthetic oligonucleotide
  Antisense strand to SEQ ID NO: 766362
guuuaugagcgagaccugg

SEQ ID NO: 766364 - RNA, 19 nt, Artificial Sequence
  Description of Artificial Sequence: Synthetic oligonucleotide
  Sense strand starting at position 461 of SEQ ID NO: 587096
aggucucgcucauaaacau

SEQ ID NO: 766365 - RNA, 19 nt, Artificial Sequence
  Description of Artificial Sequence: Synthetic oligonucleotide
  Antisense strand to SEQ ID NO: 766364
auguuuaugagcgagaccu

SEQ ID NO: 766366 - RNA, 19 nt, Artificial Sequence
  Description of Artificial Sequence: Synthetic oligonucleotide
  Sense strand starting at position 698 of SEQ ID NO: 587096
cccucauaguccgugguga

SEQ ID NO: 766367 - RNA, 19 nt, Artificial Sequence
  Description of Artificial Sequence: Synthetic oligonucleotide
  Antisense strand to SEQ ID NO: 766366
ucaccacggacuaugaggg

SEQ ID NO: 766368 - RNA, 19 nt, Artificial Sequence
  Description of Artificial Sequence: Synthetic oligonucleotide
  Sense strand starting at position 718 of SEQ ID NO: 587096
gcuggugauuuggaaacua

SEQ ID NO: 766369 - RNA, 19 nt, Artificial Sequence
  Description of Artificial Sequence: Synthetic oligonucleotide
  Antisense strand to SEQ ID NO: 766368
uaguuuccaaaucaccagc

SEQ ID NO: 766370 - RNA, 19 nt, Artificial Sequence
  Description of Artificial Sequence: Synthetic oligonucleotide
  Sense strand starting at position 1012 of SEQ ID NO: 587096
agagcugaguuugcaaacu

SEQ ID NO: 766371 - RNA, 19 nt, Artificial Sequence
  Description of Artificial Sequence: Synthetic oligonucleotide
  Antisense strand to SEQ ID NO: 766370
aguuugcaaacucagcucu

SEQ ID NO: 766372 - RNA, 19 nt, Artificial Sequence
  Description of Artificial Sequence: Synthetic oligonucleotide
  Sense strand starting at position 1272 of SEQ ID NO: 587096
gcagaugagucccagaguu

SEQ ID NO: 766373 - RNA, 19 nt, Artificial Sequence
  Description of Artificial Sequence: Synthetic oligonucleotide
  Antisense strand to SEQ ID NO: 766372
aacucugggacucaucugc

SEQ ID NO: 766374 - RNA, 19 nt, Artificial Sequence
  Description of Artificial Sequence: Synthetic oligonucleotide
  Sense strand starting at position 1291 of SEQ ID NO: 587096
gggcauuucucgccuggga

SEQ ID NO: 766375 - RNA, 19 nt, Artificial Sequence
  Description of Artificial Sequence: Synthetic oligonucleotide
  Antisense strand to SEQ ID NO: 766374
ucccaggcgagaaaugccc

SEQ ID NO: 766376 - RNA, 19 nt, Artificial Sequence
  Description of Artificial Sequence: Synthetic oligonucleotide
  Sense strand starting at position 1293 of SEQ ID NO: 587096
gcauuucucgccugggauu

SEQ ID NO: 766377 - RNA, 19 nt, Artificial Sequence
  Description of Artificial Sequence: Synthetic oligonucleotide
  Antisense strand to SEQ ID NO: 766376
aaucccaggcgagaaaugc

SEQ ID NO: 766378 - RNA, 19 nt, Artificial Sequence
  Description of Artificial Sequence: Synthetic oligonucleotide
  Sense strand starting at position 1674 of SEQ ID NO: 587096
aggcaucuccgaggaaagu

SEQ ID NO: 766379 - RNA, 19 nt, Artificial Sequence
  Description of Artificial Sequence: Synthetic oligonucleotide
  Antisense strand to SEQ ID NO: 766378
acuuuccucggagaugccu

SEQ ID NO: 766380 - RNA, 19 nt, Artificial Sequence
  Description of Artificial Sequence: Synthetic oligonucleotide
  Sense strand starting at position 1675 of SEQ ID NO: 587096
ggcaucuccgaggaaaguu

SEQ ID NO: 766381 - RNA, 19 nt, Artificial Sequence
  Description of Artificial Sequence: Synthetic oligonucleotide
  Antisense strand to SEQ ID NO: 766380
aacuuuccucggagaugcc

SEQ ID NO: 766382 - RNA, 19 nt, Artificial Sequence
  Description of Artificial Sequence: Synthetic oligonucleotide
  Sense strand starting at position 1688 of SEQ ID NO: 587096
aaaguuugcucuccggaaa

SEQ ID NO: 766383 - RNA, 19 nt, Artificial Sequence
  Description of Artificial Sequence: Synthetic oligonucleotide
  Antisense strand to SEQ ID NO: 766382
uuuccggagagcaaacuuu

SEQ ID NO: 766384 - RNA, 19 nt, Artificial Sequence
  Description of Artificial Sequence: Synthetic oligonucleotide
  Sense strand starting at position 2246 of SEQ ID NO: 587096
gagggauucccuuacuugu

SEQ ID NO: 766385 - RNA, 19 nt, Artificial Sequence
  Description of Artificial Sequence: Synthetic oligonucleotide
  Antisense strand to SEQ ID NO: 766384
acaaguaagggaaucccuc

SEQ ID NO: 766386 - RNA, 19 nt, Artificial Sequence
  Description of Artificial Sequence: Synthetic oligonucleotide
  Sense strand starting at position 2252 of SEQ ID NO: 587096
uucccuuacuuguagucaa

SEQ ID NO: 766387 - RNA, 19 nt, Artificial Sequence
  Description of Artificial Sequence: Synthetic oligonucleotide
  Antisense strand to SEQ ID NO: 766386
uugacuacaaguaagggaa

SEQ ID NO: 766388 - RNA, 19 nt, Artificial Sequence
  Description of Artificial Sequence: Synthetic oligonucleotide
  Sense strand starting at position 2263 of SEQ ID NO: 587096
guagucaauugcugccauu

SEQ ID NO: 766389 - RNA, 19 nt, Artificial Sequence
  Description of Artificial Sequence: Synthetic oligonucleotide
  Antisense strand to SEQ ID NO: 766388
aauggcagcaauugacuac

SEQ ID NO: 766390 - RNA, 19 nt, Artificial Sequence
  Description of Artificial Sequence: Synthetic oligonucleotide
  Sense strand starting at position 2385 of SEQ ID NO: 587096
cugucauucuccuuugguu

SEQ ID NO: 766391 - RNA, 19 nt, Artificial Sequence
  Description of Artificial Sequence: Synthetic oligonucleotide
  Antisense strand to SEQ ID NO: 766390
aaccaaaggagaaugacag

SEQ ID NO: 766392 - RNA, 19 nt, Artificial Sequence
  Description of Artificial Sequence: Synthetic oligonucleotide
  Sense strand starting at position 2526 of SEQ ID NO: 587096
gagaccaguuuggacaaua

SEQ ID NO: 766393 - RNA, 19 nt, Artificial Sequence
  Description of Artificial Sequence: Synthetic oligonucleotide
  Antisense strand to SEQ ID NO: 766392
uauuguccaaacuggucuc

SEQ ID NO: 766394 - RNA, 19 nt, Artificial Sequence
  Description of Artificial Sequence: Synthetic oligonucleotide
  Sense strand starting at position 2975 of SEQ ID NO: 587096
aacugaguguggugaugua

SEQ ID NO: 766395 - RNA, 19 nt, Artificial Sequence
  Description of Artificial Sequence: Synthetic oligonucleotide
  Antisense strand to SEQ ID NO: 766394
uacaucaccacacucaguu

SEQ ID NO: 766396 - RNA, 19 nt, Artificial Sequence
  Description of Artificial Sequence: Synthetic oligonucleotide
  Sense strand starting at position 3295 of SEQ ID NO: 587096
gcuguaguuugcuggacua

SEQ ID NO: 766397 - RNA, 19 nt, Artificial Sequence
  Description of Artificial Sequence: Synthetic oligonucleotide
  Antisense strand to SEQ ID NO: 766396
uaguccagcaaacuacagc

SEQ ID NO: 766398 - RNA, 19 nt, Artificial Sequence
  Description of Artificial Sequence: Synthetic oligonucleotide
  Sense strand starting at position 3297 of SEQ ID NO: 587096
uguaguuugcuggacuauu

SEQ ID NO: 766399 - RNA, 19 nt, Artificial Sequence
  Description of Artificial Sequence: Synthetic oligonucleotide
  Antisense strand to SEQ ID NO: 766398
aauaguccagcaaacuaca

SEQ ID NO: 766400 - RNA, 19 nt, Artificial Sequence
  Description of Artificial Sequence: Synthetic oligonucleotide
  Sense strand starting at position 3305 of SEQ ID NO: 587096
gcuggacuauuugaaauca

SEQ ID NO: 766401 - RNA, 19 nt, Artificial Sequence
  Description of Artificial Sequence: Synthetic oligonucleotide
  Antisense strand to SEQ ID NO: 766400
ugauuucaaauaguccagc

SEQ ID NO: 766402 - RNA, 19 nt, Artificial Sequence
  Description of Artificial Sequence: Synthetic oligonucleotide
  Sense strand starting at position 3317 of SEQ ID NO: 587096
gaaaucagauccuagaugu

SEQ ID NO: 766403 - RNA, 19 nt, Artificial Sequence
  Description of Artificial Sequence: Synthetic oligonucleotide
  Antisense strand to SEQ ID NO: 766402
acaucuaggaucugauuuc

SEQ ID NO: 766404 - RNA, 19 nt, Artificial Sequence
  Description of Artificial Sequence: Synthetic oligonucleotide
  Sense strand starting at position 3518 of SEQ ID NO: 587096
acuacuacgccuggcuaaa

SEQ ID NO: 766405 - RNA, 19 nt, Artificial Sequence
  Description of Artificial Sequence: Synthetic oligonucleotide
  Antisense strand to SEQ ID NO: 766404
uuuagccaggcguaguagu

SEQ ID NO: 766406 - RNA, 19 nt, Artificial Sequence
  Description of Artificial Sequence: Synthetic oligonucleotide
  Sense strand starting at position 3662 of SEQ ID NO: 587096
gguguauaccaccauaccu

SEQ ID NO: 766407 - RNA, 19 nt, Artificial Sequence
  Description of Artificial Sequence: Synthetic oligonucleotide
  Antisense strand to SEQ ID NO: 766406
agguauggugguauacacc

SEQ ID NO: 766408 - RNA, 19 nt, Artificial Sequence
  Description of Artificial Sequence: Synthetic oligonucleotide
  Sense strand starting at position 3702 of SEQ ID NO: 587096
agagacagguuauuacuau

SEQ ID NO: 766409 - RNA, 19 nt, Artificial Sequence
  Description of Artificial Sequence: Synthetic oligonucleotide
  Antisense strand to SEQ ID NO: 766408
auaguaauaaccugucucu

SEQ ID NO: 766410 - RNA, 19 nt, Artificial Sequence
  Description of Artificial Sequence: Synthetic oligonucleotide
  Sense strand starting at position 3703 of SEQ ID NO: 587096
gagacagguuauuacuaug

SEQ ID NO: 766411 - RNA, 19 nt, Artificial Sequence
  Description of Artificial Sequence: Synthetic oligonucleotide
  Antisense strand to SEQ ID NO: 766410
cauaguaauaaccugucuc

SEQ ID NO: 766412 - RNA, 19 nt, Artificial Sequence
  Description of Artificial Sequence: Synthetic oligonucleotide
  Sense strand starting at position 43 of SEQ ID NO: 587097
uggcuauagcgugcuacaa

SEQ ID NO: 766413 - RNA, 19 nt, Artificial Sequence
  Description of Artificial Sequence: Synthetic oligonucleotide
  Antisense strand to SEQ ID NO: 766412
uuguagcacgcuauagcca

SEQ ID NO: 766414 - RNA, 19 nt, Artificial Sequence
  Description of Artificial Sequence: Synthetic oligonucleotide
  Sense strand starting at position 177 of SEQ ID NO: 587097
guaggugacccaugaugga

SEQ ID NO: 766415 - RNA, 19 nt, Artificial Sequence
  Description of Artificial Sequence: Synthetic oligonucleotide
  Antisense strand to SEQ ID NO: 766414
uccaucaugggucaccuac

SEQ ID NO: 766416 - RNA, 19 nt, Artificial Sequence
  Description of Artificial Sequence: Synthetic oligonucleotide
  Sense strand starting at position 483 of SEQ ID NO: 587097
cagggacaaucagucaauu

SEQ ID NO: 766417 - RNA, 19 nt, Artificial Sequence
  Description of Artificial Sequence: Synthetic oligonucleotide
  Antisense strand to SEQ ID NO: 766416
aauugacugauugucccug

SEQ ID NO: 766418 - RNA, 19 nt, Artificial Sequence
  Description of Artificial Sequence: Synthetic oligonucleotide
  Sense strand starting at position 576 of SEQ ID NO: 587097
uaaagugguguuuauaacu

SEQ ID NO: 766419 - RNA, 19 nt, Artificial Sequence
  Description of Artificial Sequence: Synthetic oligonucleotide
  Antisense strand to SEQ ID NO: 766418
aguuauaaacaccacuuua

SEQ ID NO: 766420 - RNA, 19 nt, Artificial Sequence
  Description of Artificial Sequence: Synthetic oligonucleotide
  Sense strand starting at position 903 of SEQ ID NO: 587097
gugggagaaagcgauuauc

SEQ ID NO: 766421 - RNA, 19 nt, Artificial Sequence
  Description of Artificial Sequence: Synthetic oligonucleotide
  Antisense strand to SEQ ID NO: 766420
gauaaucgcuuucucccac

SEQ ID NO: 766422 - RNA, 19 nt, Artificial Sequence
  Description of Artificial Sequence: Synthetic oligonucleotide
  Sense strand starting at position 1043 of SEQ ID NO: 587097
uucuaauuccaugauagug

SEQ ID NO: 766423 - RNA, 19 nt, Artificial Sequence
  Description of Artificial Sequence: Synthetic oligonucleotide
  Antisense strand to SEQ ID NO: 766422
cacuaucauggaauuagaa

SEQ ID NO: 766424 - RNA, 19 nt, Artificial Sequence
  Description of Artificial Sequence: Synthetic oligonucleotide
  Sense strand starting at position 1102 of SEQ ID NO: 587097
cacauauguccguagaagg

SEQ ID NO: 766425 - RNA, 19 nt, Artificial Sequence
  Description of Artificial Sequence: Synthetic oligonucleotide
  Antisense strand to SEQ ID NO: 766424
ccuucuacggacauaugug

SEQ ID NO: 766426 - RNA, 19 nt, Artificial Sequence
  Description of Artificial Sequence: Synthetic oligonucleotide
  Sense strand starting at position 1231 of SEQ ID NO: 587097
augggaggauugcuauacu

SEQ ID NO: 766427 - RNA, 19 nt, Artificial Sequence
  Description of Artificial Sequence: Synthetic oligonucleotide
  Antisense strand to SEQ ID NO: 766426
aguauagcaauccucccau

SEQ ID NO: 766428 - RNA, 19 nt, Artificial Sequence
  Description of Artificial Sequence: Synthetic oligonucleotide
  Sense strand starting at position 1389 of SEQ ID NO: 587097
gaaguagucuaauuggaag

SEQ ID NO: 766429 - RNA, 19 nt, Artificial Sequence
  Description of Artificial Sequence: Synthetic oligonucleotide
  Antisense strand to SEQ ID NO: 766428
cuuccaauuagacuacuuc

SEQ ID NO: 766430 - RNA, 19 nt, Artificial Sequence
  Description of Artificial Sequence: Synthetic oligonucleotide
  Sense strand starting at position 1391 of SEQ ID NO: 587097
aguagucuaauuggaagau

SEQ ID NO: 766431 - RNA, 19 nt, Artificial Sequence
  Description of Artificial Sequence: Synthetic oligonucleotide
  Antisense strand to SEQ ID NO: 766430
aucuuccaauuagacuacu

SEQ ID NO: 766432 - RNA, 19 nt, Artificial Sequence
  Description of Artificial Sequence: Synthetic oligonucleotide
  Sense strand starting at position 1404 of SEQ ID NO: 587097
gaagauuauuugucguugu

SEQ ID NO: 766433 - RNA, 19 nt, Artificial Sequence
  Description of Artificial Sequence: Synthetic oligonucleotide
  Antisense strand to SEQ ID NO: 766432
acaacgacaaauaaucuuc

SEQ ID NO: 766434 - RNA, 19 nt, Artificial Sequence
  Description of Artificial Sequence: Synthetic oligonucleotide
  Sense strand starting at position 1407 of SEQ ID NO: 587097
gauuauuugucguuguuaa

SEQ ID NO: 766435 - RNA, 19 nt, Artificial Sequence
  Description of Artificial Sequence: Synthetic oligonucleotide
  Antisense strand to SEQ ID NO: 766434
uuaacaacgacaaauaauc

SEQ ID NO: 766436 - RNA, 19 nt, Artificial Sequence
  Description of Artificial Sequence: Synthetic oligonucleotide
  Sense strand starting at position 1408 of SEQ ID NO: 587097
auuauuugucguuguuaag

SEQ ID NO: 766437 - RNA, 19 nt, Artificial Sequence
  Description of Artificial Sequence: Synthetic oligonucleotide
  Antisense strand to SEQ ID NO: 766436
cuuaacaacgacaaauaau

SEQ ID NO: 766438 - RNA, 19 nt, Artificial Sequence
  Description of Artificial Sequence: Synthetic oligonucleotide
  Sense strand starting at position 1450 of SEQ ID NO: 587097
gucgaauggagucacauua

SEQ ID NO: 766439 - RNA, 19 nt, Artificial Sequence
  Description of Artificial Sequence: Synthetic oligonucleotide
  Antisense strand to SEQ ID NO: 766438
uaaugugacuccauucgac

SEQ ID NO: 766440 - RNA, 19 nt, Artificial Sequence
  Description of Artificial Sequence: Synthetic oligonucleotide
  Sense strand starting at position 1473 of SEQ ID NO: 587097
ggccuugacaauuaaguag

SEQ ID NO: 766441 - RNA, 19 nt, Artificial Sequence
  Description of Artificial Sequence: Synthetic oligonucleotide
  Antisense strand to SEQ ID NO: 766440
cuacuuaauugucaaggcc

SEQ ID NO: 766442 - RNA, 19 nt, Artificial Sequence
  Description of Artificial Sequence: Synthetic oligonucleotide
  Sense strand starting at position 1532 of SEQ ID NO: 587097
cccacagguuuaguggaaa

SEQ ID NO: 766443 - RNA, 19 nt, Artificial Sequence
  Description of Artificial Sequence: Synthetic oligonucleotide
  Antisense strand to SEQ ID NO: 766442
uuuccacuaaaccuguggg

SEQ ID NO: 766444 - RNA, 19 nt, Artificial Sequence
  Description of Artificial Sequence: Synthetic oligonucleotide
  Sense strand starting at position 1562 of SEQ ID NO: 587097
aggguuuaugucuaacuug

SEQ ID NO: 766445 - RNA, 19 nt, Artificial Sequence
  Description of Artificial Sequence: Synthetic oligonucleotide
  Antisense strand to SEQ ID NO: 766444
caaguuagacauaaacccu

SEQ ID NO: 766446 - RNA, 19 nt, Artificial Sequence
  Description of Artificial Sequence: Synthetic oligonucleotide
  Sense strand starting at position 1617 of SEQ ID NO: 587097
uuaugacaagacugagcua

SEQ ID NO: 766447 - RNA, 19 nt, Artificial Sequence
  Description of Artificial Sequence: Synthetic oligonucleotide
  Antisense strand to SEQ ID NO: 766446
uagcucagucuugucauaa

SEQ ID NO: 766448 - RNA, 19 nt, Artificial Sequence
  Description of Artificial Sequence: Synthetic oligonucleotide
  Sense strand starting at position 1645 of SEQ ID NO: 587097
aguucccuucuagggaaau

SEQ ID NO: 766449 - RNA, 19 nt, Artificial Sequence
  Description of Artificial Sequence: Synthetic oligonucleotide
  Antisense strand to SEQ ID NO: 766448
auuucccuagaagggaacu

SEQ ID NO: 766450 - RNA, 19 nt, Artificial Sequence
  Description of Artificial Sequence: Synthetic oligonucleotide
  Sense strand starting at position 1761 of SEQ ID NO: 587097
caaauugggcaguauaagu

SEQ ID NO: 766451 - RNA, 19 nt, Artificial Sequence
  Description of Artificial Sequence: Synthetic oligonucleotide
  Antisense strand to SEQ ID NO: 766450
acuuauacugcccaauuug

SEQ ID NO: 766452 - RNA, 19 nt, Artificial Sequence
  Description of Artificial Sequence: Synthetic oligonucleotide
  Sense strand starting at position 1891 of SEQ ID NO: 587097
gaaaucauaguuuggugaa

SEQ ID NO: 766453 - RNA, 19 nt, Artificial Sequence
  Description of Artificial Sequence: Synthetic oligonucleotide
  Antisense strand to SEQ ID NO: 766452
uucaccaaacuaugauuuc

SEQ ID NO: 766454 - RNA, 19 nt, Artificial Sequence
  Description of Artificial Sequence: Synthetic oligonucleotide
  Sense strand starting at position 1893 of SEQ ID NO: 587097
aaucauaguuuggugaaga

SEQ ID NO: 766455 - RNA, 19 nt, Artificial Sequence
  Description of Artificial Sequence: Synthetic oligonucleotide
  Antisense strand to SEQ ID NO: 766454
ucuucaccaaacuaugauu

SEQ ID NO: 766456 - RNA, 19 nt, Artificial Sequence
  Description of Artificial Sequence: Synthetic oligonucleotide
  Sense strand starting at position 1988 of SEQ ID NO: 587097
gagggaauuugugaugaau

SEQ ID NO: 766457 - RNA, 19 nt, Artificial Sequence
  Description of Artificial Sequence: Synthetic oligonucleotide
  Antisense strand to SEQ ID NO: 766456
auucaucacaaauucccuc

SEQ ID NO: 766458 - RNA, 19 nt, Artificial Sequence
  Description of Artificial Sequence: Synthetic oligonucleotide
  Sense strand starting at position 2020 of SEQ ID NO: 587097
ugcugagguguucuguguu

SEQ ID NO: 766459 - RNA, 19 nt, Artificial Sequence
  Description of Artificial Sequence: Synthetic oligonucleotide
  Antisense strand to SEQ ID NO: 766458
aacacagaacaccucagca

SEQ ID NO: 766460 - RNA, 19 nt, Artificial Sequence
  Description of Artificial Sequence: Synthetic oligonucleotide
  Sense strand starting at position 2728 of SEQ ID NO: 587097
gugucuuguaguucuguuu

SEQ ID NO: 766461 - RNA, 19 nt, Artificial Sequence
  Description of Artificial Sequence: Synthetic oligonucleotide
  Antisense strand to SEQ ID NO: 766460
aaacagaacuacaagacac

SEQ ID NO: 766462 - RNA, 19 nt, Artificial Sequence
  Description of Artificial Sequence: Synthetic oligonucleotide
  Sense strand starting at position 3016 of SEQ ID NO: 587097
gguugauugcaacagagua

SEQ ID NO: 766463 - RNA, 19 nt, Artificial Sequence
  Description of Artificial Sequence: Synthetic oligonucleotide
  Antisense strand to SEQ ID NO: 766462
uacucuguugcaaucaacc

SEQ ID NO: 766464 - RNA, 19 nt, Artificial Sequence
  Description of Artificial Sequence: Synthetic oligonucleotide
  Sense strand starting at position 3054 of SEQ ID NO: 587097
aauuuaggguacuauggaa

SEQ ID NO: 766465 - RNA, 19 nt, Artificial Sequence
  Description of Artificial Sequence: Synthetic oligonucleotide
  Antisense strand to SEQ ID NO: 766464
uuccauaguacccuaaauu

SEQ ID NO: 766466 - RNA, 19 nt, Artificial Sequence
  Description of Artificial Sequence: Synthetic oligonucleotide
  Sense strand starting at position 3149 of SEQ ID NO: 587097
ggaagaugagugugaauua

SEQ ID NO: 766467 - RNA, 19 nt, Artificial Sequence
  Description of Artificial Sequence: Synthetic oligonucleotide
  Antisense strand to SEQ ID NO: 766466
uaauucacacucaucuucc

SEQ ID NO: 766468 - RNA, 19 nt, Artificial Sequence
  Description of Artificial Sequence: Synthetic oligonucleotide
  Sense strand starting at position 3158 of SEQ ID NO: 587097
gugugaauuaaccagguga

SEQ ID NO: 766469 - RNA, 19 nt, Artificial Sequence
  Description of Artificial Sequence: Synthetic oligonucleotide
  Antisense strand to SEQ ID NO: 766468
ucaccugguuaauucacac

SEQ ID NO: 766470 - RNA, 19 nt, Artificial Sequence
  Description of Artificial Sequence: Synthetic oligonucleotide
  Sense strand starting at position 3160 of SEQ ID NO: 587097
gugaauuaaccaggugaug

SEQ ID NO: 766471 - RNA, 19 nt, Artificial Sequence
  Description of Artificial Sequence: Synthetic oligonucleotide
  Antisense strand to SEQ ID NO: 766470
caucaccugguuaauucac

SEQ ID NO: 766472 - RNA, 19 nt, Artificial Sequence
  Description of Artificial Sequence: Synthetic oligonucleotide
  Sense strand starting at position 3276 of SEQ ID NO: 587097
gcaauaugccaggaacaua

SEQ ID NO: 766473 - RNA, 19 nt, Artificial Sequence
  Description of Artificial Sequence: Synthetic oligonucleotide
  Antisense strand to SEQ ID NO: 766472
uauguuccuggcauauugc

SEQ ID NO: 766474 - RNA, 19 nt, Artificial Sequence
  Description of Artificial Sequence: Synthetic oligonucleotide
  Sense strand starting at position 3382 of SEQ ID NO: 587097
ggguuauucugaguaauga

SEQ ID NO: 766475 - RNA, 19 nt, Artificial Sequence
  Description of Artificial Sequence: Synthetic oligonucleotide
  Antisense strand to SEQ ID NO: 766474
ucauuacucagaauaaccc

SEQ ID NO: 766476 - RNA, 19 nt, Artificial Sequence
  Description of Artificial Sequence: Synthetic oligonucleotide
  Sense strand starting at position 3475 of SEQ ID NO: 587097
uggcaugugaacuauagau

SEQ ID NO: 766477 - RNA, 19 nt, Artificial Sequence
  Description of Artificial Sequence: Synthetic oligonucleotide
  Antisense strand to SEQ ID NO: 766476
aucuauaguucacaugcca

SEQ ID NO: 766478 - RNA, 19 nt, Artificial Sequence
  Description of Artificial Sequence: Synthetic oligonucleotide
  Sense strand starting at position 3477 of SEQ ID NO: 587097
gcaugugaacuauagauug

SEQ ID NO: 766479 - RNA, 19 nt, Artificial Sequence
  Description of Artificial Sequence: Synthetic oligonucleotide
  Antisense strand to SEQ ID NO: 766478
caaucuauaguucacaugc

SEQ ID NO: 766480 - RNA, 19 nt, Artificial Sequence
  Description of Artificial Sequence: Synthetic oligonucleotide
  Sense strand starting at position 3539 of SEQ ID NO: 587097
uugagaagucuaugacagu

SEQ ID NO: 766481 - RNA, 19 nt, Artificial Sequence
  Description of Artificial Sequence: Synthetic oligonucleotide
  Antisense strand to SEQ ID NO: 766480
acugucauagacuucucaa

SEQ ID NO: 766482 - RNA, 19 nt, Artificial Sequence
  Description of Artificial Sequence: Synthetic oligonucleotide
  Sense strand starting at position 3624 of SEQ ID NO: 587097
auccuagcucuggaugauu

SEQ ID NO: 766483 - RNA, 19 nt, Artificial Sequence
  Description of Artificial Sequence: Synthetic oligonucleotide
  Antisense strand to SEQ ID NO: 766482
aaucauccagagcuaggau

SEQ ID NO: 766484 - RNA, 19 nt, Artificial Sequence
  Description of Artificial Sequence: Synthetic oligonucleotide
  Sense strand starting at position 3627 of SEQ ID NO: 587097
cuagcucuggaugauugau

SEQ ID NO: 766485 - RNA, 19 nt, Artificial Sequence
  Description of Artificial Sequence: Synthetic oligonucleotide
  Antisense strand to SEQ ID NO: 766484
aucaaucauccagagcuag

SEQ ID NO: 766486 - RNA, 19 nt, Artificial Sequence
  Description of Artificial Sequence: Synthetic oligonucleotide
  Sense strand starting at position 3654 of SEQ ID NO: 587097
ggccaaccagguuauacua

SEQ ID NO: 766487 - RNA, 19 nt, Artificial Sequence
  Description of Artificial Sequence: Synthetic oligonucleotide
  Antisense strand to SEQ ID NO: 766486
uaguauaaccugguuggcc

SEQ ID NO: 766488 - RNA, 19 nt, Artificial Sequence
  Description of Artificial Sequence: Synthetic oligonucleotide
  Sense strand starting at position 3662 of SEQ ID NO: 587097
agguuauacuaagaauuug

SEQ ID NO: 766489 - RNA, 19 nt, Artificial Sequence
  Description of Artificial Sequence: Synthetic oligonucleotide
  Antisense strand to SEQ ID NO: 766488
caaauucuuaguauaaccu

SEQ ID NO: 766490 - RNA, 19 nt, Artificial Sequence
  Description of Artificial Sequence: Synthetic oligonucleotide
  Sense strand starting at position 3751 of SEQ ID NO: 587097
ggaagacucugagcucuga

SEQ ID NO: 766491 - RNA, 19 nt, Artificial Sequence
  Description of Artificial Sequence: Synthetic oligonucleotide
  Antisense strand to SEQ ID NO: 766490
ucagagcucagagucuucc

SEQ ID NO: 766492 - RNA, 19 nt, Artificial Sequence
  Description of Artificial Sequence: Synthetic oligonucleotide
  Sense strand starting at position 101 of SEQ ID NO: 587098
auagguuaucuggguguga

SEQ ID NO: 766493 - RNA, 19 nt, Artificial Sequence
  Description of Artificial Sequence: Synthetic oligonucleotide
  Antisense strand to SEQ ID NO: 766492
ucacacccagauaaccuau

SEQ ID NO: 766494 - RNA, 19 nt, Artificial Sequence
  Description of Artificial Sequence: Synthetic oligonucleotide
  Sense strand starting at position 102 of SEQ ID NO: 587098
uagguuaucugggugugaa

SEQ ID NO: 766495 - RNA, 19 nt, Artificial Sequence
  Description of Artificial Sequence: Synthetic oligonucleotide
  Antisense strand to SEQ ID NO: 766494
uucacacccagauaaccua

SEQ ID NO: 766496 - RNA, 19 nt, Artificial Sequence
  Description of Artificial Sequence: Synthetic oligonucleotide
  Sense strand starting at position 103 of SEQ ID NO: 587098
agguuaucugggugugaau

SEQ ID NO: 766497 - RNA, 19 nt, Artificial Sequence
  Description of Artificial Sequence: Synthetic oligonucleotide
  Antisense strand to SEQ ID NO: 766496
auucacacccagauaaccu

SEQ ID NO: 766498 - RNA, 19 nt, Artificial Sequence
  Description of Artificial Sequence: Synthetic oligonucleotide
  Sense strand starting at position 161 of SEQ ID NO: 587098
auauuaagacuuggcccaa

SEQ ID NO: 766499 - RNA, 19 nt, Artificial Sequence
  Description of Artificial Sequence: Synthetic oligonucleotide
  Antisense strand to SEQ ID NO: 766498
uugggccaagucuuaauau

SEQ ID NO: 766500 - RNA, 19 nt, Artificial Sequence
  Description of Artificial Sequence: Synthetic oligonucleotide
  Sense strand starting at position 252 of SEQ ID NO: 587098
caagcaguucccuaaguag

SEQ ID NO: 766501 - RNA, 19 nt, Artificial Sequence
  Description of Artificial Sequence: Synthetic oligonucleotide
  Antisense strand to SEQ ID NO: 766500
cuacuuagggaacugcuug

SEQ ID NO: 766502 - RNA, 19 nt, Artificial Sequence
  Description of Artificial Sequence: Synthetic oligonucleotide
  Sense strand starting at position 284 of SEQ ID NO: 587098
ucuuaucuaugaguagaag

SEQ ID NO: 766503 - RNA, 19 nt, Artificial Sequence
  Description of Artificial Sequence: Synthetic oligonucleotide
  Antisense strand to SEQ ID NO: 766502
cuucuacucauagauaaga

SEQ ID NO: 766504 - RNA, 19 nt, Artificial Sequence
  Description of Artificial Sequence: Synthetic oligonucleotide
  Sense strand starting at position 295 of SEQ ID NO: 587098
aguagaagcacgugcauuu

SEQ ID NO: 766505 - RNA, 19 nt, Artificial Sequence
  Description of Artificial Sequence: Synthetic oligonucleotide
  Antisense strand to SEQ ID NO: 766504
aaaugcacgugcuucuacu

SEQ ID NO: 766506 - RNA, 19 nt, Artificial Sequence
  Description of Artificial Sequence: Synthetic oligonucleotide
  Sense strand starting at position 368 of SEQ ID NO: 587098
gguggauuucuuuguucua

SEQ ID NO: 766507 - RNA, 19 nt, Artificial Sequence
  Description of Artificial Sequence: Synthetic oligonucleotide
  Antisense strand to SEQ ID NO: 766506
uagaacaaagaaauccacc

SEQ ID NO: 766508 - RNA, 19 nt, Artificial Sequence
  Description of Artificial Sequence: Synthetic oligonucleotide
  Sense strand starting at position 393 of SEQ ID NO: 587098
aauggaacuugagcuagau

SEQ ID NO: 766509 - RNA, 19 nt, Artificial Sequence
  Description of Artificial Sequence: Synthetic oligonucleotide
  Antisense strand to SEQ ID NO: 766508
aucuagcucaaguuccauu

SEQ ID NO: 766510 - RNA, 19 nt, Artificial Sequence
  Description of Artificial Sequence: Synthetic oligonucleotide
  Sense strand starting at position 934 of SEQ ID NO: 587098
agcaacuauccggaugaau

SEQ ID NO: 766511 - RNA, 19 nt, Artificial Sequence
  Description of Artificial Sequence: Synthetic oligonucleotide
  Antisense strand to SEQ ID NO: 766510
auucauccggauaguugcu

SEQ ID NO: 766512 - RNA, 19 nt, Artificial Sequence
  Description of Artificial Sequence: Synthetic oligonucleotide
  Sense strand starting at position 936 of SEQ ID NO: 587098
caacuauccggaugaauga

SEQ ID NO: 766513 - RNA, 19 nt, Artificial Sequence
  Description of Artificial Sequence: Synthetic oligonucleotide
  Antisense strand to SEQ ID NO: 766512
ucauucauccggauaguug

SEQ ID NO: 766514 - RNA, 19 nt, Artificial Sequence
  Description of Artificial Sequence: Synthetic oligonucleotide
  Sense strand starting at position 950 of SEQ ID NO: 587098
aaugaagucgcacaguaaa

SEQ ID NO: 766515 - RNA, 19 nt, Artificial Sequence
  Description of Artificial Sequence: Synthetic oligonucleotide
  Antisense strand to SEQ ID NO: 766514
uuuacugugcgacuucauu

SEQ ID NO: 766516 - RNA, 19 nt, Artificial Sequence
  Description of Artificial Sequence: Synthetic oligonucleotide
  Sense strand starting at position 1075 of SEQ ID NO: 587098
cuguccugaaggugagaaa

SEQ ID NO: 766517 - RNA, 19 nt, Artificial Sequence
  Description of Artificial Sequence: Synthetic oligonucleotide
  Antisense strand to SEQ ID NO: 766516
uuucucaccuucaggacag

SEQ ID NO: 766518 - RNA, 19 nt, Artificial Sequence
  Description of Artificial Sequence: Synthetic oligonucleotide
  Sense strand starting at position 1310 of SEQ ID NO: 587098
aggguuucucugggagaac

SEQ ID NO: 766519 - RNA, 19 nt, Artificial Sequence
  Description of Artificial Sequence: Synthetic oligonucleotide
  Antisense strand to SEQ ID NO: 766518
guucucccagagaaacccu

SEQ ID NO: 766520 - RNA, 19 nt, Artificial Sequence
  Description of Artificial Sequence: Synthetic oligonucleotide
  Sense strand starting at position 1325 of SEQ ID NO: 587098
gaacgugagaaaugauguu

SEQ ID NO: 766521 - RNA, 19 nt, Artificial Sequence
  Description of Artificial Sequence: Synthetic oligonucleotide
  Antisense strand to SEQ ID NO: 766520
aacaucauuucucacguuc

SEQ ID NO: 766522 - RNA, 19 nt, Artificial Sequence
  Description of Artificial Sequence: Synthetic oligonucleotide
  Sense strand starting at position 1358 of SEQ ID NO: 587098
gauggauuagccugggaca

SEQ ID NO: 766523 - RNA, 19 nt, Artificial Sequence
  Description of Artificial Sequence: Synthetic oligonucleotide
  Antisense strand to SEQ ID NO: 766522
ugucccaggcuaauccauc

SEQ ID NO: 766524 - RNA, 19 nt, Artificial Sequence
  Description of Artificial Sequence: Synthetic oligonucleotide
  Sense strand starting at position 1360 of SEQ ID NO: 587098
uggauuagccugggacagu

SEQ ID NO: 766525 - RNA, 19 nt, Artificial Sequence
  Description of Artificial Sequence: Synthetic oligonucleotide
  Antisense strand to SEQ ID NO: 766524
acugucccaggcuaaucca

SEQ ID NO: 766526 - RNA, 19 nt, Artificial Sequence
  Description of Artificial Sequence: Synthetic oligonucleotide
  Sense strand starting at position 2132 of SEQ ID NO: 587098
agauaaugccuaggaacuu

SEQ ID NO: 766527 - RNA, 19 nt, Artificial Sequence
  Description of Artificial Sequence: Synthetic oligonucleotide
  Antisense strand to SEQ ID NO: 766526
aaguuccuaggcauuaucu

SEQ ID NO: 766528 - RNA, 19 nt, Artificial Sequence
  Description of Artificial Sequence: Synthetic oligonucleotide
  Sense strand starting at position 2198 of SEQ ID NO: 587098
aauggaggcuggguuauaa

SEQ ID NO: 766529 - RNA, 19 nt, Artificial Sequence
  Description of Artificial Sequence: Synthetic oligonucleotide
  Antisense strand to SEQ ID NO: 766528
uuauaacccagccuccauu

SEQ ID NO: 766530 - RNA, 19 nt, Artificial Sequence
  Description of Artificial Sequence: Synthetic oligonucleotide
  Sense strand starting at position 2286 of SEQ ID NO: 587098
acccaauuccugcaaugag

SEQ ID NO: 766531 - RNA, 19 nt, Artificial Sequence
  Description of Artificial Sequence: Synthetic oligonucleotide
  Antisense strand to SEQ ID NO: 766530
cucauugcaggaauugggu

SEQ ID NO: 766532 - RNA, 19 nt, Artificial Sequence
  Description of Artificial Sequence: Synthetic oligonucleotide
  Sense strand starting at position 2565 of SEQ ID NO: 587098
uugaguuaacugggugauu

SEQ ID NO: 766533 - RNA, 19 nt, Artificial Sequence
  Description of Artificial Sequence: Synthetic oligonucleotide
  Antisense strand to SEQ ID NO: 766532
aaucacccaguuaacucaa

SEQ ID NO: 766534 - RNA, 19 nt, Artificial Sequence
  Description of Artificial Sequence: Synthetic oligonucleotide
  Sense strand starting at position 2588 of SEQ ID NO: 587098
uugaaauguguacauagua

SEQ ID NO: 766535 - RNA, 19 nt, Artificial Sequence
  Description of Artificial Sequence: Synthetic oligonucleotide
  Antisense strand to SEQ ID NO: 766534
uacuauguacacauuucaa

SEQ ID NO: 766536 - RNA, 19 nt, Artificial Sequence
  Description of Artificial Sequence: Synthetic oligonucleotide
  Sense strand starting at position 2603 of SEQ ID NO: 587098
aguaguggaucuuuggaaa

SEQ ID NO: 766537 - RNA, 19 nt, Artificial Sequence
  Description of Artificial Sequence: Synthetic oligonucleotide
  Antisense strand to SEQ ID NO: 766536
uuuccaaagauccacuacu

SEQ ID NO: 766538 - RNA, 19 nt, Artificial Sequence
  Description of Artificial Sequence: Synthetic oligonucleotide
  Sense strand starting at position 2757 of SEQ ID NO: 587098
uguggauguguugugcuau

SEQ ID NO: 766539 - RNA, 19 nt, Artificial Sequence
  Description of Artificial Sequence: Synthetic oligonucleotide
  Antisense strand to SEQ ID NO: 766538
auagcacaacacauccaca

SEQ ID NO: 766540 - RNA, 19 nt, Artificial Sequence
  Description of Artificial Sequence: Synthetic oligonucleotide
  Sense strand starting at position 2767 of SEQ ID NO: 587098
uugugcuaugccucacagu

SEQ ID NO: 766541 - RNA, 19 nt, Artificial Sequence
  Description of Artificial Sequence: Synthetic oligonucleotide
  Antisense strand to SEQ ID NO: 766540
acugugaggcauagcacaa

SEQ ID NO: 766542 - RNA, 19 nt, Artificial Sequence
  Description of Artificial Sequence: Synthetic oligonucleotide
  Sense strand starting at position 2978 of SEQ ID NO: 587098
gcaugacuggagugacaau

SEQ ID NO: 766543 - RNA, 19 nt, Artificial Sequence
  Description of Artificial Sequence: Synthetic oligonucleotide
  Antisense strand to SEQ ID NO: 766542
auugucacuccagucaugc

SEQ ID NO: 766544 - RNA, 19 nt, Artificial Sequence
  Description of Artificial Sequence: Synthetic oligonucleotide
  Sense strand starting at position 3083 of SEQ ID NO: 587098
gucacuaagcaguauguaa

SEQ ID NO: 766545 - RNA, 19 nt, Artificial Sequence
  Description of Artificial Sequence: Synthetic oligonucleotide
  Antisense strand to SEQ ID NO: 766544
uuacauacugcuuagugac

SEQ ID NO: 766546 - RNA, 19 nt, Artificial Sequence
  Description of Artificial Sequence: Synthetic oligonucleotide
  Sense strand starting at position 3085 of SEQ ID NO: 587098
cacuaagcaguauguaaga

SEQ ID NO: 766547 - RNA, 19 nt, Artificial Sequence
  Description of Artificial Sequence: Synthetic oligonucleotide
  Antisense strand to SEQ ID NO: 766546
ucuuacauacugcuuagug

SEQ ID NO: 766548 - RNA, 19 nt, Artificial Sequence
  Description of Artificial Sequence: Synthetic oligonucleotide
  Sense strand starting at position 3450 of SEQ ID NO: 587098
cuucuacuccuagaaggua

SEQ ID NO: 766549 - RNA, 19 nt, Artificial Sequence
  Description of Artificial Sequence: Synthetic oligonucleotide
  Antisense strand to SEQ ID NO: 766548
uaccuucuaggaguagaag

SEQ ID NO: 766550 - RNA, 19 nt, Artificial Sequence
  Description of Artificial Sequence: Synthetic oligonucleotide
  Sense strand starting at position 3489 of SEQ ID NO: 587098
uucguauaccuuuaagggu

SEQ ID NO: 766551 - RNA, 19 nt, Artificial Sequence
  Description of Artificial Sequence: Synthetic oligonucleotide
  Antisense strand to SEQ ID NO: 766550
acccuuaaagguauacgaa

SEQ ID NO: 766552 - RNA, 19 nt, Artificial Sequence
  Description of Artificial Sequence: Synthetic oligonucleotide
  Sense strand starting at position 3505 of SEQ ID NO: 587098
ggucaacugccuuaaagua

SEQ ID NO: 766553 - RNA, 19 nt, Artificial Sequence
  Description of Artificial Sequence: Synthetic oligonucleotide
  Antisense strand to SEQ ID NO: 766552
uacuuuaaggcaguugacc

SEQ ID NO: 766554 - RNA, 19 nt, Artificial Sequence
  Description of Artificial Sequence: Synthetic oligonucleotide
  Sense strand starting at position 3621 of SEQ ID NO: 587098
acaucuguaguccaaccua

SEQ ID NO: 766555 - RNA, 19 nt, Artificial Sequence
  Description of Artificial Sequence: Synthetic oligonucleotide
  Antisense strand to SEQ ID NO: 766554
uagguuggacuacagaugu

SEQ ID NO: 766556 - RNA, 19 nt, Artificial Sequence
  Description of Artificial Sequence: Synthetic oligonucleotide
  Sense strand starting at position 3668 of SEQ ID NO: 587098
cucuuaguacucuaguuua

SEQ ID NO: 766557 - RNA, 19 nt, Artificial Sequence
  Description of Artificial Sequence: Synthetic oligonucleotide
  Antisense strand to SEQ ID NO: 766556
uaaacuagaguacuaagag

SEQ ID NO: 766558 - RNA, 19 nt, Artificial Sequence
  Description of Artificial Sequence: Synthetic oligonucleotide
  Sense strand starting at position 3671 of SEQ ID NO: 587098
uuaguacucuaguuuaaug

SEQ ID NO: 766559 - RNA, 19 nt, Artificial Sequence
  Description of Artificial Sequence: Synthetic oligonucleotide
  Antisense strand to SEQ ID NO: 766558
cauuaaacuagaguacuaa

SEQ ID NO: 766560 - RNA, 19 nt, Artificial Sequence
  Description of Artificial Sequence: Synthetic oligonucleotide
  Sense strand starting at position 3696 of SEQ ID NO: 587098
gaaauuguuguacacgaga

SEQ ID NO: 766561 - RNA, 19 nt, Artificial Sequence
  Description of Artificial Sequence: Synthetic oligonucleotide
  Antisense strand to SEQ ID NO: 766560
ucucguguacaacaauuuc

SEQ ID NO: 766562 - RNA, 19 nt, Artificial Sequence
  Description of Artificial Sequence: Synthetic oligonucleotide
  Sense strand starting at position 3699 of SEQ ID NO: 587098
auuguuguacacgagaauc

SEQ ID NO: 766563 - RNA, 19 nt, Artificial Sequence
  Description of Artificial Sequence: Synthetic oligonucleotide
  Antisense strand to SEQ ID NO: 766562
gauucucguguacaacaau

SEQ ID NO: 766564 - RNA, 19 nt, Artificial Sequence
  Description of Artificial Sequence: Synthetic oligonucleotide
  Sense strand starting at position 3719 of SEQ ID NO: 587098
cuuggagagcuuugaaaca

SEQ ID NO: 766565 - RNA, 19 nt, Artificial Sequence
  Description of Artificial Sequence: Synthetic oligonucleotide
  Antisense strand to SEQ ID NO: 766564
uguuucaaagcucuccaag

SEQ ID NO: 766566 - RNA, 19 nt, Artificial Sequence
  Description of Artificial Sequence: Synthetic oligonucleotide
  Sense strand starting at position 3738 of SEQ ID NO: 587098
acccuaauucucuggcaug

SEQ ID NO: 766567 - RNA, 19 nt, Artificial Sequence
  Description of Artificial Sequence: Synthetic oligonucleotide
  Antisense strand to SEQ ID NO: 766566
caugccagagaauuagggu

SEQ ID NO: 766568 - RNA, 19 nt, Artificial Sequence
  Description of Artificial Sequence: Synthetic oligonucleotide
  Sense strand starting at position 3813 of SEQ ID NO: 587098
ccaagcucccaagguaauu

SEQ ID NO: 766569 - RNA, 19 nt, Artificial Sequence
  Description of Artificial Sequence: Synthetic oligonucleotide
  Antisense strand to SEQ ID NO: 766568
aauuaccuugggagcuugg

SEQ ID NO: 766570 - RNA, 19 nt, Artificial Sequence
  Description of Artificial Sequence: Synthetic oligonucleotide
  Sense strand starting at position 3939 of SEQ ID NO: 587098
agucgauaaauugggauua

SEQ ID NO: 766571 - RNA, 19 nt, Artificial Sequence
  Description of Artificial Sequence: Synthetic oligonucleotide
  Antisense strand to SEQ ID NO: 766570
uaaucccaauuuaucgacu

SEQ ID NO: 766572 - RNA, 19 nt, Artificial Sequence
  Description of Artificial Sequence: Synthetic oligonucleotide
  Sense strand starting at position 9 of SEQ ID NO: 587099
ugaaguaaguaugcaaagu

SEQ ID NO: 766573 - RNA, 19 nt, Artificial Sequence
  Description of Artificial Sequence: Synthetic oligonucleotide
  Antisense strand to SEQ ID NO: 766572
acuuugcauacuuacuuca

SEQ ID NO: 766574 - RNA, 19 nt, Artificial Sequence
  Description of Artificial Sequence: Synthetic oligonucleotide
  Sense strand starting at position 59 of SEQ ID NO: 587099
aagacuaagugucuggcaa

SEQ ID NO: 766575 - RNA, 19 nt, Artificial Sequence
  Description of Artificial Sequence: Synthetic oligonucleotide
  Antisense strand to SEQ ID NO: 766574
uugccagacacuuagucuu

SEQ ID NO: 766576 - RNA, 19 nt, Artificial Sequence
  Description of Artificial Sequence: Synthetic oligonucleotide
  Sense strand starting at position 60 of SEQ ID NO: 587099
agacuaagugucuggcaaa

SEQ ID NO: 766577 - RNA, 19 nt, Artificial Sequence
  Description of Artificial Sequence: Synthetic oligonucleotide
  Antisense strand to SEQ ID NO: 766576
uuugccagacacuuagucu

SEQ ID NO: 766578 - RNA, 19 nt, Artificial Sequence
  Description of Artificial Sequence: Synthetic oligonucleotide
  Sense strand starting at position 83 of SEQ ID NO: 587099
ugacuaaaucauuggcaga

SEQ ID NO: 766579 - RNA, 19 nt, Artificial Sequence
  Description of Artificial Sequence: Synthetic oligonucleotide
  Antisense strand to SEQ ID NO: 766578
ucugccaaugauuuaguca

SEQ ID NO: 766580 - RNA, 19 nt, Artificial Sequence
  Description of Artificial Sequence: Synthetic oligonucleotide
  Sense strand starting at position 189 of SEQ ID NO: 587099
uagagaacuggucagcauu

SEQ ID NO: 766581 - RNA, 19 nt, Artificial Sequence
  Description of Artificial Sequence: Synthetic oligonucleotide
  Antisense strand to SEQ ID NO: 766580
aaugcugaccaguucucua

SEQ ID NO: 766582 - RNA, 19 nt, Artificial Sequence
  Description of Artificial Sequence: Synthetic oligonucleotide
  Sense strand starting at position 225 of SEQ ID NO: 587099
gggugauaagcauaccuca

SEQ ID NO: 766583 - RNA, 19 nt, Artificial Sequence
  Description of Artificial Sequence: Synthetic oligonucleotide
  Antisense strand to SEQ ID NO: 766582
ugagguaugcuuaucaccc

SEQ ID NO: 766584 - RNA, 19 nt, Artificial Sequence
  Description of Artificial Sequence: Synthetic oligonucleotide
  Sense strand starting at position 233 of SEQ ID NO: 587099
agcauaccucagggugaua

SEQ ID NO: 766585 - RNA, 19 nt, Artificial Sequence
  Description of Artificial Sequence: Synthetic oligonucleotide
  Antisense strand to SEQ ID NO: 766584
uaucacccugagguaugcu

SEQ ID NO: 766586 - RNA, 19 nt, Artificial Sequence
  Description of Artificial Sequence: Synthetic oligonucleotide
  Sense strand starting at position 235 of SEQ ID NO: 587099
cauaccucagggugauaca

SEQ ID NO: 766587 - RNA, 19 nt, Artificial Sequence
  Description of Artificial Sequence: Synthetic oligonucleotide
  Antisense strand to SEQ ID NO: 766586
uguaucacccugagguaug

SEQ ID NO: 766588 - RNA, 19 nt, Artificial Sequence
  Description of Artificial Sequence: Synthetic oligonucleotide
  Sense strand starting at position 275 of SEQ ID NO: 587099
ugacauguaucuccaagga

SEQ ID NO: 766589 - RNA, 19 nt, Artificial Sequence
  Description of Artificial Sequence: Synthetic oligonucleotide
  Antisense strand to SEQ ID NO: 766588
uccuuggagauacauguca

SEQ ID NO: 766590 - RNA, 19 nt, Artificial Sequence
  Description of Artificial Sequence: Synthetic oligonucleotide
  Sense strand starting at position 342 of SEQ ID NO: 587099
ugaccauguugaccagauu

SEQ ID NO: 766591 - RNA, 19 nt, Artificial Sequence
  Description of Artificial Sequence: Synthetic oligonucleotide
  Antisense strand to SEQ ID NO: 766590
aaucuggucaacaugguca

SEQ ID NO: 766592 - RNA, 19 nt, Artificial Sequence
  Description of Artificial Sequence: Synthetic oligonucleotide
  Sense strand starting at position 345 of SEQ ID NO: 587099
ccauguugaccagauucuu

SEQ ID NO: 766593 - RNA, 19 nt, Artificial Sequence
  Description of Artificial Sequence: Synthetic oligonucleotide
  Antisense strand to SEQ ID NO: 766592
aagaaucuggucaacaugg

SEQ ID NO: 766594 - RNA, 19 nt, Artificial Sequence
  Description of Artificial Sequence: Synthetic oligonucleotide
  Sense strand starting at position 500 of SEQ ID NO: 587099
ucucuauuccaaggaggua

SEQ ID NO: 766595 - RNA, 19 nt, Artificial Sequence
  Description of Artificial Sequence: Synthetic oligonucleotide
  Antisense strand to SEQ ID NO: 766594
uaccuccuuggaauagaga

SEQ ID NO: 766596 - RNA, 19 nt, Artificial Sequence
  Description of Artificial Sequence: Synthetic oligonucleotide
  Sense strand starting at position 635 of SEQ ID NO: 587099
gagggaugaugacagaaga

SEQ ID NO: 766597 - RNA, 19 nt, Artificial Sequence
  Description of Artificial Sequence: Synthetic oligonucleotide
  Antisense strand to SEQ ID NO: 766596
ucuucugucaucaucccuc

SEQ ID NO: 766598 - RNA, 19 nt, Artificial Sequence
  Description of Artificial Sequence: Synthetic oligonucleotide
  Sense strand starting at position 656 of SEQ ID NO: 587099
aaguuucuuccgcccggua

SEQ ID NO: 766599 - RNA, 19 nt, Artificial Sequence
  Description of Artificial Sequence: Synthetic oligonucleotide
  Antisense strand to SEQ ID NO: 766598
uaccgggcggaagaaacuu

SEQ ID NO: 766600 - RNA, 19 nt, Artificial Sequence
  Description of Artificial Sequence: Synthetic oligonucleotide
  Sense strand starting at position 684 of SEQ ID NO: 587099
uguggaaagaucuggauuc

SEQ ID NO: 766601 - RNA, 19 nt, Artificial Sequence
  Description of Artificial Sequence: Synthetic oligonucleotide
  Antisense strand to SEQ ID NO: 766600
gaauccagaucuuuccaca

SEQ ID NO: 766602 - RNA, 19 nt, Artificial Sequence
  Description of Artificial Sequence: Synthetic oligonucleotide
  Sense strand starting at position 770 of SEQ ID NO: 587099
cuguuaccuuauguauaaa

SEQ ID NO: 766603 - RNA, 19 nt, Artificial Sequence
  Description of Artificial Sequence: Synthetic oligonucleotide
  Antisense strand to SEQ ID NO: 766602
uuuauacauaagguaacag

SEQ ID NO: 766604 - RNA, 19 nt, Artificial Sequence
  Description of Artificial Sequence: Synthetic oligonucleotide
  Sense strand starting at position 808 of SEQ ID NO: 587099
cccucagaagguugucaga

SEQ ID NO: 766605 - RNA, 19 nt, Artificial Sequence
  Description of Artificial Sequence: Synthetic oligonucleotide
  Antisense strand to SEQ ID NO: 766604
ucugacaaccuucugaggg

SEQ ID NO: 766606 - RNA, 19 nt, Artificial Sequence
  Description of Artificial Sequence: Synthetic oligonucleotide
  Sense strand starting at position 810 of SEQ ID NO: 587099
cucagaagguugucagaau

SEQ ID NO: 766607 - RNA, 19 nt, Artificial Sequence
  Description of Artificial Sequence: Synthetic oligonucleotide
  Antisense strand to SEQ ID NO: 766606
auucugacaaccuucugag

SEQ ID NO: 766608 - RNA, 19 nt, Artificial Sequence
  Description of Artificial Sequence: Synthetic oligonucleotide
  Sense strand starting at position 874 of SEQ ID NO: 587099
ucaauaaaugucgaucugu

SEQ ID NO: 766609 - RNA, 19 nt, Artificial Sequence
  Description of Artificial Sequence: Synthetic oligonucleotide
  Antisense strand to SEQ ID NO: 766608
acagaucgacauuuauuga

SEQ ID NO: 766610 - RNA, 19 nt, Artificial Sequence
  Description of Artificial Sequence: Synthetic oligonucleotide
  Sense strand starting at position 975 of SEQ ID NO: 587099
gcugguuggcagggaaaga

SEQ ID NO: 766611 - RNA, 19 nt, Artificial Sequence
  Description of Artificial Sequence: Synthetic oligonucleotide
  Antisense strand to SEQ ID NO: 766610
ucuuucccugccaaccagc

SEQ ID NO: 766612 - RNA, 19 nt, Artificial Sequence
  Description of Artificial Sequence: Synthetic oligonucleotide
  Sense strand starting at position 1022 of SEQ ID NO: 587099
ccuggaggacuugguuuaa

SEQ ID NO: 766613 - RNA, 19 nt, Artificial Sequence
  Description of Artificial Sequence: Synthetic oligonucleotide
  Antisense strand to SEQ ID NO: 766612
uuaaaccaaguccuccagg

SEQ ID NO: 766614 - RNA, 19 nt, Artificial Sequence
  Description of Artificial Sequence: Synthetic oligonucleotide
  Sense strand starting at position 1132 of SEQ ID NO: 587099
cuuuacugugagcacgaaa

SEQ ID NO: 766615 - RNA, 19 nt, Artificial Sequence
  Description of Artificial Sequence: Synthetic oligonucleotide
  Antisense strand to SEQ ID NO: 766614
uuucgugcucacaguaaag

SEQ ID NO: 766616 - RNA, 19 nt, Artificial Sequence
  Description of Artificial Sequence: Synthetic oligonucleotide
  Sense strand starting at position 1135 of SEQ ID NO: 587099
uacugugagcacgaaacaa

SEQ ID NO: 766617 - RNA, 19 nt, Artificial Sequence
  Description of Artificial Sequence: Synthetic oligonucleotide
  Antisense strand to SEQ ID NO: 766616
uuguuucgugcucacagua

SEQ ID NO: 766618 - RNA, 19 nt, Artificial Sequence
  Description of Artificial Sequence: Synthetic oligonucleotide
  Sense strand starting at position 1687 of SEQ ID NO: 587099
ggauacucacgguguaaag

SEQ ID NO: 766619 - RNA, 19 nt, Artificial Sequence
  Description of Artificial Sequence: Synthetic oligonucleotide
  Antisense strand to SEQ ID NO: 766618
cuuuacaccgugaguaucc

SEQ ID NO: 766620 - RNA, 19 nt, Artificial Sequence
  Description of Artificial Sequence: Synthetic oligonucleotide
  Sense strand starting at position 2469 of SEQ ID NO: 587099
agauaugugcccuauaauu

SEQ ID NO: 766621 - RNA, 19 nt, Artificial Sequence
  Description of Artificial Sequence: Synthetic oligonucleotide
  Antisense strand to SEQ ID NO: 766620
aauuauagggcacauaucu

SEQ ID NO: 766622 - RNA, 19 nt, Artificial Sequence
  Description of Artificial Sequence: Synthetic oligonucleotide
  Sense strand starting at position 2480 of SEQ ID NO: 587099
cuauaauugugaccuggac

SEQ ID NO: 766623 - RNA, 19 nt, Artificial Sequence
  Description of Artificial Sequence: Synthetic oligonucleotide
  Antisense strand to SEQ ID NO: 766622
guccaggucacaauuauag

SEQ ID NO: 766624 - RNA, 19 nt, Artificial Sequence
  Description of Artificial Sequence: Synthetic oligonucleotide
  Sense strand starting at position 2482 of SEQ ID NO: 587099
auaauugugaccuggacag

SEQ ID NO: 766625 - RNA, 19 nt, Artificial Sequence
  Description of Artificial Sequence: Synthetic oligonucleotide
  Antisense strand to SEQ ID NO: 766624
cuguccaggucacaauuau

SEQ ID NO: 766626 - RNA, 19 nt, Artificial Sequence
  Description of Artificial Sequence: Synthetic oligonucleotide
  Sense strand starting at position 2499 of SEQ ID NO: 587099
aggucagacuuauccuaca

SEQ ID NO: 766627 - RNA, 19 nt, Artificial Sequence
  Description of Artificial Sequence: Synthetic oligonucleotide
  Antisense strand to SEQ ID NO: 766626
uguaggauaagucugaccu

SEQ ID NO: 766628 - RNA, 19 nt, Artificial Sequence
  Description of Artificial Sequence: Synthetic oligonucleotide
  Sense strand starting at position 2591 of SEQ ID NO: 587099
gaugguuaauagguccaaa

SEQ ID NO: 766629 - RNA, 19 nt, Artificial Sequence
  Description of Artificial Sequence: Synthetic oligonucleotide
  Antisense strand to SEQ ID NO: 766628
uuuggaccuauuaaccauc

SEQ ID NO: 766630 - RNA, 19 nt, Artificial Sequence
  Description of Artificial Sequence: Synthetic oligonucleotide
  Sense strand starting at position 2654 of SEQ ID NO: 587099
aagugacaaucguuaauaa

SEQ ID NO: 766631 - RNA, 19 nt, Artificial Sequence
  Description of Artificial Sequence: Synthetic oligonucleotide
  Antisense strand to SEQ ID NO: 766630
uuauuaacgauugucacuu

SEQ ID NO: 766632 - RNA, 19 nt, Artificial Sequence
  Description of Artificial Sequence: Synthetic oligonucleotide
  Sense strand starting at position 2655 of SEQ ID NO: 587099
agugacaaucguuaauaag

SEQ ID NO: 766633 - RNA, 19 nt, Artificial Sequence
  Description of Artificial Sequence: Synthetic oligonucleotide
  Antisense strand to SEQ ID NO: 766632
cuuauuaacgauugucacu

SEQ ID NO: 766634 - RNA, 19 nt, Artificial Sequence
  Description of Artificial Sequence: Synthetic oligonucleotide
  Sense strand starting at position 2900 of SEQ ID NO: 587099
uguguucuggucgugaauu

SEQ ID NO: 766635 - RNA, 19 nt, Artificial Sequence
  Description of Artificial Sequence: Synthetic oligonucleotide
  Antisense strand to SEQ ID NO: 766634
aauucacgaccagaacaca

SEQ ID NO: 766636 - RNA, 19 nt, Artificial Sequence
  Description of Artificial Sequence: Synthetic oligonucleotide
  Sense strand starting at position 2902 of SEQ ID NO: 587099
uguucuggucgugaauuuc

SEQ ID NO: 766637 - RNA, 19 nt, Artificial Sequence
  Description of Artificial Sequence: Synthetic oligonucleotide
  Antisense strand to SEQ ID NO: 766636
gaaauucacgaccagaaca

SEQ ID NO: 766638 - RNA, 19 nt, Artificial Sequence
  Description of Artificial Sequence: Synthetic oligonucleotide
  Sense strand starting at position 3291 of SEQ ID NO: 587099
ggaguaaauuauguaauug

SEQ ID NO: 766639 - RNA, 19 nt, Artificial Sequence
  Description of Artificial Sequence: Synthetic oligonucleotide
  Antisense strand to SEQ ID NO: 766638
caauuacauaauuuacucc

SEQ ID NO: 766640 - RNA, 19 nt, Artificial Sequence
  Description of Artificial Sequence: Synthetic oligonucleotide
  Sense strand starting at position 3539 of SEQ ID NO: 587099
cuuugaugaugcucaacuu

SEQ ID NO: 766641 - RNA, 19 nt, Artificial Sequence
  Description of Artificial Sequence: Synthetic oligonucleotide
  Antisense strand to SEQ ID NO: 766640
aaguugagcaucaucaaag

SEQ ID NO: 766642 - RNA, 19 nt, Artificial Sequence
  Description of Artificial Sequence: Synthetic oligonucleotide
  Sense strand starting at position 3540 of SEQ ID NO: 587099
uuugaugaugcucaacuuu

SEQ ID NO: 766643 - RNA, 19 nt, Artificial Sequence
  Description of Artificial Sequence: Synthetic oligonucleotide
  Antisense strand to SEQ ID NO: 766642
aaaguugagcaucaucaaa

SEQ ID NO: 766644 - RNA, 19 nt, Artificial Sequence
  Description of Artificial Sequence: Synthetic oligonucleotide
  Sense strand starting at position 3590 of SEQ ID NO: 587099
gaggcauuggcagggaaau

SEQ ID NO: 766645 - RNA, 19 nt, Artificial Sequence
  Description of Artificial Sequence: Synthetic oligonucleotide
  Antisense strand to SEQ ID NO: 766644
auuucccugccaaugccuc

SEQ ID NO: 766646 - RNA, 19 nt, Artificial Sequence
  Description of Artificial Sequence: Synthetic oligonucleotide
  Sense strand starting at position 3632 of SEQ ID NO: 587099
gggugucaccaacauuagu

SEQ ID NO: 766647 - RNA, 19 nt, Artificial Sequence
  Description of Artificial Sequence: Synthetic oligonucleotide
  Antisense strand to SEQ ID NO: 766646
acuaauguuggugacaccc

SEQ ID NO: 766648 - RNA, 19 nt, Artificial Sequence
  Description of Artificial Sequence: Synthetic oligonucleotide
  Sense strand starting at position 3693 of SEQ ID NO: 587099
uuggcuucugcauaauauc

SEQ ID NO: 766649 - RNA, 19 nt, Artificial Sequence
  Description of Artificial Sequence: Synthetic oligonucleotide
  Antisense strand to SEQ ID NO: 766648
gauauuaugcagaagccaa

SEQ ID NO: 766650 - RNA, 19 nt, Artificial Sequence
  Description of Artificial Sequence: Synthetic oligonucleotide
  Sense strand starting at position 3789 of SEQ ID NO: 587099
ggagaugacucguucaaau

SEQ ID NO: 766651 - RNA, 19 nt, Artificial Sequence
  Description of Artificial Sequence: Synthetic oligonucleotide
  Antisense strand to SEQ ID NO: 766650
auuugaacgagucaucucc

SEQ ID NO: 766652 - RNA, 19 nt, Artificial Sequence
  Description of Artificial Sequence: Synthetic oligonucleotide
  Sense strand starting at position 104 of SEQ ID NO: 587100
uggguugacugguuaacua

SEQ ID NO: 766653 - RNA, 19 nt, Artificial Sequence
  Description of Artificial Sequence: Synthetic oligonucleotide
  Antisense strand to SEQ ID NO: 766652
uaguuaaccagucaaccca

SEQ ID NO: 766654 - RNA, 19 nt, Artificial Sequence
  Description of Artificial Sequence: Synthetic oligonucleotide
  Sense strand starting at position 188 of SEQ ID NO: 587100
ugugguucaguagaaaggu

SEQ ID NO: 766655 - RNA, 19 nt, Artificial Sequence
  Description of Artificial Sequence: Synthetic oligonucleotide
  Antisense strand to SEQ ID NO: 766654
accuuucuacugaaccaca

SEQ ID NO: 766656 - RNA, 19 nt, Artificial Sequence
  Description of Artificial Sequence: Synthetic oligonucleotide
  Sense strand starting at position 307 of SEQ ID NO: 587100
uggacaagaugucuucuaa

SEQ ID NO: 766657 - RNA, 19 nt, Artificial Sequence
  Description of Artificial Sequence: Synthetic oligonucleotide
  Antisense strand to SEQ ID NO: 766656
uuagaagacaucuugucca

SEQ ID NO: 766658 - RNA, 19 nt, Artificial Sequence
  Description of Artificial Sequence: Synthetic oligonucleotide
  Sense strand starting at position 423 of SEQ ID NO: 587100
ugggauuucucucauuugu

SEQ ID NO: 766659 - RNA, 19 nt, Artificial Sequence
  Description of Artificial Sequence: Synthetic oligonucleotide
  Antisense strand to SEQ ID NO: 766658
acaaaugagagaaauccca

SEQ ID NO: 766660 - RNA, 19 nt, Artificial Sequence
  Description of Artificial Sequence: Synthetic oligonucleotide
  Sense strand starting at position 508 of SEQ ID NO: 587100
cagcaaauggcuuagaugu

SEQ ID NO: 766661 - RNA, 19 nt, Artificial Sequence
  Description of Artificial Sequence: Synthetic oligonucleotide
  Antisense strand to SEQ ID NO: 766660
acaucuaagccauuugcug

SEQ ID NO: 766662 - RNA, 19 nt, Artificial Sequence
  Description of Artificial Sequence: Synthetic oligonucleotide
  Sense strand starting at position 682 of SEQ ID NO: 587100
gaaggaugucccuauguuc

SEQ ID NO: 766663 - RNA, 19 nt, Artificial Sequence
  Description of Artificial Sequence: Synthetic oligonucleotide
  Antisense strand to SEQ ID NO: 766662
gaacauagggacauccuuc

SEQ ID NO: 766664 - RNA, 19 nt, Artificial Sequence
  Description of Artificial Sequence: Synthetic oligonucleotide
  Sense strand starting at position 848 of SEQ ID NO: 587100
gccugcagacaugaacaua

SEQ ID NO: 766665 - RNA, 19 nt, Artificial Sequence
  Description of Artificial Sequence: Synthetic oligonucleotide
  Antisense strand to SEQ ID NO: 766664
uauguucaugucugcaggc

SEQ ID NO: 766666 - RNA, 19 nt, Artificial Sequence
  Description of Artificial Sequence: Synthetic oligonucleotide
  Sense strand starting at position 878 of SEQ ID NO: 587100
cggucaagucaacaaugaa

SEQ ID NO: 766667 - RNA, 19 nt, Artificial Sequence
  Description of Artificial Sequence: Synthetic oligonucleotide
  Antisense strand to SEQ ID NO: 766666
uucauuguugacuugaccg

SEQ ID NO: 766668 - RNA, 19 nt, Artificial Sequence
  Description of Artificial Sequence: Synthetic oligonucleotide
  Sense strand starting at position 1009 of SEQ ID NO: 587100
guuuaaagacacuggugau

SEQ ID NO: 766669 - RNA, 19 nt, Artificial Sequence
  Description of Artificial Sequence: Synthetic oligonucleotide
  Antisense strand to SEQ ID NO: 766668
aucaccagugucuuuaaac

SEQ ID NO: 766670 - RNA, 19 nt, Artificial Sequence
  Description of Artificial Sequence: Synthetic oligonucleotide
  Sense strand starting at position 1123 of SEQ ID NO: 587100
ggaggccauucuuccuaga

SEQ ID NO: 766671 - RNA, 19 nt, Artificial Sequence
  Description of Artificial Sequence: Synthetic oligonucleotide
  Antisense strand to SEQ ID NO: 766670
ucuaggaagaauggccucc

SEQ ID NO: 766672 - RNA, 19 nt, Artificial Sequence
  Description of Artificial Sequence: Synthetic oligonucleotide
  Sense strand starting at position 1188 of SEQ ID NO: 587100
agaugaugccaguaaccca

SEQ ID NO: 766673 - RNA, 19 nt, Artificial Sequence
  Description of Artificial Sequence: Synthetic oligonucleotide
  Antisense strand to SEQ ID NO: 766672
uggguuacuggcaucaucu

SEQ ID NO: 766674 - RNA, 19 nt, Artificial Sequence
  Description of Artificial Sequence: Synthetic oligonucleotide
  Sense strand starting at position 1415 of SEQ ID NO: 587100
acccaucagucuuuacuga

SEQ ID NO: 766675 - RNA, 19 nt, Artificial Sequence
  Description of Artificial Sequence: Synthetic oligonucleotide
  Antisense strand to SEQ ID NO: 766674
ucaguaaagacugaugggu

SEQ ID NO: 766676 - RNA, 19 nt, Artificial Sequence
  Description of Artificial Sequence: Synthetic oligonucleotide
  Sense strand starting at position 1416 of SEQ ID NO: 587100
cccaucagucuuuacugau

SEQ ID NO: 766677 - RNA, 19 nt, Artificial Sequence
  Description of Artificial Sequence: Synthetic oligonucleotide
  Antisense strand to SEQ ID NO: 766676
aucaguaaagacugauggg

SEQ ID NO: 766678 - RNA, 19 nt, Artificial Sequence
  Description of Artificial Sequence: Synthetic oligonucleotide
  Sense strand starting at position 2077 of SEQ ID NO: 587100
ggcugaugucacuaaguau

SEQ ID NO: 766679 - RNA, 19 nt, Artificial Sequence
  Description of Artificial Sequence: Synthetic oligonucleotide
  Antisense strand to SEQ ID NO: 766678
auacuuagugacaucagcc

SEQ ID NO: 766680 - RNA, 19 nt, Artificial Sequence
  Description of Artificial Sequence: Synthetic oligonucleotide
  Sense strand starting at position 2080 of SEQ ID NO: 587100
ugaugucacuaaguaucca

SEQ ID NO: 766681 - RNA, 19 nt, Artificial Sequence
  Description of Artificial Sequence: Synthetic oligonucleotide
  Antisense strand to SEQ ID NO: 766680
uggauacuuagugacauca

SEQ ID NO: 766682 - RNA, 19 nt, Artificial Sequence
  Description of Artificial Sequence: Synthetic oligonucleotide
  Sense strand starting at position 2125 of SEQ ID NO: 587100
ggagacaccuguucuguga

SEQ ID NO: 766683 - RNA, 19 nt, Artificial Sequence
  Description of Artificial Sequence: Synthetic oligonucleotide
  Antisense strand to SEQ ID NO: 766682
ucacagaacaggugucucc

SEQ ID NO: 766684 - RNA, 19 nt, Artificial Sequence
  Description of Artificial Sequence: Synthetic oligonucleotide
  Sense strand starting at position 2129 of SEQ ID NO: 587100
acaccuguucugugaggga

SEQ ID NO: 766685 - RNA, 19 nt, Artificial Sequence
  Description of Artificial Sequence: Synthetic oligonucleotide
  Antisense strand to SEQ ID NO: 766684
ucccucacagaacaggugu

SEQ ID NO: 766686 - RNA, 19 nt, Artificial Sequence
  Description of Artificial Sequence: Synthetic oligonucleotide
  Sense strand starting at position 2133 of SEQ ID NO: 587100
cuguucugugagggauaac

SEQ ID NO: 766687 - RNA, 19 nt, Artificial Sequence
  Description of Artificial Sequence: Synthetic oligonucleotide
  Antisense strand to SEQ ID NO: 766686
guuaucccucacagaacag

SEQ ID NO: 766688 - RNA, 19 nt, Artificial Sequence
  Description of Artificial Sequence: Synthetic oligonucleotide
  Sense strand starting at position 2134 of SEQ ID NO: 587100
uguucugugagggauaacu

SEQ ID NO: 766689 - RNA, 19 nt, Artificial Sequence
  Description of Artificial Sequence: Synthetic oligonucleotide
  Antisense strand to SEQ ID NO: 766688
aguuaucccucacagaaca

SEQ ID NO: 766690 - RNA, 19 nt, Artificial Sequence
  Description of Artificial Sequence: Synthetic oligonucleotide
  Sense strand starting at position 2519 of SEQ ID NO: 587100
aguggaaauuuggaaacau

SEQ ID NO: 766691 - RNA, 19 nt, Artificial Sequence
  Description of Artificial Sequence: Synthetic oligonucleotide
  Antisense strand to SEQ ID NO: 766690
auguuuccaaauuuccacu

SEQ ID NO: 766692 - RNA, 19 nt, Artificial Sequence
  Description of Artificial Sequence: Synthetic oligonucleotide
  Sense strand starting at position 2529 of SEQ ID NO: 587100
uggaaacaucaccgccaau

SEQ ID NO: 766693 - RNA, 19 nt, Artificial Sequence
  Description of Artificial Sequence: Synthetic oligonucleotide
  Antisense strand to SEQ ID NO: 766692
auuggcggugauguuucca

SEQ ID NO: 766694 - RNA, 19 nt, Artificial Sequence
  Description of Artificial Sequence: Synthetic oligonucleotide
  Sense strand starting at position 2903 of SEQ ID NO: 587100
gcauuacaguauuucguuu

SEQ ID NO: 766695 - RNA, 19 nt, Artificial Sequence
  Description of Artificial Sequence: Synthetic oligonucleotide
  Antisense strand to SEQ ID NO: 766694
aaacgaaauacuguaaugc

SEQ ID NO: 766696 - RNA, 19 nt, Artificial Sequence
  Description of Artificial Sequence: Synthetic oligonucleotide
  Sense strand starting at position 2930 of SEQ ID NO: 587100
uuaagaauccaguguggaa

SEQ ID NO: 766697 - RNA, 19 nt, Artificial Sequence
  Description of Artificial Sequence: Synthetic oligonucleotide
  Antisense strand to SEQ ID NO: 766696
uuccacacuggauucuuaa

SEQ ID NO: 766698 - RNA, 19 nt, Artificial Sequence
  Description of Artificial Sequence: Synthetic oligonucleotide
  Sense strand starting at position 2972 of SEQ ID NO: 587100
auaauacguuugguagaag

SEQ ID NO: 766699 - RNA, 19 nt, Artificial Sequence
  Description of Artificial Sequence: Synthetic oligonucleotide
  Antisense strand to SEQ ID NO: 766698
cuucuaccaaacguauuau

SEQ ID NO: 766700 - RNA, 19 nt, Artificial Sequence
  Description of Artificial Sequence: Synthetic oligonucleotide
  Sense strand starting at position 2975 of SEQ ID NO: 587100
auacguuugguagaagguu

SEQ ID NO: 766701 - RNA, 19 nt, Artificial Sequence
  Description of Artificial Sequence: Synthetic oligonucleotide
  Antisense strand to SEQ ID NO: 766700
aaccuucuaccaaacguau

SEQ ID NO: 766702 - RNA, 19 nt, Artificial Sequence
  Description of Artificial Sequence: Synthetic oligonucleotide
  Sense strand starting at position 2981 of SEQ ID NO: 587100
uugguagaagguuagugaa

SEQ ID NO: 766703 - RNA, 19 nt, Artificial Sequence
  Description of Artificial Sequence: Synthetic oligonucleotide
  Antisense strand to SEQ ID NO: 766702
uucacuaaccuucuaccaa

SEQ ID NO: 766704 - RNA, 19 nt, Artificial Sequence
  Description of Artificial Sequence: Synthetic oligonucleotide
  Sense strand starting at position 2983 of SEQ ID NO: 587100
gguagaagguuagugaaga

SEQ ID NO: 766705 - RNA, 19 nt, Artificial Sequence
  Description of Artificial Sequence: Synthetic oligonucleotide
  Antisense strand to SEQ ID NO: 766704
ucuucacuaaccuucuacc

SEQ ID NO: 766706 - RNA, 19 nt, Artificial Sequence
  Description of Artificial Sequence: Synthetic oligonucleotide
  Sense strand starting at position 3033 of SEQ ID NO: 587100
gauuuagaauaguagagac

SEQ ID NO: 766707 - RNA, 19 nt, Artificial Sequence
  Description of Artificial Sequence: Synthetic oligonucleotide
  Antisense strand to SEQ ID NO: 766706
gucucuacuauucuaaauc

SEQ ID NO: 766708 - RNA, 19 nt, Artificial Sequence
  Description of Artificial Sequence: Synthetic oligonucleotide
  Sense strand starting at position 3062 of SEQ ID NO: 587100
cauaauccagguggauuaa

SEQ ID NO: 766709 - RNA, 19 nt, Artificial Sequence
  Description of Artificial Sequence: Synthetic oligonucleotide
  Antisense strand to SEQ ID NO: 766708
uuaauccaccuggauuaug

SEQ ID NO: 766710 - RNA, 19 nt, Artificial Sequence
  Description of Artificial Sequence: Synthetic oligonucleotide
  Sense strand starting at position 3167 of SEQ ID NO: 587100
caggguaugcuuggaauag

SEQ ID NO: 766711 - RNA, 19 nt, Artificial Sequence
  Description of Artificial Sequence: Synthetic oligonucleotide
  Antisense strand to SEQ ID NO: 766710
cuauuccaagcauacccug

SEQ ID NO: 766712 - RNA, 19 nt, Artificial Sequence
  Description of Artificial Sequence: Synthetic oligonucleotide
  Sense strand starting at position 3179 of SEQ ID NO: 587100
ggaauagcagugggacaua

SEQ ID NO: 766713 - RNA, 19 nt, Artificial Sequence
  Description of Artificial Sequence: Synthetic oligonucleotide
  Antisense strand to SEQ ID NO: 766712
uaugucccacugcuauucc

SEQ ID NO: 766714 - RNA, 19 nt, Artificial Sequence
  Description of Artificial Sequence: Synthetic oligonucleotide
  Sense strand starting at position 3191 of SEQ ID NO: 587100
ggacauaaugcugaccgau

SEQ ID NO: 766715 - RNA, 19 nt, Artificial Sequence
  Description of Artificial Sequence: Synthetic oligonucleotide
  Antisense strand to SEQ ID NO: 766714
aucggucagcauuaugucc

SEQ ID NO: 766716 - RNA, 19 nt, Artificial Sequence
  Description of Artificial Sequence: Synthetic oligonucleotide
  Sense strand starting at position 3239 of SEQ ID NO: 587100
gcggaaguaauugaauauc

SEQ ID NO: 766717 - RNA, 19 nt, Artificial Sequence
  Description of Artificial Sequence: Synthetic oligonucleotide
  Antisense strand to SEQ ID NO: 766716
gauauucaauuacuuccgc

SEQ ID NO: 766718 - RNA, 19 nt, Artificial Sequence
  Description of Artificial Sequence: Synthetic oligonucleotide
  Sense strand starting at position 3265 of SEQ ID NO: 587100
ggaguuagugcuuaauuga

SEQ ID NO: 766719 - RNA, 19 nt, Artificial Sequence
  Description of Artificial Sequence: Synthetic oligonucleotide
  Antisense strand to SEQ ID NO: 766718
ucaauuaagcacuaacucc

SEQ ID NO: 766720 - RNA, 19 nt, Artificial Sequence
  Description of Artificial Sequence: Synthetic oligonucleotide
  Sense strand starting at position 3272 of SEQ ID NO: 587100
gugcuuaauugacuuggaa

SEQ ID NO: 766721 - RNA, 19 nt, Artificial Sequence
  Description of Artificial Sequence: Synthetic oligonucleotide
  Antisense strand to SEQ ID NO: 766720
uuccaagucaauuaagcac

SEQ ID NO: 766722 - RNA, 19 nt, Artificial Sequence
  Description of Artificial Sequence: Synthetic oligonucleotide
  Sense strand starting at position 3364 of SEQ ID NO: 587100
aaagauuuguuagaagcau

SEQ ID NO: 766723 - RNA, 19 nt, Artificial Sequence
  Description of Artificial Sequence: Synthetic oligonucleotide
  Antisense strand to SEQ ID NO: 766722
augcuucuaacaaaucuuu

SEQ ID NO: 766724 - RNA, 19 nt, Artificial Sequence
  Description of Artificial Sequence: Synthetic oligonucleotide
  Sense strand starting at position 3577 of SEQ ID NO: 587100
ggagauuacuggcccuuaa

SEQ ID NO: 766725 - RNA, 19 nt, Artificial Sequence
  Description of Artificial Sequence: Synthetic oligonucleotide
  Antisense strand to SEQ ID NO: 766724
uuaagggccaguaaucucc

SEQ ID NO: 766726 - RNA, 19 nt, Artificial Sequence
  Description of Artificial Sequence: Synthetic oligonucleotide
  Sense strand starting at position 3589 of SEQ ID NO: 587100
cccuuaacagguuaaguga

SEQ ID NO: 766727 - RNA, 19 nt, Artificial Sequence
  Description of Artificial Sequence: Synthetic oligonucleotide
  Antisense strand to SEQ ID NO: 766726
ucacuuaaccuguuaaggg

SEQ ID NO: 766728 - RNA, 19 nt, Artificial Sequence
  Description of Artificial Sequence: Synthetic oligonucleotide
  Sense strand starting at position 3664 of SEQ ID NO: 587100
gagguuaaugagugaauag

SEQ ID NO: 766729 - RNA, 19 nt, Artificial Sequence
  Description of Artificial Sequence: Synthetic oligonucleotide
  Antisense strand to SEQ ID NO: 766728
cuauucacucauuaaccuc

SEQ ID NO: 766730 - RNA, 19 nt, Artificial Sequence
  Description of Artificial Sequence: Synthetic oligonucleotide
  Sense strand starting at position 3728 of SEQ ID NO: 587100
gaccaagaugcugaauguu

SEQ ID NO: 766731 - RNA, 19 nt, Artificial Sequence
  Description of Artificial Sequence: Synthetic oligonucleotide
  Antisense strand to SEQ ID NO: 766730
aacauucagcaucuugguc

SEQ ID NO: 766732 - RNA, 19 nt, Artificial Sequence
  Description of Artificial Sequence: Synthetic oligonucleotide
  Sense strand starting at position 14 of SEQ ID NO: 587101
auguguuucccacaaagca

SEQ ID NO: 766733 - RNA, 19 nt, Artificial Sequence
  Description of Artificial Sequence: Synthetic oligonucleotide
  Antisense strand to SEQ ID NO: 766732
ugcuuugugggaaacacau

SEQ ID NO: 766734 - RNA, 19 nt, Artificial Sequence
  Description of Artificial Sequence: Synthetic oligonucleotide
  Sense strand starting at position 140 of SEQ ID NO: 587101
aggaaucgauaucuuauua

SEQ ID NO: 766735 - RNA, 19 nt, Artificial Sequence
  Description of Artificial Sequence: Synthetic oligonucleotide
  Antisense strand to SEQ ID NO: 766734
uaauaagauaucgauuccu

SEQ ID NO: 766736 - RNA, 19 nt, Artificial Sequence
  Description of Artificial Sequence: Synthetic oligonucleotide
  Sense strand starting at position 156 of SEQ ID NO: 587101
uuaaguacccuagguaauu

SEQ ID NO: 766737 - RNA, 19 nt, Artificial Sequence
  Description of Artificial Sequence: Synthetic oligonucleotide
  Antisense strand to SEQ ID NO: 766736
aauuaccuaggguacuuaa

SEQ ID NO: 766738 - RNA, 19 nt, Artificial Sequence
  Description of Artificial Sequence: Synthetic oligonucleotide
  Sense strand starting at position 167 of SEQ ID NO: 587101
agguaauuccaauguauau

SEQ ID NO: 766739 - RNA, 19 nt, Artificial Sequence
  Description of Artificial Sequence: Synthetic oligonucleotide
  Antisense strand to SEQ ID NO: 766738
auauacauuggaauuaccu

SEQ ID NO: 766740 - RNA, 19 nt, Artificial Sequence
  Description of Artificial Sequence: Synthetic oligonucleotide
  Sense strand starting at position 196 of SEQ ID NO: 587101
gaacuacugccauggagau

SEQ ID NO: 766741 - RNA, 19 nt, Artificial Sequence
  Description of Artificial Sequence: Synthetic oligonucleotide
  Antisense strand to SEQ ID NO: 766740
aucuccauggcaguaguuc

SEQ ID NO: 766742 - RNA, 19 nt, Artificial Sequence
  Description of Artificial Sequence: Synthetic oligonucleotide
  Sense strand starting at position 315 of SEQ ID NO: 587101
uggucaaggguugggauaa

SEQ ID NO: 766743 - RNA, 19 nt, Artificial Sequence
  Description of Artificial Sequence: Synthetic oligonucleotide
  Antisense strand to SEQ ID NO: 766742
uuaucccaacccuugacca

SEQ ID NO: 766744 - RNA, 19 nt, Artificial Sequence
  Description of Artificial Sequence: Synthetic oligonucleotide
  Sense strand starting at position 326 of SEQ ID NO: 587101
ugggauaagcaauguguga

SEQ ID NO: 766745 - RNA, 19 nt, Artificial Sequence
  Description of Artificial Sequence: Synthetic oligonucleotide
  Antisense strand to SEQ ID NO: 766744
ucacacauugcuuauccca

SEQ ID NO: 766746 - RNA, 19 nt, Artificial Sequence
  Description of Artificial Sequence: Synthetic oligonucleotide
  Sense strand starting at position 328 of SEQ ID NO: 587101
ggauaagcaaugugugaaa

SEQ ID NO: 766747 - RNA, 19 nt, Artificial Sequence
  Description of Artificial Sequence: Synthetic oligonucleotide
  Antisense strand to SEQ ID NO: 766746
uuucacacauugcuuaucc

SEQ ID NO: 766748 - RNA, 19 nt, Artificial Sequence
  Description of Artificial Sequence: Synthetic oligonucleotide
  Sense strand starting at position 330 of SEQ ID NO: 587101
auaagcaaugugugaaaug

SEQ ID NO: 766749 - RNA, 19 nt, Artificial Sequence
  Description of Artificial Sequence: Synthetic oligonucleotide
  Antisense strand to SEQ ID NO: 766748
cauuucacacauugcuuau

SEQ ID NO: 766750 - RNA, 19 nt, Artificial Sequence
  Description of Artificial Sequence: Synthetic oligonucleotide
  Sense strand starting at position 341 of SEQ ID NO: 587101
gugaaaugacauuguauaa

SEQ ID NO: 766751 - RNA, 19 nt, Artificial Sequence
  Description of Artificial Sequence: Synthetic oligonucleotide
  Antisense strand to SEQ ID NO: 766750
uuauacaaugucauuucac

SEQ ID NO: 766752 - RNA, 19 nt, Artificial Sequence
  Description of Artificial Sequence: Synthetic oligonucleotide
  Sense strand starting at position 778 of SEQ ID NO: 587101
guuuauagcuaacuuggaa

SEQ ID NO: 766753 - RNA, 19 nt, Artificial Sequence
  Description of Artificial Sequence: Synthetic oligonucleotide
  Antisense strand to SEQ ID NO: 766752
uuccaaguuagcuauaaac

SEQ ID NO: 766754 - RNA, 19 nt, Artificial Sequence
  Description of Artificial Sequence: Synthetic oligonucleotide
  Sense strand starting at position 801 of SEQ ID NO: 587101
gaaucugugccugacuaga

SEQ ID NO: 766755 - RNA, 19 nt, Artificial Sequence
  Description of Artificial Sequence: Synthetic oligonucleotide
  Antisense strand to SEQ ID NO: 766754
ucuagucaggcacagauuc

SEQ ID NO: 766756 - RNA, 19 nt, Artificial Sequence
  Description of Artificial Sequence: Synthetic oligonucleotide
  Sense strand starting at position 1119 of SEQ ID NO: 587101
guccaauucugauuaucag

SEQ ID NO: 766757 - RNA, 19 nt, Artificial Sequence
  Description of Artificial Sequence: Synthetic oligonucleotide
  Antisense strand to SEQ ID NO: 766756
cugauaaucagaauuggac

SEQ ID NO: 766758 - RNA, 19 nt, Artificial Sequence
  Description of Artificial Sequence: Synthetic oligonucleotide
  Sense strand starting at position 1137 of SEQ ID NO: 587101
gauuuaaacugagagugac

SEQ ID NO: 766759 - RNA, 19 nt, Artificial Sequence
  Description of Artificial Sequence: Synthetic oligonucleotide
  Antisense strand to SEQ ID NO: 766758
gucacucucaguuuaaauc

SEQ ID NO: 766760 - RNA, 19 nt, Artificial Sequence
  Description of Artificial Sequence: Synthetic oligonucleotide
  Sense strand starting at position 1150 of SEQ ID NO: 587101
agugacagcucuguaauuu

SEQ ID NO: 766761 - RNA, 19 nt, Artificial Sequence
  Description of Artificial Sequence: Synthetic oligonucleotide
  Antisense strand to SEQ ID NO: 766760
aaauuacagagcugucacu

SEQ ID NO: 766762 - RNA, 19 nt, Artificial Sequence
  Description of Artificial Sequence: Synthetic oligonucleotide
  Sense strand starting at position 1526 of SEQ ID NO: 587101
uguaacagguauucuacua

SEQ ID NO: 766763 - RNA, 19 nt, Artificial Sequence
  Description of Artificial Sequence: Synthetic oligonucleotide
  Antisense strand to SEQ ID NO: 766762
uaguagaauaccuguuaca

SEQ ID NO: 766764 - RNA, 19 nt, Artificial Sequence
  Description of Artificial Sequence: Synthetic oligonucleotide
  Sense strand starting at position 1597 of SEQ ID NO: 587101
uaucuucucuggcuagaga

SEQ ID NO: 766765 - RNA, 19 nt, Artificial Sequence
  Description of Artificial Sequence: Synthetic oligonucleotide
  Antisense strand to SEQ ID NO: 766764
ucucuagccagagaagaua

SEQ ID NO: 766766 - RNA, 19 nt, Artificial Sequence
  Description of Artificial Sequence: Synthetic oligonucleotide
  Sense strand starting at position 1598 of SEQ ID NO: 587101
aucuucucuggcuagagau

SEQ ID NO: 766767 - RNA, 19 nt, Artificial Sequence
  Description of Artificial Sequence: Synthetic oligonucleotide
  Antisense strand to SEQ ID NO: 766766
aucucuagccagagaagau

SEQ ID NO: 766768 - RNA, 19 nt, Artificial Sequence
  Description of Artificial Sequence: Synthetic oligonucleotide
  Sense strand starting at position 1619 of SEQ ID NO: 587101
uuucgcauugcuucuguca

SEQ ID NO: 766769 - RNA, 19 nt, Artificial Sequence
  Description of Artificial Sequence: Synthetic oligonucleotide
  Antisense strand to SEQ ID NO: 766768
ugacagaagcaaugcgaaa

SEQ ID NO: 766770 - RNA, 19 nt, Artificial Sequence
  Description of Artificial Sequence: Synthetic oligonucleotide
  Sense strand starting at position 1620 of SEQ ID NO: 587101
uucgcauugcuucugucau

SEQ ID NO: 766771 - RNA, 19 nt, Artificial Sequence
  Description of Artificial Sequence: Synthetic oligonucleotide
  Antisense strand to SEQ ID NO: 766770
augacagaagcaaugcgaa

SEQ ID NO: 766772 - RNA, 19 nt, Artificial Sequence
  Description of Artificial Sequence: Synthetic oligonucleotide
  Sense strand starting at position 2141 of SEQ ID NO: 587101
uuaugaguuuacuuuagga

SEQ ID NO: 766773 - RNA, 19 nt, Artificial Sequence
  Description of Artificial Sequence: Synthetic oligonucleotide
  Antisense strand to SEQ ID NO: 766772
uccuaaaguaaacucauaa

SEQ ID NO: 766774 - RNA, 19 nt, Artificial Sequence
  Description of Artificial Sequence: Synthetic oligonucleotide
  Sense strand starting at position 2334 of SEQ ID NO: 587101
guuguaguucugugauuug

SEQ ID NO: 766775 - RNA, 19 nt, Artificial Sequence
  Description of Artificial Sequence: Synthetic oligonucleotide
  Antisense strand to SEQ ID NO: 766774
caaaucacagaacuacaac

SEQ ID NO: 766776 - RNA, 19 nt, Artificial Sequence
  Description of Artificial Sequence: Synthetic oligonucleotide
  Sense strand starting at position 2431 of SEQ ID NO: 587101
ugucgauuggaugacuuaa

SEQ ID NO: 766777 - RNA, 19 nt, Artificial Sequence
  Description of Artificial Sequence: Synthetic oligonucleotide
  Antisense strand to SEQ ID NO: 766776
uuaagucauccaaucgaca

SEQ ID NO: 766778 - RNA, 19 nt, Artificial Sequence
  Description of Artificial Sequence: Synthetic oligonucleotide
  Sense strand starting at position 2433 of SEQ ID NO: 587101
ucgauuggaugacuuaauu

SEQ ID NO: 766779 - RNA, 19 nt, Artificial Sequence
  Description of Artificial Sequence: Synthetic oligonucleotide
  Antisense strand to SEQ ID NO: 766778
aauuaagucauccaaucga

SEQ ID NO: 766780 - RNA, 19 nt, Artificial Sequence
  Description of Artificial Sequence: Synthetic oligonucleotide
  Sense strand starting at position 2507 of SEQ ID NO: 587101
cacgaaaucguggaauguu

SEQ ID NO: 766781 - RNA, 19 nt, Artificial Sequence
  Description of Artificial Sequence: Synthetic oligonucleotide
  Antisense strand to SEQ ID NO: 766780
aacauuccacgauuucgug

SEQ ID NO: 766782 - RNA, 19 nt, Artificial Sequence
  Description of Artificial Sequence: Synthetic oligonucleotide
  Sense strand starting at position 2510 of SEQ ID NO: 587101
gaaaucguggaauguuaga

SEQ ID NO: 766783 - RNA, 19 nt, Artificial Sequence
  Description of Artificial Sequence: Synthetic oligonucleotide
  Antisense strand to SEQ ID NO: 766782
ucuaacauuccacgauuuc

SEQ ID NO: 766784 - RNA, 19 nt, Artificial Sequence
  Description of Artificial Sequence: Synthetic oligonucleotide
  Sense strand starting at position 2737 of SEQ ID NO: 587101
gggaaaggugagggucauu

SEQ ID NO: 766785 - RNA, 19 nt, Artificial Sequence
  Description of Artificial Sequence: Synthetic oligonucleotide
  Antisense strand to SEQ ID NO: 766784
aaugacccucaccuuuccc

SEQ ID NO: 766786 - RNA, 19 nt, Artificial Sequence
  Description of Artificial Sequence: Synthetic oligonucleotide
  Sense strand starting at position 2799 of SEQ ID NO: 587101
ucuagaugaggcuaacgua

SEQ ID NO: 766787 - RNA, 19 nt, Artificial Sequence
  Description of Artificial Sequence: Synthetic oligonucleotide
  Antisense strand to SEQ ID NO: 766786
uacguuagccucaucuaga

SEQ ID NO: 766788 - RNA, 19 nt, Artificial Sequence
  Description of Artificial Sequence: Synthetic oligonucleotide
  Sense strand starting at position 2840 of SEQ ID NO: 587101
uauugauuacacuguaagg

SEQ ID NO: 766789 - RNA, 19 nt, Artificial Sequence
  Description of Artificial Sequence: Synthetic oligonucleotide
  Antisense strand to SEQ ID NO: 766788
ccuuacaguguaaucaaua

SEQ ID NO: 766790 - RNA, 19 nt, Artificial Sequence
  Description of Artificial Sequence: Synthetic oligonucleotide
  Sense strand starting at position 3011 of SEQ ID NO: 587101
cagccauguucugugauuu

SEQ ID NO: 766791 - RNA, 19 nt, Artificial Sequence
  Description of Artificial Sequence: Synthetic oligonucleotide
  Antisense strand to SEQ ID NO: 766790
aaaucacagaacauggcug

SEQ ID NO: 766792 - RNA, 19 nt, Artificial Sequence
  Description of Artificial Sequence: Synthetic oligonucleotide
  Sense strand starting at position 3012 of SEQ ID NO: 587101
agccauguucugugauuua

SEQ ID NO: 766793 - RNA, 19 nt, Artificial Sequence
  Description of Artificial Sequence: Synthetic oligonucleotide
  Antisense strand to SEQ ID NO: 766792
uaaaucacagaacauggcu

SEQ ID NO: 766794 - RNA, 19 nt, Artificial Sequence
  Description of Artificial Sequence: Synthetic oligonucleotide
  Sense strand starting at position 3015 of SEQ ID NO: 587101
cauguucugugauuuaguu

SEQ ID NO: 766795 - RNA, 19 nt, Artificial Sequence
  Description of Artificial Sequence: Synthetic oligonucleotide
  Antisense strand to SEQ ID NO: 766794
aacuaaaucacagaacaug

SEQ ID NO: 766796 - RNA, 19 nt, Artificial Sequence
  Description of Artificial Sequence: Synthetic oligonucleotide
  Sense strand starting at position 3158 of SEQ ID NO: 587101
ccguguauuugaucaaacc

SEQ ID NO: 766797 - RNA, 19 nt, Artificial Sequence
  Description of Artificial Sequence: Synthetic oligonucleotide
  Antisense strand to SEQ ID NO: 766796
gguuugaucaaauacacgg

SEQ ID NO: 766798 - RNA, 19 nt, Artificial Sequence
  Description of Artificial Sequence: Synthetic oligonucleotide
  Sense strand starting at position 3519 of SEQ ID NO: 587101
uuggauccgaaagguuaau

SEQ ID NO: 766799 - RNA, 19 nt, Artificial Sequence
  Description of Artificial Sequence: Synthetic oligonucleotide
  Antisense strand to SEQ ID NO: 766798
auuaaccuuucggauccaa

SEQ ID NO: 766800 - RNA, 19 nt, Artificial Sequence
  Description of Artificial Sequence: Synthetic oligonucleotide
  Sense strand starting at position 3525 of SEQ ID NO: 587101
ccgaaagguuaauuauuag

SEQ ID NO: 766801 - RNA, 19 nt, Artificial Sequence
  Description of Artificial Sequence: Synthetic oligonucleotide
  Antisense strand to SEQ ID NO: 766800
cuaauaauuaaccuuucgg

SEQ ID NO: 766802 - RNA, 19 nt, Artificial Sequence
  Description of Artificial Sequence: Synthetic oligonucleotide
  Sense strand starting at position 3558 of SEQ ID NO: 587101
guuauuaauuuggugacgu

SEQ ID NO: 766803 - RNA, 19 nt, Artificial Sequence
  Description of Artificial Sequence: Synthetic oligonucleotide
  Antisense strand to SEQ ID NO: 766802
acgucaccaaauuaauaac

SEQ ID NO: 766804 - RNA, 19 nt, Artificial Sequence
  Description of Artificial Sequence: Synthetic oligonucleotide
  Sense strand starting at position 3646 of SEQ ID NO: 587101
cagugaguaugucuaagac

SEQ ID NO: 766805 - RNA, 19 nt, Artificial Sequence
  Description of Artificial Sequence: Synthetic oligonucleotide
  Antisense strand to SEQ ID NO: 766804
gucuuagacauacucacug

SEQ ID NO: 766806 - RNA, 19 nt, Artificial Sequence
  Description of Artificial Sequence: Synthetic oligonucleotide
  Sense strand starting at position 3655 of SEQ ID NO: 587101
ugucuaagaccauacaguu

SEQ ID NO: 766807 - RNA, 19 nt, Artificial Sequence
  Description of Artificial Sequence: Synthetic oligonucleotide
  Antisense strand to SEQ ID NO: 766806
aacuguauggucuuagaca

SEQ ID NO: 766808 - RNA, 19 nt, Artificial Sequence
  Description of Artificial Sequence: Synthetic oligonucleotide
  Sense strand starting at position 3876 of SEQ ID NO: 587101
gacacuauugcguaaaccu

SEQ ID NO: 766809 - RNA, 19 nt, Artificial Sequence
  Description of Artificial Sequence: Synthetic oligonucleotide
  Antisense strand to SEQ ID NO: 766808
agguuuacgcaauaguguc

SEQ ID NO: 766810 - RNA, 19 nt, Artificial Sequence
  Description of Artificial Sequence: Synthetic oligonucleotide
  Sense strand starting at position 3949 of SEQ ID NO: 587101
acauuagccuaaguaagaa

SEQ ID NO: 766811 - RNA, 19 nt, Artificial Sequence
  Description of Artificial Sequence: Synthetic oligonucleotide
  Antisense strand to SEQ ID NO: 766810
uucuuacuuaggcuaaugu

SEQ ID NO: 766812 - RNA, 19 nt, Artificial Sequence
  Description of Artificial Sequence: Synthetic oligonucleotide
  Sense strand starting at position 80 of SEQ ID NO: 587102
gccugucucgaauguggga

SEQ ID NO: 766813 - RNA, 19 nt, Artificial Sequence
  Description of Artificial Sequence: Synthetic oligonucleotide
  Antisense strand to SEQ ID NO: 766812
ucccacauucgagacaggc

SEQ ID NO: 766814 - RNA, 19 nt, Artificial Sequence
  Description of Artificial Sequence: Synthetic oligonucleotide
  Sense strand starting at position 82 of SEQ ID NO: 587102
cugucucgaaugugggaau

SEQ ID NO: 766815 - RNA, 19 nt, Artificial Sequence
  Description of Artificial Sequence: Synthetic oligonucleotide
  Antisense strand to SEQ ID NO: 766814
auucccacauucgagacag

SEQ ID NO: 766816 - RNA, 19 nt, Artificial Sequence
  Description of Artificial Sequence: Synthetic oligonucleotide
  Sense strand starting at position 250 of SEQ ID NO: 587102
cagagaacuuuccaaagug

SEQ ID NO: 766817 - RNA, 19 nt, Artificial Sequence
  Description of Artificial Sequence: Synthetic oligonucleotide
  Antisense strand to SEQ ID NO: 766816
cacuuuggaaaguucucug

SEQ ID NO: 766818 - RNA, 19 nt, Artificial Sequence
  Description of Artificial Sequence: Synthetic oligonucleotide
  Sense strand starting at position 296 of SEQ ID NO: 587102
gaguccuccagggacaagu

SEQ ID NO: 766819 - RNA, 19 nt, Artificial Sequence
  Description of Artificial Sequence: Synthetic oligonucleotide
  Antisense strand to SEQ ID NO: 766818
acuugucccuggaggacuc

SEQ ID NO: 766820 - RNA, 19 nt, Artificial Sequence
  Description of Artificial Sequence: Synthetic oligonucleotide
  Sense strand starting at position 320 of SEQ ID NO: 587102
agccaucagcauggaauaa

SEQ ID NO: 766821 - RNA, 19 nt, Artificial Sequence
  Description of Artificial Sequence: Synthetic oligonucleotide
  Antisense strand to SEQ ID NO: 766820
uuauuccaugcugauggcu

SEQ ID NO: 766822 - RNA, 19 nt, Artificial Sequence
  Description of Artificial Sequence: Synthetic oligonucleotide
  Sense strand starting at position 331 of SEQ ID NO: 587102
uggaauaaguuccagaagu

SEQ ID NO: 766823 - RNA, 19 nt, Artificial Sequence
  Description of Artificial Sequence: Synthetic oligonucleotide
  Antisense strand to SEQ ID NO: 766822
acuucuggaacuuauucca

SEQ ID NO: 766824 - RNA, 19 nt, Artificial Sequence
  Description of Artificial Sequence: Synthetic oligonucleotide
  Sense strand starting at position 341 of SEQ ID NO: 587102
uccagaaguuccugaaugu

SEQ ID NO: 766825 - RNA, 19 nt, Artificial Sequence
  Description of Artificial Sequence: Synthetic oligonucleotide
  Antisense strand to SEQ ID NO: 766824
acauucaggaacuucugga

SEQ ID NO: 766826 - RNA, 19 nt, Artificial Sequence
  Description of Artificial Sequence: Synthetic oligonucleotide
  Sense strand starting at position 342 of SEQ ID NO: 587102
ccagaaguuccugaaugug

SEQ ID NO: 766827 - RNA, 19 nt, Artificial Sequence
  Description of Artificial Sequence: Synthetic oligonucleotide
  Antisense strand to SEQ ID NO: 766826
cacauucaggaacuucugg

SEQ ID NO: 766828 - RNA, 19 nt, Artificial Sequence
  Description of Artificial Sequence: Synthetic oligonucleotide
  Sense strand starting at position 345 of SEQ ID NO: 587102
gaaguuccugaaugugcau

SEQ ID NO: 766829 - RNA, 19 nt, Artificial Sequence
  Description of Artificial Sequence: Synthetic oligonucleotide
  Antisense strand to SEQ ID NO: 766828
augcacauucaggaacuuc

SEQ ID NO: 766830 - RNA, 19 nt, Artificial Sequence
  Description of Artificial Sequence: Synthetic oligonucleotide
  Sense strand starting at position 403 of SEQ ID NO: 587102
gaacgcaggcgugagauuu

SEQ ID NO: 766831 - RNA, 19 nt, Artificial Sequence
  Description of Artificial Sequence: Synthetic oligonucleotide
  Antisense strand to SEQ ID NO: 766830
aaaucucacgccugcguuc

SEQ ID NO: 766832 - RNA, 19 nt, Artificial Sequence
  Description of Artificial Sequence: Synthetic oligonucleotide
  Sense strand starting at position 490 of SEQ ID NO: 587102
uuccucaucuguuaggaaa

SEQ ID NO: 766833 - RNA, 19 nt, Artificial Sequence
  Description of Artificial Sequence: Synthetic oligonucleotide
  Antisense strand to SEQ ID NO: 766832
uuuccuaacagaugaggaa

SEQ ID NO: 766834 - RNA, 19 nt, Artificial Sequence
  Description of Artificial Sequence: Synthetic oligonucleotide
  Sense strand starting at position 628 of SEQ ID NO: 587102
caacgcaguucugaagagu

SEQ ID NO: 766835 - RNA, 19 nt, Artificial Sequence
  Description of Artificial Sequence: Synthetic oligonucleotide
  Antisense strand to SEQ ID NO: 766834
acucuucagaacugcguug

SEQ ID NO: 766836 - RNA, 19 nt, Artificial Sequence
  Description of Artificial Sequence: Synthetic oligonucleotide
  Sense strand starting at position 631 of SEQ ID NO: 587102
cgcaguucugaagagucca

SEQ ID NO: 766837 - RNA, 19 nt, Artificial Sequence
  Description of Artificial Sequence: Synthetic oligonucleotide
  Antisense strand to SEQ ID NO: 766836
uggacucuucagaacugcg

SEQ ID NO: 766838 - RNA, 19 nt, Artificial Sequence
  Description of Artificial Sequence: Synthetic oligonucleotide
  Sense strand starting at position 728 of SEQ ID NO: 587102
cugccaugauccguccaga

SEQ ID NO: 766839 - RNA, 19 nt, Artificial Sequence
  Description of Artificial Sequence: Synthetic oligonucleotide
  Antisense strand to SEQ ID NO: 766838
ucuggacggaucauggcag

SEQ ID NO: 766840 - RNA, 19 nt, Artificial Sequence
  Description of Artificial Sequence: Synthetic oligonucleotide
  Sense strand starting at position 731 of SEQ ID NO: 587102
ccaugauccguccagagag

SEQ ID NO: 766841 - RNA, 19 nt, Artificial Sequence
  Description of Artificial Sequence: Synthetic oligonucleotide
  Antisense strand to SEQ ID NO: 766840
cucucuggacggaucaugg

SEQ ID NO: 766842 - RNA, 19 nt, Artificial Sequence
  Description of Artificial Sequence: Synthetic oligonucleotide
  Sense strand starting at position 1389 of SEQ ID NO: 587102
gggccuuagugacaccaga

SEQ ID NO: 766843 - RNA, 19 nt, Artificial Sequence
  Description of Artificial Sequence: Synthetic oligonucleotide
  Antisense strand to SEQ ID NO: 766842
ucuggugucacuaaggccc

SEQ ID NO: 766844 - RNA, 19 nt, Artificial Sequence
  Description of Artificial Sequence: Synthetic oligonucleotide
  Sense strand starting at position 1482 of SEQ ID NO: 587102
aggccaugacccuggaaga

SEQ ID NO: 766845 - RNA, 19 nt, Artificial Sequence
  Description of Artificial Sequence: Synthetic oligonucleotide
  Antisense strand to SEQ ID NO: 766844
ucuuccagggucauggccu

SEQ ID NO: 766846 - RNA, 19 nt, Artificial Sequence
  Description of Artificial Sequence: Synthetic oligonucleotide
  Sense strand starting at position 1483 of SEQ ID NO: 587102
ggccaugacccuggaagaa

SEQ ID NO: 766847 - RNA, 19 nt, Artificial Sequence
  Description of Artificial Sequence: Synthetic oligonucleotide
  Antisense strand to SEQ ID NO: 766846
uucuuccagggucauggcc

SEQ ID NO: 766848 - RNA, 19 nt, Artificial Sequence
  Description of Artificial Sequence: Synthetic oligonucleotide
  Sense strand starting at position 1497 of SEQ ID NO: 587102
aagaaaggguccuaggacu

SEQ ID NO: 766849 - RNA, 19 nt, Artificial Sequence
  Description of Artificial Sequence: Synthetic oligonucleotide
  Antisense strand to SEQ ID NO: 766848
aguccuaggacccuuucuu

SEQ ID NO: 766850 - RNA, 19 nt, Artificial Sequence
  Description of Artificial Sequence: Synthetic oligonucleotide
  Sense strand starting at position 2306 of SEQ ID NO: 587102
cgccucuguaccgucauua

SEQ ID NO: 766851 - RNA, 19 nt, Artificial Sequence
  Description of Artificial Sequence: Synthetic oligonucleotide
  Antisense strand to SEQ ID NO: 766850
uaaugacgguacagaggcg

SEQ ID NO: 766852 - RNA, 19 nt, Artificial Sequence
  Description of Artificial Sequence: Synthetic oligonucleotide
  Sense strand starting at position 2319 of SEQ ID NO: 587102
ucauuaguccgccggcaga

SEQ ID NO: 766853 - RNA, 19 nt, Artificial Sequence
  Description of Artificial Sequence: Synthetic oligonucleotide
  Antisense strand to SEQ ID NO: 766852
ucugccggcggacuaauga

SEQ ID NO: 766854 - RNA, 19 nt, Artificial Sequence
  Description of Artificial Sequence: Synthetic oligonucleotide
  Sense strand starting at position 2399 of SEQ ID NO: 587102
gacccucagcgcuguaaga

SEQ ID NO: 766855 - RNA, 19 nt, Artificial Sequence
  Description of Artificial Sequence: Synthetic oligonucleotide
  Antisense strand to SEQ ID NO: 766854
ucuuacagcgcugaggguc

SEQ ID NO: 766856 - RNA, 19 nt, Artificial Sequence
  Description of Artificial Sequence: Synthetic oligonucleotide
  Sense strand starting at position 2517 of SEQ ID NO: 587102
uugcauguuucuuauuuga

SEQ ID NO: 766857 - RNA, 19 nt, Artificial Sequence
  Description of Artificial Sequence: Synthetic oligonucleotide
  Antisense strand to SEQ ID NO: 766856
ucaaauaagaaacaugcaa

SEQ ID NO: 766858 - RNA, 19 nt, Artificial Sequence
  Description of Artificial Sequence: Synthetic oligonucleotide
  Sense strand starting at position 2519 of SEQ ID NO: 587102
gcauguuucuuauuugacu

SEQ ID NO: 766859 - RNA, 19 nt, Artificial Sequence
  Description of Artificial Sequence: Synthetic oligonucleotide
  Antisense strand to SEQ ID NO: 766858
agucaaauaagaaacaugc

SEQ ID NO: 766860 - RNA, 19 nt, Artificial Sequence
  Description of Artificial Sequence: Synthetic oligonucleotide
  Sense strand starting at position 2627 of SEQ ID NO: 587102
aguggccuaucuguacaau

SEQ ID NO: 766861 - RNA, 19 nt, Artificial Sequence
  Description of Artificial Sequence: Synthetic oligonucleotide
  Antisense strand to SEQ ID NO: 766860
auuguacagauaggccacu

SEQ ID NO: 766862 - RNA, 19 nt, Artificial Sequence
  Description of Artificial Sequence: Synthetic oligonucleotide
  Sense strand starting at position 2630 of SEQ ID NO: 587102
ggccuaucuguacaaugga

SEQ ID NO: 766863 - RNA, 19 nt, Artificial Sequence
  Description of Artificial Sequence: Synthetic oligonucleotide
  Antisense strand to SEQ ID NO: 766862
uccauuguacagauaggcc

SEQ ID NO: 766864 - RNA, 19 nt, Artificial Sequence
  Description of Artificial Sequence: Synthetic oligonucleotide
  Sense strand starting at position 2633 of SEQ ID NO: 587102
cuaucuguacaauggacau

SEQ ID NO: 766865 - RNA, 19 nt, Artificial Sequence
  Description of Artificial Sequence: Synthetic oligonucleotide
  Antisense strand to SEQ ID NO: 766864
auguccauuguacagauag

SEQ ID NO: 766866 - RNA, 19 nt, Artificial Sequence
  Description of Artificial Sequence: Synthetic oligonucleotide
  Sense strand starting at position 2678 of SEQ ID NO: 587102
caccuagagcugugugauc

SEQ ID NO: 766867 - RNA, 19 nt, Artificial Sequence
  Description of Artificial Sequence: Synthetic oligonucleotide
  Antisense strand to SEQ ID NO: 766866
gaucacacagcucuaggug

SEQ ID NO: 766868 - RNA, 19 nt, Artificial Sequence
  Description of Artificial Sequence: Synthetic oligonucleotide
  Sense strand starting at position 2725 of SEQ ID NO: 587102
aucgguguccuugucugua

SEQ ID NO: 766869 - RNA, 19 nt, Artificial Sequence
  Description of Artificial Sequence: Synthetic oligonucleotide
  Antisense strand to SEQ ID NO: 766868
uacagacaaggacaccgau

SEQ ID NO: 766870 - RNA, 19 nt, Artificial Sequence
  Description of Artificial Sequence: Synthetic oligonucleotide
  Sense strand starting at position 2749 of SEQ ID NO: 587102
ggaugauaaagcuacgagu

SEQ ID NO: 766871 - RNA, 19 nt, Artificial Sequence
  Description of Artificial Sequence: Synthetic oligonucleotide
  Antisense strand to SEQ ID NO: 766870
acucguagcuuuaucaucc

SEQ ID NO: 766872 - RNA, 19 nt, Artificial Sequence
  Description of Artificial Sequence: Synthetic oligonucleotide
  Sense strand starting at position 2752 of SEQ ID NO: 587102
ugauaaagcuacgaguguu

SEQ ID NO: 766873 - RNA, 19 nt, Artificial Sequence
  Description of Artificial Sequence: Synthetic oligonucleotide
  Antisense strand to SEQ ID NO: 766872
aacacucguagcuuuauca

SEQ ID NO: 766874 - RNA, 19 nt, Artificial Sequence
  Description of Artificial Sequence: Synthetic oligonucleotide
  Sense strand starting at position 2968 of SEQ ID NO: 587102
auugcuuggaccugcgaga

SEQ ID NO: 766875 - RNA, 19 nt, Artificial Sequence
  Description of Artificial Sequence: Synthetic oligonucleotide
  Antisense strand to SEQ ID NO: 766874
ucucgcagguccaagcaau

SEQ ID NO: 766876 - RNA, 19 nt, Artificial Sequence
  Description of Artificial Sequence: Synthetic oligonucleotide
  Sense strand starting at position 3084 of SEQ ID NO: 587102
guacgaguguuaaguggau

SEQ ID NO: 766877 - RNA, 19 nt, Artificial Sequence
  Description of Artificial Sequence: Synthetic oligonucleotide
  Antisense strand to SEQ ID NO: 766876
auccacuuaacacucguac

SEQ ID NO: 766878 - RNA, 19 nt, Artificial Sequence
  Description of Artificial Sequence: Synthetic oligonucleotide
  Sense strand starting at position 3096 of SEQ ID NO: 587102
aguggauccgcagguagau

SEQ ID NO: 766879 - RNA, 19 nt, Artificial Sequence
  Description of Artificial Sequence: Synthetic oligonucleotide
  Antisense strand to SEQ ID NO: 766878
aucuaccugcggauccacu

SEQ ID NO: 766880 - RNA, 19 nt, Artificial Sequence
  Description of Artificial Sequence: Synthetic oligonucleotide
  Sense strand starting at position 3447 of SEQ ID NO: 587102
ccuccuguguacugagaaa

SEQ ID NO: 766881 - RNA, 19 nt, Artificial Sequence
  Description of Artificial Sequence: Synthetic oligonucleotide
  Antisense strand to SEQ ID NO: 766880
uuucucaguacacaggagg

SEQ ID NO: 766882 - RNA, 19 nt, Artificial Sequence
  Description of Artificial Sequence: Synthetic oligonucleotide
  Sense strand starting at position 3689 of SEQ ID NO: 587102
gcuggauaacuuggagaca

SEQ ID NO: 766883 - RNA, 19 nt, Artificial Sequence
  Description of Artificial Sequence: Synthetic oligonucleotide
  Antisense strand to SEQ ID NO: 766882
ugucuccaaguuauccagc

SEQ ID NO: 766884 - RNA, 19 nt, Artificial Sequence
  Description of Artificial Sequence: Synthetic oligonucleotide
  Sense strand starting at position 3921 of SEQ ID NO: 587102
ccaggugaguccucuucuu

SEQ ID NO: 766885 - RNA, 19 nt, Artificial Sequence
  Description of Artificial Sequence: Synthetic oligonucleotide
  Antisense strand to SEQ ID NO: 766884
aagaagaggacucaccugg

SEQ ID NO: 766886 - RNA, 19 nt, Artificial Sequence
  Description of Artificial Sequence: Synthetic oligonucleotide
  Sense strand starting at position 3948 of SEQ ID NO: 587102
gcugauugcucacugugaa

SEQ ID NO: 766887 - RNA, 19 nt, Artificial Sequence
  Description of Artificial Sequence: Synthetic oligonucleotide
  Antisense strand to SEQ ID NO: 766886
uucacagugagcaaucagc

SEQ ID NO: 766888 - RNA, 19 nt, Artificial Sequence
  Description of Artificial Sequence: Synthetic oligonucleotide
  Sense strand starting at position 3949 of SEQ ID NO: 587102
cugauugcucacugugaac

SEQ ID NO: 766889 - RNA, 19 nt, Artificial Sequence
  Description of Artificial Sequence: Synthetic oligonucleotide
  Antisense strand to SEQ ID NO: 766888
guucacagugagcaaucag

SEQ ID NO: 766890 - RNA, 19 nt, Artificial Sequence
  Description of Artificial Sequence: Synthetic oligonucleotide
  Sense strand starting at position 3951 of SEQ ID NO: 587102
gauugcucacugugaacag

SEQ ID NO: 766891 - RNA, 19 nt, Artificial Sequence
  Description of Artificial Sequence: Synthetic oligonucleotide
  Antisense strand to SEQ ID NO: 766890
cuguucacagugagcaauc

SEQ ID NO: 766892 - RNA, 19 nt, Artificial Sequence
  Description of Artificial Sequence: Synthetic oligonucleotide
  Sense strand starting at position 42 of SEQ ID NO: 587103
uucuaaagguguucuuaua

SEQ ID NO: 766893 - RNA, 19 nt, Artificial Sequence
  Description of Artificial Sequence: Synthetic oligonucleotide
  Antisense strand to SEQ ID NO: 766892
uauaagaacaccuuuagaa

SEQ ID NO: 766894 - RNA, 19 nt, Artificial Sequence
  Description of Artificial Sequence: Synthetic oligonucleotide
  Sense strand starting at position 53 of SEQ ID NO: 587103
uucuuauaguuccucugau

SEQ ID NO: 766895 - RNA, 19 nt, Artificial Sequence
  Description of Artificial Sequence: Synthetic oligonucleotide
  Antisense strand to SEQ ID NO: 766894
aucagaggaacuauaagaa

SEQ ID NO: 766896 - RNA, 19 nt, Artificial Sequence
  Description of Artificial Sequence: Synthetic oligonucleotide
  Sense strand starting at position 54 of SEQ ID NO: 587103
ucuuauaguuccucugauu

SEQ ID NO: 766897 - RNA, 19 nt, Artificial Sequence
  Description of Artificial Sequence: Synthetic oligonucleotide
  Antisense strand to SEQ ID NO: 766896
aaucagaggaacuauaaga

SEQ ID NO: 766898 - RNA, 19 nt, Artificial Sequence
  Description of Artificial Sequence: Synthetic oligonucleotide
  Sense strand starting at position 132 of SEQ ID NO: 587103
gcacgaccucuugagaaug

SEQ ID NO: 766899 - RNA, 19 nt, Artificial Sequence
  Description of Artificial Sequence: Synthetic oligonucleotide
  Antisense strand to SEQ ID NO: 766898
cauucucaagaggucgugc

SEQ ID NO: 766900 - RNA, 19 nt, Artificial Sequence
  Description of Artificial Sequence: Synthetic oligonucleotide
  Sense strand starting at position 222 of SEQ ID NO: 587103
ucagacuucuaucagaaug

SEQ ID NO: 766901 - RNA, 19 nt, Artificial Sequence
  Description of Artificial Sequence: Synthetic oligonucleotide
  Antisense strand to SEQ ID NO: 766900
cauucugauagaagucuga

SEQ ID NO: 766902 - RNA, 19 nt, Artificial Sequence
  Description of Artificial Sequence: Synthetic oligonucleotide
  Sense strand starting at position 224 of SEQ ID NO: 587103
agacuucuaucagaaugca

SEQ ID NO: 766903 - RNA, 19 nt, Artificial Sequence
  Description of Artificial Sequence: Synthetic oligonucleotide
  Antisense strand to SEQ ID NO: 766902
ugcauucugauagaagucu

SEQ ID NO: 766904 - RNA, 19 nt, Artificial Sequence
  Description of Artificial Sequence: Synthetic oligonucleotide
  Sense strand starting at position 325 of SEQ ID NO: 587103
acgcccuguuucuuugaau

SEQ ID NO: 766905 - RNA, 19 nt, Artificial Sequence
  Description of Artificial Sequence: Synthetic oligonucleotide
  Antisense strand to SEQ ID NO: 766904
auucaaagaaacagggcgu

SEQ ID NO: 766906 - RNA, 19 nt, Artificial Sequence
  Description of Artificial Sequence: Synthetic oligonucleotide
  Sense strand starting at position 326 of SEQ ID NO: 587103
cgcccuguuucuuugaauu

SEQ ID NO: 766907 - RNA, 19 nt, Artificial Sequence
  Description of Artificial Sequence: Synthetic oligonucleotide
  Antisense strand to SEQ ID NO: 766906
aauucaaagaaacagggcg

SEQ ID NO: 766908 - RNA, 19 nt, Artificial Sequence
  Description of Artificial Sequence: Synthetic oligonucleotide
  Sense strand starting at position 328 of SEQ ID NO: 587103
cccuguuucuuugaauuug

SEQ ID NO: 766909 - RNA, 19 nt, Artificial Sequence
  Description of Artificial Sequence: Synthetic oligonucleotide
  Antisense strand to SEQ ID NO: 766908
caaauucaaagaaacaggg

SEQ ID NO: 766910 - RNA, 19 nt, Artificial Sequence
  Description of Artificial Sequence: Synthetic oligonucleotide
  Sense strand starting at position 484 of SEQ ID NO: 587103
gggagucgguuauuguuua

SEQ ID NO: 766911 - RNA, 19 nt, Artificial Sequence
  Description of Artificial Sequence: Synthetic oligonucleotide
  Antisense strand to SEQ ID NO: 766910
uaaacaauaaccgacuccc

SEQ ID NO: 766912 - RNA, 19 nt, Artificial Sequence
  Description of Artificial Sequence: Synthetic oligonucleotide
  Sense strand starting at position 526 of SEQ ID NO: 587103
acuagugagcacuguucuu

SEQ ID NO: 766913 - RNA, 19 nt, Artificial Sequence
  Description of Artificial Sequence: Synthetic oligonucleotide
  Antisense strand to SEQ ID NO: 766912
aagaacagugcucacuagu

SEQ ID NO: 766914 - RNA, 19 nt, Artificial Sequence
  Description of Artificial Sequence: Synthetic oligonucleotide
  Sense strand starting at position 1207 of SEQ ID NO: 587103
gucugaaucuugcucagcu

SEQ ID NO: 766915 - RNA, 19 nt, Artificial Sequence
  Description of Artificial Sequence: Synthetic oligonucleotide
  Antisense strand to SEQ ID NO: 766914
agcugagcaagauucagac

SEQ ID NO: 766916 - RNA, 19 nt, Artificial Sequence
  Description of Artificial Sequence: Synthetic oligonucleotide
  Sense strand starting at position 1208 of SEQ ID NO: 587103
ucugaaucuugcucagcuu

SEQ ID NO: 766917 - RNA, 19 nt, Artificial Sequence
  Description of Artificial Sequence: Synthetic oligonucleotide
  Antisense strand to SEQ ID NO: 766916
aagcugagcaagauucaga

SEQ ID NO: 766918 - RNA, 19 nt, Artificial Sequence
  Description of Artificial Sequence: Synthetic oligonucleotide
  Sense strand starting at position 1328 of SEQ ID NO: 587103
ucugcagcuccucguaaga

SEQ ID NO: 766919 - RNA, 19 nt, Artificial Sequence
  Description of Artificial Sequence: Synthetic oligonucleotide
  Antisense strand to SEQ ID NO: 766918
ucuuacgaggagcugcaga

SEQ ID NO: 766920 - RNA, 19 nt, Artificial Sequence
  Description of Artificial Sequence: Synthetic oligonucleotide
  Sense strand starting at position 2030 of SEQ ID NO: 587103
ugucauuggccugacguga

SEQ ID NO: 766921 - RNA, 19 nt, Artificial Sequence
  Description of Artificial Sequence: Synthetic oligonucleotide
  Antisense strand to SEQ ID NO: 766920
ucacgucaggccaaugaca

SEQ ID NO: 766922 - RNA, 19 nt, Artificial Sequence
  Description of Artificial Sequence: Synthetic oligonucleotide
  Sense strand starting at position 2073 of SEQ ID NO: 587103
auaggaaaguuuccgcuuu

SEQ ID NO: 766923 - RNA, 19 nt, Artificial Sequence
  Description of Artificial Sequence: Synthetic oligonucleotide
  Antisense strand to SEQ ID NO: 766922
aaagcggaaacuuuccuau

SEQ ID NO: 766924 - RNA, 19 nt, Artificial Sequence
  Description of Artificial Sequence: Synthetic oligonucleotide
  Sense strand starting at position 2405 of SEQ ID NO: 587103
ugucucaucucgcccaaga

SEQ ID NO: 766925 - RNA, 19 nt, Artificial Sequence
  Description of Artificial Sequence: Synthetic oligonucleotide
  Antisense strand to SEQ ID NO: 766924
ucuugggcgagaugagaca

SEQ ID NO: 766926 - RNA, 19 nt, Artificial Sequence
  Description of Artificial Sequence: Synthetic oligonucleotide
  Sense strand starting at position 2734 of SEQ ID NO: 587103
ucggaaggugcucgaaaga

SEQ ID NO: 766927 - RNA, 19 nt, Artificial Sequence
  Description of Artificial Sequence: Synthetic oligonucleotide
  Antisense strand to SEQ ID NO: 766926
ucuuucgagcaccuuccga

SEQ ID NO: 766928 - RNA, 19 nt, Artificial Sequence
  Description of Artificial Sequence: Synthetic oligonucleotide
  Sense strand starting at position 2762 of SEQ ID NO: 587103
ucacucuucgguggaagga

SEQ ID NO: 766929 - RNA, 19 nt, Artificial Sequence
  Description of Artificial Sequence: Synthetic oligonucleotide
  Antisense strand to SEQ ID NO: 766928
uccuuccaccgaagaguga

SEQ ID NO: 766930 - RNA, 19 nt, Artificial Sequence
  Description of Artificial Sequence: Synthetic oligonucleotide
  Sense strand starting at position 2913 of SEQ ID NO: 587103
uccgcauugugaccuugaa

SEQ ID NO: 766931 - RNA, 19 nt, Artificial Sequence
  Description of Artificial Sequence: Synthetic oligonucleotide
  Antisense strand to SEQ ID NO: 766930
uucaaggucacaaugcgga

SEQ ID NO: 766932 - RNA, 19 nt, Artificial Sequence
  Description of Artificial Sequence: Synthetic oligonucleotide
  Sense strand starting at position 2962 of SEQ ID NO: 587103
uuugauagcgccuagacau

SEQ ID NO: 766933 - RNA, 19 nt, Artificial Sequence
  Description of Artificial Sequence: Synthetic oligonucleotide
  Antisense strand to SEQ ID NO: 766932
augucuaggcgcuaucaaa

SEQ ID NO: 766934 - RNA, 19 nt, Artificial Sequence
  Description of Artificial Sequence: Synthetic oligonucleotide
  Sense strand starting at position 3028 of SEQ ID NO: 587103
agggcauccaguggacaau

SEQ ID NO: 766935 - RNA, 19 nt, Artificial Sequence
  Description of Artificial Sequence: Synthetic oligonucleotide
  Antisense strand to SEQ ID NO: 766934
auuguccacuggaugcccu

SEQ ID NO: 766936 - RNA, 19 nt, Artificial Sequence
  Description of Artificial Sequence: Synthetic oligonucleotide
  Sense strand starting at position 3029 of SEQ ID NO: 587103
gggcauccaguggacaauu

SEQ ID NO: 766937 - RNA, 19 nt, Artificial Sequence
  Description of Artificial Sequence: Synthetic oligonucleotide
  Antisense strand to SEQ ID NO: 766936
aauuguccacuggaugccc

SEQ ID NO: 766938 - RNA, 19 nt, Artificial Sequence
  Description of Artificial Sequence: Synthetic oligonucleotide
  Sense strand starting at position 3093 of SEQ ID NO: 587103
uuaagcauuucugucugua

SEQ ID NO: 766939 - RNA, 19 nt, Artificial Sequence
  Description of Artificial Sequence: Synthetic oligonucleotide
  Antisense strand to SEQ ID NO: 766938
uacagacagaaaugcuuaa

SEQ ID NO: 766940 - RNA, 19 nt, Artificial Sequence
  Description of Artificial Sequence: Synthetic oligonucleotide
  Sense strand starting at position 3095 of SEQ ID NO: 587103
aagcauuucugucuguaag

SEQ ID NO: 766941 - RNA, 19 nt, Artificial Sequence
  Description of Artificial Sequence: Synthetic oligonucleotide
  Antisense strand to SEQ ID NO: 766940
cuuacagacagaaaugcuu

SEQ ID NO: 766942 - RNA, 19 nt, Artificial Sequence
  Description of Artificial Sequence: Synthetic oligonucleotide
  Sense strand starting at position 3096 of SEQ ID NO: 587103
agcauuucugucuguaagu

SEQ ID NO: 766943 - RNA, 19 nt, Artificial Sequence
  Description of Artificial Sequence: Synthetic oligonucleotide
  Antisense strand to SEQ ID NO: 766942
acuuacagacagaaaugcu

SEQ ID NO: 766944 - RNA, 19 nt, Artificial Sequence
  Description of Artificial Sequence: Synthetic oligonucleotide
  Sense strand starting at position 3097 of SEQ ID NO: 587103
gcauuucugucuguaaguu

SEQ ID NO: 766945 - RNA, 19 nt, Artificial Sequence
  Description of Artificial Sequence: Synthetic oligonucleotide
  Antisense strand to SEQ ID NO: 766944
aacuuacagacagaaaugc

SEQ ID NO: 766946 - RNA, 19 nt, Artificial Sequence
  Description of Artificial Sequence: Synthetic oligonucleotide
  Sense strand starting at position 3130 of SEQ ID NO: 587103
caaagaggguguuaaugua

SEQ ID NO: 766947 - RNA, 19 nt, Artificial Sequence
  Description of Artificial Sequence: Synthetic oligonucleotide
  Antisense strand to SEQ ID NO: 766946
uacauuaacacccucuuug

SEQ ID NO: 766948 - RNA, 19 nt, Artificial Sequence
  Description of Artificial Sequence: Synthetic oligonucleotide
  Sense strand starting at position 3191 of SEQ ID NO: 587103
ggaagucgccuuggauaag

SEQ ID NO: 766949 - RNA, 19 nt, Artificial Sequence
  Description of Artificial Sequence: Synthetic oligonucleotide
  Antisense strand to SEQ ID NO: 766948
cuuauccaaggcgacuucc

SEQ ID NO: 766950 - RNA, 19 nt, Artificial Sequence
  Description of Artificial Sequence: Synthetic oligonucleotide
  Sense strand starting at position 3372 of SEQ ID NO: 587103
gcuggaguacccugcacau

SEQ ID NO: 766951 - RNA, 19 nt, Artificial Sequence
  Description of Artificial Sequence: Synthetic oligonucleotide
  Antisense strand to SEQ ID NO: 766950
augugcaggguacuccagc

SEQ ID NO: 766952 - RNA, 19 nt, Artificial Sequence
  Description of Artificial Sequence: Synthetic oligonucleotide
  Sense strand starting at position 3374 of SEQ ID NO: 587103
uggaguacccugcacauaa

SEQ ID NO: 766953 - RNA, 19 nt, Artificial Sequence
  Description of Artificial Sequence: Synthetic oligonucleotide
  Antisense strand to SEQ ID NO: 766952
uuaugugcaggguacucca

SEQ ID NO: 766954 - RNA, 19 nt, Artificial Sequence
  Description of Artificial Sequence: Synthetic oligonucleotide
  Sense strand starting at position 3633 of SEQ ID NO: 587103
agugagggcgaguguuauu

SEQ ID NO: 766955 - RNA, 19 nt, Artificial Sequence
  Description of Artificial Sequence: Synthetic oligonucleotide
  Antisense strand to SEQ ID NO: 766954
aauaacacucgcccucacu

SEQ ID NO: 766956 - RNA, 19 nt, Artificial Sequence
  Description of Artificial Sequence: Synthetic oligonucleotide
  Sense strand starting at position 3643 of SEQ ID NO: 587103
aguguuauuucuccagcga

SEQ ID NO: 766957 - RNA, 19 nt, Artificial Sequence
  Description of Artificial Sequence: Synthetic oligonucleotide
  Antisense strand to SEQ ID NO: 766956
ucgcuggagaaauaacacu

SEQ ID NO: 766958 - RNA, 19 nt, Artificial Sequence
  Description of Artificial Sequence: Synthetic oligonucleotide
  Sense strand starting at position 3644 of SEQ ID NO: 587103
guguuauuucuccagcgag

SEQ ID NO: 766959 - RNA, 19 nt, Artificial Sequence
  Description of Artificial Sequence: Synthetic oligonucleotide
  Antisense strand to SEQ ID NO: 766958
cucgcuggagaaauaacac

SEQ ID NO: 766960 - RNA, 19 nt, Artificial Sequence
  Description of Artificial Sequence: Synthetic oligonucleotide
  Sense strand starting at position 3647 of SEQ ID NO: 587103
uuauuucuccagcgaggug

SEQ ID NO: 766961 - RNA, 19 nt, Artificial Sequence
  Description of Artificial Sequence: Synthetic oligonucleotide
  Antisense strand to SEQ ID NO: 766960
caccucgcuggagaaauaa

SEQ ID NO: 766962 - RNA, 19 nt, Artificial Sequence
  Description of Artificial Sequence: Synthetic oligonucleotide
  Sense strand starting at position 3727 of SEQ ID NO: 587103
cagaaauacucagaaagug

SEQ ID NO: 766963 - RNA, 19 nt, Artificial Sequence
  Description of Artificial Sequence: Synthetic oligonucleotide
  Antisense strand to SEQ ID NO: 766962
cacuuucugaguauuucug

SEQ ID NO: 766964 - RNA, 19 nt, Artificial Sequence
  Description of Artificial Sequence: Synthetic oligonucleotide
  Sense strand starting at position 3743 of SEQ ID NO: 587103
gugacuacagcuugucaac

SEQ ID NO: 766965 - RNA, 19 nt, Artificial Sequence
  Description of Artificial Sequence: Synthetic oligonucleotide
  Antisense strand to SEQ ID NO: 766964
guugacaagcuguagucac

SEQ ID NO: 766966 - RNA, 19 nt, Artificial Sequence
  Description of Artificial Sequence: Synthetic oligonucleotide
  Sense strand starting at position 3815 of SEQ ID NO: 587103
cgacuugaccuccacuuaa

SEQ ID NO: 766967 - RNA, 19 nt, Artificial Sequence
  Description of Artificial Sequence: Synthetic oligonucleotide
  Antisense strand to SEQ ID NO: 766966
uuaaguggaggucaagucg

SEQ ID NO: 766968 - RNA, 19 nt, Artificial Sequence
  Description of Artificial Sequence: Synthetic oligonucleotide
  Sense strand starting at position 3914 of SEQ ID NO: 587103
cuuggaagcgcuuagagaa

SEQ ID NO: 766969 - RNA, 19 nt, Artificial Sequence
  Description of Artificial Sequence: Synthetic oligonucleotide
  Antisense strand to SEQ ID NO: 766968
uucucuaagcgcuuccaag

SEQ ID NO: 766970 - RNA, 19 nt, Artificial Sequence
  Description of Artificial Sequence: Synthetic oligonucleotide
  Sense strand starting at position 3926 of SEQ ID NO: 587103
uagagaaugcggcagaaau

SEQ ID NO: 766971 - RNA, 19 nt, Artificial Sequence
  Description of Artificial Sequence: Synthetic oligonucleotide
  Antisense strand to SEQ ID NO: 766970
auuucugccgcauucucua

SEQ ID NO: 766972 - RNA, 19 nt, Artificial Sequence
  Description of Artificial Sequence: Synthetic oligonucleotide
  Sense strand starting at position 157 of SEQ ID NO: 587104
guagcuaaccauuaaguaa

SEQ ID NO: 766973 - RNA, 19 nt, Artificial Sequence
  Description of Artificial Sequence: Synthetic oligonucleotide
  Antisense strand to SEQ ID NO: 766972
uuacuuaaugguuagcuac

SEQ ID NO: 766974 - RNA, 19 nt, Artificial Sequence
  Description of Artificial Sequence: Synthetic oligonucleotide
  Sense strand starting at position 669 of SEQ ID NO: 587104
acuauuuauuggcuuguau

SEQ ID NO: 766975 - RNA, 19 nt, Artificial Sequence
  Description of Artificial Sequence: Synthetic oligonucleotide
  Antisense strand to SEQ ID NO: 766974
auacaagccaauaaauagu

SEQ ID NO: 766976 - RNA, 19 nt, Artificial Sequence
  Description of Artificial Sequence: Synthetic oligonucleotide
  Sense strand starting at position 778 of SEQ ID NO: 587104
acaagaaguguauauuggu

SEQ ID NO: 766977 - RNA, 19 nt, Artificial Sequence
  Description of Artificial Sequence: Synthetic oligonucleotide
  Antisense strand to SEQ ID NO: 766976
accaauauacacuucuugu

SEQ ID NO: 766978 - RNA, 19 nt, Artificial Sequence
  Description of Artificial Sequence: Synthetic oligonucleotide
  Sense strand starting at position 799 of SEQ ID NO: 587104
uuggaagaaucugcagauu

SEQ ID NO: 766979 - RNA, 19 nt, Artificial Sequence
  Description of Artificial Sequence: Synthetic oligonucleotide
  Antisense strand to SEQ ID NO: 766978
aaucugcagauucuuccaa

SEQ ID NO: 766980 - RNA, 19 nt, Artificial Sequence
  Description of Artificial Sequence: Synthetic oligonucleotide
  Sense strand starting at position 811 of SEQ ID NO: 587104
gcagauucuagacaugggu

SEQ ID NO: 766981 - RNA, 19 nt, Artificial Sequence
  Description of Artificial Sequence: Synthetic oligonucleotide
  Antisense strand to SEQ ID NO: 766980
acccaugucuagaaucugc

SEQ ID NO: 766982 - RNA, 19 nt, Artificial Sequence
  Description of Artificial Sequence: Synthetic oligonucleotide
  Sense strand starting at position 833 of SEQ ID NO: 587104
gguccaggaucccuuaaga

SEQ ID NO: 766983 - RNA, 19 nt, Artificial Sequence
  Description of Artificial Sequence: Synthetic oligonucleotide
  Antisense strand to SEQ ID NO: 766982
ucuuaagggauccuggacc

SEQ ID NO: 766984 - RNA, 19 nt, Artificial Sequence
  Description of Artificial Sequence: Synthetic oligonucleotide
  Sense strand starting at position 896 of SEQ ID NO: 587104
ggaauuccugaagggcaau

SEQ ID NO: 766985 - RNA, 19 nt, Artificial Sequence
  Description of Artificial Sequence: Synthetic oligonucleotide
  Antisense strand to SEQ ID NO: 766984
auugcccuucaggaauucc

SEQ ID NO: 766986 - RNA, 19 nt, Artificial Sequence
  Description of Artificial Sequence: Synthetic oligonucleotide
  Sense strand starting at position 1274 of SEQ ID NO: 587104
guuguacuaaugcuucgua

SEQ ID NO: 766987 - RNA, 19 nt, Artificial Sequence
  Description of Artificial Sequence: Synthetic oligonucleotide
  Antisense strand to SEQ ID NO: 766986
uacgaagcauuaguacaac

SEQ ID NO: 766988 - RNA, 19 nt, Artificial Sequence
  Description of Artificial Sequence: Synthetic oligonucleotide
  Sense strand starting at position 1293 of SEQ ID NO: 587104
ugcuaucuucuauggaaug

SEQ ID NO: 766989 - RNA, 19 nt, Artificial Sequence
  Description of Artificial Sequence: Synthetic oligonucleotide
  Antisense strand to SEQ ID NO: 766988
cauuccauagaagauagca

SEQ ID NO: 766990 - RNA, 19 nt, Artificial Sequence
  Description of Artificial Sequence: Synthetic oligonucleotide
  Sense strand starting at position 1309 of SEQ ID NO: 587104
augagaaucuacucaagca

SEQ ID NO: 766991 - RNA, 19 nt, Artificial Sequence
  Description of Artificial Sequence: Synthetic oligonucleotide
  Antisense strand to SEQ ID NO: 766990
ugcuugaguagauucucau

SEQ ID NO: 766992 - RNA, 19 nt, Artificial Sequence
  Description of Artificial Sequence: Synthetic oligonucleotide
  Sense strand starting at position 1355 of SEQ ID NO: 587104
gagaaagcaucauccguaa

SEQ ID NO: 766993 - RNA, 19 nt, Artificial Sequence
  Description of Artificial Sequence: Synthetic oligonucleotide
  Antisense strand to SEQ ID NO: 766992
uuacggaugaugcuuucuc

SEQ ID NO: 766994 - RNA, 19 nt, Artificial Sequence
  Description of Artificial Sequence: Synthetic oligonucleotide
  Sense strand starting at position 1383 of SEQ ID NO: 587104
ugaaacguugaaugccaaa

SEQ ID NO: 766995 - RNA, 19 nt, Artificial Sequence
  Description of Artificial Sequence: Synthetic oligonucleotide
  Antisense strand to SEQ ID NO: 766994
uuuggcauucaacguuuca

SEQ ID NO: 766996 - RNA, 19 nt, Artificial Sequence
  Description of Artificial Sequence: Synthetic oligonucleotide
  Sense strand starting at position 1541 of SEQ ID NO: 587104
cuguauagaucuuuaccag

SEQ ID NO: 766997 - RNA, 19 nt, Artificial Sequence
  Description of Artificial Sequence: Synthetic oligonucleotide
  Antisense strand to SEQ ID NO: 766996
cugguaaagaucuauacag

SEQ ID NO: 766998 - RNA, 19 nt, Artificial Sequence
  Description of Artificial Sequence: Synthetic oligonucleotide
  Sense strand starting at position 1711 of SEQ ID NO: 587104
caaagagaucgguaccucu

SEQ ID NO: 766999 - RNA, 19 nt, Artificial Sequence
  Description of Artificial Sequence: Synthetic oligonucleotide
  Antisense strand to SEQ ID NO: 766998
agagguaccgaucucuuug

SEQ ID NO: 767000 - RNA, 19 nt, Artificial Sequence
  Description of Artificial Sequence: Synthetic oligonucleotide
  Sense strand starting at position 1774 of SEQ ID NO: 587104
gugcguuuccuguuaaggu

SEQ ID NO: 767001 - RNA, 19 nt, Artificial Sequence
  Description of Artificial Sequence: Synthetic oligonucleotide
  Antisense strand to SEQ ID NO: 767000
accuuaacaggaaacgcac

SEQ ID NO: 767002 - RNA, 19 nt, Artificial Sequence
  Description of Artificial Sequence: Synthetic oligonucleotide
  Sense strand starting at position 2244 of SEQ ID NO: 587104
ggcuuauuggauuaaguag

SEQ ID NO: 767003 - RNA, 19 nt, Artificial Sequence
  Description of Artificial Sequence: Synthetic oligonucleotide
  Antisense strand to SEQ ID NO: 767002
cuacuuaauccaauaagcc

SEQ ID NO: 767004 - RNA, 19 nt, Artificial Sequence
  Description of Artificial Sequence: Synthetic oligonucleotide
  Sense strand starting at position 2252 of SEQ ID NO: 587104
ggauuaaguagguagcuua

SEQ ID NO: 767005 - RNA, 19 nt, Artificial Sequence
  Description of Artificial Sequence: Synthetic oligonucleotide
  Antisense strand to SEQ ID NO: 767004
uaagcuaccuacuuaaucc

SEQ ID NO: 767006 - RNA, 19 nt, Artificial Sequence
  Description of Artificial Sequence: Synthetic oligonucleotide
  Sense strand starting at position 2278 of SEQ ID NO: 587104
ggguucucacuuugaucau

SEQ ID NO: 767007 - RNA, 19 nt, Artificial Sequence
  Description of Artificial Sequence: Synthetic oligonucleotide
  Antisense strand to SEQ ID NO: 767006
augaucaaagugagaaccc

SEQ ID NO: 767008 - RNA, 19 nt, Artificial Sequence
  Description of Artificial Sequence: Synthetic oligonucleotide
  Sense strand starting at position 2331 of SEQ ID NO: 587104
aggcuuggacuguacaaua

SEQ ID NO: 767009 - RNA, 19 nt, Artificial Sequence
  Description of Artificial Sequence: Synthetic oligonucleotide
  Antisense strand to SEQ ID NO: 767008
uauuguacaguccaagccu

SEQ ID NO: 767010 - RNA, 19 nt, Artificial Sequence
  Description of Artificial Sequence: Synthetic oligonucleotide
  Sense strand starting at position 2397 of SEQ ID NO: 587104
cuaagcaggccugauaauu

SEQ ID NO: 767011 - RNA, 19 nt, Artificial Sequence
  Description of Artificial Sequence: Synthetic oligonucleotide
  Antisense strand to SEQ ID NO: 767010
aauuaucaggccugcuuag

SEQ ID NO: 767012 - RNA, 19 nt, Artificial Sequence
  Description of Artificial Sequence: Synthetic oligonucleotide
  Sense strand starting at position 2402 of SEQ ID NO: 587104
caggccugauaauuguaau

SEQ ID NO: 767013 - RNA, 19 nt, Artificial Sequence
  Description of Artificial Sequence: Synthetic oligonucleotide
  Antisense strand to SEQ ID NO: 767012
auuacaauuaucaggccug

SEQ ID NO: 767014 - RNA, 19 nt, Artificial Sequence
  Description of Artificial Sequence: Synthetic oligonucleotide
  Sense strand starting at position 2403 of SEQ ID NO: 587104
aggccugauaauuguaaug

SEQ ID NO: 767015 - RNA, 19 nt, Artificial Sequence
  Description of Artificial Sequence: Synthetic oligonucleotide
  Antisense strand to SEQ ID NO: 767014
cauuacaauuaucaggccu

SEQ ID NO: 767016 - RNA, 19 nt, Artificial Sequence
  Description of Artificial Sequence: Synthetic oligonucleotide
  Sense strand starting at position 2484 of SEQ ID NO: 587104
cugcuaaaucagggaauca

SEQ ID NO: 767017 - RNA, 19 nt, Artificial Sequence
  Description of Artificial Sequence: Synthetic oligonucleotide
  Antisense strand to SEQ ID NO: 767016
ugauucccugauuuagcag

SEQ ID NO: 767018 - RNA, 19 nt, Artificial Sequence
  Description of Artificial Sequence: Synthetic oligonucleotide
  Sense strand starting at position 2548 of SEQ ID NO: 587104
aucaaaucagccugaagac

SEQ ID NO: 767019 - RNA, 19 nt, Artificial Sequence
  Description of Artificial Sequence: Synthetic oligonucleotide
  Antisense strand to SEQ ID NO: 767018
gucuucaggcugauuugau

SEQ ID NO: 767020 - RNA, 19 nt, Artificial Sequence
  Description of Artificial Sequence: Synthetic oligonucleotide
  Sense strand starting at position 2581 of SEQ ID NO: 587104
guggaaauaucauucuauu

SEQ ID NO: 767021 - RNA, 19 nt, Artificial Sequence
  Description of Artificial Sequence: Synthetic oligonucleotide
  Antisense strand to SEQ ID NO: 767020
aauagaaugauauuuccac

SEQ ID NO: 767022 - RNA, 19 nt, Artificial Sequence
  Description of Artificial Sequence: Synthetic oligonucleotide
  Sense strand starting at position 2690 of SEQ ID NO: 587104
gccagaucuucccugaaau

SEQ ID NO: 767023 - RNA, 19 nt, Artificial Sequence
  Description of Artificial Sequence: Synthetic oligonucleotide
  Antisense strand to SEQ ID NO: 767022
auuucagggaagaucuggc

SEQ ID NO: 767024 - RNA, 19 nt, Artificial Sequence
  Description of Artificial Sequence: Synthetic oligonucleotide
  Sense strand starting at position 2929 of SEQ ID NO: 587104
uuccuuccaccagggaaua

SEQ ID NO: 767025 - RNA, 19 nt, Artificial Sequence
  Description of Artificial Sequence: Synthetic oligonucleotide
  Antisense strand to SEQ ID NO: 767024
uauucccugguggaaggaa

SEQ ID NO: 767026 - RNA, 19 nt, Artificial Sequence
  Description of Artificial Sequence: Synthetic oligonucleotide
  Sense strand starting at position 2967 of SEQ ID NO: 587104
gguaaauucuacucaugua

SEQ ID NO: 767027 - RNA, 19 nt, Artificial Sequence
  Description of Artificial Sequence: Synthetic oligonucleotide
  Antisense strand to SEQ ID NO: 767026
uacaugaguagaauuuacc

SEQ ID NO: 767028 - RNA, 19 nt, Artificial Sequence
  Description of Artificial Sequence: Synthetic oligonucleotide
  Sense strand starting at position 3062 of SEQ ID NO: 587104
ggauuagguaguuacccau

SEQ ID NO: 767029 - RNA, 19 nt, Artificial Sequence
  Description of Artificial Sequence: Synthetic oligonucleotide
  Antisense strand to SEQ ID NO: 767028
auggguaacuaccuaaucc

SEQ ID NO: 767030 - RNA, 19 nt, Artificial Sequence
  Description of Artificial Sequence: Synthetic oligonucleotide
  Sense strand starting at position 3164 of SEQ ID NO: 587104
ggaccauaauaucuguauu

SEQ ID NO: 767031 - RNA, 19 nt, Artificial Sequence
  Description of Artificial Sequence: Synthetic oligonucleotide
  Antisense strand to SEQ ID NO: 767030
aauacagauauuauggucc

SEQ ID NO: 767032 - RNA, 19 nt, Artificial Sequence
  Description of Artificial Sequence: Synthetic oligonucleotide
  Sense strand starting at position 3166 of SEQ ID NO: 587104
accauaauaucuguauugu

SEQ ID NO: 767033 - RNA, 19 nt, Artificial Sequence
  Description of Artificial Sequence: Synthetic oligonucleotide
  Antisense strand to SEQ ID NO: 767032
acaauacagauauuauggu

SEQ ID NO: 767034 - RNA, 19 nt, Artificial Sequence
  Description of Artificial Sequence: Synthetic oligonucleotide
  Sense strand starting at position 3167 of SEQ ID NO: 587104
ccauaauaucuguauuguu

SEQ ID NO: 767035 - RNA, 19 nt, Artificial Sequence
  Description of Artificial Sequence: Synthetic oligonucleotide
  Antisense strand to SEQ ID NO: 767034
aacaauacagauauuaugg

SEQ ID NO: 767036 - RNA, 19 nt, Artificial Sequence
  Description of Artificial Sequence: Synthetic oligonucleotide
  Sense strand starting at position 3269 of SEQ ID NO: 587104
accugauagugaguuaaua

SEQ ID NO: 767037 - RNA, 19 nt, Artificial Sequence
  Description of Artificial Sequence: Synthetic oligonucleotide
  Antisense strand to SEQ ID NO: 767036
uauuaacucacuaucaggu

SEQ ID NO: 767038 - RNA, 19 nt, Artificial Sequence
  Description of Artificial Sequence: Synthetic oligonucleotide
  Sense strand starting at position 3349 of SEQ ID NO: 587104
acagguuaugcuggauaag

SEQ ID NO: 767039 - RNA, 19 nt, Artificial Sequence
  Description of Artificial Sequence: Synthetic oligonucleotide
  Antisense strand to SEQ ID NO: 767038
cuuauccagcauaaccugu

SEQ ID NO: 767040 - RNA, 19 nt, Artificial Sequence
  Description of Artificial Sequence: Synthetic oligonucleotide
  Sense strand starting at position 3379 of SEQ ID NO: 587104
auguauagcagugauguga

SEQ ID NO: 767041 - RNA, 19 nt, Artificial Sequence
  Description of Artificial Sequence: Synthetic oligonucleotide
  Antisense strand to SEQ ID NO: 767040
ucacaucacugcuauacau

SEQ ID NO: 767042 - RNA, 19 nt, Artificial Sequence
  Description of Artificial Sequence: Synthetic oligonucleotide
  Sense strand starting at position 3387 of SEQ ID NO: 587104
cagugaugugaguauuaac

SEQ ID NO: 767043 - RNA, 19 nt, Artificial Sequence
  Description of Artificial Sequence: Synthetic oligonucleotide
  Antisense strand to SEQ ID NO: 767042
guuaauacucacaucacug

SEQ ID NO: 767044 - RNA, 19 nt, Artificial Sequence
  Description of Artificial Sequence: Synthetic oligonucleotide
  Sense strand starting at position 3572 of SEQ ID NO: 587104
cugcaaacucagcaugaga

SEQ ID NO: 767045 - RNA, 19 nt, Artificial Sequence
  Description of Artificial Sequence: Synthetic oligonucleotide
  Antisense strand to SEQ ID NO: 767044
ucucaugcugaguuugcag

SEQ ID NO: 767046 - RNA, 19 nt, Artificial Sequence
  Description of Artificial Sequence: Synthetic oligonucleotide
  Sense strand starting at position 3579 of SEQ ID NO: 587104
cucagcaugagaugauagu

SEQ ID NO: 767047 - RNA, 19 nt, Artificial Sequence
  Description of Artificial Sequence: Synthetic oligonucleotide
  Antisense strand to SEQ ID NO: 767046
acuaucaucucaugcugag

SEQ ID NO: 767048 - RNA, 19 nt, Artificial Sequence
  Description of Artificial Sequence: Synthetic oligonucleotide
  Sense strand starting at position 3728 of SEQ ID NO: 587104
gcucaaacuuggcuaaaca

SEQ ID NO: 767049 - RNA, 19 nt, Artificial Sequence
  Description of Artificial Sequence: Synthetic oligonucleotide
  Antisense strand to SEQ ID NO: 767048
uguuuagccaaguuugagc

SEQ ID NO: 767050 - RNA, 19 nt, Artificial Sequence
  Description of Artificial Sequence: Synthetic oligonucleotide
  Sense strand starting at position 3780 of SEQ ID NO: 587104
uccugaugcccggaugaca

SEQ ID NO: 767051 - RNA, 19 nt, Artificial Sequence
  Description of Artificial Sequence: Synthetic oligonucleotide
  Antisense strand to SEQ ID NO: 767050
ugucauccgggcaucagga

SEQ ID NO: 767052 - RNA, 19 nt, Artificial Sequence
  Description of Artificial Sequence: Synthetic oligonucleotide
  Sense strand starting at position 127 of SEQ ID NO: 587105
cugguuguauuccucaaau

SEQ ID NO: 767053 - RNA, 19 nt, Artificial Sequence
  Description of Artificial Sequence: Synthetic oligonucleotide
  Antisense strand to SEQ ID NO: 767052
auuugaggaauacaaccag

SEQ ID NO: 767054 - RNA, 19 nt, Artificial Sequence
  Description of Artificial Sequence: Synthetic oligonucleotide
  Sense strand starting at position 129 of SEQ ID NO: 587105
gguuguauuccucaaauau

SEQ ID NO: 767055 - RNA, 19 nt, Artificial Sequence
  Description of Artificial Sequence: Synthetic oligonucleotide
  Antisense strand to SEQ ID NO: 767054
auauuugaggaauacaacc

SEQ ID NO: 767056 - RNA, 19 nt, Artificial Sequence
  Description of Artificial Sequence: Synthetic oligonucleotide
  Sense strand starting at position 263 of SEQ ID NO: 587105
guagaauaauaguaggaac

SEQ ID NO: 767057 - RNA, 19 nt, Artificial Sequence
  Description of Artificial Sequence: Synthetic oligonucleotide
  Antisense strand to SEQ ID NO: 767056
guuccuacuauuauucuac

SEQ ID NO: 767058 - RNA, 19 nt, Artificial Sequence
  Description of Artificial Sequence: Synthetic oligonucleotide
  Sense strand starting at position 292 of SEQ ID NO: 587105
auccuuaauuaauggaaag

SEQ ID NO: 767059 - RNA, 19 nt, Artificial Sequence
  Description of Artificial Sequence: Synthetic oligonucleotide
  Antisense strand to SEQ ID NO: 767058
cuuuccauuaauuaaggau

SEQ ID NO: 767060 - RNA, 19 nt, Artificial Sequence
  Description of Artificial Sequence: Synthetic oligonucleotide
  Sense strand starting at position 1353 of SEQ ID NO: 587105
uguugugcuugcuccauaa

SEQ ID NO: 767061 - RNA, 19 nt, Artificial Sequence
  Description of Artificial Sequence: Synthetic oligonucleotide
  Antisense strand to SEQ ID NO: 767060
uuauggagcaagcacaaca

SEQ ID NO: 767062 - RNA, 19 nt, Artificial Sequence
  Description of Artificial Sequence: Synthetic oligonucleotide
  Sense strand starting at position 1419 of SEQ ID NO: 587105
aaggcucacgguuaaacuu

SEQ ID NO: 767063 - RNA, 19 nt, Artificial Sequence
  Description of Artificial Sequence: Synthetic oligonucleotide
  Antisense strand to SEQ ID NO: 767062
aaguuuaaccgugagccuu

SEQ ID NO: 767064 - RNA, 19 nt, Artificial Sequence
  Description of Artificial Sequence: Synthetic oligonucleotide
  Sense strand starting at position 1539 of SEQ ID NO: 587105
aaagucgaggccugaaauu

SEQ ID NO: 767065 - RNA, 19 nt, Artificial Sequence
  Description of Artificial Sequence: Synthetic oligonucleotide
  Antisense strand to SEQ ID NO: 767064
aauuucaggccucgacuuu

SEQ ID NO: 767066 - RNA, 19 nt, Artificial Sequence
  Description of Artificial Sequence: Synthetic oligonucleotide
  Sense strand starting at position 1698 of SEQ ID NO: 587105
ggugcugucaagugcaaca

SEQ ID NO: 767067 - RNA, 19 nt, Artificial Sequence
  Description of Artificial Sequence: Synthetic oligonucleotide
  Antisense strand to SEQ ID NO: 767066
uguugcacuugacagcacc

SEQ ID NO: 767068 - RNA, 19 nt, Artificial Sequence
  Description of Artificial Sequence: Synthetic oligonucleotide
  Sense strand starting at position 1754 of SEQ ID NO: 587105
cggagagggucucaguaaa

SEQ ID NO: 767069 - RNA, 19 nt, Artificial Sequence
  Description of Artificial Sequence: Synthetic oligonucleotide
  Antisense strand to SEQ ID NO: 767068
uuuacugagacccucuccg

SEQ ID NO: 767070 - RNA, 19 nt, Artificial Sequence
  Description of Artificial Sequence: Synthetic oligonucleotide
  Sense strand starting at position 2122 of SEQ ID NO: 587105
cagaguuccaggcgaugaa

SEQ ID NO: 767071 - RNA, 19 nt, Artificial Sequence
  Description of Artificial Sequence: Synthetic oligonucleotide
  Antisense strand to SEQ ID NO: 767070
uucaucgccuggaacucug

SEQ ID NO: 767072 - RNA, 19 nt, Artificial Sequence
  Description of Artificial Sequence: Synthetic oligonucleotide
  Sense strand starting at position 2200 of SEQ ID NO: 587105
agaaaugauuggcauggga

SEQ ID NO: 767073 - RNA, 19 nt, Artificial Sequence
  Description of Artificial Sequence: Synthetic oligonucleotide
  Antisense strand to SEQ ID NO: 767072
ucccaugccaaucauuucu

SEQ ID NO: 767074 - RNA, 19 nt, Artificial Sequence
  Description of Artificial Sequence: Synthetic oligonucleotide
  Sense strand starting at position 2325 of SEQ ID NO: 587105
cgaggauggacucgcuauu

SEQ ID NO: 767075 - RNA, 19 nt, Artificial Sequence
  Description of Artificial Sequence: Synthetic oligonucleotide
  Antisense strand to SEQ ID NO: 767074
aauagcgaguccauccucg

SEQ ID NO: 767076 - RNA, 19 nt, Artificial Sequence
  Description of Artificial Sequence: Synthetic oligonucleotide
  Sense strand starting at position 2336 of SEQ ID NO: 587105
ucgcuauuagaugauauua

SEQ ID NO: 767077 - RNA, 19 nt, Artificial Sequence
  Description of Artificial Sequence: Synthetic oligonucleotide
  Antisense strand to SEQ ID NO: 767076
uaauaucaucuaauagcga

SEQ ID NO: 767078 - RNA, 19 nt, Artificial Sequence
  Description of Artificial Sequence: Synthetic oligonucleotide
  Sense strand starting at position 2338 of SEQ ID NO: 587105
gcuauuagaugauauuaag

SEQ ID NO: 767079 - RNA, 19 nt, Artificial Sequence
  Description of Artificial Sequence: Synthetic oligonucleotide
  Antisense strand to SEQ ID NO: 767078
cuuaauaucaucuaauagc

SEQ ID NO: 767080 - RNA, 19 nt, Artificial Sequence
  Description of Artificial Sequence: Synthetic oligonucleotide
  Sense strand starting at position 2354 of SEQ ID NO: 587105
aaggaauuguaguuaaucu

SEQ ID NO: 767081 - RNA, 19 nt, Artificial Sequence
  Description of Artificial Sequence: Synthetic oligonucleotide
  Antisense strand to SEQ ID NO: 767080
agauuaacuacaauuccuu

SEQ ID NO: 767082 - RNA, 19 nt, Artificial Sequence
  Description of Artificial Sequence: Synthetic oligonucleotide
  Sense strand starting at position 2365 of SEQ ID NO: 587105
guuaaucucgucgcgugua

SEQ ID NO: 767083 - RNA, 19 nt, Artificial Sequence
  Description of Artificial Sequence: Synthetic oligonucleotide
  Antisense strand to SEQ ID NO: 767082
uacacgcgacgagauuaac

SEQ ID NO: 767084 - RNA, 19 nt, Artificial Sequence
  Description of Artificial Sequence: Synthetic oligonucleotide
  Sense strand starting at position 2381 of SEQ ID NO: 587105
guaucuguuaagggcuaua

SEQ ID NO: 767085 - RNA, 19 nt, Artificial Sequence
  Description of Artificial Sequence: Synthetic oligonucleotide
  Antisense strand to SEQ ID NO: 767084
uauagcccuuaacagauac

SEQ ID NO: 767086 - RNA, 19 nt, Artificial Sequence
  Description of Artificial Sequence: Synthetic oligonucleotide
  Sense strand starting at position 2391 of SEQ ID NO: 587105
agggcuauaggcugaagua

SEQ ID NO: 767087 - RNA, 19 nt, Artificial Sequence
  Description of Artificial Sequence: Synthetic oligonucleotide
  Antisense strand to SEQ ID NO: 767086
uacuucagccuauagcccu

SEQ ID NO: 767088 - RNA, 19 nt, Artificial Sequence
  Description of Artificial Sequence: Synthetic oligonucleotide
  Sense strand starting at position 2392 of SEQ ID NO: 587105
gggcuauaggcugaaguau

SEQ ID NO: 767089 - RNA, 19 nt, Artificial Sequence
  Description of Artificial Sequence: Synthetic oligonucleotide
  Antisense strand to SEQ ID NO: 767088
auacuucagccuauagccc

SEQ ID NO: 767090 - RNA, 19 nt, Artificial Sequence
  Description of Artificial Sequence: Synthetic oligonucleotide
  Sense strand starting at position 2416 of SEQ ID NO: 587105
gcugaaaccauaugauggu

SEQ ID NO: 767091 - RNA, 19 nt, Artificial Sequence
  Description of Artificial Sequence: Synthetic oligonucleotide
  Antisense strand to SEQ ID NO: 767090
accaucauaugguuucagc

SEQ ID NO: 767092 - RNA, 19 nt, Artificial Sequence
  Description of Artificial Sequence: Synthetic oligonucleotide
  Sense strand starting at position 2422 of SEQ ID NO: 587105
accauaugaugguuucuuu

SEQ ID NO: 767093 - RNA, 19 nt, Artificial Sequence
  Description of Artificial Sequence: Synthetic oligonucleotide
  Antisense strand to SEQ ID NO: 767092
aaagaaaccaucauauggu

SEQ ID NO: 767094 - RNA, 19 nt, Artificial Sequence
  Description of Artificial Sequence: Synthetic oligonucleotide
  Sense strand starting at position 2650 of SEQ ID NO: 587105
ggaagcuaacgcuggaaga

SEQ ID NO: 767095 - RNA, 19 nt, Artificial Sequence
  Description of Artificial Sequence: Synthetic oligonucleotide
  Antisense strand to SEQ ID NO: 767094
ucuuccagcguuagcuucc

SEQ ID NO: 767096 - RNA, 19 nt, Artificial Sequence
  Description of Artificial Sequence: Synthetic oligonucleotide
  Sense strand starting at position 2651 of SEQ ID NO: 587105
gaagcuaacgcuggaagau

SEQ ID NO: 767097 - RNA, 19 nt, Artificial Sequence
  Description of Artificial Sequence: Synthetic oligonucleotide
  Antisense strand to SEQ ID NO: 767096
aucuuccagcguuagcuuc

SEQ ID NO: 767098 - RNA, 19 nt, Artificial Sequence
  Description of Artificial Sequence: Synthetic oligonucleotide
  Sense strand starting at position 2663 of SEQ ID NO: 587105
ggaagaucgcucgaaccca

SEQ ID NO: 767099 - RNA, 19 nt, Artificial Sequence
  Description of Artificial Sequence: Synthetic oligonucleotide
  Antisense strand to SEQ ID NO: 767098
uggguucgagcgaucuucc

SEQ ID NO: 767100 - RNA, 19 nt, Artificial Sequence
  Description of Artificial Sequence: Synthetic oligonucleotide
  Sense strand starting at position 2971 of SEQ ID NO: 587105
gggucuggcccuugaauuc

SEQ ID NO: 767101 - RNA, 19 nt, Artificial Sequence
  Description of Artificial Sequence: Synthetic oligonucleotide
  Antisense strand to SEQ ID NO: 767100
gaauucaagggccagaccc

SEQ ID NO: 767102 - RNA, 19 nt, Artificial Sequence
  Description of Artificial Sequence: Synthetic oligonucleotide
  Sense strand starting at position 2981 of SEQ ID NO: 587105
cuugaauuccgcggaacga

SEQ ID NO: 767103 - RNA, 19 nt, Artificial Sequence
  Description of Artificial Sequence: Synthetic oligonucleotide
  Antisense strand to SEQ ID NO: 767102
ucguuccgcggaauucaag

SEQ ID NO: 767104 - RNA, 19 nt, Artificial Sequence
  Description of Artificial Sequence: Synthetic oligonucleotide
  Sense strand starting at position 3031 of SEQ ID NO: 587105
acuaaacauccgcgagcau

SEQ ID NO: 767105 - RNA, 19 nt, Artificial Sequence
  Description of Artificial Sequence: Synthetic oligonucleotide
  Antisense strand to SEQ ID NO: 767104
augcucgcggauguuuagu

SEQ ID NO: 767106 - RNA, 19 nt, Artificial Sequence
  Description of Artificial Sequence: Synthetic oligonucleotide
  Sense strand starting at position 3064 of SEQ ID NO: 587105
cagcucauuggcgaaagua

SEQ ID NO: 767107 - RNA, 19 nt, Artificial Sequence
  Description of Artificial Sequence: Synthetic oligonucleotide
  Antisense strand to SEQ ID NO: 767106
uacuuucgccaaugagcug

SEQ ID NO: 767108 - RNA, 19 nt, Artificial Sequence
  Description of Artificial Sequence: Synthetic oligonucleotide
  Sense strand starting at position 3149 of SEQ ID NO: 587105
aggcgucaucgcucacuuu

SEQ ID NO: 767109 - RNA, 19 nt, Artificial Sequence
  Description of Artificial Sequence: Synthetic oligonucleotide
  Antisense strand to SEQ ID NO: 767108
aaagugagcgaugacgccu

SEQ ID NO: 767110 - RNA, 19 nt, Artificial Sequence
  Description of Artificial Sequence: Synthetic oligonucleotide
  Sense strand starting at position 3364 of SEQ ID NO: 587105
gcuucugggucuuugaaca

SEQ ID NO: 767111 - RNA, 19 nt, Artificial Sequence
  Description of Artificial Sequence: Synthetic oligonucleotide
  Antisense strand to SEQ ID NO: 767110
uguucaaagacccagaagc

SEQ ID NO: 767112 - RNA, 19 nt, Artificial Sequence
  Description of Artificial Sequence: Synthetic oligonucleotide
  Sense strand starting at position 3455 of SEQ ID NO: 587105
gccgggaagcgcuucgaaa

SEQ ID NO: 767113 - RNA, 19 nt, Artificial Sequence
  Description of Artificial Sequence: Synthetic oligonucleotide
  Antisense strand to SEQ ID NO: 767112
uuucgaagcgcuucccggc

SEQ ID NO: 767114 - RNA, 19 nt, Artificial Sequence
  Description of Artificial Sequence: Synthetic oligonucleotide
  Sense strand starting at position 3457 of SEQ ID NO: 587105
cgggaagcgcuucgaaauc

SEQ ID NO: 767115 - RNA, 19 nt, Artificial Sequence
  Description of Artificial Sequence: Synthetic oligonucleotide
  Antisense strand to SEQ ID NO: 767114
gauuucgaagcgcuucccg

SEQ ID NO: 767116 - RNA, 19 nt, Artificial Sequence
  Description of Artificial Sequence: Synthetic oligonucleotide
  Sense strand starting at position 3467 of SEQ ID NO: 587105
uucgaaaucgccugcuaca

SEQ ID NO: 767117 - RNA, 19 nt, Artificial Sequence
  Description of Artificial Sequence: Synthetic oligonucleotide
  Antisense strand to SEQ ID NO: 767116
uguagcaggcgauuucgaa

SEQ ID NO: 767118 - RNA, 19 nt, Artificial Sequence
  Description of Artificial Sequence: Synthetic oligonucleotide
  Sense strand starting at position 3654 of SEQ ID NO: 587105
augagacgucgcuguccga

SEQ ID NO: 767119 - RNA, 19 nt, Artificial Sequence
  Description of Artificial Sequence: Synthetic oligonucleotide
  Antisense strand to SEQ ID NO: 767118
ucggacagcgacgucucau

SEQ ID NO: 767120 - RNA, 19 nt, Artificial Sequence
  Description of Artificial Sequence: Synthetic oligonucleotide
  Sense strand starting at position 3774 of SEQ ID NO: 587105
gaaaucucguaauuguggu

SEQ ID NO: 767121 - RNA, 19 nt, Artificial Sequence
  Description of Artificial Sequence: Synthetic oligonucleotide
  Antisense strand to SEQ ID NO: 767120
accacaauuacgagauuuc

SEQ ID NO: 767122 - RNA, 19 nt, Artificial Sequence
  Description of Artificial Sequence: Synthetic oligonucleotide
  Sense strand starting at position 3800 of SEQ ID NO: 587105
cuagaauaaugauggcuga

SEQ ID NO: 767123 - RNA, 19 nt, Artificial Sequence
  Description of Artificial Sequence: Synthetic oligonucleotide
  Antisense strand to SEQ ID NO: 767122
ucagccaucauuauucuag

SEQ ID NO: 767124 - RNA, 19 nt, Artificial Sequence
  Description of Artificial Sequence: Synthetic oligonucleotide
  Sense strand starting at position 3807 of SEQ ID NO: 587105
aaugauggcugagaaccua

SEQ ID NO: 767125 - RNA, 19 nt, Artificial Sequence
  Description of Artificial Sequence: Synthetic oligonucleotide
  Antisense strand to SEQ ID NO: 767124
uagguucucagccaucauu

SEQ ID NO: 767126 - RNA, 19 nt, Artificial Sequence
  Description of Artificial Sequence: Synthetic oligonucleotide
  Sense strand starting at position 3818 of SEQ ID NO: 587105
agaaccuagucuuacgaau

SEQ ID NO: 767127 - RNA, 19 nt, Artificial Sequence
  Description of Artificial Sequence: Synthetic oligonucleotide
  Antisense strand to SEQ ID NO: 767126
auucguaagacuagguucu

SEQ ID NO: 767128 - RNA, 19 nt, Artificial Sequence
  Description of Artificial Sequence: Synthetic oligonucleotide
  Sense strand starting at position 3840 of SEQ ID NO: 587105
gucauaguuguggguacau

SEQ ID NO: 767129 - RNA, 19 nt, Artificial Sequence
  Description of Artificial Sequence: Synthetic oligonucleotide
  Antisense strand to SEQ ID NO: 767128
auguacccacaacuaugac

SEQ ID NO: 767130 - RNA, 19 nt, Artificial Sequence
  Description of Artificial Sequence: Synthetic oligonucleotide
  Sense strand starting at position 3854 of SEQ ID NO: 587105
uacaucuggugucauagau

SEQ ID NO: 767131 - RNA, 19 nt, Artificial Sequence
  Description of Artificial Sequence: Synthetic oligonucleotide
  Antisense strand to SEQ ID NO: 767130
aucuaugacaccagaugua

SEQ ID NO: 767132 - RNA, 19 nt, Artificial Sequence
  Description of Artificial Sequence: Synthetic oligonucleotide
  Sense strand starting at position 61 of SEQ ID NO: 587106
gaugaaagguagcacagau

SEQ ID NO: 767133 - RNA, 19 nt, Artificial Sequence
  Description of Artificial Sequence: Synthetic oligonucleotide
  Antisense strand to SEQ ID NO: 767132
aucugugcuaccuuucauc

SEQ ID NO: 767134 - RNA, 19 nt, Artificial Sequence
  Description of Artificial Sequence: Synthetic oligonucleotide
  Sense strand starting at position 139 of SEQ ID NO: 587106
cugguuguauuccucaaau

SEQ ID NO: 767135 - RNA, 19 nt, Artificial Sequence
  Description of Artificial Sequence: Synthetic oligonucleotide
  Antisense strand to SEQ ID NO: 767134
auuugaggaauacaaccag

SEQ ID NO: 767136 - RNA, 19 nt, Artificial Sequence
  Description of Artificial Sequence: Synthetic oligonucleotide
  Sense strand starting at position 141 of SEQ ID NO: 587106
gguuguauuccucaaauau

SEQ ID NO: 767137 - RNA, 19 nt, Artificial Sequence
  Description of Artificial Sequence: Synthetic oligonucleotide
  Antisense strand to SEQ ID NO: 767136
auauuugaggaauacaacc

SEQ ID NO: 767138 - RNA, 19 nt, Artificial Sequence
  Description of Artificial Sequence: Synthetic oligonucleotide
  Sense strand starting at position 275 of SEQ ID NO: 587106
guagaauaauaguaggaac

SEQ ID NO: 767139 - RNA, 19 nt, Artificial Sequence
  Description of Artificial Sequence: Synthetic oligonucleotide
  Antisense strand to SEQ ID NO: 767138
guuccuacuauuauucuac

SEQ ID NO: 767140 - RNA, 19 nt, Artificial Sequence
  Description of Artificial Sequence: Synthetic oligonucleotide
  Sense strand starting at position 304 of SEQ ID NO: 587106
auccuuaauuaauggaaag

SEQ ID NO: 767141 - RNA, 19 nt, Artificial Sequence
  Description of Artificial Sequence: Synthetic oligonucleotide
  Antisense strand to SEQ ID NO: 767140
cuuuccauuaauuaaggau

SEQ ID NO: 767142 - RNA, 19 nt, Artificial Sequence
  Description of Artificial Sequence: Synthetic oligonucleotide
  Sense strand starting at position 557 of SEQ ID NO: 587106
guguuuaaauccucuauaa

SEQ ID NO: 767143 - RNA, 19 nt, Artificial Sequence
  Description of Artificial Sequence: Synthetic oligonucleotide
  Antisense strand to SEQ ID NO: 767142
uuauagaggauuuaaacac

SEQ ID NO: 767144 - RNA, 19 nt, Artificial Sequence
  Description of Artificial Sequence: Synthetic oligonucleotide
  Sense strand starting at position 620 of SEQ ID NO: 587106
ccugcaucucgaugacaau

SEQ ID NO: 767145 - RNA, 19 nt, Artificial Sequence
  Description of Artificial Sequence: Synthetic oligonucleotide
  Antisense strand to SEQ ID NO: 767144
auugucaucgagaugcagg

SEQ ID NO: 767146 - RNA, 19 nt, Artificial Sequence
  Description of Artificial Sequence: Synthetic oligonucleotide
  Sense strand starting at position 702 of SEQ ID NO: 587106
ccauaaugauauuaaaggu

SEQ ID NO: 767147 - RNA, 19 nt, Artificial Sequence
  Description of Artificial Sequence: Synthetic oligonucleotide
  Antisense strand to SEQ ID NO: 767146
accuuuaauaucauuaugg

SEQ ID NO: 767148 - RNA, 19 nt, Artificial Sequence
  Description of Artificial Sequence: Synthetic oligonucleotide
  Sense strand starting at position 729 of SEQ ID NO: 587106
gucccauguauccgcagaa

SEQ ID NO: 767149 - RNA, 19 nt, Artificial Sequence
  Description of Artificial Sequence: Synthetic oligonucleotide
  Antisense strand to SEQ ID NO: 767148
uucugcggauacaugggac

SEQ ID NO: 767150 - RNA, 19 nt, Artificial Sequence
  Description of Artificial Sequence: Synthetic oligonucleotide
  Sense strand starting at position 733 of SEQ ID NO: 587106
cauguauccgcagaaggau

SEQ ID NO: 767151 - RNA, 19 nt, Artificial Sequence
  Description of Artificial Sequence: Synthetic oligonucleotide
  Antisense strand to SEQ ID NO: 767150
auccuucugcggauacaug

SEQ ID NO: 767152 - RNA, 19 nt, Artificial Sequence
  Description of Artificial Sequence: Synthetic oligonucleotide
  Sense strand starting at position 1369 of SEQ ID NO: 587106
uguugugcuugcuccauaa

SEQ ID NO: 767153 - RNA, 19 nt, Artificial Sequence
  Description of Artificial Sequence: Synthetic oligonucleotide
  Antisense strand to SEQ ID NO: 767152
uuauggagcaagcacaaca

SEQ ID NO: 767154 - RNA, 19 nt, Artificial Sequence
  Description of Artificial Sequence: Synthetic oligonucleotide
  Sense strand starting at position 1435 of SEQ ID NO: 587106
aaggcucacgguuaaacuu

SEQ ID NO: 767155 - RNA, 19 nt, Artificial Sequence
  Description of Artificial Sequence: Synthetic oligonucleotide
  Antisense strand to SEQ ID NO: 767154
aaguuuaaccgugagccuu

SEQ ID NO: 767156 - RNA, 19 nt, Artificial Sequence
  Description of Artificial Sequence: Synthetic oligonucleotide
  Sense strand starting at position 1553 of SEQ ID NO: 587106
aaagucgaagccugaaauu

SEQ ID NO: 767157 - RNA, 19 nt, Artificial Sequence
  Description of Artificial Sequence: Synthetic oligonucleotide
  Antisense strand to SEQ ID NO: 767156
aauuucaggcuucgacuuu

SEQ ID NO: 767158 - RNA, 19 nt, Artificial Sequence
  Description of Artificial Sequence: Synthetic oligonucleotide
  Sense strand starting at position 1562 of SEQ ID NO: 587106
gccugaaauuuaggcuuua

SEQ ID NO: 767159 - RNA, 19 nt, Artificial Sequence
  Description of Artificial Sequence: Synthetic oligonucleotide
  Antisense strand to SEQ ID NO: 767158
uaaagccuaaauuucaggc

SEQ ID NO: 767160 - RNA, 19 nt, Artificial Sequence
  Description of Artificial Sequence: Synthetic oligonucleotide
  Sense strand starting at position 1593 of SEQ ID NO: 587106
uccuaauacacguggguaa

SEQ ID NO: 767161 - RNA, 19 nt, Artificial Sequence
  Description of Artificial Sequence: Synthetic oligonucleotide
  Antisense strand to SEQ ID NO: 767160
uuacccacguguauuagga

SEQ ID NO: 767162 - RNA, 19 nt, Artificial Sequence
  Description of Artificial Sequence: Synthetic oligonucleotide
  Sense strand starting at position 1594 of SEQ ID NO: 587106
ccuaauacacguggguaaa

SEQ ID NO: 767163 - RNA, 19 nt, Artificial Sequence
  Description of Artificial Sequence: Synthetic oligonucleotide
  Antisense strand to SEQ ID NO: 767162
uuuacccacguguauuagg

SEQ ID NO: 767164 - RNA, 19 nt, Artificial Sequence
  Description of Artificial Sequence: Synthetic oligonucleotide
  Sense strand starting at position 1712 of SEQ ID NO: 587106
ggugcugucaagugcaaca

SEQ ID NO: 767165 - RNA, 19 nt, Artificial Sequence
  Description of Artificial Sequence: Synthetic oligonucleotide
  Antisense strand to SEQ ID NO: 767164
uguugcacuugacagcacc

SEQ ID NO: 767166 - RNA, 19 nt, Artificial Sequence
  Description of Artificial Sequence: Synthetic oligonucleotide
  Sense strand starting at position 1768 of SEQ ID NO: 587106
cggagagggucucaguaaa

SEQ ID NO: 767167 - RNA, 19 nt, Artificial Sequence
  Description of Artificial Sequence: Synthetic oligonucleotide
  Antisense strand to SEQ ID NO: 767166
uuuacugagacccucuccg

SEQ ID NO: 767168 - RNA, 19 nt, Artificial Sequence
  Description of Artificial Sequence: Synthetic oligonucleotide
  Sense strand starting at position 1990 of SEQ ID NO: 587106
ccguccugauugguucaga

SEQ ID NO: 767169 - RNA, 19 nt, Artificial Sequence
  Description of Artificial Sequence: Synthetic oligonucleotide
  Antisense strand to SEQ ID NO: 767168
ucugaaccaaucaggacgg

SEQ ID NO: 767170 - RNA, 19 nt, Artificial Sequence
  Description of Artificial Sequence: Synthetic oligonucleotide
  Sense strand starting at position 2214 of SEQ ID NO: 587106
agaaaugauuggcauggga

SEQ ID NO: 767171 - RNA, 19 nt, Artificial Sequence
  Description of Artificial Sequence: Synthetic oligonucleotide
  Antisense strand to SEQ ID NO: 767170
ucccaugccaaucauuucu

SEQ ID NO: 767172 - RNA, 19 nt, Artificial Sequence
  Description of Artificial Sequence: Synthetic oligonucleotide
  Sense strand starting at position 2378 of SEQ ID NO: 587106
agaugauauuaaggaauug

SEQ ID NO: 767173 - RNA, 19 nt, Artificial Sequence
  Description of Artificial Sequence: Synthetic oligonucleotide
  Antisense strand to SEQ ID NO: 767172
caauuccuuaauaucaucu

SEQ ID NO: 767174 - RNA, 19 nt, Artificial Sequence
  Description of Artificial Sequence: Synthetic oligonucleotide
  Sense strand starting at position 2388 of SEQ ID NO: 587106
aaggaauuguaguuaaucu

SEQ ID NO: 767175 - RNA, 19 nt, Artificial Sequence
  Description of Artificial Sequence: Synthetic oligonucleotide
  Antisense strand to SEQ ID NO: 767174
agauuaacuacaauuccuu

SEQ ID NO: 767176 - RNA, 19 nt, Artificial Sequence
  Description of Artificial Sequence: Synthetic oligonucleotide
  Sense strand starting at position 2399 of SEQ ID NO: 587106
guuaaucucgucgcgugua

SEQ ID NO: 767177 - RNA, 19 nt, Artificial Sequence
  Description of Artificial Sequence: Synthetic oligonucleotide
  Antisense strand to SEQ ID NO: 767176
uacacgcgacgagauuaac

SEQ ID NO: 767178 - RNA, 19 nt, Artificial Sequence
  Description of Artificial Sequence: Synthetic oligonucleotide
  Sense strand starting at position 2415 of SEQ ID NO: 587106
guaucuguuaagggcuaua

SEQ ID NO: 767179 - RNA, 19 nt, Artificial Sequence
  Description of Artificial Sequence: Synthetic oligonucleotide
  Antisense strand to SEQ ID NO: 767178
uauagcccuuaacagauac

SEQ ID NO: 767180 - RNA, 19 nt, Artificial Sequence
  Description of Artificial Sequence: Synthetic oligonucleotide
  Sense strand starting at position 2425 of SEQ ID NO: 587106
agggcuauaggcugaagua

SEQ ID NO: 767181 - RNA, 19 nt, Artificial Sequence
  Description of Artificial Sequence: Synthetic oligonucleotide
  Antisense strand to SEQ ID NO: 767180
uacuucagccuauagcccu

SEQ ID NO: 767182 - RNA, 19 nt, Artificial Sequence
  Description of Artificial Sequence: Synthetic oligonucleotide
  Sense strand starting at position 2426 of SEQ ID NO: 587106
gggcuauaggcugaaguau

SEQ ID NO: 767183 - RNA, 19 nt, Artificial Sequence
  Description of Artificial Sequence: Synthetic oligonucleotide
  Antisense strand to SEQ ID NO: 767182
auacuucagccuauagccc

SEQ ID NO: 767184 - RNA, 19 nt, Artificial Sequence
  Description of Artificial Sequence: Synthetic oligonucleotide
  Sense strand starting at position 2684 of SEQ ID NO: 587106
ggaagcuaacgcuggaaga

SEQ ID NO: 767185 - RNA, 19 nt, Artificial Sequence
  Description of Artificial Sequence: Synthetic oligonucleotide
  Antisense strand to SEQ ID NO: 767184
ucuuccagcguuagcuucc

SEQ ID NO: 767186 - RNA, 19 nt, Artificial Sequence
  Description of Artificial Sequence: Synthetic oligonucleotide
  Sense strand starting at position 2685 of SEQ ID NO: 587106
gaagcuaacgcuggaagau

SEQ ID NO: 767187 - RNA, 19 nt, Artificial Sequence
  Description of Artificial Sequence: Synthetic oligonucleotide
  Antisense strand to SEQ ID NO: 767186
aucuuccagcguuagcuuc

SEQ ID NO: 767188 - RNA, 19 nt, Artificial Sequence
  Description of Artificial Sequence: Synthetic oligonucleotide
  Sense strand starting at position 2697 of SEQ ID NO: 587106
ggaagaucgcucgaaccca

SEQ ID NO: 767189 - RNA, 19 nt, Artificial Sequence
  Description of Artificial Sequence: Synthetic oligonucleotide
  Antisense strand to SEQ ID NO: 767188
uggguucgagcgaucuucc

SEQ ID NO: 767190 - RNA, 19 nt, Artificial Sequence
  Description of Artificial Sequence: Synthetic oligonucleotide
  Sense strand starting at position 2867 of SEQ ID NO: 587106
cggugauggguacauggaa

SEQ ID NO: 767191 - RNA, 19 nt, Artificial Sequence
  Description of Artificial Sequence: Synthetic oligonucleotide
  Antisense strand to SEQ ID NO: 767190
uuccauguacccaucaccg

SEQ ID NO: 767192 - RNA, 19 nt, Artificial Sequence
  Description of Artificial Sequence: Synthetic oligonucleotide
  Sense strand starting at position 3005 of SEQ ID NO: 587106
gggucuggcccuugaauuc

SEQ ID NO: 767193 - RNA, 19 nt, Artificial Sequence
  Description of Artificial Sequence: Synthetic oligonucleotide
  Antisense strand to SEQ ID NO: 767192
gaauucaagggccagaccc

SEQ ID NO: 767194 - RNA, 19 nt, Artificial Sequence
  Description of Artificial Sequence: Synthetic oligonucleotide
  Sense strand starting at position 3015 of SEQ ID NO: 587106
cuugaauuccgcggaacga

SEQ ID NO: 767195 - RNA, 19 nt, Artificial Sequence
  Description of Artificial Sequence: Synthetic oligonucleotide
  Antisense strand to SEQ ID NO: 767194
ucguuccgcggaauucaag

SEQ ID NO: 767196 - RNA, 19 nt, Artificial Sequence
  Description of Artificial Sequence: Synthetic oligonucleotide
  Sense strand starting at position 3065 of SEQ ID NO: 587106
acuaaacauccgcgagcau

SEQ ID NO: 767197 - RNA, 19 nt, Artificial Sequence
  Description of Artificial Sequence: Synthetic oligonucleotide
  Antisense strand to SEQ ID NO: 767196
augcucgcggauguuuagu

SEQ ID NO: 767198 - RNA, 19 nt, Artificial Sequence
  Description of Artificial Sequence: Synthetic oligonucleotide
  Sense strand starting at position 3098 of SEQ ID NO: 587106
cagcucauuggcgaaagua

SEQ ID NO: 767199 - RNA, 19 nt, Artificial Sequence
  Description of Artificial Sequence: Synthetic oligonucleotide
  Antisense strand to SEQ ID NO: 767198
uacuuucgccaaugagcug

SEQ ID NO: 767200 - RNA, 19 nt, Artificial Sequence
  Description of Artificial Sequence: Synthetic oligonucleotide
  Sense strand starting at position 3649 of SEQ ID NO: 587106
guuuguuggcccgggagga

SEQ ID NO: 767201 - RNA, 19 nt, Artificial Sequence
  Description of Artificial Sequence: Synthetic oligonucleotide
  Antisense strand to SEQ ID NO: 767200
uccucccgggccaacaaac

SEQ ID NO: 767202 - RNA, 19 nt, Artificial Sequence
  Description of Artificial Sequence: Synthetic oligonucleotide
  Sense strand starting at position 3674 of SEQ ID NO: 587106
acauuccugcugugagcau

SEQ ID NO: 767203 - RNA, 19 nt, Artificial Sequence
  Description of Artificial Sequence: Synthetic oligonucleotide
  Antisense strand to SEQ ID NO: 767202
augcucacagcaggaaugu

SEQ ID NO: 767204 - RNA, 19 nt, Artificial Sequence
  Description of Artificial Sequence: Synthetic oligonucleotide
  Sense strand starting at position 3722 of SEQ ID NO: 587106
agccaaggguuucuuuauu

SEQ ID NO: 767205 - RNA, 19 nt, Artificial Sequence
  Description of Artificial Sequence: Synthetic oligonucleotide
  Antisense strand to SEQ ID NO: 767204
aauaaagaaacccuuggcu

SEQ ID NO: 767206 - RNA, 19 nt, Artificial Sequence
  Description of Artificial Sequence: Synthetic oligonucleotide
  Sense strand starting at position 3834 of SEQ ID NO: 587106
cuagaauaaugauggcuga

SEQ ID NO: 767207 - RNA, 19 nt, Artificial Sequence
  Description of Artificial Sequence: Synthetic oligonucleotide
  Antisense strand to SEQ ID NO: 767206
ucagccaucauuauucuag

SEQ ID NO: 767208 - RNA, 19 nt, Artificial Sequence
  Description of Artificial Sequence: Synthetic oligonucleotide
  Sense strand starting at position 3841 of SEQ ID NO: 587106
aaugauggcugagaaccua

SEQ ID NO: 767209 - RNA, 19 nt, Artificial Sequence
  Description of Artificial Sequence: Synthetic oligonucleotide
  Antisense strand to SEQ ID NO: 767208
uagguucucagccaucauu

SEQ ID NO: 767210 - RNA, 19 nt, Artificial Sequence
  Description of Artificial Sequence: Synthetic oligonucleotide
  Sense strand starting at position 3852 of SEQ ID NO: 587106
agaaccuaguguuccgaau

SEQ ID NO: 767211 - RNA, 19 nt, Artificial Sequence
  Description of Artificial Sequence: Synthetic oligonucleotide
  Antisense strand to SEQ ID NO: 767210
auucggaacacuagguucu

SEQ ID NO: 767212 - RNA, 19 nt, Artificial Sequence
  Description of Artificial Sequence: Synthetic oligonucleotide
  Sense strand starting at position 85 of SEQ ID NO: 587107
aggcucauuguacaaugau

SEQ ID NO: 767213 - RNA, 19 nt, Artificial Sequence
  Description of Artificial Sequence: Synthetic oligonucleotide
  Antisense strand to SEQ ID NO: 767212
aucauuguacaaugagccu

SEQ ID NO: 767214 - RNA, 19 nt, Artificial Sequence
  Description of Artificial Sequence: Synthetic oligonucleotide
  Sense strand starting at position 94 of SEQ ID NO: 587107
guacaaugaugguugaucu

SEQ ID NO: 767215 - RNA, 19 nt, Artificial Sequence
  Description of Artificial Sequence: Synthetic oligonucleotide
  Antisense strand to SEQ ID NO: 767214
agaucaaccaucauuguac

SEQ ID NO: 767216 - RNA, 19 nt, Artificial Sequence
  Description of Artificial Sequence: Synthetic oligonucleotide
  Sense strand starting at position 105 of SEQ ID NO: 587107
guugaucugguuuggauau

SEQ ID NO: 767217 - RNA, 19 nt, Artificial Sequence
  Description of Artificial Sequence: Synthetic oligonucleotide
  Antisense strand to SEQ ID NO: 767216
auauccaaaccagaucaac

SEQ ID NO: 767218 - RNA, 19 nt, Artificial Sequence
  Description of Artificial Sequence: Synthetic oligonucleotide
  Sense strand starting at position 270 of SEQ ID NO: 587107
ucaugugagaucugggugu

SEQ ID NO: 767219 - RNA, 19 nt, Artificial Sequence
  Description of Artificial Sequence: Synthetic oligonucleotide
  Antisense strand to SEQ ID NO: 767218
acacccagaucucacauga

SEQ ID NO: 767220 - RNA, 19 nt, Artificial Sequence
  Description of Artificial Sequence: Synthetic oligonucleotide
  Sense strand starting at position 272 of SEQ ID NO: 587107
augugagaucuggguguuu

SEQ ID NO: 767221 - RNA, 19 nt, Artificial Sequence
  Description of Artificial Sequence: Synthetic oligonucleotide
  Antisense strand to SEQ ID NO: 767220
aaacacccagaucucacau

SEQ ID NO: 767222 - RNA, 19 nt, Artificial Sequence
  Description of Artificial Sequence: Synthetic oligonucleotide
  Sense strand starting at position 316 of SEQ ID NO: 587107
ccucucuuaccaggugaca

SEQ ID NO: 767223 - RNA, 19 nt, Artificial Sequence
  Description of Artificial Sequence: Synthetic oligonucleotide
  Antisense strand to SEQ ID NO: 767222
ugucaccugguaagagagg

SEQ ID NO: 767224 - RNA, 19 nt, Artificial Sequence
  Description of Artificial Sequence: Synthetic oligonucleotide
  Sense strand starting at position 526 of SEQ ID NO: 587107
agcaaauacuuagugaaga

SEQ ID NO: 767225 - RNA, 19 nt, Artificial Sequence
  Description of Artificial Sequence: Synthetic oligonucleotide
  Antisense strand to SEQ ID NO: 767224
ucuucacuaaguauuugcu

SEQ ID NO: 767226 - RNA, 19 nt, Artificial Sequence
  Description of Artificial Sequence: Synthetic oligonucleotide
  Sense strand starting at position 577 of SEQ ID NO: 587107
gaguguuugguauacagca

SEQ ID NO: 767227 - RNA, 19 nt, Artificial Sequence
  Description of Artificial Sequence: Synthetic oligonucleotide
  Antisense strand to SEQ ID NO: 767226
ugcuguauaccaaacacuc

SEQ ID NO: 767228 - RNA, 19 nt, Artificial Sequence
  Description of Artificial Sequence: Synthetic oligonucleotide
  Sense strand starting at position 777 of SEQ ID NO: 587107
cuaaauaaguuacuaguca

SEQ ID NO: 767229 - RNA, 19 nt, Artificial Sequence
  Description of Artificial Sequence: Synthetic oligonucleotide
  Antisense strand to SEQ ID NO: 767228
ugacuaguaacuuauuuag

SEQ ID NO: 767230 - RNA, 19 nt, Artificial Sequence
  Description of Artificial Sequence: Synthetic oligonucleotide
  Sense strand starting at position 781 of SEQ ID NO: 587107
auaaguuacuagucaugua

SEQ ID NO: 767231 - RNA, 19 nt, Artificial Sequence
  Description of Artificial Sequence: Synthetic oligonucleotide
  Antisense strand to SEQ ID NO: 767230
uacaugacuaguaacuuau

SEQ ID NO: 767232 - RNA, 19 nt, Artificial Sequence
  Description of Artificial Sequence: Synthetic oligonucleotide
  Sense strand starting at position 794 of SEQ ID NO: 587107
cauguacuuguggaaaguu

SEQ ID NO: 767233 - RNA, 19 nt, Artificial Sequence
  Description of Artificial Sequence: Synthetic oligonucleotide
  Antisense strand to SEQ ID NO: 767232
aacuuuccacaaguacaug

SEQ ID NO: 767234 - RNA, 19 nt, Artificial Sequence
  Description of Artificial Sequence: Synthetic oligonucleotide
  Sense strand starting at position 825 of SEQ ID NO: 587107
uaguuauaggacugggcau

SEQ ID NO: 767235 - RNA, 19 nt, Artificial Sequence
  Description of Artificial Sequence: Synthetic oligonucleotide
  Antisense strand to SEQ ID NO: 767234
augcccaguccuauaacua

SEQ ID NO: 767236 - RNA, 19 nt, Artificial Sequence
  Description of Artificial Sequence: Synthetic oligonucleotide
  Sense strand starting at position 853 of SEQ ID NO: 587107
cguuguaaucccgccacuu

SEQ ID NO: 767237 - RNA, 19 nt, Artificial Sequence
  Description of Artificial Sequence: Synthetic oligonucleotide
  Antisense strand to SEQ ID NO: 767236
aaguggcgggauuacaacg

SEQ ID NO: 767238 - RNA, 19 nt, Artificial Sequence
  Description of Artificial Sequence: Synthetic oligonucleotide
  Sense strand starting at position 855 of SEQ ID NO: 587107
uuguaaucccgccacuuua

SEQ ID NO: 767239 - RNA, 19 nt, Artificial Sequence
  Description of Artificial Sequence: Synthetic oligonucleotide
  Antisense strand to SEQ ID NO: 767238
uaaaguggcgggauuacaa

SEQ ID NO: 767240 - RNA, 19 nt, Artificial Sequence
  Description of Artificial Sequence: Synthetic oligonucleotide
  Sense strand starting at position 1176 of SEQ ID NO: 587107
uuaugugaauaaguggaau

SEQ ID NO: 767241 - RNA, 19 nt, Artificial Sequence
  Description of Artificial Sequence: Synthetic oligonucleotide
  Antisense strand to SEQ ID NO: 767240
auuccacuuauucacauaa

SEQ ID NO: 767242 - RNA, 19 nt, Artificial Sequence
  Description of Artificial Sequence: Synthetic oligonucleotide
  Sense strand starting at position 1333 of SEQ ID NO: 587107
gcauuaaacccucauggac

SEQ ID NO: 767243 - RNA, 19 nt, Artificial Sequence
  Description of Artificial Sequence: Synthetic oligonucleotide
  Antisense strand to SEQ ID NO: 767242
guccaugaggguuuaaugc

SEQ ID NO: 767244 - RNA, 19 nt, Artificial Sequence
  Description of Artificial Sequence: Synthetic oligonucleotide
  Sense strand starting at position 1353 of SEQ ID NO: 587107
cccucuuaccugcaggaua

SEQ ID NO: 767245 - RNA, 19 nt, Artificial Sequence
  Description of Artificial Sequence: Synthetic oligonucleotide
  Antisense strand to SEQ ID NO: 767244
uauccugcagguaagaggg

SEQ ID NO: 767246 - RNA, 19 nt, Artificial Sequence
  Description of Artificial Sequence: Synthetic oligonucleotide
  Sense strand starting at position 1355 of SEQ ID NO: 587107
cucuuaccugcaggauaaa

SEQ ID NO: 767247 - RNA, 19 nt, Artificial Sequence
  Description of Artificial Sequence: Synthetic oligonucleotide
  Antisense strand to SEQ ID NO: 767246
uuuauccugcagguaagag

SEQ ID NO: 767248 - RNA, 19 nt, Artificial Sequence
  Description of Artificial Sequence: Synthetic oligonucleotide
  Sense strand starting at position 1693 of SEQ ID NO: 587107
ucgcgcaaucccuuucuca

SEQ ID NO: 767249 - RNA, 19 nt, Artificial Sequence
  Description of Artificial Sequence: Synthetic oligonucleotide
  Antisense strand to SEQ ID NO: 767248
ugagaaagggauugcgcga

SEQ ID NO: 767250 - RNA, 19 nt, Artificial Sequence
  Description of Artificial Sequence: Synthetic oligonucleotide
  Sense strand starting at position 2283 of SEQ ID NO: 587107
ugagaauagugguucuuaa

SEQ ID NO: 767251 - RNA, 19 nt, Artificial Sequence
  Description of Artificial Sequence: Synthetic oligonucleotide
  Antisense strand to SEQ ID NO: 767250
uuaagaaccacuauucuca

SEQ ID NO: 767252 - RNA, 19 nt, Artificial Sequence
  Description of Artificial Sequence: Synthetic oligonucleotide
  Sense strand starting at position 2294 of SEQ ID NO: 587107
guucuuaacucuguaagua

SEQ ID NO: 767253 - RNA, 19 nt, Artificial Sequence
  Description of Artificial Sequence: Synthetic oligonucleotide
  Antisense strand to SEQ ID NO: 767252
uacuuacagaguuaagaac

SEQ ID NO: 767254 - RNA, 19 nt, Artificial Sequence
  Description of Artificial Sequence: Synthetic oligonucleotide
  Sense strand starting at position 2295 of SEQ ID NO: 587107
uucuuaacucuguaaguau

SEQ ID NO: 767255 - RNA, 19 nt, Artificial Sequence
  Description of Artificial Sequence: Synthetic oligonucleotide
  Antisense strand to SEQ ID NO: 767254
auacuuacagaguuaagaa

SEQ ID NO: 767256 - RNA, 19 nt, Artificial Sequence
  Description of Artificial Sequence: Synthetic oligonucleotide
  Sense strand starting at position 2536 of SEQ ID NO: 587107
cgucuaggucagaguuguu

SEQ ID NO: 767257 - RNA, 19 nt, Artificial Sequence
  Description of Artificial Sequence: Synthetic oligonucleotide
  Antisense strand to SEQ ID NO: 767256
aacaacucugaccuagacg

SEQ ID NO: 767258 - RNA, 19 nt, Artificial Sequence
  Description of Artificial Sequence: Synthetic oligonucleotide
  Sense strand starting at position 2552 of SEQ ID NO: 587107
guucaaacugaggguuaug

SEQ ID NO: 767259 - RNA, 19 nt, Artificial Sequence
  Description of Artificial Sequence: Synthetic oligonucleotide
  Antisense strand to SEQ ID NO: 767258
cauaacccucaguuugaac

SEQ ID NO: 767260 - RNA, 19 nt, Artificial Sequence
  Description of Artificial Sequence: Synthetic oligonucleotide
  Sense strand starting at position 2984 of SEQ ID NO: 587107
guaagaauuguggaaguuu

SEQ ID NO: 767261 - RNA, 19 nt, Artificial Sequence
  Description of Artificial Sequence: Synthetic oligonucleotide
  Antisense strand to SEQ ID NO: 767260
aaacuuccacaauucuuac

SEQ ID NO: 767262 - RNA, 19 nt, Artificial Sequence
  Description of Artificial Sequence: Synthetic oligonucleotide
  Sense strand starting at position 3011 of SEQ ID NO: 587107
uguguauguagaugauauu

SEQ ID NO: 767263 - RNA, 19 nt, Artificial Sequence
  Description of Artificial Sequence: Synthetic oligonucleotide
  Antisense strand to SEQ ID NO: 767262
aauaucaucuacauacaca

SEQ ID NO: 767264 - RNA, 19 nt, Artificial Sequence
  Description of Artificial Sequence: Synthetic oligonucleotide
  Sense strand starting at position 3041 of SEQ ID NO: 587107
cugagacauguuugagcau

SEQ ID NO: 767265 - RNA, 19 nt, Artificial Sequence
  Description of Artificial Sequence: Synthetic oligonucleotide
  Antisense strand to SEQ ID NO: 767264
augcucaaacaugucucag

SEQ ID NO: 767266 - RNA, 19 nt, Artificial Sequence
  Description of Artificial Sequence: Synthetic oligonucleotide
  Sense strand starting at position 3044 of SEQ ID NO: 587107
agacauguuugagcaugaa

SEQ ID NO: 767267 - RNA, 19 nt, Artificial Sequence
  Description of Artificial Sequence: Synthetic oligonucleotide
  Antisense strand to SEQ ID NO: 767266
uucaugcucaaacaugucu

SEQ ID NO: 767268 - RNA, 19 nt, Artificial Sequence
  Description of Artificial Sequence: Synthetic oligonucleotide
  Sense strand starting at position 3047 of SEQ ID NO: 587107
cauguuugagcaugaaagu

SEQ ID NO: 767269 - RNA, 19 nt, Artificial Sequence
  Description of Artificial Sequence: Synthetic oligonucleotide
  Antisense strand to SEQ ID NO: 767268
acuuucaugcucaaacaug

SEQ ID NO: 767270 - RNA, 19 nt, Artificial Sequence
  Description of Artificial Sequence: Synthetic oligonucleotide
  Sense strand starting at position 3057 of SEQ ID NO: 587107
caugaaaguggcuguuaau

SEQ ID NO: 767271 - RNA, 19 nt, Artificial Sequence
  Description of Artificial Sequence: Synthetic oligonucleotide
  Antisense strand to SEQ ID NO: 767270
auuaacagccacuuucaug

SEQ ID NO: 767272 - RNA, 19 nt, Artificial Sequence
  Description of Artificial Sequence: Synthetic oligonucleotide
  Sense strand starting at position 3088 of SEQ ID NO: 587107
ggaccaacgcuguaaucua

SEQ ID NO: 767273 - RNA, 19 nt, Artificial Sequence
  Description of Artificial Sequence: Synthetic oligonucleotide
  Antisense strand to SEQ ID NO: 767272
uagauuacagcguuggucc

SEQ ID NO: 767274 - RNA, 19 nt, Artificial Sequence
  Description of Artificial Sequence: Synthetic oligonucleotide
  Sense strand starting at position 3095 of SEQ ID NO: 587107
cgcuguaaucuagaauugu

SEQ ID NO: 767275 - RNA, 19 nt, Artificial Sequence
  Description of Artificial Sequence: Synthetic oligonucleotide
  Antisense strand to SEQ ID NO: 767274
acaauucuagauuacagcg

SEQ ID NO: 767276 - RNA, 19 nt, Artificial Sequence
  Description of Artificial Sequence: Synthetic oligonucleotide
  Sense strand starting at position 3104 of SEQ ID NO: 587107
cuagaauugucuccagcca

SEQ ID NO: 767277 - RNA, 19 nt, Artificial Sequence
  Description of Artificial Sequence: Synthetic oligonucleotide
  Antisense strand to SEQ ID NO: 767276
uggcuggagacaauucuag

SEQ ID NO: 767278 - RNA, 19 nt, Artificial Sequence
  Description of Artificial Sequence: Synthetic oligonucleotide
  Sense strand starting at position 3150 of SEQ ID NO: 587107
uguacucagucagcauaua

SEQ ID NO: 767279 - RNA, 19 nt, Artificial Sequence
  Description of Artificial Sequence: Synthetic oligonucleotide
  Antisense strand to SEQ ID NO: 767278
uauaugcugacugaguaca

SEQ ID NO: 767280 - RNA, 19 nt, Artificial Sequence
  Description of Artificial Sequence: Synthetic oligonucleotide
  Sense strand starting at position 3151 of SEQ ID NO: 587107
guacucagucagcauauaa

SEQ ID NO: 767281 - RNA, 19 nt, Artificial Sequence
  Description of Artificial Sequence: Synthetic oligonucleotide
  Antisense strand to SEQ ID NO: 767280
uuauaugcugacugaguac

SEQ ID NO: 767282 - RNA, 19 nt, Artificial Sequence
  Description of Artificial Sequence: Synthetic oligonucleotide
  Sense strand starting at position 3255 of SEQ ID NO: 587107
ucaugaacugucugaaaua

SEQ ID NO: 767283 - RNA, 19 nt, Artificial Sequence
  Description of Artificial Sequence: Synthetic oligonucleotide
  Antisense strand to SEQ ID NO: 767282
uauuucagacaguucauga

SEQ ID NO: 767284 - RNA, 19 nt, Artificial Sequence
  Description of Artificial Sequence: Synthetic oligonucleotide
  Sense strand starting at position 3441 of SEQ ID NO: 587107
cccuuaguccaggaguucu

SEQ ID NO: 767285 - RNA, 19 nt, Artificial Sequence
  Description of Artificial Sequence: Synthetic oligonucleotide
  Antisense strand to SEQ ID NO: 767284
agaacuccuggacuaaggg

SEQ ID NO: 767286 - RNA, 19 nt, Artificial Sequence
  Description of Artificial Sequence: Synthetic oligonucleotide
  Sense strand starting at position 3745 of SEQ ID NO: 587107
auuccuugacuagagcauu

SEQ ID NO: 767287 - RNA, 19 nt, Artificial Sequence
  Description of Artificial Sequence: Synthetic oligonucleotide
  Antisense strand to SEQ ID NO: 767286
aaugcucuagucaaggaau

SEQ ID NO: 767288 - RNA, 19 nt, Artificial Sequence
  Description of Artificial Sequence: Synthetic oligonucleotide
  Sense strand starting at position 3966 of SEQ ID NO: 587107
augguuauuuaugugcuaa

SEQ ID NO: 767289 - RNA, 19 nt, Artificial Sequence
  Description of Artificial Sequence: Synthetic oligonucleotide
  Antisense strand to SEQ ID NO: 767288
uuagcacauaaauaaccau

SEQ ID NO: 767290 - RNA, 19 nt, Artificial Sequence
  Description of Artificial Sequence: Synthetic oligonucleotide
  Sense strand starting at position 3968 of SEQ ID NO: 587107
gguuauuuaugugcuaaua

SEQ ID NO: 767291 - RNA, 19 nt, Artificial Sequence
  Description of Artificial Sequence: Synthetic oligonucleotide
  Antisense strand to SEQ ID NO: 767290
uauuagcacauaaauaacc

SEQ ID NO: 767292 - RNA, 19 nt, Artificial Sequence
  Description of Artificial Sequence: Synthetic oligonucleotide
  Sense strand starting at position 2 of SEQ ID NO: 587108
uuaguugcuccgcucuaau

SEQ ID NO: 767293 - RNA, 19 nt, Artificial Sequence
  Description of Artificial Sequence: Synthetic oligonucleotide
  Antisense strand to SEQ ID NO: 767292
auuagagcggagcaacuaa

SEQ ID NO: 767294 - RNA, 19 nt, Artificial Sequence
  Description of Artificial Sequence: Synthetic oligonucleotide
  Sense strand starting at position 347 of SEQ ID NO: 587108
gccaaacaacuugaguuau

SEQ ID NO: 767295 - RNA, 19 nt, Artificial Sequence
  Description of Artificial Sequence: Synthetic oligonucleotide
  Antisense strand to SEQ ID NO: 767294
auaacucaaguuguuuggc

SEQ ID NO: 767296 - RNA, 19 nt, Artificial Sequence
  Description of Artificial Sequence: Synthetic oligonucleotide
  Sense strand starting at position 559 of SEQ ID NO: 587108
cucgauuugucacaggaac

SEQ ID NO: 767297 - RNA, 19 nt, Artificial Sequence
  Description of Artificial Sequence: Synthetic oligonucleotide
  Antisense strand to SEQ ID NO: 767296
guuccugugacaaaucgag

SEQ ID NO: 767298 - RNA, 19 nt, Artificial Sequence
  Description of Artificial Sequence: Synthetic oligonucleotide
  Sense strand starting at position 570 of SEQ ID NO: 587108
acaggaaccuucgcgaauu

SEQ ID NO: 767299 - RNA, 19 nt, Artificial Sequence
  Description of Artificial Sequence: Synthetic oligonucleotide
  Antisense strand to SEQ ID NO: 767298
aauucgcgaagguuccugu

SEQ ID NO: 767300 - RNA, 19 nt, Artificial Sequence
  Description of Artificial Sequence: Synthetic oligonucleotide
  Sense strand starting at position 580 of SEQ ID NO: 587108
ucgcgaauuucucuagcug

SEQ ID NO: 767301 - RNA, 19 nt, Artificial Sequence
  Description of Artificial Sequence: Synthetic oligonucleotide
  Antisense strand to SEQ ID NO: 767300
cagcuagagaaauucgcga

SEQ ID NO: 767302 - RNA, 19 nt, Artificial Sequence
  Description of Artificial Sequence: Synthetic oligonucleotide
  Sense strand starting at position 592 of SEQ ID NO: 587108
cuagcugguccugaaauaa

SEQ ID NO: 767303 - RNA, 19 nt, Artificial Sequence
  Description of Artificial Sequence: Synthetic oligonucleotide
  Antisense strand to SEQ ID NO: 767302
uuauuucaggaccagcuag

SEQ ID NO: 767304 - RNA, 19 nt, Artificial Sequence
  Description of Artificial Sequence: Synthetic oligonucleotide
  Sense strand starting at position 602 of SEQ ID NO: 587108
cugaaauaaucagucugga

SEQ ID NO: 767305 - RNA, 19 nt, Artificial Sequence
  Description of Artificial Sequence: Synthetic oligonucleotide
  Antisense strand to SEQ ID NO: 767304
uccagacugauuauuucag

SEQ ID NO: 767306 - RNA, 19 nt, Artificial Sequence
  Description of Artificial Sequence: Synthetic oligonucleotide
  Sense strand starting at position 645 of SEQ ID NO: 587108
gggcucuuaucaguuauag

SEQ ID NO: 767307 - RNA, 19 nt, Artificial Sequence
  Description of Artificial Sequence: Synthetic oligonucleotide
  Antisense strand to SEQ ID NO: 767306
cuauaacugauaagagccc

SEQ ID NO: 767308 - RNA, 19 nt, Artificial Sequence
  Description of Artificial Sequence: Synthetic oligonucleotide
  Sense strand starting at position 721 of SEQ ID NO: 587108
gggugucacuuggcgacau

SEQ ID NO: 767309 - RNA, 19 nt, Artificial Sequence
  Description of Artificial Sequence: Synthetic oligonucleotide
  Antisense strand to SEQ ID NO: 767308
augucgccaagugacaccc

SEQ ID NO: 767310 - RNA, 19 nt, Artificial Sequence
  Description of Artificial Sequence: Synthetic oligonucleotide
  Sense strand starting at position 733 of SEQ ID NO: 587108
gcgacaucagggcaaguau

SEQ ID NO: 767311 - RNA, 19 nt, Artificial Sequence
  Description of Artificial Sequence: Synthetic oligonucleotide
  Antisense strand to SEQ ID NO: 767310
auacuugcccugaugucgc

SEQ ID NO: 767312 - RNA, 19 nt, Artificial Sequence
  Description of Artificial Sequence: Synthetic oligonucleotide
  Sense strand starting at position 919 of SEQ ID NO: 587108
caggcuuugucaguggaaa

SEQ ID NO: 767313 - RNA, 19 nt, Artificial Sequence
  Description of Artificial Sequence: Synthetic oligonucleotide
  Antisense strand to SEQ ID NO: 767312
uuuccacugacaaagccug

SEQ ID NO: 767314 - RNA, 19 nt, Artificial Sequence
  Description of Artificial Sequence: Synthetic oligonucleotide
  Sense strand starting at position 920 of SEQ ID NO: 587108
aggcuuugucaguggaaag

SEQ ID NO: 767315 - RNA, 19 nt, Artificial Sequence
  Description of Artificial Sequence: Synthetic oligonucleotide
  Antisense strand to SEQ ID NO: 767314
cuuuccacugacaaagccu

SEQ ID NO: 767316 - RNA, 19 nt, Artificial Sequence
  Description of Artificial Sequence: Synthetic oligonucleotide
  Sense strand starting at position 921 of SEQ ID NO: 587108
ggcuuugucaguggaaagg

SEQ ID NO: 767317 - RNA, 19 nt, Artificial Sequence
  Description of Artificial Sequence: Synthetic oligonucleotide
  Antisense strand to SEQ ID NO: 767316
ccuuuccacugacaaagcc

SEQ ID NO: 767318 - RNA, 19 nt, Artificial Sequence
  Description of Artificial Sequence: Synthetic oligonucleotide
  Sense strand starting at position 1002 of SEQ ID NO: 587108
agagcucuuucuuagaaga

SEQ ID NO: 767319 - RNA, 19 nt, Artificial Sequence
  Description of Artificial Sequence: Synthetic oligonucleotide
  Antisense strand to SEQ ID NO: 767318
ucuucuaagaaagagcucu

SEQ ID NO: 767320 - RNA, 19 nt, Artificial Sequence
  Description of Artificial Sequence: Synthetic oligonucleotide
  Sense strand starting at position 1032 of SEQ ID NO: 587108
gcaggagacucucuuccua

SEQ ID NO: 767321 - RNA, 19 nt, Artificial Sequence
  Description of Artificial Sequence: Synthetic oligonucleotide
  Antisense strand to SEQ ID NO: 767320
uaggaagagagucuccugc

SEQ ID NO: 767322 - RNA, 19 nt, Artificial Sequence
  Description of Artificial Sequence: Synthetic oligonucleotide
  Sense strand starting at position 1034 of SEQ ID NO: 587108
aggagacucucuuccuaau

SEQ ID NO: 767323 - RNA, 19 nt, Artificial Sequence
  Description of Artificial Sequence: Synthetic oligonucleotide
  Antisense strand to SEQ ID NO: 767322
auuaggaagagagucuccu

SEQ ID NO: 767324 - RNA, 19 nt, Artificial Sequence
  Description of Artificial Sequence: Synthetic oligonucleotide
  Sense strand starting at position 1105 of SEQ ID NO: 587108
agcauugugguuggaggaa

SEQ ID NO: 767325 - RNA, 19 nt, Artificial Sequence
  Description of Artificial Sequence: Synthetic oligonucleotide
  Antisense strand to SEQ ID NO: 767324
uuccuccaaccacaaugcu

SEQ ID NO: 767326 - RNA, 19 nt, Artificial Sequence
  Description of Artificial Sequence: Synthetic oligonucleotide
  Sense strand starting at position 1151 of SEQ ID NO: 587108
ggcuucccucucgggaauu

SEQ ID NO: 767327 - RNA, 19 nt, Artificial Sequence
  Description of Artificial Sequence: Synthetic oligonucleotide
  Antisense strand to SEQ ID NO: 767326
aauucccgagagggaagcc

SEQ ID NO: 767328 - RNA, 19 nt, Artificial Sequence
  Description of Artificial Sequence: Synthetic oligonucleotide
  Sense strand starting at position 1290 of SEQ ID NO: 587108
ccaaacgucgcggaggaaa

SEQ ID NO: 767329 - RNA, 19 nt, Artificial Sequence
  Description of Artificial Sequence: Synthetic oligonucleotide
  Antisense strand to SEQ ID NO: 767328
uuuccuccgcgacguuugg

SEQ ID NO: 767330 - RNA, 19 nt, Artificial Sequence
  Description of Artificial Sequence: Synthetic oligonucleotide
  Sense strand starting at position 2056 of SEQ ID NO: 587108
gcgggucuggucgcugaga

SEQ ID NO: 767331 - RNA, 19 nt, Artificial Sequence
  Description of Artificial Sequence: Synthetic oligonucleotide
  Antisense strand to SEQ ID NO: 767330
ucucagcgaccagacccgc

SEQ ID NO: 767332 - RNA, 19 nt, Artificial Sequence
  Description of Artificial Sequence: Synthetic oligonucleotide
  Sense strand starting at position 2206 of SEQ ID NO: 587108
ugucguuaucaucauccua

SEQ ID NO: 767333 - RNA, 19 nt, Artificial Sequence
  Description of Artificial Sequence: Synthetic oligonucleotide
  Antisense strand to SEQ ID NO: 767332
uaggaugaugauaacgaca

SEQ ID NO: 767334 - RNA, 19 nt, Artificial Sequence
  Description of Artificial Sequence: Synthetic oligonucleotide
  Sense strand starting at position 2221 of SEQ ID NO: 587108
ccuaaacgauaagaguaaa

SEQ ID NO: 767335 - RNA, 19 nt, Artificial Sequence
  Description of Artificial Sequence: Synthetic oligonucleotide
  Antisense strand to SEQ ID NO: 767334
uuuacucuuaucguuuagg

SEQ ID NO: 767336 - RNA, 19 nt, Artificial Sequence
  Description of Artificial Sequence: Synthetic oligonucleotide
  Sense strand starting at position 2250 of SEQ ID NO: 587108
auuauuacauucguggauu

SEQ ID NO: 767337 - RNA, 19 nt, Artificial Sequence
  Description of Artificial Sequence: Synthetic oligonucleotide
  Antisense strand to SEQ ID NO: 767336
aauccacgaauguaauaau

SEQ ID NO: 767338 - RNA, 19 nt, Artificial Sequence
  Description of Artificial Sequence: Synthetic oligonucleotide
  Sense strand starting at position 2306 of SEQ ID NO: 587108
agcuguuaauuucuuugau

SEQ ID NO: 767339 - RNA, 19 nt, Artificial Sequence
  Description of Artificial Sequence: Synthetic oligonucleotide
  Antisense strand to SEQ ID NO: 767338
aucaaagaaauuaacagcu

SEQ ID NO: 767340 - RNA, 19 nt, Artificial Sequence
  Description of Artificial Sequence: Synthetic oligonucleotide
  Sense strand starting at position 2307 of SEQ ID NO: 587108
gcuguuaauuucuuugauu

SEQ ID NO: 767341 - RNA, 19 nt, Artificial Sequence
  Description of Artificial Sequence: Synthetic oligonucleotide
  Antisense strand to SEQ ID NO: 767340
aaucaaagaaauuaacagc

SEQ ID NO: 767342 - RNA, 19 nt, Artificial Sequence
  Description of Artificial Sequence: Synthetic oligonucleotide
  Sense strand starting at position 2405 of SEQ ID NO: 587108
ccucguuggcuggagagaa

SEQ ID NO: 767343 - RNA, 19 nt, Artificial Sequence
  Description of Artificial Sequence: Synthetic oligonucleotide
  Antisense strand to SEQ ID NO: 767342
uucucuccagccaacgagg

SEQ ID NO: 767344 - RNA, 19 nt, Artificial Sequence
  Description of Artificial Sequence: Synthetic oligonucleotide
  Sense strand starting at position 2406 of SEQ ID NO: 587108
cucguuggcuggagagaau

SEQ ID NO: 767345 - RNA, 19 nt, Artificial Sequence
  Description of Artificial Sequence: Synthetic oligonucleotide
  Antisense strand to SEQ ID NO: 767344
auucucuccagccaacgag

SEQ ID NO: 767346 - RNA, 19 nt, Artificial Sequence
  Description of Artificial Sequence: Synthetic oligonucleotide
  Sense strand starting at position 2420 of SEQ ID NO: 587108
agaauuuguuuccaaggau

SEQ ID NO: 767347 - RNA, 19 nt, Artificial Sequence
  Description of Artificial Sequence: Synthetic oligonucleotide
  Antisense strand to SEQ ID NO: 767346
auccuuggaaacaaauucu

SEQ ID NO: 767348 - RNA, 19 nt, Artificial Sequence
  Description of Artificial Sequence: Synthetic oligonucleotide
  Sense strand starting at position 2530 of SEQ ID NO: 587108
gugguaaggucagaaauaa

SEQ ID NO: 767349 - RNA, 19 nt, Artificial Sequence
  Description of Artificial Sequence: Synthetic oligonucleotide
  Antisense strand to SEQ ID NO: 767348
uuauuucugaccuuaccac

SEQ ID NO: 767350 - RNA, 19 nt, Artificial Sequence
  Description of Artificial Sequence: Synthetic oligonucleotide
  Sense strand starting at position 2681 of SEQ ID NO: 587108
gcuggacaugagggauaua

SEQ ID NO: 767351 - RNA, 19 nt, Artificial Sequence
  Description of Artificial Sequence: Synthetic oligonucleotide
  Antisense strand to SEQ ID NO: 767350
uauaucccucauguccagc

SEQ ID NO: 767352 - RNA, 19 nt, Artificial Sequence
  Description of Artificial Sequence: Synthetic oligonucleotide
  Sense strand starting at position 2990 of SEQ ID NO: 587108
agagcaagaucuguuucca

SEQ ID NO: 767353 - RNA, 19 nt, Artificial Sequence
  Description of Artificial Sequence: Synthetic oligonucleotide
  Antisense strand to SEQ ID NO: 767352
uggaaacagaucuugcucu

SEQ ID NO: 767354 - RNA, 19 nt, Artificial Sequence
  Description of Artificial Sequence: Synthetic oligonucleotide
  Sense strand starting at position 3041 of SEQ ID NO: 587108
ccuaguauagccuguggau

SEQ ID NO: 767355 - RNA, 19 nt, Artificial Sequence
  Description of Artificial Sequence: Synthetic oligonucleotide
  Antisense strand to SEQ ID NO: 767354
auccacaggcuauacuagg

SEQ ID NO: 767356 - RNA, 19 nt, Artificial Sequence
  Description of Artificial Sequence: Synthetic oligonucleotide
  Sense strand starting at position 3090 of SEQ ID NO: 587108
uagaaaugccgcuagagcu

SEQ ID NO: 767357 - RNA, 19 nt, Artificial Sequence
  Description of Artificial Sequence: Synthetic oligonucleotide
  Antisense strand to SEQ ID NO: 767356
agcucuagcggcauuucua

SEQ ID NO: 767358 - RNA, 19 nt, Artificial Sequence
  Description of Artificial Sequence: Synthetic oligonucleotide
  Sense strand starting at position 3254 of SEQ ID NO: 587108
gccagugaagaguguucca

SEQ ID NO: 767359 - RNA, 19 nt, Artificial Sequence
  Description of Artificial Sequence: Synthetic oligonucleotide
  Antisense strand to SEQ ID NO: 767358
uggaacacucuucacuggc

SEQ ID NO: 767360 - RNA, 19 nt, Artificial Sequence
  Description of Artificial Sequence: Synthetic oligonucleotide
  Sense strand starting at position 3270 of SEQ ID NO: 587108
ccaggcaucgccuauauuu

SEQ ID NO: 767361 - RNA, 19 nt, Artificial Sequence
  Description of Artificial Sequence: Synthetic oligonucleotide
  Antisense strand to SEQ ID NO: 767360
aaauauaggcgaugccugg

SEQ ID NO: 767362 - RNA, 19 nt, Artificial Sequence
  Description of Artificial Sequence: Synthetic oligonucleotide
  Sense strand starting at position 3348 of SEQ ID NO: 587108
acacuuguacuuugucaga

SEQ ID NO: 767363 - RNA, 19 nt, Artificial Sequence
  Description of Artificial Sequence: Synthetic oligonucleotide
  Antisense strand to SEQ ID NO: 767362
ucugacaaaguacaagugu

SEQ ID NO: 767364 - RNA, 19 nt, Artificial Sequence
  Description of Artificial Sequence: Synthetic oligonucleotide
  Sense strand starting at position 3367 of SEQ ID NO: 587108
ccauguguugugaguugag

SEQ ID NO: 767365 - RNA, 19 nt, Artificial Sequence
  Description of Artificial Sequence: Synthetic oligonucleotide
  Antisense strand to SEQ ID NO: 767364
cucaacucacaacacaugg

SEQ ID NO: 767366 - RNA, 19 nt, Artificial Sequence
  Description of Artificial Sequence: Synthetic oligonucleotide
  Sense strand starting at position 3379 of SEQ ID NO: 587108
aguugagccuuccuuacau

SEQ ID NO: 767367 - RNA, 19 nt, Artificial Sequence
  Description of Artificial Sequence: Synthetic oligonucleotide
  Antisense strand to SEQ ID NO: 767366
auguaaggaaggcucaacu

SEQ ID NO: 767368 - RNA, 19 nt, Artificial Sequence
  Description of Artificial Sequence: Synthetic oligonucleotide
  Sense strand starting at position 3432 of SEQ ID NO: 587108
augagcuaagauugaacau

SEQ ID NO: 767369 - RNA, 19 nt, Artificial Sequence
  Description of Artificial Sequence: Synthetic oligonucleotide
  Antisense strand to SEQ ID NO: 767368
auguucaaucuuagcucau

SEQ ID NO: 767370 - RNA, 19 nt, Artificial Sequence
  Description of Artificial Sequence: Synthetic oligonucleotide
  Sense strand starting at position 3712 of SEQ ID NO: 587108
cugaaaggaguguauuguu

SEQ ID NO: 767371 - RNA, 19 nt, Artificial Sequence
  Description of Artificial Sequence: Synthetic oligonucleotide
  Antisense strand to SEQ ID NO: 767370
aacaauacacuccuuucag

SEQ ID NO: 767372 - RNA, 19 nt, Artificial Sequence
  Description of Artificial Sequence: Synthetic oligonucleotide
  Sense strand starting at position 330 of SEQ ID NO: 587109
gccaaacaacuugaguuau

SEQ ID NO: 767373 - RNA, 19 nt, Artificial Sequence
  Description of Artificial Sequence: Synthetic oligonucleotide
  Antisense strand to SEQ ID NO: 767372
auaacucaaguuguuuggc

SEQ ID NO: 767374 - RNA, 19 nt, Artificial Sequence
  Description of Artificial Sequence: Synthetic oligonucleotide
  Sense strand starting at position 542 of SEQ ID NO: 587109
cucgauuugucacaggaac

SEQ ID NO: 767375 - RNA, 19 nt, Artificial Sequence
  Description of Artificial Sequence: Synthetic oligonucleotide
  Antisense strand to SEQ ID NO: 767374
guuccugugacaaaucgag

SEQ ID NO: 767376 - RNA, 19 nt, Artificial Sequence
  Description of Artificial Sequence: Synthetic oligonucleotide
  Sense strand starting at position 553 of SEQ ID NO: 587109
acaggaaccuucgcgaauu

SEQ ID NO: 767377 - RNA, 19 nt, Artificial Sequence
  Description of Artificial Sequence: Synthetic oligonucleotide
  Antisense strand to SEQ ID NO: 767376
aauucgcgaagguuccugu

SEQ ID NO: 767378 - RNA, 19 nt, Artificial Sequence
  Description of Artificial Sequence: Synthetic oligonucleotide
  Sense strand starting at position 563 of SEQ ID NO: 587109
ucgcgaauuucucuagcug

SEQ ID NO: 767379 - RNA, 19 nt, Artificial Sequence
  Description of Artificial Sequence: Synthetic oligonucleotide
  Antisense strand to SEQ ID NO: 767378
cagcuagagaaauucgcga

SEQ ID NO: 767380 - RNA, 19 nt, Artificial Sequence
  Description of Artificial Sequence: Synthetic oligonucleotide
  Sense strand starting at position 575 of SEQ ID NO: 587109
cuagcugguccugaaauaa

SEQ ID NO: 767381 - RNA, 19 nt, Artificial Sequence
  Description of Artificial Sequence: Synthetic oligonucleotide
  Antisense strand to SEQ ID NO: 767380
uuauuucaggaccagcuag

SEQ ID NO: 767382 - RNA, 19 nt, Artificial Sequence
  Description of Artificial Sequence: Synthetic oligonucleotide
  Sense strand starting at position 585 of SEQ ID NO: 587109
cugaaauaaucagucugga

SEQ ID NO: 767383 - RNA, 19 nt, Artificial Sequence
  Description of Artificial Sequence: Synthetic oligonucleotide
  Antisense strand to SEQ ID NO: 767382
uccagacugauuauuucag

SEQ ID NO: 767384 - RNA, 19 nt, Artificial Sequence
  Description of Artificial Sequence: Synthetic oligonucleotide
  Sense strand starting at position 628 of SEQ ID NO: 587109
gggcucuuaucaguuauag

SEQ ID NO: 767385 - RNA, 19 nt, Artificial Sequence
  Description of Artificial Sequence: Synthetic oligonucleotide
  Antisense strand to SEQ ID NO: 767384
cuauaacugauaagagccc

SEQ ID NO: 767386 - RNA, 19 nt, Artificial Sequence
  Description of Artificial Sequence: Synthetic oligonucleotide
  Sense strand starting at position 704 of SEQ ID NO: 587109
gggugucacuuggcgacau

SEQ ID NO: 767387 - RNA, 19 nt, Artificial Sequence
  Description of Artificial Sequence: Synthetic oligonucleotide
  Antisense strand to SEQ ID NO: 767386
augucgccaagugacaccc

SEQ ID NO: 767388 - RNA, 19 nt, Artificial Sequence
  Description of Artificial Sequence: Synthetic oligonucleotide
  Sense strand starting at position 716 of SEQ ID NO: 587109
gcgacaucagggcaaguau

SEQ ID NO: 767389 - RNA, 19 nt, Artificial Sequence
  Description of Artificial Sequence: Synthetic oligonucleotide
  Antisense strand to SEQ ID NO: 767388
auacuugcccugaugucgc

SEQ ID NO: 767390 - RNA, 19 nt, Artificial Sequence
  Description of Artificial Sequence: Synthetic oligonucleotide
  Sense strand starting at position 902 of SEQ ID NO: 587109
caggcuuugucaguggaaa

SEQ ID NO: 767391 - RNA, 19 nt, Artificial Sequence
  Description of Artificial Sequence: Synthetic oligonucleotide
  Antisense strand to SEQ ID NO: 767390
uuuccacugacaaagccug

SEQ ID NO: 767392 - RNA, 19 nt, Artificial Sequence
  Description of Artificial Sequence: Synthetic oligonucleotide
  Sense strand starting at position 903 of SEQ ID NO: 587109
aggcuuugucaguggaaag

SEQ ID NO: 767393 - RNA, 19 nt, Artificial Sequence
  Description of Artificial Sequence: Synthetic oligonucleotide
  Antisense strand to SEQ ID NO: 767392
cuuuccacugacaaagccu

SEQ ID NO: 767394 - RNA, 19 nt, Artificial Sequence
  Description of Artificial Sequence: Synthetic oligonucleotide
  Sense strand starting at position 904 of SEQ ID NO: 587109
ggcuuugucaguggaaagg

SEQ ID NO: 767395 - RNA, 19 nt, Artificial Sequence
  Description of Artificial Sequence: Synthetic oligonucleotide
  Antisense strand to SEQ ID NO: 767394
ccuuuccacugacaaagcc

SEQ ID NO: 767396 - RNA, 19 nt, Artificial Sequence
  Description of Artificial Sequence: Synthetic oligonucleotide
  Sense strand starting at position 985 of SEQ ID NO: 587109
agagcucuuucuuagaaga

SEQ ID NO: 767397 - RNA, 19 nt, Artificial Sequence
  Description of Artificial Sequence: Synthetic oligonucleotide
  Antisense strand to SEQ ID NO: 767396
ucuucuaagaaagagcucu

SEQ ID NO: 767398 - RNA, 19 nt, Artificial Sequence
  Description of Artificial Sequence: Synthetic oligonucleotide
  Sense strand starting at position 1015 of SEQ ID NO: 587109
gcaggagacucucuuccua

SEQ ID NO: 767399 - RNA, 19 nt, Artificial Sequence
  Description of Artificial Sequence: Synthetic oligonucleotide
  Antisense strand to SEQ ID NO: 767398
uaggaagagagucuccugc

SEQ ID NO: 767400 - RNA, 19 nt, Artificial Sequence
  Description of Artificial Sequence: Synthetic oligonucleotide
  Sense strand starting at position 1017 of SEQ ID NO: 587109
aggagacucucuuccuaau

SEQ ID NO: 767401 - RNA, 19 nt, Artificial Sequence
  Description of Artificial Sequence: Synthetic oligonucleotide
  Antisense strand to SEQ ID NO: 767400
auuaggaagagagucuccu

SEQ ID NO: 767402 - RNA, 19 nt, Artificial Sequence
  Description of Artificial Sequence: Synthetic oligonucleotide
  Sense strand starting at position 1088 of SEQ ID NO: 587109
agcauugugguuggaggaa

SEQ ID NO: 767403 - RNA, 19 nt, Artificial Sequence
  Description of Artificial Sequence: Synthetic oligonucleotide
  Antisense strand to SEQ ID NO: 767402
uuccuccaaccacaaugcu

SEQ ID NO: 767404 - RNA, 19 nt, Artificial Sequence
  Description of Artificial Sequence: Synthetic oligonucleotide
  Sense strand starting at position 1134 of SEQ ID NO: 587109
ggcuucccucucgggaauu

SEQ ID NO: 767405 - RNA, 19 nt, Artificial Sequence
  Description of Artificial Sequence: Synthetic oligonucleotide
  Antisense strand to SEQ ID NO: 767404
aauucccgagagggaagcc

SEQ ID NO: 767406 - RNA, 19 nt, Artificial Sequence
  Description of Artificial Sequence: Synthetic oligonucleotide
  Sense strand starting at position 1273 of SEQ ID NO: 587109
ccaaacgucgcggaggaaa

SEQ ID NO: 767407 - RNA, 19 nt, Artificial Sequence
  Description of Artificial Sequence: Synthetic oligonucleotide
  Antisense strand to SEQ ID NO: 767406
uuuccuccgcgacguuugg

SEQ ID NO: 767408 - RNA, 19 nt, Artificial Sequence
  Description of Artificial Sequence: Synthetic oligonucleotide
  Sense strand starting at position 2039 of SEQ ID NO: 587109
gcgggucuggucgcugaga

SEQ ID NO: 767409 - RNA, 19 nt, Artificial Sequence
  Description of Artificial Sequence: Synthetic oligonucleotide
  Antisense strand to SEQ ID NO: 767408
ucucagcgaccagacccgc

SEQ ID NO: 767410 - RNA, 19 nt, Artificial Sequence
  Description of Artificial Sequence: Synthetic oligonucleotide
  Sense strand starting at position 2189 of SEQ ID NO: 587109
ugucguuaucaucauccua

SEQ ID NO: 767411 - RNA, 19 nt, Artificial Sequence
  Description of Artificial Sequence: Synthetic oligonucleotide
  Antisense strand to SEQ ID NO: 767410
uaggaugaugauaacgaca

SEQ ID NO: 767412 - RNA, 19 nt, Artificial Sequence
  Description of Artificial Sequence: Synthetic oligonucleotide
  Sense strand starting at position 2204 of SEQ ID NO: 587109
ccuaaacgauaagaguaaa

SEQ ID NO: 767413 - RNA, 19 nt, Artificial Sequence
  Description of Artificial Sequence: Synthetic oligonucleotide
  Antisense strand to SEQ ID NO: 767412
uuuacucuuaucguuuagg

SEQ ID NO: 767414 - RNA, 19 nt, Artificial Sequence
  Description of Artificial Sequence: Synthetic oligonucleotide
  Sense strand starting at position 2233 of SEQ ID NO: 587109
auuauuacauucguggauu

SEQ ID NO: 767415 - RNA, 19 nt, Artificial Sequence
  Description of Artificial Sequence: Synthetic oligonucleotide
  Antisense strand to SEQ ID NO: 767414
aauccacgaauguaauaau

SEQ ID NO: 767416 - RNA, 19 nt, Artificial Sequence
  Description of Artificial Sequence: Synthetic oligonucleotide
  Sense strand starting at position 2234 of SEQ ID NO: 587109
uuauuacauucguggauuu

SEQ ID NO: 767417 - RNA, 19 nt, Artificial Sequence
  Description of Artificial Sequence: Synthetic oligonucleotide
  Antisense strand to SEQ ID NO: 767416
aaauccacgaauguaauaa

SEQ ID NO: 767418 - RNA, 19 nt, Artificial Sequence
  Description of Artificial Sequence: Synthetic oligonucleotide
  Sense strand starting at position 2289 of SEQ ID NO: 587109
agcuguuaauuucuuugau

SEQ ID NO: 767419 - RNA, 19 nt, Artificial Sequence
  Description of Artificial Sequence: Synthetic oligonucleotide
  Antisense strand to SEQ ID NO: 767418
aucaaagaaauuaacagcu

SEQ ID NO: 767420 - RNA, 19 nt, Artificial Sequence
  Description of Artificial Sequence: Synthetic oligonucleotide
  Sense strand starting at position 2290 of SEQ ID NO: 587109
gcuguuaauuucuuugauu

SEQ ID NO: 767421 - RNA, 19 nt, Artificial Sequence
  Description of Artificial Sequence: Synthetic oligonucleotide
  Antisense strand to SEQ ID NO: 767420
aaucaaagaaauuaacagc

SEQ ID NO: 767422 - RNA, 19 nt, Artificial Sequence
  Description of Artificial Sequence: Synthetic oligonucleotide
  Sense strand starting at position 2388 of SEQ ID NO: 587109
ccucguuggcuggagagaa

SEQ ID NO: 767423 - RNA, 19 nt, Artificial Sequence
  Description of Artificial Sequence: Synthetic oligonucleotide
  Antisense strand to SEQ ID NO: 767422
uucucuccagccaacgagg

SEQ ID NO: 767424 - RNA, 19 nt, Artificial Sequence
  Description of Artificial Sequence: Synthetic oligonucleotide
  Sense strand starting at position 2389 of SEQ ID NO: 587109
cucguuggcuggagagaau

SEQ ID NO: 767425 - RNA, 19 nt, Artificial Sequence
  Description of Artificial Sequence: Synthetic oligonucleotide
  Antisense strand to SEQ ID NO: 767424
auucucuccagccaacgag

SEQ ID NO: 767426 - RNA, 19 nt, Artificial Sequence
  Description of Artificial Sequence: Synthetic oligonucleotide
  Sense strand starting at position 2403 of SEQ ID NO: 587109
agaauuuguuuccaaggau

SEQ ID NO: 767427 - RNA, 19 nt, Artificial Sequence
  Description of Artificial Sequence: Synthetic oligonucleotide
  Antisense strand to SEQ ID NO: 767426
auccuuggaaacaaauucu

SEQ ID NO: 767428 - RNA, 19 nt, Artificial Sequence
  Description of Artificial Sequence: Synthetic oligonucleotide
  Sense strand starting at position 2513 of SEQ ID NO: 587109
gugguaaggucagaaauaa

SEQ ID NO: 767429 - RNA, 19 nt, Artificial Sequence
  Description of Artificial Sequence: Synthetic oligonucleotide
  Antisense strand to SEQ ID NO: 767428
uuauuucugaccuuaccac

SEQ ID NO: 767430 - RNA, 19 nt, Artificial Sequence
  Description of Artificial Sequence: Synthetic oligonucleotide
  Sense strand starting at position 2664 of SEQ ID NO: 587109
gcuggacaugagggauaua

SEQ ID NO: 767431 - RNA, 19 nt, Artificial Sequence
  Description of Artificial Sequence: Synthetic oligonucleotide
  Antisense strand to SEQ ID NO: 767430
uauaucccucauguccagc

SEQ ID NO: 767432 - RNA, 19 nt, Artificial Sequence
  Description of Artificial Sequence: Synthetic oligonucleotide
  Sense strand starting at position 2973 of SEQ ID NO: 587109
agagcaagaucuguuucca

SEQ ID NO: 767433 - RNA, 19 nt, Artificial Sequence
  Description of Artificial Sequence: Synthetic oligonucleotide
  Antisense strand to SEQ ID NO: 767432
uggaaacagaucuugcucu

SEQ ID NO: 767434 - RNA, 19 nt, Artificial Sequence
  Description of Artificial Sequence: Synthetic oligonucleotide
  Sense strand starting at position 3024 of SEQ ID NO: 587109
ccuaguauagccuguggau

SEQ ID NO: 767435 - RNA, 19 nt, Artificial Sequence
  Description of Artificial Sequence: Synthetic oligonucleotide
  Antisense strand to SEQ ID NO: 767434
auccacaggcuauacuagg

SEQ ID NO: 767436 - RNA, 19 nt, Artificial Sequence
  Description of Artificial Sequence: Synthetic oligonucleotide
  Sense strand starting at position 3073 of SEQ ID NO: 587109
uagaaaugccgcuagagcu

SEQ ID NO: 767437 - RNA, 19 nt, Artificial Sequence
  Description of Artificial Sequence: Synthetic oligonucleotide
  Antisense strand to SEQ ID NO: 767436
agcucuagcggcauuucua

SEQ ID NO: 767438 - RNA, 19 nt, Artificial Sequence
  Description of Artificial Sequence: Synthetic oligonucleotide
  Sense strand starting at position 3237 of SEQ ID NO: 587109
gccagugaagaguguucca

SEQ ID NO: 767439 - RNA, 19 nt, Artificial Sequence
  Description of Artificial Sequence: Synthetic oligonucleotide
  Antisense strand to SEQ ID NO: 767438
uggaacacucuucacuggc

SEQ ID NO: 767440 - RNA, 19 nt, Artificial Sequence
  Description of Artificial Sequence: Synthetic oligonucleotide
  Sense strand starting at position 3253 of SEQ ID NO: 587109
ccaggcaucgccuauauuu

SEQ ID NO: 767441 - RNA, 19 nt, Artificial Sequence
  Description of Artificial Sequence: Synthetic oligonucleotide
  Antisense strand to SEQ ID NO: 767440
aaauauaggcgaugccugg

SEQ ID NO: 767442 - RNA, 19 nt, Artificial Sequence
  Description of Artificial Sequence: Synthetic oligonucleotide
  Sense strand starting at position 3331 of SEQ ID NO: 587109
acacuuguacuuugucaga

SEQ ID NO: 767443 - RNA, 19 nt, Artificial Sequence
  Description of Artificial Sequence: Synthetic oligonucleotide
  Antisense strand to SEQ ID NO: 767442
ucugacaaaguacaagugu

SEQ ID NO: 767444 - RNA, 19 nt, Artificial Sequence
  Description of Artificial Sequence: Synthetic oligonucleotide
  Sense strand starting at position 3350 of SEQ ID NO: 587109
ccauguguugugaguugag

SEQ ID NO: 767445 - RNA, 19 nt, Artificial Sequence
  Description of Artificial Sequence: Synthetic oligonucleotide
  Antisense strand to SEQ ID NO: 767444
cucaacucacaacacaugg

SEQ ID NO: 767446 - RNA, 19 nt, Artificial Sequence
  Description of Artificial Sequence: Synthetic oligonucleotide
  Sense strand starting at position 3362 of SEQ ID NO: 587109
aguugagccuuccuuacau

SEQ ID NO: 767447 - RNA, 19 nt, Artificial Sequence
  Description of Artificial Sequence: Synthetic oligonucleotide
  Antisense strand to SEQ ID NO: 767446
auguaaggaaggcucaacu

SEQ ID NO: 767448 - RNA, 19 nt, Artificial Sequence
  Description of Artificial Sequence: Synthetic oligonucleotide
  Sense strand starting at position 3415 of SEQ ID NO: 587109
augagcuaagauugaacau

SEQ ID NO: 767449 - RNA, 19 nt, Artificial Sequence
  Description of Artificial Sequence: Synthetic oligonucleotide
  Antisense strand to SEQ ID NO: 767448
auguucaaucuuagcucau

SEQ ID NO: 767450 - RNA, 19 nt, Artificial Sequence
  Description of Artificial Sequence: Synthetic oligonucleotide
  Sense strand starting at position 3695 of SEQ ID NO: 587109
cugaaaggaguguauuguu

SEQ ID NO: 767451 - RNA, 19 nt, Artificial Sequence
  Description of Artificial Sequence: Synthetic oligonucleotide
  Antisense strand to SEQ ID NO: 767450
aacaauacacuccuuucag

SEQ ID NO: 767452 - RNA, 19 nt, Artificial Sequence
  Description of Artificial Sequence: Synthetic oligonucleotide
  Sense strand starting at position 31 of SEQ ID NO: 587110
gcacaaggaucucuuuagu

SEQ ID NO: 767453 - RNA, 19 nt, Artificial Sequence
  Description of Artificial Sequence: Synthetic oligonucleotide
  Antisense strand to SEQ ID NO: 767452
acuaaagagauccuugugc

SEQ ID NO: 767454 - RNA, 19 nt, Artificial Sequence
  Description of Artificial Sequence: Synthetic oligonucleotide
  Sense strand starting at position 34 of SEQ ID NO: 587110
caaggaucucuuuaguguu

SEQ ID NO: 767455 - RNA, 19 nt, Artificial Sequence
  Description of Artificial Sequence: Synthetic oligonucleotide
  Antisense strand to SEQ ID NO: 767454
aacacuaaagagauccuug

SEQ ID NO: 767456 - RNA, 19 nt, Artificial Sequence
  Description of Artificial Sequence: Synthetic oligonucleotide
  Sense strand starting at position 40 of SEQ ID NO: 587110
ucucuuuaguguuugugaa

SEQ ID NO: 767457 - RNA, 19 nt, Artificial Sequence
  Description of Artificial Sequence: Synthetic oligonucleotide
  Antisense strand to SEQ ID NO: 767456
uucacaaacacuaaagaga

SEQ ID NO: 767458 - RNA, 19 nt, Artificial Sequence
  Description of Artificial Sequence: Synthetic oligonucleotide
  Sense strand starting at position 50 of SEQ ID NO: 587110
guuugugaaccugacugua

SEQ ID NO: 767459 - RNA, 19 nt, Artificial Sequence
  Description of Artificial Sequence: Synthetic oligonucleotide
  Antisense strand to SEQ ID NO: 767458
uacagucagguucacaaac

SEQ ID NO: 767460 - RNA, 19 nt, Artificial Sequence
  Description of Artificial Sequence: Synthetic oligonucleotide
  Sense strand starting at position 58 of SEQ ID NO: 587110
accugacuguaucuuaagu

SEQ ID NO: 767461 - RNA, 19 nt, Artificial Sequence
  Description of Artificial Sequence: Synthetic oligonucleotide
  Antisense strand to SEQ ID NO: 767460
acuuaagauacagucaggu

SEQ ID NO: 767462 - RNA, 19 nt, Artificial Sequence
  Description of Artificial Sequence: Synthetic oligonucleotide
  Sense strand starting at position 63 of SEQ ID NO: 587110
acuguaucuuaaguuauac

SEQ ID NO: 767463 - RNA, 19 nt, Artificial Sequence
  Description of Artificial Sequence: Synthetic oligonucleotide
  Antisense strand to SEQ ID NO: 767462
guauaacuuaagauacagu

SEQ ID NO: 767464 - RNA, 19 nt, Artificial Sequence
  Description of Artificial Sequence: Synthetic oligonucleotide
  Sense strand starting at position 132 of SEQ ID NO: 587110
gugcuaucuucccuugaga

SEQ ID NO: 767465 - RNA, 19 nt, Artificial Sequence
  Description of Artificial Sequence: Synthetic oligonucleotide
  Antisense strand to SEQ ID NO: 767464
ucucaagggaagauagcac

SEQ ID NO: 767466 - RNA, 19 nt, Artificial Sequence
  Description of Artificial Sequence: Synthetic oligonucleotide
  Sense strand starting at position 134 of SEQ ID NO: 587110
gcuaucuucccuugagauu

SEQ ID NO: 767467 - RNA, 19 nt, Artificial Sequence
  Description of Artificial Sequence: Synthetic oligonucleotide
  Antisense strand to SEQ ID NO: 767466
aaucucaagggaagauagc

SEQ ID NO: 767468 - RNA, 19 nt, Artificial Sequence
  Description of Artificial Sequence: Synthetic oligonucleotide
  Sense strand starting at position 191 of SEQ ID NO: 587110
agaugcacuccuuggugaa

SEQ ID NO: 767469 - RNA, 19 nt, Artificial Sequence
  Description of Artificial Sequence: Synthetic oligonucleotide
  Antisense strand to SEQ ID NO: 767468
uucaccaaggagugcaucu

SEQ ID NO: 767470 - RNA, 19 nt, Artificial Sequence
  Description of Artificial Sequence: Synthetic oligonucleotide
  Sense strand starting at position 192 of SEQ ID NO: 587110
gaugcacuccuuggugaaa

SEQ ID NO: 767471 - RNA, 19 nt, Artificial Sequence
  Description of Artificial Sequence: Synthetic oligonucleotide
  Antisense strand to SEQ ID NO: 767470
uuucaccaaggagugcauc

SEQ ID NO: 767472 - RNA, 19 nt, Artificial Sequence
  Description of Artificial Sequence: Synthetic oligonucleotide
  Sense strand starting at position 289 of SEQ ID NO: 587110
cucagauggucugccacua

SEQ ID NO: 767473 - RNA, 19 nt, Artificial Sequence
  Description of Artificial Sequence: Synthetic oligonucleotide
  Antisense strand to SEQ ID NO: 767472
uaguggcagaccaucugag

SEQ ID NO: 767474 - RNA, 19 nt, Artificial Sequence
  Description of Artificial Sequence: Synthetic oligonucleotide
  Sense strand starting at position 333 of SEQ ID NO: 587110
ucaaauguucugcagcuca

SEQ ID NO: 767475 - RNA, 19 nt, Artificial Sequence
  Description of Artificial Sequence: Synthetic oligonucleotide
  Antisense strand to SEQ ID NO: 767474
ugagcugcagaacauuuga

SEQ ID NO: 767476 - RNA, 19 nt, Artificial Sequence
  Description of Artificial Sequence: Synthetic oligonucleotide
  Sense strand starting at position 373 of SEQ ID NO: 587110
gcgauuuggcccugagauu

SEQ ID NO: 767477 - RNA, 19 nt, Artificial Sequence
  Description of Artificial Sequence: Synthetic oligonucleotide
  Antisense strand to SEQ ID NO: 767476
aaucucagggccaaaucgc

SEQ ID NO: 767478 - RNA, 19 nt, Artificial Sequence
  Description of Artificial Sequence: Synthetic oligonucleotide
  Sense strand starting at position 382 of SEQ ID NO: 587110
cccugagauucucugaagu

SEQ ID NO: 767479 - RNA, 19 nt, Artificial Sequence
  Description of Artificial Sequence: Synthetic oligonucleotide
  Antisense strand to SEQ ID NO: 767478
acuucagagaaucucaggg

SEQ ID NO: 767480 - RNA, 19 nt, Artificial Sequence
  Description of Artificial Sequence: Synthetic oligonucleotide
  Sense strand starting at position 412 of SEQ ID NO: 587110
guagaaauccuuugaucuc

SEQ ID NO: 767481 - RNA, 19 nt, Artificial Sequence
  Description of Artificial Sequence: Synthetic oligonucleotide
  Antisense strand to SEQ ID NO: 767480
gagaucaaaggauuucuac

SEQ ID NO: 767482 - RNA, 19 nt, Artificial Sequence
  Description of Artificial Sequence: Synthetic oligonucleotide
  Sense strand starting at position 494 of SEQ ID NO: 587110
uacuuaguucuggagcaca

SEQ ID NO: 767483 - RNA, 19 nt, Artificial Sequence
  Description of Artificial Sequence: Synthetic oligonucleotide
  Antisense strand to SEQ ID NO: 767482
ugugcuccagaacuaagua

SEQ ID NO: 767484 - RNA, 19 nt, Artificial Sequence
  Description of Artificial Sequence: Synthetic oligonucleotide
  Sense strand starting at position 697 of SEQ ID NO: 587110
cuaccuggugguugugaua

SEQ ID NO: 767485 - RNA, 19 nt, Artificial Sequence
  Description of Artificial Sequence: Synthetic oligonucleotide
  Antisense strand to SEQ ID NO: 767484
uaucacaaccaccagguag

SEQ ID NO: 767486 - RNA, 19 nt, Artificial Sequence
  Description of Artificial Sequence: Synthetic oligonucleotide
  Sense strand starting at position 704 of SEQ ID NO: 587110
gugguugugauauacagaa

SEQ ID NO: 767487 - RNA, 19 nt, Artificial Sequence
  Description of Artificial Sequence: Synthetic oligonucleotide
  Antisense strand to SEQ ID NO: 767486
uucuguauaucacaaccac

SEQ ID NO: 767488 - RNA, 19 nt, Artificial Sequence
  Description of Artificial Sequence: Synthetic oligonucleotide
  Sense strand starting at position 719 of SEQ ID NO: 587110
agaauauacugauagacaa

SEQ ID NO: 767489 - RNA, 19 nt, Artificial Sequence
  Description of Artificial Sequence: Synthetic oligonucleotide
  Antisense strand to SEQ ID NO: 767488
uugucuaucaguauauucu

SEQ ID NO: 767490 - RNA, 19 nt, Artificial Sequence
  Description of Artificial Sequence: Synthetic oligonucleotide
  Sense strand starting at position 836 of SEQ ID NO: 587110
agcgguuccagugaaccaa

SEQ ID NO: 767491 - RNA, 19 nt, Artificial Sequence
  Description of Artificial Sequence: Synthetic oligonucleotide
  Antisense strand to SEQ ID NO: 767490
uugguucacuggaaccgcu

SEQ ID NO: 767492 - RNA, 19 nt, Artificial Sequence
  Description of Artificial Sequence: Synthetic oligonucleotide
  Sense strand starting at position 860 of SEQ ID NO: 587110
gcccgucuucagggacaga

SEQ ID NO: 767493 - RNA, 19 nt, Artificial Sequence
  Description of Artificial Sequence: Synthetic oligonucleotide
  Antisense strand to SEQ ID NO: 767492
ucugucccugaagacgggc

SEQ ID NO: 767494 - RNA, 19 nt, Artificial Sequence
  Description of Artificial Sequence: Synthetic oligonucleotide
  Sense strand starting at position 905 of SEQ ID NO: 587110
aggcgucaugguuugccua

SEQ ID NO: 767495 - RNA, 19 nt, Artificial Sequence
  Description of Artificial Sequence: Synthetic oligonucleotide
  Antisense strand to SEQ ID NO: 767494
uaggcaaaccaugacgccu

SEQ ID NO: 767496 - RNA, 19 nt, Artificial Sequence
  Description of Artificial Sequence: Synthetic oligonucleotide
  Sense strand starting at position 955 of SEQ ID NO: 587110
cuuaaugucgaucacaaca

SEQ ID NO: 767497 - RNA, 19 nt, Artificial Sequence
  Description of Artificial Sequence: Synthetic oligonucleotide
  Antisense strand to SEQ ID NO: 767496
uguugugaucgacauuaag

SEQ ID NO: 767498 - RNA, 19 nt, Artificial Sequence
  Description of Artificial Sequence: Synthetic oligonucleotide
  Sense strand starting at position 960 of SEQ ID NO: 587110
ugucgaucacaacagaugu

SEQ ID NO: 767499 - RNA, 19 nt, Artificial Sequence
  Description of Artificial Sequence: Synthetic oligonucleotide
  Antisense strand to SEQ ID NO: 767498
acaucuguugugaucgaca

SEQ ID NO: 767500 - RNA, 19 nt, Artificial Sequence
  Description of Artificial Sequence: Synthetic oligonucleotide
  Sense strand starting at position 1050 of SEQ ID NO: 587110
guggcuauucaugagacgu

SEQ ID NO: 767501 - RNA, 19 nt, Artificial Sequence
  Description of Artificial Sequence: Synthetic oligonucleotide
  Antisense strand to SEQ ID NO: 767500
acgucucaugaauagccac

SEQ ID NO: 767502 - RNA, 19 nt, Artificial Sequence
  Description of Artificial Sequence: Synthetic oligonucleotide
  Sense strand starting at position 1060 of SEQ ID NO: 587110
augagacguucugccucua

SEQ ID NO: 767503 - RNA, 19 nt, Artificial Sequence
  Description of Artificial Sequence: Synthetic oligonucleotide
  Antisense strand to SEQ ID NO: 767502
uagaggcagaacgucucau

SEQ ID NO: 767504 - RNA, 19 nt, Artificial Sequence
  Description of Artificial Sequence: Synthetic oligonucleotide
  Sense strand starting at position 1065 of SEQ ID NO: 587110
acguucugccucuacuuua

SEQ ID NO: 767505 - RNA, 19 nt, Artificial Sequence
  Description of Artificial Sequence: Synthetic oligonucleotide
  Antisense strand to SEQ ID NO: 767504
uaaaguagaggcagaacgu

SEQ ID NO: 767506 - RNA, 19 nt, Artificial Sequence
  Description of Artificial Sequence: Synthetic oligonucleotide
  Sense strand starting at position 1083 of SEQ ID NO: 587110
agagauuaucgacaucagc

SEQ ID NO: 767507 - RNA, 19 nt, Artificial Sequence
  Description of Artificial Sequence: Synthetic oligonucleotide
  Antisense strand to SEQ ID NO: 767506
gcugaugucgauaaucucu

SEQ ID NO: 767508 - RNA, 19 nt, Artificial Sequence
  Description of Artificial Sequence: Synthetic oligonucleotide
  Sense strand starting at position 1197 of SEQ ID NO: 587110
aagcgcauuucugaaagga

SEQ ID NO: 767509 - RNA, 19 nt, Artificial Sequence
  Description of Artificial Sequence: Synthetic oligonucleotide
  Antisense strand to SEQ ID NO: 767508
uccuuucagaaaugcgcuu

SEQ ID NO: 767510 - RNA, 19 nt, Artificial Sequence
  Description of Artificial Sequence: Synthetic oligonucleotide
  Sense strand starting at position 2525 of SEQ ID NO: 587110
ccaccuguucuaugucuau

SEQ ID NO: 767511 - RNA, 19 nt, Artificial Sequence
  Description of Artificial Sequence: Synthetic oligonucleotide
  Antisense strand to SEQ ID NO: 767510
auagacauagaacaggugg

SEQ ID NO: 767512 - RNA, 19 nt, Artificial Sequence
  Description of Artificial Sequence: Synthetic oligonucleotide
  Sense strand starting at position 2529 of SEQ ID NO: 587110
cuguucuaugucuaugaca

SEQ ID NO: 767513 - RNA, 19 nt, Artificial Sequence
  Description of Artificial Sequence: Synthetic oligonucleotide
  Antisense strand to SEQ ID NO: 767512
ugucauagacauagaacag

SEQ ID NO: 767514 - RNA, 19 nt, Artificial Sequence
  Description of Artificial Sequence: Synthetic oligonucleotide
  Sense strand starting at position 2561 of SEQ ID NO: 587110
guaaauauuuaccauguac

SEQ ID NO: 767515 - RNA, 19 nt, Artificial Sequence
  Description of Artificial Sequence: Synthetic oligonucleotide
  Antisense strand to SEQ ID NO: 767514
guacaugguaaauauuuac

SEQ ID NO: 767516 - RNA, 19 nt, Artificial Sequence
  Description of Artificial Sequence: Synthetic oligonucleotide
  Sense strand starting at position 2587 of SEQ ID NO: 587110
ugcgcagauuugccucaua

SEQ ID NO: 767517 - RNA, 19 nt, Artificial Sequence
  Description of Artificial Sequence: Synthetic oligonucleotide
  Antisense strand to SEQ ID NO: 767516
uaugaggcaaaucugcgca

SEQ ID NO: 767518 - RNA, 19 nt, Artificial Sequence
  Description of Artificial Sequence: Synthetic oligonucleotide
  Sense strand starting at position 2592 of SEQ ID NO: 587110
agauuugccucauacauag

SEQ ID NO: 767519 - RNA, 19 nt, Artificial Sequence
  Description of Artificial Sequence: Synthetic oligonucleotide
  Antisense strand to SEQ ID NO: 767518
cuauguaugaggcaaaucu

SEQ ID NO: 767520 - RNA, 19 nt, Artificial Sequence
  Description of Artificial Sequence: Synthetic oligonucleotide
  Sense strand starting at position 2710 of SEQ ID NO: 587110
gggcuuuguccugauaaac

SEQ ID NO: 767521 - RNA, 19 nt, Artificial Sequence
  Description of Artificial Sequence: Synthetic oligonucleotide
  Antisense strand to SEQ ID NO: 767520
guuuaucaggacaaagccc

SEQ ID NO: 767522 - RNA, 19 nt, Artificial Sequence
  Description of Artificial Sequence: Synthetic oligonucleotide
  Sense strand starting at position 2721 of SEQ ID NO: 587110
ugauaaacccaucguaaga

SEQ ID NO: 767523 - RNA, 19 nt, Artificial Sequence
  Description of Artificial Sequence: Synthetic oligonucleotide
  Antisense strand to SEQ ID NO: 767522
ucuuacgauggguuuauca

SEQ ID NO: 767524 - RNA, 19 nt, Artificial Sequence
  Description of Artificial Sequence: Synthetic oligonucleotide
  Sense strand starting at position 2840 of SEQ ID NO: 587110
acauaaacaugugucuuau

SEQ ID NO: 767525 - RNA, 19 nt, Artificial Sequence
  Description of Artificial Sequence: Synthetic oligonucleotide
  Antisense strand to SEQ ID NO: 767524
auaagacacauguuuaugu

SEQ ID NO: 767526 - RNA, 19 nt, Artificial Sequence
  Description of Artificial Sequence: Synthetic oligonucleotide
  Sense strand starting at position 2849 of SEQ ID NO: 587110
ugugucuuauauccacaca

SEQ ID NO: 767527 - RNA, 19 nt, Artificial Sequence
  Description of Artificial Sequence: Synthetic oligonucleotide
  Antisense strand to SEQ ID NO: 767526
uguguggauauaagacaca

SEQ ID NO: 767528 - RNA, 19 nt, Artificial Sequence
  Description of Artificial Sequence: Synthetic oligonucleotide
  Sense strand starting at position 2885 of SEQ ID NO: 587110
ucauauacaugugcauaua

SEQ ID NO: 767529 - RNA, 19 nt, Artificial Sequence
  Description of Artificial Sequence: Synthetic oligonucleotide
  Antisense strand to SEQ ID NO: 767528
uauaugcacauguauauga

SEQ ID NO: 767530 - RNA, 19 nt, Artificial Sequence
  Description of Artificial Sequence: Synthetic oligonucleotide
  Sense strand starting at position 2985 of SEQ ID NO: 587110
uagagacauugugaaauga

SEQ ID NO: 767531 - RNA, 19 nt, Artificial Sequence
  Description of Artificial Sequence: Synthetic oligonucleotide
  Antisense strand to SEQ ID NO: 767530
ucauuucacaaugucucua

SEQ ID NO: 767532 - RNA, 19 nt, Artificial Sequence
  Description of Artificial Sequence: Synthetic oligonucleotide
  Sense strand starting at position 23 of SEQ ID NO: 587111
ucguuauugcuauguauuu

SEQ ID NO: 767533 - RNA, 19 nt, Artificial Sequence
  Description of Artificial Sequence: Synthetic oligonucleotide
  Antisense strand to SEQ ID NO: 767532
aaauacauagcaauaacga

SEQ ID NO: 767534 - RNA, 19 nt, Artificial Sequence
  Description of Artificial Sequence: Synthetic oligonucleotide
  Sense strand starting at position 114 of SEQ ID NO: 587111
gcucaaauacaauguuuga

SEQ ID NO: 767535 - RNA, 19 nt, Artificial Sequence
  Description of Artificial Sequence: Synthetic oligonucleotide
  Antisense strand to SEQ ID NO: 767534
ucaaacauuguauuugagc

SEQ ID NO: 767536 - RNA, 19 nt, Artificial Sequence
  Description of Artificial Sequence: Synthetic oligonucleotide
  Sense strand starting at position 292 of SEQ ID NO: 587111
uuguaaugauuugaccaca

SEQ ID NO: 767537 - RNA, 19 nt, Artificial Sequence
  Description of Artificial Sequence: Synthetic oligonucleotide
  Antisense strand to SEQ ID NO: 767536
uguggucaaaucauuacaa

SEQ ID NO: 767538 - RNA, 19 nt, Artificial Sequence
  Description of Artificial Sequence: Synthetic oligonucleotide
  Sense strand starting at position 337 of SEQ ID NO: 587111
auuagcuggccaugaagua

SEQ ID NO: 767539 - RNA, 19 nt, Artificial Sequence
  Description of Artificial Sequence: Synthetic oligonucleotide
  Antisense strand to SEQ ID NO: 767538
uacuucauggccagcuaau

SEQ ID NO: 767540 - RNA, 19 nt, Artificial Sequence
  Description of Artificial Sequence: Synthetic oligonucleotide
  Sense strand starting at position 377 of SEQ ID NO: 587111
ucaacaugauacuuuguga

SEQ ID NO: 767541 - RNA, 19 nt, Artificial Sequence
  Description of Artificial Sequence: Synthetic oligonucleotide
  Antisense strand to SEQ ID NO: 767540
ucacaaaguaucauguuga

SEQ ID NO: 767542 - RNA, 19 nt, Artificial Sequence
  Description of Artificial Sequence: Synthetic oligonucleotide
  Sense strand starting at position 380 of SEQ ID NO: 587111
acaugauacuuugugacua

SEQ ID NO: 767543 - RNA, 19 nt, Artificial Sequence
  Description of Artificial Sequence: Synthetic oligonucleotide
  Antisense strand to SEQ ID NO: 767542
uagucacaaaguaucaugu

SEQ ID NO: 767544 - RNA, 19 nt, Artificial Sequence
  Description of Artificial Sequence: Synthetic oligonucleotide
  Sense strand starting at position 384 of SEQ ID NO: 587111
gauacuuugugacuaagca

SEQ ID NO: 767545 - RNA, 19 nt, Artificial Sequence
  Description of Artificial Sequence: Synthetic oligonucleotide
  Antisense strand to SEQ ID NO: 767544
ugcuuagucacaaaguauc

SEQ ID NO: 767546 - RNA, 19 nt, Artificial Sequence
  Description of Artificial Sequence: Synthetic oligonucleotide
  Sense strand starting at position 417 of SEQ ID NO: 587111
ccauaaagguaguugaaga

SEQ ID NO: 767547 - RNA, 19 nt, Artificial Sequence
  Description of Artificial Sequence: Synthetic oligonucleotide
  Antisense strand to SEQ ID NO: 767546
ucuucaacuaccuuuaugg

SEQ ID NO: 767548 - RNA, 19 nt, Artificial Sequence
  Description of Artificial Sequence: Synthetic oligonucleotide
  Sense strand starting at position 489 of SEQ ID NO: 587111
ccuaauaacggguauaauu

SEQ ID NO: 767549 - RNA, 19 nt, Artificial Sequence
  Description of Artificial Sequence: Synthetic oligonucleotide
  Antisense strand to SEQ ID NO: 767548
aauuauacccguuauuagg

SEQ ID NO: 767550 - RNA, 19 nt, Artificial Sequence
  Description of Artificial Sequence: Synthetic oligonucleotide
  Sense strand starting at position 740 of SEQ ID NO: 587111
ggcugaauacaauauccuu

SEQ ID NO: 767551 - RNA, 19 nt, Artificial Sequence
  Description of Artificial Sequence: Synthetic oligonucleotide
  Antisense strand to SEQ ID NO: 767550
aaggauauuguauucagcc

SEQ ID NO: 767552 - RNA, 19 nt, Artificial Sequence
  Description of Artificial Sequence: Synthetic oligonucleotide
  Sense strand starting at position 947 of SEQ ID NO: 587111
ugggauccuuagucucuga

SEQ ID NO: 767553 - RNA, 19 nt, Artificial Sequence
  Description of Artificial Sequence: Synthetic oligonucleotide
  Antisense strand to SEQ ID NO: 767552
ucagagacuaaggauccca

SEQ ID NO: 767554 - RNA, 19 nt, Artificial Sequence
  Description of Artificial Sequence: Synthetic oligonucleotide
  Sense strand starting at position 1515 of SEQ ID NO: 587111
agggaagaaucuucuguac

SEQ ID NO: 767555 - RNA, 19 nt, Artificial Sequence
  Description of Artificial Sequence: Synthetic oligonucleotide
  Antisense strand to SEQ ID NO: 767554
guacagaagauucuucccu

SEQ ID NO: 767556 - RNA, 19 nt, Artificial Sequence
  Description of Artificial Sequence: Synthetic oligonucleotide
  Sense strand starting at position 2442 of SEQ ID NO: 587111
ucccgagcaguuuacuauu

SEQ ID NO: 767557 - RNA, 19 nt, Artificial Sequence
  Description of Artificial Sequence: Synthetic oligonucleotide
  Antisense strand to SEQ ID NO: 767556
aauaguaaacugcucggga

SEQ ID NO: 767558 - RNA, 19 nt, Artificial Sequence
  Description of Artificial Sequence: Synthetic oligonucleotide
  Sense strand starting at position 2662 of SEQ ID NO: 587111
gccuuaaguaucgagggaa

SEQ ID NO: 767559 - RNA, 19 nt, Artificial Sequence
  Description of Artificial Sequence: Synthetic oligonucleotide
  Antisense strand to SEQ ID NO: 767558
uucccucgauacuuaaggc

SEQ ID NO: 767560 - RNA, 19 nt, Artificial Sequence
  Description of Artificial Sequence: Synthetic oligonucleotide
  Sense strand starting at position 2856 of SEQ ID NO: 587111
ugaggaguucugggcucau

SEQ ID NO: 767561 - RNA, 19 nt, Artificial Sequence
  Description of Artificial Sequence: Synthetic oligonucleotide
  Antisense strand to SEQ ID NO: 767560
augagcccagaacuccuca

SEQ ID NO: 767562 - RNA, 19 nt, Artificial Sequence
  Description of Artificial Sequence: Synthetic oligonucleotide
  Sense strand starting at position 2882 of SEQ ID NO: 587111
gccuaaacugcugaaauca

SEQ ID NO: 767563 - RNA, 19 nt, Artificial Sequence
  Description of Artificial Sequence: Synthetic oligonucleotide
  Antisense strand to SEQ ID NO: 767562
ugauuucagcaguuuaggc

SEQ ID NO: 767564 - RNA, 19 nt, Artificial Sequence
  Description of Artificial Sequence: Synthetic oligonucleotide
  Sense strand starting at position 2938 of SEQ ID NO: 587111
aaacguacuguuuaugaga

SEQ ID NO: 767565 - RNA, 19 nt, Artificial Sequence
  Description of Artificial Sequence: Synthetic oligonucleotide
  Antisense strand to SEQ ID NO: 767564
ucucauaaacaguacguuu

SEQ ID NO: 767566 - RNA, 19 nt, Artificial Sequence
  Description of Artificial Sequence: Synthetic oligonucleotide
  Sense strand starting at position 2946 of SEQ ID NO: 587111
uguuuaugagaaugcuaaa

SEQ ID NO: 767567 - RNA, 19 nt, Artificial Sequence
  Description of Artificial Sequence: Synthetic oligonucleotide
  Antisense strand to SEQ ID NO: 767566
uuuagcauucucauaaaca

SEQ ID NO: 767568 - RNA, 19 nt, Artificial Sequence
  Description of Artificial Sequence: Synthetic oligonucleotide
  Sense strand starting at position 3005 of SEQ ID NO: 587111
cccauaggcucacuuguaa

SEQ ID NO: 767569 - RNA, 19 nt, Artificial Sequence
  Description of Artificial Sequence: Synthetic oligonucleotide
  Antisense strand to SEQ ID NO: 767568
uuacaagugagccuauggg

SEQ ID NO: 767570 - RNA, 19 nt, Artificial Sequence
  Description of Artificial Sequence: Synthetic oligonucleotide
  Sense strand starting at position 3181 of SEQ ID NO: 587111
gugugacgucauugacaaa

SEQ ID NO: 767571 - RNA, 19 nt, Artificial Sequence
  Description of Artificial Sequence: Synthetic oligonucleotide
  Antisense strand to SEQ ID NO: 767570
uuugucaaugacgucacac

SEQ ID NO: 767572 - RNA, 19 nt, Artificial Sequence
  Description of Artificial Sequence: Synthetic oligonucleotide
  Sense strand starting at position 3182 of SEQ ID NO: 587111
ugugacgucauugacaaau

SEQ ID NO: 767573 - RNA, 19 nt, Artificial Sequence
  Description of Artificial Sequence: Synthetic oligonucleotide
  Antisense strand to SEQ ID NO: 767572
auuugucaaugacgucaca

SEQ ID NO: 767574 - RNA, 19 nt, Artificial Sequence
  Description of Artificial Sequence: Synthetic oligonucleotide
  Sense strand starting at position 3240 of SEQ ID NO: 587111
ucccuacuuggacgaagau

SEQ ID NO: 767575 - RNA, 19 nt, Artificial Sequence
  Description of Artificial Sequence: Synthetic oligonucleotide
  Antisense strand to SEQ ID NO: 767574
aucuucguccaaguaggga

SEQ ID NO: 767576 - RNA, 19 nt, Artificial Sequence
  Description of Artificial Sequence: Synthetic oligonucleotide
  Sense strand starting at position 3261 of SEQ ID NO: 587111
ugaugaaaucuaugauucc

SEQ ID NO: 767577 - RNA, 19 nt, Artificial Sequence
  Description of Artificial Sequence: Synthetic oligonucleotide
  Antisense strand to SEQ ID NO: 767576
ggaaucauagauuucauca

SEQ ID NO: 767578 - RNA, 19 nt, Artificial Sequence
  Description of Artificial Sequence: Synthetic oligonucleotide
  Sense strand starting at position 3390 of SEQ ID NO: 587111
uuuagauugccuuagugau

SEQ ID NO: 767579 - RNA, 19 nt, Artificial Sequence
  Description of Artificial Sequence: Synthetic oligonucleotide
  Antisense strand to SEQ ID NO: 767578
aucacuaaggcaaucuaaa

SEQ ID NO: 767580 - RNA, 19 nt, Artificial Sequence
  Description of Artificial Sequence: Synthetic oligonucleotide
  Sense strand starting at position 3392 of SEQ ID NO: 587111
uagauugccuuagugauac

SEQ ID NO: 767581 - RNA, 19 nt, Artificial Sequence
  Description of Artificial Sequence: Synthetic oligonucleotide
  Antisense strand to SEQ ID NO: 767580
guaucacuaaggcaaucua

SEQ ID NO: 767582 - RNA, 19 nt, Artificial Sequence
  Description of Artificial Sequence: Synthetic oligonucleotide
  Sense strand starting at position 3529 of SEQ ID NO: 587111
aacugaguucuauguaugu

SEQ ID NO: 767583 - RNA, 19 nt, Artificial Sequence
  Description of Artificial Sequence: Synthetic oligonucleotide
  Antisense strand to SEQ ID NO: 767582
acauacauagaacucaguu

SEQ ID NO: 767584 - RNA, 19 nt, Artificial Sequence
  Description of Artificial Sequence: Synthetic oligonucleotide
  Sense strand starting at position 3531 of SEQ ID NO: 587111
cugaguucuauguauguau

SEQ ID NO: 767585 - RNA, 19 nt, Artificial Sequence
  Description of Artificial Sequence: Synthetic oligonucleotide
  Antisense strand to SEQ ID NO: 767584
auacauacauagaacucag

SEQ ID NO: 767586 - RNA, 19 nt, Artificial Sequence
  Description of Artificial Sequence: Synthetic oligonucleotide
  Sense strand starting at position 3533 of SEQ ID NO: 587111
gaguucuauguauguauac

SEQ ID NO: 767587 - RNA, 19 nt, Artificial Sequence
  Description of Artificial Sequence: Synthetic oligonucleotide
  Antisense strand to SEQ ID NO: 767586
guauacauacauagaacuc

SEQ ID NO: 767588 - RNA, 19 nt, Artificial Sequence
  Description of Artificial Sequence: Synthetic oligonucleotide
  Sense strand starting at position 3623 of SEQ ID NO: 587111
agguguguuacuuauccaa

SEQ ID NO: 767589 - RNA, 19 nt, Artificial Sequence
  Description of Artificial Sequence: Synthetic oligonucleotide
  Antisense strand to SEQ ID NO: 767588
uuggauaaguaacacaccu

SEQ ID NO: 767590 - RNA, 19 nt, Artificial Sequence
  Description of Artificial Sequence: Synthetic oligonucleotide
  Sense strand starting at position 3625 of SEQ ID NO: 587111
guguguuacuuauccaaca

SEQ ID NO: 767591 - RNA, 19 nt, Artificial Sequence
  Description of Artificial Sequence: Synthetic oligonucleotide
  Antisense strand to SEQ ID NO: 767590
uguuggauaaguaacacac

SEQ ID NO: 767592 - RNA, 19 nt, Artificial Sequence
  Description of Artificial Sequence: Synthetic oligonucleotide
  Sense strand starting at position 3626 of SEQ ID NO: 587111
uguguuacuuauccaacau

SEQ ID NO: 767593 - RNA, 19 nt, Artificial Sequence
  Description of Artificial Sequence: Synthetic oligonucleotide
  Antisense strand to SEQ ID NO: 767592
auguuggauaaguaacaca

SEQ ID NO: 767594 - RNA, 19 nt, Artificial Sequence
  Description of Artificial Sequence: Synthetic oligonucleotide
  Sense strand starting at position 3752 of SEQ ID NO: 587111
auaugugcauaugugaaau

SEQ ID NO: 767595 - RNA, 19 nt, Artificial Sequence
  Description of Artificial Sequence: Synthetic oligonucleotide
  Antisense strand to SEQ ID NO: 767594
auuucacauaugcacauau

SEQ ID NO: 767596 - RNA, 19 nt, Artificial Sequence
  Description of Artificial Sequence: Synthetic oligonucleotide
  Sense strand starting at position 3787 of SEQ ID NO: 587111
uuaccuacugcuuaggaua

SEQ ID NO: 767597 - RNA, 19 nt, Artificial Sequence
  Description of Artificial Sequence: Synthetic oligonucleotide
  Antisense strand to SEQ ID NO: 767596
uauccuaagcaguagguaa

SEQ ID NO: 767598 - RNA, 19 nt, Artificial Sequence
  Description of Artificial Sequence: Synthetic oligonucleotide
  Sense strand starting at position 3890 of SEQ ID NO: 587111
gaagcaaauuaggaaagau

SEQ ID NO: 767599 - RNA, 19 nt, Artificial Sequence
  Description of Artificial Sequence: Synthetic oligonucleotide
  Antisense strand to SEQ ID NO: 767598
aucuuuccuaauuugcuuc

SEQ ID NO: 767600 - RNA, 19 nt, Artificial Sequence
  Description of Artificial Sequence: Synthetic oligonucleotide
  Sense strand starting at position 3909 of SEQ ID NO: 587111
uuuauuuaaugccauggaa

SEQ ID NO: 767601 - RNA, 19 nt, Artificial Sequence
  Description of Artificial Sequence: Synthetic oligonucleotide
  Antisense strand to SEQ ID NO: 767600
uuccauggcauuaaauaaa

SEQ ID NO: 767602 - RNA, 19 nt, Artificial Sequence
  Description of Artificial Sequence: Synthetic oligonucleotide
  Sense strand starting at position 3924 of SEQ ID NO: 587111
ggaaguucuugccugauca

SEQ ID NO: 767603 - RNA, 19 nt, Artificial Sequence
  Description of Artificial Sequence: Synthetic oligonucleotide
  Antisense strand to SEQ ID NO: 767602
ugaucaggcaagaacuucc

SEQ ID NO: 767604 - RNA, 19 nt, Artificial Sequence
  Description of Artificial Sequence: Synthetic oligonucleotide
  Sense strand starting at position 3925 of SEQ ID NO: 587111
gaaguucuugccugaucau

SEQ ID NO: 767605 - RNA, 19 nt, Artificial Sequence
  Description of Artificial Sequence: Synthetic oligonucleotide
  Antisense strand to SEQ ID NO: 767604
augaucaggcaagaacuuc

SEQ ID NO: 767606 - RNA, 19 nt, Artificial Sequence
  Description of Artificial Sequence: Synthetic oligonucleotide
  Sense strand starting at position 3934 of SEQ ID NO: 587111
gccugaucauagguuuauu

SEQ ID NO: 767607 - RNA, 19 nt, Artificial Sequence
  Description of Artificial Sequence: Synthetic oligonucleotide
  Antisense strand to SEQ ID NO: 767606
aauaaaccuaugaucaggc

SEQ ID NO: 767608 - RNA, 19 nt, Artificial Sequence
  Description of Artificial Sequence: Synthetic oligonucleotide
  Sense strand starting at position 3937 of SEQ ID NO: 587111
ugaucauagguuuauugca

SEQ ID NO: 767609 - RNA, 19 nt, Artificial Sequence
  Description of Artificial Sequence: Synthetic oligonucleotide
  Antisense strand to SEQ ID NO: 767608
ugcaauaaaccuaugauca

SEQ ID NO: 767610 - RNA, 19 nt, Artificial Sequence
  Description of Artificial Sequence: Synthetic oligonucleotide
  Sense strand starting at position 3965 of SEQ ID NO: 587111
ucauuaggacagugguaca

SEQ ID NO: 767611 - RNA, 19 nt, Artificial Sequence
  Description of Artificial Sequence: Synthetic oligonucleotide
  Antisense strand to SEQ ID NO: 767610
uguaccacuguccuaauga

SEQ ID NO: 767612 - RNA, 19 nt, Artificial Sequence
  Description of Artificial Sequence: Synthetic oligonucleotide
  Sense strand starting at position 139 of SEQ ID NO: 587112
agaguaagauacgauccau

SEQ ID NO: 767613 - RNA, 19 nt, Artificial Sequence
  Description of Artificial Sequence: Synthetic oligonucleotide
  Antisense strand to SEQ ID NO: 767612
auggaucguaucuuacucu

SEQ ID NO: 767614 - RNA, 19 nt, Artificial Sequence
  Description of Artificial Sequence: Synthetic oligonucleotide
  Sense strand starting at position 145 of SEQ ID NO: 587112
agauacgauccaugaaggu

SEQ ID NO: 767615 - RNA, 19 nt, Artificial Sequence
  Description of Artificial Sequence: Synthetic oligonucleotide
  Antisense strand to SEQ ID NO: 767614
accuucauggaucguaucu

SEQ ID NO: 767616 - RNA, 19 nt, Artificial Sequence
  Description of Artificial Sequence: Synthetic oligonucleotide
  Sense strand starting at position 169 of SEQ ID NO: 587112
gugcccucuuccuugacua

SEQ ID NO: 767617 - RNA, 19 nt, Artificial Sequence
  Description of Artificial Sequence: Synthetic oligonucleotide
  Antisense strand to SEQ ID NO: 767616
uagucaaggaagagggcac

SEQ ID NO: 767618 - RNA, 19 nt, Artificial Sequence
  Description of Artificial Sequence: Synthetic oligonucleotide
  Sense strand starting at position 193 of SEQ ID NO: 587112
ggacuccuguuucucuuua

SEQ ID NO: 767619 - RNA, 19 nt, Artificial Sequence
  Description of Artificial Sequence: Synthetic oligonucleotide
  Antisense strand to SEQ ID NO: 767618
uaaagagaaacaggagucc

SEQ ID NO: 767620 - RNA, 19 nt, Artificial Sequence
  Description of Artificial Sequence: Synthetic oligonucleotide
  Sense strand starting at position 197 of SEQ ID NO: 587112
uccuguuucucuuuaacgu

SEQ ID NO: 767621 - RNA, 19 nt, Artificial Sequence
  Description of Artificial Sequence: Synthetic oligonucleotide
  Antisense strand to SEQ ID NO: 767620
acguuaaagagaaacagga

SEQ ID NO: 767622 - RNA, 19 nt, Artificial Sequence
  Description of Artificial Sequence: Synthetic oligonucleotide
  Sense strand starting at position 246 of SEQ ID NO: 587112
aggccauagcccuagaagu

SEQ ID NO: 767623 - RNA, 19 nt, Artificial Sequence
  Description of Artificial Sequence: Synthetic oligonucleotide
  Antisense strand to SEQ ID NO: 767622
acuucuagggcuauggccu

SEQ ID NO: 767624 - RNA, 19 nt, Artificial Sequence
  Description of Artificial Sequence: Synthetic oligonucleotide
  Sense strand starting at position 307 of SEQ ID NO: 587112
ugucccuguccguguugua

SEQ ID NO: 767625 - RNA, 19 nt, Artificial Sequence
  Description of Artificial Sequence: Synthetic oligonucleotide
  Antisense strand to SEQ ID NO: 767624
uacaacacggacagggaca

SEQ ID NO: 767626 - RNA, 19 nt, Artificial Sequence
  Description of Artificial Sequence: Synthetic oligonucleotide
  Sense strand starting at position 459 of SEQ ID NO: 587112
aguguguggcuuugggaga

SEQ ID NO: 767627 - RNA, 19 nt, Artificial Sequence
  Description of Artificial Sequence: Synthetic oligonucleotide
  Antisense strand to SEQ ID NO: 767626
ucucccaaagccacacacu

SEQ ID NO: 767628 - RNA, 19 nt, Artificial Sequence
  Description of Artificial Sequence: Synthetic oligonucleotide
  Sense strand starting at position 460 of SEQ ID NO: 587112
guguguggcuuugggagaa

SEQ ID NO: 767629 - RNA, 19 nt, Artificial Sequence
  Description of Artificial Sequence: Synthetic oligonucleotide
  Antisense strand to SEQ ID NO: 767628
uucucccaaagccacacac

SEQ ID NO: 767630 - RNA, 19 nt, Artificial Sequence
  Description of Artificial Sequence: Synthetic oligonucleotide
  Sense strand starting at position 948 of SEQ ID NO: 587112
uccugacucucguguguua

SEQ ID NO: 767631 - RNA, 19 nt, Artificial Sequence
  Description of Artificial Sequence: Synthetic oligonucleotide
  Antisense strand to SEQ ID NO: 767630
uaacacacgagagucagga

SEQ ID NO: 767632 - RNA, 19 nt, Artificial Sequence
  Description of Artificial Sequence: Synthetic oligonucleotide
  Sense strand starting at position 950 of SEQ ID NO: 587112
cugacucucguguguuaca

SEQ ID NO: 767633 - RNA, 19 nt, Artificial Sequence
  Description of Artificial Sequence: Synthetic oligonucleotide
  Antisense strand to SEQ ID NO: 767632
uguaacacacgagagucag

SEQ ID NO: 767634 - RNA, 19 nt, Artificial Sequence
  Description of Artificial Sequence: Synthetic oligonucleotide
  Sense strand starting at position 951 of SEQ ID NO: 587112
ugacucucguguguuacau

SEQ ID NO: 767635 - RNA, 19 nt, Artificial Sequence
  Description of Artificial Sequence: Synthetic oligonucleotide
  Antisense strand to SEQ ID NO: 767634
auguaacacacgagaguca

SEQ ID NO: 767636 - RNA, 19 nt, Artificial Sequence
  Description of Artificial Sequence: Synthetic oligonucleotide
  Sense strand starting at position 953 of SEQ ID NO: 587112
acucucguguguuacauaa

SEQ ID NO: 767637 - RNA, 19 nt, Artificial Sequence
  Description of Artificial Sequence: Synthetic oligonucleotide
  Antisense strand to SEQ ID NO: 767636
uuauguaacacacgagagu

SEQ ID NO: 767638 - RNA, 19 nt, Artificial Sequence
  Description of Artificial Sequence: Synthetic oligonucleotide
  Sense strand starting at position 955 of SEQ ID NO: 587112
ucucguguguuacauaacu

SEQ ID NO: 767639 - RNA, 19 nt, Artificial Sequence
  Description of Artificial Sequence: Synthetic oligonucleotide
  Antisense strand to SEQ ID NO: 767638
aguuauguaacacacgaga

SEQ ID NO: 767640 - RNA, 19 nt, Artificial Sequence
  Description of Artificial Sequence: Synthetic oligonucleotide
  Sense strand starting at position 974 of SEQ ID NO: 587112
ccuccauccuuccagagua

SEQ ID NO: 767641 - RNA, 19 nt, Artificial Sequence
  Description of Artificial Sequence: Synthetic oligonucleotide
  Antisense strand to SEQ ID NO: 767640
uacucuggaaggauggagg

SEQ ID NO: 767642 - RNA, 19 nt, Artificial Sequence
  Description of Artificial Sequence: Synthetic oligonucleotide
  Sense strand starting at position 986 of SEQ ID NO: 587112
cagaguaacuccugaggug

SEQ ID NO: 767643 - RNA, 19 nt, Artificial Sequence
  Description of Artificial Sequence: Synthetic oligonucleotide
  Antisense strand to SEQ ID NO: 767642
caccucaggaguuacucug

SEQ ID NO: 767644 - RNA, 19 nt, Artificial Sequence
  Description of Artificial Sequence: Synthetic oligonucleotide
  Sense strand starting at position 987 of SEQ ID NO: 587112
agaguaacuccugaggugu

SEQ ID NO: 767645 - RNA, 19 nt, Artificial Sequence
  Description of Artificial Sequence: Synthetic oligonucleotide
  Antisense strand to SEQ ID NO: 767644
acaccucaggaguuacucu

SEQ ID NO: 767646 - RNA, 19 nt, Artificial Sequence
  Description of Artificial Sequence: Synthetic oligonucleotide
  Sense strand starting at position 1085 of SEQ ID NO: 587112
gugucugggacccgagaau

SEQ ID NO: 767647 - RNA, 19 nt, Artificial Sequence
  Description of Artificial Sequence: Synthetic oligonucleotide
  Antisense strand to SEQ ID NO: 767646
auucucgggucccagacac

SEQ ID NO: 767648 - RNA, 19 nt, Artificial Sequence
  Description of Artificial Sequence: Synthetic oligonucleotide
  Sense strand starting at position 1096 of SEQ ID NO: 587112
ccgagaaucucaguucugu

SEQ ID NO: 767649 - RNA, 19 nt, Artificial Sequence
  Description of Artificial Sequence: Synthetic oligonucleotide
  Antisense strand to SEQ ID NO: 767648
acagaacugagauucucgg

SEQ ID NO: 767650 - RNA, 19 nt, Artificial Sequence
  Description of Artificial Sequence: Synthetic oligonucleotide
  Sense strand starting at position 1102 of SEQ ID NO: 587112
aucucaguucuguaacuuc

SEQ ID NO: 767651 - RNA, 19 nt, Artificial Sequence
  Description of Artificial Sequence: Synthetic oligonucleotide
  Antisense strand to SEQ ID NO: 767650
gaaguuacagaacugagau

SEQ ID NO: 767652 - RNA, 19 nt, Artificial Sequence
  Description of Artificial Sequence: Synthetic oligonucleotide
  Sense strand starting at position 1280 of SEQ ID NO: 587112
gguccaauaccaggacaua

SEQ ID NO: 767653 - RNA, 19 nt, Artificial Sequence
  Description of Artificial Sequence: Synthetic oligonucleotide
  Antisense strand to SEQ ID NO: 767652
uauguccugguauuggacc

SEQ ID NO: 767654 - RNA, 19 nt, Artificial Sequence
  Description of Artificial Sequence: Synthetic oligonucleotide
  Sense strand starting at position 1388 of SEQ ID NO: 587112
cugcgaagugcgaguaaag

SEQ ID NO: 767655 - RNA, 19 nt, Artificial Sequence
  Description of Artificial Sequence: Synthetic oligonucleotide
  Antisense strand to SEQ ID NO: 767654
cuuuacucgcacuucgcag

SEQ ID NO: 767656 - RNA, 19 nt, Artificial Sequence
  Description of Artificial Sequence: Synthetic oligonucleotide
  Sense strand starting at position 1682 of SEQ ID NO: 587112
cguagugguaguagaggua

SEQ ID NO: 767657 - RNA, 19 nt, Artificial Sequence
  Description of Artificial Sequence: Synthetic oligonucleotide
  Antisense strand to SEQ ID NO: 767656
uaccucuacuaccacuacg

SEQ ID NO: 767658 - RNA, 19 nt, Artificial Sequence
  Description of Artificial Sequence: Synthetic oligonucleotide
  Sense strand starting at position 2327 of SEQ ID NO: 587112
gggagcucagccugagaca

SEQ ID NO: 767659 - RNA, 19 nt, Artificial Sequence
  Description of Artificial Sequence: Synthetic oligonucleotide
  Antisense strand to SEQ ID NO: 767658
ugucucaggcugagcuccc

SEQ ID NO: 767660 - RNA, 19 nt, Artificial Sequence
  Description of Artificial Sequence: Synthetic oligonucleotide
  Sense strand starting at position 2328 of SEQ ID NO: 587112
ggagcucagccugagacau

SEQ ID NO: 767661 - RNA, 19 nt, Artificial Sequence
  Description of Artificial Sequence: Synthetic oligonucleotide
  Antisense strand to SEQ ID NO: 767660
augucucaggcugagcucc

SEQ ID NO: 767662 - RNA, 19 nt, Artificial Sequence
  Description of Artificial Sequence: Synthetic oligonucleotide
  Sense strand starting at position 2419 of SEQ ID NO: 587112
auagcccagcccugaaaua

SEQ ID NO: 767663 - RNA, 19 nt, Artificial Sequence
  Description of Artificial Sequence: Synthetic oligonucleotide
  Antisense strand to SEQ ID NO: 767662
uauuucagggcugggcuau

SEQ ID NO: 767664 - RNA, 19 nt, Artificial Sequence
  Description of Artificial Sequence: Synthetic oligonucleotide
  Sense strand starting at position 2519 of SEQ ID NO: 587112
gcuugcuguaguggucgaa

SEQ ID NO: 767665 - RNA, 19 nt, Artificial Sequence
  Description of Artificial Sequence: Synthetic oligonucleotide
  Antisense strand to SEQ ID NO: 767664
uucgaccacuacagcaagc

SEQ ID NO: 767666 - RNA, 19 nt, Artificial Sequence
  Description of Artificial Sequence: Synthetic oligonucleotide
  Sense strand starting at position 2758 of SEQ ID NO: 587112
gcaagaggaucaggagaau

SEQ ID NO: 767667 - RNA, 19 nt, Artificial Sequence
  Description of Artificial Sequence: Synthetic oligonucleotide
  Antisense strand to SEQ ID NO: 767666
auucuccugauccucuugc

SEQ ID NO: 767668 - RNA, 19 nt, Artificial Sequence
  Description of Artificial Sequence: Synthetic oligonucleotide
  Sense strand starting at position 2913 of SEQ ID NO: 587112
gacagaaaugguugaccgu

SEQ ID NO: 767669 - RNA, 19 nt, Artificial Sequence
  Description of Artificial Sequence: Synthetic oligonucleotide
  Antisense strand to SEQ ID NO: 767668
acggucaaccauuucuguc

SEQ ID NO: 767670 - RNA, 19 nt, Artificial Sequence
  Description of Artificial Sequence: Synthetic oligonucleotide
  Sense strand starting at position 2914 of SEQ ID NO: 587112
acagaaaugguugaccguu

SEQ ID NO: 767671 - RNA, 19 nt, Artificial Sequence
  Description of Artificial Sequence: Synthetic oligonucleotide
  Antisense strand to SEQ ID NO: 767670
aacggucaaccauuucugu

SEQ ID NO: 767672 - RNA, 19 nt, Artificial Sequence
  Description of Artificial Sequence: Synthetic oligonucleotide
  Sense strand starting at position 2916 of SEQ ID NO: 587112
agaaaugguugaccguuau

SEQ ID NO: 767673 - RNA, 19 nt, Artificial Sequence
  Description of Artificial Sequence: Synthetic oligonucleotide
  Antisense strand to SEQ ID NO: 767672
auaacggucaaccauuucu

SEQ ID NO: 767674 - RNA, 19 nt, Artificial Sequence
  Description of Artificial Sequence: Synthetic oligonucleotide
  Sense strand starting at position 3143 of SEQ ID NO: 587112
gagcacuaggucugagauc

SEQ ID NO: 767675 - RNA, 19 nt, Artificial Sequence
  Description of Artificial Sequence: Synthetic oligonucleotide
  Antisense strand to SEQ ID NO: 767674
gaucucagaccuagugcuc

SEQ ID NO: 767676 - RNA, 19 nt, Artificial Sequence
  Description of Artificial Sequence: Synthetic oligonucleotide
  Sense strand starting at position 3751 of SEQ ID NO: 587112
uccaaugugcgcggucauu

SEQ ID NO: 767677 - RNA, 19 nt, Artificial Sequence
  Description of Artificial Sequence: Synthetic oligonucleotide
  Antisense strand to SEQ ID NO: 767676
aaugaccgcgcacauugga

SEQ ID NO: 767678 - RNA, 19 nt, Artificial Sequence
  Description of Artificial Sequence: Synthetic oligonucleotide
  Sense strand starting at position 3854 of SEQ ID NO: 587112
uggcuaggaugucuugaga

SEQ ID NO: 767679 - RNA, 19 nt, Artificial Sequence
  Description of Artificial Sequence: Synthetic oligonucleotide
  Antisense strand to SEQ ID NO: 767678
ucucaagacauccuagcca

SEQ ID NO: 767680 - RNA, 19 nt, Artificial Sequence
  Description of Artificial Sequence: Synthetic oligonucleotide
  Sense strand starting at position 3892 of SEQ ID NO: 587112
cggguccuaugucuacaaa

SEQ ID NO: 767681 - RNA, 19 nt, Artificial Sequence
  Description of Artificial Sequence: Synthetic oligonucleotide
  Antisense strand to SEQ ID NO: 767680
uuuguagacauaggacccg

SEQ ID NO: 767682 - RNA, 19 nt, Artificial Sequence
  Description of Artificial Sequence: Synthetic oligonucleotide
  Sense strand starting at position 3893 of SEQ ID NO: 587112
ggguccuaugucuacaaac

SEQ ID NO: 767683 - RNA, 19 nt, Artificial Sequence
  Description of Artificial Sequence: Synthetic oligonucleotide
  Antisense strand to SEQ ID NO: 767682
guuuguagacauaggaccc

SEQ ID NO: 767684 - RNA, 19 nt, Artificial Sequence
  Description of Artificial Sequence: Synthetic oligonucleotide
  Sense strand starting at position 3895 of SEQ ID NO: 587112
guccuaugucuacaaacau

SEQ ID NO: 767685 - RNA, 19 nt, Artificial Sequence
  Description of Artificial Sequence: Synthetic oligonucleotide
  Antisense strand to SEQ ID NO: 767684
auguuuguagacauaggac

SEQ ID NO: 767686 - RNA, 19 nt, Artificial Sequence
  Description of Artificial Sequence: Synthetic oligonucleotide
  Sense strand starting at position 106 of SEQ ID NO: 587113
gcagguaaacaacgacauu

SEQ ID NO: 767687 - RNA, 19 nt, Artificial Sequence
  Description of Artificial Sequence: Synthetic oligonucleotide
  Antisense strand to SEQ ID NO: 767686
aaugucguuguuuaccugc

SEQ ID NO: 767688 - RNA, 19 nt, Artificial Sequence
  Description of Artificial Sequence: Synthetic oligonucleotide
  Sense strand starting at position 503 of SEQ ID NO: 587113
agacauugauguguguacu

SEQ ID NO: 767689 - RNA, 19 nt, Artificial Sequence
  Description of Artificial Sequence: Synthetic oligonucleotide
  Antisense strand to SEQ ID NO: 767688
aguacacacaucaaugucu

SEQ ID NO: 767690 - RNA, 19 nt, Artificial Sequence
  Description of Artificial Sequence: Synthetic oligonucleotide
  Sense strand starting at position 687 of SEQ ID NO: 587113
aguaccguuagugaguaaa

SEQ ID NO: 767691 - RNA, 19 nt, Artificial Sequence
  Description of Artificial Sequence: Synthetic oligonucleotide
  Antisense strand to SEQ ID NO: 767690
uuuacucacuaacgguacu

SEQ ID NO: 767692 - RNA, 19 nt, Artificial Sequence
  Description of Artificial Sequence: Synthetic oligonucleotide
  Sense strand starting at position 756 of SEQ ID NO: 587113
uuaauuaucguacaugaga

SEQ ID NO: 767693 - RNA, 19 nt, Artificial Sequence
  Description of Artificial Sequence: Synthetic oligonucleotide
  Antisense strand to SEQ ID NO: 767692
ucucauguacgauaauuaa

SEQ ID NO: 767694 - RNA, 19 nt, Artificial Sequence
  Description of Artificial Sequence: Synthetic oligonucleotide
  Sense strand starting at position 839 of SEQ ID NO: 587113
gaugacaauucuguagcuu

SEQ ID NO: 767695 - RNA, 19 nt, Artificial Sequence
  Description of Artificial Sequence: Synthetic oligonucleotide
  Antisense strand to SEQ ID NO: 767694
aagcuacagaauugucauc

SEQ ID NO: 767696 - RNA, 19 nt, Artificial Sequence
  Description of Artificial Sequence: Synthetic oligonucleotide
  Sense strand starting at position 840 of SEQ ID NO: 587113
augacaauucuguagcuuu

SEQ ID NO: 767697 - RNA, 19 nt, Artificial Sequence
  Description of Artificial Sequence: Synthetic oligonucleotide
  Antisense strand to SEQ ID NO: 767696
aaagcuacagaauugucau

SEQ ID NO: 767698 - RNA, 19 nt, Artificial Sequence
  Description of Artificial Sequence: Synthetic oligonucleotide
  Sense strand starting at position 1041 of SEQ ID NO: 587113
ccaggaaucgguuaucuuc

SEQ ID NO: 767699 - RNA, 19 nt, Artificial Sequence
  Description of Artificial Sequence: Synthetic oligonucleotide
  Antisense strand to SEQ ID NO: 767698
gaagauaaccgauuccugg

SEQ ID NO: 767700 - RNA, 19 nt, Artificial Sequence
  Description of Artificial Sequence: Synthetic oligonucleotide
  Sense strand starting at position 1127 of SEQ ID NO: 587113
guuuaaacuguugagucaa

SEQ ID NO: 767701 - RNA, 19 nt, Artificial Sequence
  Description of Artificial Sequence: Synthetic oligonucleotide
  Antisense strand to SEQ ID NO: 767700
uugacucaacaguuuaaac

SEQ ID NO: 767702 - RNA, 19 nt, Artificial Sequence
  Description of Artificial Sequence: Synthetic oligonucleotide
  Sense strand starting at position 1427 of SEQ ID NO: 587113
cuuagaaguaaucggauca

SEQ ID NO: 767703 - RNA, 19 nt, Artificial Sequence
  Description of Artificial Sequence: Synthetic oligonucleotide
  Antisense strand to SEQ ID NO: 767702
ugauccgauuacuucuaag

SEQ ID NO: 767704 - RNA, 19 nt, Artificial Sequence
  Description of Artificial Sequence: Synthetic oligonucleotide
  Sense strand starting at position 1428 of SEQ ID NO: 587113
uuagaaguaaucggaucaa

SEQ ID NO: 767705 - RNA, 19 nt, Artificial Sequence
  Description of Artificial Sequence: Synthetic oligonucleotide
  Antisense strand to SEQ ID NO: 767704
uugauccgauuacuucuaa

SEQ ID NO: 767706 - RNA, 19 nt, Artificial Sequence
  Description of Artificial Sequence: Synthetic oligonucleotide
  Sense strand starting at position 1451 of SEQ ID NO: 587113
ucuucuuacagguggagaa

SEQ ID NO: 767707 - RNA, 19 nt, Artificial Sequence
  Description of Artificial Sequence: Synthetic oligonucleotide
  Antisense strand to SEQ ID NO: 767706
uucuccaccuguaagaaga

SEQ ID NO: 767708 - RNA, 19 nt, Artificial Sequence
  Description of Artificial Sequence: Synthetic oligonucleotide
  Sense strand starting at position 1452 of SEQ ID NO: 587113
cuucuuacagguggagaaa

SEQ ID NO: 767709 - RNA, 19 nt, Artificial Sequence
  Description of Artificial Sequence: Synthetic oligonucleotide
  Antisense strand to SEQ ID NO: 767708
uuucuccaccuguaagaag

SEQ ID NO: 767710 - RNA, 19 nt, Artificial Sequence
  Description of Artificial Sequence: Synthetic oligonucleotide
  Sense strand starting at position 1534 of SEQ ID NO: 587113
gccugaagaaagugaucaa

SEQ ID NO: 767711 - RNA, 19 nt, Artificial Sequence
  Description of Artificial Sequence: Synthetic oligonucleotide
  Antisense strand to SEQ ID NO: 767710
uugaucacuuucuucaggc

SEQ ID NO: 767712 - RNA, 19 nt, Artificial Sequence
  Description of Artificial Sequence: Synthetic oligonucleotide
  Sense strand starting at position 1754 of SEQ ID NO: 587113
cucuguucgcgggaagaau

SEQ ID NO: 767713 - RNA, 19 nt, Artificial Sequence
  Description of Artificial Sequence: Synthetic oligonucleotide
  Antisense strand to SEQ ID NO: 767712
auucuucccgcgaacagag

SEQ ID NO: 767714 - RNA, 19 nt, Artificial Sequence
  Description of Artificial Sequence: Synthetic oligonucleotide
  Sense strand starting at position 2063 of SEQ ID NO: 587113
gcgauugcgauuuagguuu

SEQ ID NO: 767715 - RNA, 19 nt, Artificial Sequence
  Description of Artificial Sequence: Synthetic oligonucleotide
  Antisense strand to SEQ ID NO: 767714
aaaccuaaaucgcaaucgc

SEQ ID NO: 767716 - RNA, 19 nt, Artificial Sequence
  Description of Artificial Sequence: Synthetic oligonucleotide
  Sense strand starting at position 2075 of SEQ ID NO: 587113
uagguuuccgcgcauuuaa

SEQ ID NO: 767717 - RNA, 19 nt, Artificial Sequence
  Description of Artificial Sequence: Synthetic oligonucleotide
  Antisense strand to SEQ ID NO: 767716
uuaaaugcgcggaaaccua

SEQ ID NO: 767718 - RNA, 19 nt, Artificial Sequence
  Description of Artificial Sequence: Synthetic oligonucleotide
  Sense strand starting at position 2121 of SEQ ID NO: 587113
cugauuggugccgagaaau

SEQ ID NO: 767719 - RNA, 19 nt, Artificial Sequence
  Description of Artificial Sequence: Synthetic oligonucleotide
  Antisense strand to SEQ ID NO: 767718
auuucucggcaccaaucag

SEQ ID NO: 767720 - RNA, 19 nt, Artificial Sequence
  Description of Artificial Sequence: Synthetic oligonucleotide
  Sense strand starting at position 2200 of SEQ ID NO: 587113
gcagucuuggaccauaauc

SEQ ID NO: 767721 - RNA, 19 nt, Artificial Sequence
  Description of Artificial Sequence: Synthetic oligonucleotide
  Antisense strand to SEQ ID NO: 767720
gauuaugguccaagacugc

SEQ ID NO: 767722 - RNA, 19 nt, Artificial Sequence
  Description of Artificial Sequence: Synthetic oligonucleotide
  Sense strand starting at position 2455 of SEQ ID NO: 587113
uuggaaauucuuuagccgu

SEQ ID NO: 767723 - RNA, 19 nt, Artificial Sequence
  Description of Artificial Sequence: Synthetic oligonucleotide
  Antisense strand to SEQ ID NO: 767722
acggcuaaagaauuuccaa

SEQ ID NO: 767724 - RNA, 19 nt, Artificial Sequence
  Description of Artificial Sequence: Synthetic oligonucleotide
  Sense strand starting at position 2568 of SEQ ID NO: 587113
cgugcuuacguaagggaaa

SEQ ID NO: 767725 - RNA, 19 nt, Artificial Sequence
  Description of Artificial Sequence: Synthetic oligonucleotide
  Antisense strand to SEQ ID NO: 767724
uuucccuuacguaagcacg

SEQ ID NO: 767726 - RNA, 19 nt, Artificial Sequence
  Description of Artificial Sequence: Synthetic oligonucleotide
  Sense strand starting at position 2570 of SEQ ID NO: 587113
ugcuuacguaagggaaauu

SEQ ID NO: 767727 - RNA, 19 nt, Artificial Sequence
  Description of Artificial Sequence: Synthetic oligonucleotide
  Antisense strand to SEQ ID NO: 767726
aauuucccuuacguaagca

SEQ ID NO: 767728 - RNA, 19 nt, Artificial Sequence
  Description of Artificial Sequence: Synthetic oligonucleotide
  Sense strand starting at position 2571 of SEQ ID NO: 587113
gcuuacguaagggaaauua

SEQ ID NO: 767729 - RNA, 19 nt, Artificial Sequence
  Description of Artificial Sequence: Synthetic oligonucleotide
  Antisense strand to SEQ ID NO: 767728
uaauuucccuuacguaagc

SEQ ID NO: 767730 - RNA, 19 nt, Artificial Sequence
  Description of Artificial Sequence: Synthetic oligonucleotide
  Sense strand starting at position 2704 of SEQ ID NO: 587113
ccucguuuccucguuguga

SEQ ID NO: 767731 - RNA, 19 nt, Artificial Sequence
  Description of Artificial Sequence: Synthetic oligonucleotide
  Antisense strand to SEQ ID NO: 767730
ucacaacgaggaaacgagg

SEQ ID NO: 767732 - RNA, 19 nt, Artificial Sequence
  Description of Artificial Sequence: Synthetic oligonucleotide
  Sense strand starting at position 2717 of SEQ ID NO: 587113
uugugaucgcuucucugua

SEQ ID NO: 767733 - RNA, 19 nt, Artificial Sequence
  Description of Artificial Sequence: Synthetic oligonucleotide
  Antisense strand to SEQ ID NO: 767732
uacagagaagcgaucacaa

SEQ ID NO: 767734 - RNA, 19 nt, Artificial Sequence
  Description of Artificial Sequence: Synthetic oligonucleotide
  Sense strand starting at position 2808 of SEQ ID NO: 587113
ccucauucuacaggcgaga

SEQ ID NO: 767735 - RNA, 19 nt, Artificial Sequence
  Description of Artificial Sequence: Synthetic oligonucleotide
  Antisense strand to SEQ ID NO: 767734
ucucgccuguagaaugagg

SEQ ID NO: 767736 - RNA, 19 nt, Artificial Sequence
  Description of Artificial Sequence: Synthetic oligonucleotide
  Sense strand starting at position 2832 of SEQ ID NO: 587113
gcccaaagucuuggaauca

SEQ ID NO: 767737 - RNA, 19 nt, Artificial Sequence
  Description of Artificial Sequence: Synthetic oligonucleotide
  Antisense strand to SEQ ID NO: 767736
ugauuccaagacuuugggc

SEQ ID NO: 767738 - RNA, 19 nt, Artificial Sequence
  Description of Artificial Sequence: Synthetic oligonucleotide
  Sense strand starting at position 3137 of SEQ ID NO: 587113
acauacccuccgugggaua

SEQ ID NO: 767739 - RNA, 19 nt, Artificial Sequence
  Description of Artificial Sequence: Synthetic oligonucleotide
  Antisense strand to SEQ ID NO: 767738
uaucccacggaggguaugu

SEQ ID NO: 767740 - RNA, 19 nt, Artificial Sequence
  Description of Artificial Sequence: Synthetic oligonucleotide
  Sense strand starting at position 3153 of SEQ ID NO: 587113
auauguacugucuaaauca

SEQ ID NO: 767741 - RNA, 19 nt, Artificial Sequence
  Description of Artificial Sequence: Synthetic oligonucleotide
  Antisense strand to SEQ ID NO: 767740
ugauuuagacaguacauau

SEQ ID NO: 767742 - RNA, 19 nt, Artificial Sequence
  Description of Artificial Sequence: Synthetic oligonucleotide
  Sense strand starting at position 3202 of SEQ ID NO: 587113
ggcauccuuuaauuuguua

SEQ ID NO: 767743 - RNA, 19 nt, Artificial Sequence
  Description of Artificial Sequence: Synthetic oligonucleotide
  Antisense strand to SEQ ID NO: 767742
uaacaaauuaaaggaugcc

SEQ ID NO: 767744 - RNA, 19 nt, Artificial Sequence
  Description of Artificial Sequence: Synthetic oligonucleotide
  Sense strand starting at position 3215 of SEQ ID NO: 587113
uuguuaucagaauaggguu

SEQ ID NO: 767745 - RNA, 19 nt, Artificial Sequence
  Description of Artificial Sequence: Synthetic oligonucleotide
  Antisense strand to SEQ ID NO: 767744
aacccuauucugauaacaa

SEQ ID NO: 767746 - RNA, 19 nt, Artificial Sequence
  Description of Artificial Sequence: Synthetic oligonucleotide
  Sense strand starting at position 3221 of SEQ ID NO: 587113
ucagaauaggguugccaua

SEQ ID NO: 767747 - RNA, 19 nt, Artificial Sequence
  Description of Artificial Sequence: Synthetic oligonucleotide
  Antisense strand to SEQ ID NO: 767746
uauggcaacccuauucuga

SEQ ID NO: 767748 - RNA, 19 nt, Artificial Sequence
  Description of Artificial Sequence: Synthetic oligonucleotide
  Sense strand starting at position 3223 of SEQ ID NO: 587113
agaauaggguugccauauu

SEQ ID NO: 767749 - RNA, 19 nt, Artificial Sequence
  Description of Artificial Sequence: Synthetic oligonucleotide
  Antisense strand to SEQ ID NO: 767748
aauauggcaacccuauucu

SEQ ID NO: 767750 - RNA, 19 nt, Artificial Sequence
  Description of Artificial Sequence: Synthetic oligonucleotide
  Sense strand starting at position 3299 of SEQ ID NO: 587113
agaaauuaacuguguguuc

SEQ ID NO: 767751 - RNA, 19 nt, Artificial Sequence
  Description of Artificial Sequence: Synthetic oligonucleotide
  Antisense strand to SEQ ID NO: 767750
gaacacacaguuaauuucu

SEQ ID NO: 767752 - RNA, 19 nt, Artificial Sequence
  Description of Artificial Sequence: Synthetic oligonucleotide
  Sense strand starting at position 3399 of SEQ ID NO: 587113
guugauuugugcucaacua

SEQ ID NO: 767753 - RNA, 19 nt, Artificial Sequence
  Description of Artificial Sequence: Synthetic oligonucleotide
  Antisense strand to SEQ ID NO: 767752
uaguugagcacaaaucaac

SEQ ID NO: 767754 - RNA, 19 nt, Artificial Sequence
  Description of Artificial Sequence: Synthetic oligonucleotide
  Sense strand starting at position 3419 of SEQ ID NO: 587113
ggaucaauguacucaucuu

SEQ ID NO: 767755 - RNA, 19 nt, Artificial Sequence
  Description of Artificial Sequence: Synthetic oligonucleotide
  Antisense strand to SEQ ID NO: 767754
aagaugaguacauugaucc

SEQ ID NO: 767756 - RNA, 19 nt, Artificial Sequence
  Description of Artificial Sequence: Synthetic oligonucleotide
  Sense strand starting at position 3425 of SEQ ID NO: 587113
auguacucaucuuuaguca

SEQ ID NO: 767757 - RNA, 19 nt, Artificial Sequence
  Description of Artificial Sequence: Synthetic oligonucleotide
  Antisense strand to SEQ ID NO: 767756
ugacuaaagaugaguacau

SEQ ID NO: 767758 - RNA, 19 nt, Artificial Sequence
  Description of Artificial Sequence: Synthetic oligonucleotide
  Sense strand starting at position 3426 of SEQ ID NO: 587113
uguacucaucuuuagucaa

SEQ ID NO: 767759 - RNA, 19 nt, Artificial Sequence
  Description of Artificial Sequence: Synthetic oligonucleotide
  Antisense strand to SEQ ID NO: 767758
uugacuaaagaugaguaca

SEQ ID NO: 767760 - RNA, 19 nt, Artificial Sequence
  Description of Artificial Sequence: Synthetic oligonucleotide
  Sense strand starting at position 3545 of SEQ ID NO: 587113
gaaccaucgaguugaugga

SEQ ID NO: 767761 - RNA, 19 nt, Artificial Sequence
  Description of Artificial Sequence: Synthetic oligonucleotide
  Antisense strand to SEQ ID NO: 767760
uccaucaacucgaugguuc

SEQ ID NO: 767762 - RNA, 19 nt, Artificial Sequence
  Description of Artificial Sequence: Synthetic oligonucleotide
  Sense strand starting at position 3559 of SEQ ID NO: 587113
auggaacccguauguuuaa

SEQ ID NO: 767763 - RNA, 19 nt, Artificial Sequence
  Description of Artificial Sequence: Synthetic oligonucleotide
  Antisense strand to SEQ ID NO: 767762
uuaaacauacggguuccau

SEQ ID NO: 767764 - RNA, 19 nt, Artificial Sequence
  Description of Artificial Sequence: Synthetic oligonucleotide
  Sense strand starting at position 3787 of SEQ ID NO: 587113
cccauaaauguuggauaac

SEQ ID NO: 767765 - RNA, 19 nt, Artificial Sequence
  Description of Artificial Sequence: Synthetic oligonucleotide
  Antisense strand to SEQ ID NO: 767764
guuauccaacauuuauggg

SEQ ID NO: 767766 - RNA, 19 nt, Artificial Sequence
  Description of Artificial Sequence: Synthetic oligonucleotide
  Sense strand starting at position 100 of SEQ ID NO: 587114
cgcguuaauacggauucuu

SEQ ID NO: 767767 - RNA, 19 nt, Artificial Sequence
  Description of Artificial Sequence: Synthetic oligonucleotide
  Antisense strand to SEQ ID NO: 767766
aagaauccguauuaacgcg

SEQ ID NO: 767768 - RNA, 19 nt, Artificial Sequence
  Description of Artificial Sequence: Synthetic oligonucleotide
  Sense strand starting at position 186 of SEQ ID NO: 587114
ggaggucuccagcaugaag

SEQ ID NO: 767769 - RNA, 19 nt, Artificial Sequence
  Description of Artificial Sequence: Synthetic oligonucleotide
  Antisense strand to SEQ ID NO: 767768
cuucaugcuggagaccucc

SEQ ID NO: 767770 - RNA, 19 nt, Artificial Sequence
  Description of Artificial Sequence: Synthetic oligonucleotide
  Sense strand starting at position 282 of SEQ ID NO: 587114
gacugccuugccuguaaga

SEQ ID NO: 767771 - RNA, 19 nt, Artificial Sequence
  Description of Artificial Sequence: Synthetic oligonucleotide
  Antisense strand to SEQ ID NO: 767770
ucuuacaggcaaggcaguc

SEQ ID NO: 767772 - RNA, 19 nt, Artificial Sequence
  Description of Artificial Sequence: Synthetic oligonucleotide
  Sense strand starting at position 284 of SEQ ID NO: 587114
cugccuugccuguaagaau

SEQ ID NO: 767773 - RNA, 19 nt, Artificial Sequence
  Description of Artificial Sequence: Synthetic oligonucleotide
  Antisense strand to SEQ ID NO: 767772
auucuuacaggcaaggcag

SEQ ID NO: 767774 - RNA, 19 nt, Artificial Sequence
  Description of Artificial Sequence: Synthetic oligonucleotide
  Sense strand starting at position 293 of SEQ ID NO: 587114
cuguaagaauuagucauua

SEQ ID NO: 767775 - RNA, 19 nt, Artificial Sequence
  Description of Artificial Sequence: Synthetic oligonucleotide
  Antisense strand to SEQ ID NO: 767774
uaaugacuaauucuuacag

SEQ ID NO: 767776 - RNA, 19 nt, Artificial Sequence
  Description of Artificial Sequence: Synthetic oligonucleotide
  Sense strand starting at position 297 of SEQ ID NO: 587114
aagaauuagucauuaucgu

SEQ ID NO: 767777 - RNA, 19 nt, Artificial Sequence
  Description of Artificial Sequence: Synthetic oligonucleotide
  Antisense strand to SEQ ID NO: 767776
acgauaaugacuaauucuu

SEQ ID NO: 767778 - RNA, 19 nt, Artificial Sequence
  Description of Artificial Sequence: Synthetic oligonucleotide
  Sense strand starting at position 298 of SEQ ID NO: 587114
agaauuagucauuaucgua

SEQ ID NO: 767779 - RNA, 19 nt, Artificial Sequence
  Description of Artificial Sequence: Synthetic oligonucleotide
  Antisense strand to SEQ ID NO: 767778
uacgauaaugacuaauucu

SEQ ID NO: 767780 - RNA, 19 nt, Artificial Sequence
  Description of Artificial Sequence: Synthetic oligonucleotide
  Sense strand starting at position 303 of SEQ ID NO: 587114
uagucauuaucguauuagg

SEQ ID NO: 767781 - RNA, 19 nt, Artificial Sequence
  Description of Artificial Sequence: Synthetic oligonucleotide
  Antisense strand to SEQ ID NO: 767780
ccuaauacgauaaugacua

SEQ ID NO: 767782 - RNA, 19 nt, Artificial Sequence
  Description of Artificial Sequence: Synthetic oligonucleotide
  Sense strand starting at position 439 of SEQ ID NO: 587114
agacaaagcuauuggugau

SEQ ID NO: 767783 - RNA, 19 nt, Artificial Sequence
  Description of Artificial Sequence: Synthetic oligonucleotide
  Antisense strand to SEQ ID NO: 767782
aucaccaauagcuuugucu

SEQ ID NO: 767784 - RNA, 19 nt, Artificial Sequence
  Description of Artificial Sequence: Synthetic oligonucleotide
  Sense strand starting at position 442 of SEQ ID NO: 587114
caaagcuauuggugauaaa

SEQ ID NO: 767785 - RNA, 19 nt, Artificial Sequence
  Description of Artificial Sequence: Synthetic oligonucleotide
  Antisense strand to SEQ ID NO: 767784
uuuaucaccaauagcuuug

SEQ ID NO: 767786 - RNA, 19 nt, Artificial Sequence
  Description of Artificial Sequence: Synthetic oligonucleotide
  Sense strand starting at position 445 of SEQ ID NO: 587114
agcuauuggugauaaacag

SEQ ID NO: 767787 - RNA, 19 nt, Artificial Sequence
  Description of Artificial Sequence: Synthetic oligonucleotide
  Antisense strand to SEQ ID NO: 767786
cuguuuaucaccaauagcu

SEQ ID NO: 767788 - RNA, 19 nt, Artificial Sequence
  Description of Artificial Sequence: Synthetic oligonucleotide
  Sense strand starting at position 451 of SEQ ID NO: 587114
uggugauaaacaggcguuu

SEQ ID NO: 767789 - RNA, 19 nt, Artificial Sequence
  Description of Artificial Sequence: Synthetic oligonucleotide
  Antisense strand to SEQ ID NO: 767788
aaacgccuguuuaucacca

SEQ ID NO: 767790 - RNA, 19 nt, Artificial Sequence
  Description of Artificial Sequence: Synthetic oligonucleotide
  Sense strand starting at position 562 of SEQ ID NO: 587114
uucuuugcuccagggaaac

SEQ ID NO: 767791 - RNA, 19 nt, Artificial Sequence
  Description of Artificial Sequence: Synthetic oligonucleotide
  Antisense strand to SEQ ID NO: 767790
guuucccuggagcaaagaa

SEQ ID NO: 767792 - RNA, 19 nt, Artificial Sequence
  Description of Artificial Sequence: Synthetic oligonucleotide
  Sense strand starting at position 670 of SEQ ID NO: 587114
auagcaaauuuacgggaaa

SEQ ID NO: 767793 - RNA, 19 nt, Artificial Sequence
  Description of Artificial Sequence: Synthetic oligonucleotide
  Antisense strand to SEQ ID NO: 767792
uuucccguaaauuugcuau

SEQ ID NO: 767794 - RNA, 19 nt, Artificial Sequence
  Description of Artificial Sequence: Synthetic oligonucleotide
  Sense strand starting at position 751 of SEQ ID NO: 587114
ccacuuucucaauguguua

SEQ ID NO: 767795 - RNA, 19 nt, Artificial Sequence
  Description of Artificial Sequence: Synthetic oligonucleotide
  Antisense strand to SEQ ID NO: 767794
uaacacauugagaaagugg

SEQ ID NO: 767796 - RNA, 19 nt, Artificial Sequence
  Description of Artificial Sequence: Synthetic oligonucleotide
  Sense strand starting at position 754 of SEQ ID NO: 587114
cuuucucaauguguuaacu

SEQ ID NO: 767797 - RNA, 19 nt, Artificial Sequence
  Description of Artificial Sequence: Synthetic oligonucleotide
  Antisense strand to SEQ ID NO: 767796
aguuaacacauugagaaag

SEQ ID NO: 767798 - RNA, 19 nt, Artificial Sequence
  Description of Artificial Sequence: Synthetic oligonucleotide
  Sense strand starting at position 763 of SEQ ID NO: 587114
uguguuaacuguuuaagcu

SEQ ID NO: 767799 - RNA, 19 nt, Artificial Sequence
  Description of Artificial Sequence: Synthetic oligonucleotide
  Antisense strand to SEQ ID NO: 767798
agcuuaaacaguuaacaca

SEQ ID NO: 767800 - RNA, 19 nt, Artificial Sequence
  Description of Artificial Sequence: Synthetic oligonucleotide
  Sense strand starting at position 764 of SEQ ID NO: 587114
guguuaacuguuuaagcuu

SEQ ID NO: 767801 - RNA, 19 nt, Artificial Sequence
  Description of Artificial Sequence: Synthetic oligonucleotide
  Antisense strand to SEQ ID NO: 767800
aagcuuaaacaguuaacac

SEQ ID NO: 767802 - RNA, 19 nt, Artificial Sequence
  Description of Artificial Sequence: Synthetic oligonucleotide
  Sense strand starting at position 810 of SEQ ID NO: 587114
ucugcaaagcgaugaauaa

SEQ ID NO: 767803 - RNA, 19 nt, Artificial Sequence
  Description of Artificial Sequence: Synthetic oligonucleotide
  Antisense strand to SEQ ID NO: 767802
uuauucaucgcuuugcaga

SEQ ID NO: 767804 - RNA, 19 nt, Artificial Sequence
  Description of Artificial Sequence: Synthetic oligonucleotide
  Sense strand starting at position 811 of SEQ ID NO: 587114
cugcaaagcgaugaauaaa

SEQ ID NO: 767805 - RNA, 19 nt, Artificial Sequence
  Description of Artificial Sequence: Synthetic oligonucleotide
  Antisense strand to SEQ ID NO: 767804
uuuauucaucgcuuugcag

SEQ ID NO: 767806 - RNA, 19 nt, Artificial Sequence
  Description of Artificial Sequence: Synthetic oligonucleotide
  Sense strand starting at position 2141 of SEQ ID NO: 587114
gcgcuuuacuuaucaacau

SEQ ID NO: 767807 - RNA, 19 nt, Artificial Sequence
  Description of Artificial Sequence: Synthetic oligonucleotide
  Antisense strand to SEQ ID NO: 767806
auguugauaaguaaagcgc

SEQ ID NO: 767808 - RNA, 19 nt, Artificial Sequence
  Description of Artificial Sequence: Synthetic oligonucleotide
  Sense strand starting at position 2156 of SEQ ID NO: 587114
acaucaagcucccgauaau

SEQ ID NO: 767809 - RNA, 19 nt, Artificial Sequence
  Description of Artificial Sequence: Synthetic oligonucleotide
  Antisense strand to SEQ ID NO: 767808
auuaucgggagcuugaugu

SEQ ID NO: 767810 - RNA, 19 nt, Artificial Sequence
  Description of Artificial Sequence: Synthetic oligonucleotide
  Sense strand starting at position 2259 of SEQ ID NO: 587114
uuccauaucgauugcuaau

SEQ ID NO: 767811 - RNA, 19 nt, Artificial Sequence
  Description of Artificial Sequence: Synthetic oligonucleotide
  Antisense strand to SEQ ID NO: 767810
auuagcaaucgauauggaa

SEQ ID NO: 767812 - RNA, 19 nt, Artificial Sequence
  Description of Artificial Sequence: Synthetic oligonucleotide
  Sense strand starting at position 2261 of SEQ ID NO: 587114
ccauaucgauugcuaauua

SEQ ID NO: 767813 - RNA, 19 nt, Artificial Sequence
  Description of Artificial Sequence: Synthetic oligonucleotide
  Antisense strand to SEQ ID NO: 767812
uaauuagcaaucgauaugg

SEQ ID NO: 767814 - RNA, 19 nt, Artificial Sequence
  Description of Artificial Sequence: Synthetic oligonucleotide
  Sense strand starting at position 2504 of SEQ ID NO: 587114
uccgcaaaucacuaauaga

SEQ ID NO: 767815 - RNA, 19 nt, Artificial Sequence
  Description of Artificial Sequence: Synthetic oligonucleotide
  Antisense strand to SEQ ID NO: 767814
ucuauuagugauuugcgga

SEQ ID NO: 767816 - RNA, 19 nt, Artificial Sequence
  Description of Artificial Sequence: Synthetic oligonucleotide
  Sense strand starting at position 2566 of SEQ ID NO: 587114
ccagaaaugcuguacucuc

SEQ ID NO: 767817 - RNA, 19 nt, Artificial Sequence
  Description of Artificial Sequence: Synthetic oligonucleotide
  Antisense strand to SEQ ID NO: 767816
gagaguacagcauuucugg

SEQ ID NO: 767818 - RNA, 19 nt, Artificial Sequence
  Description of Artificial Sequence: Synthetic oligonucleotide
  Sense strand starting at position 2573 of SEQ ID NO: 587114
ugcuguacucucugaaccu

SEQ ID NO: 767819 - RNA, 19 nt, Artificial Sequence
  Description of Artificial Sequence: Synthetic oligonucleotide
  Antisense strand to SEQ ID NO: 767818
agguucagagaguacagca

SEQ ID NO: 767820 - RNA, 19 nt, Artificial Sequence
  Description of Artificial Sequence: Synthetic oligonucleotide
  Sense strand starting at position 2595 of SEQ ID NO: 587114
aagugauguugcuccaauu

SEQ ID NO: 767821 - RNA, 19 nt, Artificial Sequence
  Description of Artificial Sequence: Synthetic oligonucleotide
  Antisense strand to SEQ ID NO: 767820
aauuggagcaacaucacuu

SEQ ID NO: 767822 - RNA, 19 nt, Artificial Sequence
  Description of Artificial Sequence: Synthetic oligonucleotide
  Sense strand starting at position 2618 of SEQ ID NO: 587114
agagacauugagcggcaaa

SEQ ID NO: 767823 - RNA, 19 nt, Artificial Sequence
  Description of Artificial Sequence: Synthetic oligonucleotide
  Antisense strand to SEQ ID NO: 767822
uuugccgcucaaugucucu

SEQ ID NO: 767824 - RNA, 19 nt, Artificial Sequence
  Description of Artificial Sequence: Synthetic oligonucleotide
  Sense strand starting at position 2619 of SEQ ID NO: 587114
gagacauugagcggcaaau

SEQ ID NO: 767825 - RNA, 19 nt, Artificial Sequence
  Description of Artificial Sequence: Synthetic oligonucleotide
  Antisense strand to SEQ ID NO: 767824
auuugccgcucaaugucuc

SEQ ID NO: 767826 - RNA, 19 nt, Artificial Sequence
  Description of Artificial Sequence: Synthetic oligonucleotide
  Sense strand starting at position 2676 of SEQ ID NO: 587114
ccgaaacugucacauugaa

SEQ ID NO: 767827 - RNA, 19 nt, Artificial Sequence
  Description of Artificial Sequence: Synthetic oligonucleotide
  Antisense strand to SEQ ID NO: 767826
uucaaugugacaguuucgg

SEQ ID NO: 767828 - RNA, 19 nt, Artificial Sequence
  Description of Artificial Sequence: Synthetic oligonucleotide
  Sense strand starting at position 2808 of SEQ ID NO: 587114
guagcacccugucaauaaa

SEQ ID NO: 767829 - RNA, 19 nt, Artificial Sequence
  Description of Artificial Sequence: Synthetic oligonucleotide
  Antisense strand to SEQ ID NO: 767828
uuuauugacagggugcuac

SEQ ID NO: 767830 - RNA, 19 nt, Artificial Sequence
  Description of Artificial Sequence: Synthetic oligonucleotide
  Sense strand starting at position 2819 of SEQ ID NO: 587114
ucaauaaagaggcguaacu

SEQ ID NO: 767831 - RNA, 19 nt, Artificial Sequence
  Description of Artificial Sequence: Synthetic oligonucleotide
  Antisense strand to SEQ ID NO: 767830
aguuacgccucuuuauuga

SEQ ID NO: 767832 - RNA, 19 nt, Artificial Sequence
  Description of Artificial Sequence: Synthetic oligonucleotide
  Sense strand starting at position 3008 of SEQ ID NO: 587114
cccuuacacgcucgaauaa

SEQ ID NO: 767833 - RNA, 19 nt, Artificial Sequence
  Description of Artificial Sequence: Synthetic oligonucleotide
  Antisense strand to SEQ ID NO: 767832
uuauucgagcguguaaggg

SEQ ID NO: 767834 - RNA, 19 nt, Artificial Sequence
  Description of Artificial Sequence: Synthetic oligonucleotide
  Sense strand starting at position 3009 of SEQ ID NO: 587114
ccuuacacgcucgaauaaa

SEQ ID NO: 767835 - RNA, 19 nt, Artificial Sequence
  Description of Artificial Sequence: Synthetic oligonucleotide
  Antisense strand to SEQ ID NO: 767834
uuuauucgagcguguaagg

SEQ ID NO: 767836 - RNA, 19 nt, Artificial Sequence
  Description of Artificial Sequence: Synthetic oligonucleotide
  Sense strand starting at position 3111 of SEQ ID NO: 587114
agagaagugucacucccuu

SEQ ID NO: 767837 - RNA, 19 nt, Artificial Sequence
  Description of Artificial Sequence: Synthetic oligonucleotide
  Antisense strand to SEQ ID NO: 767836
aagggagugacacuucucu

SEQ ID NO: 767838 - RNA, 19 nt, Artificial Sequence
  Description of Artificial Sequence: Synthetic oligonucleotide
  Sense strand starting at position 3199 of SEQ ID NO: 587114
ucaggauugugggcagcaa

SEQ ID NO: 767839 - RNA, 19 nt, Artificial Sequence
  Description of Artificial Sequence: Synthetic oligonucleotide
  Antisense strand to SEQ ID NO: 767838
uugcugcccacaauccuga

SEQ ID NO: 767840 - RNA, 19 nt, Artificial Sequence
  Description of Artificial Sequence: Synthetic oligonucleotide
  Sense strand starting at position 3455 of SEQ ID NO: 587114
guuggcuuuggguguaagu

SEQ ID NO: 767841 - RNA, 19 nt, Artificial Sequence
  Description of Artificial Sequence: Synthetic oligonucleotide
  Antisense strand to SEQ ID NO: 767840
acuuacacccaaagccaac

SEQ ID NO: 767842 - RNA, 19 nt, Artificial Sequence
  Description of Artificial Sequence: Synthetic oligonucleotide
  Sense strand starting at position 3457 of SEQ ID NO: 587114
uggcuuuggguguaaguaa

SEQ ID NO: 767843 - RNA, 19 nt, Artificial Sequence
  Description of Artificial Sequence: Synthetic oligonucleotide
  Antisense strand to SEQ ID NO: 767842
uuacuuacacccaaagcca

SEQ ID NO: 767844 - RNA, 19 nt, Artificial Sequence
  Description of Artificial Sequence: Synthetic oligonucleotide
  Sense strand starting at position 3868 of SEQ ID NO: 587114
uuuccagucucacuaggaa

SEQ ID NO: 767845 - RNA, 19 nt, Artificial Sequence
  Description of Artificial Sequence: Synthetic oligonucleotide
  Antisense strand to SEQ ID NO: 767844
uuccuagugagacuggaaa

SEQ ID NO: 767846 - RNA, 19 nt, Artificial Sequence
  Description of Artificial Sequence: Synthetic oligonucleotide
  Sense strand starting at position 809 of SEQ ID NO: 587115
cagcuuuguccuuaugagu

SEQ ID NO: 767847 - RNA, 19 nt, Artificial Sequence
  Description of Artificial Sequence: Synthetic oligonucleotide
  Antisense strand to SEQ ID NO: 767846
acucauaaggacaaagcug

SEQ ID NO: 767848 - RNA, 19 nt, Artificial Sequence
  Description of Artificial Sequence: Synthetic oligonucleotide
  Sense strand starting at position 1160 of SEQ ID NO: 587115
uagcacuacucccgggauu

SEQ ID NO: 767849 - RNA, 19 nt, Artificial Sequence
  Description of Artificial Sequence: Synthetic oligonucleotide
  Antisense strand to SEQ ID NO: 767848
aaucccgggaguagugcua

SEQ ID NO: 767850 - RNA, 19 nt, Artificial Sequence
  Description of Artificial Sequence: Synthetic oligonucleotide
  Sense strand starting at position 2123 of SEQ ID NO: 587115
ggaccacaugccugagauu

SEQ ID NO: 767851 - RNA, 19 nt, Artificial Sequence
  Description of Artificial Sequence: Synthetic oligonucleotide
  Antisense strand to SEQ ID NO: 767850
aaucucaggcauguggucc

SEQ ID NO: 767852 - RNA, 19 nt, Artificial Sequence
  Description of Artificial Sequence: Synthetic oligonucleotide
  Sense strand starting at position 2401 of SEQ ID NO: 587115
gcgcucacuauguguguau

SEQ ID NO: 767853 - RNA, 19 nt, Artificial Sequence
  Description of Artificial Sequence: Synthetic oligonucleotide
  Antisense strand to SEQ ID NO: 767852
auacacacauagugagcgc

SEQ ID NO: 767854 - RNA, 19 nt, Artificial Sequence
  Description of Artificial Sequence: Synthetic oligonucleotide
  Sense strand starting at position 2403 of SEQ ID NO: 587115
gcucacuauguguguauuu

SEQ ID NO: 767855 - RNA, 19 nt, Artificial Sequence
  Description of Artificial Sequence: Synthetic oligonucleotide
  Antisense strand to SEQ ID NO: 767854
aaauacacacauagugagc

SEQ ID NO: 767856 - RNA, 19 nt, Artificial Sequence
  Description of Artificial Sequence: Synthetic oligonucleotide
  Sense strand starting at position 2456 of SEQ ID NO: 587115
acagcucaguggcuuaaau

SEQ ID NO: 767857 - RNA, 19 nt, Artificial Sequence
  Description of Artificial Sequence: Synthetic oligonucleotide
  Antisense strand to SEQ ID NO: 767856
auuuaagccacugagcugu

SEQ ID NO: 767858 - RNA, 19 nt, Artificial Sequence
  Description of Artificial Sequence: Synthetic oligonucleotide
  Sense strand starting at position 2458 of SEQ ID NO: 587115
agcucaguggcuuaaauau

SEQ ID NO: 767859 - RNA, 19 nt, Artificial Sequence
  Description of Artificial Sequence: Synthetic oligonucleotide
  Antisense strand to SEQ ID NO: 767858
auauuuaagccacugagcu

SEQ ID NO: 767860 - RNA, 19 nt, Artificial Sequence
  Description of Artificial Sequence: Synthetic oligonucleotide
  Sense strand starting at position 2587 of SEQ ID NO: 587115
acaccaugcuccggcuaau

SEQ ID NO: 767861 - RNA, 19 nt, Artificial Sequence
  Description of Artificial Sequence: Synthetic oligonucleotide
  Antisense strand to SEQ ID NO: 767860
auuagccggagcauggugu

SEQ ID NO: 767862 - RNA, 19 nt, Artificial Sequence
  Description of Artificial Sequence: Synthetic oligonucleotide
  Sense strand starting at position 2638 of SEQ ID NO: 587115
gauggagucuccuuuguug

SEQ ID NO: 767863 - RNA, 19 nt, Artificial Sequence
  Description of Artificial Sequence: Synthetic oligonucleotide
  Antisense strand to SEQ ID NO: 767862
caacaaaggagacuccauc

SEQ ID NO: 767864 - RNA, 19 nt, Artificial Sequence
  Description of Artificial Sequence: Synthetic oligonucleotide
  Sense strand starting at position 3289 of SEQ ID NO: 587115
ucucuaacuccugggagga

SEQ ID NO: 767865 - RNA, 19 nt, Artificial Sequence
  Description of Artificial Sequence: Synthetic oligonucleotide
  Antisense strand to SEQ ID NO: 767864
uccucccaggaguuagaga

SEQ ID NO: 767866 - RNA, 19 nt, Artificial Sequence
  Description of Artificial Sequence: Synthetic oligonucleotide
  Sense strand starting at position 3290 of SEQ ID NO: 587115
cucuaacuccugggaggau

SEQ ID NO: 767867 - RNA, 19 nt, Artificial Sequence
  Description of Artificial Sequence: Synthetic oligonucleotide
  Antisense strand to SEQ ID NO: 767866
auccucccaggaguuagag

SEQ ID NO: 767868 - RNA, 19 nt, Artificial Sequence
  Description of Artificial Sequence: Synthetic oligonucleotide
  Sense strand starting at position 3711 of SEQ ID NO: 587115
agugacuuacggcgguaau

SEQ ID NO: 767869 - RNA, 19 nt, Artificial Sequence
  Description of Artificial Sequence: Synthetic oligonucleotide
  Antisense strand to SEQ ID NO: 767868
auuaccgccguaagucacu

SEQ ID NO: 767870 - RNA, 19 nt, Artificial Sequence
  Description of Artificial Sequence: Synthetic oligonucleotide
  Sense strand starting at position 3712 of SEQ ID NO: 587115
gugacuuacggcgguaauc

SEQ ID NO: 767871 - RNA, 19 nt, Artificial Sequence
  Description of Artificial Sequence: Synthetic oligonucleotide
  Antisense strand to SEQ ID NO: 767870
gauuaccgccguaagucac

SEQ ID NO: 767872 - RNA, 19 nt, Artificial Sequence
  Description of Artificial Sequence: Synthetic oligonucleotide
  Sense strand starting at position 3846 of SEQ ID NO: 587115
gguggaacgugcuuguaau

SEQ ID NO: 767873 - RNA, 19 nt, Artificial Sequence
  Description of Artificial Sequence: Synthetic oligonucleotide
  Antisense strand to SEQ ID NO: 767872
auuacaagcacguuccacc

SEQ ID NO: 767874 - RNA, 19 nt, Artificial Sequence
  Description of Artificial Sequence: Synthetic oligonucleotide
  Sense strand starting at position 3847 of SEQ ID NO: 587115
guggaacgugcuuguaauc

SEQ ID NO: 767875 - RNA, 19 nt, Artificial Sequence
  Description of Artificial Sequence: Synthetic oligonucleotide
  Antisense strand to SEQ ID NO: 767874
gauuacaagcacguuccac

SEQ ID NO: 767876 - RNA, 19 nt, Artificial Sequence
  Description of Artificial Sequence: Synthetic oligonucleotide
  Sense strand starting at position 3853 of SEQ ID NO: 587115
cgugcuuguaaucccaagu

SEQ ID NO: 767877 - RNA, 19 nt, Artificial Sequence
  Description of Artificial Sequence: Synthetic oligonucleotide
  Antisense strand to SEQ ID NO: 767876
acuugggauuacaagcacg

SEQ ID NO: 767878 - RNA, 19 nt, Artificial Sequence
  Description of Artificial Sequence: Synthetic oligonucleotide
  Sense strand starting at position 1 of SEQ ID NO: 587117
cgcgguuacagccaaugaa

SEQ ID NO: 767879 - RNA, 19 nt, Artificial Sequence
  Description of Artificial Sequence: Synthetic oligonucleotide
  Antisense strand to SEQ ID NO: 767878
uucauuggcuguaaccgcg

SEQ ID NO: 767880 - RNA, 19 nt, Artificial Sequence
  Description of Artificial Sequence: Synthetic oligonucleotide
  Sense strand starting at position 194 of SEQ ID NO: 587117
gccucuuucuacuccggau

SEQ ID NO: 767881 - RNA, 19 nt, Artificial Sequence
  Description of Artificial Sequence: Synthetic oligonucleotide
  Antisense strand to SEQ ID NO: 767880
auccggaguagaaagaggc

SEQ ID NO: 767882 - RNA, 19 nt, Artificial Sequence
  Description of Artificial Sequence: Synthetic oligonucleotide
  Sense strand starting at position 215 of SEQ ID NO: 587117
cagacuguguuucuuugaa

SEQ ID NO: 767883 - RNA, 19 nt, Artificial Sequence
  Description of Artificial Sequence: Synthetic oligonucleotide
  Antisense strand to SEQ ID NO: 767882
uucaaagaaacacagucug

SEQ ID NO: 767884 - RNA, 19 nt, Artificial Sequence
  Description of Artificial Sequence: Synthetic oligonucleotide
  Sense strand starting at position 217 of SEQ ID NO: 587117
gacuguguuucuuugaaac

SEQ ID NO: 767885 - RNA, 19 nt, Artificial Sequence
  Description of Artificial Sequence: Synthetic oligonucleotide
  Antisense strand to SEQ ID NO: 767884
guuucaaagaaacacaguc

SEQ ID NO: 767886 - RNA, 19 nt, Artificial Sequence
  Description of Artificial Sequence: Synthetic oligonucleotide
  Sense strand starting at position 219 of SEQ ID NO: 587117
cuguguuucuuugaaacug

SEQ ID NO: 767887 - RNA, 19 nt, Artificial Sequence
  Description of Artificial Sequence: Synthetic oligonucleotide
  Antisense strand to SEQ ID NO: 767886
caguuucaaagaaacacag

SEQ ID NO: 767888 - RNA, 19 nt, Artificial Sequence
  Description of Artificial Sequence: Synthetic oligonucleotide
  Sense strand starting at position 426 of SEQ ID NO: 587117
ccaagaacagguugccaua

SEQ ID NO: 767889 - RNA, 19 nt, Artificial Sequence
  Description of Artificial Sequence: Synthetic oligonucleotide
  Antisense strand to SEQ ID NO: 767888
uauggcaaccuguucuugg

SEQ ID NO: 767890 - RNA, 19 nt, Artificial Sequence
  Description of Artificial Sequence: Synthetic oligonucleotide
  Sense strand starting at position 428 of SEQ ID NO: 587117
aagaacagguugccauaua

SEQ ID NO: 767891 - RNA, 19 nt, Artificial Sequence
  Description of Artificial Sequence: Synthetic oligonucleotide
  Antisense strand to SEQ ID NO: 767890
uauauggcaaccuguucuu

SEQ ID NO: 767892 - RNA, 19 nt, Artificial Sequence
  Description of Artificial Sequence: Synthetic oligonucleotide
  Sense strand starting at position 429 of SEQ ID NO: 587117
agaacagguugccauauaa

SEQ ID NO: 767893 - RNA, 19 nt, Artificial Sequence
  Description of Artificial Sequence: Synthetic oligonucleotide
  Antisense strand to SEQ ID NO: 767892
uuauauggcaaccuguucu

SEQ ID NO: 767894 - RNA, 19 nt, Artificial Sequence
  Description of Artificial Sequence: Synthetic oligonucleotide
  Sense strand starting at position 493 of SEQ ID NO: 587117
aacgcauaugccugugaag

SEQ ID NO: 767895 - RNA, 19 nt, Artificial Sequence
  Description of Artificial Sequence: Synthetic oligonucleotide
  Antisense strand to SEQ ID NO: 767894
cuucacaggcauaugcguu

SEQ ID NO: 767896 - RNA, 19 nt, Artificial Sequence
  Description of Artificial Sequence: Synthetic oligonucleotide
  Sense strand starting at position 495 of SEQ ID NO: 587117
cgcauaugccugugaaguu

SEQ ID NO: 767897 - RNA, 19 nt, Artificial Sequence
  Description of Artificial Sequence: Synthetic oligonucleotide
  Antisense strand to SEQ ID NO: 767896
aacuucacaggcauaugcg

SEQ ID NO: 767898 - RNA, 19 nt, Artificial Sequence
  Description of Artificial Sequence: Synthetic oligonucleotide
  Sense strand starting at position 505 of SEQ ID NO: 587117
ugugaaguuucucugcgga

SEQ ID NO: 767899 - RNA, 19 nt, Artificial Sequence
  Description of Artificial Sequence: Synthetic oligonucleotide
  Antisense strand to SEQ ID NO: 767898
uccgcagagaaacuucaca

SEQ ID NO: 767900 - RNA, 19 nt, Artificial Sequence
  Description of Artificial Sequence: Synthetic oligonucleotide
  Sense strand starting at position 508 of SEQ ID NO: 587117
gaaguuucucugcggagcu

SEQ ID NO: 767901 - RNA, 19 nt, Artificial Sequence
  Description of Artificial Sequence: Synthetic oligonucleotide
  Antisense strand to SEQ ID NO: 767900
agcuccgcagagaaacuuc

SEQ ID NO: 767902 - RNA, 19 nt, Artificial Sequence
  Description of Artificial Sequence: Synthetic oligonucleotide
  Sense strand starting at position 527 of SEQ ID NO: 587117
gccagauaacucgaugaca

SEQ ID NO: 767903 - RNA, 19 nt, Artificial Sequence
  Description of Artificial Sequence: Synthetic oligonucleotide
  Antisense strand to SEQ ID NO: 767902
ugucaucgaguuaucuggc

SEQ ID NO: 767904 - RNA, 19 nt, Artificial Sequence
  Description of Artificial Sequence: Synthetic oligonucleotide
  Sense strand starting at position 532 of SEQ ID NO: 587117
auaacucgaugacaauauu

SEQ ID NO: 767905 - RNA, 19 nt, Artificial Sequence
  Description of Artificial Sequence: Synthetic oligonucleotide
  Antisense strand to SEQ ID NO: 767904
aauauugucaucgaguuau

SEQ ID NO: 767906 - RNA, 19 nt, Artificial Sequence
  Description of Artificial Sequence: Synthetic oligonucleotide
  Sense strand starting at position 566 of SEQ ID NO: 587117
uuguuaaauguugacucga

SEQ ID NO: 767907 - RNA, 19 nt, Artificial Sequence
  Description of Artificial Sequence: Synthetic oligonucleotide
  Antisense strand to SEQ ID NO: 767906
ucgagucaacauuuaacaa

SEQ ID NO: 767908 - RNA, 19 nt, Artificial Sequence
  Description of Artificial Sequence: Synthetic oligonucleotide
  Sense strand starting at position 568 of SEQ ID NO: 587117
guuaaauguugacucgaug

SEQ ID NO: 767909 - RNA, 19 nt, Artificial Sequence
  Description of Artificial Sequence: Synthetic oligonucleotide
  Antisense strand to SEQ ID NO: 767908
caucgagucaacauuuaac

SEQ ID NO: 767910 - RNA, 19 nt, Artificial Sequence
  Description of Artificial Sequence: Synthetic oligonucleotide
  Sense strand starting at position 607 of SEQ ID NO: 587117
cucugaaagcucgcguaac

SEQ ID NO: 767911 - RNA, 19 nt, Artificial Sequence
  Description of Artificial Sequence: Synthetic oligonucleotide
  Antisense strand to SEQ ID NO: 767910
guuacgcgagcuuucagag

SEQ ID NO: 767912 - RNA, 19 nt, Artificial Sequence
  Description of Artificial Sequence: Synthetic oligonucleotide
  Sense strand starting at position 686 of SEQ ID NO: 587117
aucacuucgucacuuaagu

SEQ ID NO: 767913 - RNA, 19 nt, Artificial Sequence
  Description of Artificial Sequence: Synthetic oligonucleotide
  Antisense strand to SEQ ID NO: 767912
acuuaagugacgaagugau

SEQ ID NO: 767914 - RNA, 19 nt, Artificial Sequence
  Description of Artificial Sequence: Synthetic oligonucleotide
  Sense strand starting at position 768 of SEQ ID NO: 587117
ccggguuugggcugcgaga

SEQ ID NO: 767915 - RNA, 19 nt, Artificial Sequence
  Description of Artificial Sequence: Synthetic oligonucleotide
  Antisense strand to SEQ ID NO: 767914
ucucgcagcccaaacccgg

SEQ ID NO: 767916 - RNA, 19 nt, Artificial Sequence
  Description of Artificial Sequence: Synthetic oligonucleotide
  Sense strand starting at position 1630 of SEQ ID NO: 587117
ccaguucuguuacucauua

SEQ ID NO: 767917 - RNA, 19 nt, Artificial Sequence
  Description of Artificial Sequence: Synthetic oligonucleotide
  Antisense strand to SEQ ID NO: 767916
uaaugaguaacagaacugg

SEQ ID NO: 767918 - RNA, 19 nt, Artificial Sequence
  Description of Artificial Sequence: Synthetic oligonucleotide
  Sense strand starting at position 2218 of SEQ ID NO: 587117
cucuguuacuugcuuccua

SEQ ID NO: 767919 - RNA, 19 nt, Artificial Sequence
  Description of Artificial Sequence: Synthetic oligonucleotide
  Antisense strand to SEQ ID NO: 767918
uaggaagcaaguaacagag

SEQ ID NO: 767920 - RNA, 19 nt, Artificial Sequence
  Description of Artificial Sequence: Synthetic oligonucleotide
  Sense strand starting at position 2241 of SEQ ID NO: 587117
gaacuccaguuccugagaa

SEQ ID NO: 767921 - RNA, 19 nt, Artificial Sequence
  Description of Artificial Sequence: Synthetic oligonucleotide
  Antisense strand to SEQ ID NO: 767920
uucucaggaacuggaguuc

SEQ ID NO: 767922 - RNA, 19 nt, Artificial Sequence
  Description of Artificial Sequence: Synthetic oligonucleotide
  Sense strand starting at position 3007 of SEQ ID NO: 587117
gggcacacacuauguaaau

SEQ ID NO: 767923 - RNA, 19 nt, Artificial Sequence
  Description of Artificial Sequence: Synthetic oligonucleotide
  Antisense strand to SEQ ID NO: 767922
auuuacauagugugugccc

SEQ ID NO: 767924 - RNA, 19 nt, Artificial Sequence
  Description of Artificial Sequence: Synthetic oligonucleotide
  Sense strand starting at position 3075 of SEQ ID NO: 587117
gcuauuuccugucauagcu

SEQ ID NO: 767925 - RNA, 19 nt, Artificial Sequence
  Description of Artificial Sequence: Synthetic oligonucleotide
  Antisense strand to SEQ ID NO: 767924
agcuaugacaggaaauagc

SEQ ID NO: 767926 - RNA, 19 nt, Artificial Sequence
  Description of Artificial Sequence: Synthetic oligonucleotide
  Sense strand starting at position 3169 of SEQ ID NO: 587117
ugguuaggaaguugcuauu

SEQ ID NO: 767927 - RNA, 19 nt, Artificial Sequence
  Description of Artificial Sequence: Synthetic oligonucleotide
  Antisense strand to SEQ ID NO: 767926
aauagcaacuuccuaacca

SEQ ID NO: 767928 - RNA, 19 nt, Artificial Sequence
  Description of Artificial Sequence: Synthetic oligonucleotide
  Sense strand starting at position 3262 of SEQ ID NO: 587117
gagaauguucuuggaucuu

SEQ ID NO: 767929 - RNA, 19 nt, Artificial Sequence
  Description of Artificial Sequence: Synthetic oligonucleotide
  Antisense strand to SEQ ID NO: 767928
aagauccaagaacauucuc

SEQ ID NO: 767930 - RNA, 19 nt, Artificial Sequence
  Description of Artificial Sequence: Synthetic oligonucleotide
  Sense strand starting at position 3330 of SEQ ID NO: 587117
gaagcaagcuuauugagaa

SEQ ID NO: 767931 - RNA, 19 nt, Artificial Sequence
  Description of Artificial Sequence: Synthetic oligonucleotide
  Antisense strand to SEQ ID NO: 767930
uucucaauaagcuugcuuc

SEQ ID NO: 767932 - RNA, 19 nt, Artificial Sequence
  Description of Artificial Sequence: Synthetic oligonucleotide
  Sense strand starting at position 3506 of SEQ ID NO: 587117
ucuaaauguugccauggua

SEQ ID NO: 767933 - RNA, 19 nt, Artificial Sequence
  Description of Artificial Sequence: Synthetic oligonucleotide
  Antisense strand to SEQ ID NO: 767932
uaccauggcaacauuuaga

SEQ ID NO: 767934 - RNA, 19 nt, Artificial Sequence
  Description of Artificial Sequence: Synthetic oligonucleotide
  Sense strand starting at position 3509 of SEQ ID NO: 587117
aaauguugccaugguauuu

SEQ ID NO: 767935 - RNA, 19 nt, Artificial Sequence
  Description of Artificial Sequence: Synthetic oligonucleotide
  Antisense strand to SEQ ID NO: 767934
aaauaccauggcaacauuu

SEQ ID NO: 767936 - RNA, 19 nt, Artificial Sequence
  Description of Artificial Sequence: Synthetic oligonucleotide
  Sense strand starting at position 3554 of SEQ ID NO: 587117
ugucguuuagcaugagaau

SEQ ID NO: 767937 - RNA, 19 nt, Artificial Sequence
  Description of Artificial Sequence: Synthetic oligonucleotide
  Antisense strand to SEQ ID NO: 767936
auucucaugcuaaacgaca

SEQ ID NO: 767938 - RNA, 19 nt, Artificial Sequence
  Description of Artificial Sequence: Synthetic oligonucleotide
  Sense strand starting at position 3555 of SEQ ID NO: 587117
gucguuuagcaugagaaug

SEQ ID NO: 767939 - RNA, 19 nt, Artificial Sequence
  Description of Artificial Sequence: Synthetic oligonucleotide
  Antisense strand to SEQ ID NO: 767938
cauucucaugcuaaacgac

SEQ ID NO: 767940 - RNA, 19 nt, Artificial Sequence
  Description of Artificial Sequence: Synthetic oligonucleotide
  Sense strand starting at position 3565 of SEQ ID NO: 587117
augagaaugcauuguaauu

SEQ ID NO: 767941 - RNA, 19 nt, Artificial Sequence
  Description of Artificial Sequence: Synthetic oligonucleotide
  Antisense strand to SEQ ID NO: 767940
aauuacaaugcauucucau

SEQ ID NO: 767942 - RNA, 19 nt, Artificial Sequence
  Description of Artificial Sequence: Synthetic oligonucleotide
  Sense strand starting at position 3567 of SEQ ID NO: 587117
gagaaugcauuguaauuag

SEQ ID NO: 767943 - RNA, 19 nt, Artificial Sequence
  Description of Artificial Sequence: Synthetic oligonucleotide
  Antisense strand to SEQ ID NO: 767942
cuaauuacaaugcauucuc

SEQ ID NO: 767944 - RNA, 19 nt, Artificial Sequence
  Description of Artificial Sequence: Synthetic oligonucleotide
  Sense strand starting at position 3570 of SEQ ID NO: 587117
aaugcauuguaauuagcga

SEQ ID NO: 767945 - RNA, 19 nt, Artificial Sequence
  Description of Artificial Sequence: Synthetic oligonucleotide
  Antisense strand to SEQ ID NO: 767944
ucgcuaauuacaaugcauu

SEQ ID NO: 767946 - RNA, 19 nt, Artificial Sequence
  Description of Artificial Sequence: Synthetic oligonucleotide
  Sense strand starting at position 3571 of SEQ ID NO: 587117
augcauuguaauuagcgaa

SEQ ID NO: 767947 - RNA, 19 nt, Artificial Sequence
  Description of Artificial Sequence: Synthetic oligonucleotide
  Antisense strand to SEQ ID NO: 767946
uucgcuaauuacaaugcau

SEQ ID NO: 767948 - RNA, 19 nt, Artificial Sequence
  Description of Artificial Sequence: Synthetic oligonucleotide
  Sense strand starting at position 3578 of SEQ ID NO: 587117
guaauuagcgaauaaugag

SEQ ID NO: 767949 - RNA, 19 nt, Artificial Sequence
  Description of Artificial Sequence: Synthetic oligonucleotide
  Antisense strand to SEQ ID NO: 767948
cucauuauucgcuaauuac

SEQ ID NO: 767950 - RNA, 19 nt, Artificial Sequence
  Description of Artificial Sequence: Synthetic oligonucleotide
  Sense strand starting at position 3584 of SEQ ID NO: 587117
agcgaauaaugagcaauga

SEQ ID NO: 767951 - RNA, 19 nt, Artificial Sequence
  Description of Artificial Sequence: Synthetic oligonucleotide
  Antisense strand to SEQ ID NO: 767950
ucauugcucauuauucgcu

SEQ ID NO: 767952 - RNA, 19 nt, Artificial Sequence
  Description of Artificial Sequence: Synthetic oligonucleotide
  Sense strand starting at position 3827 of SEQ ID NO: 587117
gaugaagagucucugaguc

SEQ ID NO: 767953 - RNA, 19 nt, Artificial Sequence
  Description of Artificial Sequence: Synthetic oligonucleotide
  Antisense strand to SEQ ID NO: 767952
gacucagagacucuucauc

SEQ ID NO: 767954 - RNA, 19 nt, Artificial Sequence
  Description of Artificial Sequence: Synthetic oligonucleotide
  Sense strand starting at position 3829 of SEQ ID NO: 587117
ugaagagucucugagucga

SEQ ID NO: 767955 - RNA, 19 nt, Artificial Sequence
  Description of Artificial Sequence: Synthetic oligonucleotide
  Antisense strand to SEQ ID NO: 767954
ucgacucagagacucuuca

SEQ ID NO: 767956 - RNA, 19 nt, Artificial Sequence
  Description of Artificial Sequence: Synthetic oligonucleotide
  Sense strand starting at position 3844 of SEQ ID NO: 587117
ucgacuccugcugacauau

SEQ ID NO: 767957 - RNA, 19 nt, Artificial Sequence
  Description of Artificial Sequence: Synthetic oligonucleotide
  Antisense strand to SEQ ID NO: 767956
auaugucagcaggagucga

SEQ ID NO: 767958 - RNA, 19 nt, Artificial Sequence
  Description of Artificial Sequence: Synthetic oligonucleotide
  Sense strand starting at position 11 of SEQ ID NO: 587118
gaagaagaauguuuguugu

SEQ ID NO: 767959 - RNA, 19 nt, Artificial Sequence
  Description of Artificial Sequence: Synthetic oligonucleotide
  Antisense strand to SEQ ID NO: 767958
acaacaaacauucuucuuc

SEQ ID NO: 767960 - RNA, 19 nt, Artificial Sequence
  Description of Artificial Sequence: Synthetic oligonucleotide
  Sense strand starting at position 14 of SEQ ID NO: 587118
gaagaauguuuguuguuua

SEQ ID NO: 767961 - RNA, 19 nt, Artificial Sequence
  Description of Artificial Sequence: Synthetic oligonucleotide
  Antisense strand to SEQ ID NO: 767960
uaaacaacaaacauucuuc

SEQ ID NO: 767962 - RNA, 19 nt, Artificial Sequence
  Description of Artificial Sequence: Synthetic oligonucleotide
  Sense strand starting at position 17 of SEQ ID NO: 587118
gaauguuuguuguuuaucu

SEQ ID NO: 767963 - RNA, 19 nt, Artificial Sequence
  Description of Artificial Sequence: Synthetic oligonucleotide
  Antisense strand to SEQ ID NO: 767962
agauaaacaacaaacauuc

SEQ ID NO: 767964 - RNA, 19 nt, Artificial Sequence
  Description of Artificial Sequence: Synthetic oligonucleotide
  Sense strand starting at position 24 of SEQ ID NO: 587118
uguuguuuaucuuuaggga

SEQ ID NO: 767965 - RNA, 19 nt, Artificial Sequence
  Description of Artificial Sequence: Synthetic oligonucleotide
  Antisense strand to SEQ ID NO: 767964
ucccuaaagauaaacaaca

SEQ ID NO: 767966 - RNA, 19 nt, Artificial Sequence
  Description of Artificial Sequence: Synthetic oligonucleotide
  Sense strand starting at position 25 of SEQ ID NO: 587118
guuguuuaucuuuagggaa

SEQ ID NO: 767967 - RNA, 19 nt, Artificial Sequence
  Description of Artificial Sequence: Synthetic oligonucleotide
  Antisense strand to SEQ ID NO: 767966
uucccuaaagauaaacaac

SEQ ID NO: 767968 - RNA, 19 nt, Artificial Sequence
  Description of Artificial Sequence: Synthetic oligonucleotide
  Sense strand starting at position 118 of SEQ ID NO: 587118
uuacaauaaguuugcguua

SEQ ID NO: 767969 - RNA, 19 nt, Artificial Sequence
  Description of Artificial Sequence: Synthetic oligonucleotide
  Antisense strand to SEQ ID NO: 767968
uaacgcaaacuuauuguaa

SEQ ID NO: 767970 - RNA, 19 nt, Artificial Sequence
  Description of Artificial Sequence: Synthetic oligonucleotide
  Sense strand starting at position 119 of SEQ ID NO: 587118
uacaauaaguuugcguuaa

SEQ ID NO: 767971 - RNA, 19 nt, Artificial Sequence
  Description of Artificial Sequence: Synthetic oligonucleotide
  Antisense strand to SEQ ID NO: 767970
uuaacgcaaacuuauugua

SEQ ID NO: 767972 - RNA, 19 nt, Artificial Sequence
  Description of Artificial Sequence: Synthetic oligonucleotide
  Sense strand starting at position 121 of SEQ ID NO: 587118
caauaaguuugcguuaauu

SEQ ID NO: 767973 - RNA, 19 nt, Artificial Sequence
  Description of Artificial Sequence: Synthetic oligonucleotide
  Antisense strand to SEQ ID NO: 767972
aauuaacgcaaacuuauug

SEQ ID NO: 767974 - RNA, 19 nt, Artificial Sequence
  Description of Artificial Sequence: Synthetic oligonucleotide
  Sense strand starting at position 239 of SEQ ID NO: 587118
gcugaaaguauuggaacca

SEQ ID NO: 767975 - RNA, 19 nt, Artificial Sequence
  Description of Artificial Sequence: Synthetic oligonucleotide
  Antisense strand to SEQ ID NO: 767974
ugguuccaauacuuucagc

SEQ ID NO: 767976 - RNA, 19 nt, Artificial Sequence
  Description of Artificial Sequence: Synthetic oligonucleotide
  Sense strand starting at position 240 of SEQ ID NO: 587118
cugaaaguauuggaaccaa

SEQ ID NO: 767977 - RNA, 19 nt, Artificial Sequence
  Description of Artificial Sequence: Synthetic oligonucleotide
  Antisense strand to SEQ ID NO: 767976
uugguuccaauacuuucag

SEQ ID NO: 767978 - RNA, 19 nt, Artificial Sequence
  Description of Artificial Sequence: Synthetic oligonucleotide
  Sense strand starting at position 262 of SEQ ID NO: 587118
uauaauuugugcucgauac

SEQ ID NO: 767979 - RNA, 19 nt, Artificial Sequence
  Description of Artificial Sequence: Synthetic oligonucleotide
  Antisense strand to SEQ ID NO: 767978
guaucgagcacaaauuaua

SEQ ID NO: 767980 - RNA, 19 nt, Artificial Sequence
  Description of Artificial Sequence: Synthetic oligonucleotide
  Sense strand starting at position 263 of SEQ ID NO: 587118
auaauuugugcucgauaca

SEQ ID NO: 767981 - RNA, 19 nt, Artificial Sequence
  Description of Artificial Sequence: Synthetic oligonucleotide
  Antisense strand to SEQ ID NO: 767980
uguaucgagcacaaauuau

SEQ ID NO: 767982 - RNA, 19 nt, Artificial Sequence
  Description of Artificial Sequence: Synthetic oligonucleotide
  Sense strand starting at position 274 of SEQ ID NO: 587118
ucgauacaccugugcugaa

SEQ ID NO: 767983 - RNA, 19 nt, Artificial Sequence
  Description of Artificial Sequence: Synthetic oligonucleotide
  Antisense strand to SEQ ID NO: 767982
uucagcacagguguaucga

SEQ ID NO: 767984 - RNA, 19 nt, Artificial Sequence
  Description of Artificial Sequence: Synthetic oligonucleotide
  Sense strand starting at position 275 of SEQ ID NO: 587118
cgauacaccugugcugaau

SEQ ID NO: 767985 - RNA, 19 nt, Artificial Sequence
  Description of Artificial Sequence: Synthetic oligonucleotide
  Antisense strand to SEQ ID NO: 767984
auucagcacagguguaucg

SEQ ID NO: 767986 - RNA, 19 nt, Artificial Sequence
  Description of Artificial Sequence: Synthetic oligonucleotide
  Sense strand starting at position 307 of SEQ ID NO: 587118
ggugaugagguuuaaugca

SEQ ID NO: 767987 - RNA, 19 nt, Artificial Sequence
  Description of Artificial Sequence: Synthetic oligonucleotide
  Antisense strand to SEQ ID NO: 767986
ugcauuaaaccucaucacc

SEQ ID NO: 767988 - RNA, 19 nt, Artificial Sequence
  Description of Artificial Sequence: Synthetic oligonucleotide
  Sense strand starting at position 316 of SEQ ID NO: 587118
guuuaaugcagaggacuag

SEQ ID NO: 767989 - RNA, 19 nt, Artificial Sequence
  Description of Artificial Sequence: Synthetic oligonucleotide
  Antisense strand to SEQ ID NO: 767988
cuaguccucugcauuaaac

SEQ ID NO: 767990 - RNA, 19 nt, Artificial Sequence
  Description of Artificial Sequence: Synthetic oligonucleotide
  Sense strand starting at position 368 of SEQ ID NO: 587118
guaagagcagcugagaaau

SEQ ID NO: 767991 - RNA, 19 nt, Artificial Sequence
  Description of Artificial Sequence: Synthetic oligonucleotide
  Antisense strand to SEQ ID NO: 767990
auuucucagcugcucuuac

SEQ ID NO: 767992 - RNA, 19 nt, Artificial Sequence
  Description of Artificial Sequence: Synthetic oligonucleotide
  Sense strand starting at position 538 of SEQ ID NO: 587118
cgcgguuacagccaaugaa

SEQ ID NO: 767993 - RNA, 19 nt, Artificial Sequence
  Description of Artificial Sequence: Synthetic oligonucleotide
  Antisense strand to SEQ ID NO: 767992
uucauuggcuguaaccgcg

SEQ ID NO: 767994 - RNA, 19 nt, Artificial Sequence
  Description of Artificial Sequence: Synthetic oligonucleotide
  Sense strand starting at position 731 of SEQ ID NO: 587118
gccucuuucuacuccggau

SEQ ID NO: 767995 - RNA, 19 nt, Artificial Sequence
  Description of Artificial Sequence: Synthetic oligonucleotide
  Antisense strand to SEQ ID NO: 767994
auccggaguagaaagaggc

SEQ ID NO: 767996 - RNA, 19 nt, Artificial Sequence
  Description of Artificial Sequence: Synthetic oligonucleotide
  Sense strand starting at position 752 of SEQ ID NO: 587118
cagacuguguuucuuugaa

SEQ ID NO: 767997 - RNA, 19 nt, Artificial Sequence
  Description of Artificial Sequence: Synthetic oligonucleotide
  Antisense strand to SEQ ID NO: 767996
uucaaagaaacacagucug

SEQ ID NO: 767998 - RNA, 19 nt, Artificial Sequence
  Description of Artificial Sequence: Synthetic oligonucleotide
  Sense strand starting at position 754 of SEQ ID NO: 587118
gacuguguuucuuugaaac

SEQ ID NO: 767999 - RNA, 19 nt, Artificial Sequence
  Description of Artificial Sequence: Synthetic oligonucleotide
  Antisense strand to SEQ ID NO: 767998
guuucaaagaaacacaguc

SEQ ID NO: 768000 - RNA, 19 nt, Artificial Sequence
  Description of Artificial Sequence: Synthetic oligonucleotide
  Sense strand starting at position 963 of SEQ ID NO: 587118
ccaagaacagguugccaua

SEQ ID NO: 768001 - RNA, 19 nt, Artificial Sequence
  Description of Artificial Sequence: Synthetic oligonucleotide
  Antisense strand to SEQ ID NO: 768000
uauggcaaccuguucuugg

SEQ ID NO: 768002 - RNA, 19 nt, Artificial Sequence
  Description of Artificial Sequence: Synthetic oligonucleotide
  Sense strand starting at position 965 of SEQ ID NO: 587118
aagaacagguugccauaua

SEQ ID NO: 768003 - RNA, 19 nt, Artificial Sequence
  Description of Artificial Sequence: Synthetic oligonucleotide
  Antisense strand to SEQ ID NO: 768002
uauauggcaaccuguucuu

SEQ ID NO: 768004 - RNA, 19 nt, Artificial Sequence
  Description of Artificial Sequence: Synthetic oligonucleotide
  Sense strand starting at position 966 of SEQ ID NO: 587118
agaacagguugccauauaa

SEQ ID NO: 768005 - RNA, 19 nt, Artificial Sequence
  Description of Artificial Sequence: Synthetic oligonucleotide
  Antisense strand to SEQ ID NO: 768004
uuauauggcaaccuguucu

SEQ ID NO: 768006 - RNA, 19 nt, Artificial Sequence
  Description of Artificial Sequence: Synthetic oligonucleotide
  Sense strand starting at position 1030 of SEQ ID NO: 587118
aacgcauaugccugugaag

SEQ ID NO: 768007 - RNA, 19 nt, Artificial Sequence
  Description of Artificial Sequence: Synthetic oligonucleotide
  Antisense strand to SEQ ID NO: 768006
cuucacaggcauaugcguu

SEQ ID NO: 768008 - RNA, 19 nt, Artificial Sequence
  Description of Artificial Sequence: Synthetic oligonucleotide
  Sense strand starting at position 1042 of SEQ ID NO: 587118
ugugaaguuucucugcgga

SEQ ID NO: 768009 - RNA, 19 nt, Artificial Sequence
  Description of Artificial Sequence: Synthetic oligonucleotide
  Antisense strand to SEQ ID NO: 768008
uccgcagagaaacuucaca

SEQ ID NO: 768010 - RNA, 19 nt, Artificial Sequence
  Description of Artificial Sequence: Synthetic oligonucleotide
  Sense strand starting at position 1045 of SEQ ID NO: 587118
gaaguuucucugcggagcu

SEQ ID NO: 768011 - RNA, 19 nt, Artificial Sequence
  Description of Artificial Sequence: Synthetic oligonucleotide
  Antisense strand to SEQ ID NO: 768010
agcuccgcagagaaacuuc

SEQ ID NO: 768012 - RNA, 19 nt, Artificial Sequence
  Description of Artificial Sequence: Synthetic oligonucleotide
  Sense strand starting at position 1064 of SEQ ID NO: 587118
gccagauaacucgaugaca

SEQ ID NO: 768013 - RNA, 19 nt, Artificial Sequence
  Description of Artificial Sequence: Synthetic oligonucleotide
  Antisense strand to SEQ ID NO: 768012
ugucaucgaguuaucuggc

SEQ ID NO: 768014 - RNA, 19 nt, Artificial Sequence
  Description of Artificial Sequence: Synthetic oligonucleotide
  Sense strand starting at position 1069 of SEQ ID NO: 587118
auaacucgaugacaauauu

SEQ ID NO: 768015 - RNA, 19 nt, Artificial Sequence
  Description of Artificial Sequence: Synthetic oligonucleotide
  Antisense strand to SEQ ID NO: 768014
aauauugucaucgaguuau

SEQ ID NO: 768016 - RNA, 19 nt, Artificial Sequence
  Description of Artificial Sequence: Synthetic oligonucleotide
  Sense strand starting at position 1103 of SEQ ID NO: 587118
uuguuaaauguugacucga

SEQ ID NO: 768017 - RNA, 19 nt, Artificial Sequence
  Description of Artificial Sequence: Synthetic oligonucleotide
  Antisense strand to SEQ ID NO: 768016
ucgagucaacauuuaacaa

SEQ ID NO: 768018 - RNA, 19 nt, Artificial Sequence
  Description of Artificial Sequence: Synthetic oligonucleotide
  Sense strand starting at position 1105 of SEQ ID NO: 587118
guuaaauguugacucgaug

SEQ ID NO: 768019 - RNA, 19 nt, Artificial Sequence
  Description of Artificial Sequence: Synthetic oligonucleotide
  Antisense strand to SEQ ID NO: 768018
caucgagucaacauuuaac

SEQ ID NO: 768020 - RNA, 19 nt, Artificial Sequence
  Description of Artificial Sequence: Synthetic oligonucleotide
  Sense strand starting at position 1144 of SEQ ID NO: 587118
cucugaaagcucgcguaac

SEQ ID NO: 768021 - RNA, 19 nt, Artificial Sequence
  Description of Artificial Sequence: Synthetic oligonucleotide
  Antisense strand to SEQ ID NO: 768020
guuacgcgagcuuucagag

SEQ ID NO: 768022 - RNA, 19 nt, Artificial Sequence
  Description of Artificial Sequence: Synthetic oligonucleotide
  Sense strand starting at position 1223 of SEQ ID NO: 587118
aucacuucgucacuuaagu

SEQ ID NO: 768023 - RNA, 19 nt, Artificial Sequence
  Description of Artificial Sequence: Synthetic oligonucleotide
  Antisense strand to SEQ ID NO: 768022
acuuaagugacgaagugau

SEQ ID NO: 768024 - RNA, 19 nt, Artificial Sequence
  Description of Artificial Sequence: Synthetic oligonucleotide
  Sense strand starting at position 2167 of SEQ ID NO: 587118
ccaguucuguuacucauua

SEQ ID NO: 768025 - RNA, 19 nt, Artificial Sequence
  Description of Artificial Sequence: Synthetic oligonucleotide
  Antisense strand to SEQ ID NO: 768024
uaaugaguaacagaacugg

SEQ ID NO: 768026 - RNA, 19 nt, Artificial Sequence
  Description of Artificial Sequence: Synthetic oligonucleotide
  Sense strand starting at position 2755 of SEQ ID NO: 587118
cucuguuacuugcuuccua

SEQ ID NO: 768027 - RNA, 19 nt, Artificial Sequence
  Description of Artificial Sequence: Synthetic oligonucleotide
  Antisense strand to SEQ ID NO: 768026
uaggaagcaaguaacagag

SEQ ID NO: 768028 - RNA, 19 nt, Artificial Sequence
  Description of Artificial Sequence: Synthetic oligonucleotide
  Sense strand starting at position 2778 of SEQ ID NO: 587118
gaacuccaguuccugagaa

SEQ ID NO: 768029 - RNA, 19 nt, Artificial Sequence
  Description of Artificial Sequence: Synthetic oligonucleotide
  Antisense strand to SEQ ID NO: 768028
uucucaggaacuggaguuc

SEQ ID NO: 768030 - RNA, 19 nt, Artificial Sequence
  Description of Artificial Sequence: Synthetic oligonucleotide
  Sense strand starting at position 3544 of SEQ ID NO: 587118
gggcacacacuauguaaau

SEQ ID NO: 768031 - RNA, 19 nt, Artificial Sequence
  Description of Artificial Sequence: Synthetic oligonucleotide
  Antisense strand to SEQ ID NO: 768030
auuuacauagugugugccc

SEQ ID NO: 768032 - RNA, 19 nt, Artificial Sequence
  Description of Artificial Sequence: Synthetic oligonucleotide
  Sense strand starting at position 3706 of SEQ ID NO: 587118
ugguuaggaaguugcuauu

SEQ ID NO: 768033 - RNA, 19 nt, Artificial Sequence
  Description of Artificial Sequence: Synthetic oligonucleotide
  Antisense strand to SEQ ID NO: 768032
aauagcaacuuccuaacca

SEQ ID NO: 768034 - RNA, 19 nt, Artificial Sequence
  Description of Artificial Sequence: Synthetic oligonucleotide
  Sense strand starting at position 3799 of SEQ ID NO: 587118
gagaauguucuuggaucuu

SEQ ID NO: 768035 - RNA, 19 nt, Artificial Sequence
  Description of Artificial Sequence: Synthetic oligonucleotide
  Antisense strand to SEQ ID NO: 768034
aagauccaagaacauucuc

SEQ ID NO: 768036 - RNA, 19 nt, Artificial Sequence
  Description of Artificial Sequence: Synthetic oligonucleotide
  Sense strand starting at position 3867 of SEQ ID NO: 587118
gaagcaagcuuauugagaa

SEQ ID NO: 768037 - RNA, 19 nt, Artificial Sequence
  Description of Artificial Sequence: Synthetic oligonucleotide
  Antisense strand to SEQ ID NO: 768036
uucucaauaagcuugcuuc

SEQ ID NO: 768038 - RNA, 19 nt, Artificial Sequence
  Description of Artificial Sequence: Synthetic oligonucleotide
  Sense strand starting at position 11 of SEQ ID NO: 587119
cucaaaucagauugguaag

SEQ ID NO: 768039 - RNA, 19 nt, Artificial Sequence
  Description of Artificial Sequence: Synthetic oligonucleotide
  Antisense strand to SEQ ID NO: 768038
cuuaccaaucugauuugag

SEQ ID NO: 768040 - RNA, 19 nt, Artificial Sequence
  Description of Artificial Sequence: Synthetic oligonucleotide
  Sense strand starting at position 13 of SEQ ID NO: 587119
caaaucagauugguaaguu

SEQ ID NO: 768041 - RNA, 19 nt, Artificial Sequence
  Description of Artificial Sequence: Synthetic oligonucleotide
  Antisense strand to SEQ ID NO: 768040
aacuuaccaaucugauuug

SEQ ID NO: 768042 - RNA, 19 nt, Artificial Sequence
  Description of Artificial Sequence: Synthetic oligonucleotide
  Sense strand starting at position 17 of SEQ ID NO: 587119
ucagauugguaaguuacuu

SEQ ID NO: 768043 - RNA, 19 nt, Artificial Sequence
  Description of Artificial Sequence: Synthetic oligonucleotide
  Antisense strand to SEQ ID NO: 768042
aaguaacuuaccaaucuga

SEQ ID NO: 768044 - RNA, 19 nt, Artificial Sequence
  Description of Artificial Sequence: Synthetic oligonucleotide
  Sense strand starting at position 22 of SEQ ID NO: 587119
uugguaaguuacuugcaua

SEQ ID NO: 768045 - RNA, 19 nt, Artificial Sequence
  Description of Artificial Sequence: Synthetic oligonucleotide
  Antisense strand to SEQ ID NO: 768044
uaugcaaguaacuuaccaa

SEQ ID NO: 768046 - RNA, 19 nt, Artificial Sequence
  Description of Artificial Sequence: Synthetic oligonucleotide
  Sense strand starting at position 125 of SEQ ID NO: 587119
gaagaagaauguuuguugu

SEQ ID NO: 768047 - RNA, 19 nt, Artificial Sequence
  Description of Artificial Sequence: Synthetic oligonucleotide
  Antisense strand to SEQ ID NO: 768046
acaacaaacauucuucuuc

SEQ ID NO: 768048 - RNA, 19 nt, Artificial Sequence
  Description of Artificial Sequence: Synthetic oligonucleotide
  Sense strand starting at position 128 of SEQ ID NO: 587119
gaagaauguuuguuguuua

SEQ ID NO: 768049 - RNA, 19 nt, Artificial Sequence
  Description of Artificial Sequence: Synthetic oligonucleotide
  Antisense strand to SEQ ID NO: 768048
uaaacaacaaacauucuuc

SEQ ID NO: 768050 - RNA, 19 nt, Artificial Sequence
  Description of Artificial Sequence: Synthetic oligonucleotide
  Sense strand starting at position 131 of SEQ ID NO: 587119
gaauguuuguuguuuaucu

SEQ ID NO: 768051 - RNA, 19 nt, Artificial Sequence
  Description of Artificial Sequence: Synthetic oligonucleotide
  Antisense strand to SEQ ID NO: 768050
agauaaacaacaaacauuc

SEQ ID NO: 768052 - RNA, 19 nt, Artificial Sequence
  Description of Artificial Sequence: Synthetic oligonucleotide
  Sense strand starting at position 138 of SEQ ID NO: 587119
uguuguuuaucuuuaggga

SEQ ID NO: 768053 - RNA, 19 nt, Artificial Sequence
  Description of Artificial Sequence: Synthetic oligonucleotide
  Antisense strand to SEQ ID NO: 768052
ucccuaaagauaaacaaca

SEQ ID NO: 768054 - RNA, 19 nt, Artificial Sequence
  Description of Artificial Sequence: Synthetic oligonucleotide
  Sense strand starting at position 139 of SEQ ID NO: 587119
guuguuuaucuuuagggaa

SEQ ID NO: 768055 - RNA, 19 nt, Artificial Sequence
  Description of Artificial Sequence: Synthetic oligonucleotide
  Antisense strand to SEQ ID NO: 768054
uucccuaaagauaaacaac

SEQ ID NO: 768056 - RNA, 19 nt, Artificial Sequence
  Description of Artificial Sequence: Synthetic oligonucleotide
  Sense strand starting at position 232 of SEQ ID NO: 587119
uuacaauaaguuugcguua

SEQ ID NO: 768057 - RNA, 19 nt, Artificial Sequence
  Description of Artificial Sequence: Synthetic oligonucleotide
  Antisense strand to SEQ ID NO: 768056
uaacgcaaacuuauuguaa

SEQ ID NO: 768058 - RNA, 19 nt, Artificial Sequence
  Description of Artificial Sequence: Synthetic oligonucleotide
  Sense strand starting at position 233 of SEQ ID NO: 587119
uacaauaaguuugcguuaa

SEQ ID NO: 768059 - RNA, 19 nt, Artificial Sequence
  Description of Artificial Sequence: Synthetic oligonucleotide
  Antisense strand to SEQ ID NO: 768058
uuaacgcaaacuuauugua

SEQ ID NO: 768060 - RNA, 19 nt, Artificial Sequence
  Description of Artificial Sequence: Synthetic oligonucleotide
  Sense strand starting at position 235 of SEQ ID NO: 587119
caauaaguuugcguuaauu

SEQ ID NO: 768061 - RNA, 19 nt, Artificial Sequence
  Description of Artificial Sequence: Synthetic oligonucleotide
  Antisense strand to SEQ ID NO: 768060
aauuaacgcaaacuuauug

SEQ ID NO: 768062 - RNA, 19 nt, Artificial Sequence
  Description of Artificial Sequence: Synthetic oligonucleotide
  Sense strand starting at position 353 of SEQ ID NO: 587119
gcugaaaguauuggaacca

SEQ ID NO: 768063 - RNA, 19 nt, Artificial Sequence
  Description of Artificial Sequence: Synthetic oligonucleotide
  Antisense strand to SEQ ID NO: 768062
ugguuccaauacuuucagc

SEQ ID NO: 768064 - RNA, 19 nt, Artificial Sequence
  Description of Artificial Sequence: Synthetic oligonucleotide
  Sense strand starting at position 354 of SEQ ID NO: 587119
cugaaaguauuggaaccaa

SEQ ID NO: 768065 - RNA, 19 nt, Artificial Sequence
  Description of Artificial Sequence: Synthetic oligonucleotide
  Antisense strand to SEQ ID NO: 768064
uugguuccaauacuuucag

SEQ ID NO: 768066 - RNA, 19 nt, Artificial Sequence
  Description of Artificial Sequence: Synthetic oligonucleotide
  Sense strand starting at position 376 of SEQ ID NO: 587119
uauaauuugugcucgauac

SEQ ID NO: 768067 - RNA, 19 nt, Artificial Sequence
  Description of Artificial Sequence: Synthetic oligonucleotide
  Antisense strand to SEQ ID NO: 768066
guaucgagcacaaauuaua

SEQ ID NO: 768068 - RNA, 19 nt, Artificial Sequence
  Description of Artificial Sequence: Synthetic oligonucleotide
  Sense strand starting at position 377 of SEQ ID NO: 587119
auaauuugugcucgauaca

SEQ ID NO: 768069 - RNA, 19 nt, Artificial Sequence
  Description of Artificial Sequence: Synthetic oligonucleotide
  Antisense strand to SEQ ID NO: 768068
uguaucgagcacaaauuau

SEQ ID NO: 768070 - RNA, 19 nt, Artificial Sequence
  Description of Artificial Sequence: Synthetic oligonucleotide
  Sense strand starting at position 388 of SEQ ID NO: 587119
ucgauacaccugugcugaa

SEQ ID NO: 768071 - RNA, 19 nt, Artificial Sequence
  Description of Artificial Sequence: Synthetic oligonucleotide
  Antisense strand to SEQ ID NO: 768070
uucagcacagguguaucga

SEQ ID NO: 768072 - RNA, 19 nt, Artificial Sequence
  Description of Artificial Sequence: Synthetic oligonucleotide
  Sense strand starting at position 389 of SEQ ID NO: 587119
cgauacaccugugcugaau

SEQ ID NO: 768073 - RNA, 19 nt, Artificial Sequence
  Description of Artificial Sequence: Synthetic oligonucleotide
  Antisense strand to SEQ ID NO: 768072
auucagcacagguguaucg

SEQ ID NO: 768074 - RNA, 19 nt, Artificial Sequence
  Description of Artificial Sequence: Synthetic oligonucleotide
  Sense strand starting at position 421 of SEQ ID NO: 587119
ggugaugagguuuaaugca

SEQ ID NO: 768075 - RNA, 19 nt, Artificial Sequence
  Description of Artificial Sequence: Synthetic oligonucleotide
  Antisense strand to SEQ ID NO: 768074
ugcauuaaaccucaucacc

SEQ ID NO: 768076 - RNA, 19 nt, Artificial Sequence
  Description of Artificial Sequence: Synthetic oligonucleotide
  Sense strand starting at position 430 of SEQ ID NO: 587119
guuuaaugcagaggacuag

SEQ ID NO: 768077 - RNA, 19 nt, Artificial Sequence
  Description of Artificial Sequence: Synthetic oligonucleotide
  Antisense strand to SEQ ID NO: 768076
cuaguccucugcauuaaac

SEQ ID NO: 768078 - RNA, 19 nt, Artificial Sequence
  Description of Artificial Sequence: Synthetic oligonucleotide
  Sense strand starting at position 482 of SEQ ID NO: 587119
guaagagcagcugagaaau

SEQ ID NO: 768079 - RNA, 19 nt, Artificial Sequence
  Description of Artificial Sequence: Synthetic oligonucleotide
  Antisense strand to SEQ ID NO: 768078
auuucucagcugcucuuac

SEQ ID NO: 768080 - RNA, 19 nt, Artificial Sequence
  Description of Artificial Sequence: Synthetic oligonucleotide
  Sense strand starting at position 652 of SEQ ID NO: 587119
cgcgguuacagccaaugaa

SEQ ID NO: 768081 - RNA, 19 nt, Artificial Sequence
  Description of Artificial Sequence: Synthetic oligonucleotide
  Antisense strand to SEQ ID NO: 768080
uucauuggcuguaaccgcg

SEQ ID NO: 768082 - RNA, 19 nt, Artificial Sequence
  Description of Artificial Sequence: Synthetic oligonucleotide
  Sense strand starting at position 845 of SEQ ID NO: 587119
gccucuuucuacuccggau

SEQ ID NO: 768083 - RNA, 19 nt, Artificial Sequence
  Description of Artificial Sequence: Synthetic oligonucleotide
  Antisense strand to SEQ ID NO: 768082
auccggaguagaaagaggc

SEQ ID NO: 768084 - RNA, 19 nt, Artificial Sequence
  Description of Artificial Sequence: Synthetic oligonucleotide
  Sense strand starting at position 866 of SEQ ID NO: 587119
cagacuguguuucuuugaa

SEQ ID NO: 768085 - RNA, 19 nt, Artificial Sequence
  Description of Artificial Sequence: Synthetic oligonucleotide
  Antisense strand to SEQ ID NO: 768084
uucaaagaaacacagucug

SEQ ID NO: 768086 - RNA, 19 nt, Artificial Sequence
  Description of Artificial Sequence: Synthetic oligonucleotide
  Sense strand starting at position 868 of SEQ ID NO: 587119
gacuguguuucuuugaaac

SEQ ID NO: 768087 - RNA, 19 nt, Artificial Sequence
  Description of Artificial Sequence: Synthetic oligonucleotide
  Antisense strand to SEQ ID NO: 768086
guuucaaagaaacacaguc

SEQ ID NO: 768088 - RNA, 19 nt, Artificial Sequence
  Description of Artificial Sequence: Synthetic oligonucleotide
  Sense strand starting at position 1077 of SEQ ID NO: 587119
ccaagaacagguugccaua

SEQ ID NO: 768089 - RNA, 19 nt, Artificial Sequence
  Description of Artificial Sequence: Synthetic oligonucleotide
  Antisense strand to SEQ ID NO: 768088
uauggcaaccuguucuugg

SEQ ID NO: 768090 - RNA, 19 nt, Artificial Sequence
  Description of Artificial Sequence: Synthetic oligonucleotide
  Sense strand starting at position 1079 of SEQ ID NO: 587119
aagaacagguugccauaua

SEQ ID NO: 768091 - RNA, 19 nt, Artificial Sequence
  Description of Artificial Sequence: Synthetic oligonucleotide
  Antisense strand to SEQ ID NO: 768090
uauauggcaaccuguucuu

SEQ ID NO: 768092 - RNA, 19 nt, Artificial Sequence
  Description of Artificial Sequence: Synthetic oligonucleotide
  Sense strand starting at position 1144 of SEQ ID NO: 587119
aacgcauaugccugugaag

SEQ ID NO: 768093 - RNA, 19 nt, Artificial Sequence
  Description of Artificial Sequence: Synthetic oligonucleotide
  Antisense strand to SEQ ID NO: 768092
cuucacaggcauaugcguu

SEQ ID NO: 768094 - RNA, 19 nt, Artificial Sequence
  Description of Artificial Sequence: Synthetic oligonucleotide
  Sense strand starting at position 1178 of SEQ ID NO: 587119
gccagauaacucgaugaca

SEQ ID NO: 768095 - RNA, 19 nt, Artificial Sequence
  Description of Artificial Sequence: Synthetic oligonucleotide
  Antisense strand to SEQ ID NO: 768094
ugucaucgaguuaucuggc

SEQ ID NO: 768096 - RNA, 19 nt, Artificial Sequence
  Description of Artificial Sequence: Synthetic oligonucleotide
  Sense strand starting at position 1217 of SEQ ID NO: 587119
uuguuaaauguugacucga

SEQ ID NO: 768097 - RNA, 19 nt, Artificial Sequence
  Description of Artificial Sequence: Synthetic oligonucleotide
  Antisense strand to SEQ ID NO: 768096
ucgagucaacauuuaacaa

SEQ ID NO: 768098 - RNA, 19 nt, Artificial Sequence
  Description of Artificial Sequence: Synthetic oligonucleotide
  Sense strand starting at position 1219 of SEQ ID NO: 587119
guuaaauguugacucgaug

SEQ ID NO: 768099 - RNA, 19 nt, Artificial Sequence
  Description of Artificial Sequence: Synthetic oligonucleotide
  Antisense strand to SEQ ID NO: 768098
caucgagucaacauuuaac

SEQ ID NO: 768100 - RNA, 19 nt, Artificial Sequence
  Description of Artificial Sequence: Synthetic oligonucleotide
  Sense strand starting at position 1258 of SEQ ID NO: 587119
cucugaaagcucgcguaac

SEQ ID NO: 768101 - RNA, 19 nt, Artificial Sequence
  Description of Artificial Sequence: Synthetic oligonucleotide
  Antisense strand to SEQ ID NO: 768100
guuacgcgagcuuucagag

SEQ ID NO: 768102 - RNA, 19 nt, Artificial Sequence
  Description of Artificial Sequence: Synthetic oligonucleotide
  Sense strand starting at position 1337 of SEQ ID NO: 587119
aucacuucgucacuuaagu

SEQ ID NO: 768103 - RNA, 19 nt, Artificial Sequence
  Description of Artificial Sequence: Synthetic oligonucleotide
  Antisense strand to SEQ ID NO: 768102
acuuaagugacgaagugau

SEQ ID NO: 768104 - RNA, 19 nt, Artificial Sequence
  Description of Artificial Sequence: Synthetic oligonucleotide
  Sense strand starting at position 2281 of SEQ ID NO: 587119
ccaguucuguuacucauua

SEQ ID NO: 768105 - RNA, 19 nt, Artificial Sequence
  Description of Artificial Sequence: Synthetic oligonucleotide
  Antisense strand to SEQ ID NO: 768104
uaaugaguaacagaacugg

SEQ ID NO: 768106 - RNA, 19 nt, Artificial Sequence
  Description of Artificial Sequence: Synthetic oligonucleotide
  Sense strand starting at position 2869 of SEQ ID NO: 587119
cucuguuacuugcuuccua

SEQ ID NO: 768107 - RNA, 19 nt, Artificial Sequence
  Description of Artificial Sequence: Synthetic oligonucleotide
  Antisense strand to SEQ ID NO: 768106
uaggaagcaaguaacagag

SEQ ID NO: 768108 - RNA, 19 nt, Artificial Sequence
  Description of Artificial Sequence: Synthetic oligonucleotide
  Sense strand starting at position 2892 of SEQ ID NO: 587119
gaacuccaguuccugagaa

SEQ ID NO: 768109 - RNA, 19 nt, Artificial Sequence
  Description of Artificial Sequence: Synthetic oligonucleotide
  Antisense strand to SEQ ID NO: 768108
uucucaggaacuggaguuc

SEQ ID NO: 768110 - RNA, 19 nt, Artificial Sequence
  Description of Artificial Sequence: Synthetic oligonucleotide
  Sense strand starting at position 3658 of SEQ ID NO: 587119
gggcacacacuauguaaau

SEQ ID NO: 768111 - RNA, 19 nt, Artificial Sequence
  Description of Artificial Sequence: Synthetic oligonucleotide
  Antisense strand to SEQ ID NO: 768110
auuuacauagugugugccc

SEQ ID NO: 768112 - RNA, 19 nt, Artificial Sequence
  Description of Artificial Sequence: Synthetic oligonucleotide
  Sense strand starting at position 3820 of SEQ ID NO: 587119
ugguuaggaaguugcuauu

SEQ ID NO: 768113 - RNA, 19 nt, Artificial Sequence
  Description of Artificial Sequence: Synthetic oligonucleotide
  Antisense strand to SEQ ID NO: 768112
aauagcaacuuccuaacca

SEQ ID NO: 768114 - RNA, 19 nt, Artificial Sequence
  Description of Artificial Sequence: Synthetic oligonucleotide
  Sense strand starting at position 3913 of SEQ ID NO: 587119
gagaauguucuuggaucuu

SEQ ID NO: 768115 - RNA, 19 nt, Artificial Sequence
  Description of Artificial Sequence: Synthetic oligonucleotide
  Antisense strand to SEQ ID NO: 768114
aagauccaagaacauucuc

SEQ ID NO: 768116 - RNA, 19 nt, Artificial Sequence
  Description of Artificial Sequence: Synthetic oligonucleotide
  Sense strand starting at position 3981 of SEQ ID NO: 587119
gaagcaagcuuauugagaa

SEQ ID NO: 768117 - RNA, 19 nt, Artificial Sequence
  Description of Artificial Sequence: Synthetic oligonucleotide
  Antisense strand to SEQ ID NO: 768116
uucucaauaagcuugcuuc

SEQ ID NO: 768118 - RNA, 19 nt, Artificial Sequence
  Description of Artificial Sequence: Synthetic oligonucleotide
  Sense strand starting at position 83 of SEQ ID NO: 587120
gaagaagaauguuuguugu

SEQ ID NO: 768119 - RNA, 19 nt, Artificial Sequence
  Description of Artificial Sequence: Synthetic oligonucleotide
  Antisense strand to SEQ ID NO: 768118
acaacaaacauucuucuuc

SEQ ID NO: 768120 - RNA, 19 nt, Artificial Sequence
  Description of Artificial Sequence: Synthetic oligonucleotide
  Sense strand starting at position 86 of SEQ ID NO: 587120
gaagaauguuuguuguuua

SEQ ID NO: 768121 - RNA, 19 nt, Artificial Sequence
  Description of Artificial Sequence: Synthetic oligonucleotide
  Antisense strand to SEQ ID NO: 768120
uaaacaacaaacauucuuc

SEQ ID NO: 768122 - RNA, 19 nt, Artificial Sequence
  Description of Artificial Sequence: Synthetic oligonucleotide
  Sense strand starting at position 89 of SEQ ID NO: 587120
gaauguuuguuguuuaucu

SEQ ID NO: 768123 - RNA, 19 nt, Artificial Sequence
  Description of Artificial Sequence: Synthetic oligonucleotide
  Antisense strand to SEQ ID NO: 768122
agauaaacaacaaacauuc

SEQ ID NO: 768124 - RNA, 19 nt, Artificial Sequence
  Description of Artificial Sequence: Synthetic oligonucleotide
  Sense strand starting at position 96 of SEQ ID NO: 587120
uguuguuuaucuuuaggga

SEQ ID NO: 768125 - RNA, 19 nt, Artificial Sequence
  Description of Artificial Sequence: Synthetic oligonucleotide
  Antisense strand to SEQ ID NO: 768124
ucccuaaagauaaacaaca

SEQ ID NO: 768126 - RNA, 19 nt, Artificial Sequence
  Description of Artificial Sequence: Synthetic oligonucleotide
  Sense strand starting at position 97 of SEQ ID NO: 587120
guuguuuaucuuuagggaa

SEQ ID NO: 768127 - RNA, 19 nt, Artificial Sequence
  Description of Artificial Sequence: Synthetic oligonucleotide
  Antisense strand to SEQ ID NO: 768126
uucccuaaagauaaacaac

SEQ ID NO: 768128 - RNA, 19 nt, Artificial Sequence
  Description of Artificial Sequence: Synthetic oligonucleotide
  Sense strand starting at position 190 of SEQ ID NO: 587120
uuacaauaaguuugcguua

SEQ ID NO: 768129 - RNA, 19 nt, Artificial Sequence
  Description of Artificial Sequence: Synthetic oligonucleotide
  Antisense strand to SEQ ID NO: 768128
uaacgcaaacuuauuguaa

SEQ ID NO: 768130 - RNA, 19 nt, Artificial Sequence
  Description of Artificial Sequence: Synthetic oligonucleotide
  Sense strand starting at position 191 of SEQ ID NO: 587120
uacaauaaguuugcguuaa

SEQ ID NO: 768131 - RNA, 19 nt, Artificial Sequence
  Description of Artificial Sequence: Synthetic oligonucleotide
  Antisense strand to SEQ ID NO: 768130
uuaacgcaaacuuauugua

SEQ ID NO: 768132 - RNA, 19 nt, Artificial Sequence
  Description of Artificial Sequence: Synthetic oligonucleotide
  Sense strand starting at position 193 of SEQ ID NO: 587120
caauaaguuugcguuaauu

SEQ ID NO: 768133 - RNA, 19 nt, Artificial Sequence
  Description of Artificial Sequence: Synthetic oligonucleotide
  Antisense strand to SEQ ID NO: 768132
aauuaacgcaaacuuauug

SEQ ID NO: 768134 - RNA, 19 nt, Artificial Sequence
  Description of Artificial Sequence: Synthetic oligonucleotide
  Sense strand starting at position 311 of SEQ ID NO: 587120
gcugaaaguauuggaacca

SEQ ID NO: 768135 - RNA, 19 nt, Artificial Sequence
  Description of Artificial Sequence: Synthetic oligonucleotide
  Antisense strand to SEQ ID NO: 768134
ugguuccaauacuuucagc

SEQ ID NO: 768136 - RNA, 19 nt, Artificial Sequence
  Description of Artificial Sequence: Synthetic oligonucleotide
  Sense strand starting at position 312 of SEQ ID NO: 587120
cugaaaguauuggaaccaa

SEQ ID NO: 768137 - RNA, 19 nt, Artificial Sequence
  Description of Artificial Sequence: Synthetic oligonucleotide
  Antisense strand to SEQ ID NO: 768136
uugguuccaauacuuucag

SEQ ID NO: 768138 - RNA, 19 nt, Artificial Sequence
  Description of Artificial Sequence: Synthetic oligonucleotide
  Sense strand starting at position 334 of SEQ ID NO: 587120
uauaauuugugcucgauac

SEQ ID NO: 768139 - RNA, 19 nt, Artificial Sequence
  Description of Artificial Sequence: Synthetic oligonucleotide
  Antisense strand to SEQ ID NO: 768138
guaucgagcacaaauuaua

SEQ ID NO: 768140 - RNA, 19 nt, Artificial Sequence
  Description of Artificial Sequence: Synthetic oligonucleotide
  Sense strand starting at position 335 of SEQ ID NO: 587120
auaauuugugcucgauaca

SEQ ID NO: 768141 - RNA, 19 nt, Artificial Sequence
  Description of Artificial Sequence: Synthetic oligonucleotide
  Antisense strand to SEQ ID NO: 768140
uguaucgagcacaaauuau

SEQ ID NO: 768142 - RNA, 19 nt, Artificial Sequence
  Description of Artificial Sequence: Synthetic oligonucleotide
  Sense strand starting at position 346 of SEQ ID NO: 587120
ucgauacaccugugcugaa

SEQ ID NO: 768143 - RNA, 19 nt, Artificial Sequence
  Description of Artificial Sequence: Synthetic oligonucleotide
  Antisense strand to SEQ ID NO: 768142
uucagcacagguguaucga

SEQ ID NO: 768144 - RNA, 19 nt, Artificial Sequence
  Description of Artificial Sequence: Synthetic oligonucleotide
  Sense strand starting at position 347 of SEQ ID NO: 587120
cgauacaccugugcugaau

SEQ ID NO: 768145 - RNA, 19 nt, Artificial Sequence
  Description of Artificial Sequence: Synthetic oligonucleotide
  Antisense strand to SEQ ID NO: 768144
auucagcacagguguaucg

SEQ ID NO: 768146 - RNA, 19 nt, Artificial Sequence
  Description of Artificial Sequence: Synthetic oligonucleotide
  Sense strand starting at position 379 of SEQ ID NO: 587120
ggugaugagguuuaaugca

SEQ ID NO: 768147 - RNA, 19 nt, Artificial Sequence
  Description of Artificial Sequence: Synthetic oligonucleotide
  Antisense strand to SEQ ID NO: 768146
ugcauuaaaccucaucacc

SEQ ID NO: 768148 - RNA, 19 nt, Artificial Sequence
  Description of Artificial Sequence: Synthetic oligonucleotide
  Sense strand starting at position 388 of SEQ ID NO: 587120
guuuaaugcagaggacuag

SEQ ID NO: 768149 - RNA, 19 nt, Artificial Sequence
  Description of Artificial Sequence: Synthetic oligonucleotide
  Antisense strand to SEQ ID NO: 768148
cuaguccucugcauuaaac

SEQ ID NO: 768150 - RNA, 19 nt, Artificial Sequence
  Description of Artificial Sequence: Synthetic oligonucleotide
  Sense strand starting at position 440 of SEQ ID NO: 587120
guaagagcagcugagaaau

SEQ ID NO: 768151 - RNA, 19 nt, Artificial Sequence
  Description of Artificial Sequence: Synthetic oligonucleotide
  Antisense strand to SEQ ID NO: 768150
auuucucagcugcucuuac

SEQ ID NO: 768152 - RNA, 19 nt, Artificial Sequence
  Description of Artificial Sequence: Synthetic oligonucleotide
  Sense strand starting at position 610 of SEQ ID NO: 587120
cgcgguuacagccaaugaa

SEQ ID NO: 768153 - RNA, 19 nt, Artificial Sequence
  Description of Artificial Sequence: Synthetic oligonucleotide
  Antisense strand to SEQ ID NO: 768152
uucauuggcuguaaccgcg

SEQ ID NO: 768154 - RNA, 19 nt, Artificial Sequence
  Description of Artificial Sequence: Synthetic oligonucleotide
  Sense strand starting at position 803 of SEQ ID NO: 587120
gccucuuucuacuccggau

SEQ ID NO: 768155 - RNA, 19 nt, Artificial Sequence
  Description of Artificial Sequence: Synthetic oligonucleotide
  Antisense strand to SEQ ID NO: 768154
auccggaguagaaagaggc

SEQ ID NO: 768156 - RNA, 19 nt, Artificial Sequence
  Description of Artificial Sequence: Synthetic oligonucleotide
  Sense strand starting at position 824 of SEQ ID NO: 587120
cagacuguguuucuuugaa

SEQ ID NO: 768157 - RNA, 19 nt, Artificial Sequence
  Description of Artificial Sequence: Synthetic oligonucleotide
  Antisense strand to SEQ ID NO: 768156
uucaaagaaacacagucug

SEQ ID NO: 768158 - RNA, 19 nt, Artificial Sequence
  Description of Artificial Sequence: Synthetic oligonucleotide
  Sense strand starting at position 826 of SEQ ID NO: 587120
gacuguguuucuuugaaac

SEQ ID NO: 768159 - RNA, 19 nt, Artificial Sequence
  Description of Artificial Sequence: Synthetic oligonucleotide
  Antisense strand to SEQ ID NO: 768158
guuucaaagaaacacaguc

SEQ ID NO: 768160 - RNA, 19 nt, Artificial Sequence
  Description of Artificial Sequence: Synthetic oligonucleotide
  Sense strand starting at position 1035 of SEQ ID NO: 587120
ccaagaacagguugccaua

SEQ ID NO: 768161 - RNA, 19 nt, Artificial Sequence
  Description of Artificial Sequence: Synthetic oligonucleotide
  Antisense strand to SEQ ID NO: 768160
uauggcaaccuguucuugg

SEQ ID NO: 768162 - RNA, 19 nt, Artificial Sequence
  Description of Artificial Sequence: Synthetic oligonucleotide
  Sense strand starting at position 1037 of SEQ ID NO: 587120
aagaacagguugccauaua

SEQ ID NO: 768163 - RNA, 19 nt, Artificial Sequence
  Description of Artificial Sequence: Synthetic oligonucleotide
  Antisense strand to SEQ ID NO: 768162
uauauggcaaccuguucuu

SEQ ID NO: 768164 - RNA, 19 nt, Artificial Sequence
  Description of Artificial Sequence: Synthetic oligonucleotide
  Sense strand starting at position 1038 of SEQ ID NO: 587120
agaacagguugccauauaa

SEQ ID NO: 768165 - RNA, 19 nt, Artificial Sequence
  Description of Artificial Sequence: Synthetic oligonucleotide
  Antisense strand to SEQ ID NO: 768164
uuauauggcaaccuguucu

SEQ ID NO: 768166 - RNA, 19 nt, Artificial Sequence
  Description of Artificial Sequence: Synthetic oligonucleotide
  Sense strand starting at position 1102 of SEQ ID NO: 587120
aacgcauaugccugugaag

SEQ ID NO: 768167 - RNA, 19 nt, Artificial Sequence
  Description of Artificial Sequence: Synthetic oligonucleotide
  Antisense strand to SEQ ID NO: 768166
cuucacaggcauaugcguu

SEQ ID NO: 768168 - RNA, 19 nt, Artificial Sequence
  Description of Artificial Sequence: Synthetic oligonucleotide
  Sense strand starting at position 1114 of SEQ ID NO: 587120
ugugaaguuucucugcgga

SEQ ID NO: 768169 - RNA, 19 nt, Artificial Sequence
  Description of Artificial Sequence: Synthetic oligonucleotide
  Antisense strand to SEQ ID NO: 768168
uccgcagagaaacuucaca

SEQ ID NO: 768170 - RNA, 19 nt, Artificial Sequence
  Description of Artificial Sequence: Synthetic oligonucleotide
  Sense strand starting at position 1117 of SEQ ID NO: 587120
gaaguuucucugcggagcu

SEQ ID NO: 768171 - RNA, 19 nt, Artificial Sequence
  Description of Artificial Sequence: Synthetic oligonucleotide
  Antisense strand to SEQ ID NO: 768170
agcuccgcagagaaacuuc

SEQ ID NO: 768172 - RNA, 19 nt, Artificial Sequence
  Description of Artificial Sequence: Synthetic oligonucleotide
  Sense strand starting at position 1136 of SEQ ID NO: 587120
gccagauaacucgaugaca

SEQ ID NO: 768173 - RNA, 19 nt, Artificial Sequence
  Description of Artificial Sequence: Synthetic oligonucleotide
  Antisense strand to SEQ ID NO: 768172
ugucaucgaguuaucuggc

SEQ ID NO: 768174 - RNA, 19 nt, Artificial Sequence
  Description of Artificial Sequence: Synthetic oligonucleotide
  Sense strand starting at position 1141 of SEQ ID NO: 587120
auaacucgaugacaauauu

SEQ ID NO: 768175 - RNA, 19 nt, Artificial Sequence
  Description of Artificial Sequence: Synthetic oligonucleotide
  Antisense strand to SEQ ID NO: 768174
aauauugucaucgaguuau

SEQ ID NO: 768176 - RNA, 19 nt, Artificial Sequence
  Description of Artificial Sequence: Synthetic oligonucleotide
  Sense strand starting at position 1175 of SEQ ID NO: 587120
uuguuaaauguugacucga

SEQ ID NO: 768177 - RNA, 19 nt, Artificial Sequence
  Description of Artificial Sequence: Synthetic oligonucleotide
  Antisense strand to SEQ ID NO: 768176
ucgagucaacauuuaacaa

SEQ ID NO: 768178 - RNA, 19 nt, Artificial Sequence
  Description of Artificial Sequence: Synthetic oligonucleotide
  Sense strand starting at position 1177 of SEQ ID NO: 587120
guuaaauguugacucgaug

SEQ ID NO: 768179 - RNA, 19 nt, Artificial Sequence
  Description of Artificial Sequence: Synthetic oligonucleotide
  Antisense strand to SEQ ID NO: 768178
caucgagucaacauuuaac

SEQ ID NO: 768180 - RNA, 19 nt, Artificial Sequence
  Description of Artificial Sequence: Synthetic oligonucleotide
  Sense strand starting at position 1216 of SEQ ID NO: 587120
cucugaaagcucgcguaac

SEQ ID NO: 768181 - RNA, 19 nt, Artificial Sequence
  Description of Artificial Sequence: Synthetic oligonucleotide
  Antisense strand to SEQ ID NO: 768180
guuacgcgagcuuucagag

SEQ ID NO: 768182 - RNA, 19 nt, Artificial Sequence
  Description of Artificial Sequence: Synthetic oligonucleotide
  Sense strand starting at position 1295 of SEQ ID NO: 587120
aucacuucgucacuuaagu

SEQ ID NO: 768183 - RNA, 19 nt, Artificial Sequence
  Description of Artificial Sequence: Synthetic oligonucleotide
  Antisense strand to SEQ ID NO: 768182
acuuaagugacgaagugau

SEQ ID NO: 768184 - RNA, 19 nt, Artificial Sequence
  Description of Artificial Sequence: Synthetic oligonucleotide
  Sense strand starting at position 2239 of SEQ ID NO: 587120
ccaguucuguuacucauua

SEQ ID NO: 768185 - RNA, 19 nt, Artificial Sequence
  Description of Artificial Sequence: Synthetic oligonucleotide
  Antisense strand to SEQ ID NO: 768184
uaaugaguaacagaacugg

SEQ ID NO: 768186 - RNA, 19 nt, Artificial Sequence
  Description of Artificial Sequence: Synthetic oligonucleotide
  Sense strand starting at position 2827 of SEQ ID NO: 587120
cucuguuacuugcuuccua

SEQ ID NO: 768187 - RNA, 19 nt, Artificial Sequence
  Description of Artificial Sequence: Synthetic oligonucleotide
  Antisense strand to SEQ ID NO: 768186
uaggaagcaaguaacagag

SEQ ID NO: 768188 - RNA, 19 nt, Artificial Sequence
  Description of Artificial Sequence: Synthetic oligonucleotide
  Sense strand starting at position 2850 of SEQ ID NO: 587120
gaacuccaguuccugagaa

SEQ ID NO: 768189 - RNA, 19 nt, Artificial Sequence
  Description of Artificial Sequence: Synthetic oligonucleotide
  Antisense strand to SEQ ID NO: 768188
uucucaggaacuggaguuc

SEQ ID NO: 768190 - RNA, 19 nt, Artificial Sequence
  Description of Artificial Sequence: Synthetic oligonucleotide
  Sense strand starting at position 3616 of SEQ ID NO: 587120
gggcacacacuauguaaau

SEQ ID NO: 768191 - RNA, 19 nt, Artificial Sequence
  Description of Artificial Sequence: Synthetic oligonucleotide
  Antisense strand to SEQ ID NO: 768190
auuuacauagugugugccc

SEQ ID NO: 768192 - RNA, 19 nt, Artificial Sequence
  Description of Artificial Sequence: Synthetic oligonucleotide
  Sense strand starting at position 3778 of SEQ ID NO: 587120
ugguuaggaaguugcuauu

SEQ ID NO: 768193 - RNA, 19 nt, Artificial Sequence
  Description of Artificial Sequence: Synthetic oligonucleotide
  Antisense strand to SEQ ID NO: 768192
aauagcaacuuccuaacca

SEQ ID NO: 768194 - RNA, 19 nt, Artificial Sequence
  Description of Artificial Sequence: Synthetic oligonucleotide
  Sense strand starting at position 3871 of SEQ ID NO: 587120
gagaauguucuuggaucuu

SEQ ID NO: 768195 - RNA, 19 nt, Artificial Sequence
  Description of Artificial Sequence: Synthetic oligonucleotide
  Antisense strand to SEQ ID NO: 768194
aagauccaagaacauucuc

SEQ ID NO: 768196 - RNA, 19 nt, Artificial Sequence
  Description of Artificial Sequence: Synthetic oligonucleotide
  Sense strand starting at position 3939 of SEQ ID NO: 587120
gaagcaagcuuauugagaa

SEQ ID NO: 768197 - RNA, 19 nt, Artificial Sequence
  Description of Artificial Sequence: Synthetic oligonucleotide
  Antisense strand to SEQ ID NO: 768196
uucucaauaagcuugcuuc

SEQ ID NO: 768198 - RNA, 19 nt, Artificial Sequence
  Description of Artificial Sequence: Synthetic oligonucleotide
  Sense strand starting at position 99 of SEQ ID NO: 587121
aguguacuugggcaccaaa

SEQ ID NO: 768199 - RNA, 19 nt, Artificial Sequence
  Description of Artificial Sequence: Synthetic oligonucleotide
  Antisense strand to SEQ ID NO: 768198
uuuggugcccaaguacacu

SEQ ID NO: 768200 - RNA, 19 nt, Artificial Sequence
  Description of Artificial Sequence: Synthetic oligonucleotide
  Sense strand starting at position 283 of SEQ ID NO: 587121
agggaugguucccugcuua

SEQ ID NO: 768201 - RNA, 19 nt, Artificial Sequence
  Description of Artificial Sequence: Synthetic oligonucleotide
  Antisense strand to SEQ ID NO: 768200
uaagcagggaaccaucccu

SEQ ID NO: 768202 - RNA, 19 nt, Artificial Sequence
  Description of Artificial Sequence: Synthetic oligonucleotide
  Sense strand starting at position 325 of SEQ ID NO: 587121
uggguagucagcuggcaau

SEQ ID NO: 768203 - RNA, 19 nt, Artificial Sequence
  Description of Artificial Sequence: Synthetic oligonucleotide
  Antisense strand to SEQ ID NO: 768202
auugccagcugacuaccca

SEQ ID NO: 768204 - RNA, 19 nt, Artificial Sequence
  Description of Artificial Sequence: Synthetic oligonucleotide
  Sense strand starting at position 553 of SEQ ID NO: 587121
uguaaagcucuuugggaac

SEQ ID NO: 768205 - RNA, 19 nt, Artificial Sequence
  Description of Artificial Sequence: Synthetic oligonucleotide
  Antisense strand to SEQ ID NO: 768204
guucccaaagagcuuuaca

SEQ ID NO: 768206 - RNA, 19 nt, Artificial Sequence
  Description of Artificial Sequence: Synthetic oligonucleotide
  Sense strand starting at position 569 of SEQ ID NO: 587121
aacuguucugaauggcuau

SEQ ID NO: 768207 - RNA, 19 nt, Artificial Sequence
  Description of Artificial Sequence: Synthetic oligonucleotide
  Antisense strand to SEQ ID NO: 768206
auagccauucagaacaguu

SEQ ID NO: 768208 - RNA, 19 nt, Artificial Sequence
  Description of Artificial Sequence: Synthetic oligonucleotide
  Sense strand starting at position 602 of SEQ ID NO: 587121
ccaagacccucugaaugau

SEQ ID NO: 768209 - RNA, 19 nt, Artificial Sequence
  Description of Artificial Sequence: Synthetic oligonucleotide
  Antisense strand to SEQ ID NO: 768208
aucauucagagggucuugg

SEQ ID NO: 768210 - RNA, 19 nt, Artificial Sequence
  Description of Artificial Sequence: Synthetic oligonucleotide
  Sense strand starting at position 610 of SEQ ID NO: 587121
cucugaaugauggguaaca

SEQ ID NO: 768211 - RNA, 19 nt, Artificial Sequence
  Description of Artificial Sequence: Synthetic oligonucleotide
  Antisense strand to SEQ ID NO: 768210
uguuacccaucauucagag

SEQ ID NO: 768212 - RNA, 19 nt, Artificial Sequence
  Description of Artificial Sequence: Synthetic oligonucleotide
  Sense strand starting at position 656 of SEQ ID NO: 587121
cgaugaccuugagccuaau

SEQ ID NO: 768213 - RNA, 19 nt, Artificial Sequence
  Description of Artificial Sequence: Synthetic oligonucleotide
  Antisense strand to SEQ ID NO: 768212
auuaggcucaaggucaucg

SEQ ID NO: 768214 - RNA, 19 nt, Artificial Sequence
  Description of Artificial Sequence: Synthetic oligonucleotide
  Sense strand starting at position 698 of SEQ ID NO: 587121
guuggacugucauucccaa

SEQ ID NO: 768215 - RNA, 19 nt, Artificial Sequence
  Description of Artificial Sequence: Synthetic oligonucleotide
  Antisense strand to SEQ ID NO: 768214
uugggaaugacaguccaac

SEQ ID NO: 768216 - RNA, 19 nt, Artificial Sequence
  Description of Artificial Sequence: Synthetic oligonucleotide
  Sense strand starting at position 1853 of SEQ ID NO: 587121
gaguuuaauuucuguaaga

SEQ ID NO: 768217 - RNA, 19 nt, Artificial Sequence
  Description of Artificial Sequence: Synthetic oligonucleotide
  Antisense strand to SEQ ID NO: 768216
ucuuacagaaauuaaacuc

SEQ ID NO: 768218 - RNA, 19 nt, Artificial Sequence
  Description of Artificial Sequence: Synthetic oligonucleotide
  Sense strand starting at position 1894 of SEQ ID NO: 587121
agcguaaggccuuauuauu

SEQ ID NO: 768219 - RNA, 19 nt, Artificial Sequence
  Description of Artificial Sequence: Synthetic oligonucleotide
  Antisense strand to SEQ ID NO: 768218
aauaauaaggccuuacgcu

SEQ ID NO: 768220 - RNA, 19 nt, Artificial Sequence
  Description of Artificial Sequence: Synthetic oligonucleotide
  Sense strand starting at position 2090 of SEQ ID NO: 587121
caguuccuccagugagguu

SEQ ID NO: 768221 - RNA, 19 nt, Artificial Sequence
  Description of Artificial Sequence: Synthetic oligonucleotide
  Antisense strand to SEQ ID NO: 768220
aaccucacuggaggaacug

SEQ ID NO: 768222 - RNA, 19 nt, Artificial Sequence
  Description of Artificial Sequence: Synthetic oligonucleotide
  Sense strand starting at position 2126 of SEQ ID NO: 587121
aguuaugaguccuuaggca

SEQ ID NO: 768223 - RNA, 19 nt, Artificial Sequence
  Description of Artificial Sequence: Synthetic oligonucleotide
  Antisense strand to SEQ ID NO: 768222
ugccuaaggacucauaacu

SEQ ID NO: 768224 - RNA, 19 nt, Artificial Sequence
  Description of Artificial Sequence: Synthetic oligonucleotide
  Sense strand starting at position 2130 of SEQ ID NO: 587121
augaguccuuaggcaggua

SEQ ID NO: 768225 - RNA, 19 nt, Artificial Sequence
  Description of Artificial Sequence: Synthetic oligonucleotide
  Antisense strand to SEQ ID NO: 768224
uaccugccuaaggacucau

SEQ ID NO: 768226 - RNA, 19 nt, Artificial Sequence
  Description of Artificial Sequence: Synthetic oligonucleotide
  Sense strand starting at position 2133 of SEQ ID NO: 587121
aguccuuaggcagguagau

SEQ ID NO: 768227 - RNA, 19 nt, Artificial Sequence
  Description of Artificial Sequence: Synthetic oligonucleotide
  Antisense strand to SEQ ID NO: 768226
aucuaccugccuaaggacu

SEQ ID NO: 768228 - RNA, 19 nt, Artificial Sequence
  Description of Artificial Sequence: Synthetic oligonucleotide
  Sense strand starting at position 2235 of SEQ ID NO: 587121
uguaaaccauuguugauaa

SEQ ID NO: 768229 - RNA, 19 nt, Artificial Sequence
  Description of Artificial Sequence: Synthetic oligonucleotide
  Antisense strand to SEQ ID NO: 768228
uuaucaacaaugguuuaca

SEQ ID NO: 768230 - RNA, 19 nt, Artificial Sequence
  Description of Artificial Sequence: Synthetic oligonucleotide
  Sense strand starting at position 2269 of SEQ ID NO: 587121
auuaaauaucacuggccga

SEQ ID NO: 768231 - RNA, 19 nt, Artificial Sequence
  Description of Artificial Sequence: Synthetic oligonucleotide
  Antisense strand to SEQ ID NO: 768230
ucggccagugauauuuaau

SEQ ID NO: 768232 - RNA, 19 nt, Artificial Sequence
  Description of Artificial Sequence: Synthetic oligonucleotide
  Sense strand starting at position 2501 of SEQ ID NO: 587121
acagcaaagcagugauuaa

SEQ ID NO: 768233 - RNA, 19 nt, Artificial Sequence
  Description of Artificial Sequence: Synthetic oligonucleotide
  Antisense strand to SEQ ID NO: 768232
uuaaucacugcuuugcugu

SEQ ID NO: 768234 - RNA, 19 nt, Artificial Sequence
  Description of Artificial Sequence: Synthetic oligonucleotide
  Sense strand starting at position 2536 of SEQ ID NO: 587121
ccagaauaccuguguugga

SEQ ID NO: 768235 - RNA, 19 nt, Artificial Sequence
  Description of Artificial Sequence: Synthetic oligonucleotide
  Antisense strand to SEQ ID NO: 768234
uccaacacagguauucugg

SEQ ID NO: 768236 - RNA, 19 nt, Artificial Sequence
  Description of Artificial Sequence: Synthetic oligonucleotide
  Sense strand starting at position 2537 of SEQ ID NO: 587121
cagaauaccuguguuggaa

SEQ ID NO: 768237 - RNA, 19 nt, Artificial Sequence
  Description of Artificial Sequence: Synthetic oligonucleotide
  Antisense strand to SEQ ID NO: 768236
uuccaacacagguauucug

SEQ ID NO: 768238 - RNA, 19 nt, Artificial Sequence
  Description of Artificial Sequence: Synthetic oligonucleotide
  Sense strand starting at position 2611 of SEQ ID NO: 587121
gggccacaguuccuuauuu

SEQ ID NO: 768239 - RNA, 19 nt, Artificial Sequence
  Description of Artificial Sequence: Synthetic oligonucleotide
  Antisense strand to SEQ ID NO: 768238
aaauaaggaacuguggccc

SEQ ID NO: 768240 - RNA, 19 nt, Artificial Sequence
  Description of Artificial Sequence: Synthetic oligonucleotide
  Sense strand starting at position 2651 of SEQ ID NO: 587121
gucccuuccucucugugaa

SEQ ID NO: 768241 - RNA, 19 nt, Artificial Sequence
  Description of Artificial Sequence: Synthetic oligonucleotide
  Antisense strand to SEQ ID NO: 768240
uucacagagaggaagggac

SEQ ID NO: 768242 - RNA, 19 nt, Artificial Sequence
  Description of Artificial Sequence: Synthetic oligonucleotide
  Sense strand starting at position 2654 of SEQ ID NO: 587121
ccuuccucucugugaagau

SEQ ID NO: 768243 - RNA, 19 nt, Artificial Sequence
  Description of Artificial Sequence: Synthetic oligonucleotide
  Antisense strand to SEQ ID NO: 768242
aucuucacagagaggaagg

SEQ ID NO: 768244 - RNA, 19 nt, Artificial Sequence
  Description of Artificial Sequence: Synthetic oligonucleotide
  Sense strand starting at position 2716 of SEQ ID NO: 587121
guuaguaaacauugcguga

SEQ ID NO: 768245 - RNA, 19 nt, Artificial Sequence
  Description of Artificial Sequence: Synthetic oligonucleotide
  Antisense strand to SEQ ID NO: 768244
ucacgcaauguuuacuaac

SEQ ID NO: 768246 - RNA, 19 nt, Artificial Sequence
  Description of Artificial Sequence: Synthetic oligonucleotide
  Sense strand starting at position 2720 of SEQ ID NO: 587121
guaaacauugcgugaugca

SEQ ID NO: 768247 - RNA, 19 nt, Artificial Sequence
  Description of Artificial Sequence: Synthetic oligonucleotide
  Antisense strand to SEQ ID NO: 768246
ugcaucacgcaauguuuac

SEQ ID NO: 768248 - RNA, 19 nt, Artificial Sequence
  Description of Artificial Sequence: Synthetic oligonucleotide
  Sense strand starting at position 2721 of SEQ ID NO: 587121
uaaacauugcgugaugcau

SEQ ID NO: 768249 - RNA, 19 nt, Artificial Sequence
  Description of Artificial Sequence: Synthetic oligonucleotide
  Antisense strand to SEQ ID NO: 768248
augcaucacgcaauguuua

SEQ ID NO: 768250 - RNA, 19 nt, Artificial Sequence
  Description of Artificial Sequence: Synthetic oligonucleotide
  Sense strand starting at position 2729 of SEQ ID NO: 587121
gcgugaugcauggucucuu

SEQ ID NO: 768251 - RNA, 19 nt, Artificial Sequence
  Description of Artificial Sequence: Synthetic oligonucleotide
  Antisense strand to SEQ ID NO: 768250
aagagaccaugcaucacgc

SEQ ID NO: 768252 - RNA, 19 nt, Artificial Sequence
  Description of Artificial Sequence: Synthetic oligonucleotide
  Sense strand starting at position 2785 of SEQ ID NO: 587121
ccuuguccucuucgguaaa

SEQ ID NO: 768253 - RNA, 19 nt, Artificial Sequence
  Description of Artificial Sequence: Synthetic oligonucleotide
  Antisense strand to SEQ ID NO: 768252
uuuaccgaagaggacaagg

SEQ ID NO: 768254 - RNA, 19 nt, Artificial Sequence
  Description of Artificial Sequence: Synthetic oligonucleotide
  Sense strand starting at position 2787 of SEQ ID NO: 587121
uuguccucuucgguaaaga

SEQ ID NO: 768255 - RNA, 19 nt, Artificial Sequence
  Description of Artificial Sequence: Synthetic oligonucleotide
  Antisense strand to SEQ ID NO: 768254
ucuuuaccgaagaggacaa

SEQ ID NO: 768256 - RNA, 19 nt, Artificial Sequence
  Description of Artificial Sequence: Synthetic oligonucleotide
  Sense strand starting at position 2788 of SEQ ID NO: 587121
uguccucuucgguaaagaa

SEQ ID NO: 768257 - RNA, 19 nt, Artificial Sequence
  Description of Artificial Sequence: Synthetic oligonucleotide
  Antisense strand to SEQ ID NO: 768256
uucuuuaccgaagaggaca

SEQ ID NO: 768258 - RNA, 19 nt, Artificial Sequence
  Description of Artificial Sequence: Synthetic oligonucleotide
  Sense strand starting at position 2926 of SEQ ID NO: 587121
uaggaagaguuugaggaau

SEQ ID NO: 768259 - RNA, 19 nt, Artificial Sequence
  Description of Artificial Sequence: Synthetic oligonucleotide
  Antisense strand to SEQ ID NO: 768258
auuccucaaacucuuccua

SEQ ID NO: 768260 - RNA, 19 nt, Artificial Sequence
  Description of Artificial Sequence: Synthetic oligonucleotide
  Sense strand starting at position 3333 of SEQ ID NO: 587121
aggaauacauguuuacuga

SEQ ID NO: 768261 - RNA, 19 nt, Artificial Sequence
  Description of Artificial Sequence: Synthetic oligonucleotide
  Antisense strand to SEQ ID NO: 768260
ucaguaaacauguauuccu

SEQ ID NO: 768262 - RNA, 19 nt, Artificial Sequence
  Description of Artificial Sequence: Synthetic oligonucleotide
  Sense strand starting at position 3471 of SEQ ID NO: 587121
gucuuuaucugcuuaaagu

SEQ ID NO: 768263 - RNA, 19 nt, Artificial Sequence
  Description of Artificial Sequence: Synthetic oligonucleotide
  Antisense strand to SEQ ID NO: 768262
acuuuaagcagauaaagac

SEQ ID NO: 768264 - RNA, 19 nt, Artificial Sequence
  Description of Artificial Sequence: Synthetic oligonucleotide
  Sense strand starting at position 3573 of SEQ ID NO: 587121
uaggauagcguacaaguua

SEQ ID NO: 768265 - RNA, 19 nt, Artificial Sequence
  Description of Artificial Sequence: Synthetic oligonucleotide
  Antisense strand to SEQ ID NO: 768264
uaacuuguacgcuauccua

SEQ ID NO: 768266 - RNA, 19 nt, Artificial Sequence
  Description of Artificial Sequence: Synthetic oligonucleotide
  Sense strand starting at position 3680 of SEQ ID NO: 587121
uugccaagauggucuacaa

SEQ ID NO: 768267 - RNA, 19 nt, Artificial Sequence
  Description of Artificial Sequence: Synthetic oligonucleotide
  Antisense strand to SEQ ID NO: 768266
uuguagaccaucuuggcaa

SEQ ID NO: 768268 - RNA, 19 nt, Artificial Sequence
  Description of Artificial Sequence: Synthetic oligonucleotide
  Sense strand starting at position 3733 of SEQ ID NO: 587121
cuguaauucucccugugca

SEQ ID NO: 768269 - RNA, 19 nt, Artificial Sequence
  Description of Artificial Sequence: Synthetic oligonucleotide
  Antisense strand to SEQ ID NO: 768268
ugcacagggagaauuacag

SEQ ID NO: 768270 - RNA, 19 nt, Artificial Sequence
  Description of Artificial Sequence: Synthetic oligonucleotide
  Sense strand starting at position 3734 of SEQ ID NO: 587121
uguaauucucccugugcac

SEQ ID NO: 768271 - RNA, 19 nt, Artificial Sequence
  Description of Artificial Sequence: Synthetic oligonucleotide
  Antisense strand to SEQ ID NO: 768270
gugcacagggagaauuaca

SEQ ID NO: 768272 - RNA, 19 nt, Artificial Sequence
  Description of Artificial Sequence: Synthetic oligonucleotide
  Sense strand starting at position 3889 of SEQ ID NO: 587121
ugguuagaccaucauguuu

SEQ ID NO: 768273 - RNA, 19 nt, Artificial Sequence
  Description of Artificial Sequence: Synthetic oligonucleotide
  Antisense strand to SEQ ID NO: 768272
aaacaugauggucuaacca

SEQ ID NO: 768274 - RNA, 19 nt, Artificial Sequence
  Description of Artificial Sequence: Synthetic oligonucleotide
  Sense strand starting at position 3954 of SEQ ID NO: 587121
uauuauaaggaaugugagu

SEQ ID NO: 768275 - RNA, 19 nt, Artificial Sequence
  Description of Artificial Sequence: Synthetic oligonucleotide
  Antisense strand to SEQ ID NO: 768274
acucacauuccuuauaaua

SEQ ID NO: 768276 - RNA, 19 nt, Artificial Sequence
  Description of Artificial Sequence: Synthetic oligonucleotide
  Sense strand starting at position 3956 of SEQ ID NO: 587121
uuauaaggaaugugaguaa

SEQ ID NO: 768277 - RNA, 19 nt, Artificial Sequence
  Description of Artificial Sequence: Synthetic oligonucleotide
  Antisense strand to SEQ ID NO: 768276
uuacucacauuccuuauaa

SEQ ID NO: 768278 - RNA, 19 nt, Artificial Sequence
  Description of Artificial Sequence: Synthetic oligonucleotide
  Sense strand starting at position 122 of SEQ ID NO: 587122
gagggaaggccaugucaau

SEQ ID NO: 768279 - RNA, 19 nt, Artificial Sequence
  Description of Artificial Sequence: Synthetic oligonucleotide
  Antisense strand to SEQ ID NO: 768278
auugacauggccuucccuc

SEQ ID NO: 768280 - RNA, 19 nt, Artificial Sequence
  Description of Artificial Sequence: Synthetic oligonucleotide
  Sense strand starting at position 128 of SEQ ID NO: 587122
aggccaugucaauaaugua

SEQ ID NO: 768281 - RNA, 19 nt, Artificial Sequence
  Description of Artificial Sequence: Synthetic oligonucleotide
  Antisense strand to SEQ ID NO: 768280
uacauuauugacauggccu

SEQ ID NO: 768282 - RNA, 19 nt, Artificial Sequence
  Description of Artificial Sequence: Synthetic oligonucleotide
  Sense strand starting at position 135 of SEQ ID NO: 587122
gucaauaauguaggaggau

SEQ ID NO: 768283 - RNA, 19 nt, Artificial Sequence
  Description of Artificial Sequence: Synthetic oligonucleotide
  Antisense strand to SEQ ID NO: 768282
auccuccuacauuauugac

SEQ ID NO: 768284 - RNA, 19 nt, Artificial Sequence
  Description of Artificial Sequence: Synthetic oligonucleotide
  Sense strand starting at position 225 of SEQ ID NO: 587122
uguucaaugggugaugcuu

SEQ ID NO: 768285 - RNA, 19 nt, Artificial Sequence
  Description of Artificial Sequence: Synthetic oligonucleotide
  Antisense strand to SEQ ID NO: 768284
aagcaucacccauugaaca

SEQ ID NO: 768286 - RNA, 19 nt, Artificial Sequence
  Description of Artificial Sequence: Synthetic oligonucleotide
  Sense strand starting at position 247 of SEQ ID NO: 587122
cuggcuuuggaaggugaau

SEQ ID NO: 768287 - RNA, 19 nt, Artificial Sequence
  Description of Artificial Sequence: Synthetic oligonucleotide
  Antisense strand to SEQ ID NO: 768286
auucaccuuccaaagccag

SEQ ID NO: 768288 - RNA, 19 nt, Artificial Sequence
  Description of Artificial Sequence: Synthetic oligonucleotide
  Sense strand starting at position 258 of SEQ ID NO: 587122
aggugaaugcucuagucaa

SEQ ID NO: 768289 - RNA, 19 nt, Artificial Sequence
  Description of Artificial Sequence: Synthetic oligonucleotide
  Antisense strand to SEQ ID NO: 768288
uugacuagagcauucaccu

SEQ ID NO: 768290 - RNA, 19 nt, Artificial Sequence
  Description of Artificial Sequence: Synthetic oligonucleotide
  Sense strand starting at position 266 of SEQ ID NO: 587122
gcucuagucaaggaaugua

SEQ ID NO: 768291 - RNA, 19 nt, Artificial Sequence
  Description of Artificial Sequence: Synthetic oligonucleotide
  Antisense strand to SEQ ID NO: 768290
uacauuccuugacuagagc

SEQ ID NO: 768292 - RNA, 19 nt, Artificial Sequence
  Description of Artificial Sequence: Synthetic oligonucleotide
  Sense strand starting at position 269 of SEQ ID NO: 587122
cuagucaaggaauguagau

SEQ ID NO: 768293 - RNA, 19 nt, Artificial Sequence
  Description of Artificial Sequence: Synthetic oligonucleotide
  Antisense strand to SEQ ID NO: 768292
aucuacauuccuugacuag

SEQ ID NO: 768294 - RNA, 19 nt, Artificial Sequence
  Description of Artificial Sequence: Synthetic oligonucleotide
  Sense strand starting at position 287 of SEQ ID NO: 587122
ugcuguggugauggaaaca

SEQ ID NO: 768295 - RNA, 19 nt, Artificial Sequence
  Description of Artificial Sequence: Synthetic oligonucleotide
  Antisense strand to SEQ ID NO: 768294
uguuuccaucaccacagca

SEQ ID NO: 768296 - RNA, 19 nt, Artificial Sequence
  Description of Artificial Sequence: Synthetic oligonucleotide
  Sense strand starting at position 348 of SEQ ID NO: 587122
gcuggaggauacuuugagu

SEQ ID NO: 768297 - RNA, 19 nt, Artificial Sequence
  Description of Artificial Sequence: Synthetic oligonucleotide
  Antisense strand to SEQ ID NO: 768296
acucaaaguauccuccagc

SEQ ID NO: 768298 - RNA, 19 nt, Artificial Sequence
  Description of Artificial Sequence: Synthetic oligonucleotide
  Sense strand starting at position 670 of SEQ ID NO: 587122
ccuggaugacagugaaugu

SEQ ID NO: 768299 - RNA, 19 nt, Artificial Sequence
  Description of Artificial Sequence: Synthetic oligonucleotide
  Antisense strand to SEQ ID NO: 768298
acauucacugucauccagg

SEQ ID NO: 768300 - RNA, 19 nt, Artificial Sequence
  Description of Artificial Sequence: Synthetic oligonucleotide
  Sense strand starting at position 714 of SEQ ID NO: 587122
ugaagaguucuggguaagg

SEQ ID NO: 768301 - RNA, 19 nt, Artificial Sequence
  Description of Artificial Sequence: Synthetic oligonucleotide
  Antisense strand to SEQ ID NO: 768300
ccuuacccagaacucuuca

SEQ ID NO: 768302 - RNA, 19 nt, Artificial Sequence
  Description of Artificial Sequence: Synthetic oligonucleotide
  Sense strand starting at position 767 of SEQ ID NO: 587122
caugaaguuguguggagga

SEQ ID NO: 768303 - RNA, 19 nt, Artificial Sequence
  Description of Artificial Sequence: Synthetic oligonucleotide
  Antisense strand to SEQ ID NO: 768302
uccuccacacaacuucaug

SEQ ID NO: 768304 - RNA, 19 nt, Artificial Sequence
  Description of Artificial Sequence: Synthetic oligonucleotide
  Sense strand starting at position 769 of SEQ ID NO: 587122
ugaaguuguguggaggaca

SEQ ID NO: 768305 - RNA, 19 nt, Artificial Sequence
  Description of Artificial Sequence: Synthetic oligonucleotide
  Antisense strand to SEQ ID NO: 768304
uguccuccacacaacuuca

SEQ ID NO: 768306 - RNA, 19 nt, Artificial Sequence
  Description of Artificial Sequence: Synthetic oligonucleotide
  Sense strand starting at position 772 of SEQ ID NO: 587122
aguuguguggaggacagau

SEQ ID NO: 768307 - RNA, 19 nt, Artificial Sequence
  Description of Artificial Sequence: Synthetic oligonucleotide
  Antisense strand to SEQ ID NO: 768306
aucuguccuccacacaacu

SEQ ID NO: 768308 - RNA, 19 nt, Artificial Sequence
  Description of Artificial Sequence: Synthetic oligonucleotide
  Sense strand starting at position 856 of SEQ ID NO: 587122
uuuauaugcugacugagua

SEQ ID NO: 768309 - RNA, 19 nt, Artificial Sequence
  Description of Artificial Sequence: Synthetic oligonucleotide
  Antisense strand to SEQ ID NO: 768308
uacucagucagcauauaaa

SEQ ID NO: 768310 - RNA, 19 nt, Artificial Sequence
  Description of Artificial Sequence: Synthetic oligonucleotide
  Sense strand starting at position 860 of SEQ ID NO: 587122
uaugcugacugaguacaaa

SEQ ID NO: 768311 - RNA, 19 nt, Artificial Sequence
  Description of Artificial Sequence: Synthetic oligonucleotide
  Antisense strand to SEQ ID NO: 768310
uuuguacucagucagcaua

SEQ ID NO: 768312 - RNA, 19 nt, Artificial Sequence
  Description of Artificial Sequence: Synthetic oligonucleotide
  Sense strand starting at position 932 of SEQ ID NO: 587122
uuggucccagaguaauuau

SEQ ID NO: 768313 - RNA, 19 nt, Artificial Sequence
  Description of Artificial Sequence: Synthetic oligonucleotide
  Antisense strand to SEQ ID NO: 768312
auaauuacucugggaccaa

SEQ ID NO: 768314 - RNA, 19 nt, Artificial Sequence
  Description of Artificial Sequence: Synthetic oligonucleotide
  Sense strand starting at position 935 of SEQ ID NO: 587122
gucccagaguaauuauauu

SEQ ID NO: 768315 - RNA, 19 nt, Artificial Sequence
  Description of Artificial Sequence: Synthetic oligonucleotide
  Antisense strand to SEQ ID NO: 768314
aauauaauuacucugggac

SEQ ID NO: 768316 - RNA, 19 nt, Artificial Sequence
  Description of Artificial Sequence: Synthetic oligonucleotide
  Sense strand starting at position 976 of SEQ ID NO: 587122
caugucucagucugaagau

SEQ ID NO: 768317 - RNA, 19 nt, Artificial Sequence
  Description of Artificial Sequence: Synthetic oligonucleotide
  Antisense strand to SEQ ID NO: 768316
aucuucagacugagacaug

SEQ ID NO: 768318 - RNA, 19 nt, Artificial Sequence
  Description of Artificial Sequence: Synthetic oligonucleotide
  Sense strand starting at position 1051 of SEQ ID NO: 587122
ugugaaaugcacugauauu

SEQ ID NO: 768319 - RNA, 19 nt, Artificial Sequence
  Description of Artificial Sequence: Synthetic oligonucleotide
  Antisense strand to SEQ ID NO: 768318
aauaucagugcauuucaca

SEQ ID NO: 768320 - RNA, 19 nt, Artificial Sequence
  Description of Artificial Sequence: Synthetic oligonucleotide
  Sense strand starting at position 1529 of SEQ ID NO: 587122
uuaaguuugggagaugcau

SEQ ID NO: 768321 - RNA, 19 nt, Artificial Sequence
  Description of Artificial Sequence: Synthetic oligonucleotide
  Antisense strand to SEQ ID NO: 768320
augcaucucccaaacuuaa

SEQ ID NO: 768322 - RNA, 19 nt, Artificial Sequence
  Description of Artificial Sequence: Synthetic oligonucleotide
  Sense strand starting at position 1535 of SEQ ID NO: 587122
uugggagaugcauagucua

SEQ ID NO: 768323 - RNA, 19 nt, Artificial Sequence
  Description of Artificial Sequence: Synthetic oligonucleotide
  Antisense strand to SEQ ID NO: 768322
uagacuaugcaucucccaa

SEQ ID NO: 768324 - RNA, 19 nt, Artificial Sequence
  Description of Artificial Sequence: Synthetic oligonucleotide
  Sense strand starting at position 1666 of SEQ ID NO: 587122
uggaaauggcuguaacgca

SEQ ID NO: 768325 - RNA, 19 nt, Artificial Sequence
  Description of Artificial Sequence: Synthetic oligonucleotide
  Antisense strand to SEQ ID NO: 768324
ugcguuacagccauuucca

SEQ ID NO: 768326 - RNA, 19 nt, Artificial Sequence
  Description of Artificial Sequence: Synthetic oligonucleotide
  Sense strand starting at position 2451 of SEQ ID NO: 587122
gguggguauccagaagggu

SEQ ID NO: 768327 - RNA, 19 nt, Artificial Sequence
  Description of Artificial Sequence: Synthetic oligonucleotide
  Antisense strand to SEQ ID NO: 768326
acccuucuggauacccacc

SEQ ID NO: 768328 - RNA, 19 nt, Artificial Sequence
  Description of Artificial Sequence: Synthetic oligonucleotide
  Sense strand starting at position 2475 of SEQ ID NO: 587122
ggaagaagcuggguccuaa

SEQ ID NO: 768329 - RNA, 19 nt, Artificial Sequence
  Description of Artificial Sequence: Synthetic oligonucleotide
  Antisense strand to SEQ ID NO: 768328
uuaggacccagcuucuucc

SEQ ID NO: 768330 - RNA, 19 nt, Artificial Sequence
  Description of Artificial Sequence: Synthetic oligonucleotide
  Sense strand starting at position 2628 of SEQ ID NO: 587122
aggagcagugcugaaguaa

SEQ ID NO: 768331 - RNA, 19 nt, Artificial Sequence
  Description of Artificial Sequence: Synthetic oligonucleotide
  Antisense strand to SEQ ID NO: 768330
uuacuucagcacugcuccu

SEQ ID NO: 768332 - RNA, 19 nt, Artificial Sequence
  Description of Artificial Sequence: Synthetic oligonucleotide
  Sense strand starting at position 2672 of SEQ ID NO: 587122
ggaguccaugaggguuuaa

SEQ ID NO: 768333 - RNA, 19 nt, Artificial Sequence
  Description of Artificial Sequence: Synthetic oligonucleotide
  Antisense strand to SEQ ID NO: 768332
uuaaacccucauggacucc

SEQ ID NO: 768334 - RNA, 19 nt, Artificial Sequence
  Description of Artificial Sequence: Synthetic oligonucleotide
  Sense strand starting at position 3076 of SEQ ID NO: 587122
uagagacagugucucgaua

SEQ ID NO: 768335 - RNA, 19 nt, Artificial Sequence
  Description of Artificial Sequence: Synthetic oligonucleotide
  Antisense strand to SEQ ID NO: 768334
uaucgagacacugucucua

SEQ ID NO: 768336 - RNA, 19 nt, Artificial Sequence
  Description of Artificial Sequence: Synthetic oligonucleotide
  Sense strand starting at position 3162 of SEQ ID NO: 587122
gggauuacaacgugagaca

SEQ ID NO: 768337 - RNA, 19 nt, Artificial Sequence
  Description of Artificial Sequence: Synthetic oligonucleotide
  Antisense strand to SEQ ID NO: 768336
ugucucacguuguaauccc

SEQ ID NO: 768338 - RNA, 19 nt, Artificial Sequence
  Description of Artificial Sequence: Synthetic oligonucleotide
  Sense strand starting at position 3222 of SEQ ID NO: 587122
acaaguacaugacuaguaa

SEQ ID NO: 768339 - RNA, 19 nt, Artificial Sequence
  Description of Artificial Sequence: Synthetic oligonucleotide
  Antisense strand to SEQ ID NO: 768338
uuacuagucauguacuugu

SEQ ID NO: 768340 - RNA, 19 nt, Artificial Sequence
  Description of Artificial Sequence: Synthetic oligonucleotide
  Sense strand starting at position 3273 of SEQ ID NO: 587122
uauggacuugggugucaga

SEQ ID NO: 768341 - RNA, 19 nt, Artificial Sequence
  Description of Artificial Sequence: Synthetic oligonucleotide
  Antisense strand to SEQ ID NO: 768340
ucugacacccaaguccaua

SEQ ID NO: 768342 - RNA, 19 nt, Artificial Sequence
  Description of Artificial Sequence: Synthetic oligonucleotide
  Sense strand starting at position 3317 of SEQ ID NO: 587122
ucacuuauagugggaccuu

SEQ ID NO: 768343 - RNA, 19 nt, Artificial Sequence
  Description of Artificial Sequence: Synthetic oligonucleotide
  Antisense strand to SEQ ID NO: 768342
aaggucccacuauaaguga

SEQ ID NO: 768344 - RNA, 19 nt, Artificial Sequence
  Description of Artificial Sequence: Synthetic oligonucleotide
  Sense strand starting at position 3362 of SEQ ID NO: 587122
cucccaguccuacauguuu

SEQ ID NO: 768345 - RNA, 19 nt, Artificial Sequence
  Description of Artificial Sequence: Synthetic oligonucleotide
  Antisense strand to SEQ ID NO: 768344
aaacauguaggacugggag

SEQ ID NO: 768346 - RNA, 19 nt, Artificial Sequence
  Description of Artificial Sequence: Synthetic oligonucleotide
  Sense strand starting at position 3367 of SEQ ID NO: 587122
aguccuacauguuuacaga

SEQ ID NO: 768347 - RNA, 19 nt, Artificial Sequence
  Description of Artificial Sequence: Synthetic oligonucleotide
  Antisense strand to SEQ ID NO: 768346
ucuguaaacauguaggacu

SEQ ID NO: 768348 - RNA, 19 nt, Artificial Sequence
  Description of Artificial Sequence: Synthetic oligonucleotide
  Sense strand starting at position 3408 of SEQ ID NO: 587122
augaaauguguuuagcaca

SEQ ID NO: 768349 - RNA, 19 nt, Artificial Sequence
  Description of Artificial Sequence: Synthetic oligonucleotide
  Antisense strand to SEQ ID NO: 768348
ugugcuaaacacauuucau

SEQ ID NO: 768350 - RNA, 19 nt, Artificial Sequence
  Description of Artificial Sequence: Synthetic oligonucleotide
  Sense strand starting at position 3426 of SEQ ID NO: 587122
augcuugcuguauaccaaa

SEQ ID NO: 768351 - RNA, 19 nt, Artificial Sequence
  Description of Artificial Sequence: Synthetic oligonucleotide
  Antisense strand to SEQ ID NO: 768350
uuugguauacagcaagcau

SEQ ID NO: 768352 - RNA, 19 nt, Artificial Sequence
  Description of Artificial Sequence: Synthetic oligonucleotide
  Sense strand starting at position 3453 of SEQ ID NO: 587122
acgaguuagcugcuguuau

SEQ ID NO: 768353 - RNA, 19 nt, Artificial Sequence
  Description of Artificial Sequence: Synthetic oligonucleotide
  Antisense strand to SEQ ID NO: 768352
auaacagcagcuaacucgu

SEQ ID NO: 768354 - RNA, 19 nt, Artificial Sequence
  Description of Artificial Sequence: Synthetic oligonucleotide
  Sense strand starting at position 3952 of SEQ ID NO: 587122
ucacauuacuggguuugau

SEQ ID NO: 768355 - RNA, 19 nt, Artificial Sequence
  Description of Artificial Sequence: Synthetic oligonucleotide
  Antisense strand to SEQ ID NO: 768354
aucaaacccaguaauguga

SEQ ID NO: 768356 - RNA, 19 nt, Artificial Sequence
  Description of Artificial Sequence: Synthetic oligonucleotide
  Sense strand starting at position 3966 of SEQ ID NO: 587122
uugauugccagagguggaa

SEQ ID NO: 768357 - RNA, 19 nt, Artificial Sequence
  Description of Artificial Sequence: Synthetic oligonucleotide
  Antisense strand to SEQ ID NO: 768356
uuccaccucuggcaaucaa

SEQ ID NO: 768358 - RNA, 19 nt, Artificial Sequence
  Description of Artificial Sequence: Synthetic oligonucleotide
  Sense strand starting at position 4 of SEQ ID NO: 587123
auaauaugugcauagcuua

SEQ ID NO: 768359 - RNA, 19 nt, Artificial Sequence
  Description of Artificial Sequence: Synthetic oligonucleotide
  Antisense strand to SEQ ID NO: 768358
uaagcuaugcacauauuau

SEQ ID NO: 768360 - RNA, 19 nt, Artificial Sequence
  Description of Artificial Sequence: Synthetic oligonucleotide
  Sense strand starting at position 99 of SEQ ID NO: 587123
caauuugguccuuguguga

SEQ ID NO: 768361 - RNA, 19 nt, Artificial Sequence
  Description of Artificial Sequence: Synthetic oligonucleotide
  Antisense strand to SEQ ID NO: 768360
ucacacaaggaccaaauug

SEQ ID NO: 768362 - RNA, 19 nt, Artificial Sequence
  Description of Artificial Sequence: Synthetic oligonucleotide
  Sense strand starting at position 261 of SEQ ID NO: 587123
guauuugugcaugggacca

SEQ ID NO: 768363 - RNA, 19 nt, Artificial Sequence
  Description of Artificial Sequence: Synthetic oligonucleotide
  Antisense strand to SEQ ID NO: 768362
uggucccaugcacaaauac

SEQ ID NO: 768364 - RNA, 19 nt, Artificial Sequence
  Description of Artificial Sequence: Synthetic oligonucleotide
  Sense strand starting at position 318 of SEQ ID NO: 587123
gcaugacuuguauacuaaa

SEQ ID NO: 768365 - RNA, 19 nt, Artificial Sequence
  Description of Artificial Sequence: Synthetic oligonucleotide
  Antisense strand to SEQ ID NO: 768364
uuuaguauacaagucaugc

SEQ ID NO: 768366 - RNA, 19 nt, Artificial Sequence
  Description of Artificial Sequence: Synthetic oligonucleotide
  Sense strand starting at position 536 of SEQ ID NO: 587123
aguguacuugggcaccaaa

SEQ ID NO: 768367 - RNA, 19 nt, Artificial Sequence
  Description of Artificial Sequence: Synthetic oligonucleotide
  Antisense strand to SEQ ID NO: 768366
uuuggugcccaaguacacu

SEQ ID NO: 768368 - RNA, 19 nt, Artificial Sequence
  Description of Artificial Sequence: Synthetic oligonucleotide
  Sense strand starting at position 720 of SEQ ID NO: 587123
agggaugguucccugcuua

SEQ ID NO: 768369 - RNA, 19 nt, Artificial Sequence
  Description of Artificial Sequence: Synthetic oligonucleotide
  Antisense strand to SEQ ID NO: 768368
uaagcagggaaccaucccu

SEQ ID NO: 768370 - RNA, 19 nt, Artificial Sequence
  Description of Artificial Sequence: Synthetic oligonucleotide
  Sense strand starting at position 751 of SEQ ID NO: 587123
gcucaaagugcuggguagu

SEQ ID NO: 768371 - RNA, 19 nt, Artificial Sequence
  Description of Artificial Sequence: Synthetic oligonucleotide
  Antisense strand to SEQ ID NO: 768370
acuacccagcacuuugagc

SEQ ID NO: 768372 - RNA, 19 nt, Artificial Sequence
  Description of Artificial Sequence: Synthetic oligonucleotide
  Sense strand starting at position 762 of SEQ ID NO: 587123
uggguagucagcuggcaau

SEQ ID NO: 768373 - RNA, 19 nt, Artificial Sequence
  Description of Artificial Sequence: Synthetic oligonucleotide
  Antisense strand to SEQ ID NO: 768372
auugccagcugacuaccca

SEQ ID NO: 768374 - RNA, 19 nt, Artificial Sequence
  Description of Artificial Sequence: Synthetic oligonucleotide
  Sense strand starting at position 990 of SEQ ID NO: 587123
uguaaagcucuuugggaac

SEQ ID NO: 768375 - RNA, 19 nt, Artificial Sequence
  Description of Artificial Sequence: Synthetic oligonucleotide
  Antisense strand to SEQ ID NO: 768374
guucccaaagagcuuuaca

SEQ ID NO: 768376 - RNA, 19 nt, Artificial Sequence
  Description of Artificial Sequence: Synthetic oligonucleotide
  Sense strand starting at position 1006 of SEQ ID NO: 587123
aacuguucugaauggcuau

SEQ ID NO: 768377 - RNA, 19 nt, Artificial Sequence
  Description of Artificial Sequence: Synthetic oligonucleotide
  Antisense strand to SEQ ID NO: 768376
auagccauucagaacaguu

SEQ ID NO: 768378 - RNA, 19 nt, Artificial Sequence
  Description of Artificial Sequence: Synthetic oligonucleotide
  Sense strand starting at position 1039 of SEQ ID NO: 587123
ccaagacccucugaaugau

SEQ ID NO: 768379 - RNA, 19 nt, Artificial Sequence
  Description of Artificial Sequence: Synthetic oligonucleotide
  Antisense strand to SEQ ID NO: 768378
aucauucagagggucuugg

SEQ ID NO: 768380 - RNA, 19 nt, Artificial Sequence
  Description of Artificial Sequence: Synthetic oligonucleotide
  Sense strand starting at position 1047 of SEQ ID NO: 587123
cucugaaugauggguaaca

SEQ ID NO: 768381 - RNA, 19 nt, Artificial Sequence
  Description of Artificial Sequence: Synthetic oligonucleotide
  Antisense strand to SEQ ID NO: 768380
uguuacccaucauucagag

SEQ ID NO: 768382 - RNA, 19 nt, Artificial Sequence
  Description of Artificial Sequence: Synthetic oligonucleotide
  Sense strand starting at position 1093 of SEQ ID NO: 587123
cgaugaccuugagccuaau

SEQ ID NO: 768383 - RNA, 19 nt, Artificial Sequence
  Description of Artificial Sequence: Synthetic oligonucleotide
  Antisense strand to SEQ ID NO: 768382
auuaggcucaaggucaucg

SEQ ID NO: 768384 - RNA, 19 nt, Artificial Sequence
  Description of Artificial Sequence: Synthetic oligonucleotide
  Sense strand starting at position 1135 of SEQ ID NO: 587123
guuggacugucauucccaa

SEQ ID NO: 768385 - RNA, 19 nt, Artificial Sequence
  Description of Artificial Sequence: Synthetic oligonucleotide
  Antisense strand to SEQ ID NO: 768384
uugggaaugacaguccaac

SEQ ID NO: 768386 - RNA, 19 nt, Artificial Sequence
  Description of Artificial Sequence: Synthetic oligonucleotide
  Sense strand starting at position 1254 of SEQ ID NO: 587123
cuauaugugucgccaucau

SEQ ID NO: 768387 - RNA, 19 nt, Artificial Sequence
  Description of Artificial Sequence: Synthetic oligonucleotide
  Antisense strand to SEQ ID NO: 768386
augauggcgacacauauag

SEQ ID NO: 768388 - RNA, 19 nt, Artificial Sequence
  Description of Artificial Sequence: Synthetic oligonucleotide
  Sense strand starting at position 2290 of SEQ ID NO: 587123
gaguuuaauuucuguaaga

SEQ ID NO: 768389 - RNA, 19 nt, Artificial Sequence
  Description of Artificial Sequence: Synthetic oligonucleotide
  Antisense strand to SEQ ID NO: 768388
ucuuacagaaauuaaacuc

SEQ ID NO: 768390 - RNA, 19 nt, Artificial Sequence
  Description of Artificial Sequence: Synthetic oligonucleotide
  Sense strand starting at position 2331 of SEQ ID NO: 587123
agcguaaggccuuauuauu

SEQ ID NO: 768391 - RNA, 19 nt, Artificial Sequence
  Description of Artificial Sequence: Synthetic oligonucleotide
  Antisense strand to SEQ ID NO: 768390
aauaauaaggccuuacgcu

SEQ ID NO: 768392 - RNA, 19 nt, Artificial Sequence
  Description of Artificial Sequence: Synthetic oligonucleotide
  Sense strand starting at position 2527 of SEQ ID NO: 587123
caguuccuccagugagguu

SEQ ID NO: 768393 - RNA, 19 nt, Artificial Sequence
  Description of Artificial Sequence: Synthetic oligonucleotide
  Antisense strand to SEQ ID NO: 768392
aaccucacuggaggaacug

SEQ ID NO: 768394 - RNA, 19 nt, Artificial Sequence
  Description of Artificial Sequence: Synthetic oligonucleotide
  Sense strand starting at position 2563 of SEQ ID NO: 587123
aguuaugaguccuuaggca

SEQ ID NO: 768395 - RNA, 19 nt, Artificial Sequence
  Description of Artificial Sequence: Synthetic oligonucleotide
  Antisense strand to SEQ ID NO: 768394
ugccuaaggacucauaacu

SEQ ID NO: 768396 - RNA, 19 nt, Artificial Sequence
  Description of Artificial Sequence: Synthetic oligonucleotide
  Sense strand starting at position 2567 of SEQ ID NO: 587123
augaguccuuaggcaggua

SEQ ID NO: 768397 - RNA, 19 nt, Artificial Sequence
  Description of Artificial Sequence: Synthetic oligonucleotide
  Antisense strand to SEQ ID NO: 768396
uaccugccuaaggacucau

SEQ ID NO: 768398 - RNA, 19 nt, Artificial Sequence
  Description of Artificial Sequence: Synthetic oligonucleotide
  Sense strand starting at position 2570 of SEQ ID NO: 587123
aguccuuaggcagguagau

SEQ ID NO: 768399 - RNA, 19 nt, Artificial Sequence
  Description of Artificial Sequence: Synthetic oligonucleotide
  Antisense strand to SEQ ID NO: 768398
aucuaccugccuaaggacu

SEQ ID NO: 768400 - RNA, 19 nt, Artificial Sequence
  Description of Artificial Sequence: Synthetic oligonucleotide
  Sense strand starting at position 2672 of SEQ ID NO: 587123
uguaaaccauuguugauaa

SEQ ID NO: 768401 - RNA, 19 nt, Artificial Sequence
  Description of Artificial Sequence: Synthetic oligonucleotide
  Antisense strand to SEQ ID NO: 768400
uuaucaacaaugguuuaca

SEQ ID NO: 768402 - RNA, 19 nt, Artificial Sequence
  Description of Artificial Sequence: Synthetic oligonucleotide
  Sense strand starting at position 2706 of SEQ ID NO: 587123
auuaaauaucacuggccga

SEQ ID NO: 768403 - RNA, 19 nt, Artificial Sequence
  Description of Artificial Sequence: Synthetic oligonucleotide
  Antisense strand to SEQ ID NO: 768402
ucggccagugauauuuaau

SEQ ID NO: 768404 - RNA, 19 nt, Artificial Sequence
  Description of Artificial Sequence: Synthetic oligonucleotide
  Sense strand starting at position 2938 of SEQ ID NO: 587123
acagcaaagcagugauuaa

SEQ ID NO: 768405 - RNA, 19 nt, Artificial Sequence
  Description of Artificial Sequence: Synthetic oligonucleotide
  Antisense strand to SEQ ID NO: 768404
uuaaucacugcuuugcugu

SEQ ID NO: 768406 - RNA, 19 nt, Artificial Sequence
  Description of Artificial Sequence: Synthetic oligonucleotide
  Sense strand starting at position 2973 of SEQ ID NO: 587123
ccagaauaccuguguugga

SEQ ID NO: 768407 - RNA, 19 nt, Artificial Sequence
  Description of Artificial Sequence: Synthetic oligonucleotide
  Antisense strand to SEQ ID NO: 768406
uccaacacagguauucugg

SEQ ID NO: 768408 - RNA, 19 nt, Artificial Sequence
  Description of Artificial Sequence: Synthetic oligonucleotide
  Sense strand starting at position 2974 of SEQ ID NO: 587123
cagaauaccuguguuggaa

SEQ ID NO: 768409 - RNA, 19 nt, Artificial Sequence
  Description of Artificial Sequence: Synthetic oligonucleotide
  Antisense strand to SEQ ID NO: 768408
uuccaacacagguauucug

SEQ ID NO: 768410 - RNA, 19 nt, Artificial Sequence
  Description of Artificial Sequence: Synthetic oligonucleotide
  Sense strand starting at position 3048 of SEQ ID NO: 587123
gggccacaguuccuuauuu

SEQ ID NO: 768411 - RNA, 19 nt, Artificial Sequence
  Description of Artificial Sequence: Synthetic oligonucleotide
  Antisense strand to SEQ ID NO: 768410
aaauaaggaacuguggccc

SEQ ID NO: 768412 - RNA, 19 nt, Artificial Sequence
  Description of Artificial Sequence: Synthetic oligonucleotide
  Sense strand starting at position 3088 of SEQ ID NO: 587123
gucccuuccucucugugaa

SEQ ID NO: 768413 - RNA, 19 nt, Artificial Sequence
  Description of Artificial Sequence: Synthetic oligonucleotide
  Antisense strand to SEQ ID NO: 768412
uucacagagaggaagggac

SEQ ID NO: 768414 - RNA, 19 nt, Artificial Sequence
  Description of Artificial Sequence: Synthetic oligonucleotide
  Sense strand starting at position 3091 of SEQ ID NO: 587123
ccuuccucucugugaagau

SEQ ID NO: 768415 - RNA, 19 nt, Artificial Sequence
  Description of Artificial Sequence: Synthetic oligonucleotide
  Antisense strand to SEQ ID NO: 768414
aucuucacagagaggaagg

SEQ ID NO: 768416 - RNA, 19 nt, Artificial Sequence
  Description of Artificial Sequence: Synthetic oligonucleotide
  Sense strand starting at position 3153 of SEQ ID NO: 587123
guuaguaaacauugcguga

SEQ ID NO: 768417 - RNA, 19 nt, Artificial Sequence
  Description of Artificial Sequence: Synthetic oligonucleotide
  Antisense strand to SEQ ID NO: 768416
ucacgcaauguuuacuaac

SEQ ID NO: 768418 - RNA, 19 nt, Artificial Sequence
  Description of Artificial Sequence: Synthetic oligonucleotide
  Sense strand starting at position 3157 of SEQ ID NO: 587123
guaaacauugcgugaugca

SEQ ID NO: 768419 - RNA, 19 nt, Artificial Sequence
  Description of Artificial Sequence: Synthetic oligonucleotide
  Antisense strand to SEQ ID NO: 768418
ugcaucacgcaauguuuac

SEQ ID NO: 768420 - RNA, 19 nt, Artificial Sequence
  Description of Artificial Sequence: Synthetic oligonucleotide
  Sense strand starting at position 3158 of SEQ ID NO: 587123
uaaacauugcgugaugcau

SEQ ID NO: 768421 - RNA, 19 nt, Artificial Sequence
  Description of Artificial Sequence: Synthetic oligonucleotide
  Antisense strand to SEQ ID NO: 768420
augcaucacgcaauguuua

SEQ ID NO: 768422 - RNA, 19 nt, Artificial Sequence
  Description of Artificial Sequence: Synthetic oligonucleotide
  Sense strand starting at position 3166 of SEQ ID NO: 587123
gcgugaugcauggucucuu

SEQ ID NO: 768423 - RNA, 19 nt, Artificial Sequence
  Description of Artificial Sequence: Synthetic oligonucleotide
  Antisense strand to SEQ ID NO: 768422
aagagaccaugcaucacgc

SEQ ID NO: 768424 - RNA, 19 nt, Artificial Sequence
  Description of Artificial Sequence: Synthetic oligonucleotide
  Sense strand starting at position 3167 of SEQ ID NO: 587123
cgugaugcauggucucuuu

SEQ ID NO: 768425 - RNA, 19 nt, Artificial Sequence
  Description of Artificial Sequence: Synthetic oligonucleotide
  Antisense strand to SEQ ID NO: 768424
aaagagaccaugcaucacg

SEQ ID NO: 768426 - RNA, 19 nt, Artificial Sequence
  Description of Artificial Sequence: Synthetic oligonucleotide
  Sense strand starting at position 3222 of SEQ ID NO: 587123
ccuuguccucuucgguaaa

SEQ ID NO: 768427 - RNA, 19 nt, Artificial Sequence
  Description of Artificial Sequence: Synthetic oligonucleotide
  Antisense strand to SEQ ID NO: 768426
uuuaccgaagaggacaagg

SEQ ID NO: 768428 - RNA, 19 nt, Artificial Sequence
  Description of Artificial Sequence: Synthetic oligonucleotide
  Sense strand starting at position 3224 of SEQ ID NO: 587123
uuguccucuucgguaaaga

SEQ ID NO: 768429 - RNA, 19 nt, Artificial Sequence
  Description of Artificial Sequence: Synthetic oligonucleotide
  Antisense strand to SEQ ID NO: 768428
ucuuuaccgaagaggacaa

SEQ ID NO: 768430 - RNA, 19 nt, Artificial Sequence
  Description of Artificial Sequence: Synthetic oligonucleotide
  Sense strand starting at position 3225 of SEQ ID NO: 587123
uguccucuucgguaaagaa

SEQ ID NO: 768431 - RNA, 19 nt, Artificial Sequence
  Description of Artificial Sequence: Synthetic oligonucleotide
  Antisense strand to SEQ ID NO: 768430
uucuuuaccgaagaggaca

SEQ ID NO: 768432 - RNA, 19 nt, Artificial Sequence
  Description of Artificial Sequence: Synthetic oligonucleotide
  Sense strand starting at position 3363 of SEQ ID NO: 587123
uaggaagaguuugaggaau

SEQ ID NO: 768433 - RNA, 19 nt, Artificial Sequence
  Description of Artificial Sequence: Synthetic oligonucleotide
  Antisense strand to SEQ ID NO: 768432
auuccucaaacucuuccua

SEQ ID NO: 768434 - RNA, 19 nt, Artificial Sequence
  Description of Artificial Sequence: Synthetic oligonucleotide
  Sense strand starting at position 3770 of SEQ ID NO: 587123
aggaauacauguuuacuga

SEQ ID NO: 768435 - RNA, 19 nt, Artificial Sequence
  Description of Artificial Sequence: Synthetic oligonucleotide
  Antisense strand to SEQ ID NO: 768434
ucaguaaacauguauuccu

SEQ ID NO: 768436 - RNA, 19 nt, Artificial Sequence
  Description of Artificial Sequence: Synthetic oligonucleotide
  Sense strand starting at position 3908 of SEQ ID NO: 587123
gucuuuaucugcuuaaagu

SEQ ID NO: 768437 - RNA, 19 nt, Artificial Sequence
  Description of Artificial Sequence: Synthetic oligonucleotide
  Antisense strand to SEQ ID NO: 768436
acuuuaagcagauaaagac

SEQ ID NO: 768438 - RNA, 19 nt, Artificial Sequence
  Description of Artificial Sequence: Synthetic oligonucleotide
  Sense strand starting at position 2 of SEQ ID NO: 587124
acagcuucugaugauauau

SEQ ID NO: 768439 - RNA, 19 nt, Artificial Sequence
  Description of Artificial Sequence: Synthetic oligonucleotide
  Antisense strand to SEQ ID NO: 768438
auauaucaucagaagcugu

SEQ ID NO: 768440 - RNA, 19 nt, Artificial Sequence
  Description of Artificial Sequence: Synthetic oligonucleotide
  Sense strand starting at position 4 of SEQ ID NO: 587124
agcuucugaugauauauaa

SEQ ID NO: 768441 - RNA, 19 nt, Artificial Sequence
  Description of Artificial Sequence: Synthetic oligonucleotide
  Antisense strand to SEQ ID NO: 768440
uuauauaucaucagaagcu

SEQ ID NO: 768442 - RNA, 19 nt, Artificial Sequence
  Description of Artificial Sequence: Synthetic oligonucleotide
  Sense strand starting at position 365 of SEQ ID NO: 587124
guuggaucuguguggagga

SEQ ID NO: 768443 - RNA, 19 nt, Artificial Sequence
  Description of Artificial Sequence: Synthetic oligonucleotide
  Antisense strand to SEQ ID NO: 768442
uccuccacacagauccaac

SEQ ID NO: 768444 - RNA, 19 nt, Artificial Sequence
  Description of Artificial Sequence: Synthetic oligonucleotide
  Sense strand starting at position 366 of SEQ ID NO: 587124
uuggaucuguguggaggaa

SEQ ID NO: 768445 - RNA, 19 nt, Artificial Sequence
  Description of Artificial Sequence: Synthetic oligonucleotide
  Antisense strand to SEQ ID NO: 768444
uuccuccacacagauccaa

SEQ ID NO: 768446 - RNA, 19 nt, Artificial Sequence
  Description of Artificial Sequence: Synthetic oligonucleotide
  Sense strand starting at position 368 of SEQ ID NO: 587124
ggaucuguguggaggaaug

SEQ ID NO: 768447 - RNA, 19 nt, Artificial Sequence
  Description of Artificial Sequence: Synthetic oligonucleotide
  Antisense strand to SEQ ID NO: 768446
cauuccuccacacagaucc

SEQ ID NO: 768448 - RNA, 19 nt, Artificial Sequence
  Description of Artificial Sequence: Synthetic oligonucleotide
  Sense strand starting at position 394 of SEQ ID NO: 587124
acaaguguuuccuuugcuu

SEQ ID NO: 768449 - RNA, 19 nt, Artificial Sequence
  Description of Artificial Sequence: Synthetic oligonucleotide
  Antisense strand to SEQ ID NO: 768448
aagcaaaggaaacacuugu

SEQ ID NO: 768450 - RNA, 19 nt, Artificial Sequence
  Description of Artificial Sequence: Synthetic oligonucleotide
  Sense strand starting at position 445 of SEQ ID NO: 587124
cccagucucuuauauggua

SEQ ID NO: 768451 - RNA, 19 nt, Artificial Sequence
  Description of Artificial Sequence: Synthetic oligonucleotide
  Antisense strand to SEQ ID NO: 768450
uaccauauaagagacuggg

SEQ ID NO: 768452 - RNA, 19 nt, Artificial Sequence
  Description of Artificial Sequence: Synthetic oligonucleotide
  Sense strand starting at position 459 of SEQ ID NO: 587124
ugguaugucucccuuguua

SEQ ID NO: 768453 - RNA, 19 nt, Artificial Sequence
  Description of Artificial Sequence: Synthetic oligonucleotide
  Antisense strand to SEQ ID NO: 768452
uaacaagggagacauacca

SEQ ID NO: 768454 - RNA, 19 nt, Artificial Sequence
  Description of Artificial Sequence: Synthetic oligonucleotide
  Sense strand starting at position 461 of SEQ ID NO: 587124
guaugucucccuuguuauc

SEQ ID NO: 768455 - RNA, 19 nt, Artificial Sequence
  Description of Artificial Sequence: Synthetic oligonucleotide
  Antisense strand to SEQ ID NO: 768454
gauaacaagggagacauac

SEQ ID NO: 768456 - RNA, 19 nt, Artificial Sequence
  Description of Artificial Sequence: Synthetic oligonucleotide
  Sense strand starting at position 463 of SEQ ID NO: 587124
augucucccuuguuaucaa

SEQ ID NO: 768457 - RNA, 19 nt, Artificial Sequence
  Description of Artificial Sequence: Synthetic oligonucleotide
  Antisense strand to SEQ ID NO: 768456
uugauaacaagggagacau

SEQ ID NO: 768458 - RNA, 19 nt, Artificial Sequence
  Description of Artificial Sequence: Synthetic oligonucleotide
  Sense strand starting at position 464 of SEQ ID NO: 587124
ugucucccuuguuaucaaa

SEQ ID NO: 768459 - RNA, 19 nt, Artificial Sequence
  Description of Artificial Sequence: Synthetic oligonucleotide
  Antisense strand to SEQ ID NO: 768458
uuugauaacaagggagaca

SEQ ID NO: 768460 - RNA, 19 nt, Artificial Sequence
  Description of Artificial Sequence: Synthetic oligonucleotide
  Sense strand starting at position 474 of SEQ ID NO: 587124
guuaucaaaugcuagaaug

SEQ ID NO: 768461 - RNA, 19 nt, Artificial Sequence
  Description of Artificial Sequence: Synthetic oligonucleotide
  Antisense strand to SEQ ID NO: 768460
cauucuagcauuugauaac

SEQ ID NO: 768462 - RNA, 19 nt, Artificial Sequence
  Description of Artificial Sequence: Synthetic oligonucleotide
  Sense strand starting at position 484 of SEQ ID NO: 587124
gcuagaaugcauuauucuu

SEQ ID NO: 768463 - RNA, 19 nt, Artificial Sequence
  Description of Artificial Sequence: Synthetic oligonucleotide
  Antisense strand to SEQ ID NO: 768462
aagaauaaugcauucuagc

SEQ ID NO: 768464 - RNA, 19 nt, Artificial Sequence
  Description of Artificial Sequence: Synthetic oligonucleotide
  Sense strand starting at position 542 of SEQ ID NO: 587124
cucugcauacauugaggua

SEQ ID NO: 768465 - RNA, 19 nt, Artificial Sequence
  Description of Artificial Sequence: Synthetic oligonucleotide
  Antisense strand to SEQ ID NO: 768464
uaccucaauguaugcagag

SEQ ID NO: 768466 - RNA, 19 nt, Artificial Sequence
  Description of Artificial Sequence: Synthetic oligonucleotide
  Sense strand starting at position 545 of SEQ ID NO: 587124
ugcauacauugagguaaua

SEQ ID NO: 768467 - RNA, 19 nt, Artificial Sequence
  Description of Artificial Sequence: Synthetic oligonucleotide
  Antisense strand to SEQ ID NO: 768466
uauuaccucaauguaugca

SEQ ID NO: 768468 - RNA, 19 nt, Artificial Sequence
  Description of Artificial Sequence: Synthetic oligonucleotide
  Sense strand starting at position 558 of SEQ ID NO: 587124
guaauaauauuagcacguu

SEQ ID NO: 768469 - RNA, 19 nt, Artificial Sequence
  Description of Artificial Sequence: Synthetic oligonucleotide
  Antisense strand to SEQ ID NO: 768468
aacgugcuaauauuauuac

SEQ ID NO: 768470 - RNA, 19 nt, Artificial Sequence
  Description of Artificial Sequence: Synthetic oligonucleotide
  Sense strand starting at position 603 of SEQ ID NO: 587124
cuucguaaacaauguaauc

SEQ ID NO: 768471 - RNA, 19 nt, Artificial Sequence
  Description of Artificial Sequence: Synthetic oligonucleotide
  Antisense strand to SEQ ID NO: 768470
gauuacauuguuuacgaag

SEQ ID NO: 768472 - RNA, 19 nt, Artificial Sequence
  Description of Artificial Sequence: Synthetic oligonucleotide
  Sense strand starting at position 628 of SEQ ID NO: 587124
cucauagcauuuccguuau

SEQ ID NO: 768473 - RNA, 19 nt, Artificial Sequence
  Description of Artificial Sequence: Synthetic oligonucleotide
  Antisense strand to SEQ ID NO: 768472
auaacggaaaugcuaugag

SEQ ID NO: 768474 - RNA, 19 nt, Artificial Sequence
  Description of Artificial Sequence: Synthetic oligonucleotide
  Sense strand starting at position 634 of SEQ ID NO: 587124
gcauuuccguuauaagaga

SEQ ID NO: 768475 - RNA, 19 nt, Artificial Sequence
  Description of Artificial Sequence: Synthetic oligonucleotide
  Antisense strand to SEQ ID NO: 768474
ucucuuauaacggaaaugc

SEQ ID NO: 768476 - RNA, 19 nt, Artificial Sequence
  Description of Artificial Sequence: Synthetic oligonucleotide
  Sense strand starting at position 841 of SEQ ID NO: 587124
uugaaugagugacaaagua

SEQ ID NO: 768477 - RNA, 19 nt, Artificial Sequence
  Description of Artificial Sequence: Synthetic oligonucleotide
  Antisense strand to SEQ ID NO: 768476
uacuuugucacucauucaa

SEQ ID NO: 768478 - RNA, 19 nt, Artificial Sequence
  Description of Artificial Sequence: Synthetic oligonucleotide
  Sense strand starting at position 878 of SEQ ID NO: 587124
auguacaacucuucgaaac

SEQ ID NO: 768479 - RNA, 19 nt, Artificial Sequence
  Description of Artificial Sequence: Synthetic oligonucleotide
  Antisense strand to SEQ ID NO: 768478
guuucgaagaguuguacau

SEQ ID NO: 768480 - RNA, 19 nt, Artificial Sequence
  Description of Artificial Sequence: Synthetic oligonucleotide
  Sense strand starting at position 926 of SEQ ID NO: 587124
aggauucugugguuaccuu

SEQ ID NO: 768481 - RNA, 19 nt, Artificial Sequence
  Description of Artificial Sequence: Synthetic oligonucleotide
  Antisense strand to SEQ ID NO: 768480
aagguaaccacagaauccu

SEQ ID NO: 768482 - RNA, 19 nt, Artificial Sequence
  Description of Artificial Sequence: Synthetic oligonucleotide
  Sense strand starting at position 930 of SEQ ID NO: 587124
uucugugguuaccuugaaa

SEQ ID NO: 768483 - RNA, 19 nt, Artificial Sequence
  Description of Artificial Sequence: Synthetic oligonucleotide
  Antisense strand to SEQ ID NO: 768482
uuucaagguaaccacagaa

SEQ ID NO: 768484 - RNA, 19 nt, Artificial Sequence
  Description of Artificial Sequence: Synthetic oligonucleotide
  Sense strand starting at position 953 of SEQ ID NO: 587124
ggcguuaacuaguuucuca

SEQ ID NO: 768485 - RNA, 19 nt, Artificial Sequence
  Description of Artificial Sequence: Synthetic oligonucleotide
  Antisense strand to SEQ ID NO: 768484
ugagaaacuaguuaacgcc

SEQ ID NO: 768486 - RNA, 19 nt, Artificial Sequence
  Description of Artificial Sequence: Synthetic oligonucleotide
  Sense strand starting at position 956 of SEQ ID NO: 587124
guuaacuaguuucucaaac

SEQ ID NO: 768487 - RNA, 19 nt, Artificial Sequence
  Description of Artificial Sequence: Synthetic oligonucleotide
  Antisense strand to SEQ ID NO: 768486
guuugagaaacuaguuaac

SEQ ID NO: 768488 - RNA, 19 nt, Artificial Sequence
  Description of Artificial Sequence: Synthetic oligonucleotide
  Sense strand starting at position 1092 of SEQ ID NO: 587124
ggguuaaaguccuagaugg

SEQ ID NO: 768489 - RNA, 19 nt, Artificial Sequence
  Description of Artificial Sequence: Synthetic oligonucleotide
  Antisense strand to SEQ ID NO: 768488
ccaucuaggacuuuaaccc

SEQ ID NO: 768490 - RNA, 19 nt, Artificial Sequence
  Description of Artificial Sequence: Synthetic oligonucleotide
  Sense strand starting at position 2279 of SEQ ID NO: 587124
cugugcuucccugggcaga

SEQ ID NO: 768491 - RNA, 19 nt, Artificial Sequence
  Description of Artificial Sequence: Synthetic oligonucleotide
  Antisense strand to SEQ ID NO: 768490
ucugcccagggaagcacag

SEQ ID NO: 768492 - RNA, 19 nt, Artificial Sequence
  Description of Artificial Sequence: Synthetic oligonucleotide
  Sense strand starting at position 2423 of SEQ ID NO: 587124
cggacuuggcuccgagaaa

SEQ ID NO: 768493 - RNA, 19 nt, Artificial Sequence
  Description of Artificial Sequence: Synthetic oligonucleotide
  Antisense strand to SEQ ID NO: 768492
uuucucggagccaaguccg

SEQ ID NO: 768494 - RNA, 19 nt, Artificial Sequence
  Description of Artificial Sequence: Synthetic oligonucleotide
  Sense strand starting at position 2424 of SEQ ID NO: 587124
ggacuuggcuccgagaaau

SEQ ID NO: 768495 - RNA, 19 nt, Artificial Sequence
  Description of Artificial Sequence: Synthetic oligonucleotide
  Antisense strand to SEQ ID NO: 768494
auuucucggagccaagucc

SEQ ID NO: 768496 - RNA, 19 nt, Artificial Sequence
  Description of Artificial Sequence: Synthetic oligonucleotide
  Sense strand starting at position 2436 of SEQ ID NO: 587124
gagaaauccuccgcuucgu

SEQ ID NO: 768497 - RNA, 19 nt, Artificial Sequence
  Description of Artificial Sequence: Synthetic oligonucleotide
  Antisense strand to SEQ ID NO: 768496
acgaagcggaggauuucuc

SEQ ID NO: 768498 - RNA, 19 nt, Artificial Sequence
  Description of Artificial Sequence: Synthetic oligonucleotide
  Sense strand starting at position 3066 of SEQ ID NO: 587124
cuaagauuccugggcucaa

SEQ ID NO: 768499 - RNA, 19 nt, Artificial Sequence
  Description of Artificial Sequence: Synthetic oligonucleotide
  Antisense strand to SEQ ID NO: 768498
uugagcccaggaaucuuag

SEQ ID NO: 768500 - RNA, 19 nt, Artificial Sequence
  Description of Artificial Sequence: Synthetic oligonucleotide
  Sense strand starting at position 3217 of SEQ ID NO: 587124
guuuccaacuucugagauc

SEQ ID NO: 768501 - RNA, 19 nt, Artificial Sequence
  Description of Artificial Sequence: Synthetic oligonucleotide
  Antisense strand to SEQ ID NO: 768500
gaucucagaaguuggaaac

SEQ ID NO: 768502 - RNA, 19 nt, Artificial Sequence
  Description of Artificial Sequence: Synthetic oligonucleotide
  Sense strand starting at position 3231 of SEQ ID NO: 587124
agaucaagcgauuguccca

SEQ ID NO: 768503 - RNA, 19 nt, Artificial Sequence
  Description of Artificial Sequence: Synthetic oligonucleotide
  Antisense strand to SEQ ID NO: 768502
ugggacaaucgcuugaucu

SEQ ID NO: 768504 - RNA, 19 nt, Artificial Sequence
  Description of Artificial Sequence: Synthetic oligonucleotide
  Sense strand starting at position 3352 of SEQ ID NO: 587124
agacucacacacugaguua

SEQ ID NO: 768505 - RNA, 19 nt, Artificial Sequence
  Description of Artificial Sequence: Synthetic oligonucleotide
  Antisense strand to SEQ ID NO: 768504
uaacucagugugugagucu

SEQ ID NO: 768506 - RNA, 19 nt, Artificial Sequence
  Description of Artificial Sequence: Synthetic oligonucleotide
  Sense strand starting at position 3406 of SEQ ID NO: 587124
gacggaguuugcucuuaug

SEQ ID NO: 768507 - RNA, 19 nt, Artificial Sequence
  Description of Artificial Sequence: Synthetic oligonucleotide
  Antisense strand to SEQ ID NO: 768506
cauaagagcaaacuccguc

SEQ ID NO: 768508 - RNA, 19 nt, Artificial Sequence
  Description of Artificial Sequence: Synthetic oligonucleotide
  Sense strand starting at position 3593 of SEQ ID NO: 587124
ugaccucagguguggaauu

SEQ ID NO: 768509 - RNA, 19 nt, Artificial Sequence
  Description of Artificial Sequence: Synthetic oligonucleotide
  Antisense strand to SEQ ID NO: 768508
aauuccacaccugagguca

SEQ ID NO: 768510 - RNA, 19 nt, Artificial Sequence
  Description of Artificial Sequence: Synthetic oligonucleotide
  Sense strand starting at position 3594 of SEQ ID NO: 587124
gaccucagguguggaauuu

SEQ ID NO: 768511 - RNA, 19 nt, Artificial Sequence
  Description of Artificial Sequence: Synthetic oligonucleotide
  Antisense strand to SEQ ID NO: 768510
aaauuccacaccugagguc

SEQ ID NO: 768512 - RNA, 19 nt, Artificial Sequence
  Description of Artificial Sequence: Synthetic oligonucleotide
  Sense strand starting at position 3832 of SEQ ID NO: 587124
ugauuaaggaccugguauu

SEQ ID NO: 768513 - RNA, 19 nt, Artificial Sequence
  Description of Artificial Sequence: Synthetic oligonucleotide
  Antisense strand to SEQ ID NO: 768512
aauaccagguccuuaauca

SEQ ID NO: 768514 - RNA, 19 nt, Artificial Sequence
  Description of Artificial Sequence: Synthetic oligonucleotide
  Sense strand starting at position 3846 of SEQ ID NO: 587124
guauucugugcucaccaga

SEQ ID NO: 768515 - RNA, 19 nt, Artificial Sequence
  Description of Artificial Sequence: Synthetic oligonucleotide
  Antisense strand to SEQ ID NO: 768514
ucuggugagcacagaauac

SEQ ID NO: 768516 - RNA, 19 nt, Artificial Sequence
  Description of Artificial Sequence: Synthetic oligonucleotide
  Sense strand starting at position 3973 of SEQ ID NO: 587124
agccuuucuucgcucaaca

SEQ ID NO: 768517 - RNA, 19 nt, Artificial Sequence
  Description of Artificial Sequence: Synthetic oligonucleotide
  Antisense strand to SEQ ID NO: 768516
uguugagcgaagaaaggcu

SEQ ID NO: 768518 - RNA, 19 nt, Artificial Sequence
  Description of Artificial Sequence: Synthetic oligonucleotide
  Sense strand starting at position 566 of SEQ ID NO: 587125
ggcauacgcgccuggaauu

SEQ ID NO: 768519 - RNA, 19 nt, Artificial Sequence
  Description of Artificial Sequence: Synthetic oligonucleotide
  Antisense strand to SEQ ID NO: 768518
aauuccaggcgcguaugcc

SEQ ID NO: 768520 - RNA, 19 nt, Artificial Sequence
  Description of Artificial Sequence: Synthetic oligonucleotide
  Sense strand starting at position 753 of SEQ ID NO: 587125
cgcuacuuggacugaaauc

SEQ ID NO: 768521 - RNA, 19 nt, Artificial Sequence
  Description of Artificial Sequence: Synthetic oligonucleotide
  Antisense strand to SEQ ID NO: 768520
gauuucaguccaaguagcg

SEQ ID NO: 768522 - RNA, 19 nt, Artificial Sequence
  Description of Artificial Sequence: Synthetic oligonucleotide
  Sense strand starting at position 1149 of SEQ ID NO: 587125
gcucuuuaugcucagagcu

SEQ ID NO: 768523 - RNA, 19 nt, Artificial Sequence
  Description of Artificial Sequence: Synthetic oligonucleotide
  Antisense strand to SEQ ID NO: 768522
agcucugagcauaaagagc

SEQ ID NO: 768524 - RNA, 19 nt, Artificial Sequence
  Description of Artificial Sequence: Synthetic oligonucleotide
  Sense strand starting at position 1151 of SEQ ID NO: 587125
ucuuuaugcucagagcuga

SEQ ID NO: 768525 - RNA, 19 nt, Artificial Sequence
  Description of Artificial Sequence: Synthetic oligonucleotide
  Antisense strand to SEQ ID NO: 768524
ucagcucugagcauaaaga

SEQ ID NO: 768526 - RNA, 19 nt, Artificial Sequence
  Description of Artificial Sequence: Synthetic oligonucleotide
  Sense strand starting at position 1251 of SEQ ID NO: 587125
ccgacaaucugagggcuuu

SEQ ID NO: 768527 - RNA, 19 nt, Artificial Sequence
  Description of Artificial Sequence: Synthetic oligonucleotide
  Antisense strand to SEQ ID NO: 768526
aaagcccucagauugucgg

SEQ ID NO: 768528 - RNA, 19 nt, Artificial Sequence
  Description of Artificial Sequence: Synthetic oligonucleotide
  Sense strand starting at position 1444 of SEQ ID NO: 587125
ggaagauguugugccgauc

SEQ ID NO: 768529 - RNA, 19 nt, Artificial Sequence
  Description of Artificial Sequence: Synthetic oligonucleotide
  Antisense strand to SEQ ID NO: 768528
gaucggcacaacaucuucc

SEQ ID NO: 768530 - RNA, 19 nt, Artificial Sequence
  Description of Artificial Sequence: Synthetic oligonucleotide
  Sense strand starting at position 1459 of SEQ ID NO: 587125
gaucucuggagccguguaa

SEQ ID NO: 768531 - RNA, 19 nt, Artificial Sequence
  Description of Artificial Sequence: Synthetic oligonucleotide
  Antisense strand to SEQ ID NO: 768530
uuacacggcuccagagauc

SEQ ID NO: 768532 - RNA, 19 nt, Artificial Sequence
  Description of Artificial Sequence: Synthetic oligonucleotide
  Sense strand starting at position 1769 of SEQ ID NO: 587125
cgaggguuugagggacgaa

SEQ ID NO: 768533 - RNA, 19 nt, Artificial Sequence
  Description of Artificial Sequence: Synthetic oligonucleotide
  Antisense strand to SEQ ID NO: 768532
uucgucccucaaacccucg

SEQ ID NO: 768534 - RNA, 19 nt, Artificial Sequence
  Description of Artificial Sequence: Synthetic oligonucleotide
  Sense strand starting at position 1781 of SEQ ID NO: 587125
ggacgaacagcggaguauu

SEQ ID NO: 768535 - RNA, 19 nt, Artificial Sequence
  Description of Artificial Sequence: Synthetic oligonucleotide
  Antisense strand to SEQ ID NO: 768534
aauacuccgcuguucgucc

SEQ ID NO: 768536 - RNA, 19 nt, Artificial Sequence
  Description of Artificial Sequence: Synthetic oligonucleotide
  Sense strand starting at position 2401 of SEQ ID NO: 587125
ccgcguugcugaguggaau

SEQ ID NO: 768537 - RNA, 19 nt, Artificial Sequence
  Description of Artificial Sequence: Synthetic oligonucleotide
  Antisense strand to SEQ ID NO: 768536
auuccacucagcaacgcgg

SEQ ID NO: 768538 - RNA, 19 nt, Artificial Sequence
  Description of Artificial Sequence: Synthetic oligonucleotide
  Sense strand starting at position 2402 of SEQ ID NO: 587125
cgcguugcugaguggaaua

SEQ ID NO: 768539 - RNA, 19 nt, Artificial Sequence
  Description of Artificial Sequence: Synthetic oligonucleotide
  Antisense strand to SEQ ID NO: 768538
uauuccacucagcaacgcg

SEQ ID NO: 768540 - RNA, 19 nt, Artificial Sequence
  Description of Artificial Sequence: Synthetic oligonucleotide
  Sense strand starting at position 2404 of SEQ ID NO: 587125
cguugcugaguggaauaga

SEQ ID NO: 768541 - RNA, 19 nt, Artificial Sequence
  Description of Artificial Sequence: Synthetic oligonucleotide
  Antisense strand to SEQ ID NO: 768540
ucuauuccacucagcaacg

SEQ ID NO: 768542 - RNA, 19 nt, Artificial Sequence
  Description of Artificial Sequence: Synthetic oligonucleotide
  Sense strand starting at position 2549 of SEQ ID NO: 587125
gcgugaaccugagugcaga

SEQ ID NO: 768543 - RNA, 19 nt, Artificial Sequence
  Description of Artificial Sequence: Synthetic oligonucleotide
  Antisense strand to SEQ ID NO: 768542
ucugcacucagguucacgc

SEQ ID NO: 768544 - RNA, 19 nt, Artificial Sequence
  Description of Artificial Sequence: Synthetic oligonucleotide
  Sense strand starting at position 2661 of SEQ ID NO: 587125
ugguaaucccaucgggaag

SEQ ID NO: 768545 - RNA, 19 nt, Artificial Sequence
  Description of Artificial Sequence: Synthetic oligonucleotide
  Antisense strand to SEQ ID NO: 768544
cuucccgaugggauuacca

SEQ ID NO: 768546 - RNA, 19 nt, Artificial Sequence
  Description of Artificial Sequence: Synthetic oligonucleotide
  Sense strand starting at position 2730 of SEQ ID NO: 587125
ggucgugucuguuucacga

SEQ ID NO: 768547 - RNA, 19 nt, Artificial Sequence
  Description of Artificial Sequence: Synthetic oligonucleotide
  Antisense strand to SEQ ID NO: 768546
ucgugaaacagacacgacc

SEQ ID NO: 768548 - RNA, 19 nt, Artificial Sequence
  Description of Artificial Sequence: Synthetic oligonucleotide
  Sense strand starting at position 2750 of SEQ ID NO: 587125
ccgugcugugucuggagaa

SEQ ID NO: 768549 - RNA, 19 nt, Artificial Sequence
  Description of Artificial Sequence: Synthetic oligonucleotide
  Antisense strand to SEQ ID NO: 768548
uucuccagacacagcacgg

SEQ ID NO: 768550 - RNA, 19 nt, Artificial Sequence
  Description of Artificial Sequence: Synthetic oligonucleotide
  Sense strand starting at position 2751 of SEQ ID NO: 587125
cgugcugugucuggagaaa

SEQ ID NO: 768551 - RNA, 19 nt, Artificial Sequence
  Description of Artificial Sequence: Synthetic oligonucleotide
  Antisense strand to SEQ ID NO: 768550
uuucuccagacacagcacg

SEQ ID NO: 768552 - RNA, 19 nt, Artificial Sequence
  Description of Artificial Sequence: Synthetic oligonucleotide
  Sense strand starting at position 3059 of SEQ ID NO: 587125
gaccguaucuccugccaga

SEQ ID NO: 768553 - RNA, 19 nt, Artificial Sequence
  Description of Artificial Sequence: Synthetic oligonucleotide
  Antisense strand to SEQ ID NO: 768552
ucuggcaggagauacgguc

SEQ ID NO: 768554 - RNA, 19 nt, Artificial Sequence
  Description of Artificial Sequence: Synthetic oligonucleotide
  Sense strand starting at position 3464 of SEQ ID NO: 587125
gcugucugucagggucuua

SEQ ID NO: 768555 - RNA, 19 nt, Artificial Sequence
  Description of Artificial Sequence: Synthetic oligonucleotide
  Antisense strand to SEQ ID NO: 768554
uaagacccugacagacagc

SEQ ID NO: 768556 - RNA, 19 nt, Artificial Sequence
  Description of Artificial Sequence: Synthetic oligonucleotide
  Sense strand starting at position 3572 of SEQ ID NO: 587125
ucacgugcuuucucucuau

SEQ ID NO: 768557 - RNA, 19 nt, Artificial Sequence
  Description of Artificial Sequence: Synthetic oligonucleotide
  Antisense strand to SEQ ID NO: 768556
auagagagaaagcacguga

SEQ ID NO: 768558 - RNA, 19 nt, Artificial Sequence
  Description of Artificial Sequence: Synthetic oligonucleotide
  Sense strand starting at position 3575 of SEQ ID NO: 587125
cgugcuuucucucuauaac

SEQ ID NO: 768559 - RNA, 19 nt, Artificial Sequence
  Description of Artificial Sequence: Synthetic oligonucleotide
  Antisense strand to SEQ ID NO: 768558
guuauagagagaaagcacg

SEQ ID NO: 768560 - RNA, 19 nt, Artificial Sequence
  Description of Artificial Sequence: Synthetic oligonucleotide
  Sense strand starting at position 3613 of SEQ ID NO: 587125
ccaucaguggcucgacuuu

SEQ ID NO: 768561 - RNA, 19 nt, Artificial Sequence
  Description of Artificial Sequence: Synthetic oligonucleotide
  Antisense strand to SEQ ID NO: 768560
aaagucgagccacugaugg

SEQ ID NO: 768562 - RNA, 19 nt, Artificial Sequence
  Description of Artificial Sequence: Synthetic oligonucleotide
  Sense strand starting at position 3622 of SEQ ID NO: 587125
gcucgacuuucccagaaga

SEQ ID NO: 768563 - RNA, 19 nt, Artificial Sequence
  Description of Artificial Sequence: Synthetic oligonucleotide
  Antisense strand to SEQ ID NO: 768562
ucuucugggaaagucgagc

SEQ ID NO: 768564 - RNA, 19 nt, Artificial Sequence
  Description of Artificial Sequence: Synthetic oligonucleotide
  Sense strand starting at position 3787 of SEQ ID NO: 587125
caaggugacaguggagauu

SEQ ID NO: 768565 - RNA, 19 nt, Artificial Sequence
  Description of Artificial Sequence: Synthetic oligonucleotide
  Antisense strand to SEQ ID NO: 768564
aaucuccacugucaccuug

SEQ ID NO: 768566 - RNA, 19 nt, Artificial Sequence
  Description of Artificial Sequence: Synthetic oligonucleotide
  Sense strand starting at position 3965 of SEQ ID NO: 587125
cacguuaccuuccugagga

SEQ ID NO: 768567 - RNA, 19 nt, Artificial Sequence
  Description of Artificial Sequence: Synthetic oligonucleotide
  Antisense strand to SEQ ID NO: 768566
uccucaggaagguaacgug

SEQ ID NO: 768568 - RNA, 19 nt, Artificial Sequence
  Description of Artificial Sequence: Synthetic oligonucleotide
  Sense strand starting at position 18 of SEQ ID NO: 587126
uuuaaagguguugguacau

SEQ ID NO: 768569 - RNA, 19 nt, Artificial Sequence
  Description of Artificial Sequence: Synthetic oligonucleotide
  Antisense strand to SEQ ID NO: 768568
auguaccaacaccuuuaaa

SEQ ID NO: 768570 - RNA, 19 nt, Artificial Sequence
  Description of Artificial Sequence: Synthetic oligonucleotide
  Sense strand starting at position 245 of SEQ ID NO: 587126
agucuacuaaugugagaag

SEQ ID NO: 768571 - RNA, 19 nt, Artificial Sequence
  Description of Artificial Sequence: Synthetic oligonucleotide
  Antisense strand to SEQ ID NO: 768570
cuucucacauuaguagacu

SEQ ID NO: 768572 - RNA, 19 nt, Artificial Sequence
  Description of Artificial Sequence: Synthetic oligonucleotide
  Sense strand starting at position 490 of SEQ ID NO: 587126
gccaucuauguuuaguuau

SEQ ID NO: 768573 - RNA, 19 nt, Artificial Sequence
  Description of Artificial Sequence: Synthetic oligonucleotide
  Antisense strand to SEQ ID NO: 768572
auaacuaaacauagauggc

SEQ ID NO: 768574 - RNA, 19 nt, Artificial Sequence
  Description of Artificial Sequence: Synthetic oligonucleotide
  Sense strand starting at position 517 of SEQ ID NO: 587126
ugaaauggucaaugagagu

SEQ ID NO: 768575 - RNA, 19 nt, Artificial Sequence
  Description of Artificial Sequence: Synthetic oligonucleotide
  Antisense strand to SEQ ID NO: 768574
acucucauugaccauuuca

SEQ ID NO: 768576 - RNA, 19 nt, Artificial Sequence
  Description of Artificial Sequence: Synthetic oligonucleotide
  Sense strand starting at position 631 of SEQ ID NO: 587126
cuucuugcucgugacugaa

SEQ ID NO: 768577 - RNA, 19 nt, Artificial Sequence
  Description of Artificial Sequence: Synthetic oligonucleotide
  Antisense strand to SEQ ID NO: 768576
uucagucacgagcaagaag

SEQ ID NO: 768578 - RNA, 19 nt, Artificial Sequence
  Description of Artificial Sequence: Synthetic oligonucleotide
  Sense strand starting at position 697 of SEQ ID NO: 587126
aggacaaguaaguggcuua

SEQ ID NO: 768579 - RNA, 19 nt, Artificial Sequence
  Description of Artificial Sequence: Synthetic oligonucleotide
  Antisense strand to SEQ ID NO: 768578
uaagccacuuacuuguccu

SEQ ID NO: 768580 - RNA, 19 nt, Artificial Sequence
  Description of Artificial Sequence: Synthetic oligonucleotide
  Sense strand starting at position 698 of SEQ ID NO: 587126
ggacaaguaaguggcuuaa

SEQ ID NO: 768581 - RNA, 19 nt, Artificial Sequence
  Description of Artificial Sequence: Synthetic oligonucleotide
  Antisense strand to SEQ ID NO: 768580
uuaagccacuuacuugucc

SEQ ID NO: 768582 - RNA, 19 nt, Artificial Sequence
  Description of Artificial Sequence: Synthetic oligonucleotide
  Sense strand starting at position 789 of SEQ ID NO: 587126
ccugacguuccuggaauau

SEQ ID NO: 768583 - RNA, 19 nt, Artificial Sequence
  Description of Artificial Sequence: Synthetic oligonucleotide
  Antisense strand to SEQ ID NO: 768582
auauuccaggaacgucagg

SEQ ID NO: 768584 - RNA, 19 nt, Artificial Sequence
  Description of Artificial Sequence: Synthetic oligonucleotide
  Sense strand starting at position 799 of SEQ ID NO: 587126
cuggaauaugcacagcaau

SEQ ID NO: 768585 - RNA, 19 nt, Artificial Sequence
  Description of Artificial Sequence: Synthetic oligonucleotide
  Antisense strand to SEQ ID NO: 768584
auugcugugcauauuccag

SEQ ID NO: 768586 - RNA, 19 nt, Artificial Sequence
  Description of Artificial Sequence: Synthetic oligonucleotide
  Sense strand starting at position 849 of SEQ ID NO: 587126
cagcauuaaccgugauaaa

SEQ ID NO: 768587 - RNA, 19 nt, Artificial Sequence
  Description of Artificial Sequence: Synthetic oligonucleotide
  Antisense strand to SEQ ID NO: 768586
uuuaucacgguuaaugcug

SEQ ID NO: 768588 - RNA, 19 nt, Artificial Sequence
  Description of Artificial Sequence: Synthetic oligonucleotide
  Sense strand starting at position 868 of SEQ ID NO: 587126
acccguuacuuuccaagga

SEQ ID NO: 768589 - RNA, 19 nt, Artificial Sequence
  Description of Artificial Sequence: Synthetic oligonucleotide
  Antisense strand to SEQ ID NO: 768588
uccuuggaaaguaacgggu

SEQ ID NO: 768590 - RNA, 19 nt, Artificial Sequence
  Description of Artificial Sequence: Synthetic oligonucleotide
  Sense strand starting at position 980 of SEQ ID NO: 587126
gggcgucgccgguuaauca

SEQ ID NO: 768591 - RNA, 19 nt, Artificial Sequence
  Description of Artificial Sequence: Synthetic oligonucleotide
  Antisense strand to SEQ ID NO: 768590
ugauuaaccggcgacgccc

SEQ ID NO: 768592 - RNA, 19 nt, Artificial Sequence
  Description of Artificial Sequence: Synthetic oligonucleotide
  Sense strand starting at position 988 of SEQ ID NO: 587126
ccgguuaaucaaugacacu

SEQ ID NO: 768593 - RNA, 19 nt, Artificial Sequence
  Description of Artificial Sequence: Synthetic oligonucleotide
  Antisense strand to SEQ ID NO: 768592
agugucauugauuaaccgg

SEQ ID NO: 768594 - RNA, 19 nt, Artificial Sequence
  Description of Artificial Sequence: Synthetic oligonucleotide
  Sense strand starting at position 1233 of SEQ ID NO: 587126
acaaacuuaugagcaguua

SEQ ID NO: 768595 - RNA, 19 nt, Artificial Sequence
  Description of Artificial Sequence: Synthetic oligonucleotide
  Antisense strand to SEQ ID NO: 768594
uaacugcucauaaguuugu

SEQ ID NO: 768596 - RNA, 19 nt, Artificial Sequence
  Description of Artificial Sequence: Synthetic oligonucleotide
  Sense strand starting at position 1470 of SEQ ID NO: 587126
ugacgcguccaggaagaaa

SEQ ID NO: 768597 - RNA, 19 nt, Artificial Sequence
  Description of Artificial Sequence: Synthetic oligonucleotide
  Antisense strand to SEQ ID NO: 768596
uuucuuccuggacgcguca

SEQ ID NO: 768598 - RNA, 19 nt, Artificial Sequence
  Description of Artificial Sequence: Synthetic oligonucleotide
  Sense strand starting at position 2672 of SEQ ID NO: 587126
uuguguccugcguuugcaa

SEQ ID NO: 768599 - RNA, 19 nt, Artificial Sequence
  Description of Artificial Sequence: Synthetic oligonucleotide
  Antisense strand to SEQ ID NO: 768598
uugcaaacgcaggacacaa

SEQ ID NO: 768600 - RNA, 19 nt, Artificial Sequence
  Description of Artificial Sequence: Synthetic oligonucleotide
  Sense strand starting at position 2673 of SEQ ID NO: 587126
uguguccugcguuugcaaa

SEQ ID NO: 768601 - RNA, 19 nt, Artificial Sequence
  Description of Artificial Sequence: Synthetic oligonucleotide
  Antisense strand to SEQ ID NO: 768600
uuugcaaacgcaggacaca

SEQ ID NO: 768602 - RNA, 19 nt, Artificial Sequence
  Description of Artificial Sequence: Synthetic oligonucleotide
  Sense strand starting at position 2882 of SEQ ID NO: 587126
aguuaaguucguguuguuu

SEQ ID NO: 768603 - RNA, 19 nt, Artificial Sequence
  Description of Artificial Sequence: Synthetic oligonucleotide
  Antisense strand to SEQ ID NO: 768602
aaacaacacgaacuuaacu

SEQ ID NO: 768604 - RNA, 19 nt, Artificial Sequence
  Description of Artificial Sequence: Synthetic oligonucleotide
  Sense strand starting at position 2985 of SEQ ID NO: 587126
uguggauucggucauuaac

SEQ ID NO: 768605 - RNA, 19 nt, Artificial Sequence
  Description of Artificial Sequence: Synthetic oligonucleotide
  Antisense strand to SEQ ID NO: 768604
guuaaugaccgaauccaca

SEQ ID NO: 768606 - RNA, 19 nt, Artificial Sequence
  Description of Artificial Sequence: Synthetic oligonucleotide
  Sense strand starting at position 2987 of SEQ ID NO: 587126
uggauucggucauuaacau

SEQ ID NO: 768607 - RNA, 19 nt, Artificial Sequence
  Description of Artificial Sequence: Synthetic oligonucleotide
  Antisense strand to SEQ ID NO: 768606
auguuaaugaccgaaucca

SEQ ID NO: 768608 - RNA, 19 nt, Artificial Sequence
  Description of Artificial Sequence: Synthetic oligonucleotide
  Sense strand starting at position 2988 of SEQ ID NO: 587126
ggauucggucauuaacauu

SEQ ID NO: 768609 - RNA, 19 nt, Artificial Sequence
  Description of Artificial Sequence: Synthetic oligonucleotide
  Antisense strand to SEQ ID NO: 768608
aauguuaaugaccgaaucc

SEQ ID NO: 768610 - RNA, 19 nt, Artificial Sequence
  Description of Artificial Sequence: Synthetic oligonucleotide
  Sense strand starting at position 3009 of SEQ ID NO: 587126
ccucauugggcuuaucauu

SEQ ID NO: 768611 - RNA, 19 nt, Artificial Sequence
  Description of Artificial Sequence: Synthetic oligonucleotide
  Antisense strand to SEQ ID NO: 768610
aaugauaagcccaaugagg

SEQ ID NO: 768612 - RNA, 19 nt, Artificial Sequence
  Description of Artificial Sequence: Synthetic oligonucleotide
  Sense strand starting at position 3078 of SEQ ID NO: 587126
aucaucugauguuuaucau

SEQ ID NO: 768613 - RNA, 19 nt, Artificial Sequence
  Description of Artificial Sequence: Synthetic oligonucleotide
  Antisense strand to SEQ ID NO: 768612
augauaaacaucagaugau

SEQ ID NO: 768614 - RNA, 19 nt, Artificial Sequence
  Description of Artificial Sequence: Synthetic oligonucleotide
  Sense strand starting at position 3081 of SEQ ID NO: 587126
aucugauguuuaucaucca

SEQ ID NO: 768615 - RNA, 19 nt, Artificial Sequence
  Description of Artificial Sequence: Synthetic oligonucleotide
  Antisense strand to SEQ ID NO: 768614
uggaugauaaacaucagau

SEQ ID NO: 768616 - RNA, 19 nt, Artificial Sequence
  Description of Artificial Sequence: Synthetic oligonucleotide
  Sense strand starting at position 3084 of SEQ ID NO: 587126
ugauguuuaucauccacau

SEQ ID NO: 768617 - RNA, 19 nt, Artificial Sequence
  Description of Artificial Sequence: Synthetic oligonucleotide
  Antisense strand to SEQ ID NO: 768616
auguggaugauaaacauca

SEQ ID NO: 768618 - RNA, 19 nt, Artificial Sequence
  Description of Artificial Sequence: Synthetic oligonucleotide
  Sense strand starting at position 3120 of SEQ ID NO: 587126
uccaucaucuacguaucau

SEQ ID NO: 768619 - RNA, 19 nt, Artificial Sequence
  Description of Artificial Sequence: Synthetic oligonucleotide
  Antisense strand to SEQ ID NO: 768618
augauacguagaugaugga

SEQ ID NO: 768620 - RNA, 19 nt, Artificial Sequence
  Description of Artificial Sequence: Synthetic oligonucleotide
  Sense strand starting at position 3146 of SEQ ID NO: 587126
ucugucauguaccuaucau

SEQ ID NO: 768621 - RNA, 19 nt, Artificial Sequence
  Description of Artificial Sequence: Synthetic oligonucleotide
  Antisense strand to SEQ ID NO: 768620
augauagguacaugacaga

SEQ ID NO: 768622 - RNA, 19 nt, Artificial Sequence
  Description of Artificial Sequence: Synthetic oligonucleotide
  Sense strand starting at position 3179 of SEQ ID NO: 587126
ucgaucaucuaucuguaau

SEQ ID NO: 768623 - RNA, 19 nt, Artificial Sequence
  Description of Artificial Sequence: Synthetic oligonucleotide
  Antisense strand to SEQ ID NO: 768622
auuacagauagaugaucga

SEQ ID NO: 768624 - RNA, 19 nt, Artificial Sequence
  Description of Artificial Sequence: Synthetic oligonucleotide
  Sense strand starting at position 3192 of SEQ ID NO: 587126
uguaaucugucaucuauua

SEQ ID NO: 768625 - RNA, 19 nt, Artificial Sequence
  Description of Artificial Sequence: Synthetic oligonucleotide
  Antisense strand to SEQ ID NO: 768624
uaauagaugacagauuaca

SEQ ID NO: 768626 - RNA, 19 nt, Artificial Sequence
  Description of Artificial Sequence: Synthetic oligonucleotide
  Sense strand starting at position 3259 of SEQ ID NO: 587126
ucugucagguaucuaucau

SEQ ID NO: 768627 - RNA, 19 nt, Artificial Sequence
  Description of Artificial Sequence: Synthetic oligonucleotide
  Antisense strand to SEQ ID NO: 768626
augauagauaccugacaga

SEQ ID NO: 768628 - RNA, 19 nt, Artificial Sequence
  Description of Artificial Sequence: Synthetic oligonucleotide
  Sense strand starting at position 3322 of SEQ ID NO: 587126
ugucaucuauuaucuauga

SEQ ID NO: 768629 - RNA, 19 nt, Artificial Sequence
  Description of Artificial Sequence: Synthetic oligonucleotide
  Antisense strand to SEQ ID NO: 768628
ucauagauaauagaugaca

SEQ ID NO: 768630 - RNA, 19 nt, Artificial Sequence
  Description of Artificial Sequence: Synthetic oligonucleotide
  Sense strand starting at position 3323 of SEQ ID NO: 587126
gucaucuauuaucuaugau

SEQ ID NO: 768631 - RNA, 19 nt, Artificial Sequence
  Description of Artificial Sequence: Synthetic oligonucleotide
  Antisense strand to SEQ ID NO: 768630
aucauagauaauagaugac

SEQ ID NO: 768632 - RNA, 19 nt, Artificial Sequence
  Description of Artificial Sequence: Synthetic oligonucleotide
  Sense strand starting at position 3477 of SEQ ID NO: 587126
cuaucaucucuguaucaug

SEQ ID NO: 768633 - RNA, 19 nt, Artificial Sequence
  Description of Artificial Sequence: Synthetic oligonucleotide
  Antisense strand to SEQ ID NO: 768632
caugauacagagaugauag

SEQ ID NO: 768634 - RNA, 19 nt, Artificial Sequence
  Description of Artificial Sequence: Synthetic oligonucleotide
  Sense strand starting at position 3530 of SEQ ID NO: 587126
gcgaucuauuaccuaucua

SEQ ID NO: 768635 - RNA, 19 nt, Artificial Sequence
  Description of Artificial Sequence: Synthetic oligonucleotide
  Antisense strand to SEQ ID NO: 768634
uagauagguaauagaucgc

SEQ ID NO: 768636 - RNA, 19 nt, Artificial Sequence
  Description of Artificial Sequence: Synthetic oligonucleotide
  Sense strand starting at position 3593 of SEQ ID NO: 587126
ucauuuaucuaugaucugu

SEQ ID NO: 768637 - RNA, 19 nt, Artificial Sequence
  Description of Artificial Sequence: Synthetic oligonucleotide
  Antisense strand to SEQ ID NO: 768636
acagaucauagauaaauga

SEQ ID NO: 768638 - RNA, 19 nt, Artificial Sequence
  Description of Artificial Sequence: Synthetic oligonucleotide
  Sense strand starting at position 3643 of SEQ ID NO: 587126
aucgucuaucuguaaucua

SEQ ID NO: 768639 - RNA, 19 nt, Artificial Sequence
  Description of Artificial Sequence: Synthetic oligonucleotide
  Antisense strand to SEQ ID NO: 768638
uagauuacagauagacgau

SEQ ID NO: 768640 - RNA, 19 nt, Artificial Sequence
  Description of Artificial Sequence: Synthetic oligonucleotide
  Sense strand starting at position 3646 of SEQ ID NO: 587126
gucuaucuguaaucuauca

SEQ ID NO: 768641 - RNA, 19 nt, Artificial Sequence
  Description of Artificial Sequence: Synthetic oligonucleotide
  Antisense strand to SEQ ID NO: 768640
ugauagauuacagauagac

SEQ ID NO: 768642 - RNA, 19 nt, Artificial Sequence
  Description of Artificial Sequence: Synthetic oligonucleotide
  Sense strand starting at position 3689 of SEQ ID NO: 587126
gccuauccaucaucuguga

SEQ ID NO: 768643 - RNA, 19 nt, Artificial Sequence
  Description of Artificial Sequence: Synthetic oligonucleotide
  Antisense strand to SEQ ID NO: 768642
ucacagaugauggauaggc

SEQ ID NO: 768644 - RNA, 19 nt, Artificial Sequence
  Description of Artificial Sequence: Synthetic oligonucleotide
  Sense strand starting at position 3712 of SEQ ID NO: 587126
gcauaucugugaucuaccu

SEQ ID NO: 768645 - RNA, 19 nt, Artificial Sequence
  Description of Artificial Sequence: Synthetic oligonucleotide
  Antisense strand to SEQ ID NO: 768644
agguagaucacagauaugc

SEQ ID NO: 768646 - RNA, 19 nt, Artificial Sequence
  Description of Artificial Sequence: Synthetic oligonucleotide
  Sense strand starting at position 3927 of SEQ ID NO: 587126
aucaucuaucugugaucua

SEQ ID NO: 768647 - RNA, 19 nt, Artificial Sequence
  Description of Artificial Sequence: Synthetic oligonucleotide
  Antisense strand to SEQ ID NO: 768646
uagaucacagauagaugau

SEQ ID NO: 768648 - RNA, 19 nt, Artificial Sequence
  Description of Artificial Sequence: Synthetic oligonucleotide
  Sense strand starting at position 33 of SEQ ID NO: 587127
auggguaguuuauaagcua

SEQ ID NO: 768649 - RNA, 19 nt, Artificial Sequence
  Description of Artificial Sequence: Synthetic oligonucleotide
  Antisense strand to SEQ ID NO: 768648
uagcuuauaaacuacccau

SEQ ID NO: 768650 - RNA, 19 nt, Artificial Sequence
  Description of Artificial Sequence: Synthetic oligonucleotide
  Sense strand starting at position 354 of SEQ ID NO: 587127
gcagcucuugcaggauaua

SEQ ID NO: 768651 - RNA, 19 nt, Artificial Sequence
  Description of Artificial Sequence: Synthetic oligonucleotide
  Antisense strand to SEQ ID NO: 768650
uauauccugcaagagcugc

SEQ ID NO: 768652 - RNA, 19 nt, Artificial Sequence
  Description of Artificial Sequence: Synthetic oligonucleotide
  Sense strand starting at position 357 of SEQ ID NO: 587127
gcucuugcaggauauaacu

SEQ ID NO: 768653 - RNA, 19 nt, Artificial Sequence
  Description of Artificial Sequence: Synthetic oligonucleotide
  Antisense strand to SEQ ID NO: 768652
aguuauauccugcaagagc

SEQ ID NO: 768654 - RNA, 19 nt, Artificial Sequence
  Description of Artificial Sequence: Synthetic oligonucleotide
  Sense strand starting at position 498 of SEQ ID NO: 587127
ggugcaaugguguggucuu

SEQ ID NO: 768655 - RNA, 19 nt, Artificial Sequence
  Description of Artificial Sequence: Synthetic oligonucleotide
  Antisense strand to SEQ ID NO: 768654
aagaccacaccauugcacc

SEQ ID NO: 768656 - RNA, 19 nt, Artificial Sequence
  Description of Artificial Sequence: Synthetic oligonucleotide
  Sense strand starting at position 867 of SEQ ID NO: 587127
ccaauaugcuggucucgaa

SEQ ID NO: 768657 - RNA, 19 nt, Artificial Sequence
  Description of Artificial Sequence: Synthetic oligonucleotide
  Antisense strand to SEQ ID NO: 768656
uucgagaccagcauauugg

SEQ ID NO: 768658 - RNA, 19 nt, Artificial Sequence
  Description of Artificial Sequence: Synthetic oligonucleotide
  Sense strand starting at position 870 of SEQ ID NO: 587127
auaugcuggucucgaauau

SEQ ID NO: 768659 - RNA, 19 nt, Artificial Sequence
  Description of Artificial Sequence: Synthetic oligonucleotide
  Antisense strand to SEQ ID NO: 768658
auauucgagaccagcauau

SEQ ID NO: 768660 - RNA, 19 nt, Artificial Sequence
  Description of Artificial Sequence: Synthetic oligonucleotide
  Sense strand starting at position 874 of SEQ ID NO: 587127
gcuggucucgaauaugcua

SEQ ID NO: 768661 - RNA, 19 nt, Artificial Sequence
  Description of Artificial Sequence: Synthetic oligonucleotide
  Antisense strand to SEQ ID NO: 768660
uagcauauucgagaccagc

SEQ ID NO: 768662 - RNA, 19 nt, Artificial Sequence
  Description of Artificial Sequence: Synthetic oligonucleotide
  Sense strand starting at position 877 of SEQ ID NO: 587127
ggucucgaauaugcuaaua

SEQ ID NO: 768663 - RNA, 19 nt, Artificial Sequence
  Description of Artificial Sequence: Synthetic oligonucleotide
  Antisense strand to SEQ ID NO: 768662
uauuagcauauucgagacc

SEQ ID NO: 768664 - RNA, 19 nt, Artificial Sequence
  Description of Artificial Sequence: Synthetic oligonucleotide
  Sense strand starting at position 882 of SEQ ID NO: 587127
cgaauaugcuaauaggcaa

SEQ ID NO: 768665 - RNA, 19 nt, Artificial Sequence
  Description of Artificial Sequence: Synthetic oligonucleotide
  Antisense strand to SEQ ID NO: 768664
uugccuauuagcauauucg

SEQ ID NO: 768666 - RNA, 19 nt, Artificial Sequence
  Description of Artificial Sequence: Synthetic oligonucleotide
  Sense strand starting at position 1052 of SEQ ID NO: 587127
auauguuaagugcggguau

SEQ ID NO: 768667 - RNA, 19 nt, Artificial Sequence
  Description of Artificial Sequence: Synthetic oligonucleotide
  Antisense strand to SEQ ID NO: 768666
auacccgcacuuaacauau

SEQ ID NO: 768668 - RNA, 19 nt, Artificial Sequence
  Description of Artificial Sequence: Synthetic oligonucleotide
  Sense strand starting at position 1063 of SEQ ID NO: 587127
gcggguaucuucuuccaca

SEQ ID NO: 768669 - RNA, 19 nt, Artificial Sequence
  Description of Artificial Sequence: Synthetic oligonucleotide
  Antisense strand to SEQ ID NO: 768668
uguggaagaagauacccgc

SEQ ID NO: 768670 - RNA, 19 nt, Artificial Sequence
  Description of Artificial Sequence: Synthetic oligonucleotide
  Sense strand starting at position 1064 of SEQ ID NO: 587127
cggguaucuucuuccacag

SEQ ID NO: 768671 - RNA, 19 nt, Artificial Sequence
  Description of Artificial Sequence: Synthetic oligonucleotide
  Antisense strand to SEQ ID NO: 768670
cuguggaagaagauacccg

SEQ ID NO: 768672 - RNA, 19 nt, Artificial Sequence
  Description of Artificial Sequence: Synthetic oligonucleotide
  Sense strand starting at position 1087 of SEQ ID NO: 587127
gucaaauucguguuugcca

SEQ ID NO: 768673 - RNA, 19 nt, Artificial Sequence
  Description of Artificial Sequence: Synthetic oligonucleotide
  Antisense strand to SEQ ID NO: 768672
uggcaaacacgaauuugac

SEQ ID NO: 768674 - RNA, 19 nt, Artificial Sequence
  Description of Artificial Sequence: Synthetic oligonucleotide
  Sense strand starting at position 1092 of SEQ ID NO: 587127
auucguguuugccagcaaa

SEQ ID NO: 768675 - RNA, 19 nt, Artificial Sequence
  Description of Artificial Sequence: Synthetic oligonucleotide
  Antisense strand to SEQ ID NO: 768674
uuugcuggcaaacacgaau

SEQ ID NO: 768676 - RNA, 19 nt, Artificial Sequence
  Description of Artificial Sequence: Synthetic oligonucleotide
  Sense strand starting at position 1094 of SEQ ID NO: 587127
ucguguuugccagcaaaug

SEQ ID NO: 768677 - RNA, 19 nt, Artificial Sequence
  Description of Artificial Sequence: Synthetic oligonucleotide
  Antisense strand to SEQ ID NO: 768676
cauuugcuggcaaacacga

SEQ ID NO: 768678 - RNA, 19 nt, Artificial Sequence
  Description of Artificial Sequence: Synthetic oligonucleotide
  Sense strand starting at position 1095 of SEQ ID NO: 587127
cguguuugccagcaaaugu

SEQ ID NO: 768679 - RNA, 19 nt, Artificial Sequence
  Description of Artificial Sequence: Synthetic oligonucleotide
  Antisense strand to SEQ ID NO: 768678
acauuugcuggcaaacacg

SEQ ID NO: 768680 - RNA, 19 nt, Artificial Sequence
  Description of Artificial Sequence: Synthetic oligonucleotide
  Sense strand starting at position 1120 of SEQ ID NO: 587127
cccaguuaagucugcaaau

SEQ ID NO: 768681 - RNA, 19 nt, Artificial Sequence
  Description of Artificial Sequence: Synthetic oligonucleotide
  Antisense strand to SEQ ID NO: 768680
auuugcagacuuaacuggg

SEQ ID NO: 768682 - RNA, 19 nt, Artificial Sequence
  Description of Artificial Sequence: Synthetic oligonucleotide
  Sense strand starting at position 1121 of SEQ ID NO: 587127
ccaguuaagucugcaaauu

SEQ ID NO: 768683 - RNA, 19 nt, Artificial Sequence
  Description of Artificial Sequence: Synthetic oligonucleotide
  Antisense strand to SEQ ID NO: 768682
aauuugcagacuuaacugg

SEQ ID NO: 768684 - RNA, 19 nt, Artificial Sequence
  Description of Artificial Sequence: Synthetic oligonucleotide
  Sense strand starting at position 2350 of SEQ ID NO: 587127
gacuuaaaggagcggucua

SEQ ID NO: 768685 - RNA, 19 nt, Artificial Sequence
  Description of Artificial Sequence: Synthetic oligonucleotide
  Antisense strand to SEQ ID NO: 768684
uagaccgcuccuuuaaguc

SEQ ID NO: 768686 - RNA, 19 nt, Artificial Sequence
  Description of Artificial Sequence: Synthetic oligonucleotide
  Sense strand starting at position 2351 of SEQ ID NO: 587127
acuuaaaggagcggucuaa

SEQ ID NO: 768687 - RNA, 19 nt, Artificial Sequence
  Description of Artificial Sequence: Synthetic oligonucleotide
  Antisense strand to SEQ ID NO: 768686
uuagaccgcuccuuuaagu

SEQ ID NO: 768688 - RNA, 19 nt, Artificial Sequence
  Description of Artificial Sequence: Synthetic oligonucleotide
  Sense strand starting at position 2467 of SEQ ID NO: 587127
guuguauauuucugaccca

SEQ ID NO: 768689 - RNA, 19 nt, Artificial Sequence
  Description of Artificial Sequence: Synthetic oligonucleotide
  Antisense strand to SEQ ID NO: 768688
ugggucagaaauauacaac

SEQ ID NO: 768690 - RNA, 19 nt, Artificial Sequence
  Description of Artificial Sequence: Synthetic oligonucleotide
  Sense strand starting at position 2559 of SEQ ID NO: 587127
uucgguuagaccugugcaa

SEQ ID NO: 768691 - RNA, 19 nt, Artificial Sequence
  Description of Artificial Sequence: Synthetic oligonucleotide
  Antisense strand to SEQ ID NO: 768690
uugcacaggucuaaccgaa

SEQ ID NO: 768692 - RNA, 19 nt, Artificial Sequence
  Description of Artificial Sequence: Synthetic oligonucleotide
  Sense strand starting at position 3599 of SEQ ID NO: 587127
cuugcaccucuugguaaga

SEQ ID NO: 768693 - RNA, 19 nt, Artificial Sequence
  Description of Artificial Sequence: Synthetic oligonucleotide
  Antisense strand to SEQ ID NO: 768692
ucuuaccaagaggugcaag

SEQ ID NO: 768694 - RNA, 19 nt, Artificial Sequence
  Description of Artificial Sequence: Synthetic oligonucleotide
  Sense strand starting at position 3600 of SEQ ID NO: 587127
uugcaccucuugguaagaa

SEQ ID NO: 768695 - RNA, 19 nt, Artificial Sequence
  Description of Artificial Sequence: Synthetic oligonucleotide
  Antisense strand to SEQ ID NO: 768694
uucuuaccaagaggugcaa

SEQ ID NO: 768696 - RNA, 19 nt, Artificial Sequence
  Description of Artificial Sequence: Synthetic oligonucleotide
  Sense strand starting at position 3737 of SEQ ID NO: 587127
uacgaagucuauugcuacu

SEQ ID NO: 768697 - RNA, 19 nt, Artificial Sequence
  Description of Artificial Sequence: Synthetic oligonucleotide
  Antisense strand to SEQ ID NO: 768696
aguagcaauagacuucgua

SEQ ID NO: 768698 - RNA, 19 nt, Artificial Sequence
  Description of Artificial Sequence: Synthetic oligonucleotide
  Sense strand starting at position 3739 of SEQ ID NO: 587127
cgaagucuauugcuacuua

SEQ ID NO: 768699 - RNA, 19 nt, Artificial Sequence
  Description of Artificial Sequence: Synthetic oligonucleotide
  Antisense strand to SEQ ID NO: 768698
uaaguagcaauagacuucg

SEQ ID NO: 768700 - RNA, 19 nt, Artificial Sequence
  Description of Artificial Sequence: Synthetic oligonucleotide
  Sense strand starting at position 87 of SEQ ID NO: 587128
auuagaaugcauuaggcuu

SEQ ID NO: 768701 - RNA, 19 nt, Artificial Sequence
  Description of Artificial Sequence: Synthetic oligonucleotide
  Antisense strand to SEQ ID NO: 768700
aagccuaaugcauucuaau

SEQ ID NO: 768702 - RNA, 19 nt, Artificial Sequence
  Description of Artificial Sequence: Synthetic oligonucleotide
  Sense strand starting at position 279 of SEQ ID NO: 587128
gacacugagugcucugguu

SEQ ID NO: 768703 - RNA, 19 nt, Artificial Sequence
  Description of Artificial Sequence: Synthetic oligonucleotide
  Antisense strand to SEQ ID NO: 768702
aaccagagcacucaguguc

SEQ ID NO: 768704 - RNA, 19 nt, Artificial Sequence
  Description of Artificial Sequence: Synthetic oligonucleotide
  Sense strand starting at position 303 of SEQ ID NO: 587128
ggcaaauuaucucccuguu

SEQ ID NO: 768705 - RNA, 19 nt, Artificial Sequence
  Description of Artificial Sequence: Synthetic oligonucleotide
  Antisense strand to SEQ ID NO: 768704
aacagggagauaauuugcc

SEQ ID NO: 768706 - RNA, 19 nt, Artificial Sequence
  Description of Artificial Sequence: Synthetic oligonucleotide
  Sense strand starting at position 382 of SEQ ID NO: 587128
gccauagcauucuuccaga

SEQ ID NO: 768707 - RNA, 19 nt, Artificial Sequence
  Description of Artificial Sequence: Synthetic oligonucleotide
  Antisense strand to SEQ ID NO: 768706
ucuggaagaaugcuauggc

SEQ ID NO: 768708 - RNA, 19 nt, Artificial Sequence
  Description of Artificial Sequence: Synthetic oligonucleotide
  Sense strand starting at position 502 of SEQ ID NO: 587128
ccuagagucaauggaaguu

SEQ ID NO: 768709 - RNA, 19 nt, Artificial Sequence
  Description of Artificial Sequence: Synthetic oligonucleotide
  Antisense strand to SEQ ID NO: 768708
aacuuccauugacucuagg

SEQ ID NO: 768710 - RNA, 19 nt, Artificial Sequence
  Description of Artificial Sequence: Synthetic oligonucleotide
  Sense strand starting at position 534 of SEQ ID NO: 587128
aagcaauguccuggaaugu

SEQ ID NO: 768711 - RNA, 19 nt, Artificial Sequence
  Description of Artificial Sequence: Synthetic oligonucleotide
  Antisense strand to SEQ ID NO: 768710
acauuccaggacauugcuu

SEQ ID NO: 768712 - RNA, 19 nt, Artificial Sequence
  Description of Artificial Sequence: Synthetic oligonucleotide
  Sense strand starting at position 535 of SEQ ID NO: 587128
agcaauguccuggaauguu

SEQ ID NO: 768713 - RNA, 19 nt, Artificial Sequence
  Description of Artificial Sequence: Synthetic oligonucleotide
  Antisense strand to SEQ ID NO: 768712
aacauuccaggacauugcu

SEQ ID NO: 768714 - RNA, 19 nt, Artificial Sequence
  Description of Artificial Sequence: Synthetic oligonucleotide
  Sense strand starting at position 672 of SEQ ID NO: 587128
caaagcaugccucgaaagu

SEQ ID NO: 768715 - RNA, 19 nt, Artificial Sequence
  Description of Artificial Sequence: Synthetic oligonucleotide
  Antisense strand to SEQ ID NO: 768714
acuuucgaggcaugcuuug

SEQ ID NO: 768716 - RNA, 19 nt, Artificial Sequence
  Description of Artificial Sequence: Synthetic oligonucleotide
  Sense strand starting at position 722 of SEQ ID NO: 587128
gcacaaacacuugguguuu

SEQ ID NO: 768717 - RNA, 19 nt, Artificial Sequence
  Description of Artificial Sequence: Synthetic oligonucleotide
  Antisense strand to SEQ ID NO: 768716
aaacaccaaguguuugugc

SEQ ID NO: 768718 - RNA, 19 nt, Artificial Sequence
  Description of Artificial Sequence: Synthetic oligonucleotide
  Sense strand starting at position 737 of SEQ ID NO: 587128
guuucuuucccucaggaaa

SEQ ID NO: 768719 - RNA, 19 nt, Artificial Sequence
  Description of Artificial Sequence: Synthetic oligonucleotide
  Antisense strand to SEQ ID NO: 768718
uuuccugagggaaagaaac

SEQ ID NO: 768720 - RNA, 19 nt, Artificial Sequence
  Description of Artificial Sequence: Synthetic oligonucleotide
  Sense strand starting at position 759 of SEQ ID NO: 587128
gucaauaagcucuggucua

SEQ ID NO: 768721 - RNA, 19 nt, Artificial Sequence
  Description of Artificial Sequence: Synthetic oligonucleotide
  Antisense strand to SEQ ID NO: 768720
uagaccagagcuuauugac

SEQ ID NO: 768722 - RNA, 19 nt, Artificial Sequence
  Description of Artificial Sequence: Synthetic oligonucleotide
  Sense strand starting at position 1387 of SEQ ID NO: 587128
gugccucugcuaguuauua

SEQ ID NO: 768723 - RNA, 19 nt, Artificial Sequence
  Description of Artificial Sequence: Synthetic oligonucleotide
  Antisense strand to SEQ ID NO: 768722
uaauaacuagcagaggcac

SEQ ID NO: 768724 - RNA, 19 nt, Artificial Sequence
  Description of Artificial Sequence: Synthetic oligonucleotide
  Sense strand starting at position 1730 of SEQ ID NO: 587128
gauggaucuccaugcuuac

SEQ ID NO: 768725 - RNA, 19 nt, Artificial Sequence
  Description of Artificial Sequence: Synthetic oligonucleotide
  Antisense strand to SEQ ID NO: 768724
guaagcauggagauccauc

SEQ ID NO: 768726 - RNA, 19 nt, Artificial Sequence
  Description of Artificial Sequence: Synthetic oligonucleotide
  Sense strand starting at position 1733 of SEQ ID NO: 587128
ggaucuccaugcuuacaca

SEQ ID NO: 768727 - RNA, 19 nt, Artificial Sequence
  Description of Artificial Sequence: Synthetic oligonucleotide
  Antisense strand to SEQ ID NO: 768726
uguguaagcauggagaucc

SEQ ID NO: 768728 - RNA, 19 nt, Artificial Sequence
  Description of Artificial Sequence: Synthetic oligonucleotide
  Sense strand starting at position 2031 of SEQ ID NO: 587128
ggcugagucacucagccau

SEQ ID NO: 768729 - RNA, 19 nt, Artificial Sequence
  Description of Artificial Sequence: Synthetic oligonucleotide
  Antisense strand to SEQ ID NO: 768728
auggcugagugacucagcc

SEQ ID NO: 768730 - RNA, 19 nt, Artificial Sequence
  Description of Artificial Sequence: Synthetic oligonucleotide
  Sense strand starting at position 2037 of SEQ ID NO: 587128
gucacucagccaugcucaa

SEQ ID NO: 768731 - RNA, 19 nt, Artificial Sequence
  Description of Artificial Sequence: Synthetic oligonucleotide
  Antisense strand to SEQ ID NO: 768730
uugagcauggcugagugac

SEQ ID NO: 768732 - RNA, 19 nt, Artificial Sequence
  Description of Artificial Sequence: Synthetic oligonucleotide
  Sense strand starting at position 2091 of SEQ ID NO: 587128
aggauuuccuccuagacua

SEQ ID NO: 768733 - RNA, 19 nt, Artificial Sequence
  Description of Artificial Sequence: Synthetic oligonucleotide
  Antisense strand to SEQ ID NO: 768732
uagucuaggaggaaauccu

SEQ ID NO: 768734 - RNA, 19 nt, Artificial Sequence
  Description of Artificial Sequence: Synthetic oligonucleotide
  Sense strand starting at position 2149 of SEQ ID NO: 587128
cugcaaauugcugacaaau

SEQ ID NO: 768735 - RNA, 19 nt, Artificial Sequence
  Description of Artificial Sequence: Synthetic oligonucleotide
  Antisense strand to SEQ ID NO: 768734
auuugucagcaauuugcag

SEQ ID NO: 768736 - RNA, 19 nt, Artificial Sequence
  Description of Artificial Sequence: Synthetic oligonucleotide
  Sense strand starting at position 2260 of SEQ ID NO: 587128
guguuauugcuacagcaaa

SEQ ID NO: 768737 - RNA, 19 nt, Artificial Sequence
  Description of Artificial Sequence: Synthetic oligonucleotide
  Antisense strand to SEQ ID NO: 768736
uuugcuguagcaauaacac

SEQ ID NO: 768738 - RNA, 19 nt, Artificial Sequence
  Description of Artificial Sequence: Synthetic oligonucleotide
  Sense strand starting at position 2280 of SEQ ID NO: 587128
augacaaaugcuugacaau

SEQ ID NO: 768739 - RNA, 19 nt, Artificial Sequence
  Description of Artificial Sequence: Synthetic oligonucleotide
  Antisense strand to SEQ ID NO: 768738
auugucaagcauuugucau

SEQ ID NO: 768740 - RNA, 19 nt, Artificial Sequence
  Description of Artificial Sequence: Synthetic oligonucleotide
  Sense strand starting at position 2352 of SEQ ID NO: 587128
acaguauaggcagacaagu

SEQ ID NO: 768741 - RNA, 19 nt, Artificial Sequence
  Description of Artificial Sequence: Synthetic oligonucleotide
  Antisense strand to SEQ ID NO: 768740
acuugucugccuauacugu

SEQ ID NO: 768742 - RNA, 19 nt, Artificial Sequence
  Description of Artificial Sequence: Synthetic oligonucleotide
  Sense strand starting at position 2354 of SEQ ID NO: 587128
aguauaggcagacaaguua

SEQ ID NO: 768743 - RNA, 19 nt, Artificial Sequence
  Description of Artificial Sequence: Synthetic oligonucleotide
  Antisense strand to SEQ ID NO: 768742
uaacuugucugccuauacu

SEQ ID NO: 768744 - RNA, 19 nt, Artificial Sequence
  Description of Artificial Sequence: Synthetic oligonucleotide
  Sense strand starting at position 2438 of SEQ ID NO: 587128
gcugcaguuccucuguuau

SEQ ID NO: 768745 - RNA, 19 nt, Artificial Sequence
  Description of Artificial Sequence: Synthetic oligonucleotide
  Antisense strand to SEQ ID NO: 768744
auaacagaggaacugcagc

SEQ ID NO: 768746 - RNA, 19 nt, Artificial Sequence
  Description of Artificial Sequence: Synthetic oligonucleotide
  Sense strand starting at position 2721 of SEQ ID NO: 587128
augauagaucuaggccuaa

SEQ ID NO: 768747 - RNA, 19 nt, Artificial Sequence
  Description of Artificial Sequence: Synthetic oligonucleotide
  Antisense strand to SEQ ID NO: 768746
uuaggccuagaucuaucau

SEQ ID NO: 768748 - RNA, 19 nt, Artificial Sequence
  Description of Artificial Sequence: Synthetic oligonucleotide
  Sense strand starting at position 2733 of SEQ ID NO: 587128
ggccuaacauuucugguuu

SEQ ID NO: 768749 - RNA, 19 nt, Artificial Sequence
  Description of Artificial Sequence: Synthetic oligonucleotide
  Antisense strand to SEQ ID NO: 768748
aaaccagaaauguuaggcc

SEQ ID NO: 768750 - RNA, 19 nt, Artificial Sequence
  Description of Artificial Sequence: Synthetic oligonucleotide
  Sense strand starting at position 2773 of SEQ ID NO: 587128
cgaaaccaaugauacaaau

SEQ ID NO: 768751 - RNA, 19 nt, Artificial Sequence
  Description of Artificial Sequence: Synthetic oligonucleotide
  Antisense strand to SEQ ID NO: 768750
auuuguaucauugguuucg

SEQ ID NO: 768752 - RNA, 19 nt, Artificial Sequence
  Description of Artificial Sequence: Synthetic oligonucleotide
  Sense strand starting at position 2949 of SEQ ID NO: 587128
cccugauaucucugugcuc

SEQ ID NO: 768753 - RNA, 19 nt, Artificial Sequence
  Description of Artificial Sequence: Synthetic oligonucleotide
  Antisense strand to SEQ ID NO: 768752
gagcacagagauaucaggg

SEQ ID NO: 768754 - RNA, 19 nt, Artificial Sequence
  Description of Artificial Sequence: Synthetic oligonucleotide
  Sense strand starting at position 3051 of SEQ ID NO: 587128
cuagcaacgaggcaucauu

SEQ ID NO: 768755 - RNA, 19 nt, Artificial Sequence
  Description of Artificial Sequence: Synthetic oligonucleotide
  Antisense strand to SEQ ID NO: 768754
aaugaugccucguugcuag

SEQ ID NO: 768756 - RNA, 19 nt, Artificial Sequence
  Description of Artificial Sequence: Synthetic oligonucleotide
  Sense strand starting at position 3182 of SEQ ID NO: 587128
aaggcauguccuggaggga

SEQ ID NO: 768757 - RNA, 19 nt, Artificial Sequence
  Description of Artificial Sequence: Synthetic oligonucleotide
  Antisense strand to SEQ ID NO: 768756
ucccuccaggacaugccuu

SEQ ID NO: 768758 - RNA, 19 nt, Artificial Sequence
  Description of Artificial Sequence: Synthetic oligonucleotide
  Sense strand starting at position 3183 of SEQ ID NO: 587128
aggcauguccuggagggau

SEQ ID NO: 768759 - RNA, 19 nt, Artificial Sequence
  Description of Artificial Sequence: Synthetic oligonucleotide
  Antisense strand to SEQ ID NO: 768758
aucccuccaggacaugccu

SEQ ID NO: 768760 - RNA, 19 nt, Artificial Sequence
  Description of Artificial Sequence: Synthetic oligonucleotide
  Sense strand starting at position 3339 of SEQ ID NO: 587128
gagguaugccaguaagagu

SEQ ID NO: 768761 - RNA, 19 nt, Artificial Sequence
  Description of Artificial Sequence: Synthetic oligonucleotide
  Antisense strand to SEQ ID NO: 768760
acucuuacuggcauaccuc

SEQ ID NO: 768762 - RNA, 19 nt, Artificial Sequence
  Description of Artificial Sequence: Synthetic oligonucleotide
  Sense strand starting at position 3361 of SEQ ID NO: 587128
aucucuuauugagagauag

SEQ ID NO: 768763 - RNA, 19 nt, Artificial Sequence
  Description of Artificial Sequence: Synthetic oligonucleotide
  Antisense strand to SEQ ID NO: 768762
cuaucucucaauaagagau

SEQ ID NO: 768764 - RNA, 19 nt, Artificial Sequence
  Description of Artificial Sequence: Synthetic oligonucleotide
  Sense strand starting at position 3391 of SEQ ID NO: 587128
uuccaaguggcuggucaau

SEQ ID NO: 768765 - RNA, 19 nt, Artificial Sequence
  Description of Artificial Sequence: Synthetic oligonucleotide
  Antisense strand to SEQ ID NO: 768764
auugaccagccacuuggaa

SEQ ID NO: 768766 - RNA, 19 nt, Artificial Sequence
  Description of Artificial Sequence: Synthetic oligonucleotide
  Sense strand starting at position 3424 of SEQ ID NO: 587128
agguuacacaugugugaug

SEQ ID NO: 768767 - RNA, 19 nt, Artificial Sequence
  Description of Artificial Sequence: Synthetic oligonucleotide
  Antisense strand to SEQ ID NO: 768766
caucacacauguguaaccu

SEQ ID NO: 768768 - RNA, 19 nt, Artificial Sequence
  Description of Artificial Sequence: Synthetic oligonucleotide
  Sense strand starting at position 3610 of SEQ ID NO: 587128
ggguaccauuaguggauuu

SEQ ID NO: 768769 - RNA, 19 nt, Artificial Sequence
  Description of Artificial Sequence: Synthetic oligonucleotide
  Antisense strand to SEQ ID NO: 768768
aaauccacuaaugguaccc

SEQ ID NO: 768770 - RNA, 19 nt, Artificial Sequence
  Description of Artificial Sequence: Synthetic oligonucleotide
  Sense strand starting at position 3690 of SEQ ID NO: 587128
gaaacaucccaaggacugu

SEQ ID NO: 768771 - RNA, 19 nt, Artificial Sequence
  Description of Artificial Sequence: Synthetic oligonucleotide
  Antisense strand to SEQ ID NO: 768770
acaguccuugggauguuuc

SEQ ID NO: 768772 - RNA, 19 nt, Artificial Sequence
  Description of Artificial Sequence: Synthetic oligonucleotide
  Sense strand starting at position 3772 of SEQ ID NO: 587128
ucuagaaacuuugaguaaa

SEQ ID NO: 768773 - RNA, 19 nt, Artificial Sequence
  Description of Artificial Sequence: Synthetic oligonucleotide
  Antisense strand to SEQ ID NO: 768772
uuuacucaaaguuucuaga

SEQ ID NO: 768774 - RNA, 19 nt, Artificial Sequence
  Description of Artificial Sequence: Synthetic oligonucleotide
  Sense strand starting at position 3803 of SEQ ID NO: 587128
uuggguugccgaggaugua

SEQ ID NO: 768775 - RNA, 19 nt, Artificial Sequence
  Description of Artificial Sequence: Synthetic oligonucleotide
  Antisense strand to SEQ ID NO: 768774
uacauccucggcaacccaa

SEQ ID NO: 768776 - RNA, 19 nt, Artificial Sequence
  Description of Artificial Sequence: Synthetic oligonucleotide
  Sense strand starting at position 3957 of SEQ ID NO: 587128
ggaggaggucucuguuaga

SEQ ID NO: 768777 - RNA, 19 nt, Artificial Sequence
  Description of Artificial Sequence: Synthetic oligonucleotide
  Antisense strand to SEQ ID NO: 768776
ucuaacagagaccuccucc

SEQ ID NO: 768778 - RNA, 19 nt, Artificial Sequence
  Description of Artificial Sequence: Synthetic oligonucleotide
  Sense strand starting at position 3971 of SEQ ID NO: 587128
uuagacaacugggucgaua

SEQ ID NO: 768779 - RNA, 19 nt, Artificial Sequence
  Description of Artificial Sequence: Synthetic oligonucleotide
  Antisense strand to SEQ ID NO: 768778
uaucgacccaguugucuaa

SEQ ID NO: 768780 - RNA, 19 nt, Artificial Sequence
  Description of Artificial Sequence: Synthetic oligonucleotide
  Sense strand starting at position 416 of SEQ ID NO: 587129
uggugaguccaagaucucu

SEQ ID NO: 768781 - RNA, 19 nt, Artificial Sequence
  Description of Artificial Sequence: Synthetic oligonucleotide
  Antisense strand to SEQ ID NO: 768780
agagaucuuggacucacca

SEQ ID NO: 768782 - RNA, 19 nt, Artificial Sequence
  Description of Artificial Sequence: Synthetic oligonucleotide
  Sense strand starting at position 424 of SEQ ID NO: 587129
ccaagaucucucggccuga

SEQ ID NO: 768783 - RNA, 19 nt, Artificial Sequence
  Description of Artificial Sequence: Synthetic oligonucleotide
  Antisense strand to SEQ ID NO: 768782
ucaggccgagagaucuugg

SEQ ID NO: 768784 - RNA, 19 nt, Artificial Sequence
  Description of Artificial Sequence: Synthetic oligonucleotide
  Sense strand starting at position 615 of SEQ ID NO: 587129
gcaggaaucucacugacgu

SEQ ID NO: 768785 - RNA, 19 nt, Artificial Sequence
  Description of Artificial Sequence: Synthetic oligonucleotide
  Antisense strand to SEQ ID NO: 768784
acgucagugagauuccugc

SEQ ID NO: 768786 - RNA, 19 nt, Artificial Sequence
  Description of Artificial Sequence: Synthetic oligonucleotide
  Sense strand starting at position 722 of SEQ ID NO: 587129
cagccuucuggagguaaca

SEQ ID NO: 768787 - RNA, 19 nt, Artificial Sequence
  Description of Artificial Sequence: Synthetic oligonucleotide
  Antisense strand to SEQ ID NO: 768786
uguuaccuccagaaggcug

SEQ ID NO: 768788 - RNA, 19 nt, Artificial Sequence
  Description of Artificial Sequence: Synthetic oligonucleotide
  Sense strand starting at position 724 of SEQ ID NO: 587129
gccuucuggagguaacaca

SEQ ID NO: 768789 - RNA, 19 nt, Artificial Sequence
  Description of Artificial Sequence: Synthetic oligonucleotide
  Antisense strand to SEQ ID NO: 768788
uguguuaccuccagaaggc

SEQ ID NO: 768790 - RNA, 19 nt, Artificial Sequence
  Description of Artificial Sequence: Synthetic oligonucleotide
  Sense strand starting at position 849 of SEQ ID NO: 587129
cguccuucgcauucuguua

SEQ ID NO: 768791 - RNA, 19 nt, Artificial Sequence
  Description of Artificial Sequence: Synthetic oligonucleotide
  Antisense strand to SEQ ID NO: 768790
uaacagaaugcgaaggacg

SEQ ID NO: 768792 - RNA, 19 nt, Artificial Sequence
  Description of Artificial Sequence: Synthetic oligonucleotide
  Sense strand starting at position 860 of SEQ ID NO: 587129
uucuguuaggcgcaaggau

SEQ ID NO: 768793 - RNA, 19 nt, Artificial Sequence
  Description of Artificial Sequence: Synthetic oligonucleotide
  Antisense strand to SEQ ID NO: 768792
auccuugcgccuaacagaa

SEQ ID NO: 768794 - RNA, 19 nt, Artificial Sequence
  Description of Artificial Sequence: Synthetic oligonucleotide
  Sense strand starting at position 1062 of SEQ ID NO: 587129
gcgcuugugacagugugaa

SEQ ID NO: 768795 - RNA, 19 nt, Artificial Sequence
  Description of Artificial Sequence: Synthetic oligonucleotide
  Antisense strand to SEQ ID NO: 768794
uucacacugucacaagcgc

SEQ ID NO: 768796 - RNA, 19 nt, Artificial Sequence
  Description of Artificial Sequence: Synthetic oligonucleotide
  Sense strand starting at position 1249 of SEQ ID NO: 587129
gauggaggccagcgugaau

SEQ ID NO: 768797 - RNA, 19 nt, Artificial Sequence
  Description of Artificial Sequence: Synthetic oligonucleotide
  Antisense strand to SEQ ID NO: 768796
auucacgcuggccuccauc

SEQ ID NO: 768798 - RNA, 19 nt, Artificial Sequence
  Description of Artificial Sequence: Synthetic oligonucleotide
  Sense strand starting at position 1410 of SEQ ID NO: 587129
acuuuagggcuucgagaca

SEQ ID NO: 768799 - RNA, 19 nt, Artificial Sequence
  Description of Artificial Sequence: Synthetic oligonucleotide
  Antisense strand to SEQ ID NO: 768798
ugucucgaagcccuaaagu

SEQ ID NO: 768800 - RNA, 19 nt, Artificial Sequence
  Description of Artificial Sequence: Synthetic oligonucleotide
  Sense strand starting at position 1482 of SEQ ID NO: 587129
gaccgcucucauugcagaa

SEQ ID NO: 768801 - RNA, 19 nt, Artificial Sequence
  Description of Artificial Sequence: Synthetic oligonucleotide
  Antisense strand to SEQ ID NO: 768800
uucugcaaugagagcgguc

SEQ ID NO: 768802 - RNA, 19 nt, Artificial Sequence
  Description of Artificial Sequence: Synthetic oligonucleotide
  Sense strand starting at position 1486 of SEQ ID NO: 587129
gcucucauugcagaagugu

SEQ ID NO: 768803 - RNA, 19 nt, Artificial Sequence
  Description of Artificial Sequence: Synthetic oligonucleotide
  Antisense strand to SEQ ID NO: 768802
acacuucugcaaugagagc

SEQ ID NO: 768804 - RNA, 19 nt, Artificial Sequence
  Description of Artificial Sequence: Synthetic oligonucleotide
  Sense strand starting at position 1521 of SEQ ID NO: 587129
auugcaaagucagucuauu

SEQ ID NO: 768805 - RNA, 19 nt, Artificial Sequence
  Description of Artificial Sequence: Synthetic oligonucleotide
  Antisense strand to SEQ ID NO: 768804
aauagacugacuuugcaau

SEQ ID NO: 768806 - RNA, 19 nt, Artificial Sequence
  Description of Artificial Sequence: Synthetic oligonucleotide
  Sense strand starting at position 1556 of SEQ ID NO: 587129
ugaguagcgauuugcaaac

SEQ ID NO: 768807 - RNA, 19 nt, Artificial Sequence
  Description of Artificial Sequence: Synthetic oligonucleotide
  Antisense strand to SEQ ID NO: 768806
guuugcaaaucgcuacuca

SEQ ID NO: 768808 - RNA, 19 nt, Artificial Sequence
  Description of Artificial Sequence: Synthetic oligonucleotide
  Sense strand starting at position 1743 of SEQ ID NO: 587129
gaacaauguuucguucuuu

SEQ ID NO: 768809 - RNA, 19 nt, Artificial Sequence
  Description of Artificial Sequence: Synthetic oligonucleotide
  Antisense strand to SEQ ID NO: 768808
aaagaacgaaacauuguuc

SEQ ID NO: 768810 - RNA, 19 nt, Artificial Sequence
  Description of Artificial Sequence: Synthetic oligonucleotide
  Sense strand starting at position 1897 of SEQ ID NO: 587129
acugcuuuacaugguuuaa

SEQ ID NO: 768811 - RNA, 19 nt, Artificial Sequence
  Description of Artificial Sequence: Synthetic oligonucleotide
  Antisense strand to SEQ ID NO: 768810
uuaaaccauguaaagcagu

SEQ ID NO: 768812 - RNA, 19 nt, Artificial Sequence
  Description of Artificial Sequence: Synthetic oligonucleotide
  Sense strand starting at position 1899 of SEQ ID NO: 587129
ugcuuuacaugguuuaaua

SEQ ID NO: 768813 - RNA, 19 nt, Artificial Sequence
  Description of Artificial Sequence: Synthetic oligonucleotide
  Antisense strand to SEQ ID NO: 768812
uauuaaaccauguaaagca

SEQ ID NO: 768814 - RNA, 19 nt, Artificial Sequence
  Description of Artificial Sequence: Synthetic oligonucleotide
  Sense strand starting at position 1973 of SEQ ID NO: 587129
aagaguuucgcugagcauu

SEQ ID NO: 768815 - RNA, 19 nt, Artificial Sequence
  Description of Artificial Sequence: Synthetic oligonucleotide
  Antisense strand to SEQ ID NO: 768814
aaugcucagcgaaacucuu

SEQ ID NO: 768816 - RNA, 19 nt, Artificial Sequence
  Description of Artificial Sequence: Synthetic oligonucleotide
  Sense strand starting at position 1984 of SEQ ID NO: 587129
ugagcauuguguguaauga

SEQ ID NO: 768817 - RNA, 19 nt, Artificial Sequence
  Description of Artificial Sequence: Synthetic oligonucleotide
  Antisense strand to SEQ ID NO: 768816
ucauuacacacaaugcuca

SEQ ID NO: 768818 - RNA, 19 nt, Artificial Sequence
  Description of Artificial Sequence: Synthetic oligonucleotide
  Sense strand starting at position 1985 of SEQ ID NO: 587129
gagcauuguguguaaugac

SEQ ID NO: 768819 - RNA, 19 nt, Artificial Sequence
  Description of Artificial Sequence: Synthetic oligonucleotide
  Antisense strand to SEQ ID NO: 768818
gucauuacacacaaugcuc

SEQ ID NO: 768820 - RNA, 19 nt, Artificial Sequence
  Description of Artificial Sequence: Synthetic oligonucleotide
  Sense strand starting at position 2093 of SEQ ID NO: 587129
gggaaugcuguggguuuga

SEQ ID NO: 768821 - RNA, 19 nt, Artificial Sequence
  Description of Artificial Sequence: Synthetic oligonucleotide
  Antisense strand to SEQ ID NO: 768820
ucaaacccacagcauuccc

SEQ ID NO: 768822 - RNA, 19 nt, Artificial Sequence
  Description of Artificial Sequence: Synthetic oligonucleotide
  Sense strand starting at position 2176 of SEQ ID NO: 587129
gaugcagaacacugucuau

SEQ ID NO: 768823 - RNA, 19 nt, Artificial Sequence
  Description of Artificial Sequence: Synthetic oligonucleotide
  Antisense strand to SEQ ID NO: 768822
auagacaguguucugcauc

SEQ ID NO: 768824 - RNA, 19 nt, Artificial Sequence
  Description of Artificial Sequence: Synthetic oligonucleotide
  Sense strand starting at position 2179 of SEQ ID NO: 587129
gcagaacacugucuauaau

SEQ ID NO: 768825 - RNA, 19 nt, Artificial Sequence
  Description of Artificial Sequence: Synthetic oligonucleotide
  Antisense strand to SEQ ID NO: 768824
auuauagacaguguucugc

SEQ ID NO: 768826 - RNA, 19 nt, Artificial Sequence
  Description of Artificial Sequence: Synthetic oligonucleotide
  Sense strand starting at position 2264 of SEQ ID NO: 587129
agaaacuuaucagagaggu

SEQ ID NO: 768827 - RNA, 19 nt, Artificial Sequence
  Description of Artificial Sequence: Synthetic oligonucleotide
  Antisense strand to SEQ ID NO: 768826
accucucugauaaguuucu

SEQ ID NO: 768828 - RNA, 19 nt, Artificial Sequence
  Description of Artificial Sequence: Synthetic oligonucleotide
  Sense strand starting at position 2283 of SEQ ID NO: 587129
augccucuuucucuguaga

SEQ ID NO: 768829 - RNA, 19 nt, Artificial Sequence
  Description of Artificial Sequence: Synthetic oligonucleotide
  Antisense strand to SEQ ID NO: 768828
ucuacagagaaagaggcau

SEQ ID NO: 768830 - RNA, 19 nt, Artificial Sequence
  Description of Artificial Sequence: Synthetic oligonucleotide
  Sense strand starting at position 2303 of SEQ ID NO: 587129
ggucuaggguugagaaggu

SEQ ID NO: 768831 - RNA, 19 nt, Artificial Sequence
  Description of Artificial Sequence: Synthetic oligonucleotide
  Antisense strand to SEQ ID NO: 768830
accuucucaacccuagacc

SEQ ID NO: 768832 - RNA, 19 nt, Artificial Sequence
  Description of Artificial Sequence: Synthetic oligonucleotide
  Sense strand starting at position 2654 of SEQ ID NO: 587129
ggcgacaugagcgaaacuu

SEQ ID NO: 768833 - RNA, 19 nt, Artificial Sequence
  Description of Artificial Sequence: Synthetic oligonucleotide
  Antisense strand to SEQ ID NO: 768832
aaguuucgcucaugucgcc

SEQ ID NO: 768834 - RNA, 19 nt, Artificial Sequence
  Description of Artificial Sequence: Synthetic oligonucleotide
  Sense strand starting at position 3016 of SEQ ID NO: 587129
ggaguugagucccucugga

SEQ ID NO: 768835 - RNA, 19 nt, Artificial Sequence
  Description of Artificial Sequence: Synthetic oligonucleotide
  Antisense strand to SEQ ID NO: 768834
uccagagggacucaacucc

SEQ ID NO: 768836 - RNA, 19 nt, Artificial Sequence
  Description of Artificial Sequence: Synthetic oligonucleotide
  Sense strand starting at position 3099 of SEQ ID NO: 587129
cucaguaagugguugcuga

SEQ ID NO: 768837 - RNA, 19 nt, Artificial Sequence
  Description of Artificial Sequence: Synthetic oligonucleotide
  Antisense strand to SEQ ID NO: 768836
ucagcaaccacuuacugag

SEQ ID NO: 768838 - RNA, 19 nt, Artificial Sequence
  Description of Artificial Sequence: Synthetic oligonucleotide
  Sense strand starting at position 3100 of SEQ ID NO: 587129
ucaguaagugguugcugaa

SEQ ID NO: 768839 - RNA, 19 nt, Artificial Sequence
  Description of Artificial Sequence: Synthetic oligonucleotide
  Antisense strand to SEQ ID NO: 768838
uucagcaaccacuuacuga

SEQ ID NO: 768840 - RNA, 19 nt, Artificial Sequence
  Description of Artificial Sequence: Synthetic oligonucleotide
  Sense strand starting at position 3181 of SEQ ID NO: 587129
gcauauuugucauacacac

SEQ ID NO: 768841 - RNA, 19 nt, Artificial Sequence
  Description of Artificial Sequence: Synthetic oligonucleotide
  Antisense strand to SEQ ID NO: 768840
guguguaugacaaauaugc

SEQ ID NO: 768842 - RNA, 19 nt, Artificial Sequence
  Description of Artificial Sequence: Synthetic oligonucleotide
  Sense strand starting at position 3328 of SEQ ID NO: 587129
ccaacuuagggaugguuua

SEQ ID NO: 768843 - RNA, 19 nt, Artificial Sequence
  Description of Artificial Sequence: Synthetic oligonucleotide
  Antisense strand to SEQ ID NO: 768842
uaaaccaucccuaaguugg

SEQ ID NO: 768844 - RNA, 19 nt, Artificial Sequence
  Description of Artificial Sequence: Synthetic oligonucleotide
  Sense strand starting at position 3329 of SEQ ID NO: 587129
caacuuagggaugguuuaa

SEQ ID NO: 768845 - RNA, 19 nt, Artificial Sequence
  Description of Artificial Sequence: Synthetic oligonucleotide
  Antisense strand to SEQ ID NO: 768844
uuaaaccaucccuaaguug

SEQ ID NO: 768846 - RNA, 19 nt, Artificial Sequence
  Description of Artificial Sequence: Synthetic oligonucleotide
  Sense strand starting at position 3367 of SEQ ID NO: 587129
cacggaaaugaugguauaa

SEQ ID NO: 768847 - RNA, 19 nt, Artificial Sequence
  Description of Artificial Sequence: Synthetic oligonucleotide
  Antisense strand to SEQ ID NO: 768846
uuauaccaucauuuccgug

SEQ ID NO: 768848 - RNA, 19 nt, Artificial Sequence
  Description of Artificial Sequence: Synthetic oligonucleotide
  Sense strand starting at position 3379 of SEQ ID NO: 587129
gguauaaauguuggcgaac

SEQ ID NO: 768849 - RNA, 19 nt, Artificial Sequence
  Description of Artificial Sequence: Synthetic oligonucleotide
  Antisense strand to SEQ ID NO: 768848
guucgccaacauuuauacc

SEQ ID NO: 768850 - RNA, 19 nt, Artificial Sequence
  Description of Artificial Sequence: Synthetic oligonucleotide
  Sense strand starting at position 3380 of SEQ ID NO: 587129
guauaaauguuggcgaacu

SEQ ID NO: 768851 - RNA, 19 nt, Artificial Sequence
  Description of Artificial Sequence: Synthetic oligonucleotide
  Antisense strand to SEQ ID NO: 768850
aguucgccaacauuuauac

SEQ ID NO: 768852 - RNA, 19 nt, Artificial Sequence
  Description of Artificial Sequence: Synthetic oligonucleotide
  Sense strand starting at position 3409 of SEQ ID NO: 587129
gguaacacaugucuguuua

SEQ ID NO: 768853 - RNA, 19 nt, Artificial Sequence
  Description of Artificial Sequence: Synthetic oligonucleotide
  Antisense strand to SEQ ID NO: 768852
uaaacagacauguguuacc

SEQ ID NO: 768854 - RNA, 19 nt, Artificial Sequence
  Description of Artificial Sequence: Synthetic oligonucleotide
  Sense strand starting at position 3410 of SEQ ID NO: 587129
guaacacaugucuguuuag

SEQ ID NO: 768855 - RNA, 19 nt, Artificial Sequence
  Description of Artificial Sequence: Synthetic oligonucleotide
  Antisense strand to SEQ ID NO: 768854
cuaaacagacauguguuac

SEQ ID NO: 768856 - RNA, 19 nt, Artificial Sequence
  Description of Artificial Sequence: Synthetic oligonucleotide
  Sense strand starting at position 3417 of SEQ ID NO: 587129
augucuguuuagcucauaa

SEQ ID NO: 768857 - RNA, 19 nt, Artificial Sequence
  Description of Artificial Sequence: Synthetic oligonucleotide
  Antisense strand to SEQ ID NO: 768856
uuaugagcuaaacagacau

SEQ ID NO: 768858 - RNA, 19 nt, Artificial Sequence
  Description of Artificial Sequence: Synthetic oligonucleotide
  Sense strand starting at position 3796 of SEQ ID NO: 587129
uccguccuuguguuugauu

SEQ ID NO: 768859 - RNA, 19 nt, Artificial Sequence
  Description of Artificial Sequence: Synthetic oligonucleotide
  Antisense strand to SEQ ID NO: 768858
aaucaaacacaaggacgga

SEQ ID NO: 768860 - RNA, 19 nt, Artificial Sequence
  Description of Artificial Sequence: Synthetic oligonucleotide
  Sense strand starting at position 20 of SEQ ID NO: 587130
cuucccuuccgugaacuua

SEQ ID NO: 768861 - RNA, 19 nt, Artificial Sequence
  Description of Artificial Sequence: Synthetic oligonucleotide
  Antisense strand to SEQ ID NO: 768860
uaaguucacggaagggaag

SEQ ID NO: 768862 - RNA, 19 nt, Artificial Sequence
  Description of Artificial Sequence: Synthetic oligonucleotide
  Sense strand starting at position 35 of SEQ ID NO: 587130
cuuauuugguccuaaugag

SEQ ID NO: 768863 - RNA, 19 nt, Artificial Sequence
  Description of Artificial Sequence: Synthetic oligonucleotide
  Antisense strand to SEQ ID NO: 768862
cucauuaggaccaaauaag

SEQ ID NO: 768864 - RNA, 19 nt, Artificial Sequence
  Description of Artificial Sequence: Synthetic oligonucleotide
  Sense strand starting at position 157 of SEQ ID NO: 587130
gcaggcagacaucaacuua

SEQ ID NO: 768865 - RNA, 19 nt, Artificial Sequence
  Description of Artificial Sequence: Synthetic oligonucleotide
  Antisense strand to SEQ ID NO: 768864
uaaguugaugucugccugc

SEQ ID NO: 768866 - RNA, 19 nt, Artificial Sequence
  Description of Artificial Sequence: Synthetic oligonucleotide
  Sense strand starting at position 182 of SEQ ID NO: 587130
gucugagacuaucuccaaa

SEQ ID NO: 768867 - RNA, 19 nt, Artificial Sequence
  Description of Artificial Sequence: Synthetic oligonucleotide
  Antisense strand to SEQ ID NO: 768866
uuuggagauagucucagac

SEQ ID NO: 768868 - RNA, 19 nt, Artificial Sequence
  Description of Artificial Sequence: Synthetic oligonucleotide
  Sense strand starting at position 194 of SEQ ID NO: 587130
cuccaaagacaguguucuu

SEQ ID NO: 768869 - RNA, 19 nt, Artificial Sequence
  Description of Artificial Sequence: Synthetic oligonucleotide
  Antisense strand to SEQ ID NO: 768868
aagaacacugucuuuggag

SEQ ID NO: 768870 - RNA, 19 nt, Artificial Sequence
  Description of Artificial Sequence: Synthetic oligonucleotide
  Sense strand starting at position 203 of SEQ ID NO: 587130
caguguucuuuccuugaug

SEQ ID NO: 768871 - RNA, 19 nt, Artificial Sequence
  Description of Artificial Sequence: Synthetic oligonucleotide
  Antisense strand to SEQ ID NO: 768870
caucaaggaaagaacacug

SEQ ID NO: 768872 - RNA, 19 nt, Artificial Sequence
  Description of Artificial Sequence: Synthetic oligonucleotide
  Sense strand starting at position 204 of SEQ ID NO: 587130
aguguucuuuccuugauga

SEQ ID NO: 768873 - RNA, 19 nt, Artificial Sequence
  Description of Artificial Sequence: Synthetic oligonucleotide
  Antisense strand to SEQ ID NO: 768872
ucaucaaggaaagaacacu

SEQ ID NO: 768874 - RNA, 19 nt, Artificial Sequence
  Description of Artificial Sequence: Synthetic oligonucleotide
  Sense strand starting at position 205 of SEQ ID NO: 587130
guguucuuuccuugaugac

SEQ ID NO: 768875 - RNA, 19 nt, Artificial Sequence
  Description of Artificial Sequence: Synthetic oligonucleotide
  Antisense strand to SEQ ID NO: 768874
gucaucaaggaaagaacac

SEQ ID NO: 768876 - RNA, 19 nt, Artificial Sequence
  Description of Artificial Sequence: Synthetic oligonucleotide
  Sense strand starting at position 313 of SEQ ID NO: 587130
ucaggagcuccugaggagu

SEQ ID NO: 768877 - RNA, 19 nt, Artificial Sequence
  Description of Artificial Sequence: Synthetic oligonucleotide
  Antisense strand to SEQ ID NO: 768876
acuccucaggagcuccuga

SEQ ID NO: 768878 - RNA, 19 nt, Artificial Sequence
  Description of Artificial Sequence: Synthetic oligonucleotide
  Sense strand starting at position 376 of SEQ ID NO: 587130
aggccaagcguucaggaaa

SEQ ID NO: 768879 - RNA, 19 nt, Artificial Sequence
  Description of Artificial Sequence: Synthetic oligonucleotide
  Antisense strand to SEQ ID NO: 768878
uuuccugaacgcuuggccu

SEQ ID NO: 768880 - RNA, 19 nt, Artificial Sequence
  Description of Artificial Sequence: Synthetic oligonucleotide
  Sense strand starting at position 387 of SEQ ID NO: 587130
ucaggaaaccuuuggugga

SEQ ID NO: 768881 - RNA, 19 nt, Artificial Sequence
  Description of Artificial Sequence: Synthetic oligonucleotide
  Antisense strand to SEQ ID NO: 768880
uccaccaaagguuuccuga

SEQ ID NO: 768882 - RNA, 19 nt, Artificial Sequence
  Description of Artificial Sequence: Synthetic oligonucleotide
  Sense strand starting at position 400 of SEQ ID NO: 587130
gguggaaacgcucacauau

SEQ ID NO: 768883 - RNA, 19 nt, Artificial Sequence
  Description of Artificial Sequence: Synthetic oligonucleotide
  Antisense strand to SEQ ID NO: 768882
auaugugagcguuuccacc

SEQ ID NO: 768884 - RNA, 19 nt, Artificial Sequence
  Description of Artificial Sequence: Synthetic oligonucleotide
  Sense strand starting at position 448 of SEQ ID NO: 587130
guacuuggauuugacuaua

SEQ ID NO: 768885 - RNA, 19 nt, Artificial Sequence
  Description of Artificial Sequence: Synthetic oligonucleotide
  Antisense strand to SEQ ID NO: 768884
uauagucaaauccaaguac

SEQ ID NO: 768886 - RNA, 19 nt, Artificial Sequence
  Description of Artificial Sequence: Synthetic oligonucleotide
  Sense strand starting at position 490 of SEQ ID NO: 587130
ccugacugccaggauacau

SEQ ID NO: 768887 - RNA, 19 nt, Artificial Sequence
  Description of Artificial Sequence: Synthetic oligonucleotide
  Antisense strand to SEQ ID NO: 768886
auguauccuggcagucagg

SEQ ID NO: 768888 - RNA, 19 nt, Artificial Sequence
  Description of Artificial Sequence: Synthetic oligonucleotide
  Sense strand starting at position 498 of SEQ ID NO: 587130
ccaggauacauaggcugau

SEQ ID NO: 768889 - RNA, 19 nt, Artificial Sequence
  Description of Artificial Sequence: Synthetic oligonucleotide
  Antisense strand to SEQ ID NO: 768888
aucagccuauguauccugg

SEQ ID NO: 768890 - RNA, 19 nt, Artificial Sequence
  Description of Artificial Sequence: Synthetic oligonucleotide
  Sense strand starting at position 499 of SEQ ID NO: 587130
caggauacauaggcugauu

SEQ ID NO: 768891 - RNA, 19 nt, Artificial Sequence
  Description of Artificial Sequence: Synthetic oligonucleotide
  Antisense strand to SEQ ID NO: 768890
aaucagccuauguauccug

SEQ ID NO: 768892 - RNA, 19 nt, Artificial Sequence
  Description of Artificial Sequence: Synthetic oligonucleotide
  Sense strand starting at position 501 of SEQ ID NO: 587130
ggauacauaggcugauuaa

SEQ ID NO: 768893 - RNA, 19 nt, Artificial Sequence
  Description of Artificial Sequence: Synthetic oligonucleotide
  Antisense strand to SEQ ID NO: 768892
uuaaucagccuauguaucc

SEQ ID NO: 768894 - RNA, 19 nt, Artificial Sequence
  Description of Artificial Sequence: Synthetic oligonucleotide
  Sense strand starting at position 1367 of SEQ ID NO: 587130
uggugaguccaagaucucu

SEQ ID NO: 768895 - RNA, 19 nt, Artificial Sequence
  Description of Artificial Sequence: Synthetic oligonucleotide
  Antisense strand to SEQ ID NO: 768894
agagaucuuggacucacca

SEQ ID NO: 768896 - RNA, 19 nt, Artificial Sequence
  Description of Artificial Sequence: Synthetic oligonucleotide
  Sense strand starting at position 1375 of SEQ ID NO: 587130
ccaagaucucucggccuga

SEQ ID NO: 768897 - RNA, 19 nt, Artificial Sequence
  Description of Artificial Sequence: Synthetic oligonucleotide
  Antisense strand to SEQ ID NO: 768896
ucaggccgagagaucuugg

SEQ ID NO: 768898 - RNA, 19 nt, Artificial Sequence
  Description of Artificial Sequence: Synthetic oligonucleotide
  Sense strand starting at position 1566 of SEQ ID NO: 587130
gcaggaaucucacugacgu

SEQ ID NO: 768899 - RNA, 19 nt, Artificial Sequence
  Description of Artificial Sequence: Synthetic oligonucleotide
  Antisense strand to SEQ ID NO: 768898
acgucagugagauuccugc

SEQ ID NO: 768900 - RNA, 19 nt, Artificial Sequence
  Description of Artificial Sequence: Synthetic oligonucleotide
  Sense strand starting at position 1673 of SEQ ID NO: 587130
cagccuucuggagguaaca

SEQ ID NO: 768901 - RNA, 19 nt, Artificial Sequence
  Description of Artificial Sequence: Synthetic oligonucleotide
  Antisense strand to SEQ ID NO: 768900
uguuaccuccagaaggcug

SEQ ID NO: 768902 - RNA, 19 nt, Artificial Sequence
  Description of Artificial Sequence: Synthetic oligonucleotide
  Sense strand starting at position 1675 of SEQ ID NO: 587130
gccuucuggagguaacaca

SEQ ID NO: 768903 - RNA, 19 nt, Artificial Sequence
  Description of Artificial Sequence: Synthetic oligonucleotide
  Antisense strand to SEQ ID NO: 768902
uguguuaccuccagaaggc

SEQ ID NO: 768904 - RNA, 19 nt, Artificial Sequence
  Description of Artificial Sequence: Synthetic oligonucleotide
  Sense strand starting at position 1800 of SEQ ID NO: 587130
cguccuucgcauucuguua

SEQ ID NO: 768905 - RNA, 19 nt, Artificial Sequence
  Description of Artificial Sequence: Synthetic oligonucleotide
  Antisense strand to SEQ ID NO: 768904
uaacagaaugcgaaggacg

SEQ ID NO: 768906 - RNA, 19 nt, Artificial Sequence
  Description of Artificial Sequence: Synthetic oligonucleotide
  Sense strand starting at position 1811 of SEQ ID NO: 587130
uucuguuaggcgcaaggau

SEQ ID NO: 768907 - RNA, 19 nt, Artificial Sequence
  Description of Artificial Sequence: Synthetic oligonucleotide
  Antisense strand to SEQ ID NO: 768906
auccuugcgccuaacagaa

SEQ ID NO: 768908 - RNA, 19 nt, Artificial Sequence
  Description of Artificial Sequence: Synthetic oligonucleotide
  Sense strand starting at position 2013 of SEQ ID NO: 587130
gcgcuugugacagugugaa

SEQ ID NO: 768909 - RNA, 19 nt, Artificial Sequence
  Description of Artificial Sequence: Synthetic oligonucleotide
  Antisense strand to SEQ ID NO: 768908
uucacacugucacaagcgc

SEQ ID NO: 768910 - RNA, 19 nt, Artificial Sequence
  Description of Artificial Sequence: Synthetic oligonucleotide
  Sense strand starting at position 2200 of SEQ ID NO: 587130
gauggaggccagcgugaau

SEQ ID NO: 768911 - RNA, 19 nt, Artificial Sequence
  Description of Artificial Sequence: Synthetic oligonucleotide
  Antisense strand to SEQ ID NO: 768910
auucacgcuggccuccauc

SEQ ID NO: 768912 - RNA, 19 nt, Artificial Sequence
  Description of Artificial Sequence: Synthetic oligonucleotide
  Sense strand starting at position 2361 of SEQ ID NO: 587130
acuuuagggcuucgagaca

SEQ ID NO: 768913 - RNA, 19 nt, Artificial Sequence
  Description of Artificial Sequence: Synthetic oligonucleotide
  Antisense strand to SEQ ID NO: 768912
ugucucgaagcccuaaagu

SEQ ID NO: 768914 - RNA, 19 nt, Artificial Sequence
  Description of Artificial Sequence: Synthetic oligonucleotide
  Sense strand starting at position 2472 of SEQ ID NO: 587130
auugcaaagucagucuauu

SEQ ID NO: 768915 - RNA, 19 nt, Artificial Sequence
  Description of Artificial Sequence: Synthetic oligonucleotide
  Antisense strand to SEQ ID NO: 768914
aauagacugacuuugcaau

SEQ ID NO: 768916 - RNA, 19 nt, Artificial Sequence
  Description of Artificial Sequence: Synthetic oligonucleotide
  Sense strand starting at position 2507 of SEQ ID NO: 587130
ugaguagcgauuugcaaac

SEQ ID NO: 768917 - RNA, 19 nt, Artificial Sequence
  Description of Artificial Sequence: Synthetic oligonucleotide
  Antisense strand to SEQ ID NO: 768916
guuugcaaaucgcuacuca

SEQ ID NO: 768918 - RNA, 19 nt, Artificial Sequence
  Description of Artificial Sequence: Synthetic oligonucleotide
  Sense strand starting at position 2848 of SEQ ID NO: 587130
acugcuuuacaugguuuaa

SEQ ID NO: 768919 - RNA, 19 nt, Artificial Sequence
  Description of Artificial Sequence: Synthetic oligonucleotide
  Antisense strand to SEQ ID NO: 768918
uuaaaccauguaaagcagu

SEQ ID NO: 768920 - RNA, 19 nt, Artificial Sequence
  Description of Artificial Sequence: Synthetic oligonucleotide
  Sense strand starting at position 2850 of SEQ ID NO: 587130
ugcuuuacaugguuuaaua

SEQ ID NO: 768921 - RNA, 19 nt, Artificial Sequence
  Description of Artificial Sequence: Synthetic oligonucleotide
  Antisense strand to SEQ ID NO: 768920
uauuaaaccauguaaagca

SEQ ID NO: 768922 - RNA, 19 nt, Artificial Sequence
  Description of Artificial Sequence: Synthetic oligonucleotide
  Sense strand starting at position 2924 of SEQ ID NO: 587130
aagaguuucgcugagcauu

SEQ ID NO: 768923 - RNA, 19 nt, Artificial Sequence
  Description of Artificial Sequence: Synthetic oligonucleotide
  Antisense strand to SEQ ID NO: 768922
aaugcucagcgaaacucuu

SEQ ID NO: 768924 - RNA, 19 nt, Artificial Sequence
  Description of Artificial Sequence: Synthetic oligonucleotide
  Sense strand starting at position 2935 of SEQ ID NO: 587130
ugagcauuguguguaauga

SEQ ID NO: 768925 - RNA, 19 nt, Artificial Sequence
  Description of Artificial Sequence: Synthetic oligonucleotide
  Antisense strand to SEQ ID NO: 768924
ucauuacacacaaugcuca

SEQ ID NO: 768926 - RNA, 19 nt, Artificial Sequence
  Description of Artificial Sequence: Synthetic oligonucleotide
  Sense strand starting at position 2936 of SEQ ID NO: 587130
gagcauuguguguaaugac

SEQ ID NO: 768927 - RNA, 19 nt, Artificial Sequence
  Description of Artificial Sequence: Synthetic oligonucleotide
  Antisense strand to SEQ ID NO: 768926
gucauuacacacaaugcuc

SEQ ID NO: 768928 - RNA, 19 nt, Artificial Sequence
  Description of Artificial Sequence: Synthetic oligonucleotide
  Sense strand starting at position 3044 of SEQ ID NO: 587130
gggaaugcuguggguuuga

SEQ ID NO: 768929 - RNA, 19 nt, Artificial Sequence
  Description of Artificial Sequence: Synthetic oligonucleotide
  Antisense strand to SEQ ID NO: 768928
ucaaacccacagcauuccc

SEQ ID NO: 768930 - RNA, 19 nt, Artificial Sequence
  Description of Artificial Sequence: Synthetic oligonucleotide
  Sense strand starting at position 3127 of SEQ ID NO: 587130
gaugcagaacacugucuau

SEQ ID NO: 768931 - RNA, 19 nt, Artificial Sequence
  Description of Artificial Sequence: Synthetic oligonucleotide
  Antisense strand to SEQ ID NO: 768930
auagacaguguucugcauc

SEQ ID NO: 768932 - RNA, 19 nt, Artificial Sequence
  Description of Artificial Sequence: Synthetic oligonucleotide
  Sense strand starting at position 3130 of SEQ ID NO: 587130
gcagaacacugucuauaau

SEQ ID NO: 768933 - RNA, 19 nt, Artificial Sequence
  Description of Artificial Sequence: Synthetic oligonucleotide
  Antisense strand to SEQ ID NO: 768932
auuauagacaguguucugc

SEQ ID NO: 768934 - RNA, 19 nt, Artificial Sequence
  Description of Artificial Sequence: Synthetic oligonucleotide
  Sense strand starting at position 3254 of SEQ ID NO: 587130
ggucuaggguugagaaggu

SEQ ID NO: 768935 - RNA, 19 nt, Artificial Sequence
  Description of Artificial Sequence: Synthetic oligonucleotide
  Antisense strand to SEQ ID NO: 768934
accuucucaacccuagacc

SEQ ID NO: 768936 - RNA, 19 nt, Artificial Sequence
  Description of Artificial Sequence: Synthetic oligonucleotide
  Sense strand starting at position 3605 of SEQ ID NO: 587130
ggcgacaugagcgaaacuu

SEQ ID NO: 768937 - RNA, 19 nt, Artificial Sequence
  Description of Artificial Sequence: Synthetic oligonucleotide
  Antisense strand to SEQ ID NO: 768936
aaguuucgcucaugucgcc

SEQ ID NO: 768938 - RNA, 19 nt, Artificial Sequence
  Description of Artificial Sequence: Synthetic oligonucleotide
  Sense strand starting at position 3967 of SEQ ID NO: 587130
ggaguugagucccucugga

SEQ ID NO: 768939 - RNA, 19 nt, Artificial Sequence
  Description of Artificial Sequence: Synthetic oligonucleotide
  Antisense strand to SEQ ID NO: 768938
uccagagggacucaacucc

SEQ ID NO: 768940 - RNA, 19 nt, Artificial Sequence
  Description of Artificial Sequence: Synthetic oligonucleotide
  Sense strand starting at position 27 of SEQ ID NO: 587131
ggccgucuaggcuacauau

SEQ ID NO: 768941 - RNA, 19 nt, Artificial Sequence
  Description of Artificial Sequence: Synthetic oligonucleotide
  Antisense strand to SEQ ID NO: 768940
auauguagccuagacggcc

SEQ ID NO: 768942 - RNA, 19 nt, Artificial Sequence
  Description of Artificial Sequence: Synthetic oligonucleotide
  Sense strand starting at position 124 of SEQ ID NO: 587131
ucaucaagugccgauuaaa

SEQ ID NO: 768943 - RNA, 19 nt, Artificial Sequence
  Description of Artificial Sequence: Synthetic oligonucleotide
  Antisense strand to SEQ ID NO: 768942
uuuaaucggcacuugauga

SEQ ID NO: 768944 - RNA, 19 nt, Artificial Sequence
  Description of Artificial Sequence: Synthetic oligonucleotide
  Sense strand starting at position 567 of SEQ ID NO: 587131
ucacucagagaaugugauu

SEQ ID NO: 768945 - RNA, 19 nt, Artificial Sequence
  Description of Artificial Sequence: Synthetic oligonucleotide
  Antisense strand to SEQ ID NO: 768944
aaucacauucucugaguga

SEQ ID NO: 768946 - RNA, 19 nt, Artificial Sequence
  Description of Artificial Sequence: Synthetic oligonucleotide
  Sense strand starting at position 572 of SEQ ID NO: 587131
cagagaaugugauuccuaa

SEQ ID NO: 768947 - RNA, 19 nt, Artificial Sequence
  Description of Artificial Sequence: Synthetic oligonucleotide
  Antisense strand to SEQ ID NO: 768946
uuaggaaucacauucucug

SEQ ID NO: 768948 - RNA, 19 nt, Artificial Sequence
  Description of Artificial Sequence: Synthetic oligonucleotide
  Sense strand starting at position 687 of SEQ ID NO: 587131
ggaagucucggcuauggca

SEQ ID NO: 768949 - RNA, 19 nt, Artificial Sequence
  Description of Artificial Sequence: Synthetic oligonucleotide
  Antisense strand to SEQ ID NO: 768948
ugccauagccgagacuucc

SEQ ID NO: 768950 - RNA, 19 nt, Artificial Sequence
  Description of Artificial Sequence: Synthetic oligonucleotide
  Sense strand starting at position 1014 of SEQ ID NO: 587131
gaaccugcuuuagugagaa

SEQ ID NO: 768951 - RNA, 19 nt, Artificial Sequence
  Description of Artificial Sequence: Synthetic oligonucleotide
  Antisense strand to SEQ ID NO: 768950
uucucacuaaagcagguuc

SEQ ID NO: 768952 - RNA, 19 nt, Artificial Sequence
  Description of Artificial Sequence: Synthetic oligonucleotide
  Sense strand starting at position 1016 of SEQ ID NO: 587131
accugcuuuagugagaagu

SEQ ID NO: 768953 - RNA, 19 nt, Artificial Sequence
  Description of Artificial Sequence: Synthetic oligonucleotide
  Antisense strand to SEQ ID NO: 768952
acuucucacuaaagcaggu

SEQ ID NO: 768954 - RNA, 19 nt, Artificial Sequence
  Description of Artificial Sequence: Synthetic oligonucleotide
  Sense strand starting at position 1171 of SEQ ID NO: 587131
ccaggcucuccgcagaauu

SEQ ID NO: 768955 - RNA, 19 nt, Artificial Sequence
  Description of Artificial Sequence: Synthetic oligonucleotide
  Antisense strand to SEQ ID NO: 768954
aauucugcggagagccugg

SEQ ID NO: 768956 - RNA, 19 nt, Artificial Sequence
  Description of Artificial Sequence: Synthetic oligonucleotide
  Sense strand starting at position 2257 of SEQ ID NO: 587131
ggaagcuuguucccugaga

SEQ ID NO: 768957 - RNA, 19 nt, Artificial Sequence
  Description of Artificial Sequence: Synthetic oligonucleotide
  Antisense strand to SEQ ID NO: 768956
ucucagggaacaagcuucc

SEQ ID NO: 768958 - RNA, 19 nt, Artificial Sequence
  Description of Artificial Sequence: Synthetic oligonucleotide
  Sense strand starting at position 2258 of SEQ ID NO: 587131
gaagcuuguucccugagag

SEQ ID NO: 768959 - RNA, 19 nt, Artificial Sequence
  Description of Artificial Sequence: Synthetic oligonucleotide
  Antisense strand to SEQ ID NO: 768958
cucucagggaacaagcuuc

SEQ ID NO: 768960 - RNA, 19 nt, Artificial Sequence
  Description of Artificial Sequence: Synthetic oligonucleotide
  Sense strand starting at position 2259 of SEQ ID NO: 587131
aagcuuguucccugagagg

SEQ ID NO: 768961 - RNA, 19 nt, Artificial Sequence
  Description of Artificial Sequence: Synthetic oligonucleotide
  Antisense strand to SEQ ID NO: 768960
ccucucagggaacaagcuu

SEQ ID NO: 768962 - RNA, 19 nt, Artificial Sequence
  Description of Artificial Sequence: Synthetic oligonucleotide
  Sense strand starting at position 2756 of SEQ ID NO: 587131
gagggagagucgcuuaaac

SEQ ID NO: 768963 - RNA, 19 nt, Artificial Sequence
  Description of Artificial Sequence: Synthetic oligonucleotide
  Antisense strand to SEQ ID NO: 768962
guuuaagcgacucucccuc

SEQ ID NO: 768964 - RNA, 19 nt, Artificial Sequence
  Description of Artificial Sequence: Synthetic oligonucleotide
  Sense strand starting at position 2973 of SEQ ID NO: 587131
cugucagagccagaacuua

SEQ ID NO: 768965 - RNA, 19 nt, Artificial Sequence
  Description of Artificial Sequence: Synthetic oligonucleotide
  Antisense strand to SEQ ID NO: 768964
uaaguucuggcucugacag

SEQ ID NO: 768966 - RNA, 19 nt, Artificial Sequence
  Description of Artificial Sequence: Synthetic oligonucleotide
  Sense strand starting at position 3062 of SEQ ID NO: 587131
gccauugaacucuaguagu

SEQ ID NO: 768967 - RNA, 19 nt, Artificial Sequence
  Description of Artificial Sequence: Synthetic oligonucleotide
  Antisense strand to SEQ ID NO: 768966
acuacuagaguucaauggc

SEQ ID NO: 768968 - RNA, 19 nt, Artificial Sequence
  Description of Artificial Sequence: Synthetic oligonucleotide
  Sense strand starting at position 3155 of SEQ ID NO: 587131
gcuuauuguguguuagcaa

SEQ ID NO: 768969 - RNA, 19 nt, Artificial Sequence
  Description of Artificial Sequence: Synthetic oligonucleotide
  Antisense strand to SEQ ID NO: 768968
uugcuaacacacaauaagc

SEQ ID NO: 768970 - RNA, 19 nt, Artificial Sequence
  Description of Artificial Sequence: Synthetic oligonucleotide
  Sense strand starting at position 3162 of SEQ ID NO: 587131
guguguuagcaagacaaau

SEQ ID NO: 768971 - RNA, 19 nt, Artificial Sequence
  Description of Artificial Sequence: Synthetic oligonucleotide
  Antisense strand to SEQ ID NO: 768970
auuugucuugcuaacacac

SEQ ID NO: 768972 - RNA, 19 nt, Artificial Sequence
  Description of Artificial Sequence: Synthetic oligonucleotide
  Sense strand starting at position 3164 of SEQ ID NO: 587131
guguuagcaagacaaaugu

SEQ ID NO: 768973 - RNA, 19 nt, Artificial Sequence
  Description of Artificial Sequence: Synthetic oligonucleotide
  Antisense strand to SEQ ID NO: 768972
acauuugucuugcuaacac

SEQ ID NO: 768974 - RNA, 19 nt, Artificial Sequence
  Description of Artificial Sequence: Synthetic oligonucleotide
  Sense strand starting at position 3400 of SEQ ID NO: 587131
cccugcuuaaggugagaau

SEQ ID NO: 768975 - RNA, 19 nt, Artificial Sequence
  Description of Artificial Sequence: Synthetic oligonucleotide
  Antisense strand to SEQ ID NO: 768974
auucucaccuuaagcaggg

SEQ ID NO: 768976 - RNA, 19 nt, Artificial Sequence
  Description of Artificial Sequence: Synthetic oligonucleotide
  Sense strand starting at position 3409 of SEQ ID NO: 587131
aggugagaaucauaaccag

SEQ ID NO: 768977 - RNA, 19 nt, Artificial Sequence
  Description of Artificial Sequence: Synthetic oligonucleotide
  Antisense strand to SEQ ID NO: 768976
cugguuaugauucucaccu

SEQ ID NO: 768978 - RNA, 19 nt, Artificial Sequence
  Description of Artificial Sequence: Synthetic oligonucleotide
  Sense strand starting at position 3412 of SEQ ID NO: 587131
ugagaaucauaaccagcuu

SEQ ID NO: 768979 - RNA, 19 nt, Artificial Sequence
  Description of Artificial Sequence: Synthetic oligonucleotide
  Antisense strand to SEQ ID NO: 768978
aagcugguuaugauucuca

SEQ ID NO: 768980 - RNA, 19 nt, Artificial Sequence
  Description of Artificial Sequence: Synthetic oligonucleotide
  Sense strand starting at position 3429 of SEQ ID NO: 587131
uuccuaucugauugagcca

SEQ ID NO: 768981 - RNA, 19 nt, Artificial Sequence
  Description of Artificial Sequence: Synthetic oligonucleotide
  Antisense strand to SEQ ID NO: 768980
uggcucaaucagauaggaa

SEQ ID NO: 768982 - RNA, 19 nt, Artificial Sequence
  Description of Artificial Sequence: Synthetic oligonucleotide
  Sense strand starting at position 3511 of SEQ ID NO: 587131
ccugcauucuccuuugaag

SEQ ID NO: 768983 - RNA, 19 nt, Artificial Sequence
  Description of Artificial Sequence: Synthetic oligonucleotide
  Antisense strand to SEQ ID NO: 768982
cuucaaaggagaaugcagg

SEQ ID NO: 768984 - RNA, 19 nt, Artificial Sequence
  Description of Artificial Sequence: Synthetic oligonucleotide
  Sense strand starting at position 3513 of SEQ ID NO: 587131
ugcauucuccuuugaagca

SEQ ID NO: 768985 - RNA, 19 nt, Artificial Sequence
  Description of Artificial Sequence: Synthetic oligonucleotide
  Antisense strand to SEQ ID NO: 768984
ugcuucaaaggagaaugca

SEQ ID NO: 768986 - RNA, 19 nt, Artificial Sequence
  Description of Artificial Sequence: Synthetic oligonucleotide
  Sense strand starting at position 3578 of SEQ ID NO: 587131
uuugacuuguguccacgau

SEQ ID NO: 768987 - RNA, 19 nt, Artificial Sequence
  Description of Artificial Sequence: Synthetic oligonucleotide
  Antisense strand to SEQ ID NO: 768986
aucguggacacaagucaaa

SEQ ID NO: 768988 - RNA, 19 nt, Artificial Sequence
  Description of Artificial Sequence: Synthetic oligonucleotide
  Sense strand starting at position 3582 of SEQ ID NO: 587131
acuuguguccacgauguau

SEQ ID NO: 768989 - RNA, 19 nt, Artificial Sequence
  Description of Artificial Sequence: Synthetic oligonucleotide
  Antisense strand to SEQ ID NO: 768988
auacaucguggacacaagu

SEQ ID NO: 768990 - RNA, 19 nt, Artificial Sequence
  Description of Artificial Sequence: Synthetic oligonucleotide
  Sense strand starting at position 3593 of SEQ ID NO: 587131
cgauguauucgugugcaaa

SEQ ID NO: 768991 - RNA, 19 nt, Artificial Sequence
  Description of Artificial Sequence: Synthetic oligonucleotide
  Antisense strand to SEQ ID NO: 768990
uuugcacacgaauacaucg

SEQ ID NO: 768992 - RNA, 19 nt, Artificial Sequence
  Description of Artificial Sequence: Synthetic oligonucleotide
  Sense strand starting at position 3623 of SEQ ID NO: 587131
uugcauugugagcaaccua

SEQ ID NO: 768993 - RNA, 19 nt, Artificial Sequence
  Description of Artificial Sequence: Synthetic oligonucleotide
  Antisense strand to SEQ ID NO: 768992
uagguugcucacaaugcaa

SEQ ID NO: 768994 - RNA, 19 nt, Artificial Sequence
  Description of Artificial Sequence: Synthetic oligonucleotide
  Sense strand starting at position 3637 of SEQ ID NO: 587131
accuacuagugucugacau

SEQ ID NO: 768995 - RNA, 19 nt, Artificial Sequence
  Description of Artificial Sequence: Synthetic oligonucleotide
  Antisense strand to SEQ ID NO: 768994
augucagacacuaguaggu

SEQ ID NO: 768996 - RNA, 19 nt, Artificial Sequence
  Description of Artificial Sequence: Synthetic oligonucleotide
  Sense strand starting at position 3638 of SEQ ID NO: 587131
ccuacuagugucugacaua

SEQ ID NO: 768997 - RNA, 19 nt, Artificial Sequence
  Description of Artificial Sequence: Synthetic oligonucleotide
  Antisense strand to SEQ ID NO: 768996
uaugucagacacuaguagg

SEQ ID NO: 768998 - RNA, 19 nt, Artificial Sequence
  Description of Artificial Sequence: Synthetic oligonucleotide
  Sense strand starting at position 3700 of SEQ ID NO: 587131
gagcucgacuuccuguaau

SEQ ID NO: 768999 - RNA, 19 nt, Artificial Sequence
  Description of Artificial Sequence: Synthetic oligonucleotide
  Antisense strand to SEQ ID NO: 768998
auuacaggaagucgagcuc

SEQ ID NO: 769000 - RNA, 19 nt, Artificial Sequence
  Description of Artificial Sequence: Synthetic oligonucleotide
  Sense strand starting at position 3711 of SEQ ID NO: 587131
ccuguaauuugugcaaguu

SEQ ID NO: 769001 - RNA, 19 nt, Artificial Sequence
  Description of Artificial Sequence: Synthetic oligonucleotide
  Antisense strand to SEQ ID NO: 769000
aacuugcacaaauuacagg

SEQ ID NO: 769002 - RNA, 19 nt, Artificial Sequence
  Description of Artificial Sequence: Synthetic oligonucleotide
  Sense strand starting at position 3712 of SEQ ID NO: 587131
cuguaauuugugcaaguuu

SEQ ID NO: 769003 - RNA, 19 nt, Artificial Sequence
  Description of Artificial Sequence: Synthetic oligonucleotide
  Antisense strand to SEQ ID NO: 769002
aaacuugcacaaauuacag

SEQ ID NO: 769004 - RNA, 19 nt, Artificial Sequence
  Description of Artificial Sequence: Synthetic oligonucleotide
  Sense strand starting at position 3787 of SEQ ID NO: 587131
uccugugugcucucuguuu

SEQ ID NO: 769005 - RNA, 19 nt, Artificial Sequence
  Description of Artificial Sequence: Synthetic oligonucleotide
  Antisense strand to SEQ ID NO: 769004
aaacagagagcacacagga

SEQ ID NO: 769006 - RNA, 19 nt, Artificial Sequence
  Description of Artificial Sequence: Synthetic oligonucleotide
  Sense strand starting at position 3796 of SEQ ID NO: 587131
cucucuguuugguccugaa

SEQ ID NO: 769007 - RNA, 19 nt, Artificial Sequence
  Description of Artificial Sequence: Synthetic oligonucleotide
  Antisense strand to SEQ ID NO: 769006
uucaggaccaaacagagag

SEQ ID NO: 769008 - RNA, 19 nt, Artificial Sequence
  Description of Artificial Sequence: Synthetic oligonucleotide
  Sense strand starting at position 3800 of SEQ ID NO: 587131
cuguuugguccugaaugau

SEQ ID NO: 769009 - RNA, 19 nt, Artificial Sequence
  Description of Artificial Sequence: Synthetic oligonucleotide
  Antisense strand to SEQ ID NO: 769008
aucauucaggaccaaacag

SEQ ID NO: 769010 - RNA, 19 nt, Artificial Sequence
  Description of Artificial Sequence: Synthetic oligonucleotide
  Sense strand starting at position 3808 of SEQ ID NO: 587131
uccugaaugaugugguggu

SEQ ID NO: 769011 - RNA, 19 nt, Artificial Sequence
  Description of Artificial Sequence: Synthetic oligonucleotide
  Antisense strand to SEQ ID NO: 769010
accaccacaucauucagga

SEQ ID NO: 769012 - RNA, 19 nt, Artificial Sequence
  Description of Artificial Sequence: Synthetic oligonucleotide
  Sense strand starting at position 3869 of SEQ ID NO: 587131
ggcuguuuccuugagcaca

SEQ ID NO: 769013 - RNA, 19 nt, Artificial Sequence
  Description of Artificial Sequence: Synthetic oligonucleotide
  Antisense strand to SEQ ID NO: 769012
ugugcucaaggaaacagcc

SEQ ID NO: 769014 - RNA, 19 nt, Artificial Sequence
  Description of Artificial Sequence: Synthetic oligonucleotide
  Sense strand starting at position 3871 of SEQ ID NO: 587131
cuguuuccuugagcacaaa

SEQ ID NO: 769015 - RNA, 19 nt, Artificial Sequence
  Description of Artificial Sequence: Synthetic oligonucleotide
  Antisense strand to SEQ ID NO: 769014
uuugugcucaaggaaacag

SEQ ID NO: 769016 - RNA, 19 nt, Artificial Sequence
  Description of Artificial Sequence: Synthetic oligonucleotide
  Sense strand starting at position 3872 of SEQ ID NO: 587131
uguuuccuugagcacaaau

SEQ ID NO: 769017 - RNA, 19 nt, Artificial Sequence
  Description of Artificial Sequence: Synthetic oligonucleotide
  Antisense strand to SEQ ID NO: 769016
auuugugcucaaggaaaca

SEQ ID NO: 769018 - RNA, 19 nt, Artificial Sequence
  Description of Artificial Sequence: Synthetic oligonucleotide
  Sense strand starting at position 3981 of SEQ ID NO: 587131
aguucuugaugaguuguuu

SEQ ID NO: 769019 - RNA, 19 nt, Artificial Sequence
  Description of Artificial Sequence: Synthetic oligonucleotide
  Antisense strand to SEQ ID NO: 769018
aaacaacucaucaagaacu

SEQ ID NO: 769020 - RNA, 19 nt, Artificial Sequence
  Description of Artificial Sequence: Synthetic oligonucleotide
  Sense strand starting at position 718 of SEQ ID NO: 587132
cucuacaaauguuaguuaa

SEQ ID NO: 769021 - RNA, 19 nt, Artificial Sequence
  Description of Artificial Sequence: Synthetic oligonucleotide
  Antisense strand to SEQ ID NO: 769020
uuaacuaacauuuguagag

SEQ ID NO: 769022 - RNA, 19 nt, Artificial Sequence
  Description of Artificial Sequence: Synthetic oligonucleotide
  Sense strand starting at position 1131 of SEQ ID NO: 587132
ccaucugucccuuguggga

SEQ ID NO: 769023 - RNA, 19 nt, Artificial Sequence
  Description of Artificial Sequence: Synthetic oligonucleotide
  Antisense strand to SEQ ID NO: 769022
ucccacaagggacagaugg

SEQ ID NO: 769024 - RNA, 19 nt, Artificial Sequence
  Description of Artificial Sequence: Synthetic oligonucleotide
  Sense strand starting at position 1138 of SEQ ID NO: 587132
ucccuugugggaugcacaa

SEQ ID NO: 769025 - RNA, 19 nt, Artificial Sequence
  Description of Artificial Sequence: Synthetic oligonucleotide
  Antisense strand to SEQ ID NO: 769024
uugugcaucccacaaggga

SEQ ID NO: 769026 - RNA, 19 nt, Artificial Sequence
  Description of Artificial Sequence: Synthetic oligonucleotide
  Sense strand starting at position 1223 of SEQ ID NO: 587132
gggccuaucucccgugaaa

SEQ ID NO: 769027 - RNA, 19 nt, Artificial Sequence
  Description of Artificial Sequence: Synthetic oligonucleotide
  Antisense strand to SEQ ID NO: 769026
uuucacgggagauaggccc

SEQ ID NO: 769028 - RNA, 19 nt, Artificial Sequence
  Description of Artificial Sequence: Synthetic oligonucleotide
  Sense strand starting at position 1225 of SEQ ID NO: 587132
gccuaucucccgugaaaua

SEQ ID NO: 769029 - RNA, 19 nt, Artificial Sequence
  Description of Artificial Sequence: Synthetic oligonucleotide
  Antisense strand to SEQ ID NO: 769028
uauuucacgggagauaggc

SEQ ID NO: 769030 - RNA, 19 nt, Artificial Sequence
  Description of Artificial Sequence: Synthetic oligonucleotide
  Sense strand starting at position 1226 of SEQ ID NO: 587132
ccuaucucccgugaaauau

SEQ ID NO: 769031 - RNA, 19 nt, Artificial Sequence
  Description of Artificial Sequence: Synthetic oligonucleotide
  Antisense strand to SEQ ID NO: 769030
auauuucacgggagauagg

SEQ ID NO: 769032 - RNA, 19 nt, Artificial Sequence
  Description of Artificial Sequence: Synthetic oligonucleotide
  Sense strand starting at position 1257 of SEQ ID NO: 587132
uacgguggccuaugcaaua

SEQ ID NO: 769033 - RNA, 19 nt, Artificial Sequence
  Description of Artificial Sequence: Synthetic oligonucleotide
  Antisense strand to SEQ ID NO: 769032
uauugcauaggccaccgua

SEQ ID NO: 769034 - RNA, 19 nt, Artificial Sequence
  Description of Artificial Sequence: Synthetic oligonucleotide
  Sense strand starting at position 1411 of SEQ ID NO: 587132
cuuucuggcccuuacagaa

SEQ ID NO: 769035 - RNA, 19 nt, Artificial Sequence
  Description of Artificial Sequence: Synthetic oligonucleotide
  Antisense strand to SEQ ID NO: 769034
uucuguaagggccagaaag

SEQ ID NO: 769036 - RNA, 19 nt, Artificial Sequence
  Description of Artificial Sequence: Synthetic oligonucleotide
  Sense strand starting at position 3055 of SEQ ID NO: 587132
gagggauagugauauggcu

SEQ ID NO: 769037 - RNA, 19 nt, Artificial Sequence
  Description of Artificial Sequence: Synthetic oligonucleotide
  Antisense strand to SEQ ID NO: 769036
agccauaucacuaucccuc

SEQ ID NO: 769038 - RNA, 19 nt, Artificial Sequence
  Description of Artificial Sequence: Synthetic oligonucleotide
  Sense strand starting at position 3057 of SEQ ID NO: 587132
gggauagugauauggcuag

SEQ ID NO: 769039 - RNA, 19 nt, Artificial Sequence
  Description of Artificial Sequence: Synthetic oligonucleotide
  Antisense strand to SEQ ID NO: 769038
cuagccauaucacuauccc

SEQ ID NO: 769040 - RNA, 19 nt, Artificial Sequence
  Description of Artificial Sequence: Synthetic oligonucleotide
  Sense strand starting at position 3061 of SEQ ID NO: 587132
uagugauauggcuagcaau

SEQ ID NO: 769041 - RNA, 19 nt, Artificial Sequence
  Description of Artificial Sequence: Synthetic oligonucleotide
  Antisense strand to SEQ ID NO: 769040
auugcuagccauaucacua

SEQ ID NO: 769042 - RNA, 19 nt, Artificial Sequence
  Description of Artificial Sequence: Synthetic oligonucleotide
  Sense strand starting at position 3064 of SEQ ID NO: 587132
ugauauggcuagcaauguu

SEQ ID NO: 769043 - RNA, 19 nt, Artificial Sequence
  Description of Artificial Sequence: Synthetic oligonucleotide
  Antisense strand to SEQ ID NO: 769042
aacauugcuagccauauca

SEQ ID NO: 769044 - RNA, 19 nt, Artificial Sequence
  Description of Artificial Sequence: Synthetic oligonucleotide
  Sense strand starting at position 3067 of SEQ ID NO: 587132
uauggcuagcaauguuaua

SEQ ID NO: 769045 - RNA, 19 nt, Artificial Sequence
  Description of Artificial Sequence: Synthetic oligonucleotide
  Antisense strand to SEQ ID NO: 769044
uauaacauugcuagccaua

SEQ ID NO: 769046 - RNA, 19 nt, Artificial Sequence
  Description of Artificial Sequence: Synthetic oligonucleotide
  Sense strand starting at position 3072 of SEQ ID NO: 587132
cuagcaauguuauaaugaa

SEQ ID NO: 769047 - RNA, 19 nt, Artificial Sequence
  Description of Artificial Sequence: Synthetic oligonucleotide
  Antisense strand to SEQ ID NO: 769046
uucauuauaacauugcuag

SEQ ID NO: 769048 - RNA, 19 nt, Artificial Sequence
  Description of Artificial Sequence: Synthetic oligonucleotide
  Sense strand starting at position 3388 of SEQ ID NO: 587132
ccgugcuccgucucaaaca

SEQ ID NO: 769049 - RNA, 19 nt, Artificial Sequence
  Description of Artificial Sequence: Synthetic oligonucleotide
  Antisense strand to SEQ ID NO: 769048
uguuugagacggagcacgg

SEQ ID NO: 769050 - RNA, 19 nt, Artificial Sequence
  Description of Artificial Sequence: Synthetic oligonucleotide
  Sense strand starting at position 3389 of SEQ ID NO: 587132
cgugcuccgucucaaacaa

SEQ ID NO: 769051 - RNA, 19 nt, Artificial Sequence
  Description of Artificial Sequence: Synthetic oligonucleotide
  Antisense strand to SEQ ID NO: 769050
uuguuugagacggagcacg

SEQ ID NO: 769052 - RNA, 19 nt, Artificial Sequence
  Description of Artificial Sequence: Synthetic oligonucleotide
  Sense strand starting at position 3477 of SEQ ID NO: 587132
cguuucuucucauuuguac

SEQ ID NO: 769053 - RNA, 19 nt, Artificial Sequence
  Description of Artificial Sequence: Synthetic oligonucleotide
  Antisense strand to SEQ ID NO: 769052
guacaaaugagaagaaacg

SEQ ID NO: 769054 - RNA, 19 nt, Artificial Sequence
  Description of Artificial Sequence: Synthetic oligonucleotide
  Sense strand starting at position 3648 of SEQ ID NO: 587132
ucaugauggcuuugugauu

SEQ ID NO: 769055 - RNA, 19 nt, Artificial Sequence
  Description of Artificial Sequence: Synthetic oligonucleotide
  Antisense strand to SEQ ID NO: 769054
aaucacaaagccaucauga

SEQ ID NO: 769056 - RNA, 19 nt, Artificial Sequence
  Description of Artificial Sequence: Synthetic oligonucleotide
  Sense strand starting at position 3653 of SEQ ID NO: 587132
auggcuuugugauucccau

SEQ ID NO: 769057 - RNA, 19 nt, Artificial Sequence
  Description of Artificial Sequence: Synthetic oligonucleotide
  Antisense strand to SEQ ID NO: 769056
augggaaucacaaagccau

SEQ ID NO: 769058 - RNA, 19 nt, Artificial Sequence
  Description of Artificial Sequence: Synthetic oligonucleotide
  Sense strand starting at position 3657 of SEQ ID NO: 587132
cuuugugauucccauguga

SEQ ID NO: 769059 - RNA, 19 nt, Artificial Sequence
  Description of Artificial Sequence: Synthetic oligonucleotide
  Antisense strand to SEQ ID NO: 769058
ucacaugggaaucacaaag

SEQ ID NO: 769060 - RNA, 19 nt, Artificial Sequence
  Description of Artificial Sequence: Synthetic oligonucleotide
  Sense strand starting at position 3659 of SEQ ID NO: 587132
uugugauucccaugugauc

SEQ ID NO: 769061 - RNA, 19 nt, Artificial Sequence
  Description of Artificial Sequence: Synthetic oligonucleotide
  Antisense strand to SEQ ID NO: 769060
gaucacaugggaaucacaa

SEQ ID NO: 769062 - RNA, 19 nt, Artificial Sequence
  Description of Artificial Sequence: Synthetic oligonucleotide
  Sense strand starting at position 3678 of SEQ ID NO: 587132
cccgauauguccuguaccu

SEQ ID NO: 769063 - RNA, 19 nt, Artificial Sequence
  Description of Artificial Sequence: Synthetic oligonucleotide
  Antisense strand to SEQ ID NO: 769062
agguacaggacauaucggg

SEQ ID NO: 769064 - RNA, 19 nt, Artificial Sequence
  Description of Artificial Sequence: Synthetic oligonucleotide
  Sense strand starting at position 3680 of SEQ ID NO: 587132
cgauauguccuguaccuug

SEQ ID NO: 769065 - RNA, 19 nt, Artificial Sequence
  Description of Artificial Sequence: Synthetic oligonucleotide
  Antisense strand to SEQ ID NO: 769064
caagguacaggacauaucg

SEQ ID NO: 769066 - RNA, 19 nt, Artificial Sequence
  Description of Artificial Sequence: Synthetic oligonucleotide
  Sense strand starting at position 30 of SEQ ID NO: 587133
uguaaauaucaggguuccu

SEQ ID NO: 769067 - RNA, 19 nt, Artificial Sequence
  Description of Artificial Sequence: Synthetic oligonucleotide
  Antisense strand to SEQ ID NO: 769066
aggaacccugauauuuaca

SEQ ID NO: 769068 - RNA, 19 nt, Artificial Sequence
  Description of Artificial Sequence: Synthetic oligonucleotide
  Sense strand starting at position 474 of SEQ ID NO: 587133
ugcacuaaacagugguaaa

SEQ ID NO: 769069 - RNA, 19 nt, Artificial Sequence
  Description of Artificial Sequence: Synthetic oligonucleotide
  Antisense strand to SEQ ID NO: 769068
uuuaccacuguuuagugca

SEQ ID NO: 769070 - RNA, 19 nt, Artificial Sequence
  Description of Artificial Sequence: Synthetic oligonucleotide
  Sense strand starting at position 539 of SEQ ID NO: 587133
aggagcaacucucuccauu

SEQ ID NO: 769071 - RNA, 19 nt, Artificial Sequence
  Description of Artificial Sequence: Synthetic oligonucleotide
  Antisense strand to SEQ ID NO: 769070
aauggagagaguugcuccu

SEQ ID NO: 769072 - RNA, 19 nt, Artificial Sequence
  Description of Artificial Sequence: Synthetic oligonucleotide
  Sense strand starting at position 685 of SEQ ID NO: 587133
agcaauggcagucaugaaa

SEQ ID NO: 769073 - RNA, 19 nt, Artificial Sequence
  Description of Artificial Sequence: Synthetic oligonucleotide
  Antisense strand to SEQ ID NO: 769072
uuucaugacugccauugcu

SEQ ID NO: 769074 - RNA, 19 nt, Artificial Sequence
  Description of Artificial Sequence: Synthetic oligonucleotide
  Sense strand starting at position 692 of SEQ ID NO: 587133
gcagucaugaaaugauaug

SEQ ID NO: 769075 - RNA, 19 nt, Artificial Sequence
  Description of Artificial Sequence: Synthetic oligonucleotide
  Antisense strand to SEQ ID NO: 769074
cauaucauuucaugacugc

SEQ ID NO: 769076 - RNA, 19 nt, Artificial Sequence
  Description of Artificial Sequence: Synthetic oligonucleotide
  Sense strand starting at position 770 of SEQ ID NO: 587133
auaagagacuuuguuaucu

SEQ ID NO: 769077 - RNA, 19 nt, Artificial Sequence
  Description of Artificial Sequence: Synthetic oligonucleotide
  Antisense strand to SEQ ID NO: 769076
agauaacaaagucucuuau

SEQ ID NO: 769078 - RNA, 19 nt, Artificial Sequence
  Description of Artificial Sequence: Synthetic oligonucleotide
  Sense strand starting at position 782 of SEQ ID NO: 587133
guuaucuuguuaucacaag

SEQ ID NO: 769079 - RNA, 19 nt, Artificial Sequence
  Description of Artificial Sequence: Synthetic oligonucleotide
  Antisense strand to SEQ ID NO: 769078
cuugugauaacaagauaac

SEQ ID NO: 769080 - RNA, 19 nt, Artificial Sequence
  Description of Artificial Sequence: Synthetic oligonucleotide
  Sense strand starting at position 893 of SEQ ID NO: 587133
acaaaugaaguauguugaa

SEQ ID NO: 769081 - RNA, 19 nt, Artificial Sequence
  Description of Artificial Sequence: Synthetic oligonucleotide
  Antisense strand to SEQ ID NO: 769080
uucaacauacuucauuugu

SEQ ID NO: 769082 - RNA, 19 nt, Artificial Sequence
  Description of Artificial Sequence: Synthetic oligonucleotide
  Sense strand starting at position 965 of SEQ ID NO: 587133
aucaucaagucacuguuua

SEQ ID NO: 769083 - RNA, 19 nt, Artificial Sequence
  Description of Artificial Sequence: Synthetic oligonucleotide
  Antisense strand to SEQ ID NO: 769082
uaaacagugacuugaugau

SEQ ID NO: 769084 - RNA, 19 nt, Artificial Sequence
  Description of Artificial Sequence: Synthetic oligonucleotide
  Sense strand starting at position 966 of SEQ ID NO: 587133
ucaucaagucacuguuuag

SEQ ID NO: 769085 - RNA, 19 nt, Artificial Sequence
  Description of Artificial Sequence: Synthetic oligonucleotide
  Antisense strand to SEQ ID NO: 769084
cuaaacagugacuugauga

SEQ ID NO: 769086 - RNA, 19 nt, Artificial Sequence
  Description of Artificial Sequence: Synthetic oligonucleotide
  Sense strand starting at position 969 of SEQ ID NO: 587133
ucaagucacuguuuagaga

SEQ ID NO: 769087 - RNA, 19 nt, Artificial Sequence
  Description of Artificial Sequence: Synthetic oligonucleotide
  Antisense strand to SEQ ID NO: 769086
ucucuaaacagugacuuga

SEQ ID NO: 769088 - RNA, 19 nt, Artificial Sequence
  Description of Artificial Sequence: Synthetic oligonucleotide
  Sense strand starting at position 1224 of SEQ ID NO: 587133
ccacguugccaguuguuga

SEQ ID NO: 769089 - RNA, 19 nt, Artificial Sequence
  Description of Artificial Sequence: Synthetic oligonucleotide
  Antisense strand to SEQ ID NO: 769088
ucaacaacuggcaacgugg

SEQ ID NO: 769090 - RNA, 19 nt, Artificial Sequence
  Description of Artificial Sequence: Synthetic oligonucleotide
  Sense strand starting at position 1234 of SEQ ID NO: 587133
aguuguugacuggauacua

SEQ ID NO: 769091 - RNA, 19 nt, Artificial Sequence
  Description of Artificial Sequence: Synthetic oligonucleotide
  Antisense strand to SEQ ID NO: 769090
uaguauccagucaacaacu

SEQ ID NO: 769092 - RNA, 19 nt, Artificial Sequence
  Description of Artificial Sequence: Synthetic oligonucleotide
  Sense strand starting at position 1294 of SEQ ID NO: 587133
aguucuaaguacucuaacu

SEQ ID NO: 769093 - RNA, 19 nt, Artificial Sequence
  Description of Artificial Sequence: Synthetic oligonucleotide
  Antisense strand to SEQ ID NO: 769092
aguuagaguacuuagaacu

SEQ ID NO: 769094 - RNA, 19 nt, Artificial Sequence
  Description of Artificial Sequence: Synthetic oligonucleotide
  Sense strand starting at position 1306 of SEQ ID NO: 587133
ucuaacuuuguguauaaac

SEQ ID NO: 769095 - RNA, 19 nt, Artificial Sequence
  Description of Artificial Sequence: Synthetic oligonucleotide
  Antisense strand to SEQ ID NO: 769094
guuuauacacaaaguuaga

SEQ ID NO: 769096 - RNA, 19 nt, Artificial Sequence
  Description of Artificial Sequence: Synthetic oligonucleotide
  Sense strand starting at position 1351 of SEQ ID NO: 587133
ugaggacggccuuauuauu

SEQ ID NO: 769097 - RNA, 19 nt, Artificial Sequence
  Description of Artificial Sequence: Synthetic oligonucleotide
  Antisense strand to SEQ ID NO: 769096
aauaauaaggccguccuca

SEQ ID NO: 769098 - RNA, 19 nt, Artificial Sequence
  Description of Artificial Sequence: Synthetic oligonucleotide
  Sense strand starting at position 1475 of SEQ ID NO: 587133
gcauuuaaucccugcugca

SEQ ID NO: 769099 - RNA, 19 nt, Artificial Sequence
  Description of Artificial Sequence: Synthetic oligonucleotide
  Antisense strand to SEQ ID NO: 769098
ugcagcagggauuaaaugc

SEQ ID NO: 769100 - RNA, 19 nt, Artificial Sequence
  Description of Artificial Sequence: Synthetic oligonucleotide
  Sense strand starting at position 1738 of SEQ ID NO: 587133
gggugugucagagcgcuuu

SEQ ID NO: 769101 - RNA, 19 nt, Artificial Sequence
  Description of Artificial Sequence: Synthetic oligonucleotide
  Antisense strand to SEQ ID NO: 769100
aaagcgcucugacacaccc

SEQ ID NO: 769102 - RNA, 19 nt, Artificial Sequence
  Description of Artificial Sequence: Synthetic oligonucleotide
  Sense strand starting at position 1993 of SEQ ID NO: 587133
ccugacagacccggaaaua

SEQ ID NO: 769103 - RNA, 19 nt, Artificial Sequence
  Description of Artificial Sequence: Synthetic oligonucleotide
  Antisense strand to SEQ ID NO: 769102
uauuuccgggucugucagg

SEQ ID NO: 769104 - RNA, 19 nt, Artificial Sequence
  Description of Artificial Sequence: Synthetic oligonucleotide
  Sense strand starting at position 2064 of SEQ ID NO: 587133
ucaucugagccuggaaauc

SEQ ID NO: 769105 - RNA, 19 nt, Artificial Sequence
  Description of Artificial Sequence: Synthetic oligonucleotide
  Antisense strand to SEQ ID NO: 769104
gauuuccaggcucagauga

SEQ ID NO: 769106 - RNA, 19 nt, Artificial Sequence
  Description of Artificial Sequence: Synthetic oligonucleotide
  Sense strand starting at position 2139 of SEQ ID NO: 587133
auggaauucugcuuugaag

SEQ ID NO: 769107 - RNA, 19 nt, Artificial Sequence
  Description of Artificial Sequence: Synthetic oligonucleotide
  Antisense strand to SEQ ID NO: 769106
cuucaaagcagaauuccau

SEQ ID NO: 769108 - RNA, 19 nt, Artificial Sequence
  Description of Artificial Sequence: Synthetic oligonucleotide
  Sense strand starting at position 2141 of SEQ ID NO: 587133
ggaauucugcuuugaagga

SEQ ID NO: 769109 - RNA, 19 nt, Artificial Sequence
  Description of Artificial Sequence: Synthetic oligonucleotide
  Antisense strand to SEQ ID NO: 769108
uccuucaaagcagaauucc

SEQ ID NO: 769110 - RNA, 19 nt, Artificial Sequence
  Description of Artificial Sequence: Synthetic oligonucleotide
  Sense strand starting at position 2146 of SEQ ID NO: 587133
ucugcuuugaaggauguga

SEQ ID NO: 769111 - RNA, 19 nt, Artificial Sequence
  Description of Artificial Sequence: Synthetic oligonucleotide
  Antisense strand to SEQ ID NO: 769110
ucacauccuucaaagcaga

SEQ ID NO: 769112 - RNA, 19 nt, Artificial Sequence
  Description of Artificial Sequence: Synthetic oligonucleotide
  Sense strand starting at position 2148 of SEQ ID NO: 587133
ugcuuugaaggaugugaac

SEQ ID NO: 769113 - RNA, 19 nt, Artificial Sequence
  Description of Artificial Sequence: Synthetic oligonucleotide
  Antisense strand to SEQ ID NO: 769112
guucacauccuucaaagca

SEQ ID NO: 769114 - RNA, 19 nt, Artificial Sequence
  Description of Artificial Sequence: Synthetic oligonucleotide
  Sense strand starting at position 2150 of SEQ ID NO: 587133
cuuugaaggaugugaacau

SEQ ID NO: 769115 - RNA, 19 nt, Artificial Sequence
  Description of Artificial Sequence: Synthetic oligonucleotide
  Antisense strand to SEQ ID NO: 769114
auguucacauccuucaaag

SEQ ID NO: 769116 - RNA, 19 nt, Artificial Sequence
  Description of Artificial Sequence: Synthetic oligonucleotide
  Sense strand starting at position 2330 of SEQ ID NO: 587133
gggagaauaccguagcuca

SEQ ID NO: 769117 - RNA, 19 nt, Artificial Sequence
  Description of Artificial Sequence: Synthetic oligonucleotide
  Antisense strand to SEQ ID NO: 769116
ugagcuacgguauucuccc

SEQ ID NO: 769118 - RNA, 19 nt, Artificial Sequence
  Description of Artificial Sequence: Synthetic oligonucleotide
  Sense strand starting at position 2750 of SEQ ID NO: 587133
ugauuccuucuccauguuu

SEQ ID NO: 769119 - RNA, 19 nt, Artificial Sequence
  Description of Artificial Sequence: Synthetic oligonucleotide
  Antisense strand to SEQ ID NO: 769118
aaacauggagaaggaauca

SEQ ID NO: 769120 - RNA, 19 nt, Artificial Sequence
  Description of Artificial Sequence: Synthetic oligonucleotide
  Sense strand starting at position 2870 of SEQ ID NO: 587133
agcagagggcauugcaaau

SEQ ID NO: 769121 - RNA, 19 nt, Artificial Sequence
  Description of Artificial Sequence: Synthetic oligonucleotide
  Antisense strand to SEQ ID NO: 769120
auuugcaaugcccucugcu

SEQ ID NO: 769122 - RNA, 19 nt, Artificial Sequence
  Description of Artificial Sequence: Synthetic oligonucleotide
  Sense strand starting at position 2953 of SEQ ID NO: 587133
guaggaagucauggacuca

SEQ ID NO: 769123 - RNA, 19 nt, Artificial Sequence
  Description of Artificial Sequence: Synthetic oligonucleotide
  Antisense strand to SEQ ID NO: 769122
ugaguccaugacuuccuac

SEQ ID NO: 769124 - RNA, 19 nt, Artificial Sequence
  Description of Artificial Sequence: Synthetic oligonucleotide
  Sense strand starting at position 3027 of SEQ ID NO: 587133
gugacaucaucucugagac

SEQ ID NO: 769125 - RNA, 19 nt, Artificial Sequence
  Description of Artificial Sequence: Synthetic oligonucleotide
  Antisense strand to SEQ ID NO: 769124
gucucagagaugaugucac

SEQ ID NO: 769126 - RNA, 19 nt, Artificial Sequence
  Description of Artificial Sequence: Synthetic oligonucleotide
  Sense strand starting at position 3028 of SEQ ID NO: 587133
ugacaucaucucugagaca

SEQ ID NO: 769127 - RNA, 19 nt, Artificial Sequence
  Description of Artificial Sequence: Synthetic oligonucleotide
  Antisense strand to SEQ ID NO: 769126
ugucucagagaugauguca

SEQ ID NO: 769128 - RNA, 19 nt, Artificial Sequence
  Description of Artificial Sequence: Synthetic oligonucleotide
  Sense strand starting at position 3165 of SEQ ID NO: 587133
uuuaaaugucuauaagcag

SEQ ID NO: 769129 - RNA, 19 nt, Artificial Sequence
  Description of Artificial Sequence: Synthetic oligonucleotide
  Antisense strand to SEQ ID NO: 769128
cugcuuauagacauuuaaa

SEQ ID NO: 769130 - RNA, 19 nt, Artificial Sequence
  Description of Artificial Sequence: Synthetic oligonucleotide
  Sense strand starting at position 3244 of SEQ ID NO: 587133
ucaugagcucaagaguuug

SEQ ID NO: 769131 - RNA, 19 nt, Artificial Sequence
  Description of Artificial Sequence: Synthetic oligonucleotide
  Antisense strand to SEQ ID NO: 769130
caaacucuugagcucauga

SEQ ID NO: 769132 - RNA, 19 nt, Artificial Sequence
  Description of Artificial Sequence: Synthetic oligonucleotide
  Sense strand starting at position 3564 of SEQ ID NO: 587133
ggccaaacauugcucauga

SEQ ID NO: 769133 - RNA, 19 nt, Artificial Sequence
  Description of Artificial Sequence: Synthetic oligonucleotide
  Antisense strand to SEQ ID NO: 769132
ucaugagcaauguuuggcc

SEQ ID NO: 769134 - RNA, 19 nt, Artificial Sequence
  Description of Artificial Sequence: Synthetic oligonucleotide
  Sense strand starting at position 3642 of SEQ ID NO: 587133
ucgaguauccacgggaaag

SEQ ID NO: 769135 - RNA, 19 nt, Artificial Sequence
  Description of Artificial Sequence: Synthetic oligonucleotide
  Antisense strand to SEQ ID NO: 769134
cuuucccguggauacucga

SEQ ID NO: 769136 - RNA, 19 nt, Artificial Sequence
  Description of Artificial Sequence: Synthetic oligonucleotide
  Sense strand starting at position 3643 of SEQ ID NO: 587133
cgaguauccacgggaaaga

SEQ ID NO: 769137 - RNA, 19 nt, Artificial Sequence
  Description of Artificial Sequence: Synthetic oligonucleotide
  Antisense strand to SEQ ID NO: 769136
ucuuucccguggauacucg

SEQ ID NO: 769138 - RNA, 19 nt, Artificial Sequence
  Description of Artificial Sequence: Synthetic oligonucleotide
  Sense strand starting at position 3801 of SEQ ID NO: 587133
ggaugagauugggaugaag

SEQ ID NO: 769139 - RNA, 19 nt, Artificial Sequence
  Description of Artificial Sequence: Synthetic oligonucleotide
  Antisense strand to SEQ ID NO: 769138
cuucaucccaaucucaucc

SEQ ID NO: 769140 - RNA, 19 nt, Artificial Sequence
  Description of Artificial Sequence: Synthetic oligonucleotide
  Sense strand starting at position 3829 of SEQ ID NO: 587133
aagggauuauuaccacugu

SEQ ID NO: 769141 - RNA, 19 nt, Artificial Sequence
  Description of Artificial Sequence: Synthetic oligonucleotide
  Antisense strand to SEQ ID NO: 769140
acagugguaauaaucccuu

SEQ ID NO: 769142 - RNA, 19 nt, Artificial Sequence
  Description of Artificial Sequence: Synthetic oligonucleotide
  Sense strand starting at position 3970 of SEQ ID NO: 587133
gaaugagaauguuuauucu

SEQ ID NO: 769143 - RNA, 19 nt, Artificial Sequence
  Description of Artificial Sequence: Synthetic oligonucleotide
  Antisense strand to SEQ ID NO: 769142
agaauaaacauucucauuc

SEQ ID NO: 769144 - RNA, 19 nt, Artificial Sequence
  Description of Artificial Sequence: Synthetic oligonucleotide
  Sense strand starting at position 3973 of SEQ ID NO: 587133
ugagaauguuuauucucuu

SEQ ID NO: 769145 - RNA, 19 nt, Artificial Sequence
  Description of Artificial Sequence: Synthetic oligonucleotide
  Antisense strand to SEQ ID NO: 769144
aagagaauaaacauucuca

SEQ ID NO: 769146 - RNA, 19 nt, Artificial Sequence
  Description of Artificial Sequence: Synthetic oligonucleotide
  Sense strand starting at position 15 of SEQ ID NO: 587134
aacauuuacugagagaguc

SEQ ID NO: 769147 - RNA, 19 nt, Artificial Sequence
  Description of Artificial Sequence: Synthetic oligonucleotide
  Antisense strand to SEQ ID NO: 769146
gacucucucaguaaauguu

SEQ ID NO: 769148 - RNA, 19 nt, Artificial Sequence
  Description of Artificial Sequence: Synthetic oligonucleotide
  Sense strand starting at position 23 of SEQ ID NO: 587134
cugagagagucagugagau

SEQ ID NO: 769149 - RNA, 19 nt, Artificial Sequence
  Description of Artificial Sequence: Synthetic oligonucleotide
  Antisense strand to SEQ ID NO: 769148
aucucacugacucucucag

SEQ ID NO: 769150 - RNA, 19 nt, Artificial Sequence
  Description of Artificial Sequence: Synthetic oligonucleotide
  Sense strand starting at position 54 of SEQ ID NO: 587134
aucugucaaguugauaaau

SEQ ID NO: 769151 - RNA, 19 nt, Artificial Sequence
  Description of Artificial Sequence: Synthetic oligonucleotide
  Antisense strand to SEQ ID NO: 769150
auuuaucaacuugacagau

SEQ ID NO: 769152 - RNA, 19 nt, Artificial Sequence
  Description of Artificial Sequence: Synthetic oligonucleotide
  Sense strand starting at position 141 of SEQ ID NO: 587134
agaucaugauuaucuguca

SEQ ID NO: 769153 - RNA, 19 nt, Artificial Sequence
  Description of Artificial Sequence: Synthetic oligonucleotide
  Antisense strand to SEQ ID NO: 769152
ugacagauaaucaugaucu

SEQ ID NO: 769154 - RNA, 19 nt, Artificial Sequence
  Description of Artificial Sequence: Synthetic oligonucleotide
  Sense strand starting at position 187 of SEQ ID NO: 587134
gguuauuagcaacaccagu

SEQ ID NO: 769155 - RNA, 19 nt, Artificial Sequence
  Description of Artificial Sequence: Synthetic oligonucleotide
  Antisense strand to SEQ ID NO: 769154
acugguguugcuaauaacc

SEQ ID NO: 769156 - RNA, 19 nt, Artificial Sequence
  Description of Artificial Sequence: Synthetic oligonucleotide
  Sense strand starting at position 380 of SEQ ID NO: 587134
agucacuauggagauguuu

SEQ ID NO: 769157 - RNA, 19 nt, Artificial Sequence
  Description of Artificial Sequence: Synthetic oligonucleotide
  Antisense strand to SEQ ID NO: 769156
aaacaucuccauagugacu

SEQ ID NO: 769158 - RNA, 19 nt, Artificial Sequence
  Description of Artificial Sequence: Synthetic oligonucleotide
  Sense strand starting at position 444 of SEQ ID NO: 587134
ucaugcaacccuggugaaa

SEQ ID NO: 769159 - RNA, 19 nt, Artificial Sequence
  Description of Artificial Sequence: Synthetic oligonucleotide
  Antisense strand to SEQ ID NO: 769158
uuucaccaggguugcauga

SEQ ID NO: 769160 - RNA, 19 nt, Artificial Sequence
  Description of Artificial Sequence: Synthetic oligonucleotide
  Sense strand starting at position 592 of SEQ ID NO: 587134
aaagcaguccugggaagau

SEQ ID NO: 769161 - RNA, 19 nt, Artificial Sequence
  Description of Artificial Sequence: Synthetic oligonucleotide
  Antisense strand to SEQ ID NO: 769160
aucuucccaggacugcuuu

SEQ ID NO: 769162 - RNA, 19 nt, Artificial Sequence
  Description of Artificial Sequence: Synthetic oligonucleotide
  Sense strand starting at position 874 of SEQ ID NO: 587134
gcagaaggaguauggcauu

SEQ ID NO: 769163 - RNA, 19 nt, Artificial Sequence
  Description of Artificial Sequence: Synthetic oligonucleotide
  Antisense strand to SEQ ID NO: 769162
aaugccauacuccuucugc

SEQ ID NO: 769164 - RNA, 19 nt, Artificial Sequence
  Description of Artificial Sequence: Synthetic oligonucleotide
  Sense strand starting at position 886 of SEQ ID NO: 587134
uggcauuucugcuugcaga

SEQ ID NO: 769165 - RNA, 19 nt, Artificial Sequence
  Description of Artificial Sequence: Synthetic oligonucleotide
  Antisense strand to SEQ ID NO: 769164
ucugcaagcagaaaugcca

SEQ ID NO: 769166 - RNA, 19 nt, Artificial Sequence
  Description of Artificial Sequence: Synthetic oligonucleotide
  Sense strand starting at position 887 of SEQ ID NO: 587134
ggcauuucugcuugcagaa

SEQ ID NO: 769167 - RNA, 19 nt, Artificial Sequence
  Description of Artificial Sequence: Synthetic oligonucleotide
  Antisense strand to SEQ ID NO: 769166
uucugcaagcagaaaugcc

SEQ ID NO: 769168 - RNA, 19 nt, Artificial Sequence
  Description of Artificial Sequence: Synthetic oligonucleotide
  Sense strand starting at position 940 of SEQ ID NO: 587134
guucauggugcugaaacga

SEQ ID NO: 769169 - RNA, 19 nt, Artificial Sequence
  Description of Artificial Sequence: Synthetic oligonucleotide
  Antisense strand to SEQ ID NO: 769168
ucguuucagcaccaugaac

SEQ ID NO: 769170 - RNA, 19 nt, Artificial Sequence
  Description of Artificial Sequence: Synthetic oligonucleotide
  Sense strand starting at position 969 of SEQ ID NO: 587134
cuacgaaguccugaacaau

SEQ ID NO: 769171 - RNA, 19 nt, Artificial Sequence
  Description of Artificial Sequence: Synthetic oligonucleotide
  Antisense strand to SEQ ID NO: 769170
auuguucaggacuucguag

SEQ ID NO: 769172 - RNA, 19 nt, Artificial Sequence
  Description of Artificial Sequence: Synthetic oligonucleotide
  Sense strand starting at position 1006 of SEQ ID NO: 587134
gcugcuugucaugcaaguu

SEQ ID NO: 769173 - RNA, 19 nt, Artificial Sequence
  Description of Artificial Sequence: Synthetic oligonucleotide
  Antisense strand to SEQ ID NO: 769172
aacuugcaugacaagcagc

SEQ ID NO: 769174 - RNA, 19 nt, Artificial Sequence
  Description of Artificial Sequence: Synthetic oligonucleotide
  Sense strand starting at position 1045 of SEQ ID NO: 587134
agaggagucuguccuuuga

SEQ ID NO: 769175 - RNA, 19 nt, Artificial Sequence
  Description of Artificial Sequence: Synthetic oligonucleotide
  Antisense strand to SEQ ID NO: 769174
ucaaaggacagacuccucu

SEQ ID NO: 769176 - RNA, 19 nt, Artificial Sequence
  Description of Artificial Sequence: Synthetic oligonucleotide
  Sense strand starting at position 1047 of SEQ ID NO: 587134
aggagucuguccuuugaua

SEQ ID NO: 769177 - RNA, 19 nt, Artificial Sequence
  Description of Artificial Sequence: Synthetic oligonucleotide
  Antisense strand to SEQ ID NO: 769176
uaucaaaggacagacuccu

SEQ ID NO: 769178 - RNA, 19 nt, Artificial Sequence
  Description of Artificial Sequence: Synthetic oligonucleotide
  Sense strand starting at position 1049 of SEQ ID NO: 587134
gagucuguccuuugauaaa

SEQ ID NO: 769179 - RNA, 19 nt, Artificial Sequence
  Description of Artificial Sequence: Synthetic oligonucleotide
  Antisense strand to SEQ ID NO: 769178
uuuaucaaaggacagacuc

SEQ ID NO: 769180 - RNA, 19 nt, Artificial Sequence
  Description of Artificial Sequence: Synthetic oligonucleotide
  Sense strand starting at position 1187 of SEQ ID NO: 587134
gaugauuauguaugcauga

SEQ ID NO: 769181 - RNA, 19 nt, Artificial Sequence
  Description of Artificial Sequence: Synthetic oligonucleotide
  Antisense strand to SEQ ID NO: 769180
ucaugcauacauaaucauc

SEQ ID NO: 769182 - RNA, 19 nt, Artificial Sequence
  Description of Artificial Sequence: Synthetic oligonucleotide
  Sense strand starting at position 1189 of SEQ ID NO: 587134
ugauuauguaugcaugagu

SEQ ID NO: 769183 - RNA, 19 nt, Artificial Sequence
  Description of Artificial Sequence: Synthetic oligonucleotide
  Antisense strand to SEQ ID NO: 769182
acucaugcauacauaauca

SEQ ID NO: 769184 - RNA, 19 nt, Artificial Sequence
  Description of Artificial Sequence: Synthetic oligonucleotide
  Sense strand starting at position 1337 of SEQ ID NO: 587134
cuagcuagucuacaguuua

SEQ ID NO: 769185 - RNA, 19 nt, Artificial Sequence
  Description of Artificial Sequence: Synthetic oligonucleotide
  Antisense strand to SEQ ID NO: 769184
uaaacuguagacuagcuag

SEQ ID NO: 769186 - RNA, 19 nt, Artificial Sequence
  Description of Artificial Sequence: Synthetic oligonucleotide
  Sense strand starting at position 1408 of SEQ ID NO: 587134
cacuguuacuugcuaggaa

SEQ ID NO: 769187 - RNA, 19 nt, Artificial Sequence
  Description of Artificial Sequence: Synthetic oligonucleotide
  Antisense strand to SEQ ID NO: 769186
uuccuagcaaguaacagug

SEQ ID NO: 769188 - RNA, 19 nt, Artificial Sequence
  Description of Artificial Sequence: Synthetic oligonucleotide
  Sense strand starting at position 1420 of SEQ ID NO: 587134
cuaggaagcuuauucuauc

SEQ ID NO: 769189 - RNA, 19 nt, Artificial Sequence
  Description of Artificial Sequence: Synthetic oligonucleotide
  Antisense strand to SEQ ID NO: 769188
gauagaauaagcuuccuag

SEQ ID NO: 769190 - RNA, 19 nt, Artificial Sequence
  Description of Artificial Sequence: Synthetic oligonucleotide
  Sense strand starting at position 1484 of SEQ ID NO: 587134
gcaaauguauauuugccau

SEQ ID NO: 769191 - RNA, 19 nt, Artificial Sequence
  Description of Artificial Sequence: Synthetic oligonucleotide
  Antisense strand to SEQ ID NO: 769190
auggcaaauauacauuugc

SEQ ID NO: 769192 - RNA, 19 nt, Artificial Sequence
  Description of Artificial Sequence: Synthetic oligonucleotide
  Sense strand starting at position 2026 of SEQ ID NO: 587134
cgaugaugccuuuaacucu

SEQ ID NO: 769193 - RNA, 19 nt, Artificial Sequence
  Description of Artificial Sequence: Synthetic oligonucleotide
  Antisense strand to SEQ ID NO: 769192
agaguuaaaggcaucaucg

SEQ ID NO: 769194 - RNA, 19 nt, Artificial Sequence
  Description of Artificial Sequence: Synthetic oligonucleotide
  Sense strand starting at position 2647 of SEQ ID NO: 587134
uuuaaauaccguuaagguc

SEQ ID NO: 769195 - RNA, 19 nt, Artificial Sequence
  Description of Artificial Sequence: Synthetic oligonucleotide
  Antisense strand to SEQ ID NO: 769194
gaccuuaacgguauuuaaa

SEQ ID NO: 769196 - RNA, 19 nt, Artificial Sequence
  Description of Artificial Sequence: Synthetic oligonucleotide
  Sense strand starting at position 2721 of SEQ ID NO: 587134
uauguaauguucccuggga

SEQ ID NO: 769197 - RNA, 19 nt, Artificial Sequence
  Description of Artificial Sequence: Synthetic oligonucleotide
  Antisense strand to SEQ ID NO: 769196
ucccagggaacauuacaua

SEQ ID NO: 769198 - RNA, 19 nt, Artificial Sequence
  Description of Artificial Sequence: Synthetic oligonucleotide
  Sense strand starting at position 2722 of SEQ ID NO: 587134
auguaauguucccugggac

SEQ ID NO: 769199 - RNA, 19 nt, Artificial Sequence
  Description of Artificial Sequence: Synthetic oligonucleotide
  Antisense strand to SEQ ID NO: 769198
gucccagggaacauuacau

SEQ ID NO: 769200 - RNA, 19 nt, Artificial Sequence
  Description of Artificial Sequence: Synthetic oligonucleotide
  Sense strand starting at position 2725 of SEQ ID NO: 587134
uaauguucccugggacuaa

SEQ ID NO: 769201 - RNA, 19 nt, Artificial Sequence
  Description of Artificial Sequence: Synthetic oligonucleotide
  Antisense strand to SEQ ID NO: 769200
uuagucccagggaacauua

SEQ ID NO: 769202 - RNA, 19 nt, Artificial Sequence
  Description of Artificial Sequence: Synthetic oligonucleotide
  Sense strand starting at position 2813 of SEQ ID NO: 587134
aucugccuuggugaagauu

SEQ ID NO: 769203 - RNA, 19 nt, Artificial Sequence
  Description of Artificial Sequence: Synthetic oligonucleotide
  Antisense strand to SEQ ID NO: 769202
aaucuucaccaaggcagau

SEQ ID NO: 769204 - RNA, 19 nt, Artificial Sequence
  Description of Artificial Sequence: Synthetic oligonucleotide
  Sense strand starting at position 2821 of SEQ ID NO: 587134
uggugaagauuugagaugu

SEQ ID NO: 769205 - RNA, 19 nt, Artificial Sequence
  Description of Artificial Sequence: Synthetic oligonucleotide
  Antisense strand to SEQ ID NO: 769204
acaucucaaaucuucacca

SEQ ID NO: 769206 - RNA, 19 nt, Artificial Sequence
  Description of Artificial Sequence: Synthetic oligonucleotide
  Sense strand starting at position 3191 of SEQ ID NO: 587134
ucuucuauugcugaaugca

SEQ ID NO: 769207 - RNA, 19 nt, Artificial Sequence
  Description of Artificial Sequence: Synthetic oligonucleotide
  Antisense strand to SEQ ID NO: 769206
ugcauucagcaauagaaga

SEQ ID NO: 769208 - RNA, 19 nt, Artificial Sequence
  Description of Artificial Sequence: Synthetic oligonucleotide
  Sense strand starting at position 3376 of SEQ ID NO: 587134
cuguauccuccuuguauuu

SEQ ID NO: 769209 - RNA, 19 nt, Artificial Sequence
  Description of Artificial Sequence: Synthetic oligonucleotide
  Antisense strand to SEQ ID NO: 769208
aaauacaaggaggauacag

SEQ ID NO: 769210 - RNA, 19 nt, Artificial Sequence
  Description of Artificial Sequence: Synthetic oligonucleotide
  Sense strand starting at position 3514 of SEQ ID NO: 587134
aagcauuacguggaaagua

SEQ ID NO: 769211 - RNA, 19 nt, Artificial Sequence
  Description of Artificial Sequence: Synthetic oligonucleotide
  Antisense strand to SEQ ID NO: 769210
uacuuuccacguaaugcuu

SEQ ID NO: 769212 - RNA, 19 nt, Artificial Sequence
  Description of Artificial Sequence: Synthetic oligonucleotide
  Sense strand starting at position 3621 of SEQ ID NO: 587134
uagcauaaacauggguaua

SEQ ID NO: 769213 - RNA, 19 nt, Artificial Sequence
  Description of Artificial Sequence: Synthetic oligonucleotide
  Antisense strand to SEQ ID NO: 769212
uauacccauguuuaugcua

SEQ ID NO: 769214 - RNA, 19 nt, Artificial Sequence
  Description of Artificial Sequence: Synthetic oligonucleotide
  Sense strand starting at position 3623 of SEQ ID NO: 587134
gcauaaacauggguauaau

SEQ ID NO: 769215 - RNA, 19 nt, Artificial Sequence
  Description of Artificial Sequence: Synthetic oligonucleotide
  Antisense strand to SEQ ID NO: 769214
auuauacccauguuuaugc

SEQ ID NO: 769216 - RNA, 19 nt, Artificial Sequence
  Description of Artificial Sequence: Synthetic oligonucleotide
  Sense strand starting at position 3765 of SEQ ID NO: 587134
agaaguacuugaucacugu

SEQ ID NO: 769217 - RNA, 19 nt, Artificial Sequence
  Description of Artificial Sequence: Synthetic oligonucleotide
  Antisense strand to SEQ ID NO: 769216
acagugaucaaguacuucu

SEQ ID NO: 769218 - RNA, 19 nt, Artificial Sequence
  Description of Artificial Sequence: Synthetic oligonucleotide
  Sense strand starting at position 3766 of SEQ ID NO: 587134
gaaguacuugaucacugua

SEQ ID NO: 769219 - RNA, 19 nt, Artificial Sequence
  Description of Artificial Sequence: Synthetic oligonucleotide
  Antisense strand to SEQ ID NO: 769218
uacagugaucaaguacuuc

SEQ ID NO: 769220 - RNA, 19 nt, Artificial Sequence
  Description of Artificial Sequence: Synthetic oligonucleotide
  Sense strand starting at position 3768 of SEQ ID NO: 587134
aguacuugaucacuguaac

SEQ ID NO: 769221 - RNA, 19 nt, Artificial Sequence
  Description of Artificial Sequence: Synthetic oligonucleotide
  Antisense strand to SEQ ID NO: 769220
guuacagugaucaaguacu

SEQ ID NO: 769222 - RNA, 19 nt, Artificial Sequence
  Description of Artificial Sequence: Synthetic oligonucleotide
  Sense strand starting at position 3769 of SEQ ID NO: 587134
guacuugaucacuguaaca

SEQ ID NO: 769223 - RNA, 19 nt, Artificial Sequence
  Description of Artificial Sequence: Synthetic oligonucleotide
  Antisense strand to SEQ ID NO: 769222
uguuacagugaucaaguac

SEQ ID NO: 769224 - RNA, 19 nt, Artificial Sequence
  Description of Artificial Sequence: Synthetic oligonucleotide
  Sense strand starting at position 3806 of SEQ ID NO: 587134
uaagcuuaagagugugaaa

SEQ ID NO: 769225 - RNA, 19 nt, Artificial Sequence
  Description of Artificial Sequence: Synthetic oligonucleotide
  Antisense strand to SEQ ID NO: 769224
uuucacacucuuaagcuua

SEQ ID NO: 769226 - RNA, 19 nt, Artificial Sequence
  Description of Artificial Sequence: Synthetic oligonucleotide
  Sense strand starting at position 406 of SEQ ID NO: 587135
ccggcauagcucuagauua

SEQ ID NO: 769227 - RNA, 19 nt, Artificial Sequence
  Description of Artificial Sequence: Synthetic oligonucleotide
  Antisense strand to SEQ ID NO: 769226
uaaucuagagcuaugccgg

SEQ ID NO: 769228 - RNA, 19 nt, Artificial Sequence
  Description of Artificial Sequence: Synthetic oligonucleotide
  Sense strand starting at position 408 of SEQ ID NO: 587135
ggcauagcucuagauuaac

SEQ ID NO: 769229 - RNA, 19 nt, Artificial Sequence
  Description of Artificial Sequence: Synthetic oligonucleotide
  Antisense strand to SEQ ID NO: 769228
guuaaucuagagcuaugcc

SEQ ID NO: 769230 - RNA, 19 nt, Artificial Sequence
  Description of Artificial Sequence: Synthetic oligonucleotide
  Sense strand starting at position 551 of SEQ ID NO: 587135
uucugauguagucgugauu

SEQ ID NO: 769231 - RNA, 19 nt, Artificial Sequence
  Description of Artificial Sequence: Synthetic oligonucleotide
  Antisense strand to SEQ ID NO: 769230
aaucacgacuacaucagaa

SEQ ID NO: 769232 - RNA, 19 nt, Artificial Sequence
  Description of Artificial Sequence: Synthetic oligonucleotide
  Sense strand starting at position 554 of SEQ ID NO: 587135
ugauguagucgugauuagu

SEQ ID NO: 769233 - RNA, 19 nt, Artificial Sequence
  Description of Artificial Sequence: Synthetic oligonucleotide
  Antisense strand to SEQ ID NO: 769232
acuaaucacgacuacauca

SEQ ID NO: 769234 - RNA, 19 nt, Artificial Sequence
  Description of Artificial Sequence: Synthetic oligonucleotide
  Sense strand starting at position 557 of SEQ ID NO: 587135
uguagucgugauuaguguu

SEQ ID NO: 769235 - RNA, 19 nt, Artificial Sequence
  Description of Artificial Sequence: Synthetic oligonucleotide
  Antisense strand to SEQ ID NO: 769234
aacacuaaucacgacuaca

SEQ ID NO: 769236 - RNA, 19 nt, Artificial Sequence
  Description of Artificial Sequence: Synthetic oligonucleotide
  Sense strand starting at position 564 of SEQ ID NO: 587135
gugauuaguguuggagaug

SEQ ID NO: 769237 - RNA, 19 nt, Artificial Sequence
  Description of Artificial Sequence: Synthetic oligonucleotide
  Antisense strand to SEQ ID NO: 769236
caucuccaacacuaaucac

SEQ ID NO: 769238 - RNA, 19 nt, Artificial Sequence
  Description of Artificial Sequence: Synthetic oligonucleotide
  Sense strand starting at position 569 of SEQ ID NO: 587135
uaguguuggagauggccaa

SEQ ID NO: 769239 - RNA, 19 nt, Artificial Sequence
  Description of Artificial Sequence: Synthetic oligonucleotide
  Antisense strand to SEQ ID NO: 769238
uuggccaucuccaacacua

SEQ ID NO: 769240 - RNA, 19 nt, Artificial Sequence
  Description of Artificial Sequence: Synthetic oligonucleotide
  Sense strand starting at position 648 of SEQ ID NO: 587135
ugccuugaaccacguaauu

SEQ ID NO: 769241 - RNA, 19 nt, Artificial Sequence
  Description of Artificial Sequence: Synthetic oligonucleotide
  Antisense strand to SEQ ID NO: 769240
aauuacgugguucaaggca

SEQ ID NO: 769242 - RNA, 19 nt, Artificial Sequence
  Description of Artificial Sequence: Synthetic oligonucleotide
  Sense strand starting at position 698 of SEQ ID NO: 587135
ggccacauuucccgaaggu

SEQ ID NO: 769243 - RNA, 19 nt, Artificial Sequence
  Description of Artificial Sequence: Synthetic oligonucleotide
  Antisense strand to SEQ ID NO: 769242
accuucgggaaauguggcc

SEQ ID NO: 769244 - RNA, 19 nt, Artificial Sequence
  Description of Artificial Sequence: Synthetic oligonucleotide
  Sense strand starting at position 705 of SEQ ID NO: 587135
uuucccgaagguuauuaaa

SEQ ID NO: 769245 - RNA, 19 nt, Artificial Sequence
  Description of Artificial Sequence: Synthetic oligonucleotide
  Antisense strand to SEQ ID NO: 769244
uuuaauaaccuucgggaaa

SEQ ID NO: 769246 - RNA, 19 nt, Artificial Sequence
  Description of Artificial Sequence: Synthetic oligonucleotide
  Sense strand starting at position 707 of SEQ ID NO: 587135
ucccgaagguuauuaaaug

SEQ ID NO: 769247 - RNA, 19 nt, Artificial Sequence
  Description of Artificial Sequence: Synthetic oligonucleotide
  Antisense strand to SEQ ID NO: 769246
cauuuaauaaccuucggga

SEQ ID NO: 769248 - RNA, 19 nt, Artificial Sequence
  Description of Artificial Sequence: Synthetic oligonucleotide
  Sense strand starting at position 1181 of SEQ ID NO: 587135
cuuucuggauuccaaaguu

SEQ ID NO: 769249 - RNA, 19 nt, Artificial Sequence
  Description of Artificial Sequence: Synthetic oligonucleotide
  Antisense strand to SEQ ID NO: 769248
aacuuuggaauccagaaag

SEQ ID NO: 769250 - RNA, 19 nt, Artificial Sequence
  Description of Artificial Sequence: Synthetic oligonucleotide
  Sense strand starting at position 1532 of SEQ ID NO: 587135
gcgccaaaccuacauacau

SEQ ID NO: 769251 - RNA, 19 nt, Artificial Sequence
  Description of Artificial Sequence: Synthetic oligonucleotide
  Antisense strand to SEQ ID NO: 769250
auguauguagguuuggcgc

SEQ ID NO: 769252 - RNA, 19 nt, Artificial Sequence
  Description of Artificial Sequence: Synthetic oligonucleotide
  Sense strand starting at position 2395 of SEQ ID NO: 587135
cuguguucagauugggauu

SEQ ID NO: 769253 - RNA, 19 nt, Artificial Sequence
  Description of Artificial Sequence: Synthetic oligonucleotide
  Antisense strand to SEQ ID NO: 769252
aaucccaaucugaacacag

SEQ ID NO: 769254 - RNA, 19 nt, Artificial Sequence
  Description of Artificial Sequence: Synthetic oligonucleotide
  Sense strand starting at position 2411 of SEQ ID NO: 587135
auucgaaggccguguuagu

SEQ ID NO: 769255 - RNA, 19 nt, Artificial Sequence
  Description of Artificial Sequence: Synthetic oligonucleotide
  Antisense strand to SEQ ID NO: 769254
acuaacacggccuucgaau

SEQ ID NO: 769256 - RNA, 19 nt, Artificial Sequence
  Description of Artificial Sequence: Synthetic oligonucleotide
  Sense strand starting at position 2412 of SEQ ID NO: 587135
uucgaaggccguguuaguu

SEQ ID NO: 769257 - RNA, 19 nt, Artificial Sequence
  Description of Artificial Sequence: Synthetic oligonucleotide
  Antisense strand to SEQ ID NO: 769256
aacuaacacggccuucgaa

SEQ ID NO: 769258 - RNA, 19 nt, Artificial Sequence
  Description of Artificial Sequence: Synthetic oligonucleotide
  Sense strand starting at position 2421 of SEQ ID NO: 587135
cguguuaguuuagcagacu

SEQ ID NO: 769259 - RNA, 19 nt, Artificial Sequence
  Description of Artificial Sequence: Synthetic oligonucleotide
  Antisense strand to SEQ ID NO: 769258
agucugcuaaacuaacacg

SEQ ID NO: 769260 - RNA, 19 nt, Artificial Sequence
  Description of Artificial Sequence: Synthetic oligonucleotide
  Sense strand starting at position 2424 of SEQ ID NO: 587135
guuaguuuagcagacuguu

SEQ ID NO: 769261 - RNA, 19 nt, Artificial Sequence
  Description of Artificial Sequence: Synthetic oligonucleotide
  Antisense strand to SEQ ID NO: 769260
aacagucugcuaaacuaac

SEQ ID NO: 769262 - RNA, 19 nt, Artificial Sequence
  Description of Artificial Sequence: Synthetic oligonucleotide
  Sense strand starting at position 2430 of SEQ ID NO: 587135
uuagcagacuguugagacu

SEQ ID NO: 769263 - RNA, 19 nt, Artificial Sequence
  Description of Artificial Sequence: Synthetic oligonucleotide
  Antisense strand to SEQ ID NO: 769262
agucucaacagucugcuaa

SEQ ID NO: 769264 - RNA, 19 nt, Artificial Sequence
  Description of Artificial Sequence: Synthetic oligonucleotide
  Sense strand starting at position 2477 of SEQ ID NO: 587135
gaaauagacguuuacgagu

SEQ ID NO: 769265 - RNA, 19 nt, Artificial Sequence
  Description of Artificial Sequence: Synthetic oligonucleotide
  Antisense strand to SEQ ID NO: 769264
acucguaaacgucuauuuc

SEQ ID NO: 769266 - RNA, 19 nt, Artificial Sequence
  Description of Artificial Sequence: Synthetic oligonucleotide
  Sense strand starting at position 2479 of SEQ ID NO: 587135
aauagacguuuacgaguaa

SEQ ID NO: 769267 - RNA, 19 nt, Artificial Sequence
  Description of Artificial Sequence: Synthetic oligonucleotide
  Antisense strand to SEQ ID NO: 769266
uuacucguaaacgucuauu

SEQ ID NO: 769268 - RNA, 19 nt, Artificial Sequence
  Description of Artificial Sequence: Synthetic oligonucleotide
  Sense strand starting at position 2483 of SEQ ID NO: 587135
gacguuuacgaguaagaaa

SEQ ID NO: 769269 - RNA, 19 nt, Artificial Sequence
  Description of Artificial Sequence: Synthetic oligonucleotide
  Antisense strand to SEQ ID NO: 769268
uuucuuacucguaaacguc

SEQ ID NO: 769270 - RNA, 19 nt, Artificial Sequence
  Description of Artificial Sequence: Synthetic oligonucleotide
  Sense strand starting at position 2604 of SEQ ID NO: 587135
guuuccuaacuuugcuaga

SEQ ID NO: 769271 - RNA, 19 nt, Artificial Sequence
  Description of Artificial Sequence: Synthetic oligonucleotide
  Antisense strand to SEQ ID NO: 769270
ucuagcaaaguuaggaaac

SEQ ID NO: 769272 - RNA, 19 nt, Artificial Sequence
  Description of Artificial Sequence: Synthetic oligonucleotide
  Sense strand starting at position 2615 of SEQ ID NO: 587135
uugcuagaauccucaacug

SEQ ID NO: 769273 - RNA, 19 nt, Artificial Sequence
  Description of Artificial Sequence: Synthetic oligonucleotide
  Antisense strand to SEQ ID NO: 769272
caguugaggauucuagcaa

SEQ ID NO: 769274 - RNA, 19 nt, Artificial Sequence
  Description of Artificial Sequence: Synthetic oligonucleotide
  Sense strand starting at position 2658 of SEQ ID NO: 587135
acucuuugaucuuguguaa

SEQ ID NO: 769275 - RNA, 19 nt, Artificial Sequence
  Description of Artificial Sequence: Synthetic oligonucleotide
  Antisense strand to SEQ ID NO: 769274
uuacacaagaucaaagagu

SEQ ID NO: 769276 - RNA, 19 nt, Artificial Sequence
  Description of Artificial Sequence: Synthetic oligonucleotide
  Sense strand starting at position 2661 of SEQ ID NO: 587135
cuuugaucuuguguaaacg

SEQ ID NO: 769277 - RNA, 19 nt, Artificial Sequence
  Description of Artificial Sequence: Synthetic oligonucleotide
  Antisense strand to SEQ ID NO: 769276
cguuuacacaagaucaaag

SEQ ID NO: 769278 - RNA, 19 nt, Artificial Sequence
  Description of Artificial Sequence: Synthetic oligonucleotide
  Sense strand starting at position 2662 of SEQ ID NO: 587135
uuugaucuuguguaaacga

SEQ ID NO: 769279 - RNA, 19 nt, Artificial Sequence
  Description of Artificial Sequence: Synthetic oligonucleotide
  Antisense strand to SEQ ID NO: 769278
ucguuuacacaagaucaaa

SEQ ID NO: 769280 - RNA, 19 nt, Artificial Sequence
  Description of Artificial Sequence: Synthetic oligonucleotide
  Sense strand starting at position 2793 of SEQ ID NO: 587135
acgguaaacagauaagcuu

SEQ ID NO: 769281 - RNA, 19 nt, Artificial Sequence
  Description of Artificial Sequence: Synthetic oligonucleotide
  Antisense strand to SEQ ID NO: 769280
aagcuuaucuguuuaccgu

SEQ ID NO: 769282 - RNA, 19 nt, Artificial Sequence
  Description of Artificial Sequence: Synthetic oligonucleotide
  Sense strand starting at position 2853 of SEQ ID NO: 587135
gcugguuugggacacaguu

SEQ ID NO: 769283 - RNA, 19 nt, Artificial Sequence
  Description of Artificial Sequence: Synthetic oligonucleotide
  Antisense strand to SEQ ID NO: 769282
aacugugucccaaaccagc

SEQ ID NO: 769284 - RNA, 19 nt, Artificial Sequence
  Description of Artificial Sequence: Synthetic oligonucleotide
  Sense strand starting at position 2855 of SEQ ID NO: 587135
ugguuugggacacaguuau

SEQ ID NO: 769285 - RNA, 19 nt, Artificial Sequence
  Description of Artificial Sequence: Synthetic oligonucleotide
  Antisense strand to SEQ ID NO: 769284
auaacugugucccaaacca

SEQ ID NO: 769286 - RNA, 19 nt, Artificial Sequence
  Description of Artificial Sequence: Synthetic oligonucleotide
  Sense strand starting at position 2861 of SEQ ID NO: 587135
gggacacaguuaugucuau

SEQ ID NO: 769287 - RNA, 19 nt, Artificial Sequence
  Description of Artificial Sequence: Synthetic oligonucleotide
  Antisense strand to SEQ ID NO: 769286
auagacauaacuguguccc

SEQ ID NO: 769288 - RNA, 19 nt, Artificial Sequence
  Description of Artificial Sequence: Synthetic oligonucleotide
  Sense strand starting at position 3101 of SEQ ID NO: 587135
gcucgauucccggguucau

SEQ ID NO: 769289 - RNA, 19 nt, Artificial Sequence
  Description of Artificial Sequence: Synthetic oligonucleotide
  Antisense strand to SEQ ID NO: 769288
augaacccgggaaucgagc

SEQ ID NO: 769290 - RNA, 19 nt, Artificial Sequence
  Description of Artificial Sequence: Synthetic oligonucleotide
  Sense strand starting at position 3227 of SEQ ID NO: 587135
uggacaugauggucucgau

SEQ ID NO: 769291 - RNA, 19 nt, Artificial Sequence
  Description of Artificial Sequence: Synthetic oligonucleotide
  Antisense strand to SEQ ID NO: 769290
aucgagaccaucaugucca

SEQ ID NO: 769292 - RNA, 19 nt, Artificial Sequence
  Description of Artificial Sequence: Synthetic oligonucleotide
  Sense strand starting at position 3713 of SEQ ID NO: 587135
gcccuuucguuucuuguua

SEQ ID NO: 769293 - RNA, 19 nt, Artificial Sequence
  Description of Artificial Sequence: Synthetic oligonucleotide
  Antisense strand to SEQ ID NO: 769292
uaacaagaaacgaaagggc

SEQ ID NO: 769294 - RNA, 19 nt, Artificial Sequence
  Description of Artificial Sequence: Synthetic oligonucleotide
  Sense strand starting at position 3721 of SEQ ID NO: 587135
guuucuuguuacccucaga

SEQ ID NO: 769295 - RNA, 19 nt, Artificial Sequence
  Description of Artificial Sequence: Synthetic oligonucleotide
  Antisense strand to SEQ ID NO: 769294
ucugaggguaacaagaaac

SEQ ID NO: 769296 - RNA, 19 nt, Artificial Sequence
  Description of Artificial Sequence: Synthetic oligonucleotide
  Sense strand starting at position 3816 of SEQ ID NO: 587135
uauggcuucugugucuuua

SEQ ID NO: 769297 - RNA, 19 nt, Artificial Sequence
  Description of Artificial Sequence: Synthetic oligonucleotide
  Antisense strand to SEQ ID NO: 769296
uaaagacacagaagccaua

SEQ ID NO: 769298 - RNA, 19 nt, Artificial Sequence
  Description of Artificial Sequence: Synthetic oligonucleotide
  Sense strand starting at position 3820 of SEQ ID NO: 587135
gcuucugugucuuuaugau

SEQ ID NO: 769299 - RNA, 19 nt, Artificial Sequence
  Description of Artificial Sequence: Synthetic oligonucleotide
  Antisense strand to SEQ ID NO: 769298
aucauaaagacacagaagc

SEQ ID NO: 769300 - RNA, 19 nt, Artificial Sequence
  Description of Artificial Sequence: Synthetic oligonucleotide
  Sense strand starting at position 3888 of SEQ ID NO: 587135
cggcucgaggugugaucau

SEQ ID NO: 769301 - RNA, 19 nt, Artificial Sequence
  Description of Artificial Sequence: Synthetic oligonucleotide
  Antisense strand to SEQ ID NO: 769300
augaucacaccucgagccg

SEQ ID NO: 769302 - RNA, 19 nt, Artificial Sequence
  Description of Artificial Sequence: Synthetic oligonucleotide
  Sense strand starting at position 3901 of SEQ ID NO: 587135
gaucauauguaaugugcaa

SEQ ID NO: 769303 - RNA, 19 nt, Artificial Sequence
  Description of Artificial Sequence: Synthetic oligonucleotide
  Antisense strand to SEQ ID NO: 769302
uugcacauuacauaugauc

SEQ ID NO: 769304 - RNA, 19 nt, Artificial Sequence
  Description of Artificial Sequence: Synthetic oligonucleotide
  Sense strand starting at position 3957 of SEQ ID NO: 587135
agcauugguuaggcuacaa

SEQ ID NO: 769305 - RNA, 19 nt, Artificial Sequence
  Description of Artificial Sequence: Synthetic oligonucleotide
  Antisense strand to SEQ ID NO: 769304
uuguagccuaaccaaugcu

SEQ ID NO: 769306 - RNA, 19 nt, Artificial Sequence
  Description of Artificial Sequence: Synthetic oligonucleotide
  Sense strand starting at position 2 of SEQ ID NO: 587136
guggucaucgcugcauaua

SEQ ID NO: 769307 - RNA, 19 nt, Artificial Sequence
  Description of Artificial Sequence: Synthetic oligonucleotide
  Antisense strand to SEQ ID NO: 769306
uauaugcagcgaugaccac

SEQ ID NO: 769308 - RNA, 19 nt, Artificial Sequence
  Description of Artificial Sequence: Synthetic oligonucleotide
  Sense strand starting at position 76 of SEQ ID NO: 587136
cgcacacuuugagugauuu

SEQ ID NO: 769309 - RNA, 19 nt, Artificial Sequence
  Description of Artificial Sequence: Synthetic oligonucleotide
  Antisense strand to SEQ ID NO: 769308
aaaucacucaaagugugcg

SEQ ID NO: 769310 - RNA, 19 nt, Artificial Sequence
  Description of Artificial Sequence: Synthetic oligonucleotide
  Sense strand starting at position 158 of SEQ ID NO: 587136
ccauuuaccucgucuucua

SEQ ID NO: 769311 - RNA, 19 nt, Artificial Sequence
  Description of Artificial Sequence: Synthetic oligonucleotide
  Antisense strand to SEQ ID NO: 769310
uagaagacgagguaaaugg

SEQ ID NO: 769312 - RNA, 19 nt, Artificial Sequence
  Description of Artificial Sequence: Synthetic oligonucleotide
  Sense strand starting at position 203 of SEQ ID NO: 587136
uugacaauguuaccaaugu

SEQ ID NO: 769313 - RNA, 19 nt, Artificial Sequence
  Description of Artificial Sequence: Synthetic oligonucleotide
  Antisense strand to SEQ ID NO: 769312
acauugguaacauugucaa

SEQ ID NO: 769314 - RNA, 19 nt, Artificial Sequence
  Description of Artificial Sequence: Synthetic oligonucleotide
  Sense strand starting at position 235 of SEQ ID NO: 587136
ccugguaauggguaauauu

SEQ ID NO: 769315 - RNA, 19 nt, Artificial Sequence
  Description of Artificial Sequence: Synthetic oligonucleotide
  Antisense strand to SEQ ID NO: 769314
aauauuacccauuaccagg

SEQ ID NO: 769316 - RNA, 19 nt, Artificial Sequence
  Description of Artificial Sequence: Synthetic oligonucleotide
  Sense strand starting at position 303 of SEQ ID NO: 587136
uuaugcggucuauaguaaa

SEQ ID NO: 769317 - RNA, 19 nt, Artificial Sequence
  Description of Artificial Sequence: Synthetic oligonucleotide
  Antisense strand to SEQ ID NO: 769316
uuuacuauagaccgcauaa

SEQ ID NO: 769318 - RNA, 19 nt, Artificial Sequence
  Description of Artificial Sequence: Synthetic oligonucleotide
  Sense strand starting at position 532 of SEQ ID NO: 587136
auaggauaguguuuguauu

SEQ ID NO: 769319 - RNA, 19 nt, Artificial Sequence
  Description of Artificial Sequence: Synthetic oligonucleotide
  Antisense strand to SEQ ID NO: 769318
aauacaaacacuauccuau

SEQ ID NO: 769320 - RNA, 19 nt, Artificial Sequence
  Description of Artificial Sequence: Synthetic oligonucleotide
  Sense strand starting at position 621 of SEQ ID NO: 587136
ccuggacugcuauaaaugu

SEQ ID NO: 769321 - RNA, 19 nt, Artificial Sequence
  Description of Artificial Sequence: Synthetic oligonucleotide
  Antisense strand to SEQ ID NO: 769320
acauuuauagcaguccagg

SEQ ID NO: 769322 - RNA, 19 nt, Artificial Sequence
  Description of Artificial Sequence: Synthetic oligonucleotide
  Sense strand starting at position 827 of SEQ ID NO: 587136
aaauguucuuugucaugga

SEQ ID NO: 769323 - RNA, 19 nt, Artificial Sequence
  Description of Artificial Sequence: Synthetic oligonucleotide
  Antisense strand to SEQ ID NO: 769322
uccaugacaaagaacauuu

SEQ ID NO: 769324 - RNA, 19 nt, Artificial Sequence
  Description of Artificial Sequence: Synthetic oligonucleotide
  Sense strand starting at position 863 of SEQ ID NO: 587136
gaguauucgcuccacagag

SEQ ID NO: 769325 - RNA, 19 nt, Artificial Sequence
  Description of Artificial Sequence: Synthetic oligonucleotide
  Antisense strand to SEQ ID NO: 769324
cucuguggagcgaauacuc

SEQ ID NO: 769326 - RNA, 19 nt, Artificial Sequence
  Description of Artificial Sequence: Synthetic oligonucleotide
  Sense strand starting at position 865 of SEQ ID NO: 587136
guauucgcuccacagagau

SEQ ID NO: 769327 - RNA, 19 nt, Artificial Sequence
  Description of Artificial Sequence: Synthetic oligonucleotide
  Antisense strand to SEQ ID NO: 769326
aucucuguggagcgaauac

SEQ ID NO: 769328 - RNA, 19 nt, Artificial Sequence
  Description of Artificial Sequence: Synthetic oligonucleotide
  Sense strand starting at position 971 of SEQ ID NO: 587136
gauuuauuguagggauaaa

SEQ ID NO: 769329 - RNA, 19 nt, Artificial Sequence
  Description of Artificial Sequence: Synthetic oligonucleotide
  Antisense strand to SEQ ID NO: 769328
uuuaucccuacaauaaauc

SEQ ID NO: 769330 - RNA, 19 nt, Artificial Sequence
  Description of Artificial Sequence: Synthetic oligonucleotide
  Sense strand starting at position 1001 of SEQ ID NO: 587136
ugaauuauuucugaggguc

SEQ ID NO: 769331 - RNA, 19 nt, Artificial Sequence
  Description of Artificial Sequence: Synthetic oligonucleotide
  Antisense strand to SEQ ID NO: 769330
gacccucagaaauaauuca

SEQ ID NO: 769332 - RNA, 19 nt, Artificial Sequence
  Description of Artificial Sequence: Synthetic oligonucleotide
  Sense strand starting at position 1032 of SEQ ID NO: 587136
gaauucgugcaguauggaa

SEQ ID NO: 769333 - RNA, 19 nt, Artificial Sequence
  Description of Artificial Sequence: Synthetic oligonucleotide
  Antisense strand to SEQ ID NO: 769332
uuccauacugcacgaauuc

SEQ ID NO: 769334 - RNA, 19 nt, Artificial Sequence
  Description of Artificial Sequence: Synthetic oligonucleotide
  Sense strand starting at position 1849 of SEQ ID NO: 587136
cugcgucuugcuguucuaa

SEQ ID NO: 769335 - RNA, 19 nt, Artificial Sequence
  Description of Artificial Sequence: Synthetic oligonucleotide
  Antisense strand to SEQ ID NO: 769334
uuagaacagcaagacgcag

SEQ ID NO: 769336 - RNA, 19 nt, Artificial Sequence
  Description of Artificial Sequence: Synthetic oligonucleotide
  Sense strand starting at position 1894 of SEQ ID NO: 587136
ccuagaaacugcucagaug

SEQ ID NO: 769337 - RNA, 19 nt, Artificial Sequence
  Description of Artificial Sequence: Synthetic oligonucleotide
  Antisense strand to SEQ ID NO: 769336
caucugagcaguuucuagg

SEQ ID NO: 769338 - RNA, 19 nt, Artificial Sequence
  Description of Artificial Sequence: Synthetic oligonucleotide
  Sense strand starting at position 1906 of SEQ ID NO: 587136
ucagauggaccucgcauaa

SEQ ID NO: 769339 - RNA, 19 nt, Artificial Sequence
  Description of Artificial Sequence: Synthetic oligonucleotide
  Antisense strand to SEQ ID NO: 769338
uuaugcgagguccaucuga

SEQ ID NO: 769340 - RNA, 19 nt, Artificial Sequence
  Description of Artificial Sequence: Synthetic oligonucleotide
  Sense strand starting at position 1933 of SEQ ID NO: 587136
ucacaagguuccguuggaa

SEQ ID NO: 769341 - RNA, 19 nt, Artificial Sequence
  Description of Artificial Sequence: Synthetic oligonucleotide
  Antisense strand to SEQ ID NO: 769340
uuccaacggaaccuuguga

SEQ ID NO: 769342 - RNA, 19 nt, Artificial Sequence
  Description of Artificial Sequence: Synthetic oligonucleotide
  Sense strand starting at position 1954 of SEQ ID NO: 587136
ggaaguuucccaugauugu

SEQ ID NO: 769343 - RNA, 19 nt, Artificial Sequence
  Description of Artificial Sequence: Synthetic oligonucleotide
  Antisense strand to SEQ ID NO: 769342
acaaucaugggaaacuucc

SEQ ID NO: 769344 - RNA, 19 nt, Artificial Sequence
  Description of Artificial Sequence: Synthetic oligonucleotide
  Sense strand starting at position 1955 of SEQ ID NO: 587136
gaaguuucccaugauugua

SEQ ID NO: 769345 - RNA, 19 nt, Artificial Sequence
  Description of Artificial Sequence: Synthetic oligonucleotide
  Antisense strand to SEQ ID NO: 769344
uacaaucaugggaaacuuc

SEQ ID NO: 769346 - RNA, 19 nt, Artificial Sequence
  Description of Artificial Sequence: Synthetic oligonucleotide
  Sense strand starting at position 1963 of SEQ ID NO: 587136
ccaugauuguaucugcaga

SEQ ID NO: 769347 - RNA, 19 nt, Artificial Sequence
  Description of Artificial Sequence: Synthetic oligonucleotide
  Antisense strand to SEQ ID NO: 769346
ucugcagauacaaucaugg

SEQ ID NO: 769348 - RNA, 19 nt, Artificial Sequence
  Description of Artificial Sequence: Synthetic oligonucleotide
  Sense strand starting at position 1968 of SEQ ID NO: 587136
auuguaucugcagacggau

SEQ ID NO: 769349 - RNA, 19 nt, Artificial Sequence
  Description of Artificial Sequence: Synthetic oligonucleotide
  Antisense strand to SEQ ID NO: 769348
auccgucugcagauacaau

SEQ ID NO: 769350 - RNA, 19 nt, Artificial Sequence
  Description of Artificial Sequence: Synthetic oligonucleotide
  Sense strand starting at position 2055 of SEQ ID NO: 587136
cuuagaucucagugaugaa

SEQ ID NO: 769351 - RNA, 19 nt, Artificial Sequence
  Description of Artificial Sequence: Synthetic oligonucleotide
  Antisense strand to SEQ ID NO: 769350
uucaucacugagaucuaag

SEQ ID NO: 769352 - RNA, 19 nt, Artificial Sequence
  Description of Artificial Sequence: Synthetic oligonucleotide
  Sense strand starting at position 2187 of SEQ ID NO: 587136
agguuugucaccuguauuu

SEQ ID NO: 769353 - RNA, 19 nt, Artificial Sequence
  Description of Artificial Sequence: Synthetic oligonucleotide
  Antisense strand to SEQ ID NO: 769352
aaauacaggugacaaaccu

SEQ ID NO: 769354 - RNA, 19 nt, Artificial Sequence
  Description of Artificial Sequence: Synthetic oligonucleotide
  Sense strand starting at position 2199 of SEQ ID NO: 587136
uguauuugccagugauucc

SEQ ID NO: 769355 - RNA, 19 nt, Artificial Sequence
  Description of Artificial Sequence: Synthetic oligonucleotide
  Antisense strand to SEQ ID NO: 769354
ggaaucacuggcaaauaca

SEQ ID NO: 769356 - RNA, 19 nt, Artificial Sequence
  Description of Artificial Sequence: Synthetic oligonucleotide
  Sense strand starting at position 2208 of SEQ ID NO: 587136
cagugauucccagagcucu

SEQ ID NO: 769357 - RNA, 19 nt, Artificial Sequence
  Description of Artificial Sequence: Synthetic oligonucleotide
  Antisense strand to SEQ ID NO: 769356
agagcucugggaaucacug

SEQ ID NO: 769358 - RNA, 19 nt, Artificial Sequence
  Description of Artificial Sequence: Synthetic oligonucleotide
  Sense strand starting at position 2270 of SEQ ID NO: 587136
caagguugaccugggaguu

SEQ ID NO: 769359 - RNA, 19 nt, Artificial Sequence
  Description of Artificial Sequence: Synthetic oligonucleotide
  Antisense strand to SEQ ID NO: 769358
aacucccaggucaaccuug

SEQ ID NO: 769360 - RNA, 19 nt, Artificial Sequence
  Description of Artificial Sequence: Synthetic oligonucleotide
  Sense strand starting at position 2271 of SEQ ID NO: 587136
aagguugaccugggaguua

SEQ ID NO: 769361 - RNA, 19 nt, Artificial Sequence
  Description of Artificial Sequence: Synthetic oligonucleotide
  Antisense strand to SEQ ID NO: 769360
uaacucccaggucaaccuu

SEQ ID NO: 769362 - RNA, 19 nt, Artificial Sequence
  Description of Artificial Sequence: Synthetic oligonucleotide
  Sense strand starting at position 2496 of SEQ ID NO: 587136
ggucuaaggucuucagaag

SEQ ID NO: 769363 - RNA, 19 nt, Artificial Sequence
  Description of Artificial Sequence: Synthetic oligonucleotide
  Antisense strand to SEQ ID NO: 769362
cuucugaagaccuuagacc

SEQ ID NO: 769364 - RNA, 19 nt, Artificial Sequence
  Description of Artificial Sequence: Synthetic oligonucleotide
  Sense strand starting at position 2663 of SEQ ID NO: 587136
agagccuuuaccugaagag

SEQ ID NO: 769365 - RNA, 19 nt, Artificial Sequence
  Description of Artificial Sequence: Synthetic oligonucleotide
  Antisense strand to SEQ ID NO: 769364
cucuucagguaaaggcucu

SEQ ID NO: 769366 - RNA, 19 nt, Artificial Sequence
  Description of Artificial Sequence: Synthetic oligonucleotide
  Sense strand starting at position 2860 of SEQ ID NO: 587136
gcuuaucaucuccauagua

SEQ ID NO: 769367 - RNA, 19 nt, Artificial Sequence
  Description of Artificial Sequence: Synthetic oligonucleotide
  Antisense strand to SEQ ID NO: 769366
uacuauggagaugauaagc

SEQ ID NO: 769368 - RNA, 19 nt, Artificial Sequence
  Description of Artificial Sequence: Synthetic oligonucleotide
  Sense strand starting at position 3192 of SEQ ID NO: 587136
guaauuugaugugaaucaa

SEQ ID NO: 769369 - RNA, 19 nt, Artificial Sequence
  Description of Artificial Sequence: Synthetic oligonucleotide
  Antisense strand to SEQ ID NO: 769368
uugauucacaucaaauuac

SEQ ID NO: 769370 - RNA, 19 nt, Artificial Sequence
  Description of Artificial Sequence: Synthetic oligonucleotide
  Sense strand starting at position 3363 of SEQ ID NO: 587136
gauuguuuaugaguuuaug

SEQ ID NO: 769371 - RNA, 19 nt, Artificial Sequence
  Description of Artificial Sequence: Synthetic oligonucleotide
  Antisense strand to SEQ ID NO: 769370
cauaaacucauaaacaauc

SEQ ID NO: 769372 - RNA, 19 nt, Artificial Sequence
  Description of Artificial Sequence: Synthetic oligonucleotide
  Sense strand starting at position 3371 of SEQ ID NO: 587136
augaguuuaugaguuuaca

SEQ ID NO: 769373 - RNA, 19 nt, Artificial Sequence
  Description of Artificial Sequence: Synthetic oligonucleotide
  Antisense strand to SEQ ID NO: 769372
uguaaacucauaaacucau

SEQ ID NO: 769374 - RNA, 19 nt, Artificial Sequence
  Description of Artificial Sequence: Synthetic oligonucleotide
  Sense strand starting at position 3415 of SEQ ID NO: 587136
cccuccaugugacuaaaga

SEQ ID NO: 769375 - RNA, 19 nt, Artificial Sequence
  Description of Artificial Sequence: Synthetic oligonucleotide
  Antisense strand to SEQ ID NO: 769374
ucuuuagucacauggaggg

SEQ ID NO: 769376 - RNA, 19 nt, Artificial Sequence
  Description of Artificial Sequence: Synthetic oligonucleotide
  Sense strand starting at position 3475 of SEQ ID NO: 587136
ucaguaaccuggcuuggau

SEQ ID NO: 769377 - RNA, 19 nt, Artificial Sequence
  Description of Artificial Sequence: Synthetic oligonucleotide
  Antisense strand to SEQ ID NO: 769376
auccaagccagguuacuga

SEQ ID NO: 769378 - RNA, 19 nt, Artificial Sequence
  Description of Artificial Sequence: Synthetic oligonucleotide
  Sense strand starting at position 3484 of SEQ ID NO: 587136
uggcuuggaucugcaagaa

SEQ ID NO: 769379 - RNA, 19 nt, Artificial Sequence
  Description of Artificial Sequence: Synthetic oligonucleotide
  Antisense strand to SEQ ID NO: 769378
uucuugcagauccaagcca

SEQ ID NO: 769380 - RNA, 19 nt, Artificial Sequence
  Description of Artificial Sequence: Synthetic oligonucleotide
  Sense strand starting at position 3488 of SEQ ID NO: 587136
uuggaucugcaagaaugua

SEQ ID NO: 769381 - RNA, 19 nt, Artificial Sequence
  Description of Artificial Sequence: Synthetic oligonucleotide
  Antisense strand to SEQ ID NO: 769380
uacauucuugcagauccaa

SEQ ID NO: 769382 - RNA, 19 nt, Artificial Sequence
  Description of Artificial Sequence: Synthetic oligonucleotide
  Sense strand starting at position 3510 of SEQ ID NO: 587136
auuaaaugcugguuauauc

SEQ ID NO: 769383 - RNA, 19 nt, Artificial Sequence
  Description of Artificial Sequence: Synthetic oligonucleotide
  Antisense strand to SEQ ID NO: 769382
gauauaaccagcauuuaau

SEQ ID NO: 769384 - RNA, 19 nt, Artificial Sequence
  Description of Artificial Sequence: Synthetic oligonucleotide
  Sense strand starting at position 3511 of SEQ ID NO: 587136
uuaaaugcugguuauauca

SEQ ID NO: 769385 - RNA, 19 nt, Artificial Sequence
  Description of Artificial Sequence: Synthetic oligonucleotide
  Antisense strand to SEQ ID NO: 769384
ugauauaaccagcauuuaa

SEQ ID NO: 769386 - RNA, 19 nt, Artificial Sequence
  Description of Artificial Sequence: Synthetic oligonucleotide
  Sense strand starting at position 30 of SEQ ID NO: 587137
auaaaucaguaacaggaaa

SEQ ID NO: 769387 - RNA, 19 nt, Artificial Sequence
  Description of Artificial Sequence: Synthetic oligonucleotide
  Antisense strand to SEQ ID NO: 769386
uuuccuguuacugauuuau

SEQ ID NO: 769388 - RNA, 19 nt, Artificial Sequence
  Description of Artificial Sequence: Synthetic oligonucleotide
  Sense strand starting at position 71 of SEQ ID NO: 587137
caugauguagugcaaagua

SEQ ID NO: 769389 - RNA, 19 nt, Artificial Sequence
  Description of Artificial Sequence: Synthetic oligonucleotide
  Antisense strand to SEQ ID NO: 769388
uacuuugcacuacaucaug

SEQ ID NO: 769390 - RNA, 19 nt, Artificial Sequence
  Description of Artificial Sequence: Synthetic oligonucleotide
  Sense strand starting at position 81 of SEQ ID NO: 587137
ugcaaaguacaaugggaua

SEQ ID NO: 769391 - RNA, 19 nt, Artificial Sequence
  Description of Artificial Sequence: Synthetic oligonucleotide
  Antisense strand to SEQ ID NO: 769390
uaucccauuguacuuugca

SEQ ID NO: 769392 - RNA, 19 nt, Artificial Sequence
  Description of Artificial Sequence: Synthetic oligonucleotide
  Sense strand starting at position 126 of SEQ ID NO: 587137
ucuaguucugguuacauua

SEQ ID NO: 769393 - RNA, 19 nt, Artificial Sequence
  Description of Artificial Sequence: Synthetic oligonucleotide
  Antisense strand to SEQ ID NO: 769392
uaauguaaccagaacuaga

SEQ ID NO: 769394 - RNA, 19 nt, Artificial Sequence
  Description of Artificial Sequence: Synthetic oligonucleotide
  Sense strand starting at position 144 of SEQ ID NO: 587137
auuaaauugcuguaugacu

SEQ ID NO: 769395 - RNA, 19 nt, Artificial Sequence
  Description of Artificial Sequence: Synthetic oligonucleotide
  Antisense strand to SEQ ID NO: 769394
agucauacagcaauuuaau

SEQ ID NO: 769396 - RNA, 19 nt, Artificial Sequence
  Description of Artificial Sequence: Synthetic oligonucleotide
  Sense strand starting at position 288 of SEQ ID NO: 587137
acucaauguucucuaaggu

SEQ ID NO: 769397 - RNA, 19 nt, Artificial Sequence
  Description of Artificial Sequence: Synthetic oligonucleotide
  Antisense strand to SEQ ID NO: 769396
accuuagagaacauugagu

SEQ ID NO: 769398 - RNA, 19 nt, Artificial Sequence
  Description of Artificial Sequence: Synthetic oligonucleotide
  Sense strand starting at position 385 of SEQ ID NO: 587137
gguggacuccuaugaaguu

SEQ ID NO: 769399 - RNA, 19 nt, Artificial Sequence
  Description of Artificial Sequence: Synthetic oligonucleotide
  Antisense strand to SEQ ID NO: 769398
aacuucauaggaguccacc

SEQ ID NO: 769400 - RNA, 19 nt, Artificial Sequence
  Description of Artificial Sequence: Synthetic oligonucleotide
  Sense strand starting at position 461 of SEQ ID NO: 587137
ggugaaaucugguuuggca

SEQ ID NO: 769401 - RNA, 19 nt, Artificial Sequence
  Description of Artificial Sequence: Synthetic oligonucleotide
  Antisense strand to SEQ ID NO: 769400
ugccaaaccagauuucacc

SEQ ID NO: 769402 - RNA, 19 nt, Artificial Sequence
  Description of Artificial Sequence: Synthetic oligonucleotide
  Sense strand starting at position 463 of SEQ ID NO: 587137
ugaaaucugguuuggcaua

SEQ ID NO: 769403 - RNA, 19 nt, Artificial Sequence
  Description of Artificial Sequence: Synthetic oligonucleotide
  Antisense strand to SEQ ID NO: 769402
uaugccaaaccagauuuca

SEQ ID NO: 769404 - RNA, 19 nt, Artificial Sequence
  Description of Artificial Sequence: Synthetic oligonucleotide
  Sense strand starting at position 468 of SEQ ID NO: 587137
ucugguuuggcauaccuaa

SEQ ID NO: 769405 - RNA, 19 nt, Artificial Sequence
  Description of Artificial Sequence: Synthetic oligonucleotide
  Antisense strand to SEQ ID NO: 769404
uuagguaugccaaaccaga

SEQ ID NO: 769406 - RNA, 19 nt, Artificial Sequence
  Description of Artificial Sequence: Synthetic oligonucleotide
  Sense strand starting at position 977 of SEQ ID NO: 587137
cuuguuucucuuuaacgaa

SEQ ID NO: 769407 - RNA, 19 nt, Artificial Sequence
  Description of Artificial Sequence: Synthetic oligonucleotide
  Antisense strand to SEQ ID NO: 769406
uucguuaaagagaaacaag

SEQ ID NO: 769408 - RNA, 19 nt, Artificial Sequence
  Description of Artificial Sequence: Synthetic oligonucleotide
  Sense strand starting at position 984 of SEQ ID NO: 587137
cucuuuaacgaagagcaau

SEQ ID NO: 769409 - RNA, 19 nt, Artificial Sequence
  Description of Artificial Sequence: Synthetic oligonucleotide
  Antisense strand to SEQ ID NO: 769408
auugcucuucguuaaagag

SEQ ID NO: 769410 - RNA, 19 nt, Artificial Sequence
  Description of Artificial Sequence: Synthetic oligonucleotide
  Sense strand starting at position 1131 of SEQ ID NO: 587137
ggcauuguuaaggaacgua

SEQ ID NO: 769411 - RNA, 19 nt, Artificial Sequence
  Description of Artificial Sequence: Synthetic oligonucleotide
  Antisense strand to SEQ ID NO: 769410
uacguuccuuaacaaugcc

SEQ ID NO: 769412 - RNA, 19 nt, Artificial Sequence
  Description of Artificial Sequence: Synthetic oligonucleotide
  Sense strand starting at position 1239 of SEQ ID NO: 587137
guggccugagaauaaaguu

SEQ ID NO: 769413 - RNA, 19 nt, Artificial Sequence
  Description of Artificial Sequence: Synthetic oligonucleotide
  Antisense strand to SEQ ID NO: 769412
aacuuuauucucaggccac

SEQ ID NO: 769414 - RNA, 19 nt, Artificial Sequence
  Description of Artificial Sequence: Synthetic oligonucleotide
  Sense strand starting at position 2427 of SEQ ID NO: 587137
cugcgaucugaagacugaa

SEQ ID NO: 769415 - RNA, 19 nt, Artificial Sequence
  Description of Artificial Sequence: Synthetic oligonucleotide
  Antisense strand to SEQ ID NO: 769414
uucagucuucagaucgcag

SEQ ID NO: 769416 - RNA, 19 nt, Artificial Sequence
  Description of Artificial Sequence: Synthetic oligonucleotide
  Sense strand starting at position 2562 of SEQ ID NO: 587137
aggccucucccagaauugu

SEQ ID NO: 769417 - RNA, 19 nt, Artificial Sequence
  Description of Artificial Sequence: Synthetic oligonucleotide
  Antisense strand to SEQ ID NO: 769416
acaauucugggagaggccu

SEQ ID NO: 769418 - RNA, 19 nt, Artificial Sequence
  Description of Artificial Sequence: Synthetic oligonucleotide
  Sense strand starting at position 2583 of SEQ ID NO: 587137
aagagaucgcccuggugga

SEQ ID NO: 769419 - RNA, 19 nt, Artificial Sequence
  Description of Artificial Sequence: Synthetic oligonucleotide
  Antisense strand to SEQ ID NO: 769418
uccaccagggcgaucucuu

SEQ ID NO: 769420 - RNA, 19 nt, Artificial Sequence
  Description of Artificial Sequence: Synthetic oligonucleotide
  Sense strand starting at position 2584 of SEQ ID NO: 587137
agagaucgcccugguggau

SEQ ID NO: 769421 - RNA, 19 nt, Artificial Sequence
  Description of Artificial Sequence: Synthetic oligonucleotide
  Antisense strand to SEQ ID NO: 769420
auccaccagggcgaucucu

SEQ ID NO: 769422 - RNA, 19 nt, Artificial Sequence
  Description of Artificial Sequence: Synthetic oligonucleotide
  Sense strand starting at position 2644 of SEQ ID NO: 587137
cgugucacgcggguuuaau

SEQ ID NO: 769423 - RNA, 19 nt, Artificial Sequence
  Description of Artificial Sequence: Synthetic oligonucleotide
  Antisense strand to SEQ ID NO: 769422
auuaaacccgcgugacacg

SEQ ID NO: 769424 - RNA, 19 nt, Artificial Sequence
  Description of Artificial Sequence: Synthetic oligonucleotide
  Sense strand starting at position 2645 of SEQ ID NO: 587137
gugucacgcggguuuaaug

SEQ ID NO: 769425 - RNA, 19 nt, Artificial Sequence
  Description of Artificial Sequence: Synthetic oligonucleotide
  Antisense strand to SEQ ID NO: 769424
cauuaaacccgcgugacac

SEQ ID NO: 769426 - RNA, 19 nt, Artificial Sequence
  Description of Artificial Sequence: Synthetic oligonucleotide
  Sense strand starting at position 2780 of SEQ ID NO: 587137
cccuuucuucuguaaguua

SEQ ID NO: 769427 - RNA, 19 nt, Artificial Sequence
  Description of Artificial Sequence: Synthetic oligonucleotide
  Antisense strand to SEQ ID NO: 769426
uaacuuacagaagaaaggg

SEQ ID NO: 769428 - RNA, 19 nt, Artificial Sequence
  Description of Artificial Sequence: Synthetic oligonucleotide
  Sense strand starting at position 2845 of SEQ ID NO: 587137
ugcagacugcagugaauua

SEQ ID NO: 769429 - RNA, 19 nt, Artificial Sequence
  Description of Artificial Sequence: Synthetic oligonucleotide
  Antisense strand to SEQ ID NO: 769428
uaauucacugcagucugca

SEQ ID NO: 769430 - RNA, 19 nt, Artificial Sequence
  Description of Artificial Sequence: Synthetic oligonucleotide
  Sense strand starting at position 2846 of SEQ ID NO: 587137
gcagacugcagugaauuau

SEQ ID NO: 769431 - RNA, 19 nt, Artificial Sequence
  Description of Artificial Sequence: Synthetic oligonucleotide
  Antisense strand to SEQ ID NO: 769430
auaauucacugcagucugc

SEQ ID NO: 769432 - RNA, 19 nt, Artificial Sequence
  Description of Artificial Sequence: Synthetic oligonucleotide
  Sense strand starting at position 2852 of SEQ ID NO: 587137
ugcagugaauuaucaaaua

SEQ ID NO: 769433 - RNA, 19 nt, Artificial Sequence
  Description of Artificial Sequence: Synthetic oligonucleotide
  Antisense strand to SEQ ID NO: 769432
uauuugauaauucacugca

SEQ ID NO: 769434 - RNA, 19 nt, Artificial Sequence
  Description of Artificial Sequence: Synthetic oligonucleotide
  Sense strand starting at position 2920 of SEQ ID NO: 587137
uguuaagacgucuauaaca

SEQ ID NO: 769435 - RNA, 19 nt, Artificial Sequence
  Description of Artificial Sequence: Synthetic oligonucleotide
  Antisense strand to SEQ ID NO: 769434
uguuauagacgucuuaaca

SEQ ID NO: 769436 - RNA, 19 nt, Artificial Sequence
  Description of Artificial Sequence: Synthetic oligonucleotide
  Sense strand starting at position 2963 of SEQ ID NO: 587137
auguuaacaucucugauag

SEQ ID NO: 769437 - RNA, 19 nt, Artificial Sequence
  Description of Artificial Sequence: Synthetic oligonucleotide
  Antisense strand to SEQ ID NO: 769436
cuaucagagauguuaacau

SEQ ID NO: 769438 - RNA, 19 nt, Artificial Sequence
  Description of Artificial Sequence: Synthetic oligonucleotide
  Sense strand starting at position 3077 of SEQ ID NO: 587137
aaugaaauaggcugagcaa

SEQ ID NO: 769439 - RNA, 19 nt, Artificial Sequence
  Description of Artificial Sequence: Synthetic oligonucleotide
  Antisense strand to SEQ ID NO: 769438
uugcucagccuauuucauu

SEQ ID NO: 769440 - RNA, 19 nt, Artificial Sequence
  Description of Artificial Sequence: Synthetic oligonucleotide
  Sense strand starting at position 3121 of SEQ ID NO: 587137
aguggauagccuugggagu

SEQ ID NO: 769441 - RNA, 19 nt, Artificial Sequence
  Description of Artificial Sequence: Synthetic oligonucleotide
  Antisense strand to SEQ ID NO: 769440
acucccaaggcuauccacu

SEQ ID NO: 769442 - RNA, 19 nt, Artificial Sequence
  Description of Artificial Sequence: Synthetic oligonucleotide
  Sense strand starting at position 3239 of SEQ ID NO: 587137
uuagaaagcagucguagaa

SEQ ID NO: 769443 - RNA, 19 nt, Artificial Sequence
  Description of Artificial Sequence: Synthetic oligonucleotide
  Antisense strand to SEQ ID NO: 769442
uucuacgacugcuuucuaa

SEQ ID NO: 769444 - RNA, 19 nt, Artificial Sequence
  Description of Artificial Sequence: Synthetic oligonucleotide
  Sense strand starting at position 3243 of SEQ ID NO: 587137
aaagcagucguagaaauau

SEQ ID NO: 769445 - RNA, 19 nt, Artificial Sequence
  Description of Artificial Sequence: Synthetic oligonucleotide
  Antisense strand to SEQ ID NO: 769444
auauuucuacgacugcuuu

SEQ ID NO: 769446 - RNA, 19 nt, Artificial Sequence
  Description of Artificial Sequence: Synthetic oligonucleotide
  Sense strand starting at position 3255 of SEQ ID NO: 587137
gaaauauaagccuggaguu

SEQ ID NO: 769447 - RNA, 19 nt, Artificial Sequence
  Description of Artificial Sequence: Synthetic oligonucleotide
  Antisense strand to SEQ ID NO: 769446
aacuccaggcuuauauuuc

SEQ ID NO: 769448 - RNA, 19 nt, Artificial Sequence
  Description of Artificial Sequence: Synthetic oligonucleotide
  Sense strand starting at position 3267 of SEQ ID NO: 587137
uggaguugccucugaauua

SEQ ID NO: 769449 - RNA, 19 nt, Artificial Sequence
  Description of Artificial Sequence: Synthetic oligonucleotide
  Antisense strand to SEQ ID NO: 769448
uaauucagaggcaacucca

SEQ ID NO: 769450 - RNA, 19 nt, Artificial Sequence
  Description of Artificial Sequence: Synthetic oligonucleotide
  Sense strand starting at position 3430 of SEQ ID NO: 587137
aguauaguaccagaaguau

SEQ ID NO: 769451 - RNA, 19 nt, Artificial Sequence
  Description of Artificial Sequence: Synthetic oligonucleotide
  Antisense strand to SEQ ID NO: 769450
auacuucugguacuauacu

SEQ ID NO: 769452 - RNA, 19 nt, Artificial Sequence
  Description of Artificial Sequence: Synthetic oligonucleotide
  Sense strand starting at position 3895 of SEQ ID NO: 587137
agguaucacauguaaagua

SEQ ID NO: 769453 - RNA, 19 nt, Artificial Sequence
  Description of Artificial Sequence: Synthetic oligonucleotide
  Antisense strand to SEQ ID NO: 769452
uacuuuacaugugauaccu

SEQ ID NO: 769454 - RNA, 19 nt, Artificial Sequence
  Description of Artificial Sequence: Synthetic oligonucleotide
  Sense strand starting at position 3905 of SEQ ID NO: 587137
uguaaaguaccugauacau

SEQ ID NO: 769455 - RNA, 19 nt, Artificial Sequence
  Description of Artificial Sequence: Synthetic oligonucleotide
  Antisense strand to SEQ ID NO: 769454
auguaucagguacuuuaca

SEQ ID NO: 769456 - RNA, 19 nt, Artificial Sequence
  Description of Artificial Sequence: Synthetic oligonucleotide
  Sense strand starting at position 3917 of SEQ ID NO: 587137
gauacauagugguuacuca

SEQ ID NO: 769457 - RNA, 19 nt, Artificial Sequence
  Description of Artificial Sequence: Synthetic oligonucleotide
  Antisense strand to SEQ ID NO: 769456
ugaguaaccacuauguauc

SEQ ID NO: 769458 - RNA, 19 nt, Artificial Sequence
  Description of Artificial Sequence: Synthetic oligonucleotide
  Sense strand starting at position 3918 of SEQ ID NO: 587137
auacauagugguuacucaa

SEQ ID NO: 769459 - RNA, 19 nt, Artificial Sequence
  Description of Artificial Sequence: Synthetic oligonucleotide
  Antisense strand to SEQ ID NO: 769458
uugaguaaccacuauguau

SEQ ID NO: 769460 - RNA, 19 nt, Artificial Sequence
  Description of Artificial Sequence: Synthetic oligonucleotide
  Sense strand starting at position 3921 of SEQ ID NO: 587137
cauagugguuacucaagua

SEQ ID NO: 769461 - RNA, 19 nt, Artificial Sequence
  Description of Artificial Sequence: Synthetic oligonucleotide
  Antisense strand to SEQ ID NO: 769460
uacuugaguaaccacuaug

SEQ ID NO: 769462 - RNA, 19 nt, Artificial Sequence
  Description of Artificial Sequence: Synthetic oligonucleotide
  Sense strand starting at position 3926 of SEQ ID NO: 587137
ugguuacucaaguauuagu

SEQ ID NO: 769463 - RNA, 19 nt, Artificial Sequence
  Description of Artificial Sequence: Synthetic oligonucleotide
  Antisense strand to SEQ ID NO: 769462
acuaauacuugaguaacca

SEQ ID NO: 769464 - RNA, 19 nt, Artificial Sequence
  Description of Artificial Sequence: Synthetic oligonucleotide
  Sense strand starting at position 3979 of SEQ ID NO: 587137
ucugcuuucccugagcuaa

SEQ ID NO: 769465 - RNA, 19 nt, Artificial Sequence
  Description of Artificial Sequence: Synthetic oligonucleotide
  Antisense strand to SEQ ID NO: 769464
uuagcucagggaaagcaga

SEQ ID NO: 769466 - RNA, 19 nt, Artificial Sequence
  Description of Artificial Sequence: Synthetic oligonucleotide
  Sense strand starting at position 54 of SEQ ID NO: 587138
gugacaaccugucucuaug

SEQ ID NO: 769467 - RNA, 19 nt, Artificial Sequence
  Description of Artificial Sequence: Synthetic oligonucleotide
  Antisense strand to SEQ ID NO: 769466
cauagagacagguugucac

SEQ ID NO: 769468 - RNA, 19 nt, Artificial Sequence
  Description of Artificial Sequence: Synthetic oligonucleotide
  Sense strand starting at position 333 of SEQ ID NO: 587138
augaguucucacuguguua

SEQ ID NO: 769469 - RNA, 19 nt, Artificial Sequence
  Description of Artificial Sequence: Synthetic oligonucleotide
  Antisense strand to SEQ ID NO: 769468
uaacacagugagaacucau

SEQ ID NO: 769470 - RNA, 19 nt, Artificial Sequence
  Description of Artificial Sequence: Synthetic oligonucleotide
  Sense strand starting at position 436 of SEQ ID NO: 587138
gcaccuggccuauauugua

SEQ ID NO: 769471 - RNA, 19 nt, Artificial Sequence
  Description of Artificial Sequence: Synthetic oligonucleotide
  Antisense strand to SEQ ID NO: 769470
uacaauauaggccaggugc

SEQ ID NO: 769472 - RNA, 19 nt, Artificial Sequence
  Description of Artificial Sequence: Synthetic oligonucleotide
  Sense strand starting at position 513 of SEQ ID NO: 587138
ucuuauugcuguuagcagu

SEQ ID NO: 769473 - RNA, 19 nt, Artificial Sequence
  Description of Artificial Sequence: Synthetic oligonucleotide
  Antisense strand to SEQ ID NO: 769472
acugcuaacagcaauaaga

SEQ ID NO: 769474 - RNA, 19 nt, Artificial Sequence
  Description of Artificial Sequence: Synthetic oligonucleotide
  Sense strand starting at position 519 of SEQ ID NO: 587138
ugcuguuagcaguaguaua

SEQ ID NO: 769475 - RNA, 19 nt, Artificial Sequence
  Description of Artificial Sequence: Synthetic oligonucleotide
  Antisense strand to SEQ ID NO: 769474
uauacuacugcuaacagca

SEQ ID NO: 769476 - RNA, 19 nt, Artificial Sequence
  Description of Artificial Sequence: Synthetic oligonucleotide
  Sense strand starting at position 527 of SEQ ID NO: 587138
gcaguaguauaaggcagau

SEQ ID NO: 769477 - RNA, 19 nt, Artificial Sequence
  Description of Artificial Sequence: Synthetic oligonucleotide
  Antisense strand to SEQ ID NO: 769476
aucugccuuauacuacugc

SEQ ID NO: 769478 - RNA, 19 nt, Artificial Sequence
  Description of Artificial Sequence: Synthetic oligonucleotide
  Sense strand starting at position 546 of SEQ ID NO: 587138
gagaaaguguggcuucuaa

SEQ ID NO: 769479 - RNA, 19 nt, Artificial Sequence
  Description of Artificial Sequence: Synthetic oligonucleotide
  Antisense strand to SEQ ID NO: 769478
uuagaagccacacuuucuc

SEQ ID NO: 769480 - RNA, 19 nt, Artificial Sequence
  Description of Artificial Sequence: Synthetic oligonucleotide
  Sense strand starting at position 550 of SEQ ID NO: 587138
aaguguggcuucuaaaggu

SEQ ID NO: 769481 - RNA, 19 nt, Artificial Sequence
  Description of Artificial Sequence: Synthetic oligonucleotide
  Antisense strand to SEQ ID NO: 769480
accuuuagaagccacacuu

SEQ ID NO: 769482 - RNA, 19 nt, Artificial Sequence
  Description of Artificial Sequence: Synthetic oligonucleotide
  Sense strand starting at position 557 of SEQ ID NO: 587138
gcuucuaaagguugaguaa

SEQ ID NO: 769483 - RNA, 19 nt, Artificial Sequence
  Description of Artificial Sequence: Synthetic oligonucleotide
  Antisense strand to SEQ ID NO: 769482
uuacucaaccuuuagaagc

SEQ ID NO: 769484 - RNA, 19 nt, Artificial Sequence
  Description of Artificial Sequence: Synthetic oligonucleotide
  Sense strand starting at position 560 of SEQ ID NO: 587138
ucuaaagguugaguaacuu

SEQ ID NO: 769485 - RNA, 19 nt, Artificial Sequence
  Description of Artificial Sequence: Synthetic oligonucleotide
  Antisense strand to SEQ ID NO: 769484
aaguuacucaaccuuuaga

SEQ ID NO: 769486 - RNA, 19 nt, Artificial Sequence
  Description of Artificial Sequence: Synthetic oligonucleotide
  Sense strand starting at position 617 of SEQ ID NO: 587138
ucaggcuauuaccaugaaa

SEQ ID NO: 769487 - RNA, 19 nt, Artificial Sequence
  Description of Artificial Sequence: Synthetic oligonucleotide
  Antisense strand to SEQ ID NO: 769486
uuucaugguaauagccuga

SEQ ID NO: 769488 - RNA, 19 nt, Artificial Sequence
  Description of Artificial Sequence: Synthetic oligonucleotide
  Sense strand starting at position 760 of SEQ ID NO: 587138
uccagugagguuggauaua

SEQ ID NO: 769489 - RNA, 19 nt, Artificial Sequence
  Description of Artificial Sequence: Synthetic oligonucleotide
  Antisense strand to SEQ ID NO: 769488
uauauccaaccucacugga

SEQ ID NO: 769490 - RNA, 19 nt, Artificial Sequence
  Description of Artificial Sequence: Synthetic oligonucleotide
  Sense strand starting at position 779 of SEQ ID NO: 587138
gaccaaagaugguuugauu

SEQ ID NO: 769491 - RNA, 19 nt, Artificial Sequence
  Description of Artificial Sequence: Synthetic oligonucleotide
  Antisense strand to SEQ ID NO: 769490
aaucaaaccaucuuugguc

SEQ ID NO: 769492 - RNA, 19 nt, Artificial Sequence
  Description of Artificial Sequence: Synthetic oligonucleotide
  Sense strand starting at position 1182 of SEQ ID NO: 587138
gcuggccugagugagaauu

SEQ ID NO: 769493 - RNA, 19 nt, Artificial Sequence
  Description of Artificial Sequence: Synthetic oligonucleotide
  Antisense strand to SEQ ID NO: 769492
aauucucacucaggccagc

SEQ ID NO: 769494 - RNA, 19 nt, Artificial Sequence
  Description of Artificial Sequence: Synthetic oligonucleotide
  Sense strand starting at position 1190 of SEQ ID NO: 587138
gagugagaauuccaccgca

SEQ ID NO: 769495 - RNA, 19 nt, Artificial Sequence
  Description of Artificial Sequence: Synthetic oligonucleotide
  Antisense strand to SEQ ID NO: 769494
ugcgguggaauucucacuc

SEQ ID NO: 769496 - RNA, 19 nt, Artificial Sequence
  Description of Artificial Sequence: Synthetic oligonucleotide
  Sense strand starting at position 1195 of SEQ ID NO: 587138
agaauuccaccgcauauaa

SEQ ID NO: 769497 - RNA, 19 nt, Artificial Sequence
  Description of Artificial Sequence: Synthetic oligonucleotide
  Antisense strand to SEQ ID NO: 769496
uuauaugcgguggaauucu

SEQ ID NO: 769498 - RNA, 19 nt, Artificial Sequence
  Description of Artificial Sequence: Synthetic oligonucleotide
  Sense strand starting at position 1269 of SEQ ID NO: 587138
cccuguaauugggaauaac

SEQ ID NO: 769499 - RNA, 19 nt, Artificial Sequence
  Description of Artificial Sequence: Synthetic oligonucleotide
  Antisense strand to SEQ ID NO: 769498
guuauucccaauuacaggg

SEQ ID NO: 769500 - RNA, 19 nt, Artificial Sequence
  Description of Artificial Sequence: Synthetic oligonucleotide
  Sense strand starting at position 1279 of SEQ ID NO: 587138
gggaauaacugucgacuca

SEQ ID NO: 769501 - RNA, 19 nt, Artificial Sequence
  Description of Artificial Sequence: Synthetic oligonucleotide
  Antisense strand to SEQ ID NO: 769500
ugagucgacaguuauuccc

SEQ ID NO: 769502 - RNA, 19 nt, Artificial Sequence
  Description of Artificial Sequence: Synthetic oligonucleotide
  Sense strand starting at position 1440 of SEQ ID NO: 587138
ggagccaacuucuugaaga

SEQ ID NO: 769503 - RNA, 19 nt, Artificial Sequence
  Description of Artificial Sequence: Synthetic oligonucleotide
  Antisense strand to SEQ ID NO: 769502
ucuucaagaaguuggcucc

SEQ ID NO: 769504 - RNA, 19 nt, Artificial Sequence
  Description of Artificial Sequence: Synthetic oligonucleotide
  Sense strand starting at position 1441 of SEQ ID NO: 587138
gagccaacuucuugaagag

SEQ ID NO: 769505 - RNA, 19 nt, Artificial Sequence
  Description of Artificial Sequence: Synthetic oligonucleotide
  Antisense strand to SEQ ID NO: 769504
cucuucaagaaguuggcuc

SEQ ID NO: 769506 - RNA, 19 nt, Artificial Sequence
  Description of Artificial Sequence: Synthetic oligonucleotide
  Sense strand starting at position 1913 of SEQ ID NO: 587138
accaguccucgccggaaga

SEQ ID NO: 769507 - RNA, 19 nt, Artificial Sequence
  Description of Artificial Sequence: Synthetic oligonucleotide
  Antisense strand to SEQ ID NO: 769506
ucuuccggcgaggacuggu

SEQ ID NO: 769508 - RNA, 19 nt, Artificial Sequence
  Description of Artificial Sequence: Synthetic oligonucleotide
  Sense strand starting at position 2038 of SEQ ID NO: 587138
uuaggauucuugucccuua

SEQ ID NO: 769509 - RNA, 19 nt, Artificial Sequence
  Description of Artificial Sequence: Synthetic oligonucleotide
  Antisense strand to SEQ ID NO: 769508
uaagggacaagaauccuaa

SEQ ID NO: 769510 - RNA, 19 nt, Artificial Sequence
  Description of Artificial Sequence: Synthetic oligonucleotide
  Sense strand starting at position 2043 of SEQ ID NO: 587138
auucuugucccuuagcgaa

SEQ ID NO: 769511 - RNA, 19 nt, Artificial Sequence
  Description of Artificial Sequence: Synthetic oligonucleotide
  Antisense strand to SEQ ID NO: 769510
uucgcuaagggacaagaau

SEQ ID NO: 769512 - RNA, 19 nt, Artificial Sequence
  Description of Artificial Sequence: Synthetic oligonucleotide
  Sense strand starting at position 2538 of SEQ ID NO: 587138
ccacaagacugcucaugga

SEQ ID NO: 769513 - RNA, 19 nt, Artificial Sequence
  Description of Artificial Sequence: Synthetic oligonucleotide
  Antisense strand to SEQ ID NO: 769512
uccaugagcagucuugugg

SEQ ID NO: 769514 - RNA, 19 nt, Artificial Sequence
  Description of Artificial Sequence: Synthetic oligonucleotide
  Sense strand starting at position 2541 of SEQ ID NO: 587138
caagacugcucauggaaag

SEQ ID NO: 769515 - RNA, 19 nt, Artificial Sequence
  Description of Artificial Sequence: Synthetic oligonucleotide
  Antisense strand to SEQ ID NO: 769514
cuuuccaugagcagucuug

SEQ ID NO: 769516 - RNA, 19 nt, Artificial Sequence
  Description of Artificial Sequence: Synthetic oligonucleotide
  Sense strand starting at position 2553 of SEQ ID NO: 587138
uggaaagccucuuacuaca

SEQ ID NO: 769517 - RNA, 19 nt, Artificial Sequence
  Description of Artificial Sequence: Synthetic oligonucleotide
  Antisense strand to SEQ ID NO: 769516
uguaguaagaggcuuucca

SEQ ID NO: 769518 - RNA, 19 nt, Artificial Sequence
  Description of Artificial Sequence: Synthetic oligonucleotide
  Sense strand starting at position 2561 of SEQ ID NO: 587138
cucuuacuacagggaguaa

SEQ ID NO: 769519 - RNA, 19 nt, Artificial Sequence
  Description of Artificial Sequence: Synthetic oligonucleotide
  Antisense strand to SEQ ID NO: 769518
uuacucccuguaguaagag

SEQ ID NO: 769520 - RNA, 19 nt, Artificial Sequence
  Description of Artificial Sequence: Synthetic oligonucleotide
  Sense strand starting at position 2939 of SEQ ID NO: 587138
aaauaaaugugucuaugga

SEQ ID NO: 769521 - RNA, 19 nt, Artificial Sequence
  Description of Artificial Sequence: Synthetic oligonucleotide
  Antisense strand to SEQ ID NO: 769520
uccauagacacauuuauuu

SEQ ID NO: 769522 - RNA, 19 nt, Artificial Sequence
  Description of Artificial Sequence: Synthetic oligonucleotide
  Sense strand starting at position 2965 of SEQ ID NO: 587138
gguaguaaguucccugcca

SEQ ID NO: 769523 - RNA, 19 nt, Artificial Sequence
  Description of Artificial Sequence: Synthetic oligonucleotide
  Antisense strand to SEQ ID NO: 769522
uggcagggaacuuacuacc

SEQ ID NO: 769524 - RNA, 19 nt, Artificial Sequence
  Description of Artificial Sequence: Synthetic oligonucleotide
  Sense strand starting at position 2980 of SEQ ID NO: 587138
gccaccauuugggauagau

SEQ ID NO: 769525 - RNA, 19 nt, Artificial Sequence
  Description of Artificial Sequence: Synthetic oligonucleotide
  Antisense strand to SEQ ID NO: 769524
aucuaucccaaaugguggc

SEQ ID NO: 769526 - RNA, 19 nt, Artificial Sequence
  Description of Artificial Sequence: Synthetic oligonucleotide
  Sense strand starting at position 3065 of SEQ ID NO: 587138
cacuguuugccacauggaa

SEQ ID NO: 769527 - RNA, 19 nt, Artificial Sequence
  Description of Artificial Sequence: Synthetic oligonucleotide
  Antisense strand to SEQ ID NO: 769526
uuccauguggcaaacagug

SEQ ID NO: 769528 - RNA, 19 nt, Artificial Sequence
  Description of Artificial Sequence: Synthetic oligonucleotide
  Sense strand starting at position 3073 of SEQ ID NO: 587138
gccacauggaauuguagau

SEQ ID NO: 769529 - RNA, 19 nt, Artificial Sequence
  Description of Artificial Sequence: Synthetic oligonucleotide
  Antisense strand to SEQ ID NO: 769528
aucuacaauuccauguggc

SEQ ID NO: 769530 - RNA, 19 nt, Artificial Sequence
  Description of Artificial Sequence: Synthetic oligonucleotide
  Sense strand starting at position 3077 of SEQ ID NO: 587138
cauggaauuguagaugcua

SEQ ID NO: 769531 - RNA, 19 nt, Artificial Sequence
  Description of Artificial Sequence: Synthetic oligonucleotide
  Antisense strand to SEQ ID NO: 769530
uagcaucuacaauuccaug

SEQ ID NO: 769532 - RNA, 19 nt, Artificial Sequence
  Description of Artificial Sequence: Synthetic oligonucleotide
  Sense strand starting at position 3079 of SEQ ID NO: 587138
uggaauuguagaugcuagu

SEQ ID NO: 769533 - RNA, 19 nt, Artificial Sequence
  Description of Artificial Sequence: Synthetic oligonucleotide
  Antisense strand to SEQ ID NO: 769532
acuagcaucuacaauucca

SEQ ID NO: 769534 - RNA, 19 nt, Artificial Sequence
  Description of Artificial Sequence: Synthetic oligonucleotide
  Sense strand starting at position 3129 of SEQ ID NO: 587138
gguggugauuccuauccaa

SEQ ID NO: 769535 - RNA, 19 nt, Artificial Sequence
  Description of Artificial Sequence: Synthetic oligonucleotide
  Antisense strand to SEQ ID NO: 769534
uuggauaggaaucaccacc

SEQ ID NO: 769536 - RNA, 19 nt, Artificial Sequence
  Description of Artificial Sequence: Synthetic oligonucleotide
  Sense strand starting at position 3551 of SEQ ID NO: 587138
acucauagcugcuguguca

SEQ ID NO: 769537 - RNA, 19 nt, Artificial Sequence
  Description of Artificial Sequence: Synthetic oligonucleotide
  Antisense strand to SEQ ID NO: 769536
ugacacagcagcuaugagu

SEQ ID NO: 769538 - RNA, 19 nt, Artificial Sequence
  Description of Artificial Sequence: Synthetic oligonucleotide
  Sense strand starting at position 3636 of SEQ ID NO: 587138
gcuugaguacggugacaug

SEQ ID NO: 769539 - RNA, 19 nt, Artificial Sequence
  Description of Artificial Sequence: Synthetic oligonucleotide
  Antisense strand to SEQ ID NO: 769538
caugucaccguacucaagc

SEQ ID NO: 769540 - RNA, 19 nt, Artificial Sequence
  Description of Artificial Sequence: Synthetic oligonucleotide
  Sense strand starting at position 3945 of SEQ ID NO: 587138
ggacacugaucuggugagu

SEQ ID NO: 769541 - RNA, 19 nt, Artificial Sequence
  Description of Artificial Sequence: Synthetic oligonucleotide
  Antisense strand to SEQ ID NO: 769540
acucaccagaucagugucc

SEQ ID NO: 769542 - RNA, 19 nt, Artificial Sequence
  Description of Artificial Sequence: Synthetic oligonucleotide
  Sense strand starting at position 93 of SEQ ID NO: 587139
gaccuuuggugagccugaa

SEQ ID NO: 769543 - RNA, 19 nt, Artificial Sequence
  Description of Artificial Sequence: Synthetic oligonucleotide
  Antisense strand to SEQ ID NO: 769542
uucaggcucaccaaagguc

SEQ ID NO: 769544 - RNA, 19 nt, Artificial Sequence
  Description of Artificial Sequence: Synthetic oligonucleotide
  Sense strand starting at position 156 of SEQ ID NO: 587139
agugaagacaguugagauc

SEQ ID NO: 769545 - RNA, 19 nt, Artificial Sequence
  Description of Artificial Sequence: Synthetic oligonucleotide
  Antisense strand to SEQ ID NO: 769544
gaucucaacugucuucacu

SEQ ID NO: 769546 - RNA, 19 nt, Artificial Sequence
  Description of Artificial Sequence: Synthetic oligonucleotide
  Sense strand starting at position 169 of SEQ ID NO: 587139
gagauccuccaaugugaga

SEQ ID NO: 769547 - RNA, 19 nt, Artificial Sequence
  Description of Artificial Sequence: Synthetic oligonucleotide
  Antisense strand to SEQ ID NO: 769546
ucucacauuggaggaucuc

SEQ ID NO: 769548 - RNA, 19 nt, Artificial Sequence
  Description of Artificial Sequence: Synthetic oligonucleotide
  Sense strand starting at position 183 of SEQ ID NO: 587139
ugagaagguauaugucugu

SEQ ID NO: 769549 - RNA, 19 nt, Artificial Sequence
  Description of Artificial Sequence: Synthetic oligonucleotide
  Antisense strand to SEQ ID NO: 769548
acagacauauaccuucuca

SEQ ID NO: 769550 - RNA, 19 nt, Artificial Sequence
  Description of Artificial Sequence: Synthetic oligonucleotide
  Sense strand starting at position 186 of SEQ ID NO: 587139
gaagguauaugucuguauu

SEQ ID NO: 769551 - RNA, 19 nt, Artificial Sequence
  Description of Artificial Sequence: Synthetic oligonucleotide
  Antisense strand to SEQ ID NO: 769550
aauacagacauauaccuuc

SEQ ID NO: 769552 - RNA, 19 nt, Artificial Sequence
  Description of Artificial Sequence: Synthetic oligonucleotide
  Sense strand starting at position 192 of SEQ ID NO: 587139
auaugucuguauuugcaau

SEQ ID NO: 769553 - RNA, 19 nt, Artificial Sequence
  Description of Artificial Sequence: Synthetic oligonucleotide
  Antisense strand to SEQ ID NO: 769552
auugcaaauacagacauau

SEQ ID NO: 769554 - RNA, 19 nt, Artificial Sequence
  Description of Artificial Sequence: Synthetic oligonucleotide
  Sense strand starting at position 422 of SEQ ID NO: 587139
cgcuuagucuucucauuuc

SEQ ID NO: 769555 - RNA, 19 nt, Artificial Sequence
  Description of Artificial Sequence: Synthetic oligonucleotide
  Antisense strand to SEQ ID NO: 769554
gaaaugagaagacuaagcg

SEQ ID NO: 769556 - RNA, 19 nt, Artificial Sequence
  Description of Artificial Sequence: Synthetic oligonucleotide
  Sense strand starting at position 465 of SEQ ID NO: 587139
gcuggacagaugugaacau

SEQ ID NO: 769557 - RNA, 19 nt, Artificial Sequence
  Description of Artificial Sequence: Synthetic oligonucleotide
  Antisense strand to SEQ ID NO: 769556
auguucacaucuguccagc

SEQ ID NO: 769558 - RNA, 19 nt, Artificial Sequence
  Description of Artificial Sequence: Synthetic oligonucleotide
  Sense strand starting at position 466 of SEQ ID NO: 587139
cuggacagaugugaacaua

SEQ ID NO: 769559 - RNA, 19 nt, Artificial Sequence
  Description of Artificial Sequence: Synthetic oligonucleotide
  Antisense strand to SEQ ID NO: 769558
uauguucacaucuguccag

SEQ ID NO: 769560 - RNA, 19 nt, Artificial Sequence
  Description of Artificial Sequence: Synthetic oligonucleotide
  Sense strand starting at position 476 of SEQ ID NO: 587139
gugaacauacagugagaua

SEQ ID NO: 769561 - RNA, 19 nt, Artificial Sequence
  Description of Artificial Sequence: Synthetic oligonucleotide
  Antisense strand to SEQ ID NO: 769560
uaucucacuguauguucac

SEQ ID NO: 769562 - RNA, 19 nt, Artificial Sequence
  Description of Artificial Sequence: Synthetic oligonucleotide
  Sense strand starting at position 489 of SEQ ID NO: 587139
gagauaauguacuuguaau

SEQ ID NO: 769563 - RNA, 19 nt, Artificial Sequence
  Description of Artificial Sequence: Synthetic oligonucleotide
  Antisense strand to SEQ ID NO: 769562
auuacaaguacauuaucuc

SEQ ID NO: 769564 - RNA, 19 nt, Artificial Sequence
  Description of Artificial Sequence: Synthetic oligonucleotide
  Sense strand starting at position 554 of SEQ ID NO: 587139
uuaucacgaucuucgugau

SEQ ID NO: 769565 - RNA, 19 nt, Artificial Sequence
  Description of Artificial Sequence: Synthetic oligonucleotide
  Antisense strand to SEQ ID NO: 769564
aucacgaagaucgugauaa

SEQ ID NO: 769566 - RNA, 19 nt, Artificial Sequence
  Description of Artificial Sequence: Synthetic oligonucleotide
  Sense strand starting at position 555 of SEQ ID NO: 587139
uaucacgaucuucgugauu

SEQ ID NO: 769567 - RNA, 19 nt, Artificial Sequence
  Description of Artificial Sequence: Synthetic oligonucleotide
  Antisense strand to SEQ ID NO: 769566
aaucacgaagaucgugaua

SEQ ID NO: 769568 - RNA, 19 nt, Artificial Sequence
  Description of Artificial Sequence: Synthetic oligonucleotide
  Sense strand starting at position 558 of SEQ ID NO: 587139
cacgaucuucgugauuauc

SEQ ID NO: 769569 - RNA, 19 nt, Artificial Sequence
  Description of Artificial Sequence: Synthetic oligonucleotide
  Antisense strand to SEQ ID NO: 769568
gauaaucacgaagaucgug

SEQ ID NO: 769570 - RNA, 19 nt, Artificial Sequence
  Description of Artificial Sequence: Synthetic oligonucleotide
  Sense strand starting at position 560 of SEQ ID NO: 587139
cgaucuucgugauuaucug

SEQ ID NO: 769571 - RNA, 19 nt, Artificial Sequence
  Description of Artificial Sequence: Synthetic oligonucleotide
  Antisense strand to SEQ ID NO: 769570
cagauaaucacgaagaucg

SEQ ID NO: 769572 - RNA, 19 nt, Artificial Sequence
  Description of Artificial Sequence: Synthetic oligonucleotide
  Sense strand starting at position 574 of SEQ ID NO: 587139
aucugcaguucguuugaga

SEQ ID NO: 769573 - RNA, 19 nt, Artificial Sequence
  Description of Artificial Sequence: Synthetic oligonucleotide
  Antisense strand to SEQ ID NO: 769572
ucucaaacgaacugcagau

SEQ ID NO: 769574 - RNA, 19 nt, Artificial Sequence
  Description of Artificial Sequence: Synthetic oligonucleotide
  Sense strand starting at position 582 of SEQ ID NO: 587139
uucguuugagaacaugagu

SEQ ID NO: 769575 - RNA, 19 nt, Artificial Sequence
  Description of Artificial Sequence: Synthetic oligonucleotide
  Antisense strand to SEQ ID NO: 769574
acucauguucucaaacgaa

SEQ ID NO: 769576 - RNA, 19 nt, Artificial Sequence
  Description of Artificial Sequence: Synthetic oligonucleotide
  Sense strand starting at position 619 of SEQ ID NO: 587139
ggagguagucuguaccuaa

SEQ ID NO: 769577 - RNA, 19 nt, Artificial Sequence
  Description of Artificial Sequence: Synthetic oligonucleotide
  Antisense strand to SEQ ID NO: 769576
uuagguacagacuaccucc

SEQ ID NO: 769578 - RNA, 19 nt, Artificial Sequence
  Description of Artificial Sequence: Synthetic oligonucleotide
  Sense strand starting at position 622 of SEQ ID NO: 587139
gguagucuguaccuaagua

SEQ ID NO: 769579 - RNA, 19 nt, Artificial Sequence
  Description of Artificial Sequence: Synthetic oligonucleotide
  Antisense strand to SEQ ID NO: 769578
uacuuagguacagacuacc

SEQ ID NO: 769580 - RNA, 19 nt, Artificial Sequence
  Description of Artificial Sequence: Synthetic oligonucleotide
  Sense strand starting at position 638 of SEQ ID NO: 587139
guacguaucugccuuggau

SEQ ID NO: 769581 - RNA, 19 nt, Artificial Sequence
  Description of Artificial Sequence: Synthetic oligonucleotide
  Antisense strand to SEQ ID NO: 769580
auccaaggcagauacguac

SEQ ID NO: 769582 - RNA, 19 nt, Artificial Sequence
  Description of Artificial Sequence: Synthetic oligonucleotide
  Sense strand starting at position 640 of SEQ ID NO: 587139
acguaucugccuuggauaa

SEQ ID NO: 769583 - RNA, 19 nt, Artificial Sequence
  Description of Artificial Sequence: Synthetic oligonucleotide
  Antisense strand to SEQ ID NO: 769582
uuauccaaggcagauacgu

SEQ ID NO: 769584 - RNA, 19 nt, Artificial Sequence
  Description of Artificial Sequence: Synthetic oligonucleotide
  Sense strand starting at position 681 of SEQ ID NO: 587139
ccuguacucagguagguaa

SEQ ID NO: 769585 - RNA, 19 nt, Artificial Sequence
  Description of Artificial Sequence: Synthetic oligonucleotide
  Antisense strand to SEQ ID NO: 769584
uuaccuaccugaguacagg

SEQ ID NO: 769586 - RNA, 19 nt, Artificial Sequence
  Description of Artificial Sequence: Synthetic oligonucleotide
  Sense strand starting at position 719 of SEQ ID NO: 587139
gacagcuaguguccaauga

SEQ ID NO: 769587 - RNA, 19 nt, Artificial Sequence
  Description of Artificial Sequence: Synthetic oligonucleotide
  Antisense strand to SEQ ID NO: 769586
ucauuggacacuagcuguc

SEQ ID NO: 769588 - RNA, 19 nt, Artificial Sequence
  Description of Artificial Sequence: Synthetic oligonucleotide
  Sense strand starting at position 832 of SEQ ID NO: 587139
ucacuaaugggaugccaca

SEQ ID NO: 769589 - RNA, 19 nt, Artificial Sequence
  Description of Artificial Sequence: Synthetic oligonucleotide
  Antisense strand to SEQ ID NO: 769588
uguggcaucccauuaguga

SEQ ID NO: 769590 - RNA, 19 nt, Artificial Sequence
  Description of Artificial Sequence: Synthetic oligonucleotide
  Sense strand starting at position 848 of SEQ ID NO: 587139
acaucucucugugcuacau

SEQ ID NO: 769591 - RNA, 19 nt, Artificial Sequence
  Description of Artificial Sequence: Synthetic oligonucleotide
  Antisense strand to SEQ ID NO: 769590
auguagcacagagagaugu

SEQ ID NO: 769592 - RNA, 19 nt, Artificial Sequence
  Description of Artificial Sequence: Synthetic oligonucleotide
  Sense strand starting at position 859 of SEQ ID NO: 587139
ugcuacauucuggaaacuu

SEQ ID NO: 769593 - RNA, 19 nt, Artificial Sequence
  Description of Artificial Sequence: Synthetic oligonucleotide
  Antisense strand to SEQ ID NO: 769592
aaguuuccagaauguagca

SEQ ID NO: 769594 - RNA, 19 nt, Artificial Sequence
  Description of Artificial Sequence: Synthetic oligonucleotide
  Sense strand starting at position 1045 of SEQ ID NO: 587139
ccuugacuuugucugcaga

SEQ ID NO: 769595 - RNA, 19 nt, Artificial Sequence
  Description of Artificial Sequence: Synthetic oligonucleotide
  Antisense strand to SEQ ID NO: 769594
ucugcagacaaagucaagg

SEQ ID NO: 769596 - RNA, 19 nt, Artificial Sequence
  Description of Artificial Sequence: Synthetic oligonucleotide
  Sense strand starting at position 1047 of SEQ ID NO: 587139
uugacuuugucugcagaca

SEQ ID NO: 769597 - RNA, 19 nt, Artificial Sequence
  Description of Artificial Sequence: Synthetic oligonucleotide
  Antisense strand to SEQ ID NO: 769596
ugucugcagacaaagucaa

SEQ ID NO: 769598 - RNA, 19 nt, Artificial Sequence
  Description of Artificial Sequence: Synthetic oligonucleotide
  Sense strand starting at position 1048 of SEQ ID NO: 587139
ugacuuugucugcagacau

SEQ ID NO: 769599 - RNA, 19 nt, Artificial Sequence
  Description of Artificial Sequence: Synthetic oligonucleotide
  Antisense strand to SEQ ID NO: 769598
augucugcagacaaaguca

SEQ ID NO: 769600 - RNA, 19 nt, Artificial Sequence
  Description of Artificial Sequence: Synthetic oligonucleotide
  Sense strand starting at position 1198 of SEQ ID NO: 587139
gcuggagucgccagggaau

SEQ ID NO: 769601 - RNA, 19 nt, Artificial Sequence
  Description of Artificial Sequence: Synthetic oligonucleotide
  Antisense strand to SEQ ID NO: 769600
auucccuggcgacuccagc

SEQ ID NO: 769602 - RNA, 19 nt, Artificial Sequence
  Description of Artificial Sequence: Synthetic oligonucleotide
  Sense strand starting at position 1201 of SEQ ID NO: 587139
ggagucgccagggaaugau

SEQ ID NO: 769603 - RNA, 19 nt, Artificial Sequence
  Description of Artificial Sequence: Synthetic oligonucleotide
  Antisense strand to SEQ ID NO: 769602
aucauucccuggcgacucc

SEQ ID NO: 769604 - RNA, 19 nt, Artificial Sequence
  Description of Artificial Sequence: Synthetic oligonucleotide
  Sense strand starting at position 1255 of SEQ ID NO: 587139
acugacauguuuccaggau

SEQ ID NO: 769605 - RNA, 19 nt, Artificial Sequence
  Description of Artificial Sequence: Synthetic oligonucleotide
  Antisense strand to SEQ ID NO: 769604
auccuggaaacaugucagu

SEQ ID NO: 769606 - RNA, 19 nt, Artificial Sequence
  Description of Artificial Sequence: Synthetic oligonucleotide
  Sense strand starting at position 2015 of SEQ ID NO: 587139
cgcgaaaggccagggauuu

SEQ ID NO: 769607 - RNA, 19 nt, Artificial Sequence
  Description of Artificial Sequence: Synthetic oligonucleotide
  Antisense strand to SEQ ID NO: 769606
aaaucccuggccuuucgcg

SEQ ID NO: 769608 - RNA, 19 nt, Artificial Sequence
  Description of Artificial Sequence: Synthetic oligonucleotide
  Sense strand starting at position 2034 of SEQ ID NO: 587139
gaggguuucucuucugcac

SEQ ID NO: 769609 - RNA, 19 nt, Artificial Sequence
  Description of Artificial Sequence: Synthetic oligonucleotide
  Antisense strand to SEQ ID NO: 769608
gugcagaagagaaacccuc

SEQ ID NO: 769610 - RNA, 19 nt, Artificial Sequence
  Description of Artificial Sequence: Synthetic oligonucleotide
  Sense strand starting at position 3307 of SEQ ID NO: 587139
guucucugcgugcaagaau

SEQ ID NO: 769611 - RNA, 19 nt, Artificial Sequence
  Description of Artificial Sequence: Synthetic oligonucleotide
  Antisense strand to SEQ ID NO: 769610
auucuugcacgcagagaac

SEQ ID NO: 769612 - RNA, 19 nt, Artificial Sequence
  Description of Artificial Sequence: Synthetic oligonucleotide
  Sense strand starting at position 3493 of SEQ ID NO: 587139
uuaauuccuugggucuaaa

SEQ ID NO: 769613 - RNA, 19 nt, Artificial Sequence
  Description of Artificial Sequence: Synthetic oligonucleotide
  Antisense strand to SEQ ID NO: 769612
uuuagacccaaggaauuaa

SEQ ID NO: 769614 - RNA, 19 nt, Artificial Sequence
  Description of Artificial Sequence: Synthetic oligonucleotide
  Sense strand starting at position 3901 of SEQ ID NO: 587139
ugagcaucucauggaguau

SEQ ID NO: 769615 - RNA, 19 nt, Artificial Sequence
  Description of Artificial Sequence: Synthetic oligonucleotide
  Antisense strand to SEQ ID NO: 769614
auacuccaugagaugcuca

SEQ ID NO: 769616 - RNA, 19 nt, Artificial Sequence
  Description of Artificial Sequence: Synthetic oligonucleotide
  Sense strand starting at position 3913 of SEQ ID NO: 587139
ggaguauccaguugaguug

SEQ ID NO: 769617 - RNA, 19 nt, Artificial Sequence
  Description of Artificial Sequence: Synthetic oligonucleotide
  Antisense strand to SEQ ID NO: 769616
caacucaacuggauacucc

SEQ ID NO: 769618 - RNA, 19 nt, Artificial Sequence
  Description of Artificial Sequence: Synthetic oligonucleotide
  Sense strand starting at position 3922 of SEQ ID NO: 587139
aguugaguuggguguuauu

SEQ ID NO: 769619 - RNA, 19 nt, Artificial Sequence
  Description of Artificial Sequence: Synthetic oligonucleotide
  Antisense strand to SEQ ID NO: 769618
aauaacacccaacucaacu

SEQ ID NO: 769620 - RNA, 19 nt, Artificial Sequence
  Description of Artificial Sequence: Synthetic oligonucleotide
  Sense strand starting at position 3933 of SEQ ID NO: 587139
guguuauuauaaccacacu

SEQ ID NO: 769621 - RNA, 19 nt, Artificial Sequence
  Description of Artificial Sequence: Synthetic oligonucleotide
  Antisense strand to SEQ ID NO: 769620
agugugguuauaauaacac

SEQ ID NO: 769622 - RNA, 19 nt, Artificial Sequence
  Description of Artificial Sequence: Synthetic oligonucleotide
  Sense strand starting at position 461 of SEQ ID NO: 587140
cucggaauuccugaccuca

SEQ ID NO: 769623 - RNA, 19 nt, Artificial Sequence
  Description of Artificial Sequence: Synthetic oligonucleotide
  Antisense strand to SEQ ID NO: 769622
ugaggucaggaauuccgag

SEQ ID NO: 769624 - RNA, 19 nt, Artificial Sequence
  Description of Artificial Sequence: Synthetic oligonucleotide
  Sense strand starting at position 567 of SEQ ID NO: 587140
gcuagucucucagugagag

SEQ ID NO: 769625 - RNA, 19 nt, Artificial Sequence
  Description of Artificial Sequence: Synthetic oligonucleotide
  Antisense strand to SEQ ID NO: 769624
cucucacugagagacuagc

SEQ ID NO: 769626 - RNA, 19 nt, Artificial Sequence
  Description of Artificial Sequence: Synthetic oligonucleotide
  Sense strand starting at position 568 of SEQ ID NO: 587140
cuagucucucagugagaga

SEQ ID NO: 769627 - RNA, 19 nt, Artificial Sequence
  Description of Artificial Sequence: Synthetic oligonucleotide
  Antisense strand to SEQ ID NO: 769626
ucucucacugagagacuag

SEQ ID NO: 769628 - RNA, 19 nt, Artificial Sequence
  Description of Artificial Sequence: Synthetic oligonucleotide
  Sense strand starting at position 1317 of SEQ ID NO: 587140
ggcuacaacucaguaguua

SEQ ID NO: 769629 - RNA, 19 nt, Artificial Sequence
  Description of Artificial Sequence: Synthetic oligonucleotide
  Antisense strand to SEQ ID NO: 769628
uaacuacugaguuguagcc

SEQ ID NO: 769630 - RNA, 19 nt, Artificial Sequence
  Description of Artificial Sequence: Synthetic oligonucleotide
  Sense strand starting at position 1318 of SEQ ID NO: 587140
gcuacaacucaguaguuau

SEQ ID NO: 769631 - RNA, 19 nt, Artificial Sequence
  Description of Artificial Sequence: Synthetic oligonucleotide
  Antisense strand to SEQ ID NO: 769630
auaacuacugaguuguagc

SEQ ID NO: 769632 - RNA, 19 nt, Artificial Sequence
  Description of Artificial Sequence: Synthetic oligonucleotide
  Sense strand starting at position 1321 of SEQ ID NO: 587140
acaacucaguaguuauaca

SEQ ID NO: 769633 - RNA, 19 nt, Artificial Sequence
  Description of Artificial Sequence: Synthetic oligonucleotide
  Antisense strand to SEQ ID NO: 769632
uguauaacuacugaguugu

SEQ ID NO: 769634 - RNA, 19 nt, Artificial Sequence
  Description of Artificial Sequence: Synthetic oligonucleotide
  Sense strand starting at position 1375 of SEQ ID NO: 587140
aacugcugucuuggagauu

SEQ ID NO: 769635 - RNA, 19 nt, Artificial Sequence
  Description of Artificial Sequence: Synthetic oligonucleotide
  Antisense strand to SEQ ID NO: 769634
aaucuccaagacagcaguu

SEQ ID NO: 769636 - RNA, 19 nt, Artificial Sequence
  Description of Artificial Sequence: Synthetic oligonucleotide
  Sense strand starting at position 1376 of SEQ ID NO: 587140
acugcugucuuggagauuu

SEQ ID NO: 769637 - RNA, 19 nt, Artificial Sequence
  Description of Artificial Sequence: Synthetic oligonucleotide
  Antisense strand to SEQ ID NO: 769636
aaaucuccaagacagcagu

SEQ ID NO: 769638 - RNA, 19 nt, Artificial Sequence
  Description of Artificial Sequence: Synthetic oligonucleotide
  Sense strand starting at position 1388 of SEQ ID NO: 587140
gagauuuauuggcaacaag

SEQ ID NO: 769639 - RNA, 19 nt, Artificial Sequence
  Description of Artificial Sequence: Synthetic oligonucleotide
  Antisense strand to SEQ ID NO: 769638
cuuguugccaauaaaucuc

SEQ ID NO: 769640 - RNA, 19 nt, Artificial Sequence
  Description of Artificial Sequence: Synthetic oligonucleotide
  Sense strand starting at position 1496 of SEQ ID NO: 587140
ccacauguuuaggacaaau

SEQ ID NO: 769641 - RNA, 19 nt, Artificial Sequence
  Description of Artificial Sequence: Synthetic oligonucleotide
  Antisense strand to SEQ ID NO: 769640
auuuguccuaaacaugugg

SEQ ID NO: 769642 - RNA, 19 nt, Artificial Sequence
  Description of Artificial Sequence: Synthetic oligonucleotide
  Sense strand starting at position 1506 of SEQ ID NO: 587140
aggacaaauugucacauuc

SEQ ID NO: 769643 - RNA, 19 nt, Artificial Sequence
  Description of Artificial Sequence: Synthetic oligonucleotide
  Antisense strand to SEQ ID NO: 769642
gaaugugacaauuuguccu

SEQ ID NO: 769644 - RNA, 19 nt, Artificial Sequence
  Description of Artificial Sequence: Synthetic oligonucleotide
  Sense strand starting at position 1819 of SEQ ID NO: 587140
auggcauguagaggaauaa

SEQ ID NO: 769645 - RNA, 19 nt, Artificial Sequence
  Description of Artificial Sequence: Synthetic oligonucleotide
  Antisense strand to SEQ ID NO: 769644
uuauuccucuacaugccau

SEQ ID NO: 769646 - RNA, 19 nt, Artificial Sequence
  Description of Artificial Sequence: Synthetic oligonucleotide
  Sense strand starting at position 2009 of SEQ ID NO: 587140
cggcgaccgcuuaguaaua

SEQ ID NO: 769647 - RNA, 19 nt, Artificial Sequence
  Description of Artificial Sequence: Synthetic oligonucleotide
  Antisense strand to SEQ ID NO: 769646
uauuacuaagcggucgccg

SEQ ID NO: 769648 - RNA, 19 nt, Artificial Sequence
  Description of Artificial Sequence: Synthetic oligonucleotide
  Sense strand starting at position 2020 of SEQ ID NO: 587140
uaguaauacgcauguucca

SEQ ID NO: 769649 - RNA, 19 nt, Artificial Sequence
  Description of Artificial Sequence: Synthetic oligonucleotide
  Antisense strand to SEQ ID NO: 769648
uggaacaugcguauuacua

SEQ ID NO: 769650 - RNA, 19 nt, Artificial Sequence
  Description of Artificial Sequence: Synthetic oligonucleotide
  Sense strand starting at position 2177 of SEQ ID NO: 587140
ggcuguuaccuuggagguu

SEQ ID NO: 769651 - RNA, 19 nt, Artificial Sequence
  Description of Artificial Sequence: Synthetic oligonucleotide
  Antisense strand to SEQ ID NO: 769650
aaccuccaagguaacagcc

SEQ ID NO: 769652 - RNA, 19 nt, Artificial Sequence
  Description of Artificial Sequence: Synthetic oligonucleotide
  Sense strand starting at position 2253 of SEQ ID NO: 587140
gacuuauucccagggcgac

SEQ ID NO: 769653 - RNA, 19 nt, Artificial Sequence
  Description of Artificial Sequence: Synthetic oligonucleotide
  Antisense strand to SEQ ID NO: 769652
gucgcccugggaauaaguc

SEQ ID NO: 769654 - RNA, 19 nt, Artificial Sequence
  Description of Artificial Sequence: Synthetic oligonucleotide
  Sense strand starting at position 2254 of SEQ ID NO: 587140
acuuauucccagggcgacu

SEQ ID NO: 769655 - RNA, 19 nt, Artificial Sequence
  Description of Artificial Sequence: Synthetic oligonucleotide
  Antisense strand to SEQ ID NO: 769654
agucgcccugggaauaagu

SEQ ID NO: 769656 - RNA, 19 nt, Artificial Sequence
  Description of Artificial Sequence: Synthetic oligonucleotide
  Sense strand starting at position 2721 of SEQ ID NO: 587140
gcaggaguaucgguccaug

SEQ ID NO: 769657 - RNA, 19 nt, Artificial Sequence
  Description of Artificial Sequence: Synthetic oligonucleotide
  Antisense strand to SEQ ID NO: 769656
cauggaccgauacuccugc

SEQ ID NO: 769658 - RNA, 19 nt, Artificial Sequence
  Description of Artificial Sequence: Synthetic oligonucleotide
  Sense strand starting at position 2724 of SEQ ID NO: 587140
ggaguaucgguccaugaaa

SEQ ID NO: 769659 - RNA, 19 nt, Artificial Sequence
  Description of Artificial Sequence: Synthetic oligonucleotide
  Antisense strand to SEQ ID NO: 769658
uuucauggaccgauacucc

SEQ ID NO: 769660 - RNA, 19 nt, Artificial Sequence
  Description of Artificial Sequence: Synthetic oligonucleotide
  Sense strand starting at position 2818 of SEQ ID NO: 587140
uauauuuaaucggagagag

SEQ ID NO: 769661 - RNA, 19 nt, Artificial Sequence
  Description of Artificial Sequence: Synthetic oligonucleotide
  Antisense strand to SEQ ID NO: 769660
cucucuccgauuaaauaua

SEQ ID NO: 769662 - RNA, 19 nt, Artificial Sequence
  Description of Artificial Sequence: Synthetic oligonucleotide
  Sense strand starting at position 2896 of SEQ ID NO: 587140
acccuuggccauugauagu

SEQ ID NO: 769663 - RNA, 19 nt, Artificial Sequence
  Description of Artificial Sequence: Synthetic oligonucleotide
  Antisense strand to SEQ ID NO: 769662
acuaucaauggccaagggu

SEQ ID NO: 769664 - RNA, 19 nt, Artificial Sequence
  Description of Artificial Sequence: Synthetic oligonucleotide
  Sense strand starting at position 2995 of SEQ ID NO: 587140
gcuccacugugguccagaa

SEQ ID NO: 769665 - RNA, 19 nt, Artificial Sequence
  Description of Artificial Sequence: Synthetic oligonucleotide
  Antisense strand to SEQ ID NO: 769664
uucuggaccacaguggagc

SEQ ID NO: 769666 - RNA, 19 nt, Artificial Sequence
  Description of Artificial Sequence: Synthetic oligonucleotide
  Sense strand starting at position 3017 of SEQ ID NO: 587140
gaggccuuucgaugucuga

SEQ ID NO: 769667 - RNA, 19 nt, Artificial Sequence
  Description of Artificial Sequence: Synthetic oligonucleotide
  Antisense strand to SEQ ID NO: 769666
ucagacaucgaaaggccuc

SEQ ID NO: 769668 - RNA, 19 nt, Artificial Sequence
  Description of Artificial Sequence: Synthetic oligonucleotide
  Sense strand starting at position 3020 of SEQ ID NO: 587140
gccuuucgaugucugagaa

SEQ ID NO: 769669 - RNA, 19 nt, Artificial Sequence
  Description of Artificial Sequence: Synthetic oligonucleotide
  Antisense strand to SEQ ID NO: 769668
uucucagacaucgaaaggc

SEQ ID NO: 769670 - RNA, 19 nt, Artificial Sequence
  Description of Artificial Sequence: Synthetic oligonucleotide
  Sense strand starting at position 3021 of SEQ ID NO: 587140
ccuuucgaugucugagaaa

SEQ ID NO: 769671 - RNA, 19 nt, Artificial Sequence
  Description of Artificial Sequence: Synthetic oligonucleotide
  Antisense strand to SEQ ID NO: 769670
uuucucagacaucgaaagg

SEQ ID NO: 769672 - RNA, 19 nt, Artificial Sequence
  Description of Artificial Sequence: Synthetic oligonucleotide
  Sense strand starting at position 3118 of SEQ ID NO: 587140
cugucuucuugcuuccaga

SEQ ID NO: 769673 - RNA, 19 nt, Artificial Sequence
  Description of Artificial Sequence: Synthetic oligonucleotide
  Antisense strand to SEQ ID NO: 769672
ucuggaagcaagaagacag

SEQ ID NO: 769674 - RNA, 19 nt, Artificial Sequence
  Description of Artificial Sequence: Synthetic oligonucleotide
  Sense strand starting at position 3223 of SEQ ID NO: 587140
gggccucuguaaccuugaa

SEQ ID NO: 769675 - RNA, 19 nt, Artificial Sequence
  Description of Artificial Sequence: Synthetic oligonucleotide
  Antisense strand to SEQ ID NO: 769674
uucaagguuacagaggccc

SEQ ID NO: 769676 - RNA, 19 nt, Artificial Sequence
  Description of Artificial Sequence: Synthetic oligonucleotide
  Sense strand starting at position 3227 of SEQ ID NO: 587140
cucuguaaccuugaaaugu

SEQ ID NO: 769677 - RNA, 19 nt, Artificial Sequence
  Description of Artificial Sequence: Synthetic oligonucleotide
  Antisense strand to SEQ ID NO: 769676
acauuucaagguuacagag

SEQ ID NO: 769678 - RNA, 19 nt, Artificial Sequence
  Description of Artificial Sequence: Synthetic oligonucleotide
  Sense strand starting at position 3291 of SEQ ID NO: 587140
guacgaaacuugucuuucu

SEQ ID NO: 769679 - RNA, 19 nt, Artificial Sequence
  Description of Artificial Sequence: Synthetic oligonucleotide
  Antisense strand to SEQ ID NO: 769678
agaaagacaaguuucguac

SEQ ID NO: 769680 - RNA, 19 nt, Artificial Sequence
  Description of Artificial Sequence: Synthetic oligonucleotide
  Sense strand starting at position 3336 of SEQ ID NO: 587140
ccugguccaggguaagaau

SEQ ID NO: 769681 - RNA, 19 nt, Artificial Sequence
  Description of Artificial Sequence: Synthetic oligonucleotide
  Antisense strand to SEQ ID NO: 769680
auucuuacccuggaccagg

SEQ ID NO: 769682 - RNA, 19 nt, Artificial Sequence
  Description of Artificial Sequence: Synthetic oligonucleotide
  Sense strand starting at position 3403 of SEQ ID NO: 587140
gggcacuccuccuuauguu

SEQ ID NO: 769683 - RNA, 19 nt, Artificial Sequence
  Description of Artificial Sequence: Synthetic oligonucleotide
  Antisense strand to SEQ ID NO: 769682
aacauaaggaggagugccc

SEQ ID NO: 769684 - RNA, 19 nt, Artificial Sequence
  Description of Artificial Sequence: Synthetic oligonucleotide
  Sense strand starting at position 3407 of SEQ ID NO: 587140
acuccuccuuauguugaua

SEQ ID NO: 769685 - RNA, 19 nt, Artificial Sequence
  Description of Artificial Sequence: Synthetic oligonucleotide
  Antisense strand to SEQ ID NO: 769684
uaucaacauaaggaggagu

SEQ ID NO: 769686 - RNA, 19 nt, Artificial Sequence
  Description of Artificial Sequence: Synthetic oligonucleotide
  Sense strand starting at position 3419 of SEQ ID NO: 587140
guugauagcauguaggagu

SEQ ID NO: 769687 - RNA, 19 nt, Artificial Sequence
  Description of Artificial Sequence: Synthetic oligonucleotide
  Antisense strand to SEQ ID NO: 769686
acuccuacaugcuaucaac

SEQ ID NO: 769688 - RNA, 19 nt, Artificial Sequence
  Description of Artificial Sequence: Synthetic oligonucleotide
  Sense strand starting at position 3499 of SEQ ID NO: 587140
uggagaaguuacucuguag

SEQ ID NO: 769689 - RNA, 19 nt, Artificial Sequence
  Description of Artificial Sequence: Synthetic oligonucleotide
  Antisense strand to SEQ ID NO: 769688
cuacagaguaacuucucca

SEQ ID NO: 769690 - RNA, 19 nt, Artificial Sequence
  Description of Artificial Sequence: Synthetic oligonucleotide
  Sense strand starting at position 3502 of SEQ ID NO: 587140
agaaguuacucuguaggca

SEQ ID NO: 769691 - RNA, 19 nt, Artificial Sequence
  Description of Artificial Sequence: Synthetic oligonucleotide
  Antisense strand to SEQ ID NO: 769690
ugccuacagaguaacuucu

SEQ ID NO: 769692 - RNA, 19 nt, Artificial Sequence
  Description of Artificial Sequence: Synthetic oligonucleotide
  Sense strand starting at position 3503 of SEQ ID NO: 587140
gaaguuacucuguaggcau

SEQ ID NO: 769693 - RNA, 19 nt, Artificial Sequence
  Description of Artificial Sequence: Synthetic oligonucleotide
  Antisense strand to SEQ ID NO: 769692
augccuacagaguaacuuc

SEQ ID NO: 769694 - RNA, 19 nt, Artificial Sequence
  Description of Artificial Sequence: Synthetic oligonucleotide
  Sense strand starting at position 3559 of SEQ ID NO: 587140
ugucaugcuuuauuaucca

SEQ ID NO: 769695 - RNA, 19 nt, Artificial Sequence
  Description of Artificial Sequence: Synthetic oligonucleotide
  Antisense strand to SEQ ID NO: 769694
uggauaauaaagcaugaca

SEQ ID NO: 769696 - RNA, 19 nt, Artificial Sequence
  Description of Artificial Sequence: Synthetic oligonucleotide
  Sense strand starting at position 3563 of SEQ ID NO: 587140
augcuuuauuauccauagu

SEQ ID NO: 769697 - RNA, 19 nt, Artificial Sequence
  Description of Artificial Sequence: Synthetic oligonucleotide
  Antisense strand to SEQ ID NO: 769696
acuauggauaauaaagcau

SEQ ID NO: 769698 - RNA, 19 nt, Artificial Sequence
  Description of Artificial Sequence: Synthetic oligonucleotide
  Sense strand starting at position 3618 of SEQ ID NO: 587140
uggagucuugcgcucuguu

SEQ ID NO: 769699 - RNA, 19 nt, Artificial Sequence
  Description of Artificial Sequence: Synthetic oligonucleotide
  Antisense strand to SEQ ID NO: 769698
aacagagcgcaagacucca

SEQ ID NO: 769700 - RNA, 19 nt, Artificial Sequence
  Description of Artificial Sequence: Synthetic oligonucleotide
  Sense strand starting at position 3922 of SEQ ID NO: 587140
gggauuacagcauaaugcu

SEQ ID NO: 769701 - RNA, 19 nt, Artificial Sequence
  Description of Artificial Sequence: Synthetic oligonucleotide
  Antisense strand to SEQ ID NO: 769700
agcauuaugcuguaauccc

SEQ ID NO: 769702 - RNA, 19 nt, Artificial Sequence
  Description of Artificial Sequence: Synthetic oligonucleotide
  Sense strand starting at position 38 of SEQ ID NO: 587141
gggagacucagucaugguu

SEQ ID NO: 769703 - RNA, 19 nt, Artificial Sequence
  Description of Artificial Sequence: Synthetic oligonucleotide
  Antisense strand to SEQ ID NO: 769702
aaccaugacugagucuccc

SEQ ID NO: 769704 - RNA, 19 nt, Artificial Sequence
  Description of Artificial Sequence: Synthetic oligonucleotide
  Sense strand starting at position 116 of SEQ ID NO: 587141
gaauguggcccaugcauuu

SEQ ID NO: 769705 - RNA, 19 nt, Artificial Sequence
  Description of Artificial Sequence: Synthetic oligonucleotide
  Antisense strand to SEQ ID NO: 769704
aaaugcaugggccacauuc

SEQ ID NO: 769706 - RNA, 19 nt, Artificial Sequence
  Description of Artificial Sequence: Synthetic oligonucleotide
  Sense strand starting at position 303 of SEQ ID NO: 587141
uuuaaaucuguuuguagag

SEQ ID NO: 769707 - RNA, 19 nt, Artificial Sequence
  Description of Artificial Sequence: Synthetic oligonucleotide
  Antisense strand to SEQ ID NO: 769706
cucuacaaacagauuuaaa

SEQ ID NO: 769708 - RNA, 19 nt, Artificial Sequence
  Description of Artificial Sequence: Synthetic oligonucleotide
  Sense strand starting at position 304 of SEQ ID NO: 587141
uuaaaucuguuuguagaga

SEQ ID NO: 769709 - RNA, 19 nt, Artificial Sequence
  Description of Artificial Sequence: Synthetic oligonucleotide
  Antisense strand to SEQ ID NO: 769708
ucucuacaaacagauuuaa

SEQ ID NO: 769710 - RNA, 19 nt, Artificial Sequence
  Description of Artificial Sequence: Synthetic oligonucleotide
  Sense strand starting at position 606 of SEQ ID NO: 587141
ccuggaagggcuuguguga

SEQ ID NO: 769711 - RNA, 19 nt, Artificial Sequence
  Description of Artificial Sequence: Synthetic oligonucleotide
  Antisense strand to SEQ ID NO: 769710
ucacacaagcccuuccagg

SEQ ID NO: 769712 - RNA, 19 nt, Artificial Sequence
  Description of Artificial Sequence: Synthetic oligonucleotide
  Sense strand starting at position 823 of SEQ ID NO: 587141
ggugcuucccauugcuaaa

SEQ ID NO: 769713 - RNA, 19 nt, Artificial Sequence
  Description of Artificial Sequence: Synthetic oligonucleotide
  Antisense strand to SEQ ID NO: 769712
uuuagcaaugggaagcacc

SEQ ID NO: 769714 - RNA, 19 nt, Artificial Sequence
  Description of Artificial Sequence: Synthetic oligonucleotide
  Sense strand starting at position 1483 of SEQ ID NO: 587141
augaguuuaccuggucgua

SEQ ID NO: 769715 - RNA, 19 nt, Artificial Sequence
  Description of Artificial Sequence: Synthetic oligonucleotide
  Antisense strand to SEQ ID NO: 769714
uacgaccagguaaacucau

SEQ ID NO: 769716 - RNA, 19 nt, Artificial Sequence
  Description of Artificial Sequence: Synthetic oligonucleotide
  Sense strand starting at position 1485 of SEQ ID NO: 587141
gaguuuaccuggucguagu

SEQ ID NO: 769717 - RNA, 19 nt, Artificial Sequence
  Description of Artificial Sequence: Synthetic oligonucleotide
  Antisense strand to SEQ ID NO: 769716
acuacgaccagguaaacuc

SEQ ID NO: 769718 - RNA, 19 nt, Artificial Sequence
  Description of Artificial Sequence: Synthetic oligonucleotide
  Sense strand starting at position 1507 of SEQ ID NO: 587141
gagcccagcggucauagaa

SEQ ID NO: 769719 - RNA, 19 nt, Artificial Sequence
  Description of Artificial Sequence: Synthetic oligonucleotide
  Antisense strand to SEQ ID NO: 769718
uucuaugaccgcugggcuc

SEQ ID NO: 769720 - RNA, 19 nt, Artificial Sequence
  Description of Artificial Sequence: Synthetic oligonucleotide
  Sense strand starting at position 1914 of SEQ ID NO: 587141
ggcgacauccggagcgaaa

SEQ ID NO: 769721 - RNA, 19 nt, Artificial Sequence
  Description of Artificial Sequence: Synthetic oligonucleotide
  Antisense strand to SEQ ID NO: 769720
uuucgcuccggaugucgcc

SEQ ID NO: 769722 - RNA, 19 nt, Artificial Sequence
  Description of Artificial Sequence: Synthetic oligonucleotide
  Sense strand starting at position 1953 of SEQ ID NO: 587141
gucagaacucaccgccaau

SEQ ID NO: 769723 - RNA, 19 nt, Artificial Sequence
  Description of Artificial Sequence: Synthetic oligonucleotide
  Antisense strand to SEQ ID NO: 769722
auuggcggugaguucugac

SEQ ID NO: 769724 - RNA, 19 nt, Artificial Sequence
  Description of Artificial Sequence: Synthetic oligonucleotide
  Sense strand starting at position 2307 of SEQ ID NO: 587141
ccugaaguccuuuaugcuu

SEQ ID NO: 769725 - RNA, 19 nt, Artificial Sequence
  Description of Artificial Sequence: Synthetic oligonucleotide
  Antisense strand to SEQ ID NO: 769724
aagcauaaaggacuucagg

SEQ ID NO: 769726 - RNA, 19 nt, Artificial Sequence
  Description of Artificial Sequence: Synthetic oligonucleotide
  Sense strand starting at position 2312 of SEQ ID NO: 587141
aguccuuuaugcuuccuga

SEQ ID NO: 769727 - RNA, 19 nt, Artificial Sequence
  Description of Artificial Sequence: Synthetic oligonucleotide
  Antisense strand to SEQ ID NO: 769726
ucaggaagcauaaaggacu

SEQ ID NO: 769728 - RNA, 19 nt, Artificial Sequence
  Description of Artificial Sequence: Synthetic oligonucleotide
  Sense strand starting at position 2315 of SEQ ID NO: 587141
ccuuuaugcuuccugaaag

SEQ ID NO: 769729 - RNA, 19 nt, Artificial Sequence
  Description of Artificial Sequence: Synthetic oligonucleotide
  Antisense strand to SEQ ID NO: 769728
cuuucaggaagcauaaagg

SEQ ID NO: 769730 - RNA, 19 nt, Artificial Sequence
  Description of Artificial Sequence: Synthetic oligonucleotide
  Sense strand starting at position 2325 of SEQ ID NO: 587141
uccugaaagcaugagguuu

SEQ ID NO: 769731 - RNA, 19 nt, Artificial Sequence
  Description of Artificial Sequence: Synthetic oligonucleotide
  Antisense strand to SEQ ID NO: 769730
aaaccucaugcuuucagga

SEQ ID NO: 769732 - RNA, 19 nt, Artificial Sequence
  Description of Artificial Sequence: Synthetic oligonucleotide
  Sense strand starting at position 2363 of SEQ ID NO: 587141
ugaauucuuaugggcagga

SEQ ID NO: 769733 - RNA, 19 nt, Artificial Sequence
  Description of Artificial Sequence: Synthetic oligonucleotide
  Antisense strand to SEQ ID NO: 769732
uccugcccauaagaauuca

SEQ ID NO: 769734 - RNA, 19 nt, Artificial Sequence
  Description of Artificial Sequence: Synthetic oligonucleotide
  Sense strand starting at position 2716 of SEQ ID NO: 587141
ucugccuccuggcaaauuu

SEQ ID NO: 769735 - RNA, 19 nt, Artificial Sequence
  Description of Artificial Sequence: Synthetic oligonucleotide
  Antisense strand to SEQ ID NO: 769734
aaauuugccaggaggcaga

SEQ ID NO: 769736 - RNA, 19 nt, Artificial Sequence
  Description of Artificial Sequence: Synthetic oligonucleotide
  Sense strand starting at position 2836 of SEQ ID NO: 587141
gagucuugcggcuggaagu

SEQ ID NO: 769737 - RNA, 19 nt, Artificial Sequence
  Description of Artificial Sequence: Synthetic oligonucleotide
  Antisense strand to SEQ ID NO: 769736
acuuccagccgcaagacuc

SEQ ID NO: 769738 - RNA, 19 nt, Artificial Sequence
  Description of Artificial Sequence: Synthetic oligonucleotide
  Sense strand starting at position 2849 of SEQ ID NO: 587141
ggaagugugaccugaagau

SEQ ID NO: 769739 - RNA, 19 nt, Artificial Sequence
  Description of Artificial Sequence: Synthetic oligonucleotide
  Antisense strand to SEQ ID NO: 769738
aucuucaggucacacuucc

SEQ ID NO: 769740 - RNA, 19 nt, Artificial Sequence
  Description of Artificial Sequence: Synthetic oligonucleotide
  Sense strand starting at position 2892 of SEQ ID NO: 587141
cuugguuuccucuaggaga

SEQ ID NO: 769741 - RNA, 19 nt, Artificial Sequence
  Description of Artificial Sequence: Synthetic oligonucleotide
  Antisense strand to SEQ ID NO: 769740
ucuccuagaggaaaccaag

SEQ ID NO: 769742 - RNA, 19 nt, Artificial Sequence
  Description of Artificial Sequence: Synthetic oligonucleotide
  Sense strand starting at position 2894 of SEQ ID NO: 587141
ugguuuccucuaggagaug

SEQ ID NO: 769743 - RNA, 19 nt, Artificial Sequence
  Description of Artificial Sequence: Synthetic oligonucleotide
  Antisense strand to SEQ ID NO: 769742
caucuccuagaggaaacca

SEQ ID NO: 769744 - RNA, 19 nt, Artificial Sequence
  Description of Artificial Sequence: Synthetic oligonucleotide
  Sense strand starting at position 2917 of SEQ ID NO: 587141
agggaagcuugugagaaau

SEQ ID NO: 769745 - RNA, 19 nt, Artificial Sequence
  Description of Artificial Sequence: Synthetic oligonucleotide
  Antisense strand to SEQ ID NO: 769744
auuucucacaagcuucccu

SEQ ID NO: 769746 - RNA, 19 nt, Artificial Sequence
  Description of Artificial Sequence: Synthetic oligonucleotide
  Sense strand starting at position 3161 of SEQ ID NO: 587141
acagauugcagugagcaga

SEQ ID NO: 769747 - RNA, 19 nt, Artificial Sequence
  Description of Artificial Sequence: Synthetic oligonucleotide
  Antisense strand to SEQ ID NO: 769746
ucugcucacugcaaucugu

SEQ ID NO: 769748 - RNA, 19 nt, Artificial Sequence
  Description of Artificial Sequence: Synthetic oligonucleotide
  Sense strand starting at position 3281 of SEQ ID NO: 587141
gaauuagauuucugggacu

SEQ ID NO: 769749 - RNA, 19 nt, Artificial Sequence
  Description of Artificial Sequence: Synthetic oligonucleotide
  Antisense strand to SEQ ID NO: 769748
agucccagaaaucuaauuc

SEQ ID NO: 769750 - RNA, 19 nt, Artificial Sequence
  Description of Artificial Sequence: Synthetic oligonucleotide
  Sense strand starting at position 3302 of SEQ ID NO: 587141
ggcccagaguuucuguguu

SEQ ID NO: 769751 - RNA, 19 nt, Artificial Sequence
  Description of Artificial Sequence: Synthetic oligonucleotide
  Antisense strand to SEQ ID NO: 769750
aacacagaaacucugggcc

SEQ ID NO: 769752 - RNA, 19 nt, Artificial Sequence
  Description of Artificial Sequence: Synthetic oligonucleotide
  Sense strand starting at position 3306 of SEQ ID NO: 587141
cagaguuucuguguuucua

SEQ ID NO: 769753 - RNA, 19 nt, Artificial Sequence
  Description of Artificial Sequence: Synthetic oligonucleotide
  Antisense strand to SEQ ID NO: 769752
uagaaacacagaaacucug

SEQ ID NO: 769754 - RNA, 19 nt, Artificial Sequence
  Description of Artificial Sequence: Synthetic oligonucleotide
  Sense strand starting at position 3308 of SEQ ID NO: 587141
gaguuucuguguuucuaca

SEQ ID NO: 769755 - RNA, 19 nt, Artificial Sequence
  Description of Artificial Sequence: Synthetic oligonucleotide
  Antisense strand to SEQ ID NO: 769754
uguagaaacacagaaacuc

SEQ ID NO: 769756 - RNA, 19 nt, Artificial Sequence
  Description of Artificial Sequence: Synthetic oligonucleotide
  Sense strand starting at position 3310 of SEQ ID NO: 587141
guuucuguguuucuacaaa

SEQ ID NO: 769757 - RNA, 19 nt, Artificial Sequence
  Description of Artificial Sequence: Synthetic oligonucleotide
  Antisense strand to SEQ ID NO: 769756
uuuguagaaacacagaaac

SEQ ID NO: 769758 - RNA, 19 nt, Artificial Sequence
  Description of Artificial Sequence: Synthetic oligonucleotide
  Sense strand starting at position 3335 of SEQ ID NO: 587141
aggcgauuucuaggcagcu

SEQ ID NO: 769759 - RNA, 19 nt, Artificial Sequence
  Description of Artificial Sequence: Synthetic oligonucleotide
  Antisense strand to SEQ ID NO: 769758
agcugccuagaaaucgccu

SEQ ID NO: 769760 - RNA, 19 nt, Artificial Sequence
  Description of Artificial Sequence: Synthetic oligonucleotide
  Sense strand starting at position 3337 of SEQ ID NO: 587141
gcgauuucuaggcagcuga

SEQ ID NO: 769761 - RNA, 19 nt, Artificial Sequence
  Description of Artificial Sequence: Synthetic oligonucleotide
  Antisense strand to SEQ ID NO: 769760
ucagcugccuagaaaucgc

SEQ ID NO: 769762 - RNA, 19 nt, Artificial Sequence
  Description of Artificial Sequence: Synthetic oligonucleotide
  Sense strand starting at position 3411 of SEQ ID NO: 587141
cagaauuuggcaggcuguu

SEQ ID NO: 769763 - RNA, 19 nt, Artificial Sequence
  Description of Artificial Sequence: Synthetic oligonucleotide
  Antisense strand to SEQ ID NO: 769762
aacagccugccaaauucug

SEQ ID NO: 769764 - RNA, 19 nt, Artificial Sequence
  Description of Artificial Sequence: Synthetic oligonucleotide
  Sense strand starting at position 3445 of SEQ ID NO: 587141
ggaggugaugguugcauga

SEQ ID NO: 769765 - RNA, 19 nt, Artificial Sequence
  Description of Artificial Sequence: Synthetic oligonucleotide
  Antisense strand to SEQ ID NO: 769764
ucaugcaaccaucaccucc

SEQ ID NO: 769766 - RNA, 19 nt, Artificial Sequence
  Description of Artificial Sequence: Synthetic oligonucleotide
  Sense strand starting at position 3456 of SEQ ID NO: 587141
uugcaugaccuuggguaga

SEQ ID NO: 769767 - RNA, 19 nt, Artificial Sequence
  Description of Artificial Sequence: Synthetic oligonucleotide
  Antisense strand to SEQ ID NO: 769766
ucuacccaaggucaugcaa

SEQ ID NO: 769768 - RNA, 19 nt, Artificial Sequence
  Description of Artificial Sequence: Synthetic oligonucleotide
  Sense strand starting at position 3495 of SEQ ID NO: 587141
gugggugaucuucagagau

SEQ ID NO: 769769 - RNA, 19 nt, Artificial Sequence
  Description of Artificial Sequence: Synthetic oligonucleotide
  Antisense strand to SEQ ID NO: 769768
aucucugaagaucacccac

SEQ ID NO: 769770 - RNA, 19 nt, Artificial Sequence
  Description of Artificial Sequence: Synthetic oligonucleotide
  Sense strand starting at position 3522 of SEQ ID NO: 587141
gguagaagugucgaagugu

SEQ ID NO: 769771 - RNA, 19 nt, Artificial Sequence
  Description of Artificial Sequence: Synthetic oligonucleotide
  Antisense strand to SEQ ID NO: 769770
acacuucgacacuucuacc

SEQ ID NO: 769772 - RNA, 19 nt, Artificial Sequence
  Description of Artificial Sequence: Synthetic oligonucleotide
  Sense strand starting at position 3523 of SEQ ID NO: 587141
guagaagugucgaaguguc

SEQ ID NO: 769773 - RNA, 19 nt, Artificial Sequence
  Description of Artificial Sequence: Synthetic oligonucleotide
  Antisense strand to SEQ ID NO: 769772
gacacuucgacacuucuac

SEQ ID NO: 769774 - RNA, 19 nt, Artificial Sequence
  Description of Artificial Sequence: Synthetic oligonucleotide
  Sense strand starting at position 3533 of SEQ ID NO: 587141
cgaagugucagagauguuu

SEQ ID NO: 769775 - RNA, 19 nt, Artificial Sequence
  Description of Artificial Sequence: Synthetic oligonucleotide
  Antisense strand to SEQ ID NO: 769774
aaacaucucugacacuucg

SEQ ID NO: 769776 - RNA, 19 nt, Artificial Sequence
  Description of Artificial Sequence: Synthetic oligonucleotide
  Sense strand starting at position 3535 of SEQ ID NO: 587141
aagugucagagauguuuga

SEQ ID NO: 769777 - RNA, 19 nt, Artificial Sequence
  Description of Artificial Sequence: Synthetic oligonucleotide
  Antisense strand to SEQ ID NO: 769776
ucaaacaucucugacacuu

SEQ ID NO: 769778 - RNA, 19 nt, Artificial Sequence
  Description of Artificial Sequence: Synthetic oligonucleotide
  Sense strand starting at position 3571 of SEQ ID NO: 587141
uugaauagcggcugaguaa

SEQ ID NO: 769779 - RNA, 19 nt, Artificial Sequence
  Description of Artificial Sequence: Synthetic oligonucleotide
  Antisense strand to SEQ ID NO: 769778
uuacucagccgcuauucaa

SEQ ID NO: 769780 - RNA, 19 nt, Artificial Sequence
  Description of Artificial Sequence: Synthetic oligonucleotide
  Sense strand starting at position 3572 of SEQ ID NO: 587141
ugaauagcggcugaguaaa

SEQ ID NO: 769781 - RNA, 19 nt, Artificial Sequence
  Description of Artificial Sequence: Synthetic oligonucleotide
  Antisense strand to SEQ ID NO: 769780
uuuacucagccgcuauuca

SEQ ID NO: 769782 - RNA, 19 nt, Artificial Sequence
  Description of Artificial Sequence: Synthetic oligonucleotide
  Sense strand starting at position 38 of SEQ ID NO: 587142
gagcuaugcugagaccaaa

SEQ ID NO: 769783 - RNA, 19 nt, Artificial Sequence
  Description of Artificial Sequence: Synthetic oligonucleotide
  Antisense strand to SEQ ID NO: 769782
uuuggucucagcauagcuc

SEQ ID NO: 769784 - RNA, 19 nt, Artificial Sequence
  Description of Artificial Sequence: Synthetic oligonucleotide
  Sense strand starting at position 68 of SEQ ID NO: 587142
ggagaagaauuaggguaga

SEQ ID NO: 769785 - RNA, 19 nt, Artificial Sequence
  Description of Artificial Sequence: Synthetic oligonucleotide
  Antisense strand to SEQ ID NO: 769784
ucuacccuaauucuucucc

SEQ ID NO: 769786 - RNA, 19 nt, Artificial Sequence
  Description of Artificial Sequence: Synthetic oligonucleotide
  Sense strand starting at position 169 of SEQ ID NO: 587142
ucauuucuauaggagagga

SEQ ID NO: 769787 - RNA, 19 nt, Artificial Sequence
  Description of Artificial Sequence: Synthetic oligonucleotide
  Antisense strand to SEQ ID NO: 769786
uccucuccuauagaaauga

SEQ ID NO: 769788 - RNA, 19 nt, Artificial Sequence
  Description of Artificial Sequence: Synthetic oligonucleotide
  Sense strand starting at position 599 of SEQ ID NO: 587142
uggugucugucuuucucaa

SEQ ID NO: 769789 - RNA, 19 nt, Artificial Sequence
  Description of Artificial Sequence: Synthetic oligonucleotide
  Antisense strand to SEQ ID NO: 769788
uugagaaagacagacacca

SEQ ID NO: 769790 - RNA, 19 nt, Artificial Sequence
  Description of Artificial Sequence: Synthetic oligonucleotide
  Sense strand starting at position 601 of SEQ ID NO: 587142
gugucugucuuucucaacu

SEQ ID NO: 769791 - RNA, 19 nt, Artificial Sequence
  Description of Artificial Sequence: Synthetic oligonucleotide
  Antisense strand to SEQ ID NO: 769790
aguugagaaagacagacac

SEQ ID NO: 769792 - RNA, 19 nt, Artificial Sequence
  Description of Artificial Sequence: Synthetic oligonucleotide
  Sense strand starting at position 627 of SEQ ID NO: 587142
guuauaugaucuuggcuga

SEQ ID NO: 769793 - RNA, 19 nt, Artificial Sequence
  Description of Artificial Sequence: Synthetic oligonucleotide
  Antisense strand to SEQ ID NO: 769792
ucagccaagaucauauaac

SEQ ID NO: 769794 - RNA, 19 nt, Artificial Sequence
  Description of Artificial Sequence: Synthetic oligonucleotide
  Sense strand starting at position 692 of SEQ ID NO: 587142
uccuaagugugacugaguu

SEQ ID NO: 769795 - RNA, 19 nt, Artificial Sequence
  Description of Artificial Sequence: Synthetic oligonucleotide
  Antisense strand to SEQ ID NO: 769794
aacucagucacacuuagga

SEQ ID NO: 769796 - RNA, 19 nt, Artificial Sequence
  Description of Artificial Sequence: Synthetic oligonucleotide
  Sense strand starting at position 694 of SEQ ID NO: 587142
cuaagugugacugaguugu

SEQ ID NO: 769797 - RNA, 19 nt, Artificial Sequence
  Description of Artificial Sequence: Synthetic oligonucleotide
  Antisense strand to SEQ ID NO: 769796
acaacucagucacacuuag

SEQ ID NO: 769798 - RNA, 19 nt, Artificial Sequence
  Description of Artificial Sequence: Synthetic oligonucleotide
  Sense strand starting at position 696 of SEQ ID NO: 587142
aagugugacugaguuguga

SEQ ID NO: 769799 - RNA, 19 nt, Artificial Sequence
  Description of Artificial Sequence: Synthetic oligonucleotide
  Antisense strand to SEQ ID NO: 769798
ucacaacucagucacacuu

SEQ ID NO: 769800 - RNA, 19 nt, Artificial Sequence
  Description of Artificial Sequence: Synthetic oligonucleotide
  Sense strand starting at position 724 of SEQ ID NO: 587142
caagcauguguauguuuaa

SEQ ID NO: 769801 - RNA, 19 nt, Artificial Sequence
  Description of Artificial Sequence: Synthetic oligonucleotide
  Antisense strand to SEQ ID NO: 769800
uuaaacauacacaugcuug

SEQ ID NO: 769802 - RNA, 19 nt, Artificial Sequence
  Description of Artificial Sequence: Synthetic oligonucleotide
  Sense strand starting at position 725 of SEQ ID NO: 587142
aagcauguguauguuuaaa

SEQ ID NO: 769803 - RNA, 19 nt, Artificial Sequence
  Description of Artificial Sequence: Synthetic oligonucleotide
  Antisense strand to SEQ ID NO: 769802
uuuaaacauacacaugcuu

SEQ ID NO: 769804 - RNA, 19 nt, Artificial Sequence
  Description of Artificial Sequence: Synthetic oligonucleotide
  Sense strand starting at position 1155 of SEQ ID NO: 587142
cuaacagggucucuacuaa

SEQ ID NO: 769805 - RNA, 19 nt, Artificial Sequence
  Description of Artificial Sequence: Synthetic oligonucleotide
  Antisense strand to SEQ ID NO: 769804
uuaguagagacccuguuag

SEQ ID NO: 769806 - RNA, 19 nt, Artificial Sequence
  Description of Artificial Sequence: Synthetic oligonucleotide
  Sense strand starting at position 1713 of SEQ ID NO: 587142
aaaugucagcacuguaguu

SEQ ID NO: 769807 - RNA, 19 nt, Artificial Sequence
  Description of Artificial Sequence: Synthetic oligonucleotide
  Antisense strand to SEQ ID NO: 769806
aacuacagugcugacauuu

SEQ ID NO: 769808 - RNA, 19 nt, Artificial Sequence
  Description of Artificial Sequence: Synthetic oligonucleotide
  Sense strand starting at position 1739 of SEQ ID NO: 587142
gggcuucugggagauguca

SEQ ID NO: 769809 - RNA, 19 nt, Artificial Sequence
  Description of Artificial Sequence: Synthetic oligonucleotide
  Antisense strand to SEQ ID NO: 769808
ugacaucucccagaagccc

SEQ ID NO: 769810 - RNA, 19 nt, Artificial Sequence
  Description of Artificial Sequence: Synthetic oligonucleotide
  Sense strand starting at position 1741 of SEQ ID NO: 587142
gcuucugggagaugucaga

SEQ ID NO: 769811 - RNA, 19 nt, Artificial Sequence
  Description of Artificial Sequence: Synthetic oligonucleotide
  Antisense strand to SEQ ID NO: 769810
ucugacaucucccagaagc

SEQ ID NO: 769812 - RNA, 19 nt, Artificial Sequence
  Description of Artificial Sequence: Synthetic oligonucleotide
  Sense strand starting at position 1751 of SEQ ID NO: 587142
gaugucagauuauucugga

SEQ ID NO: 769813 - RNA, 19 nt, Artificial Sequence
  Description of Artificial Sequence: Synthetic oligonucleotide
  Antisense strand to SEQ ID NO: 769812
uccagaauaaucugacauc

SEQ ID NO: 769814 - RNA, 19 nt, Artificial Sequence
  Description of Artificial Sequence: Synthetic oligonucleotide
  Sense strand starting at position 1752 of SEQ ID NO: 587142
augucagauuauucuggaa

SEQ ID NO: 769815 - RNA, 19 nt, Artificial Sequence
  Description of Artificial Sequence: Synthetic oligonucleotide
  Antisense strand to SEQ ID NO: 769814
uuccagaauaaucugacau

SEQ ID NO: 769816 - RNA, 19 nt, Artificial Sequence
  Description of Artificial Sequence: Synthetic oligonucleotide
  Sense strand starting at position 1754 of SEQ ID NO: 587142
gucagauuauucuggaagg

SEQ ID NO: 769817 - RNA, 19 nt, Artificial Sequence
  Description of Artificial Sequence: Synthetic oligonucleotide
  Antisense strand to SEQ ID NO: 769816
ccuuccagaauaaucugac

SEQ ID NO: 769818 - RNA, 19 nt, Artificial Sequence
  Description of Artificial Sequence: Synthetic oligonucleotide
  Sense strand starting at position 2510 of SEQ ID NO: 587142
auugaagggugaugaguuu

SEQ ID NO: 769819 - RNA, 19 nt, Artificial Sequence
  Description of Artificial Sequence: Synthetic oligonucleotide
  Antisense strand to SEQ ID NO: 769818
aaacucaucacccuucaau

SEQ ID NO: 769820 - RNA, 19 nt, Artificial Sequence
  Description of Artificial Sequence: Synthetic oligonucleotide
  Sense strand starting at position 2907 of SEQ ID NO: 587142
gcagauaacuagccaaaca

SEQ ID NO: 769821 - RNA, 19 nt, Artificial Sequence
  Description of Artificial Sequence: Synthetic oligonucleotide
  Antisense strand to SEQ ID NO: 769820
uguuuggcuaguuaucugc

SEQ ID NO: 769822 - RNA, 19 nt, Artificial Sequence
  Description of Artificial Sequence: Synthetic oligonucleotide
  Sense strand starting at position 2963 of SEQ ID NO: 587142
aagggauacuucuauggga

SEQ ID NO: 769823 - RNA, 19 nt, Artificial Sequence
  Description of Artificial Sequence: Synthetic oligonucleotide
  Antisense strand to SEQ ID NO: 769822
ucccauagaaguaucccuu

SEQ ID NO: 769824 - RNA, 19 nt, Artificial Sequence
  Description of Artificial Sequence: Synthetic oligonucleotide
  Sense strand starting at position 2966 of SEQ ID NO: 587142
ggauacuucuaugggaauc

SEQ ID NO: 769825 - RNA, 19 nt, Artificial Sequence
  Description of Artificial Sequence: Synthetic oligonucleotide
  Antisense strand to SEQ ID NO: 769824
gauucccauagaaguaucc

SEQ ID NO: 769826 - RNA, 19 nt, Artificial Sequence
  Description of Artificial Sequence: Synthetic oligonucleotide
  Sense strand starting at position 3056 of SEQ ID NO: 587142
uggguaaaucuccguuuga

SEQ ID NO: 769827 - RNA, 19 nt, Artificial Sequence
  Description of Artificial Sequence: Synthetic oligonucleotide
  Antisense strand to SEQ ID NO: 769826
ucaaacggagauuuaccca

SEQ ID NO: 769828 - RNA, 19 nt, Artificial Sequence
  Description of Artificial Sequence: Synthetic oligonucleotide
  Sense strand starting at position 3057 of SEQ ID NO: 587142
ggguaaaucuccguuugag

SEQ ID NO: 769829 - RNA, 19 nt, Artificial Sequence
  Description of Artificial Sequence: Synthetic oligonucleotide
  Antisense strand to SEQ ID NO: 769828
cucaaacggagauuuaccc

SEQ ID NO: 769830 - RNA, 19 nt, Artificial Sequence
  Description of Artificial Sequence: Synthetic oligonucleotide
  Sense strand starting at position 3426 of SEQ ID NO: 587142
gagugagacucugugauaa

SEQ ID NO: 769831 - RNA, 19 nt, Artificial Sequence
  Description of Artificial Sequence: Synthetic oligonucleotide
  Antisense strand to SEQ ID NO: 769830
uuaucacagagucucacuc

SEQ ID NO: 769832 - RNA, 19 nt, Artificial Sequence
  Description of Artificial Sequence: Synthetic oligonucleotide
  Sense strand starting at position 3802 of SEQ ID NO: 587142
ucugcuuccuguuggacau

SEQ ID NO: 769833 - RNA, 19 nt, Artificial Sequence
  Description of Artificial Sequence: Synthetic oligonucleotide
  Antisense strand to SEQ ID NO: 769832
auguccaacaggaagcaga

SEQ ID NO: 769834 - RNA, 19 nt, Artificial Sequence
  Description of Artificial Sequence: Synthetic oligonucleotide
  Sense strand starting at position 71 of SEQ ID NO: 587143
uagggccauuuaugaaaga

SEQ ID NO: 769835 - RNA, 19 nt, Artificial Sequence
  Description of Artificial Sequence: Synthetic oligonucleotide
  Antisense strand to SEQ ID NO: 769834
ucuuucauaaauggcccua

SEQ ID NO: 769836 - RNA, 19 nt, Artificial Sequence
  Description of Artificial Sequence: Synthetic oligonucleotide
  Sense strand starting at position 171 of SEQ ID NO: 587143
gaaacauuguucccugagu

SEQ ID NO: 769837 - RNA, 19 nt, Artificial Sequence
  Description of Artificial Sequence: Synthetic oligonucleotide
  Antisense strand to SEQ ID NO: 769836
acucagggaacaauguuuc

SEQ ID NO: 769838 - RNA, 19 nt, Artificial Sequence
  Description of Artificial Sequence: Synthetic oligonucleotide
  Sense strand starting at position 173 of SEQ ID NO: 587143
aacauuguucccugaguag

SEQ ID NO: 769839 - RNA, 19 nt, Artificial Sequence
  Description of Artificial Sequence: Synthetic oligonucleotide
  Antisense strand to SEQ ID NO: 769838
cuacucagggaacaauguu

SEQ ID NO: 769840 - RNA, 19 nt, Artificial Sequence
  Description of Artificial Sequence: Synthetic oligonucleotide
  Sense strand starting at position 176 of SEQ ID NO: 587143
auuguucccugaguagagu

SEQ ID NO: 769841 - RNA, 19 nt, Artificial Sequence
  Description of Artificial Sequence: Synthetic oligonucleotide
  Antisense strand to SEQ ID NO: 769840
acucuacucagggaacaau

SEQ ID NO: 769842 - RNA, 19 nt, Artificial Sequence
  Description of Artificial Sequence: Synthetic oligonucleotide
  Sense strand starting at position 182 of SEQ ID NO: 587143
cccugaguagagugagcuu

SEQ ID NO: 769843 - RNA, 19 nt, Artificial Sequence
  Description of Artificial Sequence: Synthetic oligonucleotide
  Antisense strand to SEQ ID NO: 769842
aagcucacucuacucaggg

SEQ ID NO: 769844 - RNA, 19 nt, Artificial Sequence
  Description of Artificial Sequence: Synthetic oligonucleotide
  Sense strand starting at position 185 of SEQ ID NO: 587143
ugaguagagugagcuuaga

SEQ ID NO: 769845 - RNA, 19 nt, Artificial Sequence
  Description of Artificial Sequence: Synthetic oligonucleotide
  Antisense strand to SEQ ID NO: 769844
ucuaagcucacucuacuca

SEQ ID NO: 769846 - RNA, 19 nt, Artificial Sequence
  Description of Artificial Sequence: Synthetic oligonucleotide
  Sense strand starting at position 217 of SEQ ID NO: 587143
uuguaucuauugguccaau

SEQ ID NO: 769847 - RNA, 19 nt, Artificial Sequence
  Description of Artificial Sequence: Synthetic oligonucleotide
  Antisense strand to SEQ ID NO: 769846
auuggaccaauagauacaa

SEQ ID NO: 769848 - RNA, 19 nt, Artificial Sequence
  Description of Artificial Sequence: Synthetic oligonucleotide
  Sense strand starting at position 236 of SEQ ID NO: 587143
cugacuauuugguucugca

SEQ ID NO: 769849 - RNA, 19 nt, Artificial Sequence
  Description of Artificial Sequence: Synthetic oligonucleotide
  Antisense strand to SEQ ID NO: 769848
ugcagaaccaaauagucag

SEQ ID NO: 769850 - RNA, 19 nt, Artificial Sequence
  Description of Artificial Sequence: Synthetic oligonucleotide
  Sense strand starting at position 239 of SEQ ID NO: 587143
acuauuugguucugcaaug

SEQ ID NO: 769851 - RNA, 19 nt, Artificial Sequence
  Description of Artificial Sequence: Synthetic oligonucleotide
  Antisense strand to SEQ ID NO: 769850
cauugcagaaccaaauagu

SEQ ID NO: 769852 - RNA, 19 nt, Artificial Sequence
  Description of Artificial Sequence: Synthetic oligonucleotide
  Sense strand starting at position 262 of SEQ ID NO: 587143
cguauauaaccaugauguu

SEQ ID NO: 769853 - RNA, 19 nt, Artificial Sequence
  Description of Artificial Sequence: Synthetic oligonucleotide
  Antisense strand to SEQ ID NO: 769852
aacaucaugguuauauacg

SEQ ID NO: 769854 - RNA, 19 nt, Artificial Sequence
  Description of Artificial Sequence: Synthetic oligonucleotide
  Sense strand starting at position 263 of SEQ ID NO: 587143
guauauaaccaugauguua

SEQ ID NO: 769855 - RNA, 19 nt, Artificial Sequence
  Description of Artificial Sequence: Synthetic oligonucleotide
  Antisense strand to SEQ ID NO: 769854
uaacaucaugguuauauac

SEQ ID NO: 769856 - RNA, 19 nt, Artificial Sequence
  Description of Artificial Sequence: Synthetic oligonucleotide
  Sense strand starting at position 385 of SEQ ID NO: 587143
augacagggucaggaaauu

SEQ ID NO: 769857 - RNA, 19 nt, Artificial Sequence
  Description of Artificial Sequence: Synthetic oligonucleotide
  Antisense strand to SEQ ID NO: 769856
aauuuccugacccugucau

SEQ ID NO: 769858 - RNA, 19 nt, Artificial Sequence
  Description of Artificial Sequence: Synthetic oligonucleotide
  Sense strand starting at position 395 of SEQ ID NO: 587143
caggaaauuaguggguuua

SEQ ID NO: 769859 - RNA, 19 nt, Artificial Sequence
  Description of Artificial Sequence: Synthetic oligonucleotide
  Antisense strand to SEQ ID NO: 769858
uaaacccacuaauuuccug

SEQ ID NO: 769860 - RNA, 19 nt, Artificial Sequence
  Description of Artificial Sequence: Synthetic oligonucleotide
  Sense strand starting at position 396 of SEQ ID NO: 587143
aggaaauuaguggguuuag

SEQ ID NO: 769861 - RNA, 19 nt, Artificial Sequence
  Description of Artificial Sequence: Synthetic oligonucleotide
  Antisense strand to SEQ ID NO: 769860
cuaaacccacuaauuuccu

SEQ ID NO: 769862 - RNA, 19 nt, Artificial Sequence
  Description of Artificial Sequence: Synthetic oligonucleotide
  Sense strand starting at position 434 of SEQ ID NO: 587143
ggcaguagcuucuuaaucu

SEQ ID NO: 769863 - RNA, 19 nt, Artificial Sequence
  Description of Artificial Sequence: Synthetic oligonucleotide
  Antisense strand to SEQ ID NO: 769862
agauuaagaagcuacugcc

SEQ ID NO: 769864 - RNA, 19 nt, Artificial Sequence
  Description of Artificial Sequence: Synthetic oligonucleotide
  Sense strand starting at position 1220 of SEQ ID NO: 587143
uugaguguuaaugaaagca

SEQ ID NO: 769865 - RNA, 19 nt, Artificial Sequence
  Description of Artificial Sequence: Synthetic oligonucleotide
  Antisense strand to SEQ ID NO: 769864
ugcuuucauuaacacucaa

SEQ ID NO: 769866 - RNA, 19 nt, Artificial Sequence
  Description of Artificial Sequence: Synthetic oligonucleotide
  Sense strand starting at position 1308 of SEQ ID NO: 587143
uuauuauugugcccauuga

SEQ ID NO: 769867 - RNA, 19 nt, Artificial Sequence
  Description of Artificial Sequence: Synthetic oligonucleotide
  Antisense strand to SEQ ID NO: 769866
ucaaugggcacaauaauaa

SEQ ID NO: 769868 - RNA, 19 nt, Artificial Sequence
  Description of Artificial Sequence: Synthetic oligonucleotide
  Sense strand starting at position 1316 of SEQ ID NO: 587143
gugcccauugaaugaauua

SEQ ID NO: 769869 - RNA, 19 nt, Artificial Sequence
  Description of Artificial Sequence: Synthetic oligonucleotide
  Antisense strand to SEQ ID NO: 769868
uaauucauucaaugggcac

SEQ ID NO: 769870 - RNA, 19 nt, Artificial Sequence
  Description of Artificial Sequence: Synthetic oligonucleotide
  Sense strand starting at position 1341 of SEQ ID NO: 587143
aagacauguuaagugaguu

SEQ ID NO: 769871 - RNA, 19 nt, Artificial Sequence
  Description of Artificial Sequence: Synthetic oligonucleotide
  Antisense strand to SEQ ID NO: 769870
aacucacuuaacaugucuu

SEQ ID NO: 769872 - RNA, 19 nt, Artificial Sequence
  Description of Artificial Sequence: Synthetic oligonucleotide
  Sense strand starting at position 1342 of SEQ ID NO: 587143
agacauguuaagugaguuu

SEQ ID NO: 769873 - RNA, 19 nt, Artificial Sequence
  Description of Artificial Sequence: Synthetic oligonucleotide
  Antisense strand to SEQ ID NO: 769872
aaacucacuuaacaugucu

SEQ ID NO: 769874 - RNA, 19 nt, Artificial Sequence
  Description of Artificial Sequence: Synthetic oligonucleotide
  Sense strand starting at position 1354 of SEQ ID NO: 587143
ugaguuugccaaggucaua

SEQ ID NO: 769875 - RNA, 19 nt, Artificial Sequence
  Description of Artificial Sequence: Synthetic oligonucleotide
  Antisense strand to SEQ ID NO: 769874
uaugaccuuggcaaacuca

SEQ ID NO: 769876 - RNA, 19 nt, Artificial Sequence
  Description of Artificial Sequence: Synthetic oligonucleotide
  Sense strand starting at position 1429 of SEQ ID NO: 587143
ccucuuaaacugugacaag

SEQ ID NO: 769877 - RNA, 19 nt, Artificial Sequence
  Description of Artificial Sequence: Synthetic oligonucleotide
  Antisense strand to SEQ ID NO: 769876
cuugucacaguuuaagagg

SEQ ID NO: 769878 - RNA, 19 nt, Artificial Sequence
  Description of Artificial Sequence: Synthetic oligonucleotide
  Sense strand starting at position 1439 of SEQ ID NO: 587143
ugugacaagucauauuuaa

SEQ ID NO: 769879 - RNA, 19 nt, Artificial Sequence
  Description of Artificial Sequence: Synthetic oligonucleotide
  Antisense strand to SEQ ID NO: 769878
uuaaauaugacuugucaca

SEQ ID NO: 769880 - RNA, 19 nt, Artificial Sequence
  Description of Artificial Sequence: Synthetic oligonucleotide
  Sense strand starting at position 2646 of SEQ ID NO: 587143
agcuuuacauuugaauaag

SEQ ID NO: 769881 - RNA, 19 nt, Artificial Sequence
  Description of Artificial Sequence: Synthetic oligonucleotide
  Antisense strand to SEQ ID NO: 769880
cuuauucaaauguaaagcu

SEQ ID NO: 769882 - RNA, 19 nt, Artificial Sequence
  Description of Artificial Sequence: Synthetic oligonucleotide
  Sense strand starting at position 2657 of SEQ ID NO: 587143
ugaauaaggcuuugcacuu

SEQ ID NO: 769883 - RNA, 19 nt, Artificial Sequence
  Description of Artificial Sequence: Synthetic oligonucleotide
  Antisense strand to SEQ ID NO: 769882
aagugcaaagccuuauuca

SEQ ID NO: 769884 - RNA, 19 nt, Artificial Sequence
  Description of Artificial Sequence: Synthetic oligonucleotide
  Sense strand starting at position 3038 of SEQ ID NO: 587143
ggacuugauugccuuugua

SEQ ID NO: 769885 - RNA, 19 nt, Artificial Sequence
  Description of Artificial Sequence: Synthetic oligonucleotide
  Antisense strand to SEQ ID NO: 769884
uacaaaggcaaucaagucc

SEQ ID NO: 769886 - RNA, 19 nt, Artificial Sequence
  Description of Artificial Sequence: Synthetic oligonucleotide
  Sense strand starting at position 3050 of SEQ ID NO: 587143
cuuuguaggacugauguua

SEQ ID NO: 769887 - RNA, 19 nt, Artificial Sequence
  Description of Artificial Sequence: Synthetic oligonucleotide
  Antisense strand to SEQ ID NO: 769886
uaacaucaguccuacaaag

SEQ ID NO: 769888 - RNA, 19 nt, Artificial Sequence
  Description of Artificial Sequence: Synthetic oligonucleotide
  Sense strand starting at position 3058 of SEQ ID NO: 587143
gacugauguuagccacaag

SEQ ID NO: 769889 - RNA, 19 nt, Artificial Sequence
  Description of Artificial Sequence: Synthetic oligonucleotide
  Antisense strand to SEQ ID NO: 769888
cuuguggcuaacaucaguc

SEQ ID NO: 769890 - RNA, 19 nt, Artificial Sequence
  Description of Artificial Sequence: Synthetic oligonucleotide
  Sense strand starting at position 3061 of SEQ ID NO: 587143
ugauguuagccacaagauu

SEQ ID NO: 769891 - RNA, 19 nt, Artificial Sequence
  Description of Artificial Sequence: Synthetic oligonucleotide
  Antisense strand to SEQ ID NO: 769890
aaucuuguggcuaacauca

SEQ ID NO: 769892 - RNA, 19 nt, Artificial Sequence
  Description of Artificial Sequence: Synthetic oligonucleotide
  Sense strand starting at position 3282 of SEQ ID NO: 587143
cgcuuugacucccuaugau

SEQ ID NO: 769893 - RNA, 19 nt, Artificial Sequence
  Description of Artificial Sequence: Synthetic oligonucleotide
  Antisense strand to SEQ ID NO: 769892
aucauagggagucaaagcg

SEQ ID NO: 769894 - RNA, 19 nt, Artificial Sequence
  Description of Artificial Sequence: Synthetic oligonucleotide
  Sense strand starting at position 3645 of SEQ ID NO: 587143
accagucucccagguguaa

SEQ ID NO: 769895 - RNA, 19 nt, Artificial Sequence
  Description of Artificial Sequence: Synthetic oligonucleotide
  Antisense strand to SEQ ID NO: 769894
uuacaccugggagacuggu

SEQ ID NO: 769896 - RNA, 19 nt, Artificial Sequence
  Description of Artificial Sequence: Synthetic oligonucleotide
  Sense strand starting at position 3689 of SEQ ID NO: 587143
caagauguguguccucacu

SEQ ID NO: 769897 - RNA, 19 nt, Artificial Sequence
  Description of Artificial Sequence: Synthetic oligonucleotide
  Antisense strand to SEQ ID NO: 769896
agugaggacacacaucuug

SEQ ID NO: 769898 - RNA, 19 nt, Artificial Sequence
  Description of Artificial Sequence: Synthetic oligonucleotide
  Sense strand starting at position 3691 of SEQ ID NO: 587143
agauguguguccucacuua

SEQ ID NO: 769899 - RNA, 19 nt, Artificial Sequence
  Description of Artificial Sequence: Synthetic oligonucleotide
  Antisense strand to SEQ ID NO: 769898
uaagugaggacacacaucu

SEQ ID NO: 769900 - RNA, 19 nt, Artificial Sequence
  Description of Artificial Sequence: Synthetic oligonucleotide
  Sense strand starting at position 3720 of SEQ ID NO: 587143
cgccaauuguaacuuuaga

SEQ ID NO: 769901 - RNA, 19 nt, Artificial Sequence
  Description of Artificial Sequence: Synthetic oligonucleotide
  Antisense strand to SEQ ID NO: 769900
ucuaaaguuacaauuggcg

SEQ ID NO: 769902 - RNA, 19 nt, Artificial Sequence
  Description of Artificial Sequence: Synthetic oligonucleotide
  Sense strand starting at position 3754 of SEQ ID NO: 587143
ugaaacuaccucugcaaga

SEQ ID NO: 769903 - RNA, 19 nt, Artificial Sequence
  Description of Artificial Sequence: Synthetic oligonucleotide
  Antisense strand to SEQ ID NO: 769902
ucuugcagagguaguuuca

SEQ ID NO: 769904 - RNA, 19 nt, Artificial Sequence
  Description of Artificial Sequence: Synthetic oligonucleotide
  Sense strand starting at position 3759 of SEQ ID NO: 587143
cuaccucugcaagaauuag

SEQ ID NO: 769905 - RNA, 19 nt, Artificial Sequence
  Description of Artificial Sequence: Synthetic oligonucleotide
  Antisense strand to SEQ ID NO: 769904
cuaauucuugcagagguag

SEQ ID NO: 769906 - RNA, 19 nt, Artificial Sequence
  Description of Artificial Sequence: Synthetic oligonucleotide
  Sense strand starting at position 3850 of SEQ ID NO: 587143
guccauuccuggucguaga

SEQ ID NO: 769907 - RNA, 19 nt, Artificial Sequence
  Description of Artificial Sequence: Synthetic oligonucleotide
  Antisense strand to SEQ ID NO: 769906
ucuacgaccaggaauggac

SEQ ID NO: 769908 - RNA, 19 nt, Artificial Sequence
  Description of Artificial Sequence: Synthetic oligonucleotide
  Sense strand starting at position 3851 of SEQ ID NO: 587143
uccauuccuggucguagaa

SEQ ID NO: 769909 - RNA, 19 nt, Artificial Sequence
  Description of Artificial Sequence: Synthetic oligonucleotide
  Antisense strand to SEQ ID NO: 769908
uucuacgaccaggaaugga

SEQ ID NO: 769910 - RNA, 19 nt, Artificial Sequence
  Description of Artificial Sequence: Synthetic oligonucleotide
  Sense strand starting at position 3861 of SEQ ID NO: 587143
gucguagaauaguuuaacu

SEQ ID NO: 769911 - RNA, 19 nt, Artificial Sequence
  Description of Artificial Sequence: Synthetic oligonucleotide
  Antisense strand to SEQ ID NO: 769910
aguuaaacuauucuacgac

SEQ ID NO: 769912 - RNA, 19 nt, Artificial Sequence
  Description of Artificial Sequence: Synthetic oligonucleotide
  Sense strand starting at position 3863 of SEQ ID NO: 587143
cguagaauaguuuaacuuu

SEQ ID NO: 769913 - RNA, 19 nt, Artificial Sequence
  Description of Artificial Sequence: Synthetic oligonucleotide
  Antisense strand to SEQ ID NO: 769912
aaaguuaaacuauucuacg

SEQ ID NO: 769914 - RNA, 19 nt, Artificial Sequence
  Description of Artificial Sequence: Synthetic oligonucleotide
  Sense strand starting at position 78 of SEQ ID NO: 587144
ccaaguaaccgguaaucca

SEQ ID NO: 769915 - RNA, 19 nt, Artificial Sequence
  Description of Artificial Sequence: Synthetic oligonucleotide
  Antisense strand to SEQ ID NO: 769914
uggauuaccgguuacuugg

SEQ ID NO: 769916 - RNA, 19 nt, Artificial Sequence
  Description of Artificial Sequence: Synthetic oligonucleotide
  Sense strand starting at position 105 of SEQ ID NO: 587144
cccuguuggguuugaaaua

SEQ ID NO: 769917 - RNA, 19 nt, Artificial Sequence
  Description of Artificial Sequence: Synthetic oligonucleotide
  Antisense strand to SEQ ID NO: 769916
uauuucaaacccaacaggg

SEQ ID NO: 769918 - RNA, 19 nt, Artificial Sequence
  Description of Artificial Sequence: Synthetic oligonucleotide
  Sense strand starting at position 106 of SEQ ID NO: 587144
ccuguuggguuugaaauau

SEQ ID NO: 769919 - RNA, 19 nt, Artificial Sequence
  Description of Artificial Sequence: Synthetic oligonucleotide
  Antisense strand to SEQ ID NO: 769918
auauuucaaacccaacagg

SEQ ID NO: 769920 - RNA, 19 nt, Artificial Sequence
  Description of Artificial Sequence: Synthetic oligonucleotide
  Sense strand starting at position 454 of SEQ ID NO: 587144
cuggucaacuguucuuauu

SEQ ID NO: 769921 - RNA, 19 nt, Artificial Sequence
  Description of Artificial Sequence: Synthetic oligonucleotide
  Antisense strand to SEQ ID NO: 769920
aauaagaacaguugaccag

SEQ ID NO: 769922 - RNA, 19 nt, Artificial Sequence
  Description of Artificial Sequence: Synthetic oligonucleotide
  Sense strand starting at position 457 of SEQ ID NO: 587144
gucaacuguucuuauuuaa

SEQ ID NO: 769923 - RNA, 19 nt, Artificial Sequence
  Description of Artificial Sequence: Synthetic oligonucleotide
  Antisense strand to SEQ ID NO: 769922
uuaaauaagaacaguugac

SEQ ID NO: 769924 - RNA, 19 nt, Artificial Sequence
  Description of Artificial Sequence: Synthetic oligonucleotide
  Sense strand starting at position 484 of SEQ ID NO: 587144
guaucaggauuagccaaua

SEQ ID NO: 769925 - RNA, 19 nt, Artificial Sequence
  Description of Artificial Sequence: Synthetic oligonucleotide
  Antisense strand to SEQ ID NO: 769924
uauuggcuaauccugauac

SEQ ID NO: 769926 - RNA, 19 nt, Artificial Sequence
  Description of Artificial Sequence: Synthetic oligonucleotide
  Sense strand starting at position 506 of SEQ ID NO: 587144
gggcuaauauccuaccuaa

SEQ ID NO: 769927 - RNA, 19 nt, Artificial Sequence
  Description of Artificial Sequence: Synthetic oligonucleotide
  Antisense strand to SEQ ID NO: 769926
uuagguaggauauuagccc

SEQ ID NO: 769928 - RNA, 19 nt, Artificial Sequence
  Description of Artificial Sequence: Synthetic oligonucleotide
  Sense strand starting at position 725 of SEQ ID NO: 587144
cugaccuccugagugagua

SEQ ID NO: 769929 - RNA, 19 nt, Artificial Sequence
  Description of Artificial Sequence: Synthetic oligonucleotide
  Antisense strand to SEQ ID NO: 769928
uacucacucaggaggucag

SEQ ID NO: 769930 - RNA, 19 nt, Artificial Sequence
  Description of Artificial Sequence: Synthetic oligonucleotide
  Sense strand starting at position 829 of SEQ ID NO: 587144
gugcgaccugggcgaauua

SEQ ID NO: 769931 - RNA, 19 nt, Artificial Sequence
  Description of Artificial Sequence: Synthetic oligonucleotide
  Antisense strand to SEQ ID NO: 769930
uaauucgcccaggucgcac

SEQ ID NO: 769932 - RNA, 19 nt, Artificial Sequence
  Description of Artificial Sequence: Synthetic oligonucleotide
  Sense strand starting at position 859 of SEQ ID NO: 587144
gccuguuuccacgucugua

SEQ ID NO: 769933 - RNA, 19 nt, Artificial Sequence
  Description of Artificial Sequence: Synthetic oligonucleotide
  Antisense strand to SEQ ID NO: 769932
uacagacguggaaacaggc

SEQ ID NO: 769934 - RNA, 19 nt, Artificial Sequence
  Description of Artificial Sequence: Synthetic oligonucleotide
  Sense strand starting at position 860 of SEQ ID NO: 587144
ccuguuuccacgucuguau

SEQ ID NO: 769935 - RNA, 19 nt, Artificial Sequence
  Description of Artificial Sequence: Synthetic oligonucleotide
  Antisense strand to SEQ ID NO: 769934
auacagacguggaaacagg

SEQ ID NO: 769936 - RNA, 19 nt, Artificial Sequence
  Description of Artificial Sequence: Synthetic oligonucleotide
  Sense strand starting at position 946 of SEQ ID NO: 587144
ugcugugagagucgucaac

SEQ ID NO: 769937 - RNA, 19 nt, Artificial Sequence
  Description of Artificial Sequence: Synthetic oligonucleotide
  Antisense strand to SEQ ID NO: 769936
guugacgacucucacagca

SEQ ID NO: 769938 - RNA, 19 nt, Artificial Sequence
  Description of Artificial Sequence: Synthetic oligonucleotide
  Sense strand starting at position 948 of SEQ ID NO: 587144
cugugagagucgucaacag

SEQ ID NO: 769939 - RNA, 19 nt, Artificial Sequence
  Description of Artificial Sequence: Synthetic oligonucleotide
  Antisense strand to SEQ ID NO: 769938
cuguugacgacucucacag

SEQ ID NO: 769940 - RNA, 19 nt, Artificial Sequence
  Description of Artificial Sequence: Synthetic oligonucleotide
  Sense strand starting at position 1024 of SEQ ID NO: 587144
aagggaagguuugcuuaga

SEQ ID NO: 769941 - RNA, 19 nt, Artificial Sequence
  Description of Artificial Sequence: Synthetic oligonucleotide
  Antisense strand to SEQ ID NO: 769940
ucuaagcaaaccuucccuu

SEQ ID NO: 769942 - RNA, 19 nt, Artificial Sequence
  Description of Artificial Sequence: Synthetic oligonucleotide
  Sense strand starting at position 1025 of SEQ ID NO: 587144
agggaagguuugcuuagaa

SEQ ID NO: 769943 - RNA, 19 nt, Artificial Sequence
  Description of Artificial Sequence: Synthetic oligonucleotide
  Antisense strand to SEQ ID NO: 769942
uucuaagcaaaccuucccu

SEQ ID NO: 769944 - RNA, 19 nt, Artificial Sequence
  Description of Artificial Sequence: Synthetic oligonucleotide
  Sense strand starting at position 1032 of SEQ ID NO: 587144
guuugcuuagaaggaguau

SEQ ID NO: 769945 - RNA, 19 nt, Artificial Sequence
  Description of Artificial Sequence: Synthetic oligonucleotide
  Antisense strand to SEQ ID NO: 769944
auacuccuucuaagcaaac

SEQ ID NO: 769946 - RNA, 19 nt, Artificial Sequence
  Description of Artificial Sequence: Synthetic oligonucleotide
  Sense strand starting at position 1033 of SEQ ID NO: 587144
uuugcuuagaaggaguaua

SEQ ID NO: 769947 - RNA, 19 nt, Artificial Sequence
  Description of Artificial Sequence: Synthetic oligonucleotide
  Antisense strand to SEQ ID NO: 769946
uauacuccuucuaagcaaa

SEQ ID NO: 769948 - RNA, 19 nt, Artificial Sequence
  Description of Artificial Sequence: Synthetic oligonucleotide
  Sense strand starting at position 1044 of SEQ ID NO: 587144
ggaguauaggugcaacuuu

SEQ ID NO: 769949 - RNA, 19 nt, Artificial Sequence
  Description of Artificial Sequence: Synthetic oligonucleotide
  Antisense strand to SEQ ID NO: 769948
aaaguugcaccuauacucc

SEQ ID NO: 769950 - RNA, 19 nt, Artificial Sequence
  Description of Artificial Sequence: Synthetic oligonucleotide
  Sense strand starting at position 1067 of SEQ ID NO: 587144
uuguuaacauuguugucaa

SEQ ID NO: 769951 - RNA, 19 nt, Artificial Sequence
  Description of Artificial Sequence: Synthetic oligonucleotide
  Antisense strand to SEQ ID NO: 769950
uugacaacaauguuaacaa

SEQ ID NO: 769952 - RNA, 19 nt, Artificial Sequence
  Description of Artificial Sequence: Synthetic oligonucleotide
  Sense strand starting at position 1071 of SEQ ID NO: 587144
uaacauuguugucaaggga

SEQ ID NO: 769953 - RNA, 19 nt, Artificial Sequence
  Description of Artificial Sequence: Synthetic oligonucleotide
  Antisense strand to SEQ ID NO: 769952
ucccuugacaacaauguua

SEQ ID NO: 769954 - RNA, 19 nt, Artificial Sequence
  Description of Artificial Sequence: Synthetic oligonucleotide
  Sense strand starting at position 1074 of SEQ ID NO: 587144
cauuguugucaagggagau

SEQ ID NO: 769955 - RNA, 19 nt, Artificial Sequence
  Description of Artificial Sequence: Synthetic oligonucleotide
  Antisense strand to SEQ ID NO: 769954
aucucccuugacaacaaug

SEQ ID NO: 769956 - RNA, 19 nt, Artificial Sequence
  Description of Artificial Sequence: Synthetic oligonucleotide
  Sense strand starting at position 1075 of SEQ ID NO: 587144
auuguugucaagggagauu

SEQ ID NO: 769957 - RNA, 19 nt, Artificial Sequence
  Description of Artificial Sequence: Synthetic oligonucleotide
  Antisense strand to SEQ ID NO: 769956
aaucucccuugacaacaau

SEQ ID NO: 769958 - RNA, 19 nt, Artificial Sequence
  Description of Artificial Sequence: Synthetic oligonucleotide
  Sense strand starting at position 1109 of SEQ ID NO: 587144
acaaaugaucuucgccuuu

SEQ ID NO: 769959 - RNA, 19 nt, Artificial Sequence
  Description of Artificial Sequence: Synthetic oligonucleotide
  Antisense strand to SEQ ID NO: 769958
aaaggcgaagaucauuugu

SEQ ID NO: 769960 - RNA, 19 nt, Artificial Sequence
  Description of Artificial Sequence: Synthetic oligonucleotide
  Sense strand starting at position 1111 of SEQ ID NO: 587144
aaaugaucuucgccuuugu

SEQ ID NO: 769961 - RNA, 19 nt, Artificial Sequence
  Description of Artificial Sequence: Synthetic oligonucleotide
  Antisense strand to SEQ ID NO: 769960
acaaaggcgaagaucauuu

SEQ ID NO: 769962 - RNA, 19 nt, Artificial Sequence
  Description of Artificial Sequence: Synthetic oligonucleotide
  Sense strand starting at position 2005 of SEQ ID NO: 587144
ccuggcuccuccucagaga

SEQ ID NO: 769963 - RNA, 19 nt, Artificial Sequence
  Description of Artificial Sequence: Synthetic oligonucleotide
  Antisense strand to SEQ ID NO: 769962
ucucugaggaggagccagg

SEQ ID NO: 769964 - RNA, 19 nt, Artificial Sequence
  Description of Artificial Sequence: Synthetic oligonucleotide
  Sense strand starting at position 2639 of SEQ ID NO: 587144
gcugguuuccauuagggca

SEQ ID NO: 769965 - RNA, 19 nt, Artificial Sequence
  Description of Artificial Sequence: Synthetic oligonucleotide
  Antisense strand to SEQ ID NO: 769964
ugcccuaauggaaaccagc

SEQ ID NO: 769966 - RNA, 19 nt, Artificial Sequence
  Description of Artificial Sequence: Synthetic oligonucleotide
  Sense strand starting at position 2885 of SEQ ID NO: 587144
ggccguugggucguuuaua

SEQ ID NO: 769967 - RNA, 19 nt, Artificial Sequence
  Description of Artificial Sequence: Synthetic oligonucleotide
  Antisense strand to SEQ ID NO: 769966
uauaaacgacccaacggcc

SEQ ID NO: 769968 - RNA, 19 nt, Artificial Sequence
  Description of Artificial Sequence: Synthetic oligonucleotide
  Sense strand starting at position 2893 of SEQ ID NO: 587144
ggucguuuauacccagagu

SEQ ID NO: 769969 - RNA, 19 nt, Artificial Sequence
  Description of Artificial Sequence: Synthetic oligonucleotide
  Antisense strand to SEQ ID NO: 769968
acucuggguauaaacgacc

SEQ ID NO: 769970 - RNA, 19 nt, Artificial Sequence
  Description of Artificial Sequence: Synthetic oligonucleotide
  Sense strand starting at position 3023 of SEQ ID NO: 587144
ggagcguuaggacgagauu

SEQ ID NO: 769971 - RNA, 19 nt, Artificial Sequence
  Description of Artificial Sequence: Synthetic oligonucleotide
  Antisense strand to SEQ ID NO: 769970
aaucucguccuaacgcucc

SEQ ID NO: 769972 - RNA, 19 nt, Artificial Sequence
  Description of Artificial Sequence: Synthetic oligonucleotide
  Sense strand starting at position 3276 of SEQ ID NO: 587144
ugaggacagacucgguaua

SEQ ID NO: 769973 - RNA, 19 nt, Artificial Sequence
  Description of Artificial Sequence: Synthetic oligonucleotide
  Antisense strand to SEQ ID NO: 769972
uauaccgagucuguccuca

SEQ ID NO: 769974 - RNA, 19 nt, Artificial Sequence
  Description of Artificial Sequence: Synthetic oligonucleotide
  Sense strand starting at position 3278 of SEQ ID NO: 587144
aggacagacucgguauagu

SEQ ID NO: 769975 - RNA, 19 nt, Artificial Sequence
  Description of Artificial Sequence: Synthetic oligonucleotide
  Antisense strand to SEQ ID NO: 769974
acuauaccgagucuguccu

SEQ ID NO: 769976 - RNA, 19 nt, Artificial Sequence
  Description of Artificial Sequence: Synthetic oligonucleotide
  Sense strand starting at position 3363 of SEQ ID NO: 587144
gggaggguuuauccggaga

SEQ ID NO: 769977 - RNA, 19 nt, Artificial Sequence
  Description of Artificial Sequence: Synthetic oligonucleotide
  Antisense strand to SEQ ID NO: 769976
ucuccggauaaacccuccc

SEQ ID NO: 769978 - RNA, 19 nt, Artificial Sequence
  Description of Artificial Sequence: Synthetic oligonucleotide
  Sense strand starting at position 3365 of SEQ ID NO: 587144
gaggguuuauccggagaag

SEQ ID NO: 769979 - RNA, 19 nt, Artificial Sequence
  Description of Artificial Sequence: Synthetic oligonucleotide
  Antisense strand to SEQ ID NO: 769978
cuucuccggauaaacccuc

SEQ ID NO: 769980 - RNA, 19 nt, Artificial Sequence
  Description of Artificial Sequence: Synthetic oligonucleotide
  Sense strand starting at position 3366 of SEQ ID NO: 587144
aggguuuauccggagaagu

SEQ ID NO: 769981 - RNA, 19 nt, Artificial Sequence
  Description of Artificial Sequence: Synthetic oligonucleotide
  Antisense strand to SEQ ID NO: 769980
acuucuccggauaaacccu

SEQ ID NO: 769982 - RNA, 19 nt, Artificial Sequence
  Description of Artificial Sequence: Synthetic oligonucleotide
  Sense strand starting at position 3368 of SEQ ID NO: 587144
gguuuauccggagaagugc

SEQ ID NO: 769983 - RNA, 19 nt, Artificial Sequence
  Description of Artificial Sequence: Synthetic oligonucleotide
  Antisense strand to SEQ ID NO: 769982
gcacuucuccggauaaacc

SEQ ID NO: 769984 - RNA, 19 nt, Artificial Sequence
  Description of Artificial Sequence: Synthetic oligonucleotide
  Sense strand starting at position 3520 of SEQ ID NO: 587144
ggucgugggccagaggaaa

SEQ ID NO: 769985 - RNA, 19 nt, Artificial Sequence
  Description of Artificial Sequence: Synthetic oligonucleotide
  Antisense strand to SEQ ID NO: 769984
uuuccucuggcccacgacc

SEQ ID NO: 769986 - RNA, 19 nt, Artificial Sequence
  Description of Artificial Sequence: Synthetic oligonucleotide
  Sense strand starting at position 3579 of SEQ ID NO: 587144
caggauuccugagcaaggu

SEQ ID NO: 769987 - RNA, 19 nt, Artificial Sequence
  Description of Artificial Sequence: Synthetic oligonucleotide
  Antisense strand to SEQ ID NO: 769986
accuugcucaggaauccug

SEQ ID NO: 769988 - RNA, 19 nt, Artificial Sequence
  Description of Artificial Sequence: Synthetic oligonucleotide
  Sense strand starting at position 3745 of SEQ ID NO: 587144
cucuuuccagguugauaga

SEQ ID NO: 769989 - RNA, 19 nt, Artificial Sequence
  Description of Artificial Sequence: Synthetic oligonucleotide
  Antisense strand to SEQ ID NO: 769988
ucuaucaaccuggaaagag

SEQ ID NO: 769990 - RNA, 19 nt, Artificial Sequence
  Description of Artificial Sequence: Synthetic oligonucleotide
  Sense strand starting at position 3746 of SEQ ID NO: 587144
ucuuuccagguugauagau

SEQ ID NO: 769991 - RNA, 19 nt, Artificial Sequence
  Description of Artificial Sequence: Synthetic oligonucleotide
  Antisense strand to SEQ ID NO: 769990
aucuaucaaccuggaaaga

SEQ ID NO: 769992 - RNA, 19 nt, Artificial Sequence
  Description of Artificial Sequence: Synthetic oligonucleotide
  Sense strand starting at position 3748 of SEQ ID NO: 587144
uuuccagguugauagauuu

SEQ ID NO: 769993 - RNA, 19 nt, Artificial Sequence
  Description of Artificial Sequence: Synthetic oligonucleotide
  Antisense strand to SEQ ID NO: 769992
aaaucuaucaaccuggaaa

SEQ ID NO: 769994 - RNA, 19 nt, Artificial Sequence
  Description of Artificial Sequence: Synthetic oligonucleotide
  Sense strand starting at position 58 of SEQ ID NO: 587145
cugaccuccugagugagua

SEQ ID NO: 769995 - RNA, 19 nt, Artificial Sequence
  Description of Artificial Sequence: Synthetic oligonucleotide
  Antisense strand to SEQ ID NO: 769994
uacucacucaggaggucag

SEQ ID NO: 769996 - RNA, 19 nt, Artificial Sequence
  Description of Artificial Sequence: Synthetic oligonucleotide
  Sense strand starting at position 192 of SEQ ID NO: 587145
gccuguuuccacgucugua

SEQ ID NO: 769997 - RNA, 19 nt, Artificial Sequence
  Description of Artificial Sequence: Synthetic oligonucleotide
  Antisense strand to SEQ ID NO: 769996
uacagacguggaaacaggc

SEQ ID NO: 769998 - RNA, 19 nt, Artificial Sequence
  Description of Artificial Sequence: Synthetic oligonucleotide
  Sense strand starting at position 193 of SEQ ID NO: 587145
ccuguuuccacgucuguau

SEQ ID NO: 769999 - RNA, 19 nt, Artificial Sequence
  Description of Artificial Sequence: Synthetic oligonucleotide
  Antisense strand to SEQ ID NO: 769998
auacagacguggaaacagg

SEQ ID NO: 770000 - RNA, 19 nt, Artificial Sequence
  Description of Artificial Sequence: Synthetic oligonucleotide
  Sense strand starting at position 279 of SEQ ID NO: 587145
ugcugugagagucgucaac

SEQ ID NO: 770001 - RNA, 19 nt, Artificial Sequence
  Description of Artificial Sequence: Synthetic oligonucleotide
  Antisense strand to SEQ ID NO: 770000
guugacgacucucacagca

SEQ ID NO: 770002 - RNA, 19 nt, Artificial Sequence
  Description of Artificial Sequence: Synthetic oligonucleotide
  Sense strand starting at position 281 of SEQ ID NO: 587145
cugugagagucgucaacag

SEQ ID NO: 770003 - RNA, 19 nt, Artificial Sequence
  Description of Artificial Sequence: Synthetic oligonucleotide
  Antisense strand to SEQ ID NO: 770002
cuguugacgacucucacag

SEQ ID NO: 770004 - RNA, 19 nt, Artificial Sequence
  Description of Artificial Sequence: Synthetic oligonucleotide
  Sense strand starting at position 357 of SEQ ID NO: 587145
aagggaagguuugcuuaga

SEQ ID NO: 770005 - RNA, 19 nt, Artificial Sequence
  Description of Artificial Sequence: Synthetic oligonucleotide
  Antisense strand to SEQ ID NO: 770004
ucuaagcaaaccuucccuu

SEQ ID NO: 770006 - RNA, 19 nt, Artificial Sequence
  Description of Artificial Sequence: Synthetic oligonucleotide
  Sense strand starting at position 358 of SEQ ID NO: 587145
agggaagguuugcuuagaa

SEQ ID NO: 770007 - RNA, 19 nt, Artificial Sequence
  Description of Artificial Sequence: Synthetic oligonucleotide
  Antisense strand to SEQ ID NO: 770006
uucuaagcaaaccuucccu

SEQ ID NO: 770008 - RNA, 19 nt, Artificial Sequence
  Description of Artificial Sequence: Synthetic oligonucleotide
  Sense strand starting at position 365 of SEQ ID NO: 587145
guuugcuuagaaggaguau

SEQ ID NO: 770009 - RNA, 19 nt, Artificial Sequence
  Description of Artificial Sequence: Synthetic oligonucleotide
  Antisense strand to SEQ ID NO: 770008
auacuccuucuaagcaaac

SEQ ID NO: 770010 - RNA, 19 nt, Artificial Sequence
  Description of Artificial Sequence: Synthetic oligonucleotide
  Sense strand starting at position 366 of SEQ ID NO: 587145
uuugcuuagaaggaguaua

SEQ ID NO: 770011 - RNA, 19 nt, Artificial Sequence
  Description of Artificial Sequence: Synthetic oligonucleotide
  Antisense strand to SEQ ID NO: 770010
uauacuccuucuaagcaaa

SEQ ID NO: 770012 - RNA, 19 nt, Artificial Sequence
  Description of Artificial Sequence: Synthetic oligonucleotide
  Sense strand starting at position 377 of SEQ ID NO: 587145
ggaguauaggugcaacuuu

SEQ ID NO: 770013 - RNA, 19 nt, Artificial Sequence
  Description of Artificial Sequence: Synthetic oligonucleotide
  Antisense strand to SEQ ID NO: 770012
aaaguugcaccuauacucc

SEQ ID NO: 770014 - RNA, 19 nt, Artificial Sequence
  Description of Artificial Sequence: Synthetic oligonucleotide
  Sense strand starting at position 400 of SEQ ID NO: 587145
uuguuaacauuguugucaa

SEQ ID NO: 770015 - RNA, 19 nt, Artificial Sequence
  Description of Artificial Sequence: Synthetic oligonucleotide
  Antisense strand to SEQ ID NO: 770014
uugacaacaauguuaacaa

SEQ ID NO: 770016 - RNA, 19 nt, Artificial Sequence
  Description of Artificial Sequence: Synthetic oligonucleotide
  Sense strand starting at position 407 of SEQ ID NO: 587145
cauuguugucaagggagau

SEQ ID NO: 770017 - RNA, 19 nt, Artificial Sequence
  Description of Artificial Sequence: Synthetic oligonucleotide
  Antisense strand to SEQ ID NO: 770016
aucucccuugacaacaaug

SEQ ID NO: 770018 - RNA, 19 nt, Artificial Sequence
  Description of Artificial Sequence: Synthetic oligonucleotide
  Sense strand starting at position 408 of SEQ ID NO: 587145
auuguugucaagggagauu

SEQ ID NO: 770019 - RNA, 19 nt, Artificial Sequence
  Description of Artificial Sequence: Synthetic oligonucleotide
  Antisense strand to SEQ ID NO: 770018
aaucucccuugacaacaau

SEQ ID NO: 770020 - RNA, 19 nt, Artificial Sequence
  Description of Artificial Sequence: Synthetic oligonucleotide
  Sense strand starting at position 442 of SEQ ID NO: 587145
acaaaugaucuucgccuuu

SEQ ID NO: 770021 - RNA, 19 nt, Artificial Sequence
  Description of Artificial Sequence: Synthetic oligonucleotide
  Antisense strand to SEQ ID NO: 770020
aaaggcgaagaucauuugu

SEQ ID NO: 770022 - RNA, 19 nt, Artificial Sequence
  Description of Artificial Sequence: Synthetic oligonucleotide
  Sense strand starting at position 444 of SEQ ID NO: 587145
aaaugaucuucgccuuugu

SEQ ID NO: 770023 - RNA, 19 nt, Artificial Sequence
  Description of Artificial Sequence: Synthetic oligonucleotide
  Antisense strand to SEQ ID NO: 770022
acaaaggcgaagaucauuu

SEQ ID NO: 770024 - RNA, 19 nt, Artificial Sequence
  Description of Artificial Sequence: Synthetic oligonucleotide
  Sense strand starting at position 1338 of SEQ ID NO: 587145
ccuggcuccuccucagaga

SEQ ID NO: 770025 - RNA, 19 nt, Artificial Sequence
  Description of Artificial Sequence: Synthetic oligonucleotide
  Antisense strand to SEQ ID NO: 770024
ucucugaggaggagccagg

SEQ ID NO: 770026 - RNA, 19 nt, Artificial Sequence
  Description of Artificial Sequence: Synthetic oligonucleotide
  Sense strand starting at position 1972 of SEQ ID NO: 587145
gcugguuuccauuagggca

SEQ ID NO: 770027 - RNA, 19 nt, Artificial Sequence
  Description of Artificial Sequence: Synthetic oligonucleotide
  Antisense strand to SEQ ID NO: 770026
ugcccuaauggaaaccagc

SEQ ID NO: 770028 - RNA, 19 nt, Artificial Sequence
  Description of Artificial Sequence: Synthetic oligonucleotide
  Sense strand starting at position 2218 of SEQ ID NO: 587145
ggccguugggucguuuaua

SEQ ID NO: 770029 - RNA, 19 nt, Artificial Sequence
  Description of Artificial Sequence: Synthetic oligonucleotide
  Antisense strand to SEQ ID NO: 770028
uauaaacgacccaacggcc

SEQ ID NO: 770030 - RNA, 19 nt, Artificial Sequence
  Description of Artificial Sequence: Synthetic oligonucleotide
  Sense strand starting at position 2226 of SEQ ID NO: 587145
ggucguuuauacccagagu

SEQ ID NO: 770031 - RNA, 19 nt, Artificial Sequence
  Description of Artificial Sequence: Synthetic oligonucleotide
  Antisense strand to SEQ ID NO: 770030
acucuggguauaaacgacc

SEQ ID NO: 770032 - RNA, 19 nt, Artificial Sequence
  Description of Artificial Sequence: Synthetic oligonucleotide
  Sense strand starting at position 2356 of SEQ ID NO: 587145
ggagcguuaggacgagauu

SEQ ID NO: 770033 - RNA, 19 nt, Artificial Sequence
  Description of Artificial Sequence: Synthetic oligonucleotide
  Antisense strand to SEQ ID NO: 770032
aaucucguccuaacgcucc

SEQ ID NO: 770034 - RNA, 19 nt, Artificial Sequence
  Description of Artificial Sequence: Synthetic oligonucleotide
  Sense strand starting at position 2609 of SEQ ID NO: 587145
ugaggacagacucgguaua

SEQ ID NO: 770035 - RNA, 19 nt, Artificial Sequence
  Description of Artificial Sequence: Synthetic oligonucleotide
  Antisense strand to SEQ ID NO: 770034
uauaccgagucuguccuca

SEQ ID NO: 770036 - RNA, 19 nt, Artificial Sequence
  Description of Artificial Sequence: Synthetic oligonucleotide
  Sense strand starting at position 2611 of SEQ ID NO: 587145
aggacagacucgguauagu

SEQ ID NO: 770037 - RNA, 19 nt, Artificial Sequence
  Description of Artificial Sequence: Synthetic oligonucleotide
  Antisense strand to SEQ ID NO: 770036
acuauaccgagucuguccu

SEQ ID NO: 770038 - RNA, 19 nt, Artificial Sequence
  Description of Artificial Sequence: Synthetic oligonucleotide
  Sense strand starting at position 2696 of SEQ ID NO: 587145
gggaggguuuauccggaga

SEQ ID NO: 770039 - RNA, 19 nt, Artificial Sequence
  Description of Artificial Sequence: Synthetic oligonucleotide
  Antisense strand to SEQ ID NO: 770038
ucuccggauaaacccuccc

SEQ ID NO: 770040 - RNA, 19 nt, Artificial Sequence
  Description of Artificial Sequence: Synthetic oligonucleotide
  Sense strand starting at position 2699 of SEQ ID NO: 587145
aggguuuauccggagaagu

SEQ ID NO: 770041 - RNA, 19 nt, Artificial Sequence
  Description of Artificial Sequence: Synthetic oligonucleotide
  Antisense strand to SEQ ID NO: 770040
acuucuccggauaaacccu

SEQ ID NO: 770042 - RNA, 19 nt, Artificial Sequence
  Description of Artificial Sequence: Synthetic oligonucleotide
  Sense strand starting at position 2701 of SEQ ID NO: 587145
gguuuauccggagaagugc

SEQ ID NO: 770043 - RNA, 19 nt, Artificial Sequence
  Description of Artificial Sequence: Synthetic oligonucleotide
  Antisense strand to SEQ ID NO: 770042
gcacuucuccggauaaacc

SEQ ID NO: 770044 - RNA, 19 nt, Artificial Sequence
  Description of Artificial Sequence: Synthetic oligonucleotide
  Sense strand starting at position 2853 of SEQ ID NO: 587145
ggucgugggccagaggaaa

SEQ ID NO: 770045 - RNA, 19 nt, Artificial Sequence
  Description of Artificial Sequence: Synthetic oligonucleotide
  Antisense strand to SEQ ID NO: 770044
uuuccucuggcccacgacc

SEQ ID NO: 770046 - RNA, 19 nt, Artificial Sequence
  Description of Artificial Sequence: Synthetic oligonucleotide
  Sense strand starting at position 2912 of SEQ ID NO: 587145
caggauuccugagcaaggu

SEQ ID NO: 770047 - RNA, 19 nt, Artificial Sequence
  Description of Artificial Sequence: Synthetic oligonucleotide
  Antisense strand to SEQ ID NO: 770046
accuugcucaggaauccug

SEQ ID NO: 770048 - RNA, 19 nt, Artificial Sequence
  Description of Artificial Sequence: Synthetic oligonucleotide
  Sense strand starting at position 3078 of SEQ ID NO: 587145
cucuuuccagguugauaga

SEQ ID NO: 770049 - RNA, 19 nt, Artificial Sequence
  Description of Artificial Sequence: Synthetic oligonucleotide
  Antisense strand to SEQ ID NO: 770048
ucuaucaaccuggaaagag

SEQ ID NO: 770050 - RNA, 19 nt, Artificial Sequence
  Description of Artificial Sequence: Synthetic oligonucleotide
  Sense strand starting at position 3079 of SEQ ID NO: 587145
ucuuuccagguugauagau

SEQ ID NO: 770051 - RNA, 19 nt, Artificial Sequence
  Description of Artificial Sequence: Synthetic oligonucleotide
  Antisense strand to SEQ ID NO: 770050
aucuaucaaccuggaaaga

SEQ ID NO: 770052 - RNA, 19 nt, Artificial Sequence
  Description of Artificial Sequence: Synthetic oligonucleotide
  Sense strand starting at position 3081 of SEQ ID NO: 587145
uuuccagguugauagauuu

SEQ ID NO: 770053 - RNA, 19 nt, Artificial Sequence
  Description of Artificial Sequence: Synthetic oligonucleotide
  Antisense strand to SEQ ID NO: 770052
aaaucuaucaaccuggaaa

SEQ ID NO: 770054 - RNA, 19 nt, Artificial Sequence
  Description of Artificial Sequence: Synthetic oligonucleotide
  Sense strand starting at position 3609 of SEQ ID NO: 587145
ggaaaugguuaagcuuuaa

SEQ ID NO: 770055 - RNA, 19 nt, Artificial Sequence
  Description of Artificial Sequence: Synthetic oligonucleotide
  Antisense strand to SEQ ID NO: 770054
uuaaagcuuaaccauuucc

SEQ ID NO: 770056 - RNA, 19 nt, Artificial Sequence
  Description of Artificial Sequence: Synthetic oligonucleotide
  Sense strand starting at position 3631 of SEQ ID NO: 587145
gcaagaaaugggcaguguu

SEQ ID NO: 770057 - RNA, 19 nt, Artificial Sequence
  Description of Artificial Sequence: Synthetic oligonucleotide
  Antisense strand to SEQ ID NO: 770056
aacacugcccauuucuugc

SEQ ID NO: 770058 - RNA, 19 nt, Artificial Sequence
  Description of Artificial Sequence: Synthetic oligonucleotide
  Sense strand starting at position 3634 of SEQ ID NO: 587145
agaaaugggcaguguuuaa

SEQ ID NO: 770059 - RNA, 19 nt, Artificial Sequence
  Description of Artificial Sequence: Synthetic oligonucleotide
  Antisense strand to SEQ ID NO: 770058
uuaaacacugcccauuucu

SEQ ID NO: 770060 - RNA, 19 nt, Artificial Sequence
  Description of Artificial Sequence: Synthetic oligonucleotide
  Sense strand starting at position 3775 of SEQ ID NO: 587145
uggugaaagcuggauauuc

SEQ ID NO: 770061 - RNA, 19 nt, Artificial Sequence
  Description of Artificial Sequence: Synthetic oligonucleotide
  Antisense strand to SEQ ID NO: 770060
gaauauccagcuuucacca

SEQ ID NO: 770062 - RNA, 19 nt, Artificial Sequence
  Description of Artificial Sequence: Synthetic oligonucleotide
  Sense strand starting at position 3777 of SEQ ID NO: 587145
gugaaagcuggauauuccu

SEQ ID NO: 770063 - RNA, 19 nt, Artificial Sequence
  Description of Artificial Sequence: Synthetic oligonucleotide
  Antisense strand to SEQ ID NO: 770062
aggaauauccagcuuucac

SEQ ID NO: 770064 - RNA, 19 nt, Artificial Sequence
  Description of Artificial Sequence: Synthetic oligonucleotide
  Sense strand starting at position 3784 of SEQ ID NO: 587145
cuggauauuccugaguugu

SEQ ID NO: 770065 - RNA, 19 nt, Artificial Sequence
  Description of Artificial Sequence: Synthetic oligonucleotide
  Antisense strand to SEQ ID NO: 770064
acaacucaggaauauccag

SEQ ID NO: 770066 - RNA, 19 nt, Artificial Sequence
  Description of Artificial Sequence: Synthetic oligonucleotide
  Sense strand starting at position 3786 of SEQ ID NO: 587145
ggauauuccugaguugugu

SEQ ID NO: 770067 - RNA, 19 nt, Artificial Sequence
  Description of Artificial Sequence: Synthetic oligonucleotide
  Antisense strand to SEQ ID NO: 770066
acacaacucaggaauaucc

SEQ ID NO: 770068 - RNA, 19 nt, Artificial Sequence
  Description of Artificial Sequence: Synthetic oligonucleotide
  Sense strand starting at position 3864 of SEQ ID NO: 587145
acgucauagccagagcuuu

SEQ ID NO: 770069 - RNA, 19 nt, Artificial Sequence
  Description of Artificial Sequence: Synthetic oligonucleotide
  Antisense strand to SEQ ID NO: 770068
aaagcucuggcuaugacgu

SEQ ID NO: 770070 - RNA, 19 nt, Artificial Sequence
  Description of Artificial Sequence: Synthetic oligonucleotide
  Sense strand starting at position 3870 of SEQ ID NO: 587145
uagccagagcuuugucaga

SEQ ID NO: 770071 - RNA, 19 nt, Artificial Sequence
  Description of Artificial Sequence: Synthetic oligonucleotide
  Antisense strand to SEQ ID NO: 770070
ucugacaaagcucuggcua

SEQ ID NO: 770072 - RNA, 19 nt, Artificial Sequence
  Description of Artificial Sequence: Synthetic oligonucleotide
  Sense strand starting at position 3872 of SEQ ID NO: 587145
gccagagcuuugucagaau

SEQ ID NO: 770073 - RNA, 19 nt, Artificial Sequence
  Description of Artificial Sequence: Synthetic oligonucleotide
  Antisense strand to SEQ ID NO: 770072
auucugacaaagcucuggc

SEQ ID NO: 770074 - RNA, 19 nt, Artificial Sequence
  Description of Artificial Sequence: Synthetic oligonucleotide
  Sense strand starting at position 59 of SEQ ID NO: 587146
uguggauugugggucugua

SEQ ID NO: 770075 - RNA, 19 nt, Artificial Sequence
  Description of Artificial Sequence: Synthetic oligonucleotide
  Antisense strand to SEQ ID NO: 770074
uacagacccacaauccaca

SEQ ID NO: 770076 - RNA, 19 nt, Artificial Sequence
  Description of Artificial Sequence: Synthetic oligonucleotide
  Sense strand starting at position 63 of SEQ ID NO: 587146
gauugugggucuguauaua

SEQ ID NO: 770077 - RNA, 19 nt, Artificial Sequence
  Description of Artificial Sequence: Synthetic oligonucleotide
  Antisense strand to SEQ ID NO: 770076
uauauacagacccacaauc

SEQ ID NO: 770078 - RNA, 19 nt, Artificial Sequence
  Description of Artificial Sequence: Synthetic oligonucleotide
  Sense strand starting at position 71 of SEQ ID NO: 587146
gucuguauauauccuccaa

SEQ ID NO: 770079 - RNA, 19 nt, Artificial Sequence
  Description of Artificial Sequence: Synthetic oligonucleotide
  Antisense strand to SEQ ID NO: 770078
uuggaggauauauacagac

SEQ ID NO: 770080 - RNA, 19 nt, Artificial Sequence
  Description of Artificial Sequence: Synthetic oligonucleotide
  Sense strand starting at position 274 of SEQ ID NO: 587146
cauggcuucuggguguaaa

SEQ ID NO: 770081 - RNA, 19 nt, Artificial Sequence
  Description of Artificial Sequence: Synthetic oligonucleotide
  Antisense strand to SEQ ID NO: 770080
uuuacacccagaagccaug

SEQ ID NO: 770082 - RNA, 19 nt, Artificial Sequence
  Description of Artificial Sequence: Synthetic oligonucleotide
  Sense strand starting at position 299 of SEQ ID NO: 587146
uuuguaaguuagcaaucua

SEQ ID NO: 770083 - RNA, 19 nt, Artificial Sequence
  Description of Artificial Sequence: Synthetic oligonucleotide
  Antisense strand to SEQ ID NO: 770082
uagauugcuaacuuacaaa

SEQ ID NO: 770084 - RNA, 19 nt, Artificial Sequence
  Description of Artificial Sequence: Synthetic oligonucleotide
  Sense strand starting at position 399 of SEQ ID NO: 587146
acggaaauuucagguguaa

SEQ ID NO: 770085 - RNA, 19 nt, Artificial Sequence
  Description of Artificial Sequence: Synthetic oligonucleotide
  Antisense strand to SEQ ID NO: 770084
uuacaccugaaauuuccgu

SEQ ID NO: 770086 - RNA, 19 nt, Artificial Sequence
  Description of Artificial Sequence: Synthetic oligonucleotide
  Sense strand starting at position 441 of SEQ ID NO: 587146
gagaucuggcuccagaucu

SEQ ID NO: 770087 - RNA, 19 nt, Artificial Sequence
  Description of Artificial Sequence: Synthetic oligonucleotide
  Antisense strand to SEQ ID NO: 770086
agaucuggagccagaucuc

SEQ ID NO: 770088 - RNA, 19 nt, Artificial Sequence
  Description of Artificial Sequence: Synthetic oligonucleotide
  Sense strand starting at position 460 of SEQ ID NO: 587146
uggaucugccucugacuua

SEQ ID NO: 770089 - RNA, 19 nt, Artificial Sequence
  Description of Artificial Sequence: Synthetic oligonucleotide
  Antisense strand to SEQ ID NO: 770088
uaagucagaggcagaucca

SEQ ID NO: 770090 - RNA, 19 nt, Artificial Sequence
  Description of Artificial Sequence: Synthetic oligonucleotide
  Sense strand starting at position 484 of SEQ ID NO: 587146
ucaauuuggcagugucauc

SEQ ID NO: 770091 - RNA, 19 nt, Artificial Sequence
  Description of Artificial Sequence: Synthetic oligonucleotide
  Antisense strand to SEQ ID NO: 770090
gaugacacugccaaauuga

SEQ ID NO: 770092 - RNA, 19 nt, Artificial Sequence
  Description of Artificial Sequence: Synthetic oligonucleotide
  Sense strand starting at position 801 of SEQ ID NO: 587146
auggcaguguugcuuaacu

SEQ ID NO: 770093 - RNA, 19 nt, Artificial Sequence
  Description of Artificial Sequence: Synthetic oligonucleotide
  Antisense strand to SEQ ID NO: 770092
aguuaagcaacacugccau

SEQ ID NO: 770094 - RNA, 19 nt, Artificial Sequence
  Description of Artificial Sequence: Synthetic oligonucleotide
  Sense strand starting at position 803 of SEQ ID NO: 587146
ggcaguguugcuuaacugu

SEQ ID NO: 770095 - RNA, 19 nt, Artificial Sequence
  Description of Artificial Sequence: Synthetic oligonucleotide
  Antisense strand to SEQ ID NO: 770094
acaguuaagcaacacugcc

SEQ ID NO: 770096 - RNA, 19 nt, Artificial Sequence
  Description of Artificial Sequence: Synthetic oligonucleotide
  Sense strand starting at position 893 of SEQ ID NO: 587146
cccagaucccaaggaucau

SEQ ID NO: 770097 - RNA, 19 nt, Artificial Sequence
  Description of Artificial Sequence: Synthetic oligonucleotide
  Antisense strand to SEQ ID NO: 770096
augauccuugggaucuggg

SEQ ID NO: 770098 - RNA, 19 nt, Artificial Sequence
  Description of Artificial Sequence: Synthetic oligonucleotide
  Sense strand starting at position 961 of SEQ ID NO: 587146
cgugguagcugcucagagu

SEQ ID NO: 770099 - RNA, 19 nt, Artificial Sequence
  Description of Artificial Sequence: Synthetic oligonucleotide
  Antisense strand to SEQ ID NO: 770098
acucugagcagcuaccacg

SEQ ID NO: 770100 - RNA, 19 nt, Artificial Sequence
  Description of Artificial Sequence: Synthetic oligonucleotide
  Sense strand starting at position 996 of SEQ ID NO: 587146
accuucuugugaggagcaa

SEQ ID NO: 770101 - RNA, 19 nt, Artificial Sequence
  Description of Artificial Sequence: Synthetic oligonucleotide
  Antisense strand to SEQ ID NO: 770100
uugcuccucacaagaaggu

SEQ ID NO: 770102 - RNA, 19 nt, Artificial Sequence
  Description of Artificial Sequence: Synthetic oligonucleotide
  Sense strand starting at position 997 of SEQ ID NO: 587146
ccuucuugugaggagcaau

SEQ ID NO: 770103 - RNA, 19 nt, Artificial Sequence
  Description of Artificial Sequence: Synthetic oligonucleotide
  Antisense strand to SEQ ID NO: 770102
auugcuccucacaagaagg

SEQ ID NO: 770104 - RNA, 19 nt, Artificial Sequence
  Description of Artificial Sequence: Synthetic oligonucleotide
  Sense strand starting at position 1011 of SEQ ID NO: 587146
gcaauuacagcagaguaca

SEQ ID NO: 770105 - RNA, 19 nt, Artificial Sequence
  Description of Artificial Sequence: Synthetic oligonucleotide
  Antisense strand to SEQ ID NO: 770104
uguacucugcuguaauugc

SEQ ID NO: 770106 - RNA, 19 nt, Artificial Sequence
  Description of Artificial Sequence: Synthetic oligonucleotide
  Sense strand starting at position 1182 of SEQ ID NO: 587146
uccagugcucuugcuguua

SEQ ID NO: 770107 - RNA, 19 nt, Artificial Sequence
  Description of Artificial Sequence: Synthetic oligonucleotide
  Antisense strand to SEQ ID NO: 770106
uaacagcaagagcacugga

SEQ ID NO: 770108 - RNA, 19 nt, Artificial Sequence
  Description of Artificial Sequence: Synthetic oligonucleotide
  Sense strand starting at position 1261 of SEQ ID NO: 587146
ccaagaaccucgcaaugga

SEQ ID NO: 770109 - RNA, 19 nt, Artificial Sequence
  Description of Artificial Sequence: Synthetic oligonucleotide
  Antisense strand to SEQ ID NO: 770108
uccauugcgagguucuugg

SEQ ID NO: 770110 - RNA, 19 nt, Artificial Sequence
  Description of Artificial Sequence: Synthetic oligonucleotide
  Sense strand starting at position 1300 of SEQ ID NO: 587146
aaguuuggguuucucuaau

SEQ ID NO: 770111 - RNA, 19 nt, Artificial Sequence
  Description of Artificial Sequence: Synthetic oligonucleotide
  Antisense strand to SEQ ID NO: 770110
auuagagaaacccaaacuu

SEQ ID NO: 770112 - RNA, 19 nt, Artificial Sequence
  Description of Artificial Sequence: Synthetic oligonucleotide
  Sense strand starting at position 1306 of SEQ ID NO: 587146
ggguuucucuaaugugcca

SEQ ID NO: 770113 - RNA, 19 nt, Artificial Sequence
  Description of Artificial Sequence: Synthetic oligonucleotide
  Antisense strand to SEQ ID NO: 770112
uggcacauuagagaaaccc

SEQ ID NO: 770114 - RNA, 19 nt, Artificial Sequence
  Description of Artificial Sequence: Synthetic oligonucleotide
  Sense strand starting at position 1356 of SEQ ID NO: 587146
gccgaugagucccugacga

SEQ ID NO: 770115 - RNA, 19 nt, Artificial Sequence
  Description of Artificial Sequence: Synthetic oligonucleotide
  Antisense strand to SEQ ID NO: 770114
ucgucagggacucaucggc

SEQ ID NO: 770116 - RNA, 19 nt, Artificial Sequence
  Description of Artificial Sequence: Synthetic oligonucleotide
  Sense strand starting at position 1463 of SEQ ID NO: 587146
acacgaauaucuguugcca

SEQ ID NO: 770117 - RNA, 19 nt, Artificial Sequence
  Description of Artificial Sequence: Synthetic oligonucleotide
  Antisense strand to SEQ ID NO: 770116
uggcaacagauauucgugu

SEQ ID NO: 770118 - RNA, 19 nt, Artificial Sequence
  Description of Artificial Sequence: Synthetic oligonucleotide
  Sense strand starting at position 1465 of SEQ ID NO: 587146
acgaauaucuguugccaaa

SEQ ID NO: 770119 - RNA, 19 nt, Artificial Sequence
  Description of Artificial Sequence: Synthetic oligonucleotide
  Antisense strand to SEQ ID NO: 770118
uuuggcaacagauauucgu

SEQ ID NO: 770120 - RNA, 19 nt, Artificial Sequence
  Description of Artificial Sequence: Synthetic oligonucleotide
  Sense strand starting at position 2209 of SEQ ID NO: 587146
ggcggcuuugucugaauua

SEQ ID NO: 770121 - RNA, 19 nt, Artificial Sequence
  Description of Artificial Sequence: Synthetic oligonucleotide
  Antisense strand to SEQ ID NO: 770120
uaauucagacaaagccgcc

SEQ ID NO: 770122 - RNA, 19 nt, Artificial Sequence
  Description of Artificial Sequence: Synthetic oligonucleotide
  Sense strand starting at position 2210 of SEQ ID NO: 587146
gcggcuuugucugaauuac

SEQ ID NO: 770123 - RNA, 19 nt, Artificial Sequence
  Description of Artificial Sequence: Synthetic oligonucleotide
  Antisense strand to SEQ ID NO: 770122
guaauucagacaaagccgc

SEQ ID NO: 770124 - RNA, 19 nt, Artificial Sequence
  Description of Artificial Sequence: Synthetic oligonucleotide
  Sense strand starting at position 2418 of SEQ ID NO: 587146
acacgcguguccucagaga

SEQ ID NO: 770125 - RNA, 19 nt, Artificial Sequence
  Description of Artificial Sequence: Synthetic oligonucleotide
  Antisense strand to SEQ ID NO: 770124
ucucugaggacacgcgugu

SEQ ID NO: 770126 - RNA, 19 nt, Artificial Sequence
  Description of Artificial Sequence: Synthetic oligonucleotide
  Sense strand starting at position 2463 of SEQ ID NO: 587146
ucauuaguaagacgaauug

SEQ ID NO: 770127 - RNA, 19 nt, Artificial Sequence
  Description of Artificial Sequence: Synthetic oligonucleotide
  Antisense strand to SEQ ID NO: 770126
caauucgucuuacuaauga

SEQ ID NO: 770128 - RNA, 19 nt, Artificial Sequence
  Description of Artificial Sequence: Synthetic oligonucleotide
  Sense strand starting at position 2535 of SEQ ID NO: 587146
aguguauguacgcuauagu

SEQ ID NO: 770129 - RNA, 19 nt, Artificial Sequence
  Description of Artificial Sequence: Synthetic oligonucleotide
  Antisense strand to SEQ ID NO: 770128
acuauagcguacauacacu

SEQ ID NO: 770130 - RNA, 19 nt, Artificial Sequence
  Description of Artificial Sequence: Synthetic oligonucleotide
  Sense strand starting at position 2551 of SEQ ID NO: 587146
aguccugguuucuugugaa

SEQ ID NO: 770131 - RNA, 19 nt, Artificial Sequence
  Description of Artificial Sequence: Synthetic oligonucleotide
  Antisense strand to SEQ ID NO: 770130
uucacaagaaaccaggacu

SEQ ID NO: 770132 - RNA, 19 nt, Artificial Sequence
  Description of Artificial Sequence: Synthetic oligonucleotide
  Sense strand starting at position 2996 of SEQ ID NO: 587146
acaagauuagccgggcguu

SEQ ID NO: 770133 - RNA, 19 nt, Artificial Sequence
  Description of Artificial Sequence: Synthetic oligonucleotide
  Antisense strand to SEQ ID NO: 770132
aacgcccggcuaaucuugu

SEQ ID NO: 770134 - RNA, 19 nt, Artificial Sequence
  Description of Artificial Sequence: Synthetic oligonucleotide
  Sense strand starting at position 3310 of SEQ ID NO: 587146
gacaccgucucaguuuaaa

SEQ ID NO: 770135 - RNA, 19 nt, Artificial Sequence
  Description of Artificial Sequence: Synthetic oligonucleotide
  Antisense strand to SEQ ID NO: 770134
uuuaaacugagacgguguc

SEQ ID NO: 770136 - RNA, 19 nt, Artificial Sequence
  Description of Artificial Sequence: Synthetic oligonucleotide
  Sense strand starting at position 3400 of SEQ ID NO: 587146
ucaguauuauaagcaaugu

SEQ ID NO: 770137 - RNA, 19 nt, Artificial Sequence
  Description of Artificial Sequence: Synthetic oligonucleotide
  Antisense strand to SEQ ID NO: 770136
acauugcuuauaauacuga

SEQ ID NO: 770138 - RNA, 19 nt, Artificial Sequence
  Description of Artificial Sequence: Synthetic oligonucleotide
  Sense strand starting at position 3404 of SEQ ID NO: 587146
uauuauaagcaauguagag

SEQ ID NO: 770139 - RNA, 19 nt, Artificial Sequence
  Description of Artificial Sequence: Synthetic oligonucleotide
  Antisense strand to SEQ ID NO: 770138
cucuacauugcuuauaaua

SEQ ID NO: 770140 - RNA, 19 nt, Artificial Sequence
  Description of Artificial Sequence: Synthetic oligonucleotide
  Sense strand starting at position 3443 of SEQ ID NO: 587146
ggaaguguauagguuagau

SEQ ID NO: 770141 - RNA, 19 nt, Artificial Sequence
  Description of Artificial Sequence: Synthetic oligonucleotide
  Antisense strand to SEQ ID NO: 770140
aucuaaccuauacacuucc

SEQ ID NO: 770142 - RNA, 19 nt, Artificial Sequence
  Description of Artificial Sequence: Synthetic oligonucleotide
  Sense strand starting at position 3567 of SEQ ID NO: 587146
uuaucugagaggugagacu

SEQ ID NO: 770143 - RNA, 19 nt, Artificial Sequence
  Description of Artificial Sequence: Synthetic oligonucleotide
  Antisense strand to SEQ ID NO: 770142
agucucaccucucagauaa

SEQ ID NO: 770144 - RNA, 19 nt, Artificial Sequence
  Description of Artificial Sequence: Synthetic oligonucleotide
  Sense strand starting at position 3666 of SEQ ID NO: 587146
agccaauaucuuugagacu

SEQ ID NO: 770145 - RNA, 19 nt, Artificial Sequence
  Description of Artificial Sequence: Synthetic oligonucleotide
  Antisense strand to SEQ ID NO: 770144
agucucaaagauauuggcu

SEQ ID NO: 770146 - RNA, 19 nt, Artificial Sequence
  Description of Artificial Sequence: Synthetic oligonucleotide
  Sense strand starting at position 3667 of SEQ ID NO: 587146
gccaauaucuuugagacuu

SEQ ID NO: 770147 - RNA, 19 nt, Artificial Sequence
  Description of Artificial Sequence: Synthetic oligonucleotide
  Antisense strand to SEQ ID NO: 770146
aagucucaaagauauuggc

SEQ ID NO: 770148 - RNA, 19 nt, Artificial Sequence
  Description of Artificial Sequence: Synthetic oligonucleotide
  Sense strand starting at position 3679 of SEQ ID NO: 587146
gagacuugcuucugcagaa

SEQ ID NO: 770149 - RNA, 19 nt, Artificial Sequence
  Description of Artificial Sequence: Synthetic oligonucleotide
  Antisense strand to SEQ ID NO: 770148
uucugcagaagcaagucuc

SEQ ID NO: 770150 - RNA, 19 nt, Artificial Sequence
  Description of Artificial Sequence: Synthetic oligonucleotide
  Sense strand starting at position 3680 of SEQ ID NO: 587146
agacuugcuucugcagaau

SEQ ID NO: 770151 - RNA, 19 nt, Artificial Sequence
  Description of Artificial Sequence: Synthetic oligonucleotide
  Antisense strand to SEQ ID NO: 770150
auucugcagaagcaagucu

SEQ ID NO: 770152 - RNA, 19 nt, Artificial Sequence
  Description of Artificial Sequence: Synthetic oligonucleotide
  Sense strand starting at position 3689 of SEQ ID NO: 587146
ucugcagaauggugacaau

SEQ ID NO: 770153 - RNA, 19 nt, Artificial Sequence
  Description of Artificial Sequence: Synthetic oligonucleotide
  Antisense strand to SEQ ID NO: 770152
auugucaccauucugcaga

SEQ ID NO: 770154 - RNA, 19 nt, Artificial Sequence
  Description of Artificial Sequence: Synthetic oligonucleotide
  Sense strand starting at position 82 of SEQ ID NO: 587147
gcggguucugaccacacuu

SEQ ID NO: 770155 - RNA, 19 nt, Artificial Sequence
  Description of Artificial Sequence: Synthetic oligonucleotide
  Antisense strand to SEQ ID NO: 770154
aaguguggucagaacccgc

SEQ ID NO: 770156 - RNA, 19 nt, Artificial Sequence
  Description of Artificial Sequence: Synthetic oligonucleotide
  Sense strand starting at position 84 of SEQ ID NO: 587147
ggguucugaccacacuuau

SEQ ID NO: 770157 - RNA, 19 nt, Artificial Sequence
  Description of Artificial Sequence: Synthetic oligonucleotide
  Antisense strand to SEQ ID NO: 770156
auaaguguggucagaaccc

SEQ ID NO: 770158 - RNA, 19 nt, Artificial Sequence
  Description of Artificial Sequence: Synthetic oligonucleotide
  Sense strand starting at position 179 of SEQ ID NO: 587147
gcuccuuaccuauagggaa

SEQ ID NO: 770159 - RNA, 19 nt, Artificial Sequence
  Description of Artificial Sequence: Synthetic oligonucleotide
  Antisense strand to SEQ ID NO: 770158
uucccuauagguaaggagc

SEQ ID NO: 770160 - RNA, 19 nt, Artificial Sequence
  Description of Artificial Sequence: Synthetic oligonucleotide
  Sense strand starting at position 255 of SEQ ID NO: 587147
gagauagacaucggagcau

SEQ ID NO: 770161 - RNA, 19 nt, Artificial Sequence
  Description of Artificial Sequence: Synthetic oligonucleotide
  Antisense strand to SEQ ID NO: 770160
augcuccgaugucuaucuc

SEQ ID NO: 770162 - RNA, 19 nt, Artificial Sequence
  Description of Artificial Sequence: Synthetic oligonucleotide
  Sense strand starting at position 259 of SEQ ID NO: 587147
uagacaucggagcauauua

SEQ ID NO: 770163 - RNA, 19 nt, Artificial Sequence
  Description of Artificial Sequence: Synthetic oligonucleotide
  Antisense strand to SEQ ID NO: 770162
uaauaugcuccgaugucua

SEQ ID NO: 770164 - RNA, 19 nt, Artificial Sequence
  Description of Artificial Sequence: Synthetic oligonucleotide
  Sense strand starting at position 306 of SEQ ID NO: 587147
agaauuuccugguauacau

SEQ ID NO: 770165 - RNA, 19 nt, Artificial Sequence
  Description of Artificial Sequence: Synthetic oligonucleotide
  Antisense strand to SEQ ID NO: 770164
auguauaccaggaaauucu

SEQ ID NO: 770166 - RNA, 19 nt, Artificial Sequence
  Description of Artificial Sequence: Synthetic oligonucleotide
  Sense strand starting at position 603 of SEQ ID NO: 587147
ucagcuuaugaagaaguau

SEQ ID NO: 770167 - RNA, 19 nt, Artificial Sequence
  Description of Artificial Sequence: Synthetic oligonucleotide
  Antisense strand to SEQ ID NO: 770166
auacuucuucauaagcuga

SEQ ID NO: 770168 - RNA, 19 nt, Artificial Sequence
  Description of Artificial Sequence: Synthetic oligonucleotide
  Sense strand starting at position 659 of SEQ ID NO: 587147
ccuggagguucuucuauua

SEQ ID NO: 770169 - RNA, 19 nt, Artificial Sequence
  Description of Artificial Sequence: Synthetic oligonucleotide
  Antisense strand to SEQ ID NO: 770168
uaauagaagaaccuccagg

SEQ ID NO: 770170 - RNA, 19 nt, Artificial Sequence
  Description of Artificial Sequence: Synthetic oligonucleotide
  Sense strand starting at position 854 of SEQ ID NO: 587147
ucuaguccugucuguaaca

SEQ ID NO: 770171 - RNA, 19 nt, Artificial Sequence
  Description of Artificial Sequence: Synthetic oligonucleotide
  Antisense strand to SEQ ID NO: 770170
uguuacagacaggacuaga

SEQ ID NO: 770172 - RNA, 19 nt, Artificial Sequence
  Description of Artificial Sequence: Synthetic oligonucleotide
  Sense strand starting at position 855 of SEQ ID NO: 587147
cuaguccugucuguaacau

SEQ ID NO: 770173 - RNA, 19 nt, Artificial Sequence
  Description of Artificial Sequence: Synthetic oligonucleotide
  Antisense strand to SEQ ID NO: 770172
auguuacagacaggacuag

SEQ ID NO: 770174 - RNA, 19 nt, Artificial Sequence
  Description of Artificial Sequence: Synthetic oligonucleotide
  Sense strand starting at position 873 of SEQ ID NO: 587147
uuggcugagcugugagaca

SEQ ID NO: 770175 - RNA, 19 nt, Artificial Sequence
  Description of Artificial Sequence: Synthetic oligonucleotide
  Antisense strand to SEQ ID NO: 770174
ugucucacagcucagccaa

SEQ ID NO: 770176 - RNA, 19 nt, Artificial Sequence
  Description of Artificial Sequence: Synthetic oligonucleotide
  Sense strand starting at position 875 of SEQ ID NO: 587147
ggcugagcugugagacagu

SEQ ID NO: 770177 - RNA, 19 nt, Artificial Sequence
  Description of Artificial Sequence: Synthetic oligonucleotide
  Antisense strand to SEQ ID NO: 770176
acugucucacagcucagcc

SEQ ID NO: 770178 - RNA, 19 nt, Artificial Sequence
  Description of Artificial Sequence: Synthetic oligonucleotide
  Sense strand starting at position 884 of SEQ ID NO: 587147
gugagacaguuucugucuu

SEQ ID NO: 770179 - RNA, 19 nt, Artificial Sequence
  Description of Artificial Sequence: Synthetic oligonucleotide
  Antisense strand to SEQ ID NO: 770178
aagacagaaacugucucac

SEQ ID NO: 770180 - RNA, 19 nt, Artificial Sequence
  Description of Artificial Sequence: Synthetic oligonucleotide
  Sense strand starting at position 975 of SEQ ID NO: 587147
auucuuuaacuagggacuu

SEQ ID NO: 770181 - RNA, 19 nt, Artificial Sequence
  Description of Artificial Sequence: Synthetic oligonucleotide
  Antisense strand to SEQ ID NO: 770180
aagucccuaguuaaagaau

SEQ ID NO: 770182 - RNA, 19 nt, Artificial Sequence
  Description of Artificial Sequence: Synthetic oligonucleotide
  Sense strand starting at position 1003 of SEQ ID NO: 587147
caagauuuguuuguggcca

SEQ ID NO: 770183 - RNA, 19 nt, Artificial Sequence
  Description of Artificial Sequence: Synthetic oligonucleotide
  Antisense strand to SEQ ID NO: 770182
uggccacaaacaaaucuug

SEQ ID NO: 770184 - RNA, 19 nt, Artificial Sequence
  Description of Artificial Sequence: Synthetic oligonucleotide
  Sense strand starting at position 1007 of SEQ ID NO: 587147
auuuguuuguggccaauag

SEQ ID NO: 770185 - RNA, 19 nt, Artificial Sequence
  Description of Artificial Sequence: Synthetic oligonucleotide
  Antisense strand to SEQ ID NO: 770184
cuauuggccacaaacaaau

SEQ ID NO: 770186 - RNA, 19 nt, Artificial Sequence
  Description of Artificial Sequence: Synthetic oligonucleotide
  Sense strand starting at position 1122 of SEQ ID NO: 587147
auaaauguguaauugagga

SEQ ID NO: 770187 - RNA, 19 nt, Artificial Sequence
  Description of Artificial Sequence: Synthetic oligonucleotide
  Antisense strand to SEQ ID NO: 770186
uccucaauuacacauuuau

SEQ ID NO: 770188 - RNA, 19 nt, Artificial Sequence
  Description of Artificial Sequence: Synthetic oligonucleotide
  Sense strand starting at position 1150 of SEQ ID NO: 587147
ccuggaggugacugucaua

SEQ ID NO: 770189 - RNA, 19 nt, Artificial Sequence
  Description of Artificial Sequence: Synthetic oligonucleotide
  Antisense strand to SEQ ID NO: 770188
uaugacagucaccuccagg

SEQ ID NO: 770190 - RNA, 19 nt, Artificial Sequence
  Description of Artificial Sequence: Synthetic oligonucleotide
  Sense strand starting at position 2098 of SEQ ID NO: 587147
gcaucaccuggcuaucaua

SEQ ID NO: 770191 - RNA, 19 nt, Artificial Sequence
  Description of Artificial Sequence: Synthetic oligonucleotide
  Antisense strand to SEQ ID NO: 770190
uaugauagccaggugaugc

SEQ ID NO: 770192 - RNA, 19 nt, Artificial Sequence
  Description of Artificial Sequence: Synthetic oligonucleotide
  Sense strand starting at position 2137 of SEQ ID NO: 587147
aacauaucuugacuggagu

SEQ ID NO: 770193 - RNA, 19 nt, Artificial Sequence
  Description of Artificial Sequence: Synthetic oligonucleotide
  Antisense strand to SEQ ID NO: 770192
acuccagucaagauauguu

SEQ ID NO: 770194 - RNA, 19 nt, Artificial Sequence
  Description of Artificial Sequence: Synthetic oligonucleotide
  Sense strand starting at position 2138 of SEQ ID NO: 587147
acauaucuugacuggaguu

SEQ ID NO: 770195 - RNA, 19 nt, Artificial Sequence
  Description of Artificial Sequence: Synthetic oligonucleotide
  Antisense strand to SEQ ID NO: 770194
aacuccagucaagauaugu

SEQ ID NO: 770196 - RNA, 19 nt, Artificial Sequence
  Description of Artificial Sequence: Synthetic oligonucleotide
  Sense strand starting at position 2152 of SEQ ID NO: 587147
gaguuuguaucccugacag

SEQ ID NO: 770197 - RNA, 19 nt, Artificial Sequence
  Description of Artificial Sequence: Synthetic oligonucleotide
  Antisense strand to SEQ ID NO: 770196
cugucagggauacaaacuc

SEQ ID NO: 770198 - RNA, 19 nt, Artificial Sequence
  Description of Artificial Sequence: Synthetic oligonucleotide
  Sense strand starting at position 2154 of SEQ ID NO: 587147
guuuguaucccugacagag

SEQ ID NO: 770199 - RNA, 19 nt, Artificial Sequence
  Description of Artificial Sequence: Synthetic oligonucleotide
  Antisense strand to SEQ ID NO: 770198
cucugucagggauacaaac

SEQ ID NO: 770200 - RNA, 19 nt, Artificial Sequence
  Description of Artificial Sequence: Synthetic oligonucleotide
  Sense strand starting at position 2574 of SEQ ID NO: 587147
gcagcauuauccucaacag

SEQ ID NO: 770201 - RNA, 19 nt, Artificial Sequence
  Description of Artificial Sequence: Synthetic oligonucleotide
  Antisense strand to SEQ ID NO: 770200
cuguugaggauaaugcugc

SEQ ID NO: 770202 - RNA, 19 nt, Artificial Sequence
  Description of Artificial Sequence: Synthetic oligonucleotide
  Sense strand starting at position 2611 of SEQ ID NO: 587147
cuaaauagccauggacaga

SEQ ID NO: 770203 - RNA, 19 nt, Artificial Sequence
  Description of Artificial Sequence: Synthetic oligonucleotide
  Antisense strand to SEQ ID NO: 770202
ucuguccauggcuauuuag

SEQ ID NO: 770204 - RNA, 19 nt, Artificial Sequence
  Description of Artificial Sequence: Synthetic oligonucleotide
  Sense strand starting at position 2971 of SEQ ID NO: 587147
ugcauaugggugugguaaa

SEQ ID NO: 770205 - RNA, 19 nt, Artificial Sequence
  Description of Artificial Sequence: Synthetic oligonucleotide
  Antisense strand to SEQ ID NO: 770204
uuuaccacacccauaugca

SEQ ID NO: 770206 - RNA, 19 nt, Artificial Sequence
  Description of Artificial Sequence: Synthetic oligonucleotide
  Sense strand starting at position 3144 of SEQ ID NO: 587147
gggaauuauuuacaugaua

SEQ ID NO: 770207 - RNA, 19 nt, Artificial Sequence
  Description of Artificial Sequence: Synthetic oligonucleotide
  Antisense strand to SEQ ID NO: 770206
uaucauguaaauaauuccc

SEQ ID NO: 770208 - RNA, 19 nt, Artificial Sequence
  Description of Artificial Sequence: Synthetic oligonucleotide
  Sense strand starting at position 3195 of SEQ ID NO: 587147
ccagcuugaugaguuugaa

SEQ ID NO: 770209 - RNA, 19 nt, Artificial Sequence
  Description of Artificial Sequence: Synthetic oligonucleotide
  Antisense strand to SEQ ID NO: 770208
uucaaacucaucaagcugg

SEQ ID NO: 770210 - RNA, 19 nt, Artificial Sequence
  Description of Artificial Sequence: Synthetic oligonucleotide
  Sense strand starting at position 3198 of SEQ ID NO: 587147
gcuugaugaguuugaaaca

SEQ ID NO: 770211 - RNA, 19 nt, Artificial Sequence
  Description of Artificial Sequence: Synthetic oligonucleotide
  Antisense strand to SEQ ID NO: 770210
uguuucaaacucaucaagc

SEQ ID NO: 770212 - RNA, 19 nt, Artificial Sequence
  Description of Artificial Sequence: Synthetic oligonucleotide
  Sense strand starting at position 3541 of SEQ ID NO: 587147
ugcccaccuuugucagaga

SEQ ID NO: 770213 - RNA, 19 nt, Artificial Sequence
  Description of Artificial Sequence: Synthetic oligonucleotide
  Antisense strand to SEQ ID NO: 770212
ucucugacaaaggugggca

SEQ ID NO: 770214 - RNA, 19 nt, Artificial Sequence
  Description of Artificial Sequence: Synthetic oligonucleotide
  Sense strand starting at position 3612 of SEQ ID NO: 587147
acucauagguuaccaguaa

SEQ ID NO: 770215 - RNA, 19 nt, Artificial Sequence
  Description of Artificial Sequence: Synthetic oligonucleotide
  Antisense strand to SEQ ID NO: 770214
uuacugguaaccuaugagu

SEQ ID NO: 770216 - RNA, 19 nt, Artificial Sequence
  Description of Artificial Sequence: Synthetic oligonucleotide
  Sense strand starting at position 3616 of SEQ ID NO: 587147
auagguuaccaguaaugca

SEQ ID NO: 770217 - RNA, 19 nt, Artificial Sequence
  Description of Artificial Sequence: Synthetic oligonucleotide
  Antisense strand to SEQ ID NO: 770216
ugcauuacugguaaccuau

SEQ ID NO: 770218 - RNA, 19 nt, Artificial Sequence
  Description of Artificial Sequence: Synthetic oligonucleotide
  Sense strand starting at position 3649 of SEQ ID NO: 587147
ggauucucagccuaggagu

SEQ ID NO: 770219 - RNA, 19 nt, Artificial Sequence
  Description of Artificial Sequence: Synthetic oligonucleotide
  Antisense strand to SEQ ID NO: 770218
acuccuaggcugagaaucc

SEQ ID NO: 770220 - RNA, 19 nt, Artificial Sequence
  Description of Artificial Sequence: Synthetic oligonucleotide
  Sense strand starting at position 3662 of SEQ ID NO: 587147
aggagugucuuguuuacaa

SEQ ID NO: 770221 - RNA, 19 nt, Artificial Sequence
  Description of Artificial Sequence: Synthetic oligonucleotide
  Antisense strand to SEQ ID NO: 770220
uuguaaacaagacacuccu

SEQ ID NO: 770222 - RNA, 19 nt, Artificial Sequence
  Description of Artificial Sequence: Synthetic oligonucleotide
  Sense strand starting at position 3664 of SEQ ID NO: 587147
gagugucuuguuuacaaau

SEQ ID NO: 770223 - RNA, 19 nt, Artificial Sequence
  Description of Artificial Sequence: Synthetic oligonucleotide
  Antisense strand to SEQ ID NO: 770222
auuuguaaacaagacacuc

SEQ ID NO: 770224 - RNA, 19 nt, Artificial Sequence
  Description of Artificial Sequence: Synthetic oligonucleotide
  Sense strand starting at position 3681 of SEQ ID NO: 587147
aucagcaagccagaugaua

SEQ ID NO: 770225 - RNA, 19 nt, Artificial Sequence
  Description of Artificial Sequence: Synthetic oligonucleotide
  Antisense strand to SEQ ID NO: 770224
uaucaucuggcuugcugau

SEQ ID NO: 770226 - RNA, 19 nt, Artificial Sequence
  Description of Artificial Sequence: Synthetic oligonucleotide
  Sense strand starting at position 3714 of SEQ ID NO: 587147
agccuugguguugaugaau

SEQ ID NO: 770227 - RNA, 19 nt, Artificial Sequence
  Description of Artificial Sequence: Synthetic oligonucleotide
  Antisense strand to SEQ ID NO: 770226
auucaucaacaccaaggcu

SEQ ID NO: 770228 - RNA, 19 nt, Artificial Sequence
  Description of Artificial Sequence: Synthetic oligonucleotide
  Sense strand starting at position 3784 of SEQ ID NO: 587147
gcuggcuuugcucucagua

SEQ ID NO: 770229 - RNA, 19 nt, Artificial Sequence
  Description of Artificial Sequence: Synthetic oligonucleotide
  Antisense strand to SEQ ID NO: 770228
uacugagagcaaagccagc

SEQ ID NO: 770230 - RNA, 19 nt, Artificial Sequence
  Description of Artificial Sequence: Synthetic oligonucleotide
  Sense strand starting at position 3832 of SEQ ID NO: 587147
auuauuguccuguagacag

SEQ ID NO: 770231 - RNA, 19 nt, Artificial Sequence
  Description of Artificial Sequence: Synthetic oligonucleotide
  Antisense strand to SEQ ID NO: 770230
cugucuacaggacaauaau

SEQ ID NO: 770232 - RNA, 19 nt, Artificial Sequence
  Description of Artificial Sequence: Synthetic oligonucleotide
  Sense strand starting at position 3971 of SEQ ID NO: 587147
uacauuguuugccuaggga

SEQ ID NO: 770233 - RNA, 19 nt, Artificial Sequence
  Description of Artificial Sequence: Synthetic oligonucleotide
  Antisense strand to SEQ ID NO: 770232
ucccuaggcaaacaaugua

SEQ ID NO: 770234 - RNA, 19 nt, Artificial Sequence
  Description of Artificial Sequence: Synthetic oligonucleotide
  Sense strand starting at position 21 of SEQ ID NO: 587148
cuuucucccuucugguaua

SEQ ID NO: 770235 - RNA, 19 nt, Artificial Sequence
  Description of Artificial Sequence: Synthetic oligonucleotide
  Antisense strand to SEQ ID NO: 770234
uauaccagaagggagaaag

SEQ ID NO: 770236 - RNA, 19 nt, Artificial Sequence
  Description of Artificial Sequence: Synthetic oligonucleotide
  Sense strand starting at position 197 of SEQ ID NO: 587148
gugccuuaccacuauuauu

SEQ ID NO: 770237 - RNA, 19 nt, Artificial Sequence
  Description of Artificial Sequence: Synthetic oligonucleotide
  Antisense strand to SEQ ID NO: 770236
aauaauagugguaaggcac

SEQ ID NO: 770238 - RNA, 19 nt, Artificial Sequence
  Description of Artificial Sequence: Synthetic oligonucleotide
  Sense strand starting at position 302 of SEQ ID NO: 587148
cccucaagugacugaggaa

SEQ ID NO: 770239 - RNA, 19 nt, Artificial Sequence
  Description of Artificial Sequence: Synthetic oligonucleotide
  Antisense strand to SEQ ID NO: 770238
uuccucagucacuugaggg

SEQ ID NO: 770240 - RNA, 19 nt, Artificial Sequence
  Description of Artificial Sequence: Synthetic oligonucleotide
  Sense strand starting at position 345 of SEQ ID NO: 587148
acaugacccuguguuuauc

SEQ ID NO: 770241 - RNA, 19 nt, Artificial Sequence
  Description of Artificial Sequence: Synthetic oligonucleotide
  Antisense strand to SEQ ID NO: 770240
gauaaacacagggucaugu

SEQ ID NO: 770242 - RNA, 19 nt, Artificial Sequence
  Description of Artificial Sequence: Synthetic oligonucleotide
  Sense strand starting at position 353 of SEQ ID NO: 587148
cuguguuuaucccucagag

SEQ ID NO: 770243 - RNA, 19 nt, Artificial Sequence
  Description of Artificial Sequence: Synthetic oligonucleotide
  Antisense strand to SEQ ID NO: 770242
cucugagggauaaacacag

SEQ ID NO: 770244 - RNA, 19 nt, Artificial Sequence
  Description of Artificial Sequence: Synthetic oligonucleotide
  Sense strand starting at position 355 of SEQ ID NO: 587148
guguuuaucccucagagca

SEQ ID NO: 770245 - RNA, 19 nt, Artificial Sequence
  Description of Artificial Sequence: Synthetic oligonucleotide
  Antisense strand to SEQ ID NO: 770244
ugcucugagggauaaacac

SEQ ID NO: 770246 - RNA, 19 nt, Artificial Sequence
  Description of Artificial Sequence: Synthetic oligonucleotide
  Sense strand starting at position 357 of SEQ ID NO: 587148
guuuaucccucagagcaag

SEQ ID NO: 770247 - RNA, 19 nt, Artificial Sequence
  Description of Artificial Sequence: Synthetic oligonucleotide
  Antisense strand to SEQ ID NO: 770246
cuugcucugagggauaaac

SEQ ID NO: 770248 - RNA, 19 nt, Artificial Sequence
  Description of Artificial Sequence: Synthetic oligonucleotide
  Sense strand starting at position 381 of SEQ ID NO: 587148
uaggucaguccagagcaaa

SEQ ID NO: 770249 - RNA, 19 nt, Artificial Sequence
  Description of Artificial Sequence: Synthetic oligonucleotide
  Antisense strand to SEQ ID NO: 770248
uuugcucuggacugaccua

SEQ ID NO: 770250 - RNA, 19 nt, Artificial Sequence
  Description of Artificial Sequence: Synthetic oligonucleotide
  Sense strand starting at position 547 of SEQ ID NO: 587148
uucugucugcaggagaaau

SEQ ID NO: 770251 - RNA, 19 nt, Artificial Sequence
  Description of Artificial Sequence: Synthetic oligonucleotide
  Antisense strand to SEQ ID NO: 770250
auuucuccugcagacagaa

SEQ ID NO: 770252 - RNA, 19 nt, Artificial Sequence
  Description of Artificial Sequence: Synthetic oligonucleotide
  Sense strand starting at position 610 of SEQ ID NO: 587148
ggaaucgucuuuccaggga

SEQ ID NO: 770253 - RNA, 19 nt, Artificial Sequence
  Description of Artificial Sequence: Synthetic oligonucleotide
  Antisense strand to SEQ ID NO: 770252
ucccuggaaagacgauucc

SEQ ID NO: 770254 - RNA, 19 nt, Artificial Sequence
  Description of Artificial Sequence: Synthetic oligonucleotide
  Sense strand starting at position 614 of SEQ ID NO: 587148
ucgucuuuccagggagggu

SEQ ID NO: 770255 - RNA, 19 nt, Artificial Sequence
  Description of Artificial Sequence: Synthetic oligonucleotide
  Antisense strand to SEQ ID NO: 770254
acccucccuggaaagacga

SEQ ID NO: 770256 - RNA, 19 nt, Artificial Sequence
  Description of Artificial Sequence: Synthetic oligonucleotide
  Sense strand starting at position 2892 of SEQ ID NO: 587148
agagaagccauccggguua

SEQ ID NO: 770257 - RNA, 19 nt, Artificial Sequence
  Description of Artificial Sequence: Synthetic oligonucleotide
  Antisense strand to SEQ ID NO: 770256
uaacccggauggcuucucu

SEQ ID NO: 770258 - RNA, 19 nt, Artificial Sequence
  Description of Artificial Sequence: Synthetic oligonucleotide
  Sense strand starting at position 2897 of SEQ ID NO: 587148
agccauccggguuaggaaa

SEQ ID NO: 770259 - RNA, 19 nt, Artificial Sequence
  Description of Artificial Sequence: Synthetic oligonucleotide
  Antisense strand to SEQ ID NO: 770258
uuuccuaacccggauggcu

SEQ ID NO: 770260 - RNA, 19 nt, Artificial Sequence
  Description of Artificial Sequence: Synthetic oligonucleotide
  Sense strand starting at position 2908 of SEQ ID NO: 587148
uuaggaaauucuggagaaa

SEQ ID NO: 770261 - RNA, 19 nt, Artificial Sequence
  Description of Artificial Sequence: Synthetic oligonucleotide
  Antisense strand to SEQ ID NO: 770260
uuucuccagaauuuccuaa

SEQ ID NO: 770262 - RNA, 19 nt, Artificial Sequence
  Description of Artificial Sequence: Synthetic oligonucleotide
  Sense strand starting at position 2936 of SEQ ID NO: 587148
gcgggaucuuacgggagua

SEQ ID NO: 770263 - RNA, 19 nt, Artificial Sequence
  Description of Artificial Sequence: Synthetic oligonucleotide
  Antisense strand to SEQ ID NO: 770262
uacucccguaagaucccgc

SEQ ID NO: 770264 - RNA, 19 nt, Artificial Sequence
  Description of Artificial Sequence: Synthetic oligonucleotide
  Sense strand starting at position 3010 of SEQ ID NO: 587148
gcagaauucugaccgacag

SEQ ID NO: 770265 - RNA, 19 nt, Artificial Sequence
  Description of Artificial Sequence: Synthetic oligonucleotide
  Antisense strand to SEQ ID NO: 770264
cugucggucagaauucugc

SEQ ID NO: 770266 - RNA, 19 nt, Artificial Sequence
  Description of Artificial Sequence: Synthetic oligonucleotide
  Sense strand starting at position 3340 of SEQ ID NO: 587148
ugucgcugcccuugguaaa

SEQ ID NO: 770267 - RNA, 19 nt, Artificial Sequence
  Description of Artificial Sequence: Synthetic oligonucleotide
  Antisense strand to SEQ ID NO: 770266
uuuaccaagggcagcgaca

SEQ ID NO: 770268 - RNA, 19 nt, Artificial Sequence
  Description of Artificial Sequence: Synthetic oligonucleotide
  Sense strand starting at position 3514 of SEQ ID NO: 587148
uucagugacuccguauugu

SEQ ID NO: 770269 - RNA, 19 nt, Artificial Sequence
  Description of Artificial Sequence: Synthetic oligonucleotide
  Antisense strand to SEQ ID NO: 770268
acaauacggagucacugaa

SEQ ID NO: 770270 - RNA, 19 nt, Artificial Sequence
  Description of Artificial Sequence: Synthetic oligonucleotide
  Sense strand starting at position 3534 of SEQ ID NO: 587148
cccuuaaucggaugucaaa

SEQ ID NO: 770271 - RNA, 19 nt, Artificial Sequence
  Description of Artificial Sequence: Synthetic oligonucleotide
  Antisense strand to SEQ ID NO: 770270
uuugacauccgauuaaggg

SEQ ID NO: 770272 - RNA, 19 nt, Artificial Sequence
  Description of Artificial Sequence: Synthetic oligonucleotide
  Sense strand starting at position 3851 of SEQ ID NO: 587148
agcagugaaucucacaaau

SEQ ID NO: 770273 - RNA, 19 nt, Artificial Sequence
  Description of Artificial Sequence: Synthetic oligonucleotide
  Antisense strand to SEQ ID NO: 770272
auuugugagauucacugcu

SEQ ID NO: 770274 - RNA, 19 nt, Artificial Sequence
  Description of Artificial Sequence: Synthetic oligonucleotide
  Sense strand starting at position 3882 of SEQ ID NO: 587148
agacacauccagcgaaaug

SEQ ID NO: 770275 - RNA, 19 nt, Artificial Sequence
  Description of Artificial Sequence: Synthetic oligonucleotide
  Antisense strand to SEQ ID NO: 770274
cauuucgcuggaugugucu

SEQ ID NO: 770276 - RNA, 19 nt, Artificial Sequence
  Description of Artificial Sequence: Synthetic oligonucleotide
  Sense strand starting at position 3891 of SEQ ID NO: 587148
cagcgaaaugugugaguuc

SEQ ID NO: 770277 - RNA, 19 nt, Artificial Sequence
  Description of Artificial Sequence: Synthetic oligonucleotide
  Antisense strand to SEQ ID NO: 770276
gaacucacacauuucgcug

SEQ ID NO: 770278 - RNA, 19 nt, Artificial Sequence
  Description of Artificial Sequence: Synthetic oligonucleotide
  Sense strand starting at position 3892 of SEQ ID NO: 587148
agcgaaaugugugaguucu

SEQ ID NO: 770279 - RNA, 19 nt, Artificial Sequence
  Description of Artificial Sequence: Synthetic oligonucleotide
  Antisense strand to SEQ ID NO: 770278
agaacucacacauuucgcu

SEQ ID NO: 770280 - RNA, 19 nt, Artificial Sequence
  Description of Artificial Sequence: Synthetic oligonucleotide
  Sense strand starting at position 3894 of SEQ ID NO: 587148
cgaaaugugugaguucuag

SEQ ID NO: 770281 - RNA, 19 nt, Artificial Sequence
  Description of Artificial Sequence: Synthetic oligonucleotide
  Antisense strand to SEQ ID NO: 770280
cuagaacucacacauuucg

SEQ ID NO: 770282 - RNA, 19 nt, Artificial Sequence
  Description of Artificial Sequence: Synthetic oligonucleotide
  Sense strand starting at position 3898 of SEQ ID NO: 587148
augugugaguucuagacaa

SEQ ID NO: 770283 - RNA, 19 nt, Artificial Sequence
  Description of Artificial Sequence: Synthetic oligonucleotide
  Antisense strand to SEQ ID NO: 770282
uugucuagaacucacacau

SEQ ID NO: 770284 - RNA, 19 nt, Artificial Sequence
  Description of Artificial Sequence: Synthetic oligonucleotide
  Sense strand starting at position 3900 of SEQ ID NO: 587148
gugugaguucuagacaaca

SEQ ID NO: 770285 - RNA, 19 nt, Artificial Sequence
  Description of Artificial Sequence: Synthetic oligonucleotide
  Antisense strand to SEQ ID NO: 770284
uguugucuagaacucacac

SEQ ID NO: 770286 - RNA, 19 nt, Artificial Sequence
  Description of Artificial Sequence: Synthetic oligonucleotide
  Sense strand starting at position 3922 of SEQ ID NO: 587148
gcaauaagacgccauuaau

SEQ ID NO: 770287 - RNA, 19 nt, Artificial Sequence
  Description of Artificial Sequence: Synthetic oligonucleotide
  Antisense strand to SEQ ID NO: 770286
auuaauggcgucuuauugc

SEQ ID NO: 770288 - RNA, 19 nt, Artificial Sequence
  Description of Artificial Sequence: Synthetic oligonucleotide
  Sense strand starting at position 3961 of SEQ ID NO: 587148
ugacuuagguuguuucuga

SEQ ID NO: 770289 - RNA, 19 nt, Artificial Sequence
  Description of Artificial Sequence: Synthetic oligonucleotide
  Antisense strand to SEQ ID NO: 770288
ucagaaacaaccuaaguca

SEQ ID NO: 770290 - RNA, 19 nt, Artificial Sequence
  Description of Artificial Sequence: Synthetic oligonucleotide
  Sense strand starting at position 3962 of SEQ ID NO: 587148
gacuuagguuguuucugau

SEQ ID NO: 770291 - RNA, 19 nt, Artificial Sequence
  Description of Artificial Sequence: Synthetic oligonucleotide
  Antisense strand to SEQ ID NO: 770290
aucagaaacaaccuaaguc

SEQ ID NO: 770292 - RNA, 19 nt, Artificial Sequence
  Description of Artificial Sequence: Synthetic oligonucleotide
  Sense strand starting at position 3965 of SEQ ID NO: 587148
uuagguuguuucugaugca

SEQ ID NO: 770293 - RNA, 19 nt, Artificial Sequence
  Description of Artificial Sequence: Synthetic oligonucleotide
  Antisense strand to SEQ ID NO: 770292
ugcaucagaaacaaccuaa

SEQ ID NO: 770294 - RNA, 19 nt, Artificial Sequence
  Description of Artificial Sequence: Synthetic oligonucleotide
  Sense strand starting at position 3966 of SEQ ID NO: 587148
uagguuguuucugaugcau

SEQ ID NO: 770295 - RNA, 19 nt, Artificial Sequence
  Description of Artificial Sequence: Synthetic oligonucleotide
  Antisense strand to SEQ ID NO: 770294
augcaucagaaacaaccua

SEQ ID NO: 770296 - RNA, 19 nt, Artificial Sequence
  Description of Artificial Sequence: Synthetic oligonucleotide
  Sense strand starting at position 3968 of SEQ ID NO: 587148
gguuguuucugaugcauau

SEQ ID NO: 770297 - RNA, 19 nt, Artificial Sequence
  Description of Artificial Sequence: Synthetic oligonucleotide
  Antisense strand to SEQ ID NO: 770296
auaugcaucagaaacaacc

SEQ ID NO: 770298 - RNA, 19 nt, Artificial Sequence
  Description of Artificial Sequence: Synthetic oligonucleotide
  Sense strand starting at position 3978 of SEQ ID NO: 587148
gaugcauaucuacguggca

SEQ ID NO: 770299 - RNA, 19 nt, Artificial Sequence
  Description of Artificial Sequence: Synthetic oligonucleotide
  Antisense strand to SEQ ID NO: 770298
ugccacguagauaugcauc

SEQ ID NO: 770300 - RNA, 19 nt, Artificial Sequence
  Description of Artificial Sequence: Synthetic oligonucleotide
  Sense strand starting at position 3979 of SEQ ID NO: 587148
augcauaucuacguggcaa

SEQ ID NO: 770301 - RNA, 19 nt, Artificial Sequence
  Description of Artificial Sequence: Synthetic oligonucleotide
  Antisense strand to SEQ ID NO: 770300
uugccacguagauaugcau

SEQ ID NO: 770302 - RNA, 19 nt, Artificial Sequence
  Description of Artificial Sequence: Synthetic oligonucleotide
  Sense strand starting at position 3980 of SEQ ID NO: 587148
ugcauaucuacguggcaaa

SEQ ID NO: 770303 - RNA, 19 nt, Artificial Sequence
  Description of Artificial Sequence: Synthetic oligonucleotide
  Antisense strand to SEQ ID NO: 770302
uuugccacguagauaugca

SEQ ID NO: 770304 - RNA, 19 nt, Artificial Sequence
  Description of Artificial Sequence: Synthetic oligonucleotide
  Sense strand starting at position 28 of SEQ ID NO: 587149
ccacaaauugccuguugaa

SEQ ID NO: 770305 - RNA, 19 nt, Artificial Sequence
  Description of Artificial Sequence: Synthetic oligonucleotide
  Antisense strand to SEQ ID NO: 770304
uucaacaggcaauuugugg

SEQ ID NO: 770306 - RNA, 19 nt, Artificial Sequence
  Description of Artificial Sequence: Synthetic oligonucleotide
  Sense strand starting at position 82 of SEQ ID NO: 587149
ggcuguuacccugaguaag

SEQ ID NO: 770307 - RNA, 19 nt, Artificial Sequence
  Description of Artificial Sequence: Synthetic oligonucleotide
  Antisense strand to SEQ ID NO: 770306
cuuacucaggguaacagcc

SEQ ID NO: 770308 - RNA, 19 nt, Artificial Sequence
  Description of Artificial Sequence: Synthetic oligonucleotide
  Sense strand starting at position 85 of SEQ ID NO: 587149
uguuacccugaguaaguaa

SEQ ID NO: 770309 - RNA, 19 nt, Artificial Sequence
  Description of Artificial Sequence: Synthetic oligonucleotide
  Antisense strand to SEQ ID NO: 770308
uuacuuacucaggguaaca

SEQ ID NO: 770310 - RNA, 19 nt, Artificial Sequence
  Description of Artificial Sequence: Synthetic oligonucleotide
  Sense strand starting at position 167 of SEQ ID NO: 587149
aaagaauugcugcgaauca

SEQ ID NO: 770311 - RNA, 19 nt, Artificial Sequence
  Description of Artificial Sequence: Synthetic oligonucleotide
  Antisense strand to SEQ ID NO: 770310
ugauucgcagcaauucuuu

SEQ ID NO: 770312 - RNA, 19 nt, Artificial Sequence
  Description of Artificial Sequence: Synthetic oligonucleotide
  Sense strand starting at position 450 of SEQ ID NO: 587149
uucuuaggucaaggugaga

SEQ ID NO: 770313 - RNA, 19 nt, Artificial Sequence
  Description of Artificial Sequence: Synthetic oligonucleotide
  Antisense strand to SEQ ID NO: 770312
ucucaccuugaccuaagaa

SEQ ID NO: 770314 - RNA, 19 nt, Artificial Sequence
  Description of Artificial Sequence: Synthetic oligonucleotide
  Sense strand starting at position 497 of SEQ ID NO: 587149
ucauguccuguccagguau

SEQ ID NO: 770315 - RNA, 19 nt, Artificial Sequence
  Description of Artificial Sequence: Synthetic oligonucleotide
  Antisense strand to SEQ ID NO: 770314
auaccuggacaggacauga

SEQ ID NO: 770316 - RNA, 19 nt, Artificial Sequence
  Description of Artificial Sequence: Synthetic oligonucleotide
  Sense strand starting at position 509 of SEQ ID NO: 587149
cagguauugaccuggaguu

SEQ ID NO: 770317 - RNA, 19 nt, Artificial Sequence
  Description of Artificial Sequence: Synthetic oligonucleotide
  Antisense strand to SEQ ID NO: 770316
aacuccaggucaauaccug

SEQ ID NO: 770318 - RNA, 19 nt, Artificial Sequence
  Description of Artificial Sequence: Synthetic oligonucleotide
  Sense strand starting at position 510 of SEQ ID NO: 587149
agguauugaccuggaguuu

SEQ ID NO: 770319 - RNA, 19 nt, Artificial Sequence
  Description of Artificial Sequence: Synthetic oligonucleotide
  Antisense strand to SEQ ID NO: 770318
aaacuccaggucaauaccu

SEQ ID NO: 770320 - RNA, 19 nt, Artificial Sequence
  Description of Artificial Sequence: Synthetic oligonucleotide
  Sense strand starting at position 511 of SEQ ID NO: 587149
gguauugaccuggaguuua

SEQ ID NO: 770321 - RNA, 19 nt, Artificial Sequence
  Description of Artificial Sequence: Synthetic oligonucleotide
  Antisense strand to SEQ ID NO: 770320
uaaacuccaggucaauacc

SEQ ID NO: 770322 - RNA, 19 nt, Artificial Sequence
  Description of Artificial Sequence: Synthetic oligonucleotide
  Sense strand starting at position 624 of SEQ ID NO: 587149
acuauuaaugcugggcaca

SEQ ID NO: 770323 - RNA, 19 nt, Artificial Sequence
  Description of Artificial Sequence: Synthetic oligonucleotide
  Antisense strand to SEQ ID NO: 770322
ugugcccagcauuaauagu

SEQ ID NO: 770324 - RNA, 19 nt, Artificial Sequence
  Description of Artificial Sequence: Synthetic oligonucleotide
  Sense strand starting at position 625 of SEQ ID NO: 587149
cuauuaaugcugggcacaa

SEQ ID NO: 770325 - RNA, 19 nt, Artificial Sequence
  Description of Artificial Sequence: Synthetic oligonucleotide
  Antisense strand to SEQ ID NO: 770324
uugugcccagcauuaauag

SEQ ID NO: 770326 - RNA, 19 nt, Artificial Sequence
  Description of Artificial Sequence: Synthetic oligonucleotide
  Sense strand starting at position 661 of SEQ ID NO: 587149
cucccugugaagugagaaa

SEQ ID NO: 770327 - RNA, 19 nt, Artificial Sequence
  Description of Artificial Sequence: Synthetic oligonucleotide
  Antisense strand to SEQ ID NO: 770326
uuucucacuucacagggag

SEQ ID NO: 770328 - RNA, 19 nt, Artificial Sequence
  Description of Artificial Sequence: Synthetic oligonucleotide
  Sense strand starting at position 903 of SEQ ID NO: 587149
ggccuuucccugcagaaac

SEQ ID NO: 770329 - RNA, 19 nt, Artificial Sequence
  Description of Artificial Sequence: Synthetic oligonucleotide
  Antisense strand to SEQ ID NO: 770328
guuucugcagggaaaggcc

SEQ ID NO: 770330 - RNA, 19 nt, Artificial Sequence
  Description of Artificial Sequence: Synthetic oligonucleotide
  Sense strand starting at position 914 of SEQ ID NO: 587149
gcagaaacuucuuuccaga

SEQ ID NO: 770331 - RNA, 19 nt, Artificial Sequence
  Description of Artificial Sequence: Synthetic oligonucleotide
  Antisense strand to SEQ ID NO: 770330
ucuggaaagaaguuucugc

SEQ ID NO: 770332 - RNA, 19 nt, Artificial Sequence
  Description of Artificial Sequence: Synthetic oligonucleotide
  Sense strand starting at position 1208 of SEQ ID NO: 587149
uguacauugcuggagcaca

SEQ ID NO: 770333 - RNA, 19 nt, Artificial Sequence
  Description of Artificial Sequence: Synthetic oligonucleotide
  Antisense strand to SEQ ID NO: 770332
ugugcuccagcaauguaca

SEQ ID NO: 770334 - RNA, 19 nt, Artificial Sequence
  Description of Artificial Sequence: Synthetic oligonucleotide
  Sense strand starting at position 1554 of SEQ ID NO: 587149
gaguccaguccggagaagu

SEQ ID NO: 770335 - RNA, 19 nt, Artificial Sequence
  Description of Artificial Sequence: Synthetic oligonucleotide
  Antisense strand to SEQ ID NO: 770334
acuucuccggacuggacuc

SEQ ID NO: 770336 - RNA, 19 nt, Artificial Sequence
  Description of Artificial Sequence: Synthetic oligonucleotide
  Sense strand starting at position 1564 of SEQ ID NO: 587149
cggagaagucaccaagcaa

SEQ ID NO: 770337 - RNA, 19 nt, Artificial Sequence
  Description of Artificial Sequence: Synthetic oligonucleotide
  Antisense strand to SEQ ID NO: 770336
uugcuuggugacuucuccg

SEQ ID NO: 770338 - RNA, 19 nt, Artificial Sequence
  Description of Artificial Sequence: Synthetic oligonucleotide
  Sense strand starting at position 2364 of SEQ ID NO: 587149
ggcggugucauaagcgaug

SEQ ID NO: 770339 - RNA, 19 nt, Artificial Sequence
  Description of Artificial Sequence: Synthetic oligonucleotide
  Antisense strand to SEQ ID NO: 770338
caucgcuuaugacaccgcc

SEQ ID NO: 770340 - RNA, 19 nt, Artificial Sequence
  Description of Artificial Sequence: Synthetic oligonucleotide
  Sense strand starting at position 2443 of SEQ ID NO: 587149
cgaccaaugggcgauuaca

SEQ ID NO: 770341 - RNA, 19 nt, Artificial Sequence
  Description of Artificial Sequence: Synthetic oligonucleotide
  Antisense strand to SEQ ID NO: 770340
uguaaucgcccauuggucg

SEQ ID NO: 770342 - RNA, 19 nt, Artificial Sequence
  Description of Artificial Sequence: Synthetic oligonucleotide
  Sense strand starting at position 2506 of SEQ ID NO: 587149
gggagcaccugaucuaaac

SEQ ID NO: 770343 - RNA, 19 nt, Artificial Sequence
  Description of Artificial Sequence: Synthetic oligonucleotide
  Antisense strand to SEQ ID NO: 770342
guuuagaucaggugcuccc

SEQ ID NO: 770344 - RNA, 19 nt, Artificial Sequence
  Description of Artificial Sequence: Synthetic oligonucleotide
  Sense strand starting at position 2582 of SEQ ID NO: 587149
acugaagacugagugugaa

SEQ ID NO: 770345 - RNA, 19 nt, Artificial Sequence
  Description of Artificial Sequence: Synthetic oligonucleotide
  Antisense strand to SEQ ID NO: 770344
uucacacucagucuucagu

SEQ ID NO: 770346 - RNA, 19 nt, Artificial Sequence
  Description of Artificial Sequence: Synthetic oligonucleotide
  Sense strand starting at position 2585 of SEQ ID NO: 587149
gaagacugagugugaauua

SEQ ID NO: 770347 - RNA, 19 nt, Artificial Sequence
  Description of Artificial Sequence: Synthetic oligonucleotide
  Antisense strand to SEQ ID NO: 770346
uaauucacacucagucuuc

SEQ ID NO: 770348 - RNA, 19 nt, Artificial Sequence
  Description of Artificial Sequence: Synthetic oligonucleotide
  Sense strand starting at position 2594 of SEQ ID NO: 587149
gugugaauuagccagguga

SEQ ID NO: 770349 - RNA, 19 nt, Artificial Sequence
  Description of Artificial Sequence: Synthetic oligonucleotide
  Antisense strand to SEQ ID NO: 770348
ucaccuggcuaauucacac

SEQ ID NO: 770350 - RNA, 19 nt, Artificial Sequence
  Description of Artificial Sequence: Synthetic oligonucleotide
  Sense strand starting at position 2596 of SEQ ID NO: 587149
gugaauuagccaggugaug

SEQ ID NO: 770351 - RNA, 19 nt, Artificial Sequence
  Description of Artificial Sequence: Synthetic oligonucleotide
  Antisense strand to SEQ ID NO: 770350
caucaccuggcuaauucac

SEQ ID NO: 770352 - RNA, 19 nt, Artificial Sequence
  Description of Artificial Sequence: Synthetic oligonucleotide
  Sense strand starting at position 2598 of SEQ ID NO: 587149
gaauuagccaggugaugag

SEQ ID NO: 770353 - RNA, 19 nt, Artificial Sequence
  Description of Artificial Sequence: Synthetic oligonucleotide
  Antisense strand to SEQ ID NO: 770352
cucaucaccuggcuaauuc

SEQ ID NO: 770354 - RNA, 19 nt, Artificial Sequence
  Description of Artificial Sequence: Synthetic oligonucleotide
  Sense strand starting at position 2614 of SEQ ID NO: 587149
gagagaauuauccggguag

SEQ ID NO: 770355 - RNA, 19 nt, Artificial Sequence
  Description of Artificial Sequence: Synthetic oligonucleotide
  Antisense strand to SEQ ID NO: 770354
cuacccggauaauucucuc

SEQ ID NO: 770356 - RNA, 19 nt, Artificial Sequence
  Description of Artificial Sequence: Synthetic oligonucleotide
  Sense strand starting at position 2618 of SEQ ID NO: 587149
gaauuauccggguagccug

SEQ ID NO: 770357 - RNA, 19 nt, Artificial Sequence
  Description of Artificial Sequence: Synthetic oligonucleotide
  Antisense strand to SEQ ID NO: 770356
caggcuacccggauaauuc

SEQ ID NO: 770358 - RNA, 19 nt, Artificial Sequence
  Description of Artificial Sequence: Synthetic oligonucleotide
  Sense strand starting at position 2646 of SEQ ID NO: 587149
auugaugucccagguagag

SEQ ID NO: 770359 - RNA, 19 nt, Artificial Sequence
  Description of Artificial Sequence: Synthetic oligonucleotide
  Antisense strand to SEQ ID NO: 770358
cucuaccugggacaucaau

SEQ ID NO: 770360 - RNA, 19 nt, Artificial Sequence
  Description of Artificial Sequence: Synthetic oligonucleotide
  Sense strand starting at position 3118 of SEQ ID NO: 587149
ugcugagaucauuggguga

SEQ ID NO: 770361 - RNA, 19 nt, Artificial Sequence
  Description of Artificial Sequence: Synthetic oligonucleotide
  Antisense strand to SEQ ID NO: 770360
ucacccaaugaucucagca

SEQ ID NO: 770362 - RNA, 19 nt, Artificial Sequence
  Description of Artificial Sequence: Synthetic oligonucleotide
  Sense strand starting at position 3263 of SEQ ID NO: 587149
gggcaaggugucuaacucu

SEQ ID NO: 770363 - RNA, 19 nt, Artificial Sequence
  Description of Artificial Sequence: Synthetic oligonucleotide
  Antisense strand to SEQ ID NO: 770362
agaguuagacaccuugccc

SEQ ID NO: 770364 - RNA, 19 nt, Artificial Sequence
  Description of Artificial Sequence: Synthetic oligonucleotide
  Sense strand starting at position 3288 of SEQ ID NO: 587149
gcugcuggucuggaauaga

SEQ ID NO: 770365 - RNA, 19 nt, Artificial Sequence
  Description of Artificial Sequence: Synthetic oligonucleotide
  Antisense strand to SEQ ID NO: 770364
ucuauuccagaccagcagc

SEQ ID NO: 770366 - RNA, 19 nt, Artificial Sequence
  Description of Artificial Sequence: Synthetic oligonucleotide
  Sense strand starting at position 3402 of SEQ ID NO: 587149
cguggauugcagccuguau

SEQ ID NO: 770367 - RNA, 19 nt, Artificial Sequence
  Description of Artificial Sequence: Synthetic oligonucleotide
  Antisense strand to SEQ ID NO: 770366
auacaggcugcaauccacg

SEQ ID NO: 770368 - RNA, 19 nt, Artificial Sequence
  Description of Artificial Sequence: Synthetic oligonucleotide
  Sense strand starting at position 3442 of SEQ ID NO: 587149
gcugcugucaaaguauguu

SEQ ID NO: 770369 - RNA, 19 nt, Artificial Sequence
  Description of Artificial Sequence: Synthetic oligonucleotide
  Antisense strand to SEQ ID NO: 770368
aacauacuuugacagcagc

SEQ ID NO: 770370 - RNA, 19 nt, Artificial Sequence
  Description of Artificial Sequence: Synthetic oligonucleotide
  Sense strand starting at position 3516 of SEQ ID NO: 587149
ugucgaaagcaaggauuaa

SEQ ID NO: 770371 - RNA, 19 nt, Artificial Sequence
  Description of Artificial Sequence: Synthetic oligonucleotide
  Antisense strand to SEQ ID NO: 770370
uuaauccuugcuuucgaca

SEQ ID NO: 770372 - RNA, 19 nt, Artificial Sequence
  Description of Artificial Sequence: Synthetic oligonucleotide
  Sense strand starting at position 3517 of SEQ ID NO: 587149
gucgaaagcaaggauuaau

SEQ ID NO: 770373 - RNA, 19 nt, Artificial Sequence
  Description of Artificial Sequence: Synthetic oligonucleotide
  Antisense strand to SEQ ID NO: 770372
auuaauccuugcuuucgac

SEQ ID NO: 770374 - RNA, 19 nt, Artificial Sequence
  Description of Artificial Sequence: Synthetic oligonucleotide
  Sense strand starting at position 3561 of SEQ ID NO: 587149
cagugucgucaagaacaug

SEQ ID NO: 770375 - RNA, 19 nt, Artificial Sequence
  Description of Artificial Sequence: Synthetic oligonucleotide
  Antisense strand to SEQ ID NO: 770374
cauguucuugacgacacug

SEQ ID NO: 770376 - RNA, 19 nt, Artificial Sequence
  Description of Artificial Sequence: Synthetic oligonucleotide
  Sense strand starting at position 3600 of SEQ ID NO: 587149
ugacgaaaggucuaugugu

SEQ ID NO: 770377 - RNA, 19 nt, Artificial Sequence
  Description of Artificial Sequence: Synthetic oligonucleotide
  Antisense strand to SEQ ID NO: 770376
acacauagaccuuucguca

SEQ ID NO: 770378 - RNA, 19 nt, Artificial Sequence
  Description of Artificial Sequence: Synthetic oligonucleotide
  Sense strand starting at position 3605 of SEQ ID NO: 587149
aaaggucuauguguaguga

SEQ ID NO: 770379 - RNA, 19 nt, Artificial Sequence
  Description of Artificial Sequence: Synthetic oligonucleotide
  Antisense strand to SEQ ID NO: 770378
ucacuacacauagaccuuu

SEQ ID NO: 770380 - RNA, 19 nt, Artificial Sequence
  Description of Artificial Sequence: Synthetic oligonucleotide
  Sense strand starting at position 3759 of SEQ ID NO: 587149
cucuuacaugggugauugu

SEQ ID NO: 770381 - RNA, 19 nt, Artificial Sequence
  Description of Artificial Sequence: Synthetic oligonucleotide
  Antisense strand to SEQ ID NO: 770380
acaaucacccauguaagag

SEQ ID NO: 770382 - RNA, 19 nt, Artificial Sequence
  Description of Artificial Sequence: Synthetic oligonucleotide
  Sense strand starting at position 3845 of SEQ ID NO: 587149
agugcuaaagcucacuaaa

SEQ ID NO: 770383 - RNA, 19 nt, Artificial Sequence
  Description of Artificial Sequence: Synthetic oligonucleotide
  Antisense strand to SEQ ID NO: 770382
uuuagugagcuuuagcacu

SEQ ID NO: 770384 - RNA, 19 nt, Artificial Sequence
  Description of Artificial Sequence: Synthetic oligonucleotide
  Sense strand starting at position 3 of SEQ ID NO: 587150
gcaacagguuguccgaauu

SEQ ID NO: 770385 - RNA, 19 nt, Artificial Sequence
  Description of Artificial Sequence: Synthetic oligonucleotide
  Antisense strand to SEQ ID NO: 770384
aauucggacaaccuguugc

SEQ ID NO: 770386 - RNA, 19 nt, Artificial Sequence
  Description of Artificial Sequence: Synthetic oligonucleotide
  Sense strand starting at position 9 of SEQ ID NO: 587150
gguuguccgaauuguuugu

SEQ ID NO: 770387 - RNA, 19 nt, Artificial Sequence
  Description of Artificial Sequence: Synthetic oligonucleotide
  Antisense strand to SEQ ID NO: 770386
acaaacaauucggacaacc

SEQ ID NO: 770388 - RNA, 19 nt, Artificial Sequence
  Description of Artificial Sequence: Synthetic oligonucleotide
  Sense strand starting at position 13 of SEQ ID NO: 587150
guccgaauuguuuguuguu

SEQ ID NO: 770389 - RNA, 19 nt, Artificial Sequence
  Description of Artificial Sequence: Synthetic oligonucleotide
  Antisense strand to SEQ ID NO: 770388
aacaacaaacaauucggac

SEQ ID NO: 770390 - RNA, 19 nt, Artificial Sequence
  Description of Artificial Sequence: Synthetic oligonucleotide
  Sense strand starting at position 54 of SEQ ID NO: 587150
gcuacaguacuugggaguu

SEQ ID NO: 770391 - RNA, 19 nt, Artificial Sequence
  Description of Artificial Sequence: Synthetic oligonucleotide
  Antisense strand to SEQ ID NO: 770390
aacucccaaguacuguagc

SEQ ID NO: 770392 - RNA, 19 nt, Artificial Sequence
  Description of Artificial Sequence: Synthetic oligonucleotide
  Sense strand starting at position 82 of SEQ ID NO: 587150
acacguuguuaugcuauua

SEQ ID NO: 770393 - RNA, 19 nt, Artificial Sequence
  Description of Artificial Sequence: Synthetic oligonucleotide
  Antisense strand to SEQ ID NO: 770392
uaauagcauaacaacgugu

SEQ ID NO: 770394 - RNA, 19 nt, Artificial Sequence
  Description of Artificial Sequence: Synthetic oligonucleotide
  Sense strand starting at position 166 of SEQ ID NO: 587150
gaaagaacauuggaagaga

SEQ ID NO: 770395 - RNA, 19 nt, Artificial Sequence
  Description of Artificial Sequence: Synthetic oligonucleotide
  Antisense strand to SEQ ID NO: 770394
ucucuuccaauguucuuuc

SEQ ID NO: 770396 - RNA, 19 nt, Artificial Sequence
  Description of Artificial Sequence: Synthetic oligonucleotide
  Sense strand starting at position 253 of SEQ ID NO: 587150
uggagccuuucggaaggau

SEQ ID NO: 770397 - RNA, 19 nt, Artificial Sequence
  Description of Artificial Sequence: Synthetic oligonucleotide
  Antisense strand to SEQ ID NO: 770396
auccuuccgaaaggcucca

SEQ ID NO: 770398 - RNA, 19 nt, Artificial Sequence
  Description of Artificial Sequence: Synthetic oligonucleotide
  Sense strand starting at position 275 of SEQ ID NO: 587150
cucaucuguaguuggauga

SEQ ID NO: 770399 - RNA, 19 nt, Artificial Sequence
  Description of Artificial Sequence: Synthetic oligonucleotide
  Antisense strand to SEQ ID NO: 770398
ucauccaacuacagaugag

SEQ ID NO: 770400 - RNA, 19 nt, Artificial Sequence
  Description of Artificial Sequence: Synthetic oligonucleotide
  Sense strand starting at position 282 of SEQ ID NO: 587150
guaguuggaugaggugauu

SEQ ID NO: 770401 - RNA, 19 nt, Artificial Sequence
  Description of Artificial Sequence: Synthetic oligonucleotide
  Antisense strand to SEQ ID NO: 770400
aaucaccucauccaacuac

SEQ ID NO: 770402 - RNA, 19 nt, Artificial Sequence
  Description of Artificial Sequence: Synthetic oligonucleotide
  Sense strand starting at position 389 of SEQ ID NO: 587150
cacugaguguuguccauuc

SEQ ID NO: 770403 - RNA, 19 nt, Artificial Sequence
  Description of Artificial Sequence: Synthetic oligonucleotide
  Antisense strand to SEQ ID NO: 770402
gaauggacaacacucagug

SEQ ID NO: 770404 - RNA, 19 nt, Artificial Sequence
  Description of Artificial Sequence: Synthetic oligonucleotide
  Sense strand starting at position 391 of SEQ ID NO: 587150
cugaguguuguccauucua

SEQ ID NO: 770405 - RNA, 19 nt, Artificial Sequence
  Description of Artificial Sequence: Synthetic oligonucleotide
  Antisense strand to SEQ ID NO: 770404
uagaauggacaacacucag

SEQ ID NO: 770406 - RNA, 19 nt, Artificial Sequence
  Description of Artificial Sequence: Synthetic oligonucleotide
  Sense strand starting at position 396 of SEQ ID NO: 587150
uguuguccauucuacaauu

SEQ ID NO: 770407 - RNA, 19 nt, Artificial Sequence
  Description of Artificial Sequence: Synthetic oligonucleotide
  Antisense strand to SEQ ID NO: 770406
aauuguagaauggacaaca

SEQ ID NO: 770408 - RNA, 19 nt, Artificial Sequence
  Description of Artificial Sequence: Synthetic oligonucleotide
  Sense strand starting at position 595 of SEQ ID NO: 587150
ccagaaagcucgcucaucu

SEQ ID NO: 770409 - RNA, 19 nt, Artificial Sequence
  Description of Artificial Sequence: Synthetic oligonucleotide
  Antisense strand to SEQ ID NO: 770408
agaugagcgagcuuucugg

SEQ ID NO: 770410 - RNA, 19 nt, Artificial Sequence
  Description of Artificial Sequence: Synthetic oligonucleotide
  Sense strand starting at position 647 of SEQ ID NO: 587150
gcauccaacccguaucagu

SEQ ID NO: 770411 - RNA, 19 nt, Artificial Sequence
  Description of Artificial Sequence: Synthetic oligonucleotide
  Antisense strand to SEQ ID NO: 770410
acugauacggguuggaugc

SEQ ID NO: 770412 - RNA, 19 nt, Artificial Sequence
  Description of Artificial Sequence: Synthetic oligonucleotide
  Sense strand starting at position 785 of SEQ ID NO: 587150
cucaguuucucccuagcua

SEQ ID NO: 770413 - RNA, 19 nt, Artificial Sequence
  Description of Artificial Sequence: Synthetic oligonucleotide
  Antisense strand to SEQ ID NO: 770412
uagcuagggagaaacugag

SEQ ID NO: 770414 - RNA, 19 nt, Artificial Sequence
  Description of Artificial Sequence: Synthetic oligonucleotide
  Sense strand starting at position 805 of SEQ ID NO: 587150
gucagaugccaagguuauu

SEQ ID NO: 770415 - RNA, 19 nt, Artificial Sequence
  Description of Artificial Sequence: Synthetic oligonucleotide
  Antisense strand to SEQ ID NO: 770414
aauaaccuuggcaucugac

SEQ ID NO: 770416 - RNA, 19 nt, Artificial Sequence
  Description of Artificial Sequence: Synthetic oligonucleotide
  Sense strand starting at position 810 of SEQ ID NO: 587150
augccaagguuauugcuaa

SEQ ID NO: 770417 - RNA, 19 nt, Artificial Sequence
  Description of Artificial Sequence: Synthetic oligonucleotide
  Antisense strand to SEQ ID NO: 770416
uuagcaauaaccuuggcau

SEQ ID NO: 770418 - RNA, 19 nt, Artificial Sequence
  Description of Artificial Sequence: Synthetic oligonucleotide
  Sense strand starting at position 814 of SEQ ID NO: 587150
caagguuauugcuaaguuu

SEQ ID NO: 770419 - RNA, 19 nt, Artificial Sequence
  Description of Artificial Sequence: Synthetic oligonucleotide
  Antisense strand to SEQ ID NO: 770418
aaacuuagcaauaaccuug

SEQ ID NO: 770420 - RNA, 19 nt, Artificial Sequence
  Description of Artificial Sequence: Synthetic oligonucleotide
  Sense strand starting at position 817 of SEQ ID NO: 587150
gguuauugcuaaguuuguu

SEQ ID NO: 770421 - RNA, 19 nt, Artificial Sequence
  Description of Artificial Sequence: Synthetic oligonucleotide
  Antisense strand to SEQ ID NO: 770420
aacaaacuuagcaauaacc

SEQ ID NO: 770422 - RNA, 19 nt, Artificial Sequence
  Description of Artificial Sequence: Synthetic oligonucleotide
  Sense strand starting at position 829 of SEQ ID NO: 587150
guuuguuacuugcuggaga

SEQ ID NO: 770423 - RNA, 19 nt, Artificial Sequence
  Description of Artificial Sequence: Synthetic oligonucleotide
  Antisense strand to SEQ ID NO: 770422
ucuccagcaaguaacaaac

SEQ ID NO: 770424 - RNA, 19 nt, Artificial Sequence
  Description of Artificial Sequence: Synthetic oligonucleotide
  Sense strand starting at position 831 of SEQ ID NO: 587150
uuguuacuugcuggagaag

SEQ ID NO: 770425 - RNA, 19 nt, Artificial Sequence
  Description of Artificial Sequence: Synthetic oligonucleotide
  Antisense strand to SEQ ID NO: 770424
cuucuccagcaaguaacaa

SEQ ID NO: 770426 - RNA, 19 nt, Artificial Sequence
  Description of Artificial Sequence: Synthetic oligonucleotide
  Sense strand starting at position 832 of SEQ ID NO: 587150
uguuacuugcuggagaaga

SEQ ID NO: 770427 - RNA, 19 nt, Artificial Sequence
  Description of Artificial Sequence: Synthetic oligonucleotide
  Antisense strand to SEQ ID NO: 770426
ucuucuccagcaaguaaca

SEQ ID NO: 770428 - RNA, 19 nt, Artificial Sequence
  Description of Artificial Sequence: Synthetic oligonucleotide
  Sense strand starting at position 1247 of SEQ ID NO: 587150
agggucuuaagacgaugaa

SEQ ID NO: 770429 - RNA, 19 nt, Artificial Sequence
  Description of Artificial Sequence: Synthetic oligonucleotide
  Antisense strand to SEQ ID NO: 770428
uucaucgucuuaagacccu

SEQ ID NO: 770430 - RNA, 19 nt, Artificial Sequence
  Description of Artificial Sequence: Synthetic oligonucleotide
  Sense strand starting at position 1272 of SEQ ID NO: 587150
aggagaagggccugauuca

SEQ ID NO: 770431 - RNA, 19 nt, Artificial Sequence
  Description of Artificial Sequence: Synthetic oligonucleotide
  Antisense strand to SEQ ID NO: 770430
ugaaucaggcccuucuccu

SEQ ID NO: 770432 - RNA, 19 nt, Artificial Sequence
  Description of Artificial Sequence: Synthetic oligonucleotide
  Sense strand starting at position 1410 of SEQ ID NO: 587150
ccaacuuugcgagaaguag

SEQ ID NO: 770433 - RNA, 19 nt, Artificial Sequence
  Description of Artificial Sequence: Synthetic oligonucleotide
  Antisense strand to SEQ ID NO: 770432
cuacuucucgcaaaguugg

SEQ ID NO: 770434 - RNA, 19 nt, Artificial Sequence
  Description of Artificial Sequence: Synthetic oligonucleotide
  Sense strand starting at position 1414 of SEQ ID NO: 587150
cuuugcgagaaguaguuaa

SEQ ID NO: 770435 - RNA, 19 nt, Artificial Sequence
  Description of Artificial Sequence: Synthetic oligonucleotide
  Antisense strand to SEQ ID NO: 770434
uuaacuacuucucgcaaag

SEQ ID NO: 770436 - RNA, 19 nt, Artificial Sequence
  Description of Artificial Sequence: Synthetic oligonucleotide
  Sense strand starting at position 1418 of SEQ ID NO: 587150
gcgagaaguaguuaagucu

SEQ ID NO: 770437 - RNA, 19 nt, Artificial Sequence
  Description of Artificial Sequence: Synthetic oligonucleotide
  Antisense strand to SEQ ID NO: 770436
agacuuaacuacuucucgc

SEQ ID NO: 770438 - RNA, 19 nt, Artificial Sequence
  Description of Artificial Sequence: Synthetic oligonucleotide
  Sense strand starting at position 2175 of SEQ ID NO: 587150
ugcguacccuccucuuaau

SEQ ID NO: 770439 - RNA, 19 nt, Artificial Sequence
  Description of Artificial Sequence: Synthetic oligonucleotide
  Antisense strand to SEQ ID NO: 770438
auuaagaggaggguacgca

SEQ ID NO: 770440 - RNA, 19 nt, Artificial Sequence
  Description of Artificial Sequence: Synthetic oligonucleotide
  Sense strand starting at position 2535 of SEQ ID NO: 587150
ugccaaucacugugcugaa

SEQ ID NO: 770441 - RNA, 19 nt, Artificial Sequence
  Description of Artificial Sequence: Synthetic oligonucleotide
  Antisense strand to SEQ ID NO: 770440
uucagcacagugauuggca

SEQ ID NO: 770442 - RNA, 19 nt, Artificial Sequence
  Description of Artificial Sequence: Synthetic oligonucleotide
  Sense strand starting at position 2536 of SEQ ID NO: 587150
gccaaucacugugcugaau

SEQ ID NO: 770443 - RNA, 19 nt, Artificial Sequence
  Description of Artificial Sequence: Synthetic oligonucleotide
  Antisense strand to SEQ ID NO: 770442
auucagcacagugauuggc

SEQ ID NO: 770444 - RNA, 19 nt, Artificial Sequence
  Description of Artificial Sequence: Synthetic oligonucleotide
  Sense strand starting at position 2549 of SEQ ID NO: 587150
cugaaugcuucugcgcauu

SEQ ID NO: 770445 - RNA, 19 nt, Artificial Sequence
  Description of Artificial Sequence: Synthetic oligonucleotide
  Antisense strand to SEQ ID NO: 770444
aaugcgcagaagcauucag

SEQ ID NO: 770446 - RNA, 19 nt, Artificial Sequence
  Description of Artificial Sequence: Synthetic oligonucleotide
  Sense strand starting at position 2560 of SEQ ID NO: 587150
ugcgcauuaccuuaucauu

SEQ ID NO: 770447 - RNA, 19 nt, Artificial Sequence
  Description of Artificial Sequence: Synthetic oligonucleotide
  Antisense strand to SEQ ID NO: 770446
aaugauaagguaaugcgca

SEQ ID NO: 770448 - RNA, 19 nt, Artificial Sequence
  Description of Artificial Sequence: Synthetic oligonucleotide
  Sense strand starting at position 2919 of SEQ ID NO: 587150
aguagagaauaguauaucu

SEQ ID NO: 770449 - RNA, 19 nt, Artificial Sequence
  Description of Artificial Sequence: Synthetic oligonucleotide
  Antisense strand to SEQ ID NO: 770448
agauauacuauucucuacu

SEQ ID NO: 770450 - RNA, 19 nt, Artificial Sequence
  Description of Artificial Sequence: Synthetic oligonucleotide
  Sense strand starting at position 2980 of SEQ ID NO: 587150
agccaagugcuagaucuga

SEQ ID NO: 770451 - RNA, 19 nt, Artificial Sequence
  Description of Artificial Sequence: Synthetic oligonucleotide
  Antisense strand to SEQ ID NO: 770450
ucagaucuagcacuuggcu

SEQ ID NO: 770452 - RNA, 19 nt, Artificial Sequence
  Description of Artificial Sequence: Synthetic oligonucleotide
  Sense strand starting at position 3036 of SEQ ID NO: 587150
cuggguuccugggacagaa

SEQ ID NO: 770453 - RNA, 19 nt, Artificial Sequence
  Description of Artificial Sequence: Synthetic oligonucleotide
  Antisense strand to SEQ ID NO: 770452
uucugucccaggaacccag

SEQ ID NO: 770454 - RNA, 19 nt, Artificial Sequence
  Description of Artificial Sequence: Synthetic oligonucleotide
  Sense strand starting at position 3046 of SEQ ID NO: 587150
gggacagaaucgucccuua

SEQ ID NO: 770455 - RNA, 19 nt, Artificial Sequence
  Description of Artificial Sequence: Synthetic oligonucleotide
  Antisense strand to SEQ ID NO: 770454
uaagggacgauucuguccc

SEQ ID NO: 770456 - RNA, 19 nt, Artificial Sequence
  Description of Artificial Sequence: Synthetic oligonucleotide
  Sense strand starting at position 3049 of SEQ ID NO: 587150
acagaaucgucccuuaaau

SEQ ID NO: 770457 - RNA, 19 nt, Artificial Sequence
  Description of Artificial Sequence: Synthetic oligonucleotide
  Antisense strand to SEQ ID NO: 770456
auuuaagggacgauucugu

SEQ ID NO: 770458 - RNA, 19 nt, Artificial Sequence
  Description of Artificial Sequence: Synthetic oligonucleotide
  Sense strand starting at position 3127 of SEQ ID NO: 587150
uccuuucccucagagaagu

SEQ ID NO: 770459 - RNA, 19 nt, Artificial Sequence
  Description of Artificial Sequence: Synthetic oligonucleotide
  Antisense strand to SEQ ID NO: 770458
acuucucugagggaaagga

SEQ ID NO: 770460 - RNA, 19 nt, Artificial Sequence
  Description of Artificial Sequence: Synthetic oligonucleotide
  Sense strand starting at position 3800 of SEQ ID NO: 587150
ggguacaaugagcgaauau

SEQ ID NO: 770461 - RNA, 19 nt, Artificial Sequence
  Description of Artificial Sequence: Synthetic oligonucleotide
  Antisense strand to SEQ ID NO: 770460
auauucgcucauuguaccc

SEQ ID NO: 770462 - RNA, 19 nt, Artificial Sequence
  Description of Artificial Sequence: Synthetic oligonucleotide
  Sense strand starting at position 3801 of SEQ ID NO: 587150
gguacaaugagcgaauaua

SEQ ID NO: 770463 - RNA, 19 nt, Artificial Sequence
  Description of Artificial Sequence: Synthetic oligonucleotide
  Antisense strand to SEQ ID NO: 770462
uauauucgcucauuguacc

SEQ ID NO: 770464 - RNA, 19 nt, Artificial Sequence
  Description of Artificial Sequence: Synthetic oligonucleotide
  Sense strand starting at position 106 of SEQ ID NO: 587151
caugcagaccaauguuaga

SEQ ID NO: 770465 - RNA, 19 nt, Artificial Sequence
  Description of Artificial Sequence: Synthetic oligonucleotide
  Antisense strand to SEQ ID NO: 770464
ucuaacauuggucugcaug

SEQ ID NO: 770466 - RNA, 19 nt, Artificial Sequence
  Description of Artificial Sequence: Synthetic oligonucleotide
  Sense strand starting at position 133 of SEQ ID NO: 587151
ggauacagcugcuuuccau

SEQ ID NO: 770467 - RNA, 19 nt, Artificial Sequence
  Description of Artificial Sequence: Synthetic oligonucleotide
  Antisense strand to SEQ ID NO: 770466
auggaaagcagcuguaucc

SEQ ID NO: 770468 - RNA, 19 nt, Artificial Sequence
  Description of Artificial Sequence: Synthetic oligonucleotide
  Sense strand starting at position 227 of SEQ ID NO: 587151
ggccauuuaguuuaguguu

SEQ ID NO: 770469 - RNA, 19 nt, Artificial Sequence
  Description of Artificial Sequence: Synthetic oligonucleotide
  Antisense strand to SEQ ID NO: 770468
aacacuaaacuaaauggcc

SEQ ID NO: 770470 - RNA, 19 nt, Artificial Sequence
  Description of Artificial Sequence: Synthetic oligonucleotide
  Sense strand starting at position 241 of SEQ ID NO: 587151
guguuaggcaaaugcuaac

SEQ ID NO: 770471 - RNA, 19 nt, Artificial Sequence
  Description of Artificial Sequence: Synthetic oligonucleotide
  Antisense strand to SEQ ID NO: 770470
guuagcauuugccuaacac

SEQ ID NO: 770472 - RNA, 19 nt, Artificial Sequence
  Description of Artificial Sequence: Synthetic oligonucleotide
  Sense strand starting at position 271 of SEQ ID NO: 587151
acaagugugcugugaauag

SEQ ID NO: 770473 - RNA, 19 nt, Artificial Sequence
  Description of Artificial Sequence: Synthetic oligonucleotide
  Antisense strand to SEQ ID NO: 770472
cuauucacagcacacuugu

SEQ ID NO: 770474 - RNA, 19 nt, Artificial Sequence
  Description of Artificial Sequence: Synthetic oligonucleotide
  Sense strand starting at position 282 of SEQ ID NO: 587151
gugaauagauuuggaaaga

SEQ ID NO: 770475 - RNA, 19 nt, Artificial Sequence
  Description of Artificial Sequence: Synthetic oligonucleotide
  Antisense strand to SEQ ID NO: 770474
ucuuuccaaaucuauucac

SEQ ID NO: 770476 - RNA, 19 nt, Artificial Sequence
  Description of Artificial Sequence: Synthetic oligonucleotide
  Sense strand starting at position 385 of SEQ ID NO: 587151
cucagauuacuuugcaagu

SEQ ID NO: 770477 - RNA, 19 nt, Artificial Sequence
  Description of Artificial Sequence: Synthetic oligonucleotide
  Antisense strand to SEQ ID NO: 770476
acuugcaaaguaaucugag

SEQ ID NO: 770478 - RNA, 19 nt, Artificial Sequence
  Description of Artificial Sequence: Synthetic oligonucleotide
  Sense strand starting at position 386 of SEQ ID NO: 587151
ucagauuacuuugcaaguu

SEQ ID NO: 770479 - RNA, 19 nt, Artificial Sequence
  Description of Artificial Sequence: Synthetic oligonucleotide
  Antisense strand to SEQ ID NO: 770478
aacuugcaaaguaaucuga

SEQ ID NO: 770480 - RNA, 19 nt, Artificial Sequence
  Description of Artificial Sequence: Synthetic oligonucleotide
  Sense strand starting at position 398 of SEQ ID NO: 587151
gcaaguuccugcuccauuu

SEQ ID NO: 770481 - RNA, 19 nt, Artificial Sequence
  Description of Artificial Sequence: Synthetic oligonucleotide
  Antisense strand to SEQ ID NO: 770480
aaauggagcaggaacuugc

SEQ ID NO: 770482 - RNA, 19 nt, Artificial Sequence
  Description of Artificial Sequence: Synthetic oligonucleotide
  Sense strand starting at position 406 of SEQ ID NO: 587151
cugcuccauuuggaagaaa

SEQ ID NO: 770483 - RNA, 19 nt, Artificial Sequence
  Description of Artificial Sequence: Synthetic oligonucleotide
  Antisense strand to SEQ ID NO: 770482
uuucuuccaaauggagcag

SEQ ID NO: 770484 - RNA, 19 nt, Artificial Sequence
  Description of Artificial Sequence: Synthetic oligonucleotide
  Sense strand starting at position 444 of SEQ ID NO: 587151
cgaugcaucgcugagacaa

SEQ ID NO: 770485 - RNA, 19 nt, Artificial Sequence
  Description of Artificial Sequence: Synthetic oligonucleotide
  Antisense strand to SEQ ID NO: 770484
uugucucagcgaugcaucg

SEQ ID NO: 770486 - RNA, 19 nt, Artificial Sequence
  Description of Artificial Sequence: Synthetic oligonucleotide
  Sense strand starting at position 478 of SEQ ID NO: 587151
ugaccagcucuacauuagu

SEQ ID NO: 770487 - RNA, 19 nt, Artificial Sequence
  Description of Artificial Sequence: Synthetic oligonucleotide
  Antisense strand to SEQ ID NO: 770486
acuaauguagagcugguca

SEQ ID NO: 770488 - RNA, 19 nt, Artificial Sequence
  Description of Artificial Sequence: Synthetic oligonucleotide
  Sense strand starting at position 489 of SEQ ID NO: 587151
acauuaguuggacgugaac

SEQ ID NO: 770489 - RNA, 19 nt, Artificial Sequence
  Description of Artificial Sequence: Synthetic oligonucleotide
  Antisense strand to SEQ ID NO: 770488
guucacguccaacuaaugu

SEQ ID NO: 770490 - RNA, 19 nt, Artificial Sequence
  Description of Artificial Sequence: Synthetic oligonucleotide
  Sense strand starting at position 491 of SEQ ID NO: 587151
auuaguuggacgugaacac

SEQ ID NO: 770491 - RNA, 19 nt, Artificial Sequence
  Description of Artificial Sequence: Synthetic oligonucleotide
  Antisense strand to SEQ ID NO: 770490
guguucacguccaacuaau

SEQ ID NO: 770492 - RNA, 19 nt, Artificial Sequence
  Description of Artificial Sequence: Synthetic oligonucleotide
  Sense strand starting at position 495 of SEQ ID NO: 587151
guuggacgugaacacaauu

SEQ ID NO: 770493 - RNA, 19 nt, Artificial Sequence
  Description of Artificial Sequence: Synthetic oligonucleotide
  Antisense strand to SEQ ID NO: 770492
aauuguguucacguccaac

SEQ ID NO: 770494 - RNA, 19 nt, Artificial Sequence
  Description of Artificial Sequence: Synthetic oligonucleotide
  Sense strand starting at position 588 of SEQ ID NO: 587151
guuucaacugcguaaggca

SEQ ID NO: 770495 - RNA, 19 nt, Artificial Sequence
  Description of Artificial Sequence: Synthetic oligonucleotide
  Antisense strand to SEQ ID NO: 770494
ugccuuacgcaguugaaac

SEQ ID NO: 770496 - RNA, 19 nt, Artificial Sequence
  Description of Artificial Sequence: Synthetic oligonucleotide
  Sense strand starting at position 604 of SEQ ID NO: 587151
gcaagaacgucucuacugu

SEQ ID NO: 770497 - RNA, 19 nt, Artificial Sequence
  Description of Artificial Sequence: Synthetic oligonucleotide
  Antisense strand to SEQ ID NO: 770496
acaguagagacguucuugc

SEQ ID NO: 770498 - RNA, 19 nt, Artificial Sequence
  Description of Artificial Sequence: Synthetic oligonucleotide
  Sense strand starting at position 1421 of SEQ ID NO: 587151
ggucucuguaggcaaggau

SEQ ID NO: 770499 - RNA, 19 nt, Artificial Sequence
  Description of Artificial Sequence: Synthetic oligonucleotide
  Antisense strand to SEQ ID NO: 770498
auccuugccuacagagacc

SEQ ID NO: 770500 - RNA, 19 nt, Artificial Sequence
  Description of Artificial Sequence: Synthetic oligonucleotide
  Sense strand starting at position 1501 of SEQ ID NO: 587151
gggcuugucccagagugcu

SEQ ID NO: 770501 - RNA, 19 nt, Artificial Sequence
  Description of Artificial Sequence: Synthetic oligonucleotide
  Antisense strand to SEQ ID NO: 770500
agcacucugggacaagccc

SEQ ID NO: 770502 - RNA, 19 nt, Artificial Sequence
  Description of Artificial Sequence: Synthetic oligonucleotide
  Sense strand starting at position 2006 of SEQ ID NO: 587151
ggauuugaauggugaguuu

SEQ ID NO: 770503 - RNA, 19 nt, Artificial Sequence
  Description of Artificial Sequence: Synthetic oligonucleotide
  Antisense strand to SEQ ID NO: 770502
aaacucaccauucaaaucc

SEQ ID NO: 770504 - RNA, 19 nt, Artificial Sequence
  Description of Artificial Sequence: Synthetic oligonucleotide
  Sense strand starting at position 2030 of SEQ ID NO: 587151
ccaaacuccuagguaaagu

SEQ ID NO: 770505 - RNA, 19 nt, Artificial Sequence
  Description of Artificial Sequence: Synthetic oligonucleotide
  Antisense strand to SEQ ID NO: 770504
acuuuaccuaggaguuugg

SEQ ID NO: 770506 - RNA, 19 nt, Artificial Sequence
  Description of Artificial Sequence: Synthetic oligonucleotide
  Sense strand starting at position 2624 of SEQ ID NO: 587151
ggcaauugugucgugcaaa

SEQ ID NO: 770507 - RNA, 19 nt, Artificial Sequence
  Description of Artificial Sequence: Synthetic oligonucleotide
  Antisense strand to SEQ ID NO: 770506
uuugcacgacacaauugcc

SEQ ID NO: 770508 - RNA, 19 nt, Artificial Sequence
  Description of Artificial Sequence: Synthetic oligonucleotide
  Sense strand starting at position 2627 of SEQ ID NO: 587151
aauugugucgugcaaacac

SEQ ID NO: 770509 - RNA, 19 nt, Artificial Sequence
  Description of Artificial Sequence: Synthetic oligonucleotide
  Antisense strand to SEQ ID NO: 770508
guguuugcacgacacaauu

SEQ ID NO: 770510 - RNA, 19 nt, Artificial Sequence
  Description of Artificial Sequence: Synthetic oligonucleotide
  Sense strand starting at position 2721 of SEQ ID NO: 587151
gcgugugacuaacuggaua

SEQ ID NO: 770511 - RNA, 19 nt, Artificial Sequence
  Description of Artificial Sequence: Synthetic oligonucleotide
  Antisense strand to SEQ ID NO: 770510
uauccaguuagucacacgc

SEQ ID NO: 770512 - RNA, 19 nt, Artificial Sequence
  Description of Artificial Sequence: Synthetic oligonucleotide
  Sense strand starting at position 2723 of SEQ ID NO: 587151
gugugacuaacuggauacu

SEQ ID NO: 770513 - RNA, 19 nt, Artificial Sequence
  Description of Artificial Sequence: Synthetic oligonucleotide
  Antisense strand to SEQ ID NO: 770512
aguauccaguuagucacac

SEQ ID NO: 770514 - RNA, 19 nt, Artificial Sequence
  Description of Artificial Sequence: Synthetic oligonucleotide
  Sense strand starting at position 3212 of SEQ ID NO: 587151
gaaucuuugucagcggaua

SEQ ID NO: 770515 - RNA, 19 nt, Artificial Sequence
  Description of Artificial Sequence: Synthetic oligonucleotide
  Antisense strand to SEQ ID NO: 770514
uauccgcugacaaagauuc

SEQ ID NO: 770516 - RNA, 19 nt, Artificial Sequence
  Description of Artificial Sequence: Synthetic oligonucleotide
  Sense strand starting at position 3213 of SEQ ID NO: 587151
aaucuuugucagcggauac

SEQ ID NO: 770517 - RNA, 19 nt, Artificial Sequence
  Description of Artificial Sequence: Synthetic oligonucleotide
  Antisense strand to SEQ ID NO: 770516
guauccgcugacaaagauu

SEQ ID NO: 770518 - RNA, 19 nt, Artificial Sequence
  Description of Artificial Sequence: Synthetic oligonucleotide
  Sense strand starting at position 3214 of SEQ ID NO: 587151
aucuuugucagcggauaca

SEQ ID NO: 770519 - RNA, 19 nt, Artificial Sequence
  Description of Artificial Sequence: Synthetic oligonucleotide
  Antisense strand to SEQ ID NO: 770518
uguauccgcugacaaagau

SEQ ID NO: 770520 - RNA, 19 nt, Artificial Sequence
  Description of Artificial Sequence: Synthetic oligonucleotide
  Sense strand starting at position 3310 of SEQ ID NO: 587151
gucaauuauuugcaguaaa

SEQ ID NO: 770521 - RNA, 19 nt, Artificial Sequence
  Description of Artificial Sequence: Synthetic oligonucleotide
  Antisense strand to SEQ ID NO: 770520
uuuacugcaaauaauugac

SEQ ID NO: 770522 - RNA, 19 nt, Artificial Sequence
  Description of Artificial Sequence: Synthetic oligonucleotide
  Sense strand starting at position 3371 of SEQ ID NO: 587151
cccucuuucccucaggaga

SEQ ID NO: 770523 - RNA, 19 nt, Artificial Sequence
  Description of Artificial Sequence: Synthetic oligonucleotide
  Antisense strand to SEQ ID NO: 770522
ucuccugagggaaagaggg

SEQ ID NO: 770524 - RNA, 19 nt, Artificial Sequence
  Description of Artificial Sequence: Synthetic oligonucleotide
  Sense strand starting at position 3382 of SEQ ID NO: 587151
ucaggagauugacauggau

SEQ ID NO: 770525 - RNA, 19 nt, Artificial Sequence
  Description of Artificial Sequence: Synthetic oligonucleotide
  Antisense strand to SEQ ID NO: 770524
auccaugucaaucuccuga

SEQ ID NO: 770526 - RNA, 19 nt, Artificial Sequence
  Description of Artificial Sequence: Synthetic oligonucleotide
  Sense strand starting at position 3462 of SEQ ID NO: 587151
cggugcuucgcaccuguaa

SEQ ID NO: 770527 - RNA, 19 nt, Artificial Sequence
  Description of Artificial Sequence: Synthetic oligonucleotide
  Antisense strand to SEQ ID NO: 770526
uuacaggugcgaagcaccg

SEQ ID NO: 770528 - RNA, 19 nt, Artificial Sequence
  Description of Artificial Sequence: Synthetic oligonucleotide
  Sense strand starting at position 3463 of SEQ ID NO: 587151
ggugcuucgcaccuguaau

SEQ ID NO: 770529 - RNA, 19 nt, Artificial Sequence
  Description of Artificial Sequence: Synthetic oligonucleotide
  Antisense strand to SEQ ID NO: 770528
auuacaggugcgaagcacc

SEQ ID NO: 770530 - RNA, 19 nt, Artificial Sequence
  Description of Artificial Sequence: Synthetic oligonucleotide
  Sense strand starting at position 3626 of SEQ ID NO: 587151
ggaagagugccugauccca

SEQ ID NO: 770531 - RNA, 19 nt, Artificial Sequence
  Description of Artificial Sequence: Synthetic oligonucleotide
  Antisense strand to SEQ ID NO: 770530
ugggaucaggcacucuucc

SEQ ID NO: 770532 - RNA, 19 nt, Artificial Sequence
  Description of Artificial Sequence: Synthetic oligonucleotide
  Sense strand starting at position 3704 of SEQ ID NO: 587151
gcgagacccugucuguaau

SEQ ID NO: 770533 - RNA, 19 nt, Artificial Sequence
  Description of Artificial Sequence: Synthetic oligonucleotide
  Antisense strand to SEQ ID NO: 770532
auuacagacagggucucgc

SEQ ID NO: 770534 - RNA, 19 nt, Artificial Sequence
  Description of Artificial Sequence: Synthetic oligonucleotide
  Sense strand starting at position 3705 of SEQ ID NO: 587151
cgagacccugucuguaaua

SEQ ID NO: 770535 - RNA, 19 nt, Artificial Sequence
  Description of Artificial Sequence: Synthetic oligonucleotide
  Antisense strand to SEQ ID NO: 770534
uauuacagacagggucucg

SEQ ID NO: 770536 - RNA, 19 nt, Artificial Sequence
  Description of Artificial Sequence: Synthetic oligonucleotide
  Sense strand starting at position 3890 of SEQ ID NO: 587151
cagguaguacuugguagua

SEQ ID NO: 770537 - RNA, 19 nt, Artificial Sequence
  Description of Artificial Sequence: Synthetic oligonucleotide
  Antisense strand to SEQ ID NO: 770536
uacuaccaaguacuaccug

SEQ ID NO: 770538 - RNA, 19 nt, Artificial Sequence
  Description of Artificial Sequence: Synthetic oligonucleotide
  Sense strand starting at position 3945 of SEQ ID NO: 587151
accuguugccucuaguagu

SEQ ID NO: 770539 - RNA, 19 nt, Artificial Sequence
  Description of Artificial Sequence: Synthetic oligonucleotide
  Antisense strand to SEQ ID NO: 770538
acuacuagaggcaacaggu

SEQ ID NO: 770540 - RNA, 19 nt, Artificial Sequence
  Description of Artificial Sequence: Synthetic oligonucleotide
  Sense strand starting at position 3956 of SEQ ID NO: 587151
cuaguagucaccgcgcuua

SEQ ID NO: 770541 - RNA, 19 nt, Artificial Sequence
  Description of Artificial Sequence: Synthetic oligonucleotide
  Antisense strand to SEQ ID NO: 770540
uaagcgcggugacuacuag

SEQ ID NO: 770542 - RNA, 19 nt, Artificial Sequence
  Description of Artificial Sequence: Synthetic oligonucleotide
  Sense strand starting at position 3968 of SEQ ID NO: 587151
gcgcuuaccacugagaauc

SEQ ID NO: 770543 - RNA, 19 nt, Artificial Sequence
  Description of Artificial Sequence: Synthetic oligonucleotide
  Antisense strand to SEQ ID NO: 770542
gauucucagugguaagcgc

SEQ ID NO: 770544 - RNA, 19 nt, Artificial Sequence
  Description of Artificial Sequence: Synthetic oligonucleotide
  Sense strand starting at position 47 of SEQ ID NO: 587152
cuauaucaaucagugagca

SEQ ID NO: 770545 - RNA, 19 nt, Artificial Sequence
  Description of Artificial Sequence: Synthetic oligonucleotide
  Antisense strand to SEQ ID NO: 770544
ugcucacugauugauauag

SEQ ID NO: 770546 - RNA, 19 nt, Artificial Sequence
  Description of Artificial Sequence: Synthetic oligonucleotide
  Sense strand starting at position 51 of SEQ ID NO: 587152
aucaaucagugagcaauaa

SEQ ID NO: 770547 - RNA, 19 nt, Artificial Sequence
  Description of Artificial Sequence: Synthetic oligonucleotide
  Antisense strand to SEQ ID NO: 770546
uuauugcucacugauugau

SEQ ID NO: 770548 - RNA, 19 nt, Artificial Sequence
  Description of Artificial Sequence: Synthetic oligonucleotide
  Sense strand starting at position 121 of SEQ ID NO: 587152
guuuauugaguguacacua

SEQ ID NO: 770549 - RNA, 19 nt, Artificial Sequence
  Description of Artificial Sequence: Synthetic oligonucleotide
  Antisense strand to SEQ ID NO: 770548
uaguguacacucaauaaac

SEQ ID NO: 770550 - RNA, 19 nt, Artificial Sequence
  Description of Artificial Sequence: Synthetic oligonucleotide
  Sense strand starting at position 197 of SEQ ID NO: 587152
uguagauacugauccagaa

SEQ ID NO: 770551 - RNA, 19 nt, Artificial Sequence
  Description of Artificial Sequence: Synthetic oligonucleotide
  Antisense strand to SEQ ID NO: 770550
uucuggaucaguaucuaca

SEQ ID NO: 770552 - RNA, 19 nt, Artificial Sequence
  Description of Artificial Sequence: Synthetic oligonucleotide
  Sense strand starting at position 298 of SEQ ID NO: 587152
gggacaauggcggauucau

SEQ ID NO: 770553 - RNA, 19 nt, Artificial Sequence
  Description of Artificial Sequence: Synthetic oligonucleotide
  Antisense strand to SEQ ID NO: 770552
augaauccgccauuguccc

SEQ ID NO: 770554 - RNA, 19 nt, Artificial Sequence
  Description of Artificial Sequence: Synthetic oligonucleotide
  Sense strand starting at position 335 of SEQ ID NO: 587152
gggccuaguacauaagauc

SEQ ID NO: 770555 - RNA, 19 nt, Artificial Sequence
  Description of Artificial Sequence: Synthetic oligonucleotide
  Antisense strand to SEQ ID NO: 770554
gaucuuauguacuaggccc

SEQ ID NO: 770556 - RNA, 19 nt, Artificial Sequence
  Description of Artificial Sequence: Synthetic oligonucleotide
  Sense strand starting at position 394 of SEQ ID NO: 587152
gaacauccugaguggauau

SEQ ID NO: 770557 - RNA, 19 nt, Artificial Sequence
  Description of Artificial Sequence: Synthetic oligonucleotide
  Antisense strand to SEQ ID NO: 770556
auauccacucaggauguuc

SEQ ID NO: 770558 - RNA, 19 nt, Artificial Sequence
  Description of Artificial Sequence: Synthetic oligonucleotide
  Sense strand starting at position 407 of SEQ ID NO: 587152
ggauauguaagaggccuaa

SEQ ID NO: 770559 - RNA, 19 nt, Artificial Sequence
  Description of Artificial Sequence: Synthetic oligonucleotide
  Antisense strand to SEQ ID NO: 770558
uuaggccucuuacauaucc

SEQ ID NO: 770560 - RNA, 19 nt, Artificial Sequence
  Description of Artificial Sequence: Synthetic oligonucleotide
  Sense strand starting at position 600 of SEQ ID NO: 587152
ucuguuauggguuagaaag

SEQ ID NO: 770561 - RNA, 19 nt, Artificial Sequence
  Description of Artificial Sequence: Synthetic oligonucleotide
  Antisense strand to SEQ ID NO: 770560
cuuucuaacccauaacaga

SEQ ID NO: 770562 - RNA, 19 nt, Artificial Sequence
  Description of Artificial Sequence: Synthetic oligonucleotide
  Sense strand starting at position 653 of SEQ ID NO: 587152
cacagucuacuuggcaaga

SEQ ID NO: 770563 - RNA, 19 nt, Artificial Sequence
  Description of Artificial Sequence: Synthetic oligonucleotide
  Antisense strand to SEQ ID NO: 770562
ucuugccaaguagacugug

SEQ ID NO: 770564 - RNA, 19 nt, Artificial Sequence
  Description of Artificial Sequence: Synthetic oligonucleotide
  Sense strand starting at position 680 of SEQ ID NO: 587152
ggagcaugcagcuauaaua

SEQ ID NO: 770565 - RNA, 19 nt, Artificial Sequence
  Description of Artificial Sequence: Synthetic oligonucleotide
  Antisense strand to SEQ ID NO: 770564
uauuauagcugcaugcucc

SEQ ID NO: 770566 - RNA, 19 nt, Artificial Sequence
  Description of Artificial Sequence: Synthetic oligonucleotide
  Sense strand starting at position 691 of SEQ ID NO: 587152
cuauaauacgugcaauaaa

SEQ ID NO: 770567 - RNA, 19 nt, Artificial Sequence
  Description of Artificial Sequence: Synthetic oligonucleotide
  Antisense strand to SEQ ID NO: 770566
uuuauugcacguauuauag

SEQ ID NO: 770568 - RNA, 19 nt, Artificial Sequence
  Description of Artificial Sequence: Synthetic oligonucleotide
  Sense strand starting at position 694 of SEQ ID NO: 587152
uaauacgugcaauaaaugu

SEQ ID NO: 770569 - RNA, 19 nt, Artificial Sequence
  Description of Artificial Sequence: Synthetic oligonucleotide
  Antisense strand to SEQ ID NO: 770568
acauuuauugcacguauua

SEQ ID NO: 770570 - RNA, 19 nt, Artificial Sequence
  Description of Artificial Sequence: Synthetic oligonucleotide
  Sense strand starting at position 869 of SEQ ID NO: 587152
aggguauucuguccugaga

SEQ ID NO: 770571 - RNA, 19 nt, Artificial Sequence
  Description of Artificial Sequence: Synthetic oligonucleotide
  Antisense strand to SEQ ID NO: 770570
ucucaggacagaauacccu

SEQ ID NO: 770572 - RNA, 19 nt, Artificial Sequence
  Description of Artificial Sequence: Synthetic oligonucleotide
  Sense strand starting at position 890 of SEQ ID NO: 587152
cagagaccacugugucaaa

SEQ ID NO: 770573 - RNA, 19 nt, Artificial Sequence
  Description of Artificial Sequence: Synthetic oligonucleotide
  Antisense strand to SEQ ID NO: 770572
uuugacacaguggucucug

SEQ ID NO: 770574 - RNA, 19 nt, Artificial Sequence
  Description of Artificial Sequence: Synthetic oligonucleotide
  Sense strand starting at position 937 of SEQ ID NO: 587152
ggcgugaguggucuugcau

SEQ ID NO: 770575 - RNA, 19 nt, Artificial Sequence
  Description of Artificial Sequence: Synthetic oligonucleotide
  Antisense strand to SEQ ID NO: 770574
augcaagaccacucacgcc

SEQ ID NO: 770576 - RNA, 19 nt, Artificial Sequence
  Description of Artificial Sequence: Synthetic oligonucleotide
  Sense strand starting at position 938 of SEQ ID NO: 587152
gcgugaguggucuugcauc

SEQ ID NO: 770577 - RNA, 19 nt, Artificial Sequence
  Description of Artificial Sequence: Synthetic oligonucleotide
  Antisense strand to SEQ ID NO: 770576
gaugcaagaccacucacgc

SEQ ID NO: 770578 - RNA, 19 nt, Artificial Sequence
  Description of Artificial Sequence: Synthetic oligonucleotide
  Sense strand starting at position 1252 of SEQ ID NO: 587152
agaaacuugcucgagguua

SEQ ID NO: 770579 - RNA, 19 nt, Artificial Sequence
  Description of Artificial Sequence: Synthetic oligonucleotide
  Antisense strand to SEQ ID NO: 770578
uaaccucgagcaaguuucu

SEQ ID NO: 770580 - RNA, 19 nt, Artificial Sequence
  Description of Artificial Sequence: Synthetic oligonucleotide
  Sense strand starting at position 2314 of SEQ ID NO: 587152
gaacuugucuaccugaaag

SEQ ID NO: 770581 - RNA, 19 nt, Artificial Sequence
  Description of Artificial Sequence: Synthetic oligonucleotide
  Antisense strand to SEQ ID NO: 770580
cuuucagguagacaaguuc

SEQ ID NO: 770582 - RNA, 19 nt, Artificial Sequence
  Description of Artificial Sequence: Synthetic oligonucleotide
  Sense strand starting at position 2781 of SEQ ID NO: 587152
ugaccaguagaaugugaga

SEQ ID NO: 770583 - RNA, 19 nt, Artificial Sequence
  Description of Artificial Sequence: Synthetic oligonucleotide
  Antisense strand to SEQ ID NO: 770582
ucucacauucuacugguca

SEQ ID NO: 770584 - RNA, 19 nt, Artificial Sequence
  Description of Artificial Sequence: Synthetic oligonucleotide
  Sense strand starting at position 2797 of SEQ ID NO: 587152
agaccuaaaguuuacugua

SEQ ID NO: 770585 - RNA, 19 nt, Artificial Sequence
  Description of Artificial Sequence: Synthetic oligonucleotide
  Antisense strand to SEQ ID NO: 770584
uacaguaaacuuuaggucu

SEQ ID NO: 770586 - RNA, 19 nt, Artificial Sequence
  Description of Artificial Sequence: Synthetic oligonucleotide
  Sense strand starting at position 2807 of SEQ ID NO: 587152
uuuacuguacuguauaaac

SEQ ID NO: 770587 - RNA, 19 nt, Artificial Sequence
  Description of Artificial Sequence: Synthetic oligonucleotide
  Antisense strand to SEQ ID NO: 770586
guuuauacaguacaguaaa

SEQ ID NO: 770588 - RNA, 19 nt, Artificial Sequence
  Description of Artificial Sequence: Synthetic oligonucleotide
  Sense strand starting at position 2858 of SEQ ID NO: 587152
uguuguaaagaucauauca

SEQ ID NO: 770589 - RNA, 19 nt, Artificial Sequence
  Description of Artificial Sequence: Synthetic oligonucleotide
  Antisense strand to SEQ ID NO: 770588
ugauaugaucuuuacaaca

SEQ ID NO: 770590 - RNA, 19 nt, Artificial Sequence
  Description of Artificial Sequence: Synthetic oligonucleotide
  Sense strand starting at position 2933 of SEQ ID NO: 587152
agcccagcugccuagauuu

SEQ ID NO: 770591 - RNA, 19 nt, Artificial Sequence
  Description of Artificial Sequence: Synthetic oligonucleotide
  Antisense strand to SEQ ID NO: 770590
aaaucuaggcagcugggcu

SEQ ID NO: 770592 - RNA, 19 nt, Artificial Sequence
  Description of Artificial Sequence: Synthetic oligonucleotide
  Sense strand starting at position 2975 of SEQ ID NO: 587152
accauaugacugcaaguuu

SEQ ID NO: 770593 - RNA, 19 nt, Artificial Sequence
  Description of Artificial Sequence: Synthetic oligonucleotide
  Antisense strand to SEQ ID NO: 770592
aaacuugcagucauauggu

SEQ ID NO: 770594 - RNA, 19 nt, Artificial Sequence
  Description of Artificial Sequence: Synthetic oligonucleotide
  Sense strand starting at position 3216 of SEQ ID NO: 587152
ccagauaaguagcuagaca

SEQ ID NO: 770595 - RNA, 19 nt, Artificial Sequence
  Description of Artificial Sequence: Synthetic oligonucleotide
  Antisense strand to SEQ ID NO: 770594
ugucuagcuacuuaucugg

SEQ ID NO: 770596 - RNA, 19 nt, Artificial Sequence
  Description of Artificial Sequence: Synthetic oligonucleotide
  Sense strand starting at position 3224 of SEQ ID NO: 587152
guagcuagacagcaauaaa

SEQ ID NO: 770597 - RNA, 19 nt, Artificial Sequence
  Description of Artificial Sequence: Synthetic oligonucleotide
  Antisense strand to SEQ ID NO: 770596
uuuauugcugucuagcuac

SEQ ID NO: 770598 - RNA, 19 nt, Artificial Sequence
  Description of Artificial Sequence: Synthetic oligonucleotide
  Sense strand starting at position 3245 of SEQ ID NO: 587152
ccaucuuccgcccaagaca

SEQ ID NO: 770599 - RNA, 19 nt, Artificial Sequence
  Description of Artificial Sequence: Synthetic oligonucleotide
  Antisense strand to SEQ ID NO: 770598
ugucuugggcggaagaugg

SEQ ID NO: 770600 - RNA, 19 nt, Artificial Sequence
  Description of Artificial Sequence: Synthetic oligonucleotide
  Sense strand starting at position 3317 of SEQ ID NO: 587152
ucucucagucccugggaaa

SEQ ID NO: 770601 - RNA, 19 nt, Artificial Sequence
  Description of Artificial Sequence: Synthetic oligonucleotide
  Antisense strand to SEQ ID NO: 770600
uuucccagggacugagaga

SEQ ID NO: 770602 - RNA, 19 nt, Artificial Sequence
  Description of Artificial Sequence: Synthetic oligonucleotide
  Sense strand starting at position 3346 of SEQ ID NO: 587152
aaagucugccugcagagau

SEQ ID NO: 770603 - RNA, 19 nt, Artificial Sequence
  Description of Artificial Sequence: Synthetic oligonucleotide
  Antisense strand to SEQ ID NO: 770602
aucucugcaggcagacuuu

SEQ ID NO: 770604 - RNA, 19 nt, Artificial Sequence
  Description of Artificial Sequence: Synthetic oligonucleotide
  Sense strand starting at position 3359 of SEQ ID NO: 587152
agagauaugccuuggacuc

SEQ ID NO: 770605 - RNA, 19 nt, Artificial Sequence
  Description of Artificial Sequence: Synthetic oligonucleotide
  Antisense strand to SEQ ID NO: 770604
gaguccaaggcauaucucu

SEQ ID NO: 770606 - RNA, 19 nt, Artificial Sequence
  Description of Artificial Sequence: Synthetic oligonucleotide
  Sense strand starting at position 3360 of SEQ ID NO: 587152
gagauaugccuuggacucu

SEQ ID NO: 770607 - RNA, 19 nt, Artificial Sequence
  Description of Artificial Sequence: Synthetic oligonucleotide
  Antisense strand to SEQ ID NO: 770606
agaguccaaggcauaucuc

SEQ ID NO: 770608 - RNA, 19 nt, Artificial Sequence
  Description of Artificial Sequence: Synthetic oligonucleotide
  Sense strand starting at position 3448 of SEQ ID NO: 587152
agagacuuaugugcuggaa

SEQ ID NO: 770609 - RNA, 19 nt, Artificial Sequence
  Description of Artificial Sequence: Synthetic oligonucleotide
  Antisense strand to SEQ ID NO: 770608
uuccagcacauaagucucu

SEQ ID NO: 770610 - RNA, 19 nt, Artificial Sequence
  Description of Artificial Sequence: Synthetic oligonucleotide
  Sense strand starting at position 3577 of SEQ ID NO: 587152
ggaugcuacaaguguggaa

SEQ ID NO: 770611 - RNA, 19 nt, Artificial Sequence
  Description of Artificial Sequence: Synthetic oligonucleotide
  Antisense strand to SEQ ID NO: 770610
uuccacacuuguagcaucc

SEQ ID NO: 770612 - RNA, 19 nt, Artificial Sequence
  Description of Artificial Sequence: Synthetic oligonucleotide
  Sense strand starting at position 3725 of SEQ ID NO: 587152
gcgauagucccaggagaaa

SEQ ID NO: 770613 - RNA, 19 nt, Artificial Sequence
  Description of Artificial Sequence: Synthetic oligonucleotide
  Antisense strand to SEQ ID NO: 770612
uuucuccugggacuaucgc

SEQ ID NO: 770614 - RNA, 19 nt, Artificial Sequence
  Description of Artificial Sequence: Synthetic oligonucleotide
  Sense strand starting at position 3827 of SEQ ID NO: 587152
agcaauuaagguugaagaa

SEQ ID NO: 770615 - RNA, 19 nt, Artificial Sequence
  Description of Artificial Sequence: Synthetic oligonucleotide
  Antisense strand to SEQ ID NO: 770614
uucuucaaccuuaauugcu

SEQ ID NO: 770616 - RNA, 19 nt, Artificial Sequence
  Description of Artificial Sequence: Synthetic oligonucleotide
  Sense strand starting at position 3850 of SEQ ID NO: 587152
uguaaagugucaguagaaa

SEQ ID NO: 770617 - RNA, 19 nt, Artificial Sequence
  Description of Artificial Sequence: Synthetic oligonucleotide
  Antisense strand to SEQ ID NO: 770616
uuucuacugacacuuuaca

SEQ ID NO: 770618 - RNA, 19 nt, Artificial Sequence
  Description of Artificial Sequence: Synthetic oligonucleotide
  Sense strand starting at position 3858 of SEQ ID NO: 587152
gucaguagaaagugacuua

SEQ ID NO: 770619 - RNA, 19 nt, Artificial Sequence
  Description of Artificial Sequence: Synthetic oligonucleotide
  Antisense strand to SEQ ID NO: 770618
uaagucacuuucuacugac

SEQ ID NO: 770620 - RNA, 19 nt, Artificial Sequence
  Description of Artificial Sequence: Synthetic oligonucleotide
  Sense strand starting at position 3861 of SEQ ID NO: 587152
aguagaaagugacuuaucu

SEQ ID NO: 770621 - RNA, 19 nt, Artificial Sequence
  Description of Artificial Sequence: Synthetic oligonucleotide
  Antisense strand to SEQ ID NO: 770620
agauaagucacuuucuacu

SEQ ID NO: 770622 - RNA, 19 nt, Artificial Sequence
  Description of Artificial Sequence: Synthetic oligonucleotide
  Sense strand starting at position 3868 of SEQ ID NO: 587152
agugacuuaucucuuacca

SEQ ID NO: 770623 - RNA, 19 nt, Artificial Sequence
  Description of Artificial Sequence: Synthetic oligonucleotide
  Antisense strand to SEQ ID NO: 770622
ugguaagagauaagucacu

SEQ ID NO: 770624 - RNA, 19 nt, Artificial Sequence
  Description of Artificial Sequence: Synthetic oligonucleotide
  Sense strand starting at position 183 of SEQ ID NO: 587153
uccagauguuuaguuugga

SEQ ID NO: 770625 - RNA, 19 nt, Artificial Sequence
  Description of Artificial Sequence: Synthetic oligonucleotide
  Antisense strand to SEQ ID NO: 770624
uccaaacuaaacaucugga

SEQ ID NO: 770626 - RNA, 19 nt, Artificial Sequence
  Description of Artificial Sequence: Synthetic oligonucleotide
  Sense strand starting at position 491 of SEQ ID NO: 587153
guccuaacauucuuuggau

SEQ ID NO: 770627 - RNA, 19 nt, Artificial Sequence
  Description of Artificial Sequence: Synthetic oligonucleotide
  Antisense strand to SEQ ID NO: 770626
auccaaagaauguuaggac

SEQ ID NO: 770628 - RNA, 19 nt, Artificial Sequence
  Description of Artificial Sequence: Synthetic oligonucleotide
  Sense strand starting at position 500 of SEQ ID NO: 587153
uucuuuggaucuguugaua

SEQ ID NO: 770629 - RNA, 19 nt, Artificial Sequence
  Description of Artificial Sequence: Synthetic oligonucleotide
  Antisense strand to SEQ ID NO: 770628
uaucaacagauccaaagaa

SEQ ID NO: 770630 - RNA, 19 nt, Artificial Sequence
  Description of Artificial Sequence: Synthetic oligonucleotide
  Sense strand starting at position 503 of SEQ ID NO: 587153
uuuggaucuguugauauuc

SEQ ID NO: 770631 - RNA, 19 nt, Artificial Sequence
  Description of Artificial Sequence: Synthetic oligonucleotide
  Antisense strand to SEQ ID NO: 770630
gaauaucaacagauccaaa

SEQ ID NO: 770632 - RNA, 19 nt, Artificial Sequence
  Description of Artificial Sequence: Synthetic oligonucleotide
  Sense strand starting at position 508 of SEQ ID NO: 587153
aucuguugauauuccagga

SEQ ID NO: 770633 - RNA, 19 nt, Artificial Sequence
  Description of Artificial Sequence: Synthetic oligonucleotide
  Antisense strand to SEQ ID NO: 770632
uccuggaauaucaacagau

SEQ ID NO: 770634 - RNA, 19 nt, Artificial Sequence
  Description of Artificial Sequence: Synthetic oligonucleotide
  Sense strand starting at position 512 of SEQ ID NO: 587153
guugauauuccaggaacaa

SEQ ID NO: 770635 - RNA, 19 nt, Artificial Sequence
  Description of Artificial Sequence: Synthetic oligonucleotide
  Antisense strand to SEQ ID NO: 770634
uuguuccuggaauaucaac

SEQ ID NO: 770636 - RNA, 19 nt, Artificial Sequence
  Description of Artificial Sequence: Synthetic oligonucleotide
  Sense strand starting at position 815 of SEQ ID NO: 587153
agcggaguugguuaaauca

SEQ ID NO: 770637 - RNA, 19 nt, Artificial Sequence
  Description of Artificial Sequence: Synthetic oligonucleotide
  Antisense strand to SEQ ID NO: 770636
ugauuuaaccaacuccgcu

SEQ ID NO: 770638 - RNA, 19 nt, Artificial Sequence
  Description of Artificial Sequence: Synthetic oligonucleotide
  Sense strand starting at position 1098 of SEQ ID NO: 587153
gggcuucuucuggaacuua

SEQ ID NO: 770639 - RNA, 19 nt, Artificial Sequence
  Description of Artificial Sequence: Synthetic oligonucleotide
  Antisense strand to SEQ ID NO: 770638
uaaguuccagaagaagccc

SEQ ID NO: 770640 - RNA, 19 nt, Artificial Sequence
  Description of Artificial Sequence: Synthetic oligonucleotide
  Sense strand starting at position 1169 of SEQ ID NO: 587153
aggaguugucgccuuccgu

SEQ ID NO: 770641 - RNA, 19 nt, Artificial Sequence
  Description of Artificial Sequence: Synthetic oligonucleotide
  Antisense strand to SEQ ID NO: 770640
acggaaggcgacaacuccu

SEQ ID NO: 770642 - RNA, 19 nt, Artificial Sequence
  Description of Artificial Sequence: Synthetic oligonucleotide
  Sense strand starting at position 1577 of SEQ ID NO: 587153
aguugaaaguucccuagga

SEQ ID NO: 770643 - RNA, 19 nt, Artificial Sequence
  Description of Artificial Sequence: Synthetic oligonucleotide
  Antisense strand to SEQ ID NO: 770642
uccuagggaacuuucaacu

SEQ ID NO: 770644 - RNA, 19 nt, Artificial Sequence
  Description of Artificial Sequence: Synthetic oligonucleotide
  Sense strand starting at position 1578 of SEQ ID NO: 587153
guugaaaguucccuaggau

SEQ ID NO: 770645 - RNA, 19 nt, Artificial Sequence
  Description of Artificial Sequence: Synthetic oligonucleotide
  Antisense strand to SEQ ID NO: 770644
auccuagggaacuuucaac

SEQ ID NO: 770646 - RNA, 19 nt, Artificial Sequence
  Description of Artificial Sequence: Synthetic oligonucleotide
  Sense strand starting at position 2023 of SEQ ID NO: 587153
ugagaaacuucuguugaug

SEQ ID NO: 770647 - RNA, 19 nt, Artificial Sequence
  Description of Artificial Sequence: Synthetic oligonucleotide
  Antisense strand to SEQ ID NO: 770646
caucaacagaaguuucuca

SEQ ID NO: 770648 - RNA, 19 nt, Artificial Sequence
  Description of Artificial Sequence: Synthetic oligonucleotide
  Sense strand starting at position 2037 of SEQ ID NO: 587153
ugauguauccgcgucucca

SEQ ID NO: 770649 - RNA, 19 nt, Artificial Sequence
  Description of Artificial Sequence: Synthetic oligonucleotide
  Antisense strand to SEQ ID NO: 770648
uggagacgcggauacauca

SEQ ID NO: 770650 - RNA, 19 nt, Artificial Sequence
  Description of Artificial Sequence: Synthetic oligonucleotide
  Sense strand starting at position 2038 of SEQ ID NO: 587153
gauguauccgcgucuccau

SEQ ID NO: 770651 - RNA, 19 nt, Artificial Sequence
  Description of Artificial Sequence: Synthetic oligonucleotide
  Antisense strand to SEQ ID NO: 770650
auggagacgcggauacauc

SEQ ID NO: 770652 - RNA, 19 nt, Artificial Sequence
  Description of Artificial Sequence: Synthetic oligonucleotide
  Sense strand starting at position 2151 of SEQ ID NO: 587153
aggcucuuauugguggaga

SEQ ID NO: 770653 - RNA, 19 nt, Artificial Sequence
  Description of Artificial Sequence: Synthetic oligonucleotide
  Antisense strand to SEQ ID NO: 770652
ucuccaccaauaagagccu

SEQ ID NO: 770654 - RNA, 19 nt, Artificial Sequence
  Description of Artificial Sequence: Synthetic oligonucleotide
  Sense strand starting at position 2250 of SEQ ID NO: 587153
gucacagucuccuuagaac

SEQ ID NO: 770655 - RNA, 19 nt, Artificial Sequence
  Description of Artificial Sequence: Synthetic oligonucleotide
  Antisense strand to SEQ ID NO: 770654
guucuaaggagacugugac

SEQ ID NO: 770656 - RNA, 19 nt, Artificial Sequence
  Description of Artificial Sequence: Synthetic oligonucleotide
  Sense strand starting at position 2467 of SEQ ID NO: 587153
guugguaccgaacaaauua

SEQ ID NO: 770657 - RNA, 19 nt, Artificial Sequence
  Description of Artificial Sequence: Synthetic oligonucleotide
  Antisense strand to SEQ ID NO: 770656
uaauuuguucgguaccaac

SEQ ID NO: 770658 - RNA, 19 nt, Artificial Sequence
  Description of Artificial Sequence: Synthetic oligonucleotide
  Sense strand starting at position 2636 of SEQ ID NO: 587153
aaucgugcucugugauuuc

SEQ ID NO: 770659 - RNA, 19 nt, Artificial Sequence
  Description of Artificial Sequence: Synthetic oligonucleotide
  Antisense strand to SEQ ID NO: 770658
gaaaucacagagcacgauu

SEQ ID NO: 770660 - RNA, 19 nt, Artificial Sequence
  Description of Artificial Sequence: Synthetic oligonucleotide
  Sense strand starting at position 2666 of SEQ ID NO: 587153
uugucuuauuuccugcagu

SEQ ID NO: 770661 - RNA, 19 nt, Artificial Sequence
  Description of Artificial Sequence: Synthetic oligonucleotide
  Antisense strand to SEQ ID NO: 770660
acugcaggaaauaagacaa

SEQ ID NO: 770662 - RNA, 19 nt, Artificial Sequence
  Description of Artificial Sequence: Synthetic oligonucleotide
  Sense strand starting at position 2788 of SEQ ID NO: 587153
ccaguccuaccuuacgauu

SEQ ID NO: 770663 - RNA, 19 nt, Artificial Sequence
  Description of Artificial Sequence: Synthetic oligonucleotide
  Antisense strand to SEQ ID NO: 770662
aaucguaagguaggacugg

SEQ ID NO: 770664 - RNA, 19 nt, Artificial Sequence
  Description of Artificial Sequence: Synthetic oligonucleotide
  Sense strand starting at position 2800 of SEQ ID NO: 587153
uacgauucucaugguggga

SEQ ID NO: 770665 - RNA, 19 nt, Artificial Sequence
  Description of Artificial Sequence: Synthetic oligonucleotide
  Antisense strand to SEQ ID NO: 770664
ucccaccaugagaaucgua

SEQ ID NO: 770666 - RNA, 19 nt, Artificial Sequence
  Description of Artificial Sequence: Synthetic oligonucleotide
  Sense strand starting at position 2848 of SEQ ID NO: 587153
uugaaaguucgcuaggauu

SEQ ID NO: 770667 - RNA, 19 nt, Artificial Sequence
  Description of Artificial Sequence: Synthetic oligonucleotide
  Antisense strand to SEQ ID NO: 770666
aauccuagcgaacuuucaa

SEQ ID NO: 770668 - RNA, 19 nt, Artificial Sequence
  Description of Artificial Sequence: Synthetic oligonucleotide
  Sense strand starting at position 3045 of SEQ ID NO: 587153
auacguuuagaugaucagu

SEQ ID NO: 770669 - RNA, 19 nt, Artificial Sequence
  Description of Artificial Sequence: Synthetic oligonucleotide
  Antisense strand to SEQ ID NO: 770668
acugaucaucuaaacguau

SEQ ID NO: 770670 - RNA, 19 nt, Artificial Sequence
  Description of Artificial Sequence: Synthetic oligonucleotide
  Sense strand starting at position 3047 of SEQ ID NO: 587153
acguuuagaugaucaguaa

SEQ ID NO: 770671 - RNA, 19 nt, Artificial Sequence
  Description of Artificial Sequence: Synthetic oligonucleotide
  Antisense strand to SEQ ID NO: 770670
uuacugaucaucuaaacgu

SEQ ID NO: 770672 - RNA, 19 nt, Artificial Sequence
  Description of Artificial Sequence: Synthetic oligonucleotide
  Sense strand starting at position 3048 of SEQ ID NO: 587153
cguuuagaugaucaguaag

SEQ ID NO: 770673 - RNA, 19 nt, Artificial Sequence
  Description of Artificial Sequence: Synthetic oligonucleotide
  Antisense strand to SEQ ID NO: 770672
cuuacugaucaucuaaacg

SEQ ID NO: 770674 - RNA, 19 nt, Artificial Sequence
  Description of Artificial Sequence: Synthetic oligonucleotide
  Sense strand starting at position 3147 of SEQ ID NO: 587153
uuggaagguuaguuaauca

SEQ ID NO: 770675 - RNA, 19 nt, Artificial Sequence
  Description of Artificial Sequence: Synthetic oligonucleotide
  Antisense strand to SEQ ID NO: 770674
ugauuaacuaaccuuccaa

SEQ ID NO: 770676 - RNA, 19 nt, Artificial Sequence
  Description of Artificial Sequence: Synthetic oligonucleotide
  Sense strand starting at position 3152 of SEQ ID NO: 587153
agguuaguuaaucaguguu

SEQ ID NO: 770677 - RNA, 19 nt, Artificial Sequence
  Description of Artificial Sequence: Synthetic oligonucleotide
  Antisense strand to SEQ ID NO: 770676
aacacugauuaacuaaccu

SEQ ID NO: 770678 - RNA, 19 nt, Artificial Sequence
  Description of Artificial Sequence: Synthetic oligonucleotide
  Sense strand starting at position 3178 of SEQ ID NO: 587153
auggaaggucuccgagagu

SEQ ID NO: 770679 - RNA, 19 nt, Artificial Sequence
  Description of Artificial Sequence: Synthetic oligonucleotide
  Antisense strand to SEQ ID NO: 770678
acucucggagaccuuccau

SEQ ID NO: 770680 - RNA, 19 nt, Artificial Sequence
  Description of Artificial Sequence: Synthetic oligonucleotide
  Sense strand starting at position 3181 of SEQ ID NO: 587153
gaaggucuccgagaguuau

SEQ ID NO: 770681 - RNA, 19 nt, Artificial Sequence
  Description of Artificial Sequence: Synthetic oligonucleotide
  Antisense strand to SEQ ID NO: 770680
auaacucucggagaccuuc

SEQ ID NO: 770682 - RNA, 19 nt, Artificial Sequence
  Description of Artificial Sequence: Synthetic oligonucleotide
  Sense strand starting at position 3185 of SEQ ID NO: 587153
gucuccgagaguuaucuga

SEQ ID NO: 770683 - RNA, 19 nt, Artificial Sequence
  Description of Artificial Sequence: Synthetic oligonucleotide
  Antisense strand to SEQ ID NO: 770682
ucagauaacucucggagac

SEQ ID NO: 770684 - RNA, 19 nt, Artificial Sequence
  Description of Artificial Sequence: Synthetic oligonucleotide
  Sense strand starting at position 3187 of SEQ ID NO: 587153
cuccgagaguuaucugaag

SEQ ID NO: 770685 - RNA, 19 nt, Artificial Sequence
  Description of Artificial Sequence: Synthetic oligonucleotide
  Antisense strand to SEQ ID NO: 770684
cuucagauaacucucggag

SEQ ID NO: 770686 - RNA, 19 nt, Artificial Sequence
  Description of Artificial Sequence: Synthetic oligonucleotide
  Sense strand starting at position 3193 of SEQ ID NO: 587153
gaguuaucugaaggcaagu

SEQ ID NO: 770687 - RNA, 19 nt, Artificial Sequence
  Description of Artificial Sequence: Synthetic oligonucleotide
  Antisense strand to SEQ ID NO: 770686
acuugccuucagauaacuc

SEQ ID NO: 770688 - RNA, 19 nt, Artificial Sequence
  Description of Artificial Sequence: Synthetic oligonucleotide
  Sense strand starting at position 3215 of SEQ ID NO: 587153
acguguuuagcugugguau

SEQ ID NO: 770689 - RNA, 19 nt, Artificial Sequence
  Description of Artificial Sequence: Synthetic oligonucleotide
  Antisense strand to SEQ ID NO: 770688
auaccacagcuaaacacgu

SEQ ID NO: 770690 - RNA, 19 nt, Artificial Sequence
  Description of Artificial Sequence: Synthetic oligonucleotide
  Sense strand starting at position 3284 of SEQ ID NO: 587153
auuaucuguccuuagagau

SEQ ID NO: 770691 - RNA, 19 nt, Artificial Sequence
  Description of Artificial Sequence: Synthetic oligonucleotide
  Antisense strand to SEQ ID NO: 770690
aucucuaaggacagauaau

SEQ ID NO: 770692 - RNA, 19 nt, Artificial Sequence
  Description of Artificial Sequence: Synthetic oligonucleotide
  Sense strand starting at position 3316 of SEQ ID NO: 587153
aauacauucccauggugga

SEQ ID NO: 770693 - RNA, 19 nt, Artificial Sequence
  Description of Artificial Sequence: Synthetic oligonucleotide
  Antisense strand to SEQ ID NO: 770692
uccaccaugggaauguauu

SEQ ID NO: 770694 - RNA, 19 nt, Artificial Sequence
  Description of Artificial Sequence: Synthetic oligonucleotide
  Sense strand starting at position 3716 of SEQ ID NO: 587153
cuauaucaaucagugagca

SEQ ID NO: 770695 - RNA, 19 nt, Artificial Sequence
  Description of Artificial Sequence: Synthetic oligonucleotide
  Antisense strand to SEQ ID NO: 770694
ugcucacugauugauauag

SEQ ID NO: 770696 - RNA, 19 nt, Artificial Sequence
  Description of Artificial Sequence: Synthetic oligonucleotide
  Sense strand starting at position 3720 of SEQ ID NO: 587153
aucaaucagugagcaauaa

SEQ ID NO: 770697 - RNA, 19 nt, Artificial Sequence
  Description of Artificial Sequence: Synthetic oligonucleotide
  Antisense strand to SEQ ID NO: 770696
uuauugcucacugauugau

SEQ ID NO: 770698 - RNA, 19 nt, Artificial Sequence
  Description of Artificial Sequence: Synthetic oligonucleotide
  Sense strand starting at position 3790 of SEQ ID NO: 587153
guuuauugaguguacacua

SEQ ID NO: 770699 - RNA, 19 nt, Artificial Sequence
  Description of Artificial Sequence: Synthetic oligonucleotide
  Antisense strand to SEQ ID NO: 770698
uaguguacacucaauaaac

SEQ ID NO: 770700 - RNA, 19 nt, Artificial Sequence
  Description of Artificial Sequence: Synthetic oligonucleotide
  Sense strand starting at position 3866 of SEQ ID NO: 587153
uguagauacugauccagaa

SEQ ID NO: 770701 - RNA, 19 nt, Artificial Sequence
  Description of Artificial Sequence: Synthetic oligonucleotide
  Antisense strand to SEQ ID NO: 770700
uucuggaucaguaucuaca

SEQ ID NO: 770702 - RNA, 19 nt, Artificial Sequence
  Description of Artificial Sequence: Synthetic oligonucleotide
  Sense strand starting at position 3967 of SEQ ID NO: 587153
gggacaauggcggauucau

SEQ ID NO: 770703 - RNA, 19 nt, Artificial Sequence
  Description of Artificial Sequence: Synthetic oligonucleotide
  Antisense strand to SEQ ID NO: 770702
augaauccgccauuguccc

SEQ ID NO: 770704 - RNA, 19 nt, Artificial Sequence
  Description of Artificial Sequence: Synthetic oligonucleotide
  Sense strand starting at position 14 of SEQ ID NO: 587154
guuacacucuccucacaga

SEQ ID NO: 770705 - RNA, 19 nt, Artificial Sequence
  Description of Artificial Sequence: Synthetic oligonucleotide
  Antisense strand to SEQ ID NO: 770704
ucugugaggagaguguaac

SEQ ID NO: 770706 - RNA, 19 nt, Artificial Sequence
  Description of Artificial Sequence: Synthetic oligonucleotide
  Sense strand starting at position 39 of SEQ ID NO: 587154
guucuuuccuuacugaaga

SEQ ID NO: 770707 - RNA, 19 nt, Artificial Sequence
  Description of Artificial Sequence: Synthetic oligonucleotide
  Antisense strand to SEQ ID NO: 770706
ucuucaguaaggaaagaac

SEQ ID NO: 770708 - RNA, 19 nt, Artificial Sequence
  Description of Artificial Sequence: Synthetic oligonucleotide
  Sense strand starting at position 157 of SEQ ID NO: 587154
agaaucaaacagugcuaua

SEQ ID NO: 770709 - RNA, 19 nt, Artificial Sequence
  Description of Artificial Sequence: Synthetic oligonucleotide
  Antisense strand to SEQ ID NO: 770708
uauagcacuguuugauucu

SEQ ID NO: 770710 - RNA, 19 nt, Artificial Sequence
  Description of Artificial Sequence: Synthetic oligonucleotide
  Sense strand starting at position 168 of SEQ ID NO: 587154
gugcuauaacuccauaaag

SEQ ID NO: 770711 - RNA, 19 nt, Artificial Sequence
  Description of Artificial Sequence: Synthetic oligonucleotide
  Antisense strand to SEQ ID NO: 770710
cuuuauggaguuauagcac

SEQ ID NO: 770712 - RNA, 19 nt, Artificial Sequence
  Description of Artificial Sequence: Synthetic oligonucleotide
  Sense strand starting at position 234 of SEQ ID NO: 587154
cccagauguucucuauuag

SEQ ID NO: 770713 - RNA, 19 nt, Artificial Sequence
  Description of Artificial Sequence: Synthetic oligonucleotide
  Antisense strand to SEQ ID NO: 770712
cuaauagagaacaucuggg

SEQ ID NO: 770714 - RNA, 19 nt, Artificial Sequence
  Description of Artificial Sequence: Synthetic oligonucleotide
  Sense strand starting at position 235 of SEQ ID NO: 587154
ccagauguucucuauuagu

SEQ ID NO: 770715 - RNA, 19 nt, Artificial Sequence
  Description of Artificial Sequence: Synthetic oligonucleotide
  Antisense strand to SEQ ID NO: 770714
acuaauagagaacaucugg

SEQ ID NO: 770716 - RNA, 19 nt, Artificial Sequence
  Description of Artificial Sequence: Synthetic oligonucleotide
  Sense strand starting at position 245 of SEQ ID NO: 587154
ucuauuagucgugaaaugu

SEQ ID NO: 770717 - RNA, 19 nt, Artificial Sequence
  Description of Artificial Sequence: Synthetic oligonucleotide
  Antisense strand to SEQ ID NO: 770716
acauuucacgacuaauaga

SEQ ID NO: 770718 - RNA, 19 nt, Artificial Sequence
  Description of Artificial Sequence: Synthetic oligonucleotide
  Sense strand starting at position 253 of SEQ ID NO: 587154
ucgugaaauguuuagaaag

SEQ ID NO: 770719 - RNA, 19 nt, Artificial Sequence
  Description of Artificial Sequence: Synthetic oligonucleotide
  Antisense strand to SEQ ID NO: 770718
cuuucuaaacauuucacga

SEQ ID NO: 770720 - RNA, 19 nt, Artificial Sequence
  Description of Artificial Sequence: Synthetic oligonucleotide
  Sense strand starting at position 314 of SEQ ID NO: 587154
gcgaucaaacaaggagaau

SEQ ID NO: 770721 - RNA, 19 nt, Artificial Sequence
  Description of Artificial Sequence: Synthetic oligonucleotide
  Antisense strand to SEQ ID NO: 770720
auucuccuuguuugaucgc

SEQ ID NO: 770722 - RNA, 19 nt, Artificial Sequence
  Description of Artificial Sequence: Synthetic oligonucleotide
  Sense strand starting at position 405 of SEQ ID NO: 587154
uuaagugacagcugagaga

SEQ ID NO: 770723 - RNA, 19 nt, Artificial Sequence
  Description of Artificial Sequence: Synthetic oligonucleotide
  Antisense strand to SEQ ID NO: 770722
ucucucagcugucacuuaa

SEQ ID NO: 770724 - RNA, 19 nt, Artificial Sequence
  Description of Artificial Sequence: Synthetic oligonucleotide
  Sense strand starting at position 658 of SEQ ID NO: 587154
cugcucuagucuguaauuu

SEQ ID NO: 770725 - RNA, 19 nt, Artificial Sequence
  Description of Artificial Sequence: Synthetic oligonucleotide
  Antisense strand to SEQ ID NO: 770724
aaauuacagacuagagcag

SEQ ID NO: 770726 - RNA, 19 nt, Artificial Sequence
  Description of Artificial Sequence: Synthetic oligonucleotide
  Sense strand starting at position 830 of SEQ ID NO: 587154
ggagaacgguuucuagaug

SEQ ID NO: 770727 - RNA, 19 nt, Artificial Sequence
  Description of Artificial Sequence: Synthetic oligonucleotide
  Antisense strand to SEQ ID NO: 770726
caucuagaaaccguucucc

SEQ ID NO: 770728 - RNA, 19 nt, Artificial Sequence
  Description of Artificial Sequence: Synthetic oligonucleotide
  Sense strand starting at position 851 of SEQ ID NO: 587154
gagggaaucugccuuugga

SEQ ID NO: 770729 - RNA, 19 nt, Artificial Sequence
  Description of Artificial Sequence: Synthetic oligonucleotide
  Antisense strand to SEQ ID NO: 770728
uccaaaggcagauucccuc

SEQ ID NO: 770730 - RNA, 19 nt, Artificial Sequence
  Description of Artificial Sequence: Synthetic oligonucleotide
  Sense strand starting at position 854 of SEQ ID NO: 587154
ggaaucugccuuuggaacu

SEQ ID NO: 770731 - RNA, 19 nt, Artificial Sequence
  Description of Artificial Sequence: Synthetic oligonucleotide
  Antisense strand to SEQ ID NO: 770730
aguuccaaaggcagauucc

SEQ ID NO: 770732 - RNA, 19 nt, Artificial Sequence
  Description of Artificial Sequence: Synthetic oligonucleotide
  Sense strand starting at position 976 of SEQ ID NO: 587154
gacgguugugaacaaggua

SEQ ID NO: 770733 - RNA, 19 nt, Artificial Sequence
  Description of Artificial Sequence: Synthetic oligonucleotide
  Antisense strand to SEQ ID NO: 770732
uaccuuguucacaaccguc

SEQ ID NO: 770734 - RNA, 19 nt, Artificial Sequence
  Description of Artificial Sequence: Synthetic oligonucleotide
  Sense strand starting at position 979 of SEQ ID NO: 587154
gguugugaacaagguaaca

SEQ ID NO: 770735 - RNA, 19 nt, Artificial Sequence
  Description of Artificial Sequence: Synthetic oligonucleotide
  Antisense strand to SEQ ID NO: 770734
uguuaccuuguucacaacc

SEQ ID NO: 770736 - RNA, 19 nt, Artificial Sequence
  Description of Artificial Sequence: Synthetic oligonucleotide
  Sense strand starting at position 1030 of SEQ ID NO: 587154
gcauuaaagccauagucuc

SEQ ID NO: 770737 - RNA, 19 nt, Artificial Sequence
  Description of Artificial Sequence: Synthetic oligonucleotide
  Antisense strand to SEQ ID NO: 770736
gagacuauggcuuuaaugc

SEQ ID NO: 770738 - RNA, 19 nt, Artificial Sequence
  Description of Artificial Sequence: Synthetic oligonucleotide
  Sense strand starting at position 1147 of SEQ ID NO: 587154
acuccugacuggcugaauu

SEQ ID NO: 770739 - RNA, 19 nt, Artificial Sequence
  Description of Artificial Sequence: Synthetic oligonucleotide
  Antisense strand to SEQ ID NO: 770738
aauucagccagucaggagu

SEQ ID NO: 770740 - RNA, 19 nt, Artificial Sequence
  Description of Artificial Sequence: Synthetic oligonucleotide
  Sense strand starting at position 1171 of SEQ ID NO: 587154
gucgauuuaccuugaggca

SEQ ID NO: 770741 - RNA, 19 nt, Artificial Sequence
  Description of Artificial Sequence: Synthetic oligonucleotide
  Antisense strand to SEQ ID NO: 770740
ugccucaagguaaaucgac

SEQ ID NO: 770742 - RNA, 19 nt, Artificial Sequence
  Description of Artificial Sequence: Synthetic oligonucleotide
  Sense strand starting at position 1313 of SEQ ID NO: 587154
cacgucucucaacaggaua

SEQ ID NO: 770743 - RNA, 19 nt, Artificial Sequence
  Description of Artificial Sequence: Synthetic oligonucleotide
  Antisense strand to SEQ ID NO: 770742
uauccuguugagagacgug

SEQ ID NO: 770744 - RNA, 19 nt, Artificial Sequence
  Description of Artificial Sequence: Synthetic oligonucleotide
  Sense strand starting at position 1420 of SEQ ID NO: 587154
aguugucaaagcugaaaug

SEQ ID NO: 770745 - RNA, 19 nt, Artificial Sequence
  Description of Artificial Sequence: Synthetic oligonucleotide
  Antisense strand to SEQ ID NO: 770744
cauuucagcuuugacaacu

SEQ ID NO: 770746 - RNA, 19 nt, Artificial Sequence
  Description of Artificial Sequence: Synthetic oligonucleotide
  Sense strand starting at position 1421 of SEQ ID NO: 587154
guugucaaagcugaaauga

SEQ ID NO: 770747 - RNA, 19 nt, Artificial Sequence
  Description of Artificial Sequence: Synthetic oligonucleotide
  Antisense strand to SEQ ID NO: 770746
ucauuucagcuuugacaac

SEQ ID NO: 770748 - RNA, 19 nt, Artificial Sequence
  Description of Artificial Sequence: Synthetic oligonucleotide
  Sense strand starting at position 1849 of SEQ ID NO: 587154
gcgagacucgcugauaaag

SEQ ID NO: 770749 - RNA, 19 nt, Artificial Sequence
  Description of Artificial Sequence: Synthetic oligonucleotide
  Antisense strand to SEQ ID NO: 770748
cuuuaucagcgagucucgc

SEQ ID NO: 770750 - RNA, 19 nt, Artificial Sequence
  Description of Artificial Sequence: Synthetic oligonucleotide
  Sense strand starting at position 2078 of SEQ ID NO: 587154
gcaugaaaugauggcaaga

SEQ ID NO: 770751 - RNA, 19 nt, Artificial Sequence
  Description of Artificial Sequence: Synthetic oligonucleotide
  Antisense strand to SEQ ID NO: 770750
ucuugccaucauuucaugc

SEQ ID NO: 770752 - RNA, 19 nt, Artificial Sequence
  Description of Artificial Sequence: Synthetic oligonucleotide
  Sense strand starting at position 2309 of SEQ ID NO: 587154
gauuacuaugcaugggaua

SEQ ID NO: 770753 - RNA, 19 nt, Artificial Sequence
  Description of Artificial Sequence: Synthetic oligonucleotide
  Antisense strand to SEQ ID NO: 770752
uaucccaugcauaguaauc

SEQ ID NO: 770754 - RNA, 19 nt, Artificial Sequence
  Description of Artificial Sequence: Synthetic oligonucleotide
  Sense strand starting at position 2841 of SEQ ID NO: 587154
ccguuuaucaccggaaagg

SEQ ID NO: 770755 - RNA, 19 nt, Artificial Sequence
  Description of Artificial Sequence: Synthetic oligonucleotide
  Antisense strand to SEQ ID NO: 770754
ccuuuccggugauaaacgg

SEQ ID NO: 770756 - RNA, 19 nt, Artificial Sequence
  Description of Artificial Sequence: Synthetic oligonucleotide
  Sense strand starting at position 2842 of SEQ ID NO: 587154
cguuuaucaccggaaagga

SEQ ID NO: 770757 - RNA, 19 nt, Artificial Sequence
  Description of Artificial Sequence: Synthetic oligonucleotide
  Antisense strand to SEQ ID NO: 770756
uccuuuccggugauaaacg

SEQ ID NO: 770758 - RNA, 19 nt, Artificial Sequence
  Description of Artificial Sequence: Synthetic oligonucleotide
  Sense strand starting at position 2961 of SEQ ID NO: 587154
gaguaugcgccugugugua

SEQ ID NO: 770759 - RNA, 19 nt, Artificial Sequence
  Description of Artificial Sequence: Synthetic oligonucleotide
  Antisense strand to SEQ ID NO: 770758
uacacacaggcgcauacuc

SEQ ID NO: 770760 - RNA, 19 nt, Artificial Sequence
  Description of Artificial Sequence: Synthetic oligonucleotide
  Sense strand starting at position 3672 of SEQ ID NO: 587154
ucacuucuaccgugaauaa

SEQ ID NO: 770761 - RNA, 19 nt, Artificial Sequence
  Description of Artificial Sequence: Synthetic oligonucleotide
  Antisense strand to SEQ ID NO: 770760
uuauucacgguagaaguga

SEQ ID NO: 770762 - RNA, 19 nt, Artificial Sequence
  Description of Artificial Sequence: Synthetic oligonucleotide
  Sense strand starting at position 3676 of SEQ ID NO: 587154
uucuaccgugaauaaagua

SEQ ID NO: 770763 - RNA, 19 nt, Artificial Sequence
  Description of Artificial Sequence: Synthetic oligonucleotide
  Antisense strand to SEQ ID NO: 770762
uacuuuauucacgguagaa

SEQ ID NO: 770764 - RNA, 19 nt, Artificial Sequence
  Description of Artificial Sequence: Synthetic oligonucleotide
  Sense strand starting at position 3681 of SEQ ID NO: 587154
ccgugaauaaaguaggagu

SEQ ID NO: 770765 - RNA, 19 nt, Artificial Sequence
  Description of Artificial Sequence: Synthetic oligonucleotide
  Antisense strand to SEQ ID NO: 770764
acuccuacuuuauucacgg

SEQ ID NO: 770766 - RNA, 19 nt, Artificial Sequence
  Description of Artificial Sequence: Synthetic oligonucleotide
  Sense strand starting at position 3719 of SEQ ID NO: 587154
aagguagacaguuguauga

SEQ ID NO: 770767 - RNA, 19 nt, Artificial Sequence
  Description of Artificial Sequence: Synthetic oligonucleotide
  Antisense strand to SEQ ID NO: 770766
ucauacaacugucuaccuu

SEQ ID NO: 770768 - RNA, 19 nt, Artificial Sequence
  Description of Artificial Sequence: Synthetic oligonucleotide
  Sense strand starting at position 3723 of SEQ ID NO: 587154
uagacaguuguaugauucu

SEQ ID NO: 770769 - RNA, 19 nt, Artificial Sequence
  Description of Artificial Sequence: Synthetic oligonucleotide
  Antisense strand to SEQ ID NO: 770768
agaaucauacaacugucua

SEQ ID NO: 770770 - RNA, 19 nt, Artificial Sequence
  Description of Artificial Sequence: Synthetic oligonucleotide
  Sense strand starting at position 3729 of SEQ ID NO: 587154
guuguaugauucucucaug

SEQ ID NO: 770771 - RNA, 19 nt, Artificial Sequence
  Description of Artificial Sequence: Synthetic oligonucleotide
  Antisense strand to SEQ ID NO: 770770
caugagagaaucauacaac

SEQ ID NO: 770772 - RNA, 19 nt, Artificial Sequence
  Description of Artificial Sequence: Synthetic oligonucleotide
  Sense strand starting at position 3735 of SEQ ID NO: 587154
ugauucucucauggagauu

SEQ ID NO: 770773 - RNA, 19 nt, Artificial Sequence
  Description of Artificial Sequence: Synthetic oligonucleotide
  Antisense strand to SEQ ID NO: 770772
aaucuccaugagagaauca

SEQ ID NO: 770774 - RNA, 19 nt, Artificial Sequence
  Description of Artificial Sequence: Synthetic oligonucleotide
  Sense strand starting at position 3744 of SEQ ID NO: 587154
cauggagauuaugauuuga

SEQ ID NO: 770775 - RNA, 19 nt, Artificial Sequence
  Description of Artificial Sequence: Synthetic oligonucleotide
  Antisense strand to SEQ ID NO: 770774
ucaaaucauaaucuccaug

SEQ ID NO: 770776 - RNA, 19 nt, Artificial Sequence
  Description of Artificial Sequence: Synthetic oligonucleotide
  Sense strand starting at position 3749 of SEQ ID NO: 587154
agauuaugauuugaaacca

SEQ ID NO: 770777 - RNA, 19 nt, Artificial Sequence
  Description of Artificial Sequence: Synthetic oligonucleotide
  Antisense strand to SEQ ID NO: 770776
ugguuucaaaucauaaucu

SEQ ID NO: 770778 - RNA, 19 nt, Artificial Sequence
  Description of Artificial Sequence: Synthetic oligonucleotide
  Sense strand starting at position 3829 of SEQ ID NO: 587154
guguuagaaguacauggaa

SEQ ID NO: 770779 - RNA, 19 nt, Artificial Sequence
  Description of Artificial Sequence: Synthetic oligonucleotide
  Antisense strand to SEQ ID NO: 770778
uuccauguacuucuaacac

SEQ ID NO: 770780 - RNA, 19 nt, Artificial Sequence
  Description of Artificial Sequence: Synthetic oligonucleotide
  Sense strand starting at position 3831 of SEQ ID NO: 587154
guuagaaguacauggaaug

SEQ ID NO: 770781 - RNA, 19 nt, Artificial Sequence
  Description of Artificial Sequence: Synthetic oligonucleotide
  Antisense strand to SEQ ID NO: 770780
cauuccauguacuucuaac

SEQ ID NO: 770782 - RNA, 19 nt, Artificial Sequence
  Description of Artificial Sequence: Synthetic oligonucleotide
  Sense strand starting at position 3845 of SEQ ID NO: 587154
gaaugugaccaucagcuua

SEQ ID NO: 770783 - RNA, 19 nt, Artificial Sequence
  Description of Artificial Sequence: Synthetic oligonucleotide
  Antisense strand to SEQ ID NO: 770782
uaagcugauggucacauuc

SEQ ID NO: 770784 - RNA, 19 nt, Artificial Sequence
  Description of Artificial Sequence: Synthetic oligonucleotide
  Sense strand starting at position 26 of SEQ ID NO: 587155
aggcaaaggauaugauguu

SEQ ID NO: 770785 - RNA, 19 nt, Artificial Sequence
  Description of Artificial Sequence: Synthetic oligonucleotide
  Antisense strand to SEQ ID NO: 770784
aacaucauauccuuugccu

SEQ ID NO: 770786 - RNA, 19 nt, Artificial Sequence
  Description of Artificial Sequence: Synthetic oligonucleotide
  Sense strand starting at position 59 of SEQ ID NO: 587155
augacuuaacugugcuaga

SEQ ID NO: 770787 - RNA, 19 nt, Artificial Sequence
  Description of Artificial Sequence: Synthetic oligonucleotide
  Antisense strand to SEQ ID NO: 770786
ucuagcacaguuaagucau

SEQ ID NO: 770788 - RNA, 19 nt, Artificial Sequence
  Description of Artificial Sequence: Synthetic oligonucleotide
  Sense strand starting at position 60 of SEQ ID NO: 587155
ugacuuaacugugcuagac

SEQ ID NO: 770789 - RNA, 19 nt, Artificial Sequence
  Description of Artificial Sequence: Synthetic oligonucleotide
  Antisense strand to SEQ ID NO: 770788
gucuagcacaguuaaguca

SEQ ID NO: 770790 - RNA, 19 nt, Artificial Sequence
  Description of Artificial Sequence: Synthetic oligonucleotide
  Sense strand starting at position 667 of SEQ ID NO: 587155
ugguucuacucuuuaggaa

SEQ ID NO: 770791 - RNA, 19 nt, Artificial Sequence
  Description of Artificial Sequence: Synthetic oligonucleotide
  Antisense strand to SEQ ID NO: 770790
uuccuaaagaguagaacca

SEQ ID NO: 770792 - RNA, 19 nt, Artificial Sequence
  Description of Artificial Sequence: Synthetic oligonucleotide
  Sense strand starting at position 668 of SEQ ID NO: 587155
gguucuacucuuuaggaac

SEQ ID NO: 770793 - RNA, 19 nt, Artificial Sequence
  Description of Artificial Sequence: Synthetic oligonucleotide
  Antisense strand to SEQ ID NO: 770792
guuccuaaagaguagaacc

SEQ ID NO: 770794 - RNA, 19 nt, Artificial Sequence
  Description of Artificial Sequence: Synthetic oligonucleotide
  Sense strand starting at position 751 of SEQ ID NO: 587155
augugccuuuauuuaucua

SEQ ID NO: 770795 - RNA, 19 nt, Artificial Sequence
  Description of Artificial Sequence: Synthetic oligonucleotide
  Antisense strand to SEQ ID NO: 770794
uagauaaauaaaggcacau

SEQ ID NO: 770796 - RNA, 19 nt, Artificial Sequence
  Description of Artificial Sequence: Synthetic oligonucleotide
  Sense strand starting at position 781 of SEQ ID NO: 587155
ccauuagaacagcagaguu

SEQ ID NO: 770797 - RNA, 19 nt, Artificial Sequence
  Description of Artificial Sequence: Synthetic oligonucleotide
  Antisense strand to SEQ ID NO: 770796
aacucugcuguucuaaugg

SEQ ID NO: 770798 - RNA, 19 nt, Artificial Sequence
  Description of Artificial Sequence: Synthetic oligonucleotide
  Sense strand starting at position 1099 of SEQ ID NO: 587155
ucaaaugguccuugaaacu

SEQ ID NO: 770799 - RNA, 19 nt, Artificial Sequence
  Description of Artificial Sequence: Synthetic oligonucleotide
  Antisense strand to SEQ ID NO: 770798
aguuucaaggaccauuuga

SEQ ID NO: 770800 - RNA, 19 nt, Artificial Sequence
  Description of Artificial Sequence: Synthetic oligonucleotide
  Sense strand starting at position 1177 of SEQ ID NO: 587155
ugugcaauacuguaauucu

SEQ ID NO: 770801 - RNA, 19 nt, Artificial Sequence
  Description of Artificial Sequence: Synthetic oligonucleotide
  Antisense strand to SEQ ID NO: 770800
agaauuacaguauugcaca

SEQ ID NO: 770802 - RNA, 19 nt, Artificial Sequence
  Description of Artificial Sequence: Synthetic oligonucleotide
  Sense strand starting at position 1281 of SEQ ID NO: 587155
acaguaagugcuggacacu

SEQ ID NO: 770803 - RNA, 19 nt, Artificial Sequence
  Description of Artificial Sequence: Synthetic oligonucleotide
  Antisense strand to SEQ ID NO: 770802
aguguccagcacuuacugu

SEQ ID NO: 770804 - RNA, 19 nt, Artificial Sequence
  Description of Artificial Sequence: Synthetic oligonucleotide
  Sense strand starting at position 1282 of SEQ ID NO: 587155
caguaagugcuggacacuu

SEQ ID NO: 770805 - RNA, 19 nt, Artificial Sequence
  Description of Artificial Sequence: Synthetic oligonucleotide
  Antisense strand to SEQ ID NO: 770804
aaguguccagcacuuacug

SEQ ID NO: 770806 - RNA, 19 nt, Artificial Sequence
  Description of Artificial Sequence: Synthetic oligonucleotide
  Sense strand starting at position 1559 of SEQ ID NO: 587155
cauaacucuugggaggaga

SEQ ID NO: 770807 - RNA, 19 nt, Artificial Sequence
  Description of Artificial Sequence: Synthetic oligonucleotide
  Antisense strand to SEQ ID NO: 770806
ucuccucccaagaguuaug

SEQ ID NO: 770808 - RNA, 19 nt, Artificial Sequence
  Description of Artificial Sequence: Synthetic oligonucleotide
  Sense strand starting at position 1575 of SEQ ID NO: 587155
agagaccucguauguuaua

SEQ ID NO: 770809 - RNA, 19 nt, Artificial Sequence
  Description of Artificial Sequence: Synthetic oligonucleotide
  Antisense strand to SEQ ID NO: 770808
uauaacauacgaggucucu

SEQ ID NO: 770810 - RNA, 19 nt, Artificial Sequence
  Description of Artificial Sequence: Synthetic oligonucleotide
  Sense strand starting at position 1576 of SEQ ID NO: 587155
gagaccucguauguuauau

SEQ ID NO: 770811 - RNA, 19 nt, Artificial Sequence
  Description of Artificial Sequence: Synthetic oligonucleotide
  Antisense strand to SEQ ID NO: 770810
auauaacauacgaggucuc

SEQ ID NO: 770812 - RNA, 19 nt, Artificial Sequence
  Description of Artificial Sequence: Synthetic oligonucleotide
  Sense strand starting at position 1588 of SEQ ID NO: 587155
guuauaucgaucugggcag

SEQ ID NO: 770813 - RNA, 19 nt, Artificial Sequence
  Description of Artificial Sequence: Synthetic oligonucleotide
  Antisense strand to SEQ ID NO: 770812
cugcccagaucgauauaac

SEQ ID NO: 770814 - RNA, 19 nt, Artificial Sequence
  Description of Artificial Sequence: Synthetic oligonucleotide
  Sense strand starting at position 2202 of SEQ ID NO: 587155
aaacuuugguucguuauua

SEQ ID NO: 770815 - RNA, 19 nt, Artificial Sequence
  Description of Artificial Sequence: Synthetic oligonucleotide
  Antisense strand to SEQ ID NO: 770814
uaauaacgaaccaaaguuu

SEQ ID NO: 770816 - RNA, 19 nt, Artificial Sequence
  Description of Artificial Sequence: Synthetic oligonucleotide
  Sense strand starting at position 2226 of SEQ ID NO: 587155
uuagguaaagcuggucuua

SEQ ID NO: 770817 - RNA, 19 nt, Artificial Sequence
  Description of Artificial Sequence: Synthetic oligonucleotide
  Antisense strand to SEQ ID NO: 770816
uaagaccagcuuuaccuaa

SEQ ID NO: 770818 - RNA, 19 nt, Artificial Sequence
  Description of Artificial Sequence: Synthetic oligonucleotide
  Sense strand starting at position 2228 of SEQ ID NO: 587155
agguaaagcuggucuuaug

SEQ ID NO: 770819 - RNA, 19 nt, Artificial Sequence
  Description of Artificial Sequence: Synthetic oligonucleotide
  Antisense strand to SEQ ID NO: 770818
cauaagaccagcuuuaccu

SEQ ID NO: 770820 - RNA, 19 nt, Artificial Sequence
  Description of Artificial Sequence: Synthetic oligonucleotide
  Sense strand starting at position 2697 of SEQ ID NO: 587155
aguagcauuggccauuauu

SEQ ID NO: 770821 - RNA, 19 nt, Artificial Sequence
  Description of Artificial Sequence: Synthetic oligonucleotide
  Antisense strand to SEQ ID NO: 770820
aauaauggccaaugcuacu

SEQ ID NO: 770822 - RNA, 19 nt, Artificial Sequence
  Description of Artificial Sequence: Synthetic oligonucleotide
  Sense strand starting at position 2705 of SEQ ID NO: 587155
uggccauuauuaucaagau

SEQ ID NO: 770823 - RNA, 19 nt, Artificial Sequence
  Description of Artificial Sequence: Synthetic oligonucleotide
  Antisense strand to SEQ ID NO: 770822
aucuugauaauaauggcca

SEQ ID NO: 770824 - RNA, 19 nt, Artificial Sequence
  Description of Artificial Sequence: Synthetic oligonucleotide
  Sense strand starting at position 2810 of SEQ ID NO: 587155
agcauauaccaaugaagua

SEQ ID NO: 770825 - RNA, 19 nt, Artificial Sequence
  Description of Artificial Sequence: Synthetic oligonucleotide
  Antisense strand to SEQ ID NO: 770824
uacuucauugguauaugcu

SEQ ID NO: 770826 - RNA, 19 nt, Artificial Sequence
  Description of Artificial Sequence: Synthetic oligonucleotide
  Sense strand starting at position 2822 of SEQ ID NO: 587155
ugaaguauuucucaugggu

SEQ ID NO: 770827 - RNA, 19 nt, Artificial Sequence
  Description of Artificial Sequence: Synthetic oligonucleotide
  Antisense strand to SEQ ID NO: 770826
acccaugagaaauacuuca

SEQ ID NO: 770828 - RNA, 19 nt, Artificial Sequence
  Description of Artificial Sequence: Synthetic oligonucleotide
  Sense strand starting at position 2904 of SEQ ID NO: 587155
cucuuacguccugaaacaa

SEQ ID NO: 770829 - RNA, 19 nt, Artificial Sequence
  Description of Artificial Sequence: Synthetic oligonucleotide
  Antisense strand to SEQ ID NO: 770828
uuguuucaggacguaagag

SEQ ID NO: 770830 - RNA, 19 nt, Artificial Sequence
  Description of Artificial Sequence: Synthetic oligonucleotide
  Sense strand starting at position 2924 of SEQ ID NO: 587155
ugggcuuuaccgggugaca

SEQ ID NO: 770831 - RNA, 19 nt, Artificial Sequence
  Description of Artificial Sequence: Synthetic oligonucleotide
  Antisense strand to SEQ ID NO: 770830
ugucacccgguaaagccca

SEQ ID NO: 770832 - RNA, 19 nt, Artificial Sequence
  Description of Artificial Sequence: Synthetic oligonucleotide
  Sense strand starting at position 2975 of SEQ ID NO: 587155
agguuaguuuaauugagag

SEQ ID NO: 770833 - RNA, 19 nt, Artificial Sequence
  Description of Artificial Sequence: Synthetic oligonucleotide
  Antisense strand to SEQ ID NO: 770832
cucucaauuaaacuaaccu

SEQ ID NO: 770834 - RNA, 19 nt, Artificial Sequence
  Description of Artificial Sequence: Synthetic oligonucleotide
  Sense strand starting at position 2981 of SEQ ID NO: 587155
guuuaauugagaggcuuga

SEQ ID NO: 770835 - RNA, 19 nt, Artificial Sequence
  Description of Artificial Sequence: Synthetic oligonucleotide
  Antisense strand to SEQ ID NO: 770834
ucaagccucucaauuaaac

SEQ ID NO: 770836 - RNA, 19 nt, Artificial Sequence
  Description of Artificial Sequence: Synthetic oligonucleotide
  Sense strand starting at position 2985 of SEQ ID NO: 587155
aauugagaggcuugaugag

SEQ ID NO: 770837 - RNA, 19 nt, Artificial Sequence
  Description of Artificial Sequence: Synthetic oligonucleotide
  Antisense strand to SEQ ID NO: 770836
cucaucaagccucucaauu

SEQ ID NO: 770838 - RNA, 19 nt, Artificial Sequence
  Description of Artificial Sequence: Synthetic oligonucleotide
  Sense strand starting at position 3110 of SEQ ID NO: 587155
gaaugagguuggucugguu

SEQ ID NO: 770839 - RNA, 19 nt, Artificial Sequence
  Description of Artificial Sequence: Synthetic oligonucleotide
  Antisense strand to SEQ ID NO: 770838
aaccagaccaaccucauuc

SEQ ID NO: 770840 - RNA, 19 nt, Artificial Sequence
  Description of Artificial Sequence: Synthetic oligonucleotide
  Sense strand starting at position 3193 of SEQ ID NO: 587155
gacggagucucauugcacu

SEQ ID NO: 770841 - RNA, 19 nt, Artificial Sequence
  Description of Artificial Sequence: Synthetic oligonucleotide
  Antisense strand to SEQ ID NO: 770840
agugcaaugagacuccguc

SEQ ID NO: 770842 - RNA, 19 nt, Artificial Sequence
  Description of Artificial Sequence: Synthetic oligonucleotide
  Sense strand starting at position 3484 of SEQ ID NO: 587155
cacuucuauccggaguaga

SEQ ID NO: 770843 - RNA, 19 nt, Artificial Sequence
  Description of Artificial Sequence: Synthetic oligonucleotide
  Antisense strand to SEQ ID NO: 770842
ucuacuccggauagaagug

SEQ ID NO: 770844 - RNA, 19 nt, Artificial Sequence
  Description of Artificial Sequence: Synthetic oligonucleotide
  Sense strand starting at position 3531 of SEQ ID NO: 587155
uguggaaagguguggagaa

SEQ ID NO: 770845 - RNA, 19 nt, Artificial Sequence
  Description of Artificial Sequence: Synthetic oligonucleotide
  Antisense strand to SEQ ID NO: 770844
uucuccacaccuuuccaca

SEQ ID NO: 770846 - RNA, 19 nt, Artificial Sequence
  Description of Artificial Sequence: Synthetic oligonucleotide
  Sense strand starting at position 3693 of SEQ ID NO: 587155
cucuguaaugaggauaugu

SEQ ID NO: 770847 - RNA, 19 nt, Artificial Sequence
  Description of Artificial Sequence: Synthetic oligonucleotide
  Antisense strand to SEQ ID NO: 770846
acauauccucauuacagag

SEQ ID NO: 770848 - RNA, 19 nt, Artificial Sequence
  Description of Artificial Sequence: Synthetic oligonucleotide
  Sense strand starting at position 3695 of SEQ ID NO: 587155
cuguaaugaggauaugugu

SEQ ID NO: 770849 - RNA, 19 nt, Artificial Sequence
  Description of Artificial Sequence: Synthetic oligonucleotide
  Antisense strand to SEQ ID NO: 770848
acacauauccucauuacag

SEQ ID NO: 770850 - RNA, 19 nt, Artificial Sequence
  Description of Artificial Sequence: Synthetic oligonucleotide
  Sense strand starting at position 3698 of SEQ ID NO: 587155
uaaugaggauauguguaua

SEQ ID NO: 770851 - RNA, 19 nt, Artificial Sequence
  Description of Artificial Sequence: Synthetic oligonucleotide
  Antisense strand to SEQ ID NO: 770850
uauacacauauccucauua

SEQ ID NO: 770852 - RNA, 19 nt, Artificial Sequence
  Description of Artificial Sequence: Synthetic oligonucleotide
  Sense strand starting at position 3832 of SEQ ID NO: 587155
gcugcucuaggcuaaauua

SEQ ID NO: 770853 - RNA, 19 nt, Artificial Sequence
  Description of Artificial Sequence: Synthetic oligonucleotide
  Antisense strand to SEQ ID NO: 770852
uaauuuagccuagagcagc

SEQ ID NO: 770854 - RNA, 19 nt, Artificial Sequence
  Description of Artificial Sequence: Synthetic oligonucleotide
  Sense strand starting at position 3882 of SEQ ID NO: 587155
gaagacaugucagcugaac

SEQ ID NO: 770855 - RNA, 19 nt, Artificial Sequence
  Description of Artificial Sequence: Synthetic oligonucleotide
  Antisense strand to SEQ ID NO: 770854
guucagcugacaugucuuc

SEQ ID NO: 770856 - RNA, 19 nt, Artificial Sequence
  Description of Artificial Sequence: Synthetic oligonucleotide
  Sense strand starting at position 3899 of SEQ ID NO: 587155
acuaguuuaguccauuaag

SEQ ID NO: 770857 - RNA, 19 nt, Artificial Sequence
  Description of Artificial Sequence: Synthetic oligonucleotide
  Antisense strand to SEQ ID NO: 770856
cuuaauggacuaaacuagu

SEQ ID NO: 770858 - RNA, 19 nt, Artificial Sequence
  Description of Artificial Sequence: Synthetic oligonucleotide
  Sense strand starting at position 3924 of SEQ ID NO: 587155
ccuguucgugugagugcaa

SEQ ID NO: 770859 - RNA, 19 nt, Artificial Sequence
  Description of Artificial Sequence: Synthetic oligonucleotide
  Antisense strand to SEQ ID NO: 770858
uugcacucacacgaacagg

SEQ ID NO: 770860 - RNA, 19 nt, Artificial Sequence
  Description of Artificial Sequence: Synthetic oligonucleotide
  Sense strand starting at position 3927 of SEQ ID NO: 587155
guucgugugagugcaacau

SEQ ID NO: 770861 - RNA, 19 nt, Artificial Sequence
  Description of Artificial Sequence: Synthetic oligonucleotide
  Antisense strand to SEQ ID NO: 770860
auguugcacucacacgaac

SEQ ID NO: 770862 - RNA, 19 nt, Artificial Sequence
  Description of Artificial Sequence: Synthetic oligonucleotide
  Sense strand starting at position 3966 of SEQ ID NO: 587155
uuuaaugcuccggaaacau

SEQ ID NO: 770863 - RNA, 19 nt, Artificial Sequence
  Description of Artificial Sequence: Synthetic oligonucleotide
  Antisense strand to SEQ ID NO: 770862
auguuuccggagcauuaaa

SEQ ID NO: 770864 - RNA, 19 nt, Artificial Sequence
  Description of Artificial Sequence: Synthetic oligonucleotide
  Sense strand starting at position 21 of SEQ ID NO: 587156
uuaaauguaucuuuggcau

SEQ ID NO: 770865 - RNA, 19 nt, Artificial Sequence
  Description of Artificial Sequence: Synthetic oligonucleotide
  Antisense strand to SEQ ID NO: 770864
augccaaagauacauuuaa

SEQ ID NO: 770866 - RNA, 19 nt, Artificial Sequence
  Description of Artificial Sequence: Synthetic oligonucleotide
  Sense strand starting at position 72 of SEQ ID NO: 587156
ucuguaaugcuugauguuu

SEQ ID NO: 770867 - RNA, 19 nt, Artificial Sequence
  Description of Artificial Sequence: Synthetic oligonucleotide
  Antisense strand to SEQ ID NO: 770866
aaacaucaagcauuacaga

SEQ ID NO: 770868 - RNA, 19 nt, Artificial Sequence
  Description of Artificial Sequence: Synthetic oligonucleotide
  Sense strand starting at position 389 of SEQ ID NO: 587156
ugguaucuuacagguagaa

SEQ ID NO: 770869 - RNA, 19 nt, Artificial Sequence
  Description of Artificial Sequence: Synthetic oligonucleotide
  Antisense strand to SEQ ID NO: 770868
uucuaccuguaagauacca

SEQ ID NO: 770870 - RNA, 19 nt, Artificial Sequence
  Description of Artificial Sequence: Synthetic oligonucleotide
  Sense strand starting at position 417 of SEQ ID NO: 587156
augguacacuuaguguauu

SEQ ID NO: 770871 - RNA, 19 nt, Artificial Sequence
  Description of Artificial Sequence: Synthetic oligonucleotide
  Antisense strand to SEQ ID NO: 770870
aauacacuaaguguaccau

SEQ ID NO: 770872 - RNA, 19 nt, Artificial Sequence
  Description of Artificial Sequence: Synthetic oligonucleotide
  Sense strand starting at position 448 of SEQ ID NO: 587156
agagcauacuccuuaaagg

SEQ ID NO: 770873 - RNA, 19 nt, Artificial Sequence
  Description of Artificial Sequence: Synthetic oligonucleotide
  Antisense strand to SEQ ID NO: 770872
ccuuuaaggaguaugcucu

SEQ ID NO: 770874 - RNA, 19 nt, Artificial Sequence
  Description of Artificial Sequence: Synthetic oligonucleotide
  Sense strand starting at position 598 of SEQ ID NO: 587156
cuuauaguagcauaaugua

SEQ ID NO: 770875 - RNA, 19 nt, Artificial Sequence
  Description of Artificial Sequence: Synthetic oligonucleotide
  Antisense strand to SEQ ID NO: 770874
uacauuaugcuacuauaag

SEQ ID NO: 770876 - RNA, 19 nt, Artificial Sequence
  Description of Artificial Sequence: Synthetic oligonucleotide
  Sense strand starting at position 631 of SEQ ID NO: 587156
aggucucuccuuuagaaua

SEQ ID NO: 770877 - RNA, 19 nt, Artificial Sequence
  Description of Artificial Sequence: Synthetic oligonucleotide
  Antisense strand to SEQ ID NO: 770876
uauucuaaaggagagaccu

SEQ ID NO: 770878 - RNA, 19 nt, Artificial Sequence
  Description of Artificial Sequence: Synthetic oligonucleotide
  Sense strand starting at position 676 of SEQ ID NO: 587156
ggauguguaaccugugaug

SEQ ID NO: 770879 - RNA, 19 nt, Artificial Sequence
  Description of Artificial Sequence: Synthetic oligonucleotide
  Antisense strand to SEQ ID NO: 770878
caucacagguuacacaucc

SEQ ID NO: 770880 - RNA, 19 nt, Artificial Sequence
  Description of Artificial Sequence: Synthetic oligonucleotide
  Sense strand starting at position 915 of SEQ ID NO: 587156
ugaugagaagucugguuuc

SEQ ID NO: 770881 - RNA, 19 nt, Artificial Sequence
  Description of Artificial Sequence: Synthetic oligonucleotide
  Antisense strand to SEQ ID NO: 770880
gaaaccagacuucucauca

SEQ ID NO: 770882 - RNA, 19 nt, Artificial Sequence
  Description of Artificial Sequence: Synthetic oligonucleotide
  Sense strand starting at position 918 of SEQ ID NO: 587156
ugagaagucugguuucaga

SEQ ID NO: 770883 - RNA, 19 nt, Artificial Sequence
  Description of Artificial Sequence: Synthetic oligonucleotide
  Antisense strand to SEQ ID NO: 770882
ucugaaaccagacuucuca

SEQ ID NO: 770884 - RNA, 19 nt, Artificial Sequence
  Description of Artificial Sequence: Synthetic oligonucleotide
  Sense strand starting at position 973 of SEQ ID NO: 587156
aagcucuguggguagugau

SEQ ID NO: 770885 - RNA, 19 nt, Artificial Sequence
  Description of Artificial Sequence: Synthetic oligonucleotide
  Antisense strand to SEQ ID NO: 770884
aucacuacccacagagcuu

SEQ ID NO: 770886 - RNA, 19 nt, Artificial Sequence
  Description of Artificial Sequence: Synthetic oligonucleotide
  Sense strand starting at position 1154 of SEQ ID NO: 587156
cagcuuuagcggcaauuua

SEQ ID NO: 770887 - RNA, 19 nt, Artificial Sequence
  Description of Artificial Sequence: Synthetic oligonucleotide
  Antisense strand to SEQ ID NO: 770886
uaaauugccgcuaaagcug

SEQ ID NO: 770888 - RNA, 19 nt, Artificial Sequence
  Description of Artificial Sequence: Synthetic oligonucleotide
  Sense strand starting at position 1235 of SEQ ID NO: 587156
guaggcugcacacagaaau

SEQ ID NO: 770889 - RNA, 19 nt, Artificial Sequence
  Description of Artificial Sequence: Synthetic oligonucleotide
  Antisense strand to SEQ ID NO: 770888
auuucugugugcagccuac

SEQ ID NO: 770890 - RNA, 19 nt, Artificial Sequence
  Description of Artificial Sequence: Synthetic oligonucleotide
  Sense strand starting at position 1374 of SEQ ID NO: 587156
cccuuauuguccucugaca

SEQ ID NO: 770891 - RNA, 19 nt, Artificial Sequence
  Description of Artificial Sequence: Synthetic oligonucleotide
  Antisense strand to SEQ ID NO: 770890
ugucagaggacaauaaggg

SEQ ID NO: 770892 - RNA, 19 nt, Artificial Sequence
  Description of Artificial Sequence: Synthetic oligonucleotide
  Sense strand starting at position 1503 of SEQ ID NO: 587156
ccauaauaaguauagugua

SEQ ID NO: 770893 - RNA, 19 nt, Artificial Sequence
  Description of Artificial Sequence: Synthetic oligonucleotide
  Antisense strand to SEQ ID NO: 770892
uacacuauacuuauuaugg

SEQ ID NO: 770894 - RNA, 19 nt, Artificial Sequence
  Description of Artificial Sequence: Synthetic oligonucleotide
  Sense strand starting at position 1609 of SEQ ID NO: 587156
guuucuaacgcaucccgua

SEQ ID NO: 770895 - RNA, 19 nt, Artificial Sequence
  Description of Artificial Sequence: Synthetic oligonucleotide
  Antisense strand to SEQ ID NO: 770894
uacgggaugcguuagaaac

SEQ ID NO: 770896 - RNA, 19 nt, Artificial Sequence
  Description of Artificial Sequence: Synthetic oligonucleotide
  Sense strand starting at position 1665 of SEQ ID NO: 587156
ucaaguaaccaucgagaaa

SEQ ID NO: 770897 - RNA, 19 nt, Artificial Sequence
  Description of Artificial Sequence: Synthetic oligonucleotide
  Antisense strand to SEQ ID NO: 770896
uuucucgaugguuacuuga

SEQ ID NO: 770898 - RNA, 19 nt, Artificial Sequence
  Description of Artificial Sequence: Synthetic oligonucleotide
  Sense strand starting at position 2143 of SEQ ID NO: 587156
uguugaugugugccuguga

SEQ ID NO: 770899 - RNA, 19 nt, Artificial Sequence
  Description of Artificial Sequence: Synthetic oligonucleotide
  Antisense strand to SEQ ID NO: 770898
ucacaggcacacaucaaca

SEQ ID NO: 770900 - RNA, 19 nt, Artificial Sequence
  Description of Artificial Sequence: Synthetic oligonucleotide
  Sense strand starting at position 2146 of SEQ ID NO: 587156
ugaugugugccugugaguu

SEQ ID NO: 770901 - RNA, 19 nt, Artificial Sequence
  Description of Artificial Sequence: Synthetic oligonucleotide
  Antisense strand to SEQ ID NO: 770900
aacucacaggcacacauca

SEQ ID NO: 770902 - RNA, 19 nt, Artificial Sequence
  Description of Artificial Sequence: Synthetic oligonucleotide
  Sense strand starting at position 2357 of SEQ ID NO: 587156
uuuggaaucuccucugcau

SEQ ID NO: 770903 - RNA, 19 nt, Artificial Sequence
  Description of Artificial Sequence: Synthetic oligonucleotide
  Antisense strand to SEQ ID NO: 770902
augcagaggagauuccaaa

SEQ ID NO: 770904 - RNA, 19 nt, Artificial Sequence
  Description of Artificial Sequence: Synthetic oligonucleotide
  Sense strand starting at position 2454 of SEQ ID NO: 587156
uguagccaauuugagauua

SEQ ID NO: 770905 - RNA, 19 nt, Artificial Sequence
  Description of Artificial Sequence: Synthetic oligonucleotide
  Antisense strand to SEQ ID NO: 770904
uaaucucaaauuggcuaca

SEQ ID NO: 770906 - RNA, 19 nt, Artificial Sequence
  Description of Artificial Sequence: Synthetic oligonucleotide
  Sense strand starting at position 2456 of SEQ ID NO: 587156
uagccaauuugagauuagu

SEQ ID NO: 770907 - RNA, 19 nt, Artificial Sequence
  Description of Artificial Sequence: Synthetic oligonucleotide
  Antisense strand to SEQ ID NO: 770906
acuaaucucaaauuggcua

SEQ ID NO: 770908 - RNA, 19 nt, Artificial Sequence
  Description of Artificial Sequence: Synthetic oligonucleotide
  Sense strand starting at position 2566 of SEQ ID NO: 587156
guaaacaguugguuuggua

SEQ ID NO: 770909 - RNA, 19 nt, Artificial Sequence
  Description of Artificial Sequence: Synthetic oligonucleotide
  Antisense strand to SEQ ID NO: 770908
uaccaaaccaacuguuuac

SEQ ID NO: 770910 - RNA, 19 nt, Artificial Sequence
  Description of Artificial Sequence: Synthetic oligonucleotide
  Sense strand starting at position 2703 of SEQ ID NO: 587156
ugagucaugugauuaugau

SEQ ID NO: 770911 - RNA, 19 nt, Artificial Sequence
  Description of Artificial Sequence: Synthetic oligonucleotide
  Antisense strand to SEQ ID NO: 770910
aucauaaucacaugacuca

SEQ ID NO: 770912 - RNA, 19 nt, Artificial Sequence
  Description of Artificial Sequence: Synthetic oligonucleotide
  Sense strand starting at position 2704 of SEQ ID NO: 587156
gagucaugugauuaugauu

SEQ ID NO: 770913 - RNA, 19 nt, Artificial Sequence
  Description of Artificial Sequence: Synthetic oligonucleotide
  Antisense strand to SEQ ID NO: 770912
aaucauaaucacaugacuc

SEQ ID NO: 770914 - RNA, 19 nt, Artificial Sequence
  Description of Artificial Sequence: Synthetic oligonucleotide
  Sense strand starting at position 2752 of SEQ ID NO: 587156
ccuugugucagguaccauu

SEQ ID NO: 770915 - RNA, 19 nt, Artificial Sequence
  Description of Artificial Sequence: Synthetic oligonucleotide
  Antisense strand to SEQ ID NO: 770914
aaugguaccugacacaagg

SEQ ID NO: 770916 - RNA, 19 nt, Artificial Sequence
  Description of Artificial Sequence: Synthetic oligonucleotide
  Sense strand starting at position 2767 of SEQ ID NO: 587156
cauuccaggcuuugggaua

SEQ ID NO: 770917 - RNA, 19 nt, Artificial Sequence
  Description of Artificial Sequence: Synthetic oligonucleotide
  Antisense strand to SEQ ID NO: 770916
uaucccaaagccuggaaug

SEQ ID NO: 770918 - RNA, 19 nt, Artificial Sequence
  Description of Artificial Sequence: Synthetic oligonucleotide
  Sense strand starting at position 2819 of SEQ ID NO: 587156
ucgacuuuauagucaugua

SEQ ID NO: 770919 - RNA, 19 nt, Artificial Sequence
  Description of Artificial Sequence: Synthetic oligonucleotide
  Antisense strand to SEQ ID NO: 770918
uacaugacuauaaagucga

SEQ ID NO: 770920 - RNA, 19 nt, Artificial Sequence
  Description of Artificial Sequence: Synthetic oligonucleotide
  Sense strand starting at position 2865 of SEQ ID NO: 587156
auauaaguagcauaagguu

SEQ ID NO: 770921 - RNA, 19 nt, Artificial Sequence
  Description of Artificial Sequence: Synthetic oligonucleotide
  Antisense strand to SEQ ID NO: 770920
aaccuuaugcuacuuauau

SEQ ID NO: 770922 - RNA, 19 nt, Artificial Sequence
  Description of Artificial Sequence: Synthetic oligonucleotide
  Sense strand starting at position 2872 of SEQ ID NO: 587156
uagcauaagguuuguuaga

SEQ ID NO: 770923 - RNA, 19 nt, Artificial Sequence
  Description of Artificial Sequence: Synthetic oligonucleotide
  Antisense strand to SEQ ID NO: 770922
ucuaacaaaccuuaugcua

SEQ ID NO: 770924 - RNA, 19 nt, Artificial Sequence
  Description of Artificial Sequence: Synthetic oligonucleotide
  Sense strand starting at position 2873 of SEQ ID NO: 587156
agcauaagguuuguuagaa

SEQ ID NO: 770925 - RNA, 19 nt, Artificial Sequence
  Description of Artificial Sequence: Synthetic oligonucleotide
  Antisense strand to SEQ ID NO: 770924
uucuaacaaaccuuaugcu

SEQ ID NO: 770926 - RNA, 19 nt, Artificial Sequence
  Description of Artificial Sequence: Synthetic oligonucleotide
  Sense strand starting at position 2874 of SEQ ID NO: 587156
gcauaagguuuguuagaag

SEQ ID NO: 770927 - RNA, 19 nt, Artificial Sequence
  Description of Artificial Sequence: Synthetic oligonucleotide
  Antisense strand to SEQ ID NO: 770926
cuucuaacaaaccuuaugc

SEQ ID NO: 770928 - RNA, 19 nt, Artificial Sequence
  Description of Artificial Sequence: Synthetic oligonucleotide
  Sense strand starting at position 2933 of SEQ ID NO: 587156
caguaagaaccauaagugu

SEQ ID NO: 770929 - RNA, 19 nt, Artificial Sequence
  Description of Artificial Sequence: Synthetic oligonucleotide
  Antisense strand to SEQ ID NO: 770928
acacuuaugguucuuacug

SEQ ID NO: 770930 - RNA, 19 nt, Artificial Sequence
  Description of Artificial Sequence: Synthetic oligonucleotide
  Sense strand starting at position 2939 of SEQ ID NO: 587156
gaaccauaaguguguggga

SEQ ID NO: 770931 - RNA, 19 nt, Artificial Sequence
  Description of Artificial Sequence: Synthetic oligonucleotide
  Antisense strand to SEQ ID NO: 770930
ucccacacacuuaugguuc

SEQ ID NO: 770932 - RNA, 19 nt, Artificial Sequence
  Description of Artificial Sequence: Synthetic oligonucleotide
  Sense strand starting at position 2941 of SEQ ID NO: 587156
accauaagugugugggagu

SEQ ID NO: 770933 - RNA, 19 nt, Artificial Sequence
  Description of Artificial Sequence: Synthetic oligonucleotide
  Antisense strand to SEQ ID NO: 770932
acucccacacacuuauggu

SEQ ID NO: 770934 - RNA, 19 nt, Artificial Sequence
  Description of Artificial Sequence: Synthetic oligonucleotide
  Sense strand starting at position 3149 of SEQ ID NO: 587156
uugaauaaguaaguccaau

SEQ ID NO: 770935 - RNA, 19 nt, Artificial Sequence
  Description of Artificial Sequence: Synthetic oligonucleotide
  Antisense strand to SEQ ID NO: 770934
auuggacuuacuuauucaa

SEQ ID NO: 770936 - RNA, 19 nt, Artificial Sequence
  Description of Artificial Sequence: Synthetic oligonucleotide
  Sense strand starting at position 3245 of SEQ ID NO: 587156
auacaagaaugagaaauga

SEQ ID NO: 770937 - RNA, 19 nt, Artificial Sequence
  Description of Artificial Sequence: Synthetic oligonucleotide
  Antisense strand to SEQ ID NO: 770936
ucauuucucauucuuguau

SEQ ID NO: 770938 - RNA, 19 nt, Artificial Sequence
  Description of Artificial Sequence: Synthetic oligonucleotide
  Sense strand starting at position 3261 of SEQ ID NO: 587156
ugagauaaccacugaugca

SEQ ID NO: 770939 - RNA, 19 nt, Artificial Sequence
  Description of Artificial Sequence: Synthetic oligonucleotide
  Antisense strand to SEQ ID NO: 770938
ugcaucagugguuaucuca

SEQ ID NO: 770940 - RNA, 19 nt, Artificial Sequence
  Description of Artificial Sequence: Synthetic oligonucleotide
  Sense strand starting at position 3475 of SEQ ID NO: 587156
cuuugcaaucuuuaaggaa

SEQ ID NO: 770941 - RNA, 19 nt, Artificial Sequence
  Description of Artificial Sequence: Synthetic oligonucleotide
  Antisense strand to SEQ ID NO: 770940
uuccuuaaagauugcaaag

SEQ ID NO: 770942 - RNA, 19 nt, Artificial Sequence
  Description of Artificial Sequence: Synthetic oligonucleotide
  Sense strand starting at position 3699 of SEQ ID NO: 587156
cugguaguacuuuaucaaa

SEQ ID NO: 770943 - RNA, 19 nt, Artificial Sequence
  Description of Artificial Sequence: Synthetic oligonucleotide
  Antisense strand to SEQ ID NO: 770942
uuugauaaaguacuaccag

SEQ ID NO: 770944 - RNA, 19 nt, Artificial Sequence
  Description of Artificial Sequence: Synthetic oligonucleotide
  Sense strand starting at position 11 of SEQ ID NO: 587157
agugaaaucucugagaauc

SEQ ID NO: 770945 - RNA, 19 nt, Artificial Sequence
  Description of Artificial Sequence: Synthetic oligonucleotide
  Antisense strand to SEQ ID NO: 770944
gauucucagagauuucacu

SEQ ID NO: 770946 - RNA, 19 nt, Artificial Sequence
  Description of Artificial Sequence: Synthetic oligonucleotide
  Sense strand starting at position 13 of SEQ ID NO: 587157
ugaaaucucugagaaucuu

SEQ ID NO: 770947 - RNA, 19 nt, Artificial Sequence
  Description of Artificial Sequence: Synthetic oligonucleotide
  Antisense strand to SEQ ID NO: 770946
aagauucucagagauuuca

SEQ ID NO: 770948 - RNA, 19 nt, Artificial Sequence
  Description of Artificial Sequence: Synthetic oligonucleotide
  Sense strand starting at position 119 of SEQ ID NO: 587157
gugaauguaggccauggua

SEQ ID NO: 770949 - RNA, 19 nt, Artificial Sequence
  Description of Artificial Sequence: Synthetic oligonucleotide
  Antisense strand to SEQ ID NO: 770948
uaccauggccuacauucac

SEQ ID NO: 770950 - RNA, 19 nt, Artificial Sequence
  Description of Artificial Sequence: Synthetic oligonucleotide
  Sense strand starting at position 121 of SEQ ID NO: 587157
gaauguaggccaugguaaa

SEQ ID NO: 770951 - RNA, 19 nt, Artificial Sequence
  Description of Artificial Sequence: Synthetic oligonucleotide
  Antisense strand to SEQ ID NO: 770950
uuuaccauggccuacauuc

SEQ ID NO: 770952 - RNA, 19 nt, Artificial Sequence
  Description of Artificial Sequence: Synthetic oligonucleotide
  Sense strand starting at position 190 of SEQ ID NO: 587157
uuccgcuucuggguaaaua

SEQ ID NO: 770953 - RNA, 19 nt, Artificial Sequence
  Description of Artificial Sequence: Synthetic oligonucleotide
  Antisense strand to SEQ ID NO: 770952
uauuuacccagaagcggaa

SEQ ID NO: 770954 - RNA, 19 nt, Artificial Sequence
  Description of Artificial Sequence: Synthetic oligonucleotide
  Sense strand starting at position 279 of SEQ ID NO: 587157
ggcugaaauguggaagcaa

SEQ ID NO: 770955 - RNA, 19 nt, Artificial Sequence
  Description of Artificial Sequence: Synthetic oligonucleotide
  Antisense strand to SEQ ID NO: 770954
uugcuuccacauuucagcc

SEQ ID NO: 770956 - RNA, 19 nt, Artificial Sequence
  Description of Artificial Sequence: Synthetic oligonucleotide
  Sense strand starting at position 470 of SEQ ID NO: 587157
uaucuaaggucgccagaaa

SEQ ID NO: 770957 - RNA, 19 nt, Artificial Sequence
  Description of Artificial Sequence: Synthetic oligonucleotide
  Antisense strand to SEQ ID NO: 770956
uuucuggcgaccuuagaua

SEQ ID NO: 770958 - RNA, 19 nt, Artificial Sequence
  Description of Artificial Sequence: Synthetic oligonucleotide
  Sense strand starting at position 504 of SEQ ID NO: 587157
gacaaauuagaauggcagu

SEQ ID NO: 770959 - RNA, 19 nt, Artificial Sequence
  Description of Artificial Sequence: Synthetic oligonucleotide
  Antisense strand to SEQ ID NO: 770958
acugccauucuaauuuguc

SEQ ID NO: 770960 - RNA, 19 nt, Artificial Sequence
  Description of Artificial Sequence: Synthetic oligonucleotide
  Sense strand starting at position 536 of SEQ ID NO: 587157
gggagaagggaauguguuu

SEQ ID NO: 770961 - RNA, 19 nt, Artificial Sequence
  Description of Artificial Sequence: Synthetic oligonucleotide
  Antisense strand to SEQ ID NO: 770960
aaacacauucccuucuccc

SEQ ID NO: 770962 - RNA, 19 nt, Artificial Sequence
  Description of Artificial Sequence: Synthetic oligonucleotide
  Sense strand starting at position 541 of SEQ ID NO: 587157
aagggaauguguuuaauag

SEQ ID NO: 770963 - RNA, 19 nt, Artificial Sequence
  Description of Artificial Sequence: Synthetic oligonucleotide
  Antisense strand to SEQ ID NO: 770962
cuauuaaacacauucccuu

SEQ ID NO: 770964 - RNA, 19 nt, Artificial Sequence
  Description of Artificial Sequence: Synthetic oligonucleotide
  Sense strand starting at position 547 of SEQ ID NO: 587157
auguguuuaauagacacga

SEQ ID NO: 770965 - RNA, 19 nt, Artificial Sequence
  Description of Artificial Sequence: Synthetic oligonucleotide
  Antisense strand to SEQ ID NO: 770964
ucgugucuauuaaacacau

SEQ ID NO: 770966 - RNA, 19 nt, Artificial Sequence
  Description of Artificial Sequence: Synthetic oligonucleotide
  Sense strand starting at position 549 of SEQ ID NO: 587157
guguuuaauagacacgaau

SEQ ID NO: 770967 - RNA, 19 nt, Artificial Sequence
  Description of Artificial Sequence: Synthetic oligonucleotide
  Antisense strand to SEQ ID NO: 770966
auucgugucuauuaaacac

SEQ ID NO: 770968 - RNA, 19 nt, Artificial Sequence
  Description of Artificial Sequence: Synthetic oligonucleotide
  Sense strand starting at position 579 of SEQ ID NO: 587157
gaguucuggagacgauuga

SEQ ID NO: 770969 - RNA, 19 nt, Artificial Sequence
  Description of Artificial Sequence: Synthetic oligonucleotide
  Antisense strand to SEQ ID NO: 770968
ucaaucgucuccagaacuc

SEQ ID NO: 770970 - RNA, 19 nt, Artificial Sequence
  Description of Artificial Sequence: Synthetic oligonucleotide
  Sense strand starting at position 583 of SEQ ID NO: 587157
ucuggagacgauugacagu

SEQ ID NO: 770971 - RNA, 19 nt, Artificial Sequence
  Description of Artificial Sequence: Synthetic oligonucleotide
  Antisense strand to SEQ ID NO: 770970
acugucaaucgucuccaga

SEQ ID NO: 770972 - RNA, 19 nt, Artificial Sequence
  Description of Artificial Sequence: Synthetic oligonucleotide
  Sense strand starting at position 586 of SEQ ID NO: 587157
ggagacgauugacagugau

SEQ ID NO: 770973 - RNA, 19 nt, Artificial Sequence
  Description of Artificial Sequence: Synthetic oligonucleotide
  Antisense strand to SEQ ID NO: 770972
aucacugucaaucgucucc

SEQ ID NO: 770974 - RNA, 19 nt, Artificial Sequence
  Description of Artificial Sequence: Synthetic oligonucleotide
  Sense strand starting at position 596 of SEQ ID NO: 587157
gacagugauggcugcacaa

SEQ ID NO: 770975 - RNA, 19 nt, Artificial Sequence
  Description of Artificial Sequence: Synthetic oligonucleotide
  Antisense strand to SEQ ID NO: 770974
uugugcagccaucacuguc

SEQ ID NO: 770976 - RNA, 19 nt, Artificial Sequence
  Description of Artificial Sequence: Synthetic oligonucleotide
  Sense strand starting at position 644 of SEQ ID NO: 587157
ucacuacacgcuuaaagau

SEQ ID NO: 770977 - RNA, 19 nt, Artificial Sequence
  Description of Artificial Sequence: Synthetic oligonucleotide
  Antisense strand to SEQ ID NO: 770976
aucuuuaagcguguaguga

SEQ ID NO: 770978 - RNA, 19 nt, Artificial Sequence
  Description of Artificial Sequence: Synthetic oligonucleotide
  Sense strand starting at position 771 of SEQ ID NO: 587157
ccagcaaguccuuggcaaa

SEQ ID NO: 770979 - RNA, 19 nt, Artificial Sequence
  Description of Artificial Sequence: Synthetic oligonucleotide
  Antisense strand to SEQ ID NO: 770978
uuugccaaggacuugcugg

SEQ ID NO: 770980 - RNA, 19 nt, Artificial Sequence
  Description of Artificial Sequence: Synthetic oligonucleotide
  Sense strand starting at position 901 of SEQ ID NO: 587157
ccuucuuucgugccugagu

SEQ ID NO: 770981 - RNA, 19 nt, Artificial Sequence
  Description of Artificial Sequence: Synthetic oligonucleotide
  Antisense strand to SEQ ID NO: 770980
acucaggcacgaaagaagg

SEQ ID NO: 770982 - RNA, 19 nt, Artificial Sequence
  Description of Artificial Sequence: Synthetic oligonucleotide
  Sense strand starting at position 934 of SEQ ID NO: 587157
ccacgaauggucuggaagu

SEQ ID NO: 770983 - RNA, 19 nt, Artificial Sequence
  Description of Artificial Sequence: Synthetic oligonucleotide
  Antisense strand to SEQ ID NO: 770982
acuuccagaccauucgugg

SEQ ID NO: 770984 - RNA, 19 nt, Artificial Sequence
  Description of Artificial Sequence: Synthetic oligonucleotide
  Sense strand starting at position 936 of SEQ ID NO: 587157
acgaauggucuggaagugu

SEQ ID NO: 770985 - RNA, 19 nt, Artificial Sequence
  Description of Artificial Sequence: Synthetic oligonucleotide
  Antisense strand to SEQ ID NO: 770984
acacuuccagaccauucgu

SEQ ID NO: 770986 - RNA, 19 nt, Artificial Sequence
  Description of Artificial Sequence: Synthetic oligonucleotide
  Sense strand starting at position 944 of SEQ ID NO: 587157
ucuggaagugucuguguua

SEQ ID NO: 770987 - RNA, 19 nt, Artificial Sequence
  Description of Artificial Sequence: Synthetic oligonucleotide
  Antisense strand to SEQ ID NO: 770986
uaacacagacacuuccaga

SEQ ID NO: 770988 - RNA, 19 nt, Artificial Sequence
  Description of Artificial Sequence: Synthetic oligonucleotide
  Sense strand starting at position 945 of SEQ ID NO: 587157
cuggaagugucuguguuac

SEQ ID NO: 770989 - RNA, 19 nt, Artificial Sequence
  Description of Artificial Sequence: Synthetic oligonucleotide
  Antisense strand to SEQ ID NO: 770988
guaacacagacacuuccag

SEQ ID NO: 770990 - RNA, 19 nt, Artificial Sequence
  Description of Artificial Sequence: Synthetic oligonucleotide
  Sense strand starting at position 947 of SEQ ID NO: 587157
ggaagugucuguguuacuu

SEQ ID NO: 770991 - RNA, 19 nt, Artificial Sequence
  Description of Artificial Sequence: Synthetic oligonucleotide
  Antisense strand to SEQ ID NO: 770990
aaguaacacagacacuucc

SEQ ID NO: 770992 - RNA, 19 nt, Artificial Sequence
  Description of Artificial Sequence: Synthetic oligonucleotide
  Sense strand starting at position 951 of SEQ ID NO: 587157
gugucuguguuacuucuaa

SEQ ID NO: 770993 - RNA, 19 nt, Artificial Sequence
  Description of Artificial Sequence: Synthetic oligonucleotide
  Antisense strand to SEQ ID NO: 770992
uuagaaguaacacagacac

SEQ ID NO: 770994 - RNA, 19 nt, Artificial Sequence
  Description of Artificial Sequence: Synthetic oligonucleotide
  Sense strand starting at position 1009 of SEQ ID NO: 587157
gccuguaagcccuacagau

SEQ ID NO: 770995 - RNA, 19 nt, Artificial Sequence
  Description of Artificial Sequence: Synthetic oligonucleotide
  Antisense strand to SEQ ID NO: 770994
aucuguagggcuuacaggc

SEQ ID NO: 770996 - RNA, 19 nt, Artificial Sequence
  Description of Artificial Sequence: Synthetic oligonucleotide
  Sense strand starting at position 1068 of SEQ ID NO: 587157
accacuaguguccaacuaa

SEQ ID NO: 770997 - RNA, 19 nt, Artificial Sequence
  Description of Artificial Sequence: Synthetic oligonucleotide
  Antisense strand to SEQ ID NO: 770996
uuaguuggacacuaguggu

SEQ ID NO: 770998 - RNA, 19 nt, Artificial Sequence
  Description of Artificial Sequence: Synthetic oligonucleotide
  Sense strand starting at position 1108 of SEQ ID NO: 587157
aguucuagcugguugugau

SEQ ID NO: 770999 - RNA, 19 nt, Artificial Sequence
  Description of Artificial Sequence: Synthetic oligonucleotide
  Antisense strand to SEQ ID NO: 770998
aucacaaccagcuagaacu

SEQ ID NO: 771000 - RNA, 19 nt, Artificial Sequence
  Description of Artificial Sequence: Synthetic oligonucleotide
  Sense strand starting at position 1109 of SEQ ID NO: 587157
guucuagcugguugugaua

SEQ ID NO: 771001 - RNA, 19 nt, Artificial Sequence
  Description of Artificial Sequence: Synthetic oligonucleotide
  Antisense strand to SEQ ID NO: 771000
uaucacaaccagcuagaac

SEQ ID NO: 771002 - RNA, 19 nt, Artificial Sequence
  Description of Artificial Sequence: Synthetic oligonucleotide
  Sense strand starting at position 1134 of SEQ ID NO: 587157
cuugguaccucagugacuu

SEQ ID NO: 771003 - RNA, 19 nt, Artificial Sequence
  Description of Artificial Sequence: Synthetic oligonucleotide
  Antisense strand to SEQ ID NO: 771002
aagucacugagguaccaag

SEQ ID NO: 771004 - RNA, 19 nt, Artificial Sequence
  Description of Artificial Sequence: Synthetic oligonucleotide
  Sense strand starting at position 1283 of SEQ ID NO: 587157
gugggaaguguuggucuaa

SEQ ID NO: 771005 - RNA, 19 nt, Artificial Sequence
  Description of Artificial Sequence: Synthetic oligonucleotide
  Antisense strand to SEQ ID NO: 771004
uuagaccaacacuucccac

SEQ ID NO: 771006 - RNA, 19 nt, Artificial Sequence
  Description of Artificial Sequence: Synthetic oligonucleotide
  Sense strand starting at position 1284 of SEQ ID NO: 587157
ugggaaguguuggucuaaa

SEQ ID NO: 771007 - RNA, 19 nt, Artificial Sequence
  Description of Artificial Sequence: Synthetic oligonucleotide
  Antisense strand to SEQ ID NO: 771006
uuuagaccaacacuuccca

SEQ ID NO: 771008 - RNA, 19 nt, Artificial Sequence
  Description of Artificial Sequence: Synthetic oligonucleotide
  Sense strand starting at position 1335 of SEQ ID NO: 587157
agaacaucuuggcaugaag

SEQ ID NO: 771009 - RNA, 19 nt, Artificial Sequence
  Description of Artificial Sequence: Synthetic oligonucleotide
  Antisense strand to SEQ ID NO: 771008
cuucaugccaagauguucu

SEQ ID NO: 771010 - RNA, 19 nt, Artificial Sequence
  Description of Artificial Sequence: Synthetic oligonucleotide
  Sense strand starting at position 1354 of SEQ ID NO: 587157
cuuggaaaucugcacuacu

SEQ ID NO: 771011 - RNA, 19 nt, Artificial Sequence
  Description of Artificial Sequence: Synthetic oligonucleotide
  Antisense strand to SEQ ID NO: 771010
aguagugcagauuuccaag

SEQ ID NO: 771012 - RNA, 19 nt, Artificial Sequence
  Description of Artificial Sequence: Synthetic oligonucleotide
  Sense strand starting at position 1426 of SEQ ID NO: 587157
agaacuauauucuagaaug

SEQ ID NO: 771013 - RNA, 19 nt, Artificial Sequence
  Description of Artificial Sequence: Synthetic oligonucleotide
  Antisense strand to SEQ ID NO: 771012
cauucuagaauauaguucu

SEQ ID NO: 771014 - RNA, 19 nt, Artificial Sequence
  Description of Artificial Sequence: Synthetic oligonucleotide
  Sense strand starting at position 1464 of SEQ ID NO: 587157
uaauguugguuccucaaag

SEQ ID NO: 771015 - RNA, 19 nt, Artificial Sequence
  Description of Artificial Sequence: Synthetic oligonucleotide
  Antisense strand to SEQ ID NO: 771014
cuuugaggaaccaacauua

SEQ ID NO: 771016 - RNA, 19 nt, Artificial Sequence
  Description of Artificial Sequence: Synthetic oligonucleotide
  Sense strand starting at position 1497 of SEQ ID NO: 587157
cagauuccauuauaggaga

SEQ ID NO: 771017 - RNA, 19 nt, Artificial Sequence
  Description of Artificial Sequence: Synthetic oligonucleotide
  Antisense strand to SEQ ID NO: 771016
ucuccuauaauggaaucug

SEQ ID NO: 771018 - RNA, 19 nt, Artificial Sequence
  Description of Artificial Sequence: Synthetic oligonucleotide
  Sense strand starting at position 1737 of SEQ ID NO: 587157
ucaccuggaucucuggaaa

SEQ ID NO: 771019 - RNA, 19 nt, Artificial Sequence
  Description of Artificial Sequence: Synthetic oligonucleotide
  Antisense strand to SEQ ID NO: 771018
uuuccagagauccagguga

SEQ ID NO: 771020 - RNA, 19 nt, Artificial Sequence
  Description of Artificial Sequence: Synthetic oligonucleotide
  Sense strand starting at position 2024 of SEQ ID NO: 587157
gguugaggguucucauacu

SEQ ID NO: 771021 - RNA, 19 nt, Artificial Sequence
  Description of Artificial Sequence: Synthetic oligonucleotide
  Antisense strand to SEQ ID NO: 771020
aguaugagaacccucaacc

SEQ ID NO: 771022 - RNA, 19 nt, Artificial Sequence
  Description of Artificial Sequence: Synthetic oligonucleotide
  Sense strand starting at position 2053 of SEQ ID NO: 587157
aaaugugagcccggaagua

SEQ ID NO: 771023 - RNA, 19 nt, Artificial Sequence
  Description of Artificial Sequence: Synthetic oligonucleotide
  Antisense strand to SEQ ID NO: 771022
uacuuccgggcucacauuu

SEQ ID NO: 771024 - RNA, 19 nt, Artificial Sequence
  Description of Artificial Sequence: Synthetic oligonucleotide
  Sense strand starting at position 77 of SEQ ID NO: 587158
acugauaccuauuagaagu

SEQ ID NO: 771025 - RNA, 19 nt, Artificial Sequence
  Description of Artificial Sequence: Synthetic oligonucleotide
  Antisense strand to SEQ ID NO: 771024
acuucuaauagguaucagu

SEQ ID NO: 771026 - RNA, 19 nt, Artificial Sequence
  Description of Artificial Sequence: Synthetic oligonucleotide
  Sense strand starting at position 85 of SEQ ID NO: 587158
cuauuagaagugcaacuua

SEQ ID NO: 771027 - RNA, 19 nt, Artificial Sequence
  Description of Artificial Sequence: Synthetic oligonucleotide
  Antisense strand to SEQ ID NO: 771026
uaaguugcacuucuaauag

SEQ ID NO: 771028 - RNA, 19 nt, Artificial Sequence
  Description of Artificial Sequence: Synthetic oligonucleotide
  Sense strand starting at position 147 of SEQ ID NO: 587158
acagcaguauuccgaauuu

SEQ ID NO: 771029 - RNA, 19 nt, Artificial Sequence
  Description of Artificial Sequence: Synthetic oligonucleotide
  Antisense strand to SEQ ID NO: 771028
aaauucggaauacugcugu

SEQ ID NO: 771030 - RNA, 19 nt, Artificial Sequence
  Description of Artificial Sequence: Synthetic oligonucleotide
  Sense strand starting at position 224 of SEQ ID NO: 587158
auauaaagguaucagcauu

SEQ ID NO: 771031 - RNA, 19 nt, Artificial Sequence
  Description of Artificial Sequence: Synthetic oligonucleotide
  Antisense strand to SEQ ID NO: 771030
aaugcugauaccuuuauau

SEQ ID NO: 771032 - RNA, 19 nt, Artificial Sequence
  Description of Artificial Sequence: Synthetic oligonucleotide
  Sense strand starting at position 311 of SEQ ID NO: 587158
agauguaacacgcaaggua

SEQ ID NO: 771033 - RNA, 19 nt, Artificial Sequence
  Description of Artificial Sequence: Synthetic oligonucleotide
  Antisense strand to SEQ ID NO: 771032
uaccuugcguguuacaucu

SEQ ID NO: 771034 - RNA, 19 nt, Artificial Sequence
  Description of Artificial Sequence: Synthetic oligonucleotide
  Sense strand starting at position 376 of SEQ ID NO: 587158
uuacauaaggcaggaaauu

SEQ ID NO: 771035 - RNA, 19 nt, Artificial Sequence
  Description of Artificial Sequence: Synthetic oligonucleotide
  Antisense strand to SEQ ID NO: 771034
aauuuccugccuuauguaa

SEQ ID NO: 771036 - RNA, 19 nt, Artificial Sequence
  Description of Artificial Sequence: Synthetic oligonucleotide
  Sense strand starting at position 414 of SEQ ID NO: 587158
gcccgaaaucauuagauua

SEQ ID NO: 771037 - RNA, 19 nt, Artificial Sequence
  Description of Artificial Sequence: Synthetic oligonucleotide
  Antisense strand to SEQ ID NO: 771036
uaaucuaaugauuucgggc

SEQ ID NO: 771038 - RNA, 19 nt, Artificial Sequence
  Description of Artificial Sequence: Synthetic oligonucleotide
  Sense strand starting at position 416 of SEQ ID NO: 587158
ccgaaaucauuagauuaau

SEQ ID NO: 771039 - RNA, 19 nt, Artificial Sequence
  Description of Artificial Sequence: Synthetic oligonucleotide
  Antisense strand to SEQ ID NO: 771038
auuaaucuaaugauuucgg

SEQ ID NO: 771040 - RNA, 19 nt, Artificial Sequence
  Description of Artificial Sequence: Synthetic oligonucleotide
  Sense strand starting at position 502 of SEQ ID NO: 587158
auuagauaaaugugguguu

SEQ ID NO: 771041 - RNA, 19 nt, Artificial Sequence
  Description of Artificial Sequence: Synthetic oligonucleotide
  Antisense strand to SEQ ID NO: 771040
aacaccacauuuaucuaau

SEQ ID NO: 771042 - RNA, 19 nt, Artificial Sequence
  Description of Artificial Sequence: Synthetic oligonucleotide
  Sense strand starting at position 532 of SEQ ID NO: 587158
ggugcaauacagggaugaa

SEQ ID NO: 771043 - RNA, 19 nt, Artificial Sequence
  Description of Artificial Sequence: Synthetic oligonucleotide
  Antisense strand to SEQ ID NO: 771042
uucaucccuguauugcacc

SEQ ID NO: 771044 - RNA, 19 nt, Artificial Sequence
  Description of Artificial Sequence: Synthetic oligonucleotide
  Sense strand starting at position 535 of SEQ ID NO: 587158
gcaauacagggaugaaucu

SEQ ID NO: 771045 - RNA, 19 nt, Artificial Sequence
  Description of Artificial Sequence: Synthetic oligonucleotide
  Antisense strand to SEQ ID NO: 771044
agauucaucccuguauugc

SEQ ID NO: 771046 - RNA, 19 nt, Artificial Sequence
  Description of Artificial Sequence: Synthetic oligonucleotide
  Sense strand starting at position 573 of SEQ ID NO: 587158
acaacuggcgaucgguauu

SEQ ID NO: 771047 - RNA, 19 nt, Artificial Sequence
  Description of Artificial Sequence: Synthetic oligonucleotide
  Antisense strand to SEQ ID NO: 771046
aauaccgaucgccaguugu

SEQ ID NO: 771048 - RNA, 19 nt, Artificial Sequence
  Description of Artificial Sequence: Synthetic oligonucleotide
  Sense strand starting at position 607 of SEQ ID NO: 587158
ugaagauguacucgcuuaa

SEQ ID NO: 771049 - RNA, 19 nt, Artificial Sequence
  Description of Artificial Sequence: Synthetic oligonucleotide
  Antisense strand to SEQ ID NO: 771048
uuaagcgaguacaucuuca

SEQ ID NO: 771050 - RNA, 19 nt, Artificial Sequence
  Description of Artificial Sequence: Synthetic oligonucleotide
  Sense strand starting at position 611 of SEQ ID NO: 587158
gauguacucgcuuaaacaa

SEQ ID NO: 771051 - RNA, 19 nt, Artificial Sequence
  Description of Artificial Sequence: Synthetic oligonucleotide
  Antisense strand to SEQ ID NO: 771050
uuguuuaagcgaguacauc

SEQ ID NO: 771052 - RNA, 19 nt, Artificial Sequence
  Description of Artificial Sequence: Synthetic oligonucleotide
  Sense strand starting at position 714 of SEQ ID NO: 587158
agucuaggcucucugcaau

SEQ ID NO: 771053 - RNA, 19 nt, Artificial Sequence
  Description of Artificial Sequence: Synthetic oligonucleotide
  Antisense strand to SEQ ID NO: 771052
auugcagagagccuagacu

SEQ ID NO: 771054 - RNA, 19 nt, Artificial Sequence
  Description of Artificial Sequence: Synthetic oligonucleotide
  Sense strand starting at position 720 of SEQ ID NO: 587158
ggcucucugcaauaugaca

SEQ ID NO: 771055 - RNA, 19 nt, Artificial Sequence
  Description of Artificial Sequence: Synthetic oligonucleotide
  Antisense strand to SEQ ID NO: 771054
ugucauauugcagagagcc

SEQ ID NO: 771056 - RNA, 19 nt, Artificial Sequence
  Description of Artificial Sequence: Synthetic oligonucleotide
  Sense strand starting at position 784 of SEQ ID NO: 587158
cuuuguuugcacuaucaga

SEQ ID NO: 771057 - RNA, 19 nt, Artificial Sequence
  Description of Artificial Sequence: Synthetic oligonucleotide
  Antisense strand to SEQ ID NO: 771056
ucugauagugcaaacaaag

SEQ ID NO: 771058 - RNA, 19 nt, Artificial Sequence
  Description of Artificial Sequence: Synthetic oligonucleotide
  Sense strand starting at position 980 of SEQ ID NO: 587158
augacauguugagaaugau

SEQ ID NO: 771059 - RNA, 19 nt, Artificial Sequence
  Description of Artificial Sequence: Synthetic oligonucleotide
  Antisense strand to SEQ ID NO: 771058
aucauucucaacaugucau

SEQ ID NO: 771060 - RNA, 19 nt, Artificial Sequence
  Description of Artificial Sequence: Synthetic oligonucleotide
  Sense strand starting at position 1098 of SEQ ID NO: 587158
ugagcaaggugguuucgau

SEQ ID NO: 771061 - RNA, 19 nt, Artificial Sequence
  Description of Artificial Sequence: Synthetic oligonucleotide
  Antisense strand to SEQ ID NO: 771060
aucgaaaccaccuugcuca

SEQ ID NO: 771062 - RNA, 19 nt, Artificial Sequence
  Description of Artificial Sequence: Synthetic oligonucleotide
  Sense strand starting at position 1151 of SEQ ID NO: 587158
uauacaauguuucugggaa

SEQ ID NO: 771063 - RNA, 19 nt, Artificial Sequence
  Description of Artificial Sequence: Synthetic oligonucleotide
  Antisense strand to SEQ ID NO: 771062
uucccagaaacauuguaua

SEQ ID NO: 771064 - RNA, 19 nt, Artificial Sequence
  Description of Artificial Sequence: Synthetic oligonucleotide
  Sense strand starting at position 1155 of SEQ ID NO: 587158
caauguuucugggaagauu

SEQ ID NO: 771065 - RNA, 19 nt, Artificial Sequence
  Description of Artificial Sequence: Synthetic oligonucleotide
  Antisense strand to SEQ ID NO: 771064
aaucuucccagaaacauug

SEQ ID NO: 771066 - RNA, 19 nt, Artificial Sequence
  Description of Artificial Sequence: Synthetic oligonucleotide
  Sense strand starting at position 1164 of SEQ ID NO: 587158
ugggaagauucucagggau

SEQ ID NO: 771067 - RNA, 19 nt, Artificial Sequence
  Description of Artificial Sequence: Synthetic oligonucleotide
  Antisense strand to SEQ ID NO: 771066
aucccugagaaucuuccca

SEQ ID NO: 771068 - RNA, 19 nt, Artificial Sequence
  Description of Artificial Sequence: Synthetic oligonucleotide
  Sense strand starting at position 1167 of SEQ ID NO: 587158
gaagauucucagggaugug

SEQ ID NO: 771069 - RNA, 19 nt, Artificial Sequence
  Description of Artificial Sequence: Synthetic oligonucleotide
  Antisense strand to SEQ ID NO: 771068
cacaucccugagaaucuuc

SEQ ID NO: 771070 - RNA, 19 nt, Artificial Sequence
  Description of Artificial Sequence: Synthetic oligonucleotide
  Sense strand starting at position 1168 of SEQ ID NO: 587158
aagauucucagggaugugu

SEQ ID NO: 771071 - RNA, 19 nt, Artificial Sequence
  Description of Artificial Sequence: Synthetic oligonucleotide
  Antisense strand to SEQ ID NO: 771070
acacaucccugagaaucuu

SEQ ID NO: 771072 - RNA, 19 nt, Artificial Sequence
  Description of Artificial Sequence: Synthetic oligonucleotide
  Sense strand starting at position 2480 of SEQ ID NO: 587158
ccauauucuccgggaaauu

SEQ ID NO: 771073 - RNA, 19 nt, Artificial Sequence
  Description of Artificial Sequence: Synthetic oligonucleotide
  Antisense strand to SEQ ID NO: 771072
aauuucccggagaauaugg

SEQ ID NO: 771074 - RNA, 19 nt, Artificial Sequence
  Description of Artificial Sequence: Synthetic oligonucleotide
  Sense strand starting at position 2623 of SEQ ID NO: 587158
cgcgggauggccgaauuaa

SEQ ID NO: 771075 - RNA, 19 nt, Artificial Sequence
  Description of Artificial Sequence: Synthetic oligonucleotide
  Antisense strand to SEQ ID NO: 771074
uuaauucggccaucccgcg

SEQ ID NO: 771076 - RNA, 19 nt, Artificial Sequence
  Description of Artificial Sequence: Synthetic oligonucleotide
  Sense strand starting at position 2712 of SEQ ID NO: 587158
ggcucuugggccugaauag

SEQ ID NO: 771077 - RNA, 19 nt, Artificial Sequence
  Description of Artificial Sequence: Synthetic oligonucleotide
  Antisense strand to SEQ ID NO: 771076
cuauucaggcccaagagcc

SEQ ID NO: 771078 - RNA, 19 nt, Artificial Sequence
  Description of Artificial Sequence: Synthetic oligonucleotide
  Sense strand starting at position 2770 of SEQ ID NO: 587158
gugguugauuuccagaaag

SEQ ID NO: 771079 - RNA, 19 nt, Artificial Sequence
  Description of Artificial Sequence: Synthetic oligonucleotide
  Antisense strand to SEQ ID NO: 771078
cuuucuggaaaucaaccac

SEQ ID NO: 771080 - RNA, 19 nt, Artificial Sequence
  Description of Artificial Sequence: Synthetic oligonucleotide
  Sense strand starting at position 2955 of SEQ ID NO: 587158
ugaggucacgcugauauau

SEQ ID NO: 771081 - RNA, 19 nt, Artificial Sequence
  Description of Artificial Sequence: Synthetic oligonucleotide
  Antisense strand to SEQ ID NO: 771080
auauaucagcgugaccuca

SEQ ID NO: 771082 - RNA, 19 nt, Artificial Sequence
  Description of Artificial Sequence: Synthetic oligonucleotide
  Sense strand starting at position 3152 of SEQ ID NO: 587158
gccugcaggccugauaguu

SEQ ID NO: 771083 - RNA, 19 nt, Artificial Sequence
  Description of Artificial Sequence: Synthetic oligonucleotide
  Antisense strand to SEQ ID NO: 771082
aacuaucaggccugcaggc

SEQ ID NO: 771084 - RNA, 19 nt, Artificial Sequence
  Description of Artificial Sequence: Synthetic oligonucleotide
  Sense strand starting at position 3204 of SEQ ID NO: 587158
acaauuaucuaugagaagc

SEQ ID NO: 771085 - RNA, 19 nt, Artificial Sequence
  Description of Artificial Sequence: Synthetic oligonucleotide
  Antisense strand to SEQ ID NO: 771084
gcuucucauagauaauugu

SEQ ID NO: 771086 - RNA, 19 nt, Artificial Sequence
  Description of Artificial Sequence: Synthetic oligonucleotide
  Sense strand starting at position 3217 of SEQ ID NO: 587158
agaagcuacuguguuccaa

SEQ ID NO: 771087 - RNA, 19 nt, Artificial Sequence
  Description of Artificial Sequence: Synthetic oligonucleotide
  Antisense strand to SEQ ID NO: 771086
uuggaacacaguagcuucu

SEQ ID NO: 771088 - RNA, 19 nt, Artificial Sequence
  Description of Artificial Sequence: Synthetic oligonucleotide
  Sense strand starting at position 3240 of SEQ ID NO: 587158
uauucuaagccacgaggua

SEQ ID NO: 771089 - RNA, 19 nt, Artificial Sequence
  Description of Artificial Sequence: Synthetic oligonucleotide
  Antisense strand to SEQ ID NO: 771088
uaccucguggcuuagaaua

SEQ ID NO: 771090 - RNA, 19 nt, Artificial Sequence
  Description of Artificial Sequence: Synthetic oligonucleotide
  Sense strand starting at position 3301 of SEQ ID NO: 587158
aggugagauauguacagua

SEQ ID NO: 771091 - RNA, 19 nt, Artificial Sequence
  Description of Artificial Sequence: Synthetic oligonucleotide
  Antisense strand to SEQ ID NO: 771090
uacuguacauaucucaccu

SEQ ID NO: 771092 - RNA, 19 nt, Artificial Sequence
  Description of Artificial Sequence: Synthetic oligonucleotide
  Sense strand starting at position 3303 of SEQ ID NO: 587158
gugagauauguacaguaug

SEQ ID NO: 771093 - RNA, 19 nt, Artificial Sequence
  Description of Artificial Sequence: Synthetic oligonucleotide
  Antisense strand to SEQ ID NO: 771092
cauacuguacauaucucac

SEQ ID NO: 771094 - RNA, 19 nt, Artificial Sequence
  Description of Artificial Sequence: Synthetic oligonucleotide
  Sense strand starting at position 3306 of SEQ ID NO: 587158
agauauguacaguaugcua

SEQ ID NO: 771095 - RNA, 19 nt, Artificial Sequence
  Description of Artificial Sequence: Synthetic oligonucleotide
  Antisense strand to SEQ ID NO: 771094
uagcauacuguacauaucu

SEQ ID NO: 771096 - RNA, 19 nt, Artificial Sequence
  Description of Artificial Sequence: Synthetic oligonucleotide
  Sense strand starting at position 3313 of SEQ ID NO: 587158
uacaguaugcuagaaguca

SEQ ID NO: 771097 - RNA, 19 nt, Artificial Sequence
  Description of Artificial Sequence: Synthetic oligonucleotide
  Antisense strand to SEQ ID NO: 771096
ugacuucuagcauacugua

SEQ ID NO: 771098 - RNA, 19 nt, Artificial Sequence
  Description of Artificial Sequence: Synthetic oligonucleotide
  Sense strand starting at position 3321 of SEQ ID NO: 587158
gcuagaagucaguaaggag

SEQ ID NO: 771099 - RNA, 19 nt, Artificial Sequence
  Description of Artificial Sequence: Synthetic oligonucleotide
  Antisense strand to SEQ ID NO: 771098
cuccuuacugacuucuagc

SEQ ID NO: 771100 - RNA, 19 nt, Artificial Sequence
  Description of Artificial Sequence: Synthetic oligonucleotide
  Sense strand starting at position 3328 of SEQ ID NO: 587158
gucaguaaggagugaguuu

SEQ ID NO: 771101 - RNA, 19 nt, Artificial Sequence
  Description of Artificial Sequence: Synthetic oligonucleotide
  Antisense strand to SEQ ID NO: 771100
aaacucacuccuuacugac

SEQ ID NO: 771102 - RNA, 19 nt, Artificial Sequence
  Description of Artificial Sequence: Synthetic oligonucleotide
  Sense strand starting at position 3676 of SEQ ID NO: 587158
cugagaucccucuacugca

SEQ ID NO: 771103 - RNA, 19 nt, Artificial Sequence
  Description of Artificial Sequence: Synthetic oligonucleotide
  Antisense strand to SEQ ID NO: 771102
ugcaguagagggaucucag

SEQ ID NO: 771104 - RNA, 19 nt, Artificial Sequence
  Description of Artificial Sequence: Synthetic oligonucleotide
  Sense strand starting at position 1 of SEQ ID NO: 587159
aaggaugaucaguguuuau

SEQ ID NO: 771105 - RNA, 19 nt, Artificial Sequence
  Description of Artificial Sequence: Synthetic oligonucleotide
  Antisense strand to SEQ ID NO: 771104
auaaacacugaucauccuu

SEQ ID NO: 771106 - RNA, 19 nt, Artificial Sequence
  Description of Artificial Sequence: Synthetic oligonucleotide
  Sense strand starting at position 4 of SEQ ID NO: 587159
gaugaucaguguuuaugca

SEQ ID NO: 771107 - RNA, 19 nt, Artificial Sequence
  Description of Artificial Sequence: Synthetic oligonucleotide
  Antisense strand to SEQ ID NO: 771106
ugcauaaacacugaucauc

SEQ ID NO: 771108 - RNA, 19 nt, Artificial Sequence
  Description of Artificial Sequence: Synthetic oligonucleotide
  Sense strand starting at position 8 of SEQ ID NO: 587159
aucaguguuuaugcaguga

SEQ ID NO: 771109 - RNA, 19 nt, Artificial Sequence
  Description of Artificial Sequence: Synthetic oligonucleotide
  Antisense strand to SEQ ID NO: 771108
ucacugcauaaacacugau

SEQ ID NO: 771110 - RNA, 19 nt, Artificial Sequence
  Description of Artificial Sequence: Synthetic oligonucleotide
  Sense strand starting at position 12 of SEQ ID NO: 587159
guguuuaugcagugaaugu

SEQ ID NO: 771111 - RNA, 19 nt, Artificial Sequence
  Description of Artificial Sequence: Synthetic oligonucleotide
  Antisense strand to SEQ ID NO: 771110
acauucacugcauaaacac

SEQ ID NO: 771112 - RNA, 19 nt, Artificial Sequence
  Description of Artificial Sequence: Synthetic oligonucleotide
  Sense strand starting at position 21 of SEQ ID NO: 587159
cagugaaugugucugacuu

SEQ ID NO: 771113 - RNA, 19 nt, Artificial Sequence
  Description of Artificial Sequence: Synthetic oligonucleotide
  Antisense strand to SEQ ID NO: 771112
aagucagacacauucacug

SEQ ID NO: 771114 - RNA, 19 nt, Artificial Sequence
  Description of Artificial Sequence: Synthetic oligonucleotide
  Sense strand starting at position 22 of SEQ ID NO: 587159
agugaaugugucugacuug

SEQ ID NO: 771115 - RNA, 19 nt, Artificial Sequence
  Description of Artificial Sequence: Synthetic oligonucleotide
  Antisense strand to SEQ ID NO: 771114
caagucagacacauucacu

SEQ ID NO: 771116 - RNA, 19 nt, Artificial Sequence
  Description of Artificial Sequence: Synthetic oligonucleotide
  Sense strand starting at position 25 of SEQ ID NO: 587159
gaaugugucugacuugacu

SEQ ID NO: 771117 - RNA, 19 nt, Artificial Sequence
  Description of Artificial Sequence: Synthetic oligonucleotide
  Antisense strand to SEQ ID NO: 771116
agucaagucagacacauuc

SEQ ID NO: 771118 - RNA, 19 nt, Artificial Sequence
  Description of Artificial Sequence: Synthetic oligonucleotide
  Sense strand starting at position 719 of SEQ ID NO: 587159
uggccugucauccgucauu

SEQ ID NO: 771119 - RNA, 19 nt, Artificial Sequence
  Description of Artificial Sequence: Synthetic oligonucleotide
  Antisense strand to SEQ ID NO: 771118
aaugacggaugacaggcca

SEQ ID NO: 771120 - RNA, 19 nt, Artificial Sequence
  Description of Artificial Sequence: Synthetic oligonucleotide
  Sense strand starting at position 724 of SEQ ID NO: 587159
ugucauccgucauuucuuu

SEQ ID NO: 771121 - RNA, 19 nt, Artificial Sequence
  Description of Artificial Sequence: Synthetic oligonucleotide
  Antisense strand to SEQ ID NO: 771120
aaagaaaugacggaugaca

SEQ ID NO: 771122 - RNA, 19 nt, Artificial Sequence
  Description of Artificial Sequence: Synthetic oligonucleotide
  Sense strand starting at position 739 of SEQ ID NO: 587159
cuuugcugccucguacuua

SEQ ID NO: 771123 - RNA, 19 nt, Artificial Sequence
  Description of Artificial Sequence: Synthetic oligonucleotide
  Antisense strand to SEQ ID NO: 771122
uaaguacgaggcagcaaag

SEQ ID NO: 771124 - RNA, 19 nt, Artificial Sequence
  Description of Artificial Sequence: Synthetic oligonucleotide
  Sense strand starting at position 1286 of SEQ ID NO: 587159
ggccucucuccagaucuuu

SEQ ID NO: 771125 - RNA, 19 nt, Artificial Sequence
  Description of Artificial Sequence: Synthetic oligonucleotide
  Antisense strand to SEQ ID NO: 771124
aaagaucuggagagaggcc

SEQ ID NO: 771126 - RNA, 19 nt, Artificial Sequence
  Description of Artificial Sequence: Synthetic oligonucleotide
  Sense strand starting at position 1328 of SEQ ID NO: 587159
ccagcucuguccuuccaua

SEQ ID NO: 771127 - RNA, 19 nt, Artificial Sequence
  Description of Artificial Sequence: Synthetic oligonucleotide
  Antisense strand to SEQ ID NO: 771126
uauggaaggacagagcugg

SEQ ID NO: 771128 - RNA, 19 nt, Artificial Sequence
  Description of Artificial Sequence: Synthetic oligonucleotide
  Sense strand starting at position 1622 of SEQ ID NO: 587159
aguugaaaguuaccaucca

SEQ ID NO: 771129 - RNA, 19 nt, Artificial Sequence
  Description of Artificial Sequence: Synthetic oligonucleotide
  Antisense strand to SEQ ID NO: 771128
uggaugguaacuuucaacu

SEQ ID NO: 771130 - RNA, 19 nt, Artificial Sequence
  Description of Artificial Sequence: Synthetic oligonucleotide
  Sense strand starting at position 1643 of SEQ ID NO: 587159
agaagcaucguagauugaa

SEQ ID NO: 771131 - RNA, 19 nt, Artificial Sequence
  Description of Artificial Sequence: Synthetic oligonucleotide
  Antisense strand to SEQ ID NO: 771130
uucaaucuacgaugcuucu

SEQ ID NO: 771132 - RNA, 19 nt, Artificial Sequence
  Description of Artificial Sequence: Synthetic oligonucleotide
  Sense strand starting at position 1652 of SEQ ID NO: 587159
guagauugaaaucgaggga

SEQ ID NO: 771133 - RNA, 19 nt, Artificial Sequence
  Description of Artificial Sequence: Synthetic oligonucleotide
  Antisense strand to SEQ ID NO: 771132
ucccucgauuucaaucuac

SEQ ID NO: 771134 - RNA, 19 nt, Artificial Sequence
  Description of Artificial Sequence: Synthetic oligonucleotide
  Sense strand starting at position 1864 of SEQ ID NO: 587159
aaagguguccagggugaug

SEQ ID NO: 771135 - RNA, 19 nt, Artificial Sequence
  Description of Artificial Sequence: Synthetic oligonucleotide
  Antisense strand to SEQ ID NO: 771134
caucacccuggacaccuuu

SEQ ID NO: 771136 - RNA, 19 nt, Artificial Sequence
  Description of Artificial Sequence: Synthetic oligonucleotide
  Sense strand starting at position 1867 of SEQ ID NO: 587159
gguguccagggugaugaaa

SEQ ID NO: 771137 - RNA, 19 nt, Artificial Sequence
  Description of Artificial Sequence: Synthetic oligonucleotide
  Antisense strand to SEQ ID NO: 771136
uuucaucacccuggacacc

SEQ ID NO: 771138 - RNA, 19 nt, Artificial Sequence
  Description of Artificial Sequence: Synthetic oligonucleotide
  Sense strand starting at position 1970 of SEQ ID NO: 587159
gucauauaccaaggaucag

SEQ ID NO: 771139 - RNA, 19 nt, Artificial Sequence
  Description of Artificial Sequence: Synthetic oligonucleotide
  Antisense strand to SEQ ID NO: 771138
cugauccuugguauaugac

SEQ ID NO: 771140 - RNA, 19 nt, Artificial Sequence
  Description of Artificial Sequence: Synthetic oligonucleotide
  Sense strand starting at position 2041 of SEQ ID NO: 587159
guggaacauugucugcaga

SEQ ID NO: 771141 - RNA, 19 nt, Artificial Sequence
  Description of Artificial Sequence: Synthetic oligonucleotide
  Antisense strand to SEQ ID NO: 771140
ucugcagacaauguuccac

SEQ ID NO: 771142 - RNA, 19 nt, Artificial Sequence
  Description of Artificial Sequence: Synthetic oligonucleotide
  Sense strand starting at position 2042 of SEQ ID NO: 587159
uggaacauugucugcagaa

SEQ ID NO: 771143 - RNA, 19 nt, Artificial Sequence
  Description of Artificial Sequence: Synthetic oligonucleotide
  Antisense strand to SEQ ID NO: 771142
uucugcagacaauguucca

SEQ ID NO: 771144 - RNA, 19 nt, Artificial Sequence
  Description of Artificial Sequence: Synthetic oligonucleotide
  Sense strand starting at position 2043 of SEQ ID NO: 587159
ggaacauugucugcagaau

SEQ ID NO: 771145 - RNA, 19 nt, Artificial Sequence
  Description of Artificial Sequence: Synthetic oligonucleotide
  Antisense strand to SEQ ID NO: 771144
auucugcagacaauguucc

SEQ ID NO: 771146 - RNA, 19 nt, Artificial Sequence
  Description of Artificial Sequence: Synthetic oligonucleotide
  Sense strand starting at position 2044 of SEQ ID NO: 587159
gaacauugucugcagaauu

SEQ ID NO: 771147 - RNA, 19 nt, Artificial Sequence
  Description of Artificial Sequence: Synthetic oligonucleotide
  Antisense strand to SEQ ID NO: 771146
aauucugcagacaauguuc

SEQ ID NO: 771148 - RNA, 19 nt, Artificial Sequence
  Description of Artificial Sequence: Synthetic oligonucleotide
  Sense strand starting at position 2091 of SEQ ID NO: 587159
uucuauaacuggcaacagu

SEQ ID NO: 771149 - RNA, 19 nt, Artificial Sequence
  Description of Artificial Sequence: Synthetic oligonucleotide
  Antisense strand to SEQ ID NO: 771148
acuguugccaguuauagaa

SEQ ID NO: 771150 - RNA, 19 nt, Artificial Sequence
  Description of Artificial Sequence: Synthetic oligonucleotide
  Sense strand starting at position 2433 of SEQ ID NO: 587159
cuggcaaaucacggagaaa

SEQ ID NO: 771151 - RNA, 19 nt, Artificial Sequence
  Description of Artificial Sequence: Synthetic oligonucleotide
  Antisense strand to SEQ ID NO: 771150
uuucuccgugauuugccag

SEQ ID NO: 771152 - RNA, 19 nt, Artificial Sequence
  Description of Artificial Sequence: Synthetic oligonucleotide
  Sense strand starting at position 2449 of SEQ ID NO: 587159
aaagauaagucacagagga

SEQ ID NO: 771153 - RNA, 19 nt, Artificial Sequence
  Description of Artificial Sequence: Synthetic oligonucleotide
  Antisense strand to SEQ ID NO: 771152
uccucugugacuuaucuuu

SEQ ID NO: 771154 - RNA, 19 nt, Artificial Sequence
  Description of Artificial Sequence: Synthetic oligonucleotide
  Sense strand starting at position 2628 of SEQ ID NO: 587159
cagcaugacuuggcucauu

SEQ ID NO: 771155 - RNA, 19 nt, Artificial Sequence
  Description of Artificial Sequence: Synthetic oligonucleotide
  Antisense strand to SEQ ID NO: 771154
aaugagccaagucaugcug

SEQ ID NO: 771156 - RNA, 19 nt, Artificial Sequence
  Description of Artificial Sequence: Synthetic oligonucleotide
  Sense strand starting at position 2886 of SEQ ID NO: 587159
auugguaguacggaguauu

SEQ ID NO: 771157 - RNA, 19 nt, Artificial Sequence
  Description of Artificial Sequence: Synthetic oligonucleotide
  Antisense strand to SEQ ID NO: 771156
aauacuccguacuaccaau

SEQ ID NO: 771158 - RNA, 19 nt, Artificial Sequence
  Description of Artificial Sequence: Synthetic oligonucleotide
  Sense strand starting at position 2889 of SEQ ID NO: 587159
gguaguacggaguauugga

SEQ ID NO: 771159 - RNA, 19 nt, Artificial Sequence
  Description of Artificial Sequence: Synthetic oligonucleotide
  Antisense strand to SEQ ID NO: 771158
uccaauacuccguacuacc

SEQ ID NO: 771160 - RNA, 19 nt, Artificial Sequence
  Description of Artificial Sequence: Synthetic oligonucleotide
  Sense strand starting at position 2898 of SEQ ID NO: 587159
gaguauuggacaggaugca

SEQ ID NO: 771161 - RNA, 19 nt, Artificial Sequence
  Description of Artificial Sequence: Synthetic oligonucleotide
  Antisense strand to SEQ ID NO: 771160
ugcauccuguccaauacuc

SEQ ID NO: 771162 - RNA, 19 nt, Artificial Sequence
  Description of Artificial Sequence: Synthetic oligonucleotide
  Sense strand starting at position 2922 of SEQ ID NO: 587159
auacgaacucagugaugau

SEQ ID NO: 771163 - RNA, 19 nt, Artificial Sequence
  Description of Artificial Sequence: Synthetic oligonucleotide
  Antisense strand to SEQ ID NO: 771162
aucaucacugaguucguau

SEQ ID NO: 771164 - RNA, 19 nt, Artificial Sequence
  Description of Artificial Sequence: Synthetic oligonucleotide
  Sense strand starting at position 2925 of SEQ ID NO: 587159
cgaacucagugaugauaag

SEQ ID NO: 771165 - RNA, 19 nt, Artificial Sequence
  Description of Artificial Sequence: Synthetic oligonucleotide
  Antisense strand to SEQ ID NO: 771164
cuuaucaucacugaguucg

SEQ ID NO: 771166 - RNA, 19 nt, Artificial Sequence
  Description of Artificial Sequence: Synthetic oligonucleotide
  Sense strand starting at position 2931 of SEQ ID NO: 587159
cagugaugauaagacugua

SEQ ID NO: 771167 - RNA, 19 nt, Artificial Sequence
  Description of Artificial Sequence: Synthetic oligonucleotide
  Antisense strand to SEQ ID NO: 771166
uacagucuuaucaucacug

SEQ ID NO: 771168 - RNA, 19 nt, Artificial Sequence
  Description of Artificial Sequence: Synthetic oligonucleotide
  Sense strand starting at position 2934 of SEQ ID NO: 587159
ugaugauaagacuguaggu

SEQ ID NO: 771169 - RNA, 19 nt, Artificial Sequence
  Description of Artificial Sequence: Synthetic oligonucleotide
  Antisense strand to SEQ ID NO: 771168
accuacagucuuaucauca

SEQ ID NO: 771170 - RNA, 19 nt, Artificial Sequence
  Description of Artificial Sequence: Synthetic oligonucleotide
  Sense strand starting at position 3098 of SEQ ID NO: 587159
gcaguaugugccuguaggu

SEQ ID NO: 771171 - RNA, 19 nt, Artificial Sequence
  Description of Artificial Sequence: Synthetic oligonucleotide
  Antisense strand to SEQ ID NO: 771170
accuacaggcacauacugc

SEQ ID NO: 771172 - RNA, 19 nt, Artificial Sequence
  Description of Artificial Sequence: Synthetic oligonucleotide
  Sense strand starting at position 3446 of SEQ ID NO: 587159
gcuuguauuguagagauag

SEQ ID NO: 771173 - RNA, 19 nt, Artificial Sequence
  Description of Artificial Sequence: Synthetic oligonucleotide
  Antisense strand to SEQ ID NO: 771172
cuaucucuacaauacaagc

SEQ ID NO: 771174 - RNA, 19 nt, Artificial Sequence
  Description of Artificial Sequence: Synthetic oligonucleotide
  Sense strand starting at position 3919 of SEQ ID NO: 587159
uuugacaaugacuguugaa

SEQ ID NO: 771175 - RNA, 19 nt, Artificial Sequence
  Description of Artificial Sequence: Synthetic oligonucleotide
  Antisense strand to SEQ ID NO: 771174
uucaacagucauugucaaa

SEQ ID NO: 771176 - RNA, 19 nt, Artificial Sequence
  Description of Artificial Sequence: Synthetic oligonucleotide
  Sense strand starting at position 3922 of SEQ ID NO: 587159
gacaaugacuguugaacuu

SEQ ID NO: 771177 - RNA, 19 nt, Artificial Sequence
  Description of Artificial Sequence: Synthetic oligonucleotide
  Antisense strand to SEQ ID NO: 771176
aaguucaacagucauuguc

SEQ ID NO: 771178 - RNA, 19 nt, Artificial Sequence
  Description of Artificial Sequence: Synthetic oligonucleotide
  Sense strand starting at position 3946 of SEQ ID NO: 587159
ugugcauaucuuugaccua

SEQ ID NO: 771179 - RNA, 19 nt, Artificial Sequence
  Description of Artificial Sequence: Synthetic oligonucleotide
  Antisense strand to SEQ ID NO: 771178
uaggucaaagauaugcaca

SEQ ID NO: 771180 - RNA, 19 nt, Artificial Sequence
  Description of Artificial Sequence: Synthetic oligonucleotide
  Sense strand starting at position 3947 of SEQ ID NO: 587159
gugcauaucuuugaccuaa

SEQ ID NO: 771181 - RNA, 19 nt, Artificial Sequence
  Description of Artificial Sequence: Synthetic oligonucleotide
  Antisense strand to SEQ ID NO: 771180
uuaggucaaagauaugcac

SEQ ID NO: 771182 - RNA, 19 nt, Artificial Sequence
  Description of Artificial Sequence: Synthetic oligonucleotide
  Sense strand starting at position 3971 of SEQ ID NO: 587159
cuaggaaacuugcuacaga

SEQ ID NO: 771183 - RNA, 19 nt, Artificial Sequence
  Description of Artificial Sequence: Synthetic oligonucleotide
  Antisense strand to SEQ ID NO: 771182
ucuguagcaaguuuccuag

SEQ ID NO: 771184 - RNA, 19 nt, Artificial Sequence
  Description of Artificial Sequence: Synthetic oligonucleotide
  Sense strand starting at position 67 of SEQ ID NO: 587160
ggcacugguucccagagga

SEQ ID NO: 771185 - RNA, 19 nt, Artificial Sequence
  Description of Artificial Sequence: Synthetic oligonucleotide
  Antisense strand to SEQ ID NO: 771184
uccucugggaaccagugcc

SEQ ID NO: 771186 - RNA, 19 nt, Artificial Sequence
  Description of Artificial Sequence: Synthetic oligonucleotide
  Sense strand starting at position 251 of SEQ ID NO: 587160
gaacgaggcuccugagcua

SEQ ID NO: 771187 - RNA, 19 nt, Artificial Sequence
  Description of Artificial Sequence: Synthetic oligonucleotide
  Antisense strand to SEQ ID NO: 771186
uagcucaggagccucguuc

SEQ ID NO: 771188 - RNA, 19 nt, Artificial Sequence
  Description of Artificial Sequence: Synthetic oligonucleotide
  Sense strand starting at position 1215 of SEQ ID NO: 587160
cggugaauuccggaaacag

SEQ ID NO: 771189 - RNA, 19 nt, Artificial Sequence
  Description of Artificial Sequence: Synthetic oligonucleotide
  Antisense strand to SEQ ID NO: 771188
cuguuuccggaauucaccg

SEQ ID NO: 771190 - RNA, 19 nt, Artificial Sequence
  Description of Artificial Sequence: Synthetic oligonucleotide
  Sense strand starting at position 1261 of SEQ ID NO: 587160
cgugcucucagacacaguu

SEQ ID NO: 771191 - RNA, 19 nt, Artificial Sequence
  Description of Artificial Sequence: Synthetic oligonucleotide
  Antisense strand to SEQ ID NO: 771190
aacugugucugagagcacg

SEQ ID NO: 771192 - RNA, 19 nt, Artificial Sequence
  Description of Artificial Sequence: Synthetic oligonucleotide
  Sense strand starting at position 1302 of SEQ ID NO: 587160
gcuucuggcuucuguuuau

SEQ ID NO: 771193 - RNA, 19 nt, Artificial Sequence
  Description of Artificial Sequence: Synthetic oligonucleotide
  Antisense strand to SEQ ID NO: 771192
auaaacagaagccagaagc

SEQ ID NO: 771194 - RNA, 19 nt, Artificial Sequence
  Description of Artificial Sequence: Synthetic oligonucleotide
  Sense strand starting at position 1748 of SEQ ID NO: 587160
gaaagcugucagcgauaac

SEQ ID NO: 771195 - RNA, 19 nt, Artificial Sequence
  Description of Artificial Sequence: Synthetic oligonucleotide
  Antisense strand to SEQ ID NO: 771194
guuaucgcugacagcuuuc

SEQ ID NO: 771196 - RNA, 19 nt, Artificial Sequence
  Description of Artificial Sequence: Synthetic oligonucleotide
  Sense strand starting at position 1751 of SEQ ID NO: 587160
agcugucagcgauaacaga

SEQ ID NO: 771197 - RNA, 19 nt, Artificial Sequence
  Description of Artificial Sequence: Synthetic oligonucleotide
  Antisense strand to SEQ ID NO: 771196
ucuguuaucgcugacagcu

SEQ ID NO: 771198 - RNA, 19 nt, Artificial Sequence
  Description of Artificial Sequence: Synthetic oligonucleotide
  Sense strand starting at position 2238 of SEQ ID NO: 587160
ugaggucagugucugugaa

SEQ ID NO: 771199 - RNA, 19 nt, Artificial Sequence
  Description of Artificial Sequence: Synthetic oligonucleotide
  Antisense strand to SEQ ID NO: 771198
uucacagacacugaccuca

SEQ ID NO: 771200 - RNA, 19 nt, Artificial Sequence
  Description of Artificial Sequence: Synthetic oligonucleotide
  Sense strand starting at position 2263 of SEQ ID NO: 587160
gcacuagugucuuugguug

SEQ ID NO: 771201 - RNA, 19 nt, Artificial Sequence
  Description of Artificial Sequence: Synthetic oligonucleotide
  Antisense strand to SEQ ID NO: 771200
caaccaaagacacuagugc

SEQ ID NO: 771202 - RNA, 19 nt, Artificial Sequence
  Description of Artificial Sequence: Synthetic oligonucleotide
  Sense strand starting at position 2879 of SEQ ID NO: 587160
gcagacauccgcugcaaau

SEQ ID NO: 771203 - RNA, 19 nt, Artificial Sequence
  Description of Artificial Sequence: Synthetic oligonucleotide
  Antisense strand to SEQ ID NO: 771202
auuugcagcggaugucugc

SEQ ID NO: 771204 - RNA, 19 nt, Artificial Sequence
  Description of Artificial Sequence: Synthetic oligonucleotide
  Sense strand starting at position 3028 of SEQ ID NO: 587160
ccuugagggcacugaguuu

SEQ ID NO: 771205 - RNA, 19 nt, Artificial Sequence
  Description of Artificial Sequence: Synthetic oligonucleotide
  Antisense strand to SEQ ID NO: 771204
aaacucagugcccucaagg

SEQ ID NO: 771206 - RNA, 19 nt, Artificial Sequence
  Description of Artificial Sequence: Synthetic oligonucleotide
  Sense strand starting at position 3510 of SEQ ID NO: 587160
gcagcugagucauuaaguc

SEQ ID NO: 771207 - RNA, 19 nt, Artificial Sequence
  Description of Artificial Sequence: Synthetic oligonucleotide
  Antisense strand to SEQ ID NO: 771206
gacuuaaugacucagcugc

SEQ ID NO: 771208 - RNA, 19 nt, Artificial Sequence
  Description of Artificial Sequence: Synthetic oligonucleotide
  Sense strand starting at position 3518 of SEQ ID NO: 587160
gucauuaaguccuucucau

SEQ ID NO: 771209 - RNA, 19 nt, Artificial Sequence
  Description of Artificial Sequence: Synthetic oligonucleotide
  Antisense strand to SEQ ID NO: 771208
augagaaggacuuaaugac

SEQ ID NO: 771210 - RNA, 19 nt, Artificial Sequence
  Description of Artificial Sequence: Synthetic oligonucleotide
  Sense strand starting at position 3568 of SEQ ID NO: 587160
gacagagucuggugaggaa

SEQ ID NO: 771211 - RNA, 19 nt, Artificial Sequence
  Description of Artificial Sequence: Synthetic oligonucleotide
  Antisense strand to SEQ ID NO: 771210
uuccucaccagacucuguc

SEQ ID NO: 771212 - RNA, 19 nt, Artificial Sequence
  Description of Artificial Sequence: Synthetic oligonucleotide
  Sense strand starting at position 3681 of SEQ ID NO: 587160
ccucucugcuugugggauu

SEQ ID NO: 771213 - RNA, 19 nt, Artificial Sequence
  Description of Artificial Sequence: Synthetic oligonucleotide
  Antisense strand to SEQ ID NO: 771212
aaucccacaagcagagagg

SEQ ID NO: 771214 - RNA, 19 nt, Artificial Sequence
  Description of Artificial Sequence: Synthetic oligonucleotide
  Sense strand starting at position 3825 of SEQ ID NO: 587160
ccggcuugcuugugggauu

SEQ ID NO: 771215 - RNA, 19 nt, Artificial Sequence
  Description of Artificial Sequence: Synthetic oligonucleotide
  Antisense strand to SEQ ID NO: 771214
aaucccacaagcaagccgg

SEQ ID NO: 771216 - RNA, 19 nt, Artificial Sequence
  Description of Artificial Sequence: Synthetic oligonucleotide
  Sense strand starting at position 3826 of SEQ ID NO: 587160
cggcuugcuugugggauuu

SEQ ID NO: 771217 - RNA, 19 nt, Artificial Sequence
  Description of Artificial Sequence: Synthetic oligonucleotide
  Antisense strand to SEQ ID NO: 771216
aaaucccacaagcaagccg

SEQ ID NO: 771218 - RNA, 19 nt, Artificial Sequence
  Description of Artificial Sequence: Synthetic oligonucleotide
  Sense strand starting at position 3898 of SEQ ID NO: 587160
gggugauguagccguuggu

SEQ ID NO: 771219 - RNA, 19 nt, Artificial Sequence
  Description of Artificial Sequence: Synthetic oligonucleotide
  Antisense strand to SEQ ID NO: 771218
accaacggcuacaucaccc

SEQ ID NO: 771220 - RNA, 19 nt, Artificial Sequence
  Description of Artificial Sequence: Synthetic oligonucleotide
  Sense strand starting at position 2058 of SEQ ID NO: 587161
gccuacaugcuuugucuga

SEQ ID NO: 771221 - RNA, 19 nt, Artificial Sequence
  Description of Artificial Sequence: Synthetic oligonucleotide
  Antisense strand to SEQ ID NO: 771220
ucagacaaagcauguaggc

SEQ ID NO: 771222 - RNA, 19 nt, Artificial Sequence
  Description of Artificial Sequence: Synthetic oligonucleotide
  Sense strand starting at position 2062 of SEQ ID NO: 587161
acaugcuuugucugaggca

SEQ ID NO: 771223 - RNA, 19 nt, Artificial Sequence
  Description of Artificial Sequence: Synthetic oligonucleotide
  Antisense strand to SEQ ID NO: 771222
ugccucagacaaagcaugu

SEQ ID NO: 771224 - RNA, 19 nt, Artificial Sequence
  Description of Artificial Sequence: Synthetic oligonucleotide
  Sense strand starting at position 2172 of SEQ ID NO: 587161
gcuggagugaaaugauuaa

SEQ ID NO: 771225 - RNA, 19 nt, Artificial Sequence
  Description of Artificial Sequence: Synthetic oligonucleotide
  Antisense strand to SEQ ID NO: 771224
uuaaucauuucacuccagc

SEQ ID NO: 771226 - RNA, 19 nt, Artificial Sequence
  Description of Artificial Sequence: Synthetic oligonucleotide
  Sense strand starting at position 2426 of SEQ ID NO: 587161
gggacugauucgcucccuu

SEQ ID NO: 771227 - RNA, 19 nt, Artificial Sequence
  Description of Artificial Sequence: Synthetic oligonucleotide
  Antisense strand to SEQ ID NO: 771226
aagggagcgaaucaguccc

SEQ ID NO: 771228 - RNA, 19 nt, Artificial Sequence
  Description of Artificial Sequence: Synthetic oligonucleotide
  Sense strand starting at position 2490 of SEQ ID NO: 587161
agcugugucaccgauacgu

SEQ ID NO: 771229 - RNA, 19 nt, Artificial Sequence
  Description of Artificial Sequence: Synthetic oligonucleotide
  Antisense strand to SEQ ID NO: 771228
acguaucggugacacagcu

SEQ ID NO: 771230 - RNA, 19 nt, Artificial Sequence
  Description of Artificial Sequence: Synthetic oligonucleotide
  Sense strand starting at position 2540 of SEQ ID NO: 587161
uuguuugugcuguugucua

SEQ ID NO: 771231 - RNA, 19 nt, Artificial Sequence
  Description of Artificial Sequence: Synthetic oligonucleotide
  Antisense strand to SEQ ID NO: 771230
uagacaacagcacaaacaa

SEQ ID NO: 771232 - RNA, 19 nt, Artificial Sequence
  Description of Artificial Sequence: Synthetic oligonucleotide
  Sense strand starting at position 2545 of SEQ ID NO: 587161
ugugcuguugucuacuuua

SEQ ID NO: 771233 - RNA, 19 nt, Artificial Sequence
  Description of Artificial Sequence: Synthetic oligonucleotide
  Antisense strand to SEQ ID NO: 771232
uaaaguagacaacagcaca

SEQ ID NO: 771234 - RNA, 19 nt, Artificial Sequence
  Description of Artificial Sequence: Synthetic oligonucleotide
  Sense strand starting at position 2548 of SEQ ID NO: 587161
gcuguugucuacuuuaauc

SEQ ID NO: 771235 - RNA, 19 nt, Artificial Sequence
  Description of Artificial Sequence: Synthetic oligonucleotide
  Antisense strand to SEQ ID NO: 771234
gauuaaaguagacaacagc

SEQ ID NO: 771236 - RNA, 19 nt, Artificial Sequence
  Description of Artificial Sequence: Synthetic oligonucleotide
  Sense strand starting at position 2579 of SEQ ID NO: 587161
ucuuuacucuucucaggua

SEQ ID NO: 771237 - RNA, 19 nt, Artificial Sequence
  Description of Artificial Sequence: Synthetic oligonucleotide
  Antisense strand to SEQ ID NO: 771236
uaccugagaagaguaaaga

SEQ ID NO: 771238 - RNA, 19 nt, Artificial Sequence
  Description of Artificial Sequence: Synthetic oligonucleotide
  Sense strand starting at position 2599 of SEQ ID NO: 587161
ugagcaaccucagggauaa

SEQ ID NO: 771239 - RNA, 19 nt, Artificial Sequence
  Description of Artificial Sequence: Synthetic oligonucleotide
  Antisense strand to SEQ ID NO: 771238
uuaucccugagguugcuca

SEQ ID NO: 771240 - RNA, 19 nt, Artificial Sequence
  Description of Artificial Sequence: Synthetic oligonucleotide
  Sense strand starting at position 2609 of SEQ ID NO: 587161
cagggauaagucggcagaa

SEQ ID NO: 771241 - RNA, 19 nt, Artificial Sequence
  Description of Artificial Sequence: Synthetic oligonucleotide
  Antisense strand to SEQ ID NO: 771240
uucugccgacuuaucccug

SEQ ID NO: 771242 - RNA, 19 nt, Artificial Sequence
  Description of Artificial Sequence: Synthetic oligonucleotide
  Sense strand starting at position 2610 of SEQ ID NO: 587161
agggauaagucggcagaag

SEQ ID NO: 771243 - RNA, 19 nt, Artificial Sequence
  Description of Artificial Sequence: Synthetic oligonucleotide
  Antisense strand to SEQ ID NO: 771242
cuucugccgacuuaucccu

SEQ ID NO: 771244 - RNA, 19 nt, Artificial Sequence
  Description of Artificial Sequence: Synthetic oligonucleotide
  Sense strand starting at position 2711 of SEQ ID NO: 587161
cuaccucauguuugccaga

SEQ ID NO: 771245 - RNA, 19 nt, Artificial Sequence
  Description of Artificial Sequence: Synthetic oligonucleotide
  Antisense strand to SEQ ID NO: 771244
ucuggcaaacaugagguag

SEQ ID NO: 771246 - RNA, 19 nt, Artificial Sequence
  Description of Artificial Sequence: Synthetic oligonucleotide
  Sense strand starting at position 2713 of SEQ ID NO: 587161
accucauguuugccagaga

SEQ ID NO: 771247 - RNA, 19 nt, Artificial Sequence
  Description of Artificial Sequence: Synthetic oligonucleotide
  Antisense strand to SEQ ID NO: 771246
ucucuggcaaacaugaggu

SEQ ID NO: 771248 - RNA, 19 nt, Artificial Sequence
  Description of Artificial Sequence: Synthetic oligonucleotide
  Sense strand starting at position 2716 of SEQ ID NO: 587161
ucauguuugccagagacuu

SEQ ID NO: 771249 - RNA, 19 nt, Artificial Sequence
  Description of Artificial Sequence: Synthetic oligonucleotide
  Antisense strand to SEQ ID NO: 771248
aagucucuggcaaacauga

SEQ ID NO: 771250 - RNA, 19 nt, Artificial Sequence
  Description of Artificial Sequence: Synthetic oligonucleotide
  Sense strand starting at position 2722 of SEQ ID NO: 587161
uugccagagacuuggcuuu

SEQ ID NO: 771251 - RNA, 19 nt, Artificial Sequence
  Description of Artificial Sequence: Synthetic oligonucleotide
  Antisense strand to SEQ ID NO: 771250
aaagccaagucucuggcaa

SEQ ID NO: 771252 - RNA, 19 nt, Artificial Sequence
  Description of Artificial Sequence: Synthetic oligonucleotide
  Sense strand starting at position 2787 of SEQ ID NO: 587161
acgggagacuagguuucaa

SEQ ID NO: 771253 - RNA, 19 nt, Artificial Sequence
  Description of Artificial Sequence: Synthetic oligonucleotide
  Antisense strand to SEQ ID NO: 771252
uugaaaccuagucucccgu

SEQ ID NO: 771254 - RNA, 19 nt, Artificial Sequence
  Description of Artificial Sequence: Synthetic oligonucleotide
  Sense strand starting at position 2813 of SEQ ID NO: 587161
gcaucaagacuugaucucu

SEQ ID NO: 771255 - RNA, 19 nt, Artificial Sequence
  Description of Artificial Sequence: Synthetic oligonucleotide
  Antisense strand to SEQ ID NO: 771254
agagaucaagucuugaugc

SEQ ID NO: 771256 - RNA, 19 nt, Artificial Sequence
  Description of Artificial Sequence: Synthetic oligonucleotide
  Sense strand starting at position 2891 of SEQ ID NO: 587161
aggugaggguuuccuaauc

SEQ ID NO: 771257 - RNA, 19 nt, Artificial Sequence
  Description of Artificial Sequence: Synthetic oligonucleotide
  Antisense strand to SEQ ID NO: 771256
gauuaggaaacccucaccu

SEQ ID NO: 771258 - RNA, 19 nt, Artificial Sequence
  Description of Artificial Sequence: Synthetic oligonucleotide
  Sense strand starting at position 2982 of SEQ ID NO: 587161
agaggguaugcguguguau

SEQ ID NO: 771259 - RNA, 19 nt, Artificial Sequence
  Description of Artificial Sequence: Synthetic oligonucleotide
  Antisense strand to SEQ ID NO: 771258
auacacacgcauacccucu

SEQ ID NO: 771260 - RNA, 19 nt, Artificial Sequence
  Description of Artificial Sequence: Synthetic oligonucleotide
  Sense strand starting at position 2983 of SEQ ID NO: 587161
gaggguaugcguguguauu

SEQ ID NO: 771261 - RNA, 19 nt, Artificial Sequence
  Description of Artificial Sequence: Synthetic oligonucleotide
  Antisense strand to SEQ ID NO: 771260
aauacacacgcauacccuc

SEQ ID NO: 771262 - RNA, 19 nt, Artificial Sequence
  Description of Artificial Sequence: Synthetic oligonucleotide
  Sense strand starting at position 2987 of SEQ ID NO: 587161
guaugcguguguauucgua

SEQ ID NO: 771263 - RNA, 19 nt, Artificial Sequence
  Description of Artificial Sequence: Synthetic oligonucleotide
  Antisense strand to SEQ ID NO: 771262
uacgaauacacacgcauac

SEQ ID NO: 771264 - RNA, 19 nt, Artificial Sequence
  Description of Artificial Sequence: Synthetic oligonucleotide
  Sense strand starting at position 3012 of SEQ ID NO: 587161
gugacuugggaacgcuaaa

SEQ ID NO: 771265 - RNA, 19 nt, Artificial Sequence
  Description of Artificial Sequence: Synthetic oligonucleotide
  Antisense strand to SEQ ID NO: 771264
uuuagcguucccaagucac

SEQ ID NO: 771266 - RNA, 19 nt, Artificial Sequence
  Description of Artificial Sequence: Synthetic oligonucleotide
  Sense strand starting at position 3057 of SEQ ID NO: 587161
uccugugcuguccagggaa

SEQ ID NO: 771267 - RNA, 19 nt, Artificial Sequence
  Description of Artificial Sequence: Synthetic oligonucleotide
  Antisense strand to SEQ ID NO: 771266
uucccuggacagcacagga

SEQ ID NO: 771268 - RNA, 19 nt, Artificial Sequence
  Description of Artificial Sequence: Synthetic oligonucleotide
  Sense strand starting at position 3060 of SEQ ID NO: 587161
ugugcuguccagggaagga

SEQ ID NO: 771269 - RNA, 19 nt, Artificial Sequence
  Description of Artificial Sequence: Synthetic oligonucleotide
  Antisense strand to SEQ ID NO: 771268
uccuucccuggacagcaca

SEQ ID NO: 771270 - RNA, 19 nt, Artificial Sequence
  Description of Artificial Sequence: Synthetic oligonucleotide
  Sense strand starting at position 3201 of SEQ ID NO: 587161
ucagcaucacgguaacuaa

SEQ ID NO: 771271 - RNA, 19 nt, Artificial Sequence
  Description of Artificial Sequence: Synthetic oligonucleotide
  Antisense strand to SEQ ID NO: 771270
uuaguuaccgugaugcuga

SEQ ID NO: 771272 - RNA, 19 nt, Artificial Sequence
  Description of Artificial Sequence: Synthetic oligonucleotide
  Sense strand starting at position 3208 of SEQ ID NO: 587161
cacgguaacuaaggagaaa

SEQ ID NO: 771273 - RNA, 19 nt, Artificial Sequence
  Description of Artificial Sequence: Synthetic oligonucleotide
  Antisense strand to SEQ ID NO: 771272
uuucuccuuaguuaccgug

SEQ ID NO: 771274 - RNA, 19 nt, Artificial Sequence
  Description of Artificial Sequence: Synthetic oligonucleotide
  Sense strand starting at position 3245 of SEQ ID NO: 587161
gcuauaggaucaccacaaa

SEQ ID NO: 771275 - RNA, 19 nt, Artificial Sequence
  Description of Artificial Sequence: Synthetic oligonucleotide
  Antisense strand to SEQ ID NO: 771274
uuuguggugauccuauagc

SEQ ID NO: 771276 - RNA, 19 nt, Artificial Sequence
  Description of Artificial Sequence: Synthetic oligonucleotide
  Sense strand starting at position 3320 of SEQ ID NO: 587161
aucugauccuggguuuguu

SEQ ID NO: 771277 - RNA, 19 nt, Artificial Sequence
  Description of Artificial Sequence: Synthetic oligonucleotide
  Antisense strand to SEQ ID NO: 771276
aacaaacccaggaucagau

SEQ ID NO: 771278 - RNA, 19 nt, Artificial Sequence
  Description of Artificial Sequence: Synthetic oligonucleotide
  Sense strand starting at position 3365 of SEQ ID NO: 587161
ccuguaucugucuggacuu

SEQ ID NO: 771279 - RNA, 19 nt, Artificial Sequence
  Description of Artificial Sequence: Synthetic oligonucleotide
  Antisense strand to SEQ ID NO: 771278
aaguccagacagauacagg

SEQ ID NO: 771280 - RNA, 19 nt, Artificial Sequence
  Description of Artificial Sequence: Synthetic oligonucleotide
  Sense strand starting at position 3408 of SEQ ID NO: 587161
ggccuaguuuguguaacua

SEQ ID NO: 771281 - RNA, 19 nt, Artificial Sequence
  Description of Artificial Sequence: Synthetic oligonucleotide
  Antisense strand to SEQ ID NO: 771280
uaguuacacaaacuaggcc

SEQ ID NO: 771282 - RNA, 19 nt, Artificial Sequence
  Description of Artificial Sequence: Synthetic oligonucleotide
  Sense strand starting at position 3429 of SEQ ID NO: 587161
cuguguuggucuuucucca

SEQ ID NO: 771283 - RNA, 19 nt, Artificial Sequence
  Description of Artificial Sequence: Synthetic oligonucleotide
  Antisense strand to SEQ ID NO: 771282
uggagaaagaccaacacag

SEQ ID NO: 771284 - RNA, 19 nt, Artificial Sequence
  Description of Artificial Sequence: Synthetic oligonucleotide
  Sense strand starting at position 3501 of SEQ ID NO: 587161
gccaaagcaucuuuacaga

SEQ ID NO: 771285 - RNA, 19 nt, Artificial Sequence
  Description of Artificial Sequence: Synthetic oligonucleotide
  Antisense strand to SEQ ID NO: 771284
ucuguaaagaugcuuuggc

SEQ ID NO: 771286 - RNA, 19 nt, Artificial Sequence
  Description of Artificial Sequence: Synthetic oligonucleotide
  Sense strand starting at position 3755 of SEQ ID NO: 587161
acucuuaaaugauguauga

SEQ ID NO: 771287 - RNA, 19 nt, Artificial Sequence
  Description of Artificial Sequence: Synthetic oligonucleotide
  Antisense strand to SEQ ID NO: 771286
ucauacaucauuuaagagu

SEQ ID NO: 771288 - RNA, 19 nt, Artificial Sequence
  Description of Artificial Sequence: Synthetic oligonucleotide
  Sense strand starting at position 3851 of SEQ ID NO: 587161
gacacugcuuuauugggau

SEQ ID NO: 771289 - RNA, 19 nt, Artificial Sequence
  Description of Artificial Sequence: Synthetic oligonucleotide
  Antisense strand to SEQ ID NO: 771288
aucccaauaaagcaguguc

SEQ ID NO: 771290 - RNA, 19 nt, Artificial Sequence
  Description of Artificial Sequence: Synthetic oligonucleotide
  Sense strand starting at position 3857 of SEQ ID NO: 587161
gcuuuauugggauggauca

SEQ ID NO: 771291 - RNA, 19 nt, Artificial Sequence
  Description of Artificial Sequence: Synthetic oligonucleotide
  Antisense strand to SEQ ID NO: 771290
ugauccaucccaauaaagc

SEQ ID NO: 771292 - RNA, 19 nt, Artificial Sequence
  Description of Artificial Sequence: Synthetic oligonucleotide
  Sense strand starting at position 3919 of SEQ ID NO: 587161
gggccuuccacguagaagu

SEQ ID NO: 771293 - RNA, 19 nt, Artificial Sequence
  Description of Artificial Sequence: Synthetic oligonucleotide
  Antisense strand to SEQ ID NO: 771292
acuucuacguggaaggccc

SEQ ID NO: 771294 - RNA, 19 nt, Artificial Sequence
  Description of Artificial Sequence: Synthetic oligonucleotide
  Sense strand starting at position 3953 of SEQ ID NO: 587161
ggcaaaggaauaugaguau

SEQ ID NO: 771295 - RNA, 19 nt, Artificial Sequence
  Description of Artificial Sequence: Synthetic oligonucleotide
  Antisense strand to SEQ ID NO: 771294
auacucauauuccuuugcc

SEQ ID NO: 771296 - RNA, 19 nt, Artificial Sequence
  Description of Artificial Sequence: Synthetic oligonucleotide
  Sense strand starting at position 3968 of SEQ ID NO: 587161
guauauaucuaagucacuu

SEQ ID NO: 771297 - RNA, 19 nt, Artificial Sequence
  Description of Artificial Sequence: Synthetic oligonucleotide
  Antisense strand to SEQ ID NO: 771296
aagugacuuagauauauac

SEQ ID NO: 771298 - RNA, 19 nt, Artificial Sequence
  Description of Artificial Sequence: Synthetic oligonucleotide
  Sense strand starting at position 3972 of SEQ ID NO: 587161
auaucuaagucacuuagga

SEQ ID NO: 771299 - RNA, 19 nt, Artificial Sequence
  Description of Artificial Sequence: Synthetic oligonucleotide
  Antisense strand to SEQ ID NO: 771298
uccuaagugacuuagauau

SEQ ID NO: 771300 - RNA, 19 nt, Artificial Sequence
  Description of Artificial Sequence: Synthetic oligonucleotide
  Sense strand starting at position 97 of SEQ ID NO: 587162
aagucaaaguguuuaagaa

SEQ ID NO: 771301 - RNA, 19 nt, Artificial Sequence
  Description of Artificial Sequence: Synthetic oligonucleotide
  Antisense strand to SEQ ID NO: 771300
uucuuaaacacuuugacuu

SEQ ID NO: 771302 - RNA, 19 nt, Artificial Sequence
  Description of Artificial Sequence: Synthetic oligonucleotide
  Sense strand starting at position 98 of SEQ ID NO: 587162
agucaaaguguuuaagaau

SEQ ID NO: 771303 - RNA, 19 nt, Artificial Sequence
  Description of Artificial Sequence: Synthetic oligonucleotide
  Antisense strand to SEQ ID NO: 771302
auucuuaaacacuuugacu

SEQ ID NO: 771304 - RNA, 19 nt, Artificial Sequence
  Description of Artificial Sequence: Synthetic oligonucleotide
  Sense strand starting at position 105 of SEQ ID NO: 587162
guguuuaagaaugggccaa

SEQ ID NO: 771305 - RNA, 19 nt, Artificial Sequence
  Description of Artificial Sequence: Synthetic oligonucleotide
  Antisense strand to SEQ ID NO: 771304
uuggcccauucuuaaacac

SEQ ID NO: 771306 - RNA, 19 nt, Artificial Sequence
  Description of Artificial Sequence: Synthetic oligonucleotide
  Sense strand starting at position 109 of SEQ ID NO: 587162
uuaagaaugggccaagugu

SEQ ID NO: 771307 - RNA, 19 nt, Artificial Sequence
  Description of Artificial Sequence: Synthetic oligonucleotide
  Antisense strand to SEQ ID NO: 771306
acacuuggcccauucuuaa

SEQ ID NO: 771308 - RNA, 19 nt, Artificial Sequence
  Description of Artificial Sequence: Synthetic oligonucleotide
  Sense strand starting at position 147 of SEQ ID NO: 587162
aaaguaauugagcagagca

SEQ ID NO: 771309 - RNA, 19 nt, Artificial Sequence
  Description of Artificial Sequence: Synthetic oligonucleotide
  Antisense strand to SEQ ID NO: 771308
ugcucugcucaauuacuuu

SEQ ID NO: 771310 - RNA, 19 nt, Artificial Sequence
  Description of Artificial Sequence: Synthetic oligonucleotide
  Sense strand starting at position 149 of SEQ ID NO: 587162
aguaauugagcagagcaca

SEQ ID NO: 771311 - RNA, 19 nt, Artificial Sequence
  Description of Artificial Sequence: Synthetic oligonucleotide
  Antisense strand to SEQ ID NO: 771310
ugugcucugcucaauuacu

SEQ ID NO: 771312 - RNA, 19 nt, Artificial Sequence
  Description of Artificial Sequence: Synthetic oligonucleotide
  Sense strand starting at position 185 of SEQ ID NO: 587162
ggaggaaagacuggccauu

SEQ ID NO: 771313 - RNA, 19 nt, Artificial Sequence
  Description of Artificial Sequence: Synthetic oligonucleotide
  Antisense strand to SEQ ID NO: 771312
aauggccagucuuuccucc

SEQ ID NO: 771314 - RNA, 19 nt, Artificial Sequence
  Description of Artificial Sequence: Synthetic oligonucleotide
  Sense strand starting at position 254 of SEQ ID NO: 587162
ggcagaauccgccaagaag

SEQ ID NO: 771315 - RNA, 19 nt, Artificial Sequence
  Description of Artificial Sequence: Synthetic oligonucleotide
  Antisense strand to SEQ ID NO: 771314
cuucuuggcggauucugcc

SEQ ID NO: 771316 - RNA, 19 nt, Artificial Sequence
  Description of Artificial Sequence: Synthetic oligonucleotide
  Sense strand starting at position 345 of SEQ ID NO: 587162
agaugaguuugacuccaug

SEQ ID NO: 771317 - RNA, 19 nt, Artificial Sequence
  Description of Artificial Sequence: Synthetic oligonucleotide
  Antisense strand to SEQ ID NO: 771316
cauggagucaaacucaucu

SEQ ID NO: 771318 - RNA, 19 nt, Artificial Sequence
  Description of Artificial Sequence: Synthetic oligonucleotide
  Sense strand starting at position 625 of SEQ ID NO: 587162
uuaagagaguugucccaag

SEQ ID NO: 771319 - RNA, 19 nt, Artificial Sequence
  Description of Artificial Sequence: Synthetic oligonucleotide
  Antisense strand to SEQ ID NO: 771318
cuugggacaacucucuuaa

SEQ ID NO: 771320 - RNA, 19 nt, Artificial Sequence
  Description of Artificial Sequence: Synthetic oligonucleotide
  Sense strand starting at position 1337 of SEQ ID NO: 587162
caaguugaguuugcagaga

SEQ ID NO: 771321 - RNA, 19 nt, Artificial Sequence
  Description of Artificial Sequence: Synthetic oligonucleotide
  Antisense strand to SEQ ID NO: 771320
ucucugcaaacucaacuug

SEQ ID NO: 771322 - RNA, 19 nt, Artificial Sequence
  Description of Artificial Sequence: Synthetic oligonucleotide
  Sense strand starting at position 1357 of SEQ ID NO: 587162
gcagguuaucgcagggucu

SEQ ID NO: 771323 - RNA, 19 nt, Artificial Sequence
  Description of Artificial Sequence: Synthetic oligonucleotide
  Antisense strand to SEQ ID NO: 771322
agacccugcgauaaccugc

SEQ ID NO: 771324 - RNA, 19 nt, Artificial Sequence
  Description of Artificial Sequence: Synthetic oligonucleotide
  Sense strand starting at position 1967 of SEQ ID NO: 587162
gcgagccuucuuuagaaag

SEQ ID NO: 771325 - RNA, 19 nt, Artificial Sequence
  Description of Artificial Sequence: Synthetic oligonucleotide
  Antisense strand to SEQ ID NO: 771324
cuuucuaaagaaggcucgc

SEQ ID NO: 771326 - RNA, 19 nt, Artificial Sequence
  Description of Artificial Sequence: Synthetic oligonucleotide
  Sense strand starting at position 2090 of SEQ ID NO: 587162
ccacccauucccggaaaga

SEQ ID NO: 771327 - RNA, 19 nt, Artificial Sequence
  Description of Artificial Sequence: Synthetic oligonucleotide
  Antisense strand to SEQ ID NO: 771326
ucuuuccgggaaugggugg

SEQ ID NO: 771328 - RNA, 19 nt, Artificial Sequence
  Description of Artificial Sequence: Synthetic oligonucleotide
  Sense strand starting at position 2390 of SEQ ID NO: 587162
cugccuucucacgaacuuu

SEQ ID NO: 771329 - RNA, 19 nt, Artificial Sequence
  Description of Artificial Sequence: Synthetic oligonucleotide
  Antisense strand to SEQ ID NO: 771328
aaaguucgugagaaggcag

SEQ ID NO: 771330 - RNA, 19 nt, Artificial Sequence
  Description of Artificial Sequence: Synthetic oligonucleotide
  Sense strand starting at position 2430 of SEQ ID NO: 587162
uggucuugcuuaccuagaa

SEQ ID NO: 771331 - RNA, 19 nt, Artificial Sequence
  Description of Artificial Sequence: Synthetic oligonucleotide
  Antisense strand to SEQ ID NO: 771330
uucuagguaagcaagacca

SEQ ID NO: 771332 - RNA, 19 nt, Artificial Sequence
  Description of Artificial Sequence: Synthetic oligonucleotide
  Sense strand starting at position 2431 of SEQ ID NO: 587162
ggucuugcuuaccuagaau

SEQ ID NO: 771333 - RNA, 19 nt, Artificial Sequence
  Description of Artificial Sequence: Synthetic oligonucleotide
  Antisense strand to SEQ ID NO: 771332
auucuagguaagcaagacc

SEQ ID NO: 771334 - RNA, 19 nt, Artificial Sequence
  Description of Artificial Sequence: Synthetic oligonucleotide
  Sense strand starting at position 2482 of SEQ ID NO: 587162
ccucaaucacgguggacau

SEQ ID NO: 771335 - RNA, 19 nt, Artificial Sequence
  Description of Artificial Sequence: Synthetic oligonucleotide
  Antisense strand to SEQ ID NO: 771334
auguccaccgugauugagg

SEQ ID NO: 771336 - RNA, 19 nt, Artificial Sequence
  Description of Artificial Sequence: Synthetic oligonucleotide
  Sense strand starting at position 2537 of SEQ ID NO: 587162
cccguagagauugggacaa

SEQ ID NO: 771337 - RNA, 19 nt, Artificial Sequence
  Description of Artificial Sequence: Synthetic oligonucleotide
  Antisense strand to SEQ ID NO: 771336
uugucccaaucucuacggg

SEQ ID NO: 771338 - RNA, 19 nt, Artificial Sequence
  Description of Artificial Sequence: Synthetic oligonucleotide
  Sense strand starting at position 3252 of SEQ ID NO: 587162
uccuauuuaucugucuagu

SEQ ID NO: 771339 - RNA, 19 nt, Artificial Sequence
  Description of Artificial Sequence: Synthetic oligonucleotide
  Antisense strand to SEQ ID NO: 771338
acuagacagauaaauagga

SEQ ID NO: 771340 - RNA, 19 nt, Artificial Sequence
  Description of Artificial Sequence: Synthetic oligonucleotide
  Sense strand starting at position 3360 of SEQ ID NO: 587162
gucauuugaucagauaaga

SEQ ID NO: 771341 - RNA, 19 nt, Artificial Sequence
  Description of Artificial Sequence: Synthetic oligonucleotide
  Antisense strand to SEQ ID NO: 771340
ucuuaucugaucaaaugac

SEQ ID NO: 771342 - RNA, 19 nt, Artificial Sequence
  Description of Artificial Sequence: Synthetic oligonucleotide
  Sense strand starting at position 3399 of SEQ ID NO: 587162
aauagauucugguugcuaa

SEQ ID NO: 771343 - RNA, 19 nt, Artificial Sequence
  Description of Artificial Sequence: Synthetic oligonucleotide
  Antisense strand to SEQ ID NO: 771342
uuagcaaccagaaucuauu

SEQ ID NO: 771344 - RNA, 19 nt, Artificial Sequence
  Description of Artificial Sequence: Synthetic oligonucleotide
  Sense strand starting at position 3400 of SEQ ID NO: 587162
auagauucugguugcuaac

SEQ ID NO: 771345 - RNA, 19 nt, Artificial Sequence
  Description of Artificial Sequence: Synthetic oligonucleotide
  Antisense strand to SEQ ID NO: 771344
guuagcaaccagaaucuau

SEQ ID NO: 771346 - RNA, 19 nt, Artificial Sequence
  Description of Artificial Sequence: Synthetic oligonucleotide
  Sense strand starting at position 3406 of SEQ ID NO: 587162
ucugguugcuaacuuagaa

SEQ ID NO: 771347 - RNA, 19 nt, Artificial Sequence
  Description of Artificial Sequence: Synthetic oligonucleotide
  Antisense strand to SEQ ID NO: 771346
uucuaaguuagcaaccaga

SEQ ID NO: 771348 - RNA, 19 nt, Artificial Sequence
  Description of Artificial Sequence: Synthetic oligonucleotide
  Sense strand starting at position 3443 of SEQ ID NO: 587162
ugagaauucuccucaguuu

SEQ ID NO: 771349 - RNA, 19 nt, Artificial Sequence
  Description of Artificial Sequence: Synthetic oligonucleotide
  Antisense strand to SEQ ID NO: 771348
aaacugaggagaauucuca

SEQ ID NO: 771350 - RNA, 19 nt, Artificial Sequence
  Description of Artificial Sequence: Synthetic oligonucleotide
  Sense strand starting at position 3492 of SEQ ID NO: 587162
ggaauagaguacuuuguua

SEQ ID NO: 771351 - RNA, 19 nt, Artificial Sequence
  Description of Artificial Sequence: Synthetic oligonucleotide
  Antisense strand to SEQ ID NO: 771350
uaacaaaguacucuauucc

SEQ ID NO: 771352 - RNA, 19 nt, Artificial Sequence
  Description of Artificial Sequence: Synthetic oligonucleotide
  Sense strand starting at position 3494 of SEQ ID NO: 587162
aauagaguacuuuguuaug

SEQ ID NO: 771353 - RNA, 19 nt, Artificial Sequence
  Description of Artificial Sequence: Synthetic oligonucleotide
  Antisense strand to SEQ ID NO: 771352
cauaacaaaguacucuauu

SEQ ID NO: 771354 - RNA, 19 nt, Artificial Sequence
  Description of Artificial Sequence: Synthetic oligonucleotide
  Sense strand starting at position 3496 of SEQ ID NO: 587162
uagaguacuuuguuaugaa

SEQ ID NO: 771355 - RNA, 19 nt, Artificial Sequence
  Description of Artificial Sequence: Synthetic oligonucleotide
  Antisense strand to SEQ ID NO: 771354
uucauaacaaaguacucua

SEQ ID NO: 771356 - RNA, 19 nt, Artificial Sequence
  Description of Artificial Sequence: Synthetic oligonucleotide
  Sense strand starting at position 3533 of SEQ ID NO: 587162
gccacauaggaucaucuua

SEQ ID NO: 771357 - RNA, 19 nt, Artificial Sequence
  Description of Artificial Sequence: Synthetic oligonucleotide
  Antisense strand to SEQ ID NO: 771356
uaagaugauccuauguggc

SEQ ID NO: 771358 - RNA, 19 nt, Artificial Sequence
  Description of Artificial Sequence: Synthetic oligonucleotide
  Sense strand starting at position 3538 of SEQ ID NO: 587162
auaggaucaucuuaggaug

SEQ ID NO: 771359 - RNA, 19 nt, Artificial Sequence
  Description of Artificial Sequence: Synthetic oligonucleotide
  Antisense strand to SEQ ID NO: 771358
cauccuaagaugauccuau

SEQ ID NO: 771360 - RNA, 19 nt, Artificial Sequence
  Description of Artificial Sequence: Synthetic oligonucleotide
  Sense strand starting at position 3543 of SEQ ID NO: 587162
aucaucuuaggaugucuaa

SEQ ID NO: 771361 - RNA, 19 nt, Artificial Sequence
  Description of Artificial Sequence: Synthetic oligonucleotide
  Antisense strand to SEQ ID NO: 771360
uuagacauccuaagaugau

SEQ ID NO: 771362 - RNA, 19 nt, Artificial Sequence
  Description of Artificial Sequence: Synthetic oligonucleotide
  Sense strand starting at position 3673 of SEQ ID NO: 587162
aguucuagauguuuauuga

SEQ ID NO: 771363 - RNA, 19 nt, Artificial Sequence
  Description of Artificial Sequence: Synthetic oligonucleotide
  Antisense strand to SEQ ID NO: 771362
ucaauaaacaucuagaacu

SEQ ID NO: 771364 - RNA, 19 nt, Artificial Sequence
  Description of Artificial Sequence: Synthetic oligonucleotide
  Sense strand starting at position 3674 of SEQ ID NO: 587162
guucuagauguuuauugac

SEQ ID NO: 771365 - RNA, 19 nt, Artificial Sequence
  Description of Artificial Sequence: Synthetic oligonucleotide
  Antisense strand to SEQ ID NO: 771364
gucaauaaacaucuagaac

SEQ ID NO: 771366 - RNA, 19 nt, Artificial Sequence
  Description of Artificial Sequence: Synthetic oligonucleotide
  Sense strand starting at position 3676 of SEQ ID NO: 587162
ucuagauguuuauugacua

SEQ ID NO: 771367 - RNA, 19 nt, Artificial Sequence
  Description of Artificial Sequence: Synthetic oligonucleotide
  Antisense strand to SEQ ID NO: 771366
uagucaauaaacaucuaga

SEQ ID NO: 771368 - RNA, 19 nt, Artificial Sequence
  Description of Artificial Sequence: Synthetic oligonucleotide
  Sense strand starting at position 3690 of SEQ ID NO: 587162
gacuaucuucuauguggua

SEQ ID NO: 771369 - RNA, 19 nt, Artificial Sequence
  Description of Artificial Sequence: Synthetic oligonucleotide
  Antisense strand to SEQ ID NO: 771368
uaccacauagaagauaguc

SEQ ID NO: 771370 - RNA, 19 nt, Artificial Sequence
  Description of Artificial Sequence: Synthetic oligonucleotide
  Sense strand starting at position 3691 of SEQ ID NO: 587162
acuaucuucuaugugguau

SEQ ID NO: 771371 - RNA, 19 nt, Artificial Sequence
  Description of Artificial Sequence: Synthetic oligonucleotide
  Antisense strand to SEQ ID NO: 771370
auaccacauagaagauagu

SEQ ID NO: 771372 - RNA, 19 nt, Artificial Sequence
  Description of Artificial Sequence: Synthetic oligonucleotide
  Sense strand starting at position 3773 of SEQ ID NO: 587162
cauguaugcgaagacauga

SEQ ID NO: 771373 - RNA, 19 nt, Artificial Sequence
  Description of Artificial Sequence: Synthetic oligonucleotide
  Antisense strand to SEQ ID NO: 771372
ucaugucuucgcauacaug

SEQ ID NO: 771374 - RNA, 19 nt, Artificial Sequence
  Description of Artificial Sequence: Synthetic oligonucleotide
  Sense strand starting at position 3857 of SEQ ID NO: 587162
gacugaagagucuaguuug

SEQ ID NO: 771375 - RNA, 19 nt, Artificial Sequence
  Description of Artificial Sequence: Synthetic oligonucleotide
  Antisense strand to SEQ ID NO: 771374
caaacuagacucuucaguc

SEQ ID NO: 771376 - RNA, 19 nt, Artificial Sequence
  Description of Artificial Sequence: Synthetic oligonucleotide
  Sense strand starting at position 3860 of SEQ ID NO: 587162
ugaagagucuaguuuggcu

SEQ ID NO: 771377 - RNA, 19 nt, Artificial Sequence
  Description of Artificial Sequence: Synthetic oligonucleotide
  Antisense strand to SEQ ID NO: 771376
agccaaacuagacucuuca

SEQ ID NO: 771378 - RNA, 19 nt, Artificial Sequence
  Description of Artificial Sequence: Synthetic oligonucleotide
  Sense strand starting at position 3876 of SEQ ID NO: 587162
gcuacagugguugggagua

SEQ ID NO: 771379 - RNA, 19 nt, Artificial Sequence
  Description of Artificial Sequence: Synthetic oligonucleotide
  Antisense strand to SEQ ID NO: 771378
uacucccaaccacuguagc

SEQ ID NO: 771380 - RNA, 19 nt, Artificial Sequence
  Description of Artificial Sequence: Synthetic oligonucleotide
  Sense strand starting at position 107 of SEQ ID NO: 587163
gcugaaaugcauuagaguu

SEQ ID NO: 771381 - RNA, 19 nt, Artificial Sequence
  Description of Artificial Sequence: Synthetic oligonucleotide
  Antisense strand to SEQ ID NO: 771380
aacucuaaugcauuucagc

SEQ ID NO: 771382 - RNA, 19 nt, Artificial Sequence
  Description of Artificial Sequence: Synthetic oligonucleotide
  Sense strand starting at position 200 of SEQ ID NO: 587163
aguggaggugucuaugaua

SEQ ID NO: 771383 - RNA, 19 nt, Artificial Sequence
  Description of Artificial Sequence: Synthetic oligonucleotide
  Antisense strand to SEQ ID NO: 771382
uaucauagacaccuccacu

SEQ ID NO: 771384 - RNA, 19 nt, Artificial Sequence
  Description of Artificial Sequence: Synthetic oligonucleotide
  Sense strand starting at position 221 of SEQ ID NO: 587163
aucacugugcuagauuaga

SEQ ID NO: 771385 - RNA, 19 nt, Artificial Sequence
  Description of Artificial Sequence: Synthetic oligonucleotide
  Antisense strand to SEQ ID NO: 771384
ucuaaucuagcacagugau

SEQ ID NO: 771386 - RNA, 19 nt, Artificial Sequence
  Description of Artificial Sequence: Synthetic oligonucleotide
  Sense strand starting at position 345 of SEQ ID NO: 587163
acguacuauuucgccauga

SEQ ID NO: 771387 - RNA, 19 nt, Artificial Sequence
  Description of Artificial Sequence: Synthetic oligonucleotide
  Antisense strand to SEQ ID NO: 771386
ucauggcgaaauaguacgu

SEQ ID NO: 771388 - RNA, 19 nt, Artificial Sequence
  Description of Artificial Sequence: Synthetic oligonucleotide
  Sense strand starting at position 346 of SEQ ID NO: 587163
cguacuauuucgccaugau

SEQ ID NO: 771389 - RNA, 19 nt, Artificial Sequence
  Description of Artificial Sequence: Synthetic oligonucleotide
  Antisense strand to SEQ ID NO: 771388
aucauggcgaaauaguacg

SEQ ID NO: 771390 - RNA, 19 nt, Artificial Sequence
  Description of Artificial Sequence: Synthetic oligonucleotide
  Sense strand starting at position 349 of SEQ ID NO: 587163
acuauuucgccaugauagc

SEQ ID NO: 771391 - RNA, 19 nt, Artificial Sequence
  Description of Artificial Sequence: Synthetic oligonucleotide
  Antisense strand to SEQ ID NO: 771390
gcuaucauggcgaaauagu

SEQ ID NO: 771392 - RNA, 19 nt, Artificial Sequence
  Description of Artificial Sequence: Synthetic oligonucleotide
  Sense strand starting at position 477 of SEQ ID NO: 587163
gcaaaugugacaugagggu

SEQ ID NO: 771393 - RNA, 19 nt, Artificial Sequence
  Description of Artificial Sequence: Synthetic oligonucleotide
  Antisense strand to SEQ ID NO: 771392
acccucaugucacauuugc

SEQ ID NO: 771394 - RNA, 19 nt, Artificial Sequence
  Description of Artificial Sequence: Synthetic oligonucleotide
  Sense strand starting at position 490 of SEQ ID NO: 587163
gagggugacuccuugguga

SEQ ID NO: 771395 - RNA, 19 nt, Artificial Sequence
  Description of Artificial Sequence: Synthetic oligonucleotide
  Antisense strand to SEQ ID NO: 771394
ucaccaaggagucacccuc

SEQ ID NO: 771396 - RNA, 19 nt, Artificial Sequence
  Description of Artificial Sequence: Synthetic oligonucleotide
  Sense strand starting at position 505 of SEQ ID NO: 587163
gugacucaccucugguaaa

SEQ ID NO: 771397 - RNA, 19 nt, Artificial Sequence
  Description of Artificial Sequence: Synthetic oligonucleotide
  Antisense strand to SEQ ID NO: 771396
uuuaccagaggugagucac

SEQ ID NO: 771398 - RNA, 19 nt, Artificial Sequence
  Description of Artificial Sequence: Synthetic oligonucleotide
  Sense strand starting at position 741 of SEQ ID NO: 587163
acaugugaaguugaguaau

SEQ ID NO: 771399 - RNA, 19 nt, Artificial Sequence
  Description of Artificial Sequence: Synthetic oligonucleotide
  Antisense strand to SEQ ID NO: 771398
auuacucaacuucacaugu

SEQ ID NO: 771400 - RNA, 19 nt, Artificial Sequence
  Description of Artificial Sequence: Synthetic oligonucleotide
  Sense strand starting at position 773 of SEQ ID NO: 587163
gggauaguauggccuaaua

SEQ ID NO: 771401 - RNA, 19 nt, Artificial Sequence
  Description of Artificial Sequence: Synthetic oligonucleotide
  Antisense strand to SEQ ID NO: 771400
uauuaggccauacuauccc

SEQ ID NO: 771402 - RNA, 19 nt, Artificial Sequence
  Description of Artificial Sequence: Synthetic oligonucleotide
  Sense strand starting at position 1291 of SEQ ID NO: 587163
cgccaaauaucaccagaau

SEQ ID NO: 771403 - RNA, 19 nt, Artificial Sequence
  Description of Artificial Sequence: Synthetic oligonucleotide
  Antisense strand to SEQ ID NO: 771402
auucuggugauauuuggcg

SEQ ID NO: 771404 - RNA, 19 nt, Artificial Sequence
  Description of Artificial Sequence: Synthetic oligonucleotide
  Sense strand starting at position 2457 of SEQ ID NO: 587163
gagacaaggccucacguua

SEQ ID NO: 771405 - RNA, 19 nt, Artificial Sequence
  Description of Artificial Sequence: Synthetic oligonucleotide
  Antisense strand to SEQ ID NO: 771404
uaacgugaggccuugucuc

SEQ ID NO: 771406 - RNA, 19 nt, Artificial Sequence
  Description of Artificial Sequence: Synthetic oligonucleotide
  Sense strand starting at position 2578 of SEQ ID NO: 587163
gaagguucgcaucacuaau

SEQ ID NO: 771407 - RNA, 19 nt, Artificial Sequence
  Description of Artificial Sequence: Synthetic oligonucleotide
  Antisense strand to SEQ ID NO: 771406
auuagugaugcgaaccuuc

SEQ ID NO: 771408 - RNA, 19 nt, Artificial Sequence
  Description of Artificial Sequence: Synthetic oligonucleotide
  Sense strand starting at position 2580 of SEQ ID NO: 587163
agguucgcaucacuaauuu

SEQ ID NO: 771409 - RNA, 19 nt, Artificial Sequence
  Description of Artificial Sequence: Synthetic oligonucleotide
  Antisense strand to SEQ ID NO: 771408
aaauuagugaugcgaaccu

SEQ ID NO: 771410 - RNA, 19 nt, Artificial Sequence
  Description of Artificial Sequence: Synthetic oligonucleotide
  Sense strand starting at position 2732 of SEQ ID NO: 587163
ccugcugagcuuuauugga

SEQ ID NO: 771411 - RNA, 19 nt, Artificial Sequence
  Description of Artificial Sequence: Synthetic oligonucleotide
  Antisense strand to SEQ ID NO: 771410
uccaauaaagcucagcagg

SEQ ID NO: 771412 - RNA, 19 nt, Artificial Sequence
  Description of Artificial Sequence: Synthetic oligonucleotide
  Sense strand starting at position 2734 of SEQ ID NO: 587163
ugcugagcuuuauuggaaa

SEQ ID NO: 771413 - RNA, 19 nt, Artificial Sequence
  Description of Artificial Sequence: Synthetic oligonucleotide
  Antisense strand to SEQ ID NO: 771412
uuuccaauaaagcucagca

SEQ ID NO: 771414 - RNA, 19 nt, Artificial Sequence
  Description of Artificial Sequence: Synthetic oligonucleotide
  Sense strand starting at position 2736 of SEQ ID NO: 587163
cugagcuuuauuggaaagu

SEQ ID NO: 771415 - RNA, 19 nt, Artificial Sequence
  Description of Artificial Sequence: Synthetic oligonucleotide
  Antisense strand to SEQ ID NO: 771414
acuuuccaauaaagcucag

SEQ ID NO: 771416 - RNA, 19 nt, Artificial Sequence
  Description of Artificial Sequence: Synthetic oligonucleotide
  Sense strand starting at position 2761 of SEQ ID NO: 587163
uccgaauugagaugugaua

SEQ ID NO: 771417 - RNA, 19 nt, Artificial Sequence
  Description of Artificial Sequence: Synthetic oligonucleotide
  Antisense strand to SEQ ID NO: 771416
uaucacaucucaauucgga

SEQ ID NO: 771418 - RNA, 19 nt, Artificial Sequence
  Description of Artificial Sequence: Synthetic oligonucleotide
  Sense strand starting at position 2763 of SEQ ID NO: 587163
cgaauugagaugugauaua

SEQ ID NO: 771419 - RNA, 19 nt, Artificial Sequence
  Description of Artificial Sequence: Synthetic oligonucleotide
  Antisense strand to SEQ ID NO: 771418
uauaucacaucucaauucg

SEQ ID NO: 771420 - RNA, 19 nt, Artificial Sequence
  Description of Artificial Sequence: Synthetic oligonucleotide
  Sense strand starting at position 2768 of SEQ ID NO: 587163
ugagaugugauauaagugu

SEQ ID NO: 771421 - RNA, 19 nt, Artificial Sequence
  Description of Artificial Sequence: Synthetic oligonucleotide
  Antisense strand to SEQ ID NO: 771420
acacuuauaucacaucuca

SEQ ID NO: 771422 - RNA, 19 nt, Artificial Sequence
  Description of Artificial Sequence: Synthetic oligonucleotide
  Sense strand starting at position 2772 of SEQ ID NO: 587163
augugauauaagugugaaa

SEQ ID NO: 771423 - RNA, 19 nt, Artificial Sequence
  Description of Artificial Sequence: Synthetic oligonucleotide
  Antisense strand to SEQ ID NO: 771422
uuucacacuuauaucacau

SEQ ID NO: 771424 - RNA, 19 nt, Artificial Sequence
  Description of Artificial Sequence: Synthetic oligonucleotide
  Sense strand starting at position 2774 of SEQ ID NO: 587163
gugauauaagugugaaaua

SEQ ID NO: 771425 - RNA, 19 nt, Artificial Sequence
  Description of Artificial Sequence: Synthetic oligonucleotide
  Antisense strand to SEQ ID NO: 771424
uauuucacacuuauaucac

SEQ ID NO: 771426 - RNA, 19 nt, Artificial Sequence
  Description of Artificial Sequence: Synthetic oligonucleotide
  Sense strand starting at position 2969 of SEQ ID NO: 587163
gcaaauguggauuaccuua

SEQ ID NO: 771427 - RNA, 19 nt, Artificial Sequence
  Description of Artificial Sequence: Synthetic oligonucleotide
  Antisense strand to SEQ ID NO: 771426
uaagguaauccacauuugc

SEQ ID NO: 771428 - RNA, 19 nt, Artificial Sequence
  Description of Artificial Sequence: Synthetic oligonucleotide
  Sense strand starting at position 3009 of SEQ ID NO: 587163
cuagaccugccuuaagcau

SEQ ID NO: 771429 - RNA, 19 nt, Artificial Sequence
  Description of Artificial Sequence: Synthetic oligonucleotide
  Antisense strand to SEQ ID NO: 771428
augcuuaaggcaggucuag

SEQ ID NO: 771430 - RNA, 19 nt, Artificial Sequence
  Description of Artificial Sequence: Synthetic oligonucleotide
  Sense strand starting at position 3154 of SEQ ID NO: 587163
ggugcucgugaggauuaaa

SEQ ID NO: 771431 - RNA, 19 nt, Artificial Sequence
  Description of Artificial Sequence: Synthetic oligonucleotide
  Antisense strand to SEQ ID NO: 771430
uuuaauccucacgagcacc

SEQ ID NO: 771432 - RNA, 19 nt, Artificial Sequence
  Description of Artificial Sequence: Synthetic oligonucleotide
  Sense strand starting at position 3230 of SEQ ID NO: 587163
agaagaccuucucugccau

SEQ ID NO: 771433 - RNA, 19 nt, Artificial Sequence
  Description of Artificial Sequence: Synthetic oligonucleotide
  Antisense strand to SEQ ID NO: 771432
auggcagagaaggucuucu

SEQ ID NO: 771434 - RNA, 19 nt, Artificial Sequence
  Description of Artificial Sequence: Synthetic oligonucleotide
  Sense strand starting at position 3250 of SEQ ID NO: 587163
cugugaaauuuggacuuau

SEQ ID NO: 771435 - RNA, 19 nt, Artificial Sequence
  Description of Artificial Sequence: Synthetic oligonucleotide
  Antisense strand to SEQ ID NO: 771434
auaaguccaaauuucacag

SEQ ID NO: 771436 - RNA, 19 nt, Artificial Sequence
  Description of Artificial Sequence: Synthetic oligonucleotide
  Sense strand starting at position 3259 of SEQ ID NO: 587163
uuggacuuauaucccgaga

SEQ ID NO: 771437 - RNA, 19 nt, Artificial Sequence
  Description of Artificial Sequence: Synthetic oligonucleotide
  Antisense strand to SEQ ID NO: 771436
ucucgggauauaaguccaa

SEQ ID NO: 771438 - RNA, 19 nt, Artificial Sequence
  Description of Artificial Sequence: Synthetic oligonucleotide
  Sense strand starting at position 3264 of SEQ ID NO: 587163
cuuauaucccgagaacuuu

SEQ ID NO: 771439 - RNA, 19 nt, Artificial Sequence
  Description of Artificial Sequence: Synthetic oligonucleotide
  Antisense strand to SEQ ID NO: 771438
aaaguucucgggauauaag

SEQ ID NO: 771440 - RNA, 19 nt, Artificial Sequence
  Description of Artificial Sequence: Synthetic oligonucleotide
  Sense strand starting at position 3432 of SEQ ID NO: 587163
ggaacuuaccacugauauu

SEQ ID NO: 771441 - RNA, 19 nt, Artificial Sequence
  Description of Artificial Sequence: Synthetic oligonucleotide
  Antisense strand to SEQ ID NO: 771440
aauaucagugguaaguucc

SEQ ID NO: 771442 - RNA, 19 nt, Artificial Sequence
  Description of Artificial Sequence: Synthetic oligonucleotide
  Sense strand starting at position 3698 of SEQ ID NO: 587163
gagaguuugcaguggacaa

SEQ ID NO: 771443 - RNA, 19 nt, Artificial Sequence
  Description of Artificial Sequence: Synthetic oligonucleotide
  Antisense strand to SEQ ID NO: 771442
uuguccacugcaaacucuc

SEQ ID NO: 771444 - RNA, 19 nt, Artificial Sequence
  Description of Artificial Sequence: Synthetic oligonucleotide
  Sense strand starting at position 3741 of SEQ ID NO: 587163
agguguauucuguauacag

SEQ ID NO: 771445 - RNA, 19 nt, Artificial Sequence
  Description of Artificial Sequence: Synthetic oligonucleotide
  Antisense strand to SEQ ID NO: 771444
cuguauacagaauacaccu

SEQ ID NO: 771446 - RNA, 19 nt, Artificial Sequence
  Description of Artificial Sequence: Synthetic oligonucleotide
  Sense strand starting at position 3758 of SEQ ID NO: 587163
aggucuagaccuugaggga

SEQ ID NO: 771447 - RNA, 19 nt, Artificial Sequence
  Description of Artificial Sequence: Synthetic oligonucleotide
  Antisense strand to SEQ ID NO: 771446
ucccucaaggucuagaccu

SEQ ID NO: 771448 - RNA, 19 nt, Artificial Sequence
  Description of Artificial Sequence: Synthetic oligonucleotide
  Sense strand starting at position 3794 of SEQ ID NO: 587163
uguagauuugcgugacauc

SEQ ID NO: 771449 - RNA, 19 nt, Artificial Sequence
  Description of Artificial Sequence: Synthetic oligonucleotide
  Antisense strand to SEQ ID NO: 771448
gaugucacgcaaaucuaca

SEQ ID NO: 771450 - RNA, 19 nt, Artificial Sequence
  Description of Artificial Sequence: Synthetic oligonucleotide
  Sense strand starting at position 3816 of SEQ ID NO: 587163
gcauuagguaacugagagu

SEQ ID NO: 771451 - RNA, 19 nt, Artificial Sequence
  Description of Artificial Sequence: Synthetic oligonucleotide
  Antisense strand to SEQ ID NO: 771450
acucucaguuaccuaaugc

SEQ ID NO: 771452 - RNA, 19 nt, Artificial Sequence
  Description of Artificial Sequence: Synthetic oligonucleotide
  Sense strand starting at position 3823 of SEQ ID NO: 587163
guaacugagaguugauaag

SEQ ID NO: 771453 - RNA, 19 nt, Artificial Sequence
  Description of Artificial Sequence: Synthetic oligonucleotide
  Antisense strand to SEQ ID NO: 771452
cuuaucaacucucaguuac

SEQ ID NO: 771454 - RNA, 19 nt, Artificial Sequence
  Description of Artificial Sequence: Synthetic oligonucleotide
  Sense strand starting at position 3887 of SEQ ID NO: 587163
gaaagaagcuuggcgaaua

SEQ ID NO: 771455 - RNA, 19 nt, Artificial Sequence
  Description of Artificial Sequence: Synthetic oligonucleotide
  Antisense strand to SEQ ID NO: 771454
uauucgccaagcuucuuuc

SEQ ID NO: 771456 - RNA, 19 nt, Artificial Sequence
  Description of Artificial Sequence: Synthetic oligonucleotide
  Sense strand starting at position 3898 of SEQ ID NO: 587163
ggcgaauacccacauuaaa

SEQ ID NO: 771457 - RNA, 19 nt, Artificial Sequence
  Description of Artificial Sequence: Synthetic oligonucleotide
  Antisense strand to SEQ ID NO: 771456
uuuaauguggguauucgcc

SEQ ID NO: 771458 - RNA, 19 nt, Artificial Sequence
  Description of Artificial Sequence: Synthetic oligonucleotide
  Sense strand starting at position 3968 of SEQ ID NO: 587163
cucagcauuuguuccugaa

SEQ ID NO: 771459 - RNA, 19 nt, Artificial Sequence
  Description of Artificial Sequence: Synthetic oligonucleotide
  Antisense strand to SEQ ID NO: 771458
uucaggaacaaaugcugag

SEQ ID NO: 771460 - RNA, 19 nt, Artificial Sequence
  Description of Artificial Sequence: Synthetic oligonucleotide
  Sense strand starting at position 8 of SEQ ID NO: 587164
acaaguauuuggcauaacu

SEQ ID NO: 771461 - RNA, 19 nt, Artificial Sequence
  Description of Artificial Sequence: Synthetic oligonucleotide
  Antisense strand to SEQ ID NO: 771460
aguuaugccaaauacuugu

SEQ ID NO: 771462 - RNA, 19 nt, Artificial Sequence
  Description of Artificial Sequence: Synthetic oligonucleotide
  Sense strand starting at position 18 of SEQ ID NO: 587164
ggcauaacuuuaguagaca

SEQ ID NO: 771463 - RNA, 19 nt, Artificial Sequence
  Description of Artificial Sequence: Synthetic oligonucleotide
  Antisense strand to SEQ ID NO: 771462
ugucuacuaaaguuaugcc

SEQ ID NO: 771464 - RNA, 19 nt, Artificial Sequence
  Description of Artificial Sequence: Synthetic oligonucleotide
  Sense strand starting at position 951 of SEQ ID NO: 587164
ggauuacaucaacgauuau

SEQ ID NO: 771465 - RNA, 19 nt, Artificial Sequence
  Description of Artificial Sequence: Synthetic oligonucleotide
  Antisense strand to SEQ ID NO: 771464
auaaucguugauguaaucc

SEQ ID NO: 771466 - RNA, 19 nt, Artificial Sequence
  Description of Artificial Sequence: Synthetic oligonucleotide
  Sense strand starting at position 1192 of SEQ ID NO: 587164
uggaaauaauguucccaca

SEQ ID NO: 771467 - RNA, 19 nt, Artificial Sequence
  Description of Artificial Sequence: Synthetic oligonucleotide
  Antisense strand to SEQ ID NO: 771466
ugugggaacauuauuucca

SEQ ID NO: 771468 - RNA, 19 nt, Artificial Sequence
  Description of Artificial Sequence: Synthetic oligonucleotide
  Sense strand starting at position 1429 of SEQ ID NO: 587164
uuaauaagcuucuccagag

SEQ ID NO: 771469 - RNA, 19 nt, Artificial Sequence
  Description of Artificial Sequence: Synthetic oligonucleotide
  Antisense strand to SEQ ID NO: 771468
cucuggagaagcuuauuaa

SEQ ID NO: 771470 - RNA, 19 nt, Artificial Sequence
  Description of Artificial Sequence: Synthetic oligonucleotide
  Sense strand starting at position 1495 of SEQ ID NO: 587164
agagaagucaagugaacuc

SEQ ID NO: 771471 - RNA, 19 nt, Artificial Sequence
  Description of Artificial Sequence: Synthetic oligonucleotide
  Antisense strand to SEQ ID NO: 771470
gaguucacuugacuucucu

SEQ ID NO: 771472 - RNA, 19 nt, Artificial Sequence
  Description of Artificial Sequence: Synthetic oligonucleotide
  Sense strand starting at position 1750 of SEQ ID NO: 587164
ggguuaacucgugaacuca

SEQ ID NO: 771473 - RNA, 19 nt, Artificial Sequence
  Description of Artificial Sequence: Synthetic oligonucleotide
  Antisense strand to SEQ ID NO: 771472
ugaguucacgaguuaaccc

SEQ ID NO: 771474 - RNA, 19 nt, Artificial Sequence
  Description of Artificial Sequence: Synthetic oligonucleotide
  Sense strand starting at position 1947 of SEQ ID NO: 587164
guuugaaggcuccggaacu

SEQ ID NO: 771475 - RNA, 19 nt, Artificial Sequence
  Description of Artificial Sequence: Synthetic oligonucleotide
  Antisense strand to SEQ ID NO: 771474
aguuccggagccuucaaac

SEQ ID NO: 771476 - RNA, 19 nt, Artificial Sequence
  Description of Artificial Sequence: Synthetic oligonucleotide
  Sense strand starting at position 2092 of SEQ ID NO: 587164
ggacaaucuugauuaaucg

SEQ ID NO: 771477 - RNA, 19 nt, Artificial Sequence
  Description of Artificial Sequence: Synthetic oligonucleotide
  Antisense strand to SEQ ID NO: 771476
cgauuaaucaagauugucc

SEQ ID NO: 771478 - RNA, 19 nt, Artificial Sequence
  Description of Artificial Sequence: Synthetic oligonucleotide
  Sense strand starting at position 2093 of SEQ ID NO: 587164
gacaaucuugauuaaucgu

SEQ ID NO: 771479 - RNA, 19 nt, Artificial Sequence
  Description of Artificial Sequence: Synthetic oligonucleotide
  Antisense strand to SEQ ID NO: 771478
acgauuaaucaagauuguc

SEQ ID NO: 771480 - RNA, 19 nt, Artificial Sequence
  Description of Artificial Sequence: Synthetic oligonucleotide
  Sense strand starting at position 2133 of SEQ ID NO: 587164
uuagguugauaagagauuu

SEQ ID NO: 771481 - RNA, 19 nt, Artificial Sequence
  Description of Artificial Sequence: Synthetic oligonucleotide
  Antisense strand to SEQ ID NO: 771480
aaaucucuuaucaaccuaa

SEQ ID NO: 771482 - RNA, 19 nt, Artificial Sequence
  Description of Artificial Sequence: Synthetic oligonucleotide
  Sense strand starting at position 2574 of SEQ ID NO: 587164
aggaaauggugacccucau

SEQ ID NO: 771483 - RNA, 19 nt, Artificial Sequence
  Description of Artificial Sequence: Synthetic oligonucleotide
  Antisense strand to SEQ ID NO: 771482
augagggucaccauuuccu

SEQ ID NO: 771484 - RNA, 19 nt, Artificial Sequence
  Description of Artificial Sequence: Synthetic oligonucleotide
  Sense strand starting at position 2580 of SEQ ID NO: 587164
uggugacccucauuggaga

SEQ ID NO: 771485 - RNA, 19 nt, Artificial Sequence
  Description of Artificial Sequence: Synthetic oligonucleotide
  Antisense strand to SEQ ID NO: 771484
ucuccaaugagggucacca

SEQ ID NO: 771486 - RNA, 19 nt, Artificial Sequence
  Description of Artificial Sequence: Synthetic oligonucleotide
  Sense strand starting at position 2608 of SEQ ID NO: 587164
uuagaauccuuguuggaaa

SEQ ID NO: 771487 - RNA, 19 nt, Artificial Sequence
  Description of Artificial Sequence: Synthetic oligonucleotide
  Antisense strand to SEQ ID NO: 771486
uuuccaacaaggauucuaa

SEQ ID NO: 771488 - RNA, 19 nt, Artificial Sequence
  Description of Artificial Sequence: Synthetic oligonucleotide
  Sense strand starting at position 2625 of SEQ ID NO: 587164
aaccguguuauggauggau

SEQ ID NO: 771489 - RNA, 19 nt, Artificial Sequence
  Description of Artificial Sequence: Synthetic oligonucleotide
  Antisense strand to SEQ ID NO: 771488
auccauccauaacacgguu

SEQ ID NO: 771490 - RNA, 19 nt, Artificial Sequence
  Description of Artificial Sequence: Synthetic oligonucleotide
  Sense strand starting at position 2627 of SEQ ID NO: 587164
ccguguuauggauggauuu

SEQ ID NO: 771491 - RNA, 19 nt, Artificial Sequence
  Description of Artificial Sequence: Synthetic oligonucleotide
  Antisense strand to SEQ ID NO: 771490
aaauccauccauaacacgg

SEQ ID NO: 771492 - RNA, 19 nt, Artificial Sequence
  Description of Artificial Sequence: Synthetic oligonucleotide
  Sense strand starting at position 3034 of SEQ ID NO: 587164
uauugauagucucuaggca

SEQ ID NO: 771493 - RNA, 19 nt, Artificial Sequence
  Description of Artificial Sequence: Synthetic oligonucleotide
  Antisense strand to SEQ ID NO: 771492
ugccuagagacuaucaaua

SEQ ID NO: 771494 - RNA, 19 nt, Artificial Sequence
  Description of Artificial Sequence: Synthetic oligonucleotide
  Sense strand starting at position 3058 of SEQ ID NO: 587164
aaugacagucgugagcaaa

SEQ ID NO: 771495 - RNA, 19 nt, Artificial Sequence
  Description of Artificial Sequence: Synthetic oligonucleotide
  Antisense strand to SEQ ID NO: 771494
uuugcucacgacugucauu

SEQ ID NO: 771496 - RNA, 19 nt, Artificial Sequence
  Description of Artificial Sequence: Synthetic oligonucleotide
  Sense strand starting at position 3061 of SEQ ID NO: 587164
gacagucgugagcaaagaa

SEQ ID NO: 771497 - RNA, 19 nt, Artificial Sequence
  Description of Artificial Sequence: Synthetic oligonucleotide
  Antisense strand to SEQ ID NO: 771496
uucuuugcucacgacuguc

SEQ ID NO: 771498 - RNA, 19 nt, Artificial Sequence
  Description of Artificial Sequence: Synthetic oligonucleotide
  Sense strand starting at position 3083 of SEQ ID NO: 587164
guagaucuugguggaguua

SEQ ID NO: 771499 - RNA, 19 nt, Artificial Sequence
  Description of Artificial Sequence: Synthetic oligonucleotide
  Antisense strand to SEQ ID NO: 771498
uaacuccaccaagaucuac

SEQ ID NO: 771500 - RNA, 19 nt, Artificial Sequence
  Description of Artificial Sequence: Synthetic oligonucleotide
  Sense strand starting at position 3092 of SEQ ID NO: 587164
gguggaguuagaugucaaa

SEQ ID NO: 771501 - RNA, 19 nt, Artificial Sequence
  Description of Artificial Sequence: Synthetic oligonucleotide
  Antisense strand to SEQ ID NO: 771500
uuugacaucuaacuccacc

SEQ ID NO: 771502 - RNA, 19 nt, Artificial Sequence
  Description of Artificial Sequence: Synthetic oligonucleotide
  Sense strand starting at position 3095 of SEQ ID NO: 587164
ggaguuagaugucaaauuu

SEQ ID NO: 771503 - RNA, 19 nt, Artificial Sequence
  Description of Artificial Sequence: Synthetic oligonucleotide
  Antisense strand to SEQ ID NO: 771502
aaauuugacaucuaacucc

SEQ ID NO: 771504 - RNA, 19 nt, Artificial Sequence
  Description of Artificial Sequence: Synthetic oligonucleotide
  Sense strand starting at position 3136 of SEQ ID NO: 587164
uuacaagugcuccaaggau

SEQ ID NO: 771505 - RNA, 19 nt, Artificial Sequence
  Description of Artificial Sequence: Synthetic oligonucleotide
  Antisense strand to SEQ ID NO: 771504
auccuuggagcacuuguaa

SEQ ID NO: 771506 - RNA, 19 nt, Artificial Sequence
  Description of Artificial Sequence: Synthetic oligonucleotide
  Sense strand starting at position 3222 of SEQ ID NO: 587164
agcugagacggaugagauu

SEQ ID NO: 771507 - RNA, 19 nt, Artificial Sequence
  Description of Artificial Sequence: Synthetic oligonucleotide
  Antisense strand to SEQ ID NO: 771506
aaucucauccgucucagcu

SEQ ID NO: 771508 - RNA, 19 nt, Artificial Sequence
  Description of Artificial Sequence: Synthetic oligonucleotide
  Sense strand starting at position 3359 of SEQ ID NO: 587164
ggcuccuaacucuaucagu

SEQ ID NO: 771509 - RNA, 19 nt, Artificial Sequence
  Description of Artificial Sequence: Synthetic oligonucleotide
  Antisense strand to SEQ ID NO: 771508
acugauagaguuaggagcc

SEQ ID NO: 771510 - RNA, 19 nt, Artificial Sequence
  Description of Artificial Sequence: Synthetic oligonucleotide
  Sense strand starting at position 3522 of SEQ ID NO: 587164
uggguugagacuuaguuaa

SEQ ID NO: 771511 - RNA, 19 nt, Artificial Sequence
  Description of Artificial Sequence: Synthetic oligonucleotide
  Antisense strand to SEQ ID NO: 771510
uuaacuaagucucaaccca

SEQ ID NO: 771512 - RNA, 19 nt, Artificial Sequence
  Description of Artificial Sequence: Synthetic oligonucleotide
  Sense strand starting at position 3524 of SEQ ID NO: 587164
gguugagacuuaguuaaua

SEQ ID NO: 771513 - RNA, 19 nt, Artificial Sequence
  Description of Artificial Sequence: Synthetic oligonucleotide
  Antisense strand to SEQ ID NO: 771512
uauuaacuaagucucaacc

SEQ ID NO: 771514 - RNA, 19 nt, Artificial Sequence
  Description of Artificial Sequence: Synthetic oligonucleotide
  Sense strand starting at position 3546 of SEQ ID NO: 587164
aggaaacauuguugauuuc

SEQ ID NO: 771515 - RNA, 19 nt, Artificial Sequence
  Description of Artificial Sequence: Synthetic oligonucleotide
  Antisense strand to SEQ ID NO: 771514
gaaaucaacaauguuuccu

SEQ ID NO: 771516 - RNA, 19 nt, Artificial Sequence
  Description of Artificial Sequence: Synthetic oligonucleotide
  Sense strand starting at position 3573 of SEQ ID NO: 587164
uaauaauggcauuguaguu

SEQ ID NO: 771517 - RNA, 19 nt, Artificial Sequence
  Description of Artificial Sequence: Synthetic oligonucleotide
  Antisense strand to SEQ ID NO: 771516
aacuacaaugccauuauua

SEQ ID NO: 771518 - RNA, 19 nt, Artificial Sequence
  Description of Artificial Sequence: Synthetic oligonucleotide
  Sense strand starting at position 3627 of SEQ ID NO: 587164
ucuugaaguguuuauaggu

SEQ ID NO: 771519 - RNA, 19 nt, Artificial Sequence
  Description of Artificial Sequence: Synthetic oligonucleotide
  Antisense strand to SEQ ID NO: 771518
accuauaaacacuucaaga

SEQ ID NO: 771520 - RNA, 19 nt, Artificial Sequence
  Description of Artificial Sequence: Synthetic oligonucleotide
  Sense strand starting at position 3632 of SEQ ID NO: 587164
aaguguuuauaggugaauu

SEQ ID NO: 771521 - RNA, 19 nt, Artificial Sequence
  Description of Artificial Sequence: Synthetic oligonucleotide
  Antisense strand to SEQ ID NO: 771520
aauucaccuauaaacacuu

SEQ ID NO: 771522 - RNA, 19 nt, Artificial Sequence
  Description of Artificial Sequence: Synthetic oligonucleotide
  Sense strand starting at position 3633 of SEQ ID NO: 587164
aguguuuauaggugaauug

SEQ ID NO: 771523 - RNA, 19 nt, Artificial Sequence
  Description of Artificial Sequence: Synthetic oligonucleotide
  Antisense strand to SEQ ID NO: 771522
caauucaccuauaaacacu

SEQ ID NO: 771524 - RNA, 19 nt, Artificial Sequence
  Description of Artificial Sequence: Synthetic oligonucleotide
  Sense strand starting at position 3643 of SEQ ID NO: 587164
ggugaauugauaugauguu

SEQ ID NO: 771525 - RNA, 19 nt, Artificial Sequence
  Description of Artificial Sequence: Synthetic oligonucleotide
  Antisense strand to SEQ ID NO: 771524
aacaucauaucaauucacc

SEQ ID NO: 771526 - RNA, 19 nt, Artificial Sequence
  Description of Artificial Sequence: Synthetic oligonucleotide
  Sense strand starting at position 3649 of SEQ ID NO: 587164
uugauaugauguuuggaau

SEQ ID NO: 771527 - RNA, 19 nt, Artificial Sequence
  Description of Artificial Sequence: Synthetic oligonucleotide
  Antisense strand to SEQ ID NO: 771526
auuccaaacaucauaucaa

SEQ ID NO: 771528 - RNA, 19 nt, Artificial Sequence
  Description of Artificial Sequence: Synthetic oligonucleotide
  Sense strand starting at position 3650 of SEQ ID NO: 587164
ugauaugauguuuggaauu

SEQ ID NO: 771529 - RNA, 19 nt, Artificial Sequence
  Description of Artificial Sequence: Synthetic oligonucleotide
  Antisense strand to SEQ ID NO: 771528
aauuccaaacaucauauca

SEQ ID NO: 771530 - RNA, 19 nt, Artificial Sequence
  Description of Artificial Sequence: Synthetic oligonucleotide
  Sense strand starting at position 3663 of SEQ ID NO: 587164
ggaauuugcuuugaaguua

SEQ ID NO: 771531 - RNA, 19 nt, Artificial Sequence
  Description of Artificial Sequence: Synthetic oligonucleotide
  Antisense strand to SEQ ID NO: 771530
uaacuucaaagcaaauucc

SEQ ID NO: 771532 - RNA, 19 nt, Artificial Sequence
  Description of Artificial Sequence: Synthetic oligonucleotide
  Sense strand starting at position 3671 of SEQ ID NO: 587164
cuuugaaguuauccaggaa

SEQ ID NO: 771533 - RNA, 19 nt, Artificial Sequence
  Description of Artificial Sequence: Synthetic oligonucleotide
  Antisense strand to SEQ ID NO: 771532
uuccuggauaacuucaaag

SEQ ID NO: 771534 - RNA, 19 nt, Artificial Sequence
  Description of Artificial Sequence: Synthetic oligonucleotide
  Sense strand starting at position 3735 of SEQ ID NO: 587164
gucggacuuggaugauaga

SEQ ID NO: 771535 - RNA, 19 nt, Artificial Sequence
  Description of Artificial Sequence: Synthetic oligonucleotide
  Antisense strand to SEQ ID NO: 771534
ucuaucauccaaguccgac

SEQ ID NO: 771536 - RNA, 19 nt, Artificial Sequence
  Description of Artificial Sequence: Synthetic oligonucleotide
  Sense strand starting at position 3738 of SEQ ID NO: 587164
ggacuuggaugauagaauu

SEQ ID NO: 771537 - RNA, 19 nt, Artificial Sequence
  Description of Artificial Sequence: Synthetic oligonucleotide
  Antisense strand to SEQ ID NO: 771536
aauucuaucauccaagucc

SEQ ID NO: 771538 - RNA, 19 nt, Artificial Sequence
  Description of Artificial Sequence: Synthetic oligonucleotide
  Sense strand starting at position 3921 of SEQ ID NO: 587164
ugaaguaaguucucuauua

SEQ ID NO: 771539 - RNA, 19 nt, Artificial Sequence
  Description of Artificial Sequence: Synthetic oligonucleotide
  Antisense strand to SEQ ID NO: 771538
uaauagagaacuuacuuca

SEQ ID NO: 771540 - RNA, 19 nt, Artificial Sequence
  Description of Artificial Sequence: Synthetic oligonucleotide
  Sense strand starting at position 455 of SEQ ID NO: 587165
gcuuucuuccuucguguuu

SEQ ID NO: 771541 - RNA, 19 nt, Artificial Sequence
  Description of Artificial Sequence: Synthetic oligonucleotide
  Antisense strand to SEQ ID NO: 771540
aaacacgaaggaagaaagc

SEQ ID NO: 771542 - RNA, 19 nt, Artificial Sequence
  Description of Artificial Sequence: Synthetic oligonucleotide
  Sense strand starting at position 956 of SEQ ID NO: 587165
agaaguucuucccauuugu

SEQ ID NO: 771543 - RNA, 19 nt, Artificial Sequence
  Description of Artificial Sequence: Synthetic oligonucleotide
  Antisense strand to SEQ ID NO: 771542
acaaaugggaagaacuucu

SEQ ID NO: 771544 - RNA, 19 nt, Artificial Sequence
  Description of Artificial Sequence: Synthetic oligonucleotide
  Sense strand starting at position 1143 of SEQ ID NO: 587165
ccgugauccuuauucucac

SEQ ID NO: 771545 - RNA, 19 nt, Artificial Sequence
  Description of Artificial Sequence: Synthetic oligonucleotide
  Antisense strand to SEQ ID NO: 771544
gugagaauaaggaucacgg

SEQ ID NO: 771546 - RNA, 19 nt, Artificial Sequence
  Description of Artificial Sequence: Synthetic oligonucleotide
  Sense strand starting at position 1220 of SEQ ID NO: 587165
ggcgacagauucugaggaa

SEQ ID NO: 771547 - RNA, 19 nt, Artificial Sequence
  Description of Artificial Sequence: Synthetic oligonucleotide
  Antisense strand to SEQ ID NO: 771546
uuccucagaaucugucgcc

SEQ ID NO: 771548 - RNA, 19 nt, Artificial Sequence
  Description of Artificial Sequence: Synthetic oligonucleotide
  Sense strand starting at position 1221 of SEQ ID NO: 587165
gcgacagauucugaggaaa

SEQ ID NO: 771549 - RNA, 19 nt, Artificial Sequence
  Description of Artificial Sequence: Synthetic oligonucleotide
  Antisense strand to SEQ ID NO: 771548
uuuccucagaaucugucgc

SEQ ID NO: 771550 - RNA, 19 nt, Artificial Sequence
  Description of Artificial Sequence: Synthetic oligonucleotide
  Sense strand starting at position 1251 of SEQ ID NO: 587165
gcugguugucgcccugaga

SEQ ID NO: 771551 - RNA, 19 nt, Artificial Sequence
  Description of Artificial Sequence: Synthetic oligonucleotide
  Antisense strand to SEQ ID NO: 771550
ucucagggcgacaaccagc

SEQ ID NO: 771552 - RNA, 19 nt, Artificial Sequence
  Description of Artificial Sequence: Synthetic oligonucleotide
  Sense strand starting at position 1254 of SEQ ID NO: 587165
gguugucgcccugagaaag

SEQ ID NO: 771553 - RNA, 19 nt, Artificial Sequence
  Description of Artificial Sequence: Synthetic oligonucleotide
  Antisense strand to SEQ ID NO: 771552
cuuucucagggcgacaacc

SEQ ID NO: 771554 - RNA, 19 nt, Artificial Sequence
  Description of Artificial Sequence: Synthetic oligonucleotide
  Sense strand starting at position 1264 of SEQ ID NO: 587165
cugagaaaguuucuccuca

SEQ ID NO: 771555 - RNA, 19 nt, Artificial Sequence
  Description of Artificial Sequence: Synthetic oligonucleotide
  Antisense strand to SEQ ID NO: 771554
ugaggagaaacuuucucag

SEQ ID NO: 771556 - RNA, 19 nt, Artificial Sequence
  Description of Artificial Sequence: Synthetic oligonucleotide
  Sense strand starting at position 1265 of SEQ ID NO: 587165
ugagaaaguuucuccucag

SEQ ID NO: 771557 - RNA, 19 nt, Artificial Sequence
  Description of Artificial Sequence: Synthetic oligonucleotide
  Antisense strand to SEQ ID NO: 771556
cugaggagaaacuuucuca

SEQ ID NO: 771558 - RNA, 19 nt, Artificial Sequence
  Description of Artificial Sequence: Synthetic oligonucleotide
  Sense strand starting at position 1266 of SEQ ID NO: 587165
gagaaaguuucuccucagg

SEQ ID NO: 771559 - RNA, 19 nt, Artificial Sequence
  Description of Artificial Sequence: Synthetic oligonucleotide
  Antisense strand to SEQ ID NO: 771558
ccugaggagaaacuuucuc

SEQ ID NO: 771560 - RNA, 19 nt, Artificial Sequence
  Description of Artificial Sequence: Synthetic oligonucleotide
  Sense strand starting at position 1268 of SEQ ID NO: 587165
gaaaguuucuccucaggca

SEQ ID NO: 771561 - RNA, 19 nt, Artificial Sequence
  Description of Artificial Sequence: Synthetic oligonucleotide
  Antisense strand to SEQ ID NO: 771560
ugccugaggagaaacuuuc

SEQ ID NO: 771562 - RNA, 19 nt, Artificial Sequence
  Description of Artificial Sequence: Synthetic oligonucleotide
  Sense strand starting at position 1601 of SEQ ID NO: 587165
ccagaauccucuuuggugu

SEQ ID NO: 771563 - RNA, 19 nt, Artificial Sequence
  Description of Artificial Sequence: Synthetic oligonucleotide
  Antisense strand to SEQ ID NO: 771562
acaccaaagaggauucugg

SEQ ID NO: 771564 - RNA, 19 nt, Artificial Sequence
  Description of Artificial Sequence: Synthetic oligonucleotide
  Sense strand starting at position 1608 of SEQ ID NO: 587165
ccucuuuggugucacauau

SEQ ID NO: 771565 - RNA, 19 nt, Artificial Sequence
  Description of Artificial Sequence: Synthetic oligonucleotide
  Antisense strand to SEQ ID NO: 771564
auaugugacaccaaagagg

SEQ ID NO: 771566 - RNA, 19 nt, Artificial Sequence
  Description of Artificial Sequence: Synthetic oligonucleotide
  Sense strand starting at position 1645 of SEQ ID NO: 587165
gcgccugauuguuccugaa

SEQ ID NO: 771567 - RNA, 19 nt, Artificial Sequence
  Description of Artificial Sequence: Synthetic oligonucleotide
  Antisense strand to SEQ ID NO: 771566
uucaggaacaaucaggcgc

SEQ ID NO: 771568 - RNA, 19 nt, Artificial Sequence
  Description of Artificial Sequence: Synthetic oligonucleotide
  Sense strand starting at position 1648 of SEQ ID NO: 587165
ccugauuguuccugaagca

SEQ ID NO: 771569 - RNA, 19 nt, Artificial Sequence
  Description of Artificial Sequence: Synthetic oligonucleotide
  Antisense strand to SEQ ID NO: 771568
ugcuucaggaacaaucagg

SEQ ID NO: 771570 - RNA, 19 nt, Artificial Sequence
  Description of Artificial Sequence: Synthetic oligonucleotide
  Sense strand starting at position 1649 of SEQ ID NO: 587165
cugauuguuccugaagcac

SEQ ID NO: 771571 - RNA, 19 nt, Artificial Sequence
  Description of Artificial Sequence: Synthetic oligonucleotide
  Antisense strand to SEQ ID NO: 771570
gugcuucaggaacaaucag

SEQ ID NO: 771572 - RNA, 19 nt, Artificial Sequence
  Description of Artificial Sequence: Synthetic oligonucleotide
  Sense strand starting at position 1937 of SEQ ID NO: 587165
gcccacacucgcugguaua

SEQ ID NO: 771573 - RNA, 19 nt, Artificial Sequence
  Description of Artificial Sequence: Synthetic oligonucleotide
  Antisense strand to SEQ ID NO: 771572
uauaccagcgagugugggc

SEQ ID NO: 771574 - RNA, 19 nt, Artificial Sequence
  Description of Artificial Sequence: Synthetic oligonucleotide
  Sense strand starting at position 1938 of SEQ ID NO: 587165
cccacacucgcugguauau

SEQ ID NO: 771575 - RNA, 19 nt, Artificial Sequence
  Description of Artificial Sequence: Synthetic oligonucleotide
  Antisense strand to SEQ ID NO: 771574
auauaccagcgaguguggg

SEQ ID NO: 771576 - RNA, 19 nt, Artificial Sequence
  Description of Artificial Sequence: Synthetic oligonucleotide
  Sense strand starting at position 1940 of SEQ ID NO: 587165
cacacucgcugguauauaa

SEQ ID NO: 771577 - RNA, 19 nt, Artificial Sequence
  Description of Artificial Sequence: Synthetic oligonucleotide
  Antisense strand to SEQ ID NO: 771576
uuauauaccagcgagugug

SEQ ID NO: 771578 - RNA, 19 nt, Artificial Sequence
  Description of Artificial Sequence: Synthetic oligonucleotide
  Sense strand starting at position 2436 of SEQ ID NO: 587165
gcacgcugcguuuaccaaa

SEQ ID NO: 771579 - RNA, 19 nt, Artificial Sequence
  Description of Artificial Sequence: Synthetic oligonucleotide
  Antisense strand to SEQ ID NO: 771578
uuugguaaacgcagcgugc

SEQ ID NO: 771580 - RNA, 19 nt, Artificial Sequence
  Description of Artificial Sequence: Synthetic oligonucleotide
  Sense strand starting at position 2628 of SEQ ID NO: 587165
cgcugagacucauuccuca

SEQ ID NO: 771581 - RNA, 19 nt, Artificial Sequence
  Description of Artificial Sequence: Synthetic oligonucleotide
  Antisense strand to SEQ ID NO: 771580
ugaggaaugagucucagcg

SEQ ID NO: 771582 - RNA, 19 nt, Artificial Sequence
  Description of Artificial Sequence: Synthetic oligonucleotide
  Sense strand starting at position 263 of SEQ ID NO: 587166
aguguagcgguuuaagaaa

SEQ ID NO: 771583 - RNA, 19 nt, Artificial Sequence
  Description of Artificial Sequence: Synthetic oligonucleotide
  Antisense strand to SEQ ID NO: 771582
uuucuuaaaccgcuacacu

SEQ ID NO: 771584 - RNA, 19 nt, Artificial Sequence
  Description of Artificial Sequence: Synthetic oligonucleotide
  Sense strand starting at position 594 of SEQ ID NO: 587166
auaagauucugggcuguaa

SEQ ID NO: 771585 - RNA, 19 nt, Artificial Sequence
  Description of Artificial Sequence: Synthetic oligonucleotide
  Antisense strand to SEQ ID NO: 771584
uuacagcccagaaucuuau

SEQ ID NO: 771586 - RNA, 19 nt, Artificial Sequence
  Description of Artificial Sequence: Synthetic oligonucleotide
  Sense strand starting at position 596 of SEQ ID NO: 587166
aagauucugggcuguaaug

SEQ ID NO: 771587 - RNA, 19 nt, Artificial Sequence
  Description of Artificial Sequence: Synthetic oligonucleotide
  Antisense strand to SEQ ID NO: 771586
cauuacagcccagaaucuu

SEQ ID NO: 771588 - RNA, 19 nt, Artificial Sequence
  Description of Artificial Sequence: Synthetic oligonucleotide
  Sense strand starting at position 647 of SEQ ID NO: 587166
ugacaugauaggugagagu

SEQ ID NO: 771589 - RNA, 19 nt, Artificial Sequence
  Description of Artificial Sequence: Synthetic oligonucleotide
  Antisense strand to SEQ ID NO: 771588
acucucaccuaucauguca

SEQ ID NO: 771590 - RNA, 19 nt, Artificial Sequence
  Description of Artificial Sequence: Synthetic oligonucleotide
  Sense strand starting at position 650 of SEQ ID NO: 587166
caugauaggugagaguaaa

SEQ ID NO: 771591 - RNA, 19 nt, Artificial Sequence
  Description of Artificial Sequence: Synthetic oligonucleotide
  Antisense strand to SEQ ID NO: 771590
uuuacucucaccuaucaug

SEQ ID NO: 771592 - RNA, 19 nt, Artificial Sequence
  Description of Artificial Sequence: Synthetic oligonucleotide
  Sense strand starting at position 975 of SEQ ID NO: 587166
ccagcaugaauggguaaga

SEQ ID NO: 771593 - RNA, 19 nt, Artificial Sequence
  Description of Artificial Sequence: Synthetic oligonucleotide
  Antisense strand to SEQ ID NO: 771592
ucuuacccauucaugcugg

SEQ ID NO: 771594 - RNA, 19 nt, Artificial Sequence
  Description of Artificial Sequence: Synthetic oligonucleotide
  Sense strand starting at position 986 of SEQ ID NO: 587166
ggguaagacuuugggagaa

SEQ ID NO: 771595 - RNA, 19 nt, Artificial Sequence
  Description of Artificial Sequence: Synthetic oligonucleotide
  Antisense strand to SEQ ID NO: 771594
uucucccaaagucuuaccc

SEQ ID NO: 771596 - RNA, 19 nt, Artificial Sequence
  Description of Artificial Sequence: Synthetic oligonucleotide
  Sense strand starting at position 988 of SEQ ID NO: 587166
guaagacuuugggagaaau

SEQ ID NO: 771597 - RNA, 19 nt, Artificial Sequence
  Description of Artificial Sequence: Synthetic oligonucleotide
  Antisense strand to SEQ ID NO: 771596
auuucucccaaagucuuac

SEQ ID NO: 771598 - RNA, 19 nt, Artificial Sequence
  Description of Artificial Sequence: Synthetic oligonucleotide
  Sense strand starting at position 1065 of SEQ ID NO: 587166
auagcuugagguuaagagu

SEQ ID NO: 771599 - RNA, 19 nt, Artificial Sequence
  Description of Artificial Sequence: Synthetic oligonucleotide
  Antisense strand to SEQ ID NO: 771598
acucuuaaccucaagcuau

SEQ ID NO: 771600 - RNA, 19 nt, Artificial Sequence
  Description of Artificial Sequence: Synthetic oligonucleotide
  Sense strand starting at position 1105 of SEQ ID NO: 587166
cagugagaucacugucccu

SEQ ID NO: 771601 - RNA, 19 nt, Artificial Sequence
  Description of Artificial Sequence: Synthetic oligonucleotide
  Antisense strand to SEQ ID NO: 771600
agggacagugaucucacug

SEQ ID NO: 771602 - RNA, 19 nt, Artificial Sequence
  Description of Artificial Sequence: Synthetic oligonucleotide
  Sense strand starting at position 1108 of SEQ ID NO: 587166
ugagaucacugucccuaca

SEQ ID NO: 771603 - RNA, 19 nt, Artificial Sequence
  Description of Artificial Sequence: Synthetic oligonucleotide
  Antisense strand to SEQ ID NO: 771602
uguagggacagugaucuca

SEQ ID NO: 771604 - RNA, 19 nt, Artificial Sequence
  Description of Artificial Sequence: Synthetic oligonucleotide
  Sense strand starting at position 1110 of SEQ ID NO: 587166
agaucacugucccuacaua

SEQ ID NO: 771605 - RNA, 19 nt, Artificial Sequence
  Description of Artificial Sequence: Synthetic oligonucleotide
  Antisense strand to SEQ ID NO: 771604
uauguagggacagugaucu

SEQ ID NO: 771606 - RNA, 19 nt, Artificial Sequence
  Description of Artificial Sequence: Synthetic oligonucleotide
  Sense strand starting at position 1601 of SEQ ID NO: 587166
uaaagacuuugugagaaac

SEQ ID NO: 771607 - RNA, 19 nt, Artificial Sequence
  Description of Artificial Sequence: Synthetic oligonucleotide
  Antisense strand to SEQ ID NO: 771606
guuucucacaaagucuuua

SEQ ID NO: 771608 - RNA, 19 nt, Artificial Sequence
  Description of Artificial Sequence: Synthetic oligonucleotide
  Sense strand starting at position 1603 of SEQ ID NO: 587166
aagacuuugugagaaacag

SEQ ID NO: 771609 - RNA, 19 nt, Artificial Sequence
  Description of Artificial Sequence: Synthetic oligonucleotide
  Antisense strand to SEQ ID NO: 771608
cuguuucucacaaagucuu

SEQ ID NO: 771610 - RNA, 19 nt, Artificial Sequence
  Description of Artificial Sequence: Synthetic oligonucleotide
  Sense strand starting at position 1618 of SEQ ID NO: 587166
acagcuaguugggaagaaa

SEQ ID NO: 771611 - RNA, 19 nt, Artificial Sequence
  Description of Artificial Sequence: Synthetic oligonucleotide
  Antisense strand to SEQ ID NO: 771610
uuucuucccaacuagcugu

SEQ ID NO: 771612 - RNA, 19 nt, Artificial Sequence
  Description of Artificial Sequence: Synthetic oligonucleotide
  Sense strand starting at position 2126 of SEQ ID NO: 587166
gguguaaccgcugggaagu

SEQ ID NO: 771613 - RNA, 19 nt, Artificial Sequence
  Description of Artificial Sequence: Synthetic oligonucleotide
  Antisense strand to SEQ ID NO: 771612
acuucccagcgguuacacc

SEQ ID NO: 771614 - RNA, 19 nt, Artificial Sequence
  Description of Artificial Sequence: Synthetic oligonucleotide
  Sense strand starting at position 2401 of SEQ ID NO: 587166
gugcaauggcgcuauccua

SEQ ID NO: 771615 - RNA, 19 nt, Artificial Sequence
  Description of Artificial Sequence: Synthetic oligonucleotide
  Antisense strand to SEQ ID NO: 771614
uaggauagcgccauugcac

SEQ ID NO: 771616 - RNA, 19 nt, Artificial Sequence
  Description of Artificial Sequence: Synthetic oligonucleotide
  Sense strand starting at position 2680 of SEQ ID NO: 587166
gcaguauugccaggagacu

SEQ ID NO: 771617 - RNA, 19 nt, Artificial Sequence
  Description of Artificial Sequence: Synthetic oligonucleotide
  Antisense strand to SEQ ID NO: 771616
agucuccuggcaauacugc

SEQ ID NO: 771618 - RNA, 19 nt, Artificial Sequence
  Description of Artificial Sequence: Synthetic oligonucleotide
  Sense strand starting at position 2681 of SEQ ID NO: 587166
caguauugccaggagacuu

SEQ ID NO: 771619 - RNA, 19 nt, Artificial Sequence
  Description of Artificial Sequence: Synthetic oligonucleotide
  Antisense strand to SEQ ID NO: 771618
aagucuccuggcaauacug

SEQ ID NO: 771620 - RNA, 19 nt, Artificial Sequence
  Description of Artificial Sequence: Synthetic oligonucleotide
  Sense strand starting at position 2784 of SEQ ID NO: 587166
ccagucaugucccugcuca

SEQ ID NO: 771621 - RNA, 19 nt, Artificial Sequence
  Description of Artificial Sequence: Synthetic oligonucleotide
  Antisense strand to SEQ ID NO: 771620
ugagcagggacaugacugg

SEQ ID NO: 771622 - RNA, 19 nt, Artificial Sequence
  Description of Artificial Sequence: Synthetic oligonucleotide
  Sense strand starting at position 2857 of SEQ ID NO: 587166
agacuaugucuguguggug

SEQ ID NO: 771623 - RNA, 19 nt, Artificial Sequence
  Description of Artificial Sequence: Synthetic oligonucleotide
  Antisense strand to SEQ ID NO: 771622
caccacacagacauagucu

SEQ ID NO: 771624 - RNA, 19 nt, Artificial Sequence
  Description of Artificial Sequence: Synthetic oligonucleotide
  Sense strand starting at position 2902 of SEQ ID NO: 587166
acuguugagaucuagcaga

SEQ ID NO: 771625 - RNA, 19 nt, Artificial Sequence
  Description of Artificial Sequence: Synthetic oligonucleotide
  Antisense strand to SEQ ID NO: 771624
ucugcuagaucucaacagu

SEQ ID NO: 771626 - RNA, 19 nt, Artificial Sequence
  Description of Artificial Sequence: Synthetic oligonucleotide
  Sense strand starting at position 2929 of SEQ ID NO: 587166
agcaucuuccguugcagaa

SEQ ID NO: 771627 - RNA, 19 nt, Artificial Sequence
  Description of Artificial Sequence: Synthetic oligonucleotide
  Antisense strand to SEQ ID NO: 771626
uucugcaacggaagaugcu

SEQ ID NO: 771628 - RNA, 19 nt, Artificial Sequence
  Description of Artificial Sequence: Synthetic oligonucleotide
  Sense strand starting at position 2976 of SEQ ID NO: 587166
cagucagauuccgcuccau

SEQ ID NO: 771629 - RNA, 19 nt, Artificial Sequence
  Description of Artificial Sequence: Synthetic oligonucleotide
  Antisense strand to SEQ ID NO: 771628
auggagcggaaucugacug

SEQ ID NO: 771630 - RNA, 19 nt, Artificial Sequence
  Description of Artificial Sequence: Synthetic oligonucleotide
  Sense strand starting at position 2995 of SEQ ID NO: 587166
guguguccuugcuccugau

SEQ ID NO: 771631 - RNA, 19 nt, Artificial Sequence
  Description of Artificial Sequence: Synthetic oligonucleotide
  Antisense strand to SEQ ID NO: 771630
aucaggagcaaggacacac

SEQ ID NO: 771632 - RNA, 19 nt, Artificial Sequence
  Description of Artificial Sequence: Synthetic oligonucleotide
  Sense strand starting at position 2999 of SEQ ID NO: 587166
guccuugcuccugaugaca

SEQ ID NO: 771633 - RNA, 19 nt, Artificial Sequence
  Description of Artificial Sequence: Synthetic oligonucleotide
  Antisense strand to SEQ ID NO: 771632
ugucaucaggagcaaggac

SEQ ID NO: 771634 - RNA, 19 nt, Artificial Sequence
  Description of Artificial Sequence: Synthetic oligonucleotide
  Sense strand starting at position 3075 of SEQ ID NO: 587166
cacaaacguugaggauaaa

SEQ ID NO: 771635 - RNA, 19 nt, Artificial Sequence
  Description of Artificial Sequence: Synthetic oligonucleotide
  Antisense strand to SEQ ID NO: 771634
uuuauccucaacguuugug

SEQ ID NO: 771636 - RNA, 19 nt, Artificial Sequence
  Description of Artificial Sequence: Synthetic oligonucleotide
  Sense strand starting at position 3174 of SEQ ID NO: 587166
uguccuuugcucugaccau

SEQ ID NO: 771637 - RNA, 19 nt, Artificial Sequence
  Description of Artificial Sequence: Synthetic oligonucleotide
  Antisense strand to SEQ ID NO: 771636
auggucagagcaaaggaca

SEQ ID NO: 771638 - RNA, 19 nt, Artificial Sequence
  Description of Artificial Sequence: Synthetic oligonucleotide
  Sense strand starting at position 3213 of SEQ ID NO: 587166
gggucuauuccugaugccu

SEQ ID NO: 771639 - RNA, 19 nt, Artificial Sequence
  Description of Artificial Sequence: Synthetic oligonucleotide
  Antisense strand to SEQ ID NO: 771638
aggcaucaggaauagaccc

SEQ ID NO: 771640 - RNA, 19 nt, Artificial Sequence
  Description of Artificial Sequence: Synthetic oligonucleotide
  Sense strand starting at position 3221 of SEQ ID NO: 587166
uccugaugccucugaagac

SEQ ID NO: 771641 - RNA, 19 nt, Artificial Sequence
  Description of Artificial Sequence: Synthetic oligonucleotide
  Antisense strand to SEQ ID NO: 771640
gucuucagaggcaucagga

SEQ ID NO: 771642 - RNA, 19 nt, Artificial Sequence
  Description of Artificial Sequence: Synthetic oligonucleotide
  Sense strand starting at position 3388 of SEQ ID NO: 587166
ugccuucuccuguguacau

SEQ ID NO: 771643 - RNA, 19 nt, Artificial Sequence
  Description of Artificial Sequence: Synthetic oligonucleotide
  Antisense strand to SEQ ID NO: 771642
auguacacaggagaaggca

SEQ ID NO: 771644 - RNA, 19 nt, Artificial Sequence
  Description of Artificial Sequence: Synthetic oligonucleotide
  Sense strand starting at position 3389 of SEQ ID NO: 587166
gccuucuccuguguacauu

SEQ ID NO: 771645 - RNA, 19 nt, Artificial Sequence
  Description of Artificial Sequence: Synthetic oligonucleotide
  Antisense strand to SEQ ID NO: 771644
aauguacacaggagaaggc

SEQ ID NO: 771646 - RNA, 19 nt, Artificial Sequence
  Description of Artificial Sequence: Synthetic oligonucleotide
  Sense strand starting at position 3761 of SEQ ID NO: 587166
uggucaguuccugaaaccu

SEQ ID NO: 771647 - RNA, 19 nt, Artificial Sequence
  Description of Artificial Sequence: Synthetic oligonucleotide
  Antisense strand to SEQ ID NO: 771646
agguuucaggaacugacca

SEQ ID NO: 771648 - RNA, 19 nt, Artificial Sequence
  Description of Artificial Sequence: Synthetic oligonucleotide
  Sense strand starting at position 3770 of SEQ ID NO: 587166
ccugaaaccuaggcauguu

SEQ ID NO: 771649 - RNA, 19 nt, Artificial Sequence
  Description of Artificial Sequence: Synthetic oligonucleotide
  Antisense strand to SEQ ID NO: 771648
aacaugccuagguuucagg

SEQ ID NO: 771650 - RNA, 19 nt, Artificial Sequence
  Description of Artificial Sequence: Synthetic oligonucleotide
  Sense strand starting at position 3773 of SEQ ID NO: 587166
gaaaccuaggcauguuuga

SEQ ID NO: 771651 - RNA, 19 nt, Artificial Sequence
  Description of Artificial Sequence: Synthetic oligonucleotide
  Antisense strand to SEQ ID NO: 771650
ucaaacaugccuagguuuc

SEQ ID NO: 771652 - RNA, 19 nt, Artificial Sequence
  Description of Artificial Sequence: Synthetic oligonucleotide
  Sense strand starting at position 3903 of SEQ ID NO: 587166
aaaggauugccuugcuugu

SEQ ID NO: 771653 - RNA, 19 nt, Artificial Sequence
  Description of Artificial Sequence: Synthetic oligonucleotide
  Antisense strand to SEQ ID NO: 771652
acaagcaaggcaauccuuu

SEQ ID NO: 771654 - RNA, 19 nt, Artificial Sequence
  Description of Artificial Sequence: Synthetic oligonucleotide
  Sense strand starting at position 3905 of SEQ ID NO: 587166
aggauugccuugcuuguga

SEQ ID NO: 771655 - RNA, 19 nt, Artificial Sequence
  Description of Artificial Sequence: Synthetic oligonucleotide
  Antisense strand to SEQ ID NO: 771654
ucacaagcaaggcaauccu

SEQ ID NO: 771656 - RNA, 19 nt, Artificial Sequence
  Description of Artificial Sequence: Synthetic oligonucleotide
  Sense strand starting at position 3916 of SEQ ID NO: 587166
gcuugugaugcauggagca

SEQ ID NO: 771657 - RNA, 19 nt, Artificial Sequence
  Description of Artificial Sequence: Synthetic oligonucleotide
  Antisense strand to SEQ ID NO: 771656
ugcuccaugcaucacaagc

SEQ ID NO: 771658 - RNA, 19 nt, Artificial Sequence
  Description of Artificial Sequence: Synthetic oligonucleotide
  Sense strand starting at position 3918 of SEQ ID NO: 587166
uugugaugcauggagcaaa

SEQ ID NO: 771659 - RNA, 19 nt, Artificial Sequence
  Description of Artificial Sequence: Synthetic oligonucleotide
  Antisense strand to SEQ ID NO: 771658
uuugcuccaugcaucacaa

SEQ ID NO: 771660 - RNA, 19 nt, Artificial Sequence
  Description of Artificial Sequence: Synthetic oligonucleotide
  Sense strand starting at position 3935 of SEQ ID NO: 587166
aagaauuccucuuuggagu

SEQ ID NO: 771661 - RNA, 19 nt, Artificial Sequence
  Description of Artificial Sequence: Synthetic oligonucleotide
  Antisense strand to SEQ ID NO: 771660
acuccaaagaggaauucuu

SEQ ID NO: 771662 - RNA, 19 nt, Artificial Sequence
  Description of Artificial Sequence: Synthetic oligonucleotide
  Sense strand starting at position 24 of SEQ ID NO: 587167
ggaguuaagugucaccuac

SEQ ID NO: 771663 - RNA, 19 nt, Artificial Sequence
  Description of Artificial Sequence: Synthetic oligonucleotide
  Antisense strand to SEQ ID NO: 771662
guaggugacacuuaacucc

SEQ ID NO: 771664 - RNA, 19 nt, Artificial Sequence
  Description of Artificial Sequence: Synthetic oligonucleotide
  Sense strand starting at position 26 of SEQ ID NO: 587167
aguuaagugucaccuacaa

SEQ ID NO: 771665 - RNA, 19 nt, Artificial Sequence
  Description of Artificial Sequence: Synthetic oligonucleotide
  Antisense strand to SEQ ID NO: 771664
uuguaggugacacuuaacu

SEQ ID NO: 771666 - RNA, 19 nt, Artificial Sequence
  Description of Artificial Sequence: Synthetic oligonucleotide
  Sense strand starting at position 41 of SEQ ID NO: 587167
acaagagaaucagaauagu

SEQ ID NO: 771667 - RNA, 19 nt, Artificial Sequence
  Description of Artificial Sequence: Synthetic oligonucleotide
  Antisense strand to SEQ ID NO: 771666
acuauucugauucucuugu

SEQ ID NO: 771668 - RNA, 19 nt, Artificial Sequence
  Description of Artificial Sequence: Synthetic oligonucleotide
  Sense strand starting at position 50 of SEQ ID NO: 587167
ucagaauaguuaggaggaa

SEQ ID NO: 771669 - RNA, 19 nt, Artificial Sequence
  Description of Artificial Sequence: Synthetic oligonucleotide
  Antisense strand to SEQ ID NO: 771668
uuccuccuaacuauucuga

SEQ ID NO: 771670 - RNA, 19 nt, Artificial Sequence
  Description of Artificial Sequence: Synthetic oligonucleotide
  Sense strand starting at position 51 of SEQ ID NO: 587167
cagaauaguuaggaggaaa

SEQ ID NO: 771671 - RNA, 19 nt, Artificial Sequence
  Description of Artificial Sequence: Synthetic oligonucleotide
  Antisense strand to SEQ ID NO: 771670
uuuccuccuaacuauucug

SEQ ID NO: 771672 - RNA, 19 nt, Artificial Sequence
  Description of Artificial Sequence: Synthetic oligonucleotide
  Sense strand starting at position 143 of SEQ ID NO: 587167
gggagcauuccauggaguu

SEQ ID NO: 771673 - RNA, 19 nt, Artificial Sequence
  Description of Artificial Sequence: Synthetic oligonucleotide
  Antisense strand to SEQ ID NO: 771672
aacuccauggaaugcuccc

SEQ ID NO: 771674 - RNA, 19 nt, Artificial Sequence
  Description of Artificial Sequence: Synthetic oligonucleotide
  Sense strand starting at position 144 of SEQ ID NO: 587167
ggagcauuccauggaguuu

SEQ ID NO: 771675 - RNA, 19 nt, Artificial Sequence
  Description of Artificial Sequence: Synthetic oligonucleotide
  Antisense strand to SEQ ID NO: 771674
aaacuccauggaaugcucc

SEQ ID NO: 771676 - RNA, 19 nt, Artificial Sequence
  Description of Artificial Sequence: Synthetic oligonucleotide
  Sense strand starting at position 237 of SEQ ID NO: 587167
auuccuagucuaugaagca

SEQ ID NO: 771677 - RNA, 19 nt, Artificial Sequence
  Description of Artificial Sequence: Synthetic oligonucleotide
  Antisense strand to SEQ ID NO: 771676
ugcuucauagacuaggaau

SEQ ID NO: 771678 - RNA, 19 nt, Artificial Sequence
  Description of Artificial Sequence: Synthetic oligonucleotide
  Sense strand starting at position 312 of SEQ ID NO: 587167
cacagcugccagugaugau

SEQ ID NO: 771679 - RNA, 19 nt, Artificial Sequence
  Description of Artificial Sequence: Synthetic oligonucleotide
  Antisense strand to SEQ ID NO: 771678
aucaucacuggcagcugug

SEQ ID NO: 771680 - RNA, 19 nt, Artificial Sequence
  Description of Artificial Sequence: Synthetic oligonucleotide
  Sense strand starting at position 313 of SEQ ID NO: 587167
acagcugccagugaugauu

SEQ ID NO: 771681 - RNA, 19 nt, Artificial Sequence
  Description of Artificial Sequence: Synthetic oligonucleotide
  Antisense strand to SEQ ID NO: 771680
aaucaucacuggcagcugu

SEQ ID NO: 771682 - RNA, 19 nt, Artificial Sequence
  Description of Artificial Sequence: Synthetic oligonucleotide
  Sense strand starting at position 319 of SEQ ID NO: 587167
gccagugaugauuacgacu

SEQ ID NO: 771683 - RNA, 19 nt, Artificial Sequence
  Description of Artificial Sequence: Synthetic oligonucleotide
  Antisense strand to SEQ ID NO: 771682
agucguaaucaucacuggc

SEQ ID NO: 771684 - RNA, 19 nt, Artificial Sequence
  Description of Artificial Sequence: Synthetic oligonucleotide
  Sense strand starting at position 327 of SEQ ID NO: 587167
ugauuacgacuuuggugaa

SEQ ID NO: 771685 - RNA, 19 nt, Artificial Sequence
  Description of Artificial Sequence: Synthetic oligonucleotide
  Antisense strand to SEQ ID NO: 771684
uucaccaaagucguaauca

SEQ ID NO: 771686 - RNA, 19 nt, Artificial Sequence
  Description of Artificial Sequence: Synthetic oligonucleotide
  Sense strand starting at position 328 of SEQ ID NO: 587167
gauuacgacuuuggugaau

SEQ ID NO: 771687 - RNA, 19 nt, Artificial Sequence
  Description of Artificial Sequence: Synthetic oligonucleotide
  Antisense strand to SEQ ID NO: 771686
auucaccaaagucguaauc

SEQ ID NO: 771688 - RNA, 19 nt, Artificial Sequence
  Description of Artificial Sequence: Synthetic oligonucleotide
  Sense strand starting at position 330 of SEQ ID NO: 587167
uuacgacuuuggugaauuu

SEQ ID NO: 771689 - RNA, 19 nt, Artificial Sequence
  Description of Artificial Sequence: Synthetic oligonucleotide
  Antisense strand to SEQ ID NO: 771688
aaauucaccaaagucguaa

SEQ ID NO: 771690 - RNA, 19 nt, Artificial Sequence
  Description of Artificial Sequence: Synthetic oligonucleotide
  Sense strand starting at position 396 of SEQ ID NO: 587167
cucuguuacuaggugcuaa

SEQ ID NO: 771691 - RNA, 19 nt, Artificial Sequence
  Description of Artificial Sequence: Synthetic oligonucleotide
  Antisense strand to SEQ ID NO: 771690
uuagcaccuaguaacagag

SEQ ID NO: 771692 - RNA, 19 nt, Artificial Sequence
  Description of Artificial Sequence: Synthetic oligonucleotide
  Sense strand starting at position 400 of SEQ ID NO: 587167
guuacuaggugcuaaauca

SEQ ID NO: 771693 - RNA, 19 nt, Artificial Sequence
  Description of Artificial Sequence: Synthetic oligonucleotide
  Antisense strand to SEQ ID NO: 771692
ugauuuagcaccuaguaac

SEQ ID NO: 771694 - RNA, 19 nt, Artificial Sequence
  Description of Artificial Sequence: Synthetic oligonucleotide
  Sense strand starting at position 410 of SEQ ID NO: 587167
gcuaaaucacaucaguuga

SEQ ID NO: 771695 - RNA, 19 nt, Artificial Sequence
  Description of Artificial Sequence: Synthetic oligonucleotide
  Antisense strand to SEQ ID NO: 771694
ucaacugaugugauuuagc

SEQ ID NO: 771696 - RNA, 19 nt, Artificial Sequence
  Description of Artificial Sequence: Synthetic oligonucleotide
  Sense strand starting at position 479 of SEQ ID NO: 587167
ucccuuaggcauugaaucu

SEQ ID NO: 771697 - RNA, 19 nt, Artificial Sequence
  Description of Artificial Sequence: Synthetic oligonucleotide
  Antisense strand to SEQ ID NO: 771696
agauucaaugccuaaggga

SEQ ID NO: 771698 - RNA, 19 nt, Artificial Sequence
  Description of Artificial Sequence: Synthetic oligonucleotide
  Sense strand starting at position 489 of SEQ ID NO: 587167
auugaaucuuacugugaac

SEQ ID NO: 771699 - RNA, 19 nt, Artificial Sequence
  Description of Artificial Sequence: Synthetic oligonucleotide
  Antisense strand to SEQ ID NO: 771698
guucacaguaagauucaau

SEQ ID NO: 771700 - RNA, 19 nt, Artificial Sequence
  Description of Artificial Sequence: Synthetic oligonucleotide
  Sense strand starting at position 491 of SEQ ID NO: 587167
ugaaucuuacugugaacuu

SEQ ID NO: 771701 - RNA, 19 nt, Artificial Sequence
  Description of Artificial Sequence: Synthetic oligonucleotide
  Antisense strand to SEQ ID NO: 771700
aaguucacaguaagauuca

SEQ ID NO: 771702 - RNA, 19 nt, Artificial Sequence
  Description of Artificial Sequence: Synthetic oligonucleotide
  Sense strand starting at position 500 of SEQ ID NO: 587167
cugugaacuuauuccucga

SEQ ID NO: 771703 - RNA, 19 nt, Artificial Sequence
  Description of Artificial Sequence: Synthetic oligonucleotide
  Antisense strand to SEQ ID NO: 771702
ucgaggaauaaguucacag

SEQ ID NO: 771704 - RNA, 19 nt, Artificial Sequence
  Description of Artificial Sequence: Synthetic oligonucleotide
  Sense strand starting at position 503 of SEQ ID NO: 587167
ugaacuuauuccucgauga

SEQ ID NO: 771705 - RNA, 19 nt, Artificial Sequence
  Description of Artificial Sequence: Synthetic oligonucleotide
  Antisense strand to SEQ ID NO: 771704
ucaucgaggaauaaguuca

SEQ ID NO: 771706 - RNA, 19 nt, Artificial Sequence
  Description of Artificial Sequence: Synthetic oligonucleotide
  Sense strand starting at position 507 of SEQ ID NO: 587167
cuuauuccucgaugacauc

SEQ ID NO: 771707 - RNA, 19 nt, Artificial Sequence
  Description of Artificial Sequence: Synthetic oligonucleotide
  Antisense strand to SEQ ID NO: 771706
gaugucaucgaggaauaag

SEQ ID NO: 771708 - RNA, 19 nt, Artificial Sequence
  Description of Artificial Sequence: Synthetic oligonucleotide
  Sense strand starting at position 530 of SEQ ID NO: 587167
uggaguugaucagggagaa

SEQ ID NO: 771709 - RNA, 19 nt, Artificial Sequence
  Description of Artificial Sequence: Synthetic oligonucleotide
  Antisense strand to SEQ ID NO: 771708
uucucccugaucaacucca

SEQ ID NO: 771710 - RNA, 19 nt, Artificial Sequence
  Description of Artificial Sequence: Synthetic oligonucleotide
  Sense strand starting at position 551 of SEQ ID NO: 587167
gcaagcuguuaagucacua

SEQ ID NO: 771711 - RNA, 19 nt, Artificial Sequence
  Description of Artificial Sequence: Synthetic oligonucleotide
  Antisense strand to SEQ ID NO: 771710
uagugacuuaacagcuugc

SEQ ID NO: 771712 - RNA, 19 nt, Artificial Sequence
  Description of Artificial Sequence: Synthetic oligonucleotide
  Sense strand starting at position 555 of SEQ ID NO: 587167
gcuguuaagucacuaugga

SEQ ID NO: 771713 - RNA, 19 nt, Artificial Sequence
  Description of Artificial Sequence: Synthetic oligonucleotide
  Antisense strand to SEQ ID NO: 771712
uccauagugacuuaacagc

SEQ ID NO: 771714 - RNA, 19 nt, Artificial Sequence
  Description of Artificial Sequence: Synthetic oligonucleotide
  Sense strand starting at position 556 of SEQ ID NO: 587167
cuguuaagucacuauggaa

SEQ ID NO: 771715 - RNA, 19 nt, Artificial Sequence
  Description of Artificial Sequence: Synthetic oligonucleotide
  Antisense strand to SEQ ID NO: 771714
uuccauagugacuuaacag

SEQ ID NO: 771716 - RNA, 19 nt, Artificial Sequence
  Description of Artificial Sequence: Synthetic oligonucleotide
  Sense strand starting at position 690 of SEQ ID NO: 587167
gaggucccgucaucuagua

SEQ ID NO: 771717 - RNA, 19 nt, Artificial Sequence
  Description of Artificial Sequence: Synthetic oligonucleotide
  Antisense strand to SEQ ID NO: 771716
uacuagaugacgggaccuc

SEQ ID NO: 771718 - RNA, 19 nt, Artificial Sequence
  Description of Artificial Sequence: Synthetic oligonucleotide
  Sense strand starting at position 776 of SEQ ID NO: 587167
ccuagacugucgccuaaga

SEQ ID NO: 771719 - RNA, 19 nt, Artificial Sequence
  Description of Artificial Sequence: Synthetic oligonucleotide
  Antisense strand to SEQ ID NO: 771718
ucuuaggcgacagucuagg

SEQ ID NO: 771720 - RNA, 19 nt, Artificial Sequence
  Description of Artificial Sequence: Synthetic oligonucleotide
  Sense strand starting at position 778 of SEQ ID NO: 587167
uagacugucgccuaagacu

SEQ ID NO: 771721 - RNA, 19 nt, Artificial Sequence
  Description of Artificial Sequence: Synthetic oligonucleotide
  Antisense strand to SEQ ID NO: 771720
agucuuaggcgacagucua

SEQ ID NO: 771722 - RNA, 19 nt, Artificial Sequence
  Description of Artificial Sequence: Synthetic oligonucleotide
  Sense strand starting at position 812 of SEQ ID NO: 587167
auggcaaacgucuaguuau

SEQ ID NO: 771723 - RNA, 19 nt, Artificial Sequence
  Description of Artificial Sequence: Synthetic oligonucleotide
  Antisense strand to SEQ ID NO: 771722
auaacuagacguuugccau

SEQ ID NO: 771724 - RNA, 19 nt, Artificial Sequence
  Description of Artificial Sequence: Synthetic oligonucleotide
  Sense strand starting at position 867 of SEQ ID NO: 587167
cccaguucccucuauguua

SEQ ID NO: 771725 - RNA, 19 nt, Artificial Sequence
  Description of Artificial Sequence: Synthetic oligonucleotide
  Antisense strand to SEQ ID NO: 771724
uaacauagagggaacuggg

SEQ ID NO: 771726 - RNA, 19 nt, Artificial Sequence
  Description of Artificial Sequence: Synthetic oligonucleotide
  Sense strand starting at position 905 of SEQ ID NO: 587167
gcccauuaguccuuuccca

SEQ ID NO: 771727 - RNA, 19 nt, Artificial Sequence
  Description of Artificial Sequence: Synthetic oligonucleotide
  Antisense strand to SEQ ID NO: 771726
ugggaaaggacuaaugggc

SEQ ID NO: 771728 - RNA, 19 nt, Artificial Sequence
  Description of Artificial Sequence: Synthetic oligonucleotide
  Sense strand starting at position 995 of SEQ ID NO: 587167
gcaggcguuccgaaauugu

SEQ ID NO: 771729 - RNA, 19 nt, Artificial Sequence
  Description of Artificial Sequence: Synthetic oligonucleotide
  Antisense strand to SEQ ID NO: 771728
acaauuucggaacgccugc

SEQ ID NO: 771730 - RNA, 19 nt, Artificial Sequence
  Description of Artificial Sequence: Synthetic oligonucleotide
  Sense strand starting at position 1028 of SEQ ID NO: 587167
ucacaagaguuugauguga

SEQ ID NO: 771731 - RNA, 19 nt, Artificial Sequence
  Description of Artificial Sequence: Synthetic oligonucleotide
  Antisense strand to SEQ ID NO: 771730
ucacaucaaacucuuguga

SEQ ID NO: 771732 - RNA, 19 nt, Artificial Sequence
  Description of Artificial Sequence: Synthetic oligonucleotide
  Sense strand starting at position 1030 of SEQ ID NO: 587167
acaagaguuugaugugaau

SEQ ID NO: 771733 - RNA, 19 nt, Artificial Sequence
  Description of Artificial Sequence: Synthetic oligonucleotide
  Antisense strand to SEQ ID NO: 771732
auucacaucaaacucuugu

SEQ ID NO: 771734 - RNA, 19 nt, Artificial Sequence
  Description of Artificial Sequence: Synthetic oligonucleotide
  Sense strand starting at position 2768 of SEQ ID NO: 587167
gggaggauggccugagguu

SEQ ID NO: 771735 - RNA, 19 nt, Artificial Sequence
  Description of Artificial Sequence: Synthetic oligonucleotide
  Antisense strand to SEQ ID NO: 771734
aaccucaggccauccuccc

SEQ ID NO: 771736 - RNA, 19 nt, Artificial Sequence
  Description of Artificial Sequence: Synthetic oligonucleotide
  Sense strand starting at position 2780 of SEQ ID NO: 587167
ugagguuagugucucacau

SEQ ID NO: 771737 - RNA, 19 nt, Artificial Sequence
  Description of Artificial Sequence: Synthetic oligonucleotide
  Antisense strand to SEQ ID NO: 771736
augugagacacuaaccuca

SEQ ID NO: 771738 - RNA, 19 nt, Artificial Sequence
  Description of Artificial Sequence: Synthetic oligonucleotide
  Sense strand starting at position 2899 of SEQ ID NO: 587167
gggcgaugggauuaucauu

SEQ ID NO: 771739 - RNA, 19 nt, Artificial Sequence
  Description of Artificial Sequence: Synthetic oligonucleotide
  Antisense strand to SEQ ID NO: 771738
aaugauaaucccaucgccc

SEQ ID NO: 771740 - RNA, 19 nt, Artificial Sequence
  Description of Artificial Sequence: Synthetic oligonucleotide
  Sense strand starting at position 3022 of SEQ ID NO: 587167
gaaccuucuuaaggguaga

SEQ ID NO: 771741 - RNA, 19 nt, Artificial Sequence
  Description of Artificial Sequence: Synthetic oligonucleotide
  Antisense strand to SEQ ID NO: 771740
ucuacccuuaagaagguuc

SEQ ID NO: 771742 - RNA, 19 nt, Artificial Sequence
  Description of Artificial Sequence: Synthetic oligonucleotide
  Sense strand starting at position 522 of SEQ ID NO: 587168
uuaaaucgagaaugagcaa

SEQ ID NO: 771743 - RNA, 19 nt, Artificial Sequence
  Description of Artificial Sequence: Synthetic oligonucleotide
  Antisense strand to SEQ ID NO: 771742
uugcucauucucgauuuaa

SEQ ID NO: 771744 - RNA, 19 nt, Artificial Sequence
  Description of Artificial Sequence: Synthetic oligonucleotide
  Sense strand starting at position 552 of SEQ ID NO: 587168
gcuagcuuccucguuugua

SEQ ID NO: 771745 - RNA, 19 nt, Artificial Sequence
  Description of Artificial Sequence: Synthetic oligonucleotide
  Antisense strand to SEQ ID NO: 771744
uacaaacgaggaagcuagc

SEQ ID NO: 771746 - RNA, 19 nt, Artificial Sequence
  Description of Artificial Sequence: Synthetic oligonucleotide
  Sense strand starting at position 554 of SEQ ID NO: 587168
uagcuuccucguuuguauu

SEQ ID NO: 771747 - RNA, 19 nt, Artificial Sequence
  Description of Artificial Sequence: Synthetic oligonucleotide
  Antisense strand to SEQ ID NO: 771746
aauacaaacgaggaagcua

SEQ ID NO: 771748 - RNA, 19 nt, Artificial Sequence
  Description of Artificial Sequence: Synthetic oligonucleotide
  Sense strand starting at position 555 of SEQ ID NO: 587168
agcuuccucguuuguauuu

SEQ ID NO: 771749 - RNA, 19 nt, Artificial Sequence
  Description of Artificial Sequence: Synthetic oligonucleotide
  Antisense strand to SEQ ID NO: 771748
aaauacaaacgaggaagcu

SEQ ID NO: 771750 - RNA, 19 nt, Artificial Sequence
  Description of Artificial Sequence: Synthetic oligonucleotide
  Sense strand starting at position 660 of SEQ ID NO: 587168
ggcaaaucaccaugguuuc

SEQ ID NO: 771751 - RNA, 19 nt, Artificial Sequence
  Description of Artificial Sequence: Synthetic oligonucleotide
  Antisense strand to SEQ ID NO: 771750
gaaaccauggugauuugcc

SEQ ID NO: 771752 - RNA, 19 nt, Artificial Sequence
  Description of Artificial Sequence: Synthetic oligonucleotide
  Sense strand starting at position 734 of SEQ ID NO: 587168
ugcugaugugguuacaaug

SEQ ID NO: 771753 - RNA, 19 nt, Artificial Sequence
  Description of Artificial Sequence: Synthetic oligonucleotide
  Antisense strand to SEQ ID NO: 771752
cauuguaaccacaucagca

SEQ ID NO: 771754 - RNA, 19 nt, Artificial Sequence
  Description of Artificial Sequence: Synthetic oligonucleotide
  Sense strand starting at position 806 of SEQ ID NO: 587168
agcacuggcccguacaaua

SEQ ID NO: 771755 - RNA, 19 nt, Artificial Sequence
  Description of Artificial Sequence: Synthetic oligonucleotide
  Antisense strand to SEQ ID NO: 771754
uauuguacgggccagugcu

SEQ ID NO: 771756 - RNA, 19 nt, Artificial Sequence
  Description of Artificial Sequence: Synthetic oligonucleotide
  Sense strand starting at position 871 of SEQ ID NO: 587168
gaaaguaucuuacugugua

SEQ ID NO: 771757 - RNA, 19 nt, Artificial Sequence
  Description of Artificial Sequence: Synthetic oligonucleotide
  Antisense strand to SEQ ID NO: 771756
uacacaguaagauacuuuc

SEQ ID NO: 771758 - RNA, 19 nt, Artificial Sequence
  Description of Artificial Sequence: Synthetic oligonucleotide
  Sense strand starting at position 936 of SEQ ID NO: 587168
gcuaaacuguaguuaauuc

SEQ ID NO: 771759 - RNA, 19 nt, Artificial Sequence
  Description of Artificial Sequence: Synthetic oligonucleotide
  Antisense strand to SEQ ID NO: 771758
gaauuaacuacaguuuagc

SEQ ID NO: 771760 - RNA, 19 nt, Artificial Sequence
  Description of Artificial Sequence: Synthetic oligonucleotide
  Sense strand starting at position 1054 of SEQ ID NO: 587168
cgucuuauccaaggucacu

SEQ ID NO: 771761 - RNA, 19 nt, Artificial Sequence
  Description of Artificial Sequence: Synthetic oligonucleotide
  Antisense strand to SEQ ID NO: 771760
agugaccuuggauaagacg

SEQ ID NO: 771762 - RNA, 19 nt, Artificial Sequence
  Description of Artificial Sequence: Synthetic oligonucleotide
  Sense strand starting at position 1240 of SEQ ID NO: 587168
ggguguauauaaucucuac

SEQ ID NO: 771763 - RNA, 19 nt, Artificial Sequence
  Description of Artificial Sequence: Synthetic oligonucleotide
  Antisense strand to SEQ ID NO: 771762
guagagauuauauacaccc

SEQ ID NO: 771764 - RNA, 19 nt, Artificial Sequence
  Description of Artificial Sequence: Synthetic oligonucleotide
  Sense strand starting at position 1308 of SEQ ID NO: 587168
uuaaucaccgcucagugau

SEQ ID NO: 771765 - RNA, 19 nt, Artificial Sequence
  Description of Artificial Sequence: Synthetic oligonucleotide
  Antisense strand to SEQ ID NO: 771764
aucacugagcggugauuaa

SEQ ID NO: 771766 - RNA, 19 nt, Artificial Sequence
  Description of Artificial Sequence: Synthetic oligonucleotide
  Sense strand starting at position 1410 of SEQ ID NO: 587168
ccucgaggucccgaaggaa

SEQ ID NO: 771767 - RNA, 19 nt, Artificial Sequence
  Description of Artificial Sequence: Synthetic oligonucleotide
  Antisense strand to SEQ ID NO: 771766
uuccuucgggaccucgagg

SEQ ID NO: 771768 - RNA, 19 nt, Artificial Sequence
  Description of Artificial Sequence: Synthetic oligonucleotide
  Sense strand starting at position 1659 of SEQ ID NO: 587168
ggacgucucccaggaagaa

SEQ ID NO: 771769 - RNA, 19 nt, Artificial Sequence
  Description of Artificial Sequence: Synthetic oligonucleotide
  Antisense strand to SEQ ID NO: 771768
uucuuccugggagacgucc

SEQ ID NO: 771770 - RNA, 19 nt, Artificial Sequence
  Description of Artificial Sequence: Synthetic oligonucleotide
  Sense strand starting at position 2146 of SEQ ID NO: 587168
cuaguuaaugcagggacua

SEQ ID NO: 771771 - RNA, 19 nt, Artificial Sequence
  Description of Artificial Sequence: Synthetic oligonucleotide
  Antisense strand to SEQ ID NO: 771770
uagucccugcauuaacuag

SEQ ID NO: 771772 - RNA, 19 nt, Artificial Sequence
  Description of Artificial Sequence: Synthetic oligonucleotide
  Sense strand starting at position 2147 of SEQ ID NO: 587168
uaguuaaugcagggacuaa

SEQ ID NO: 771773 - RNA, 19 nt, Artificial Sequence
  Description of Artificial Sequence: Synthetic oligonucleotide
  Antisense strand to SEQ ID NO: 771772
uuagucccugcauuaacua

SEQ ID NO: 771774 - RNA, 19 nt, Artificial Sequence
  Description of Artificial Sequence: Synthetic oligonucleotide
  Sense strand starting at position 2231 of SEQ ID NO: 587168
gacaccaguccaugugaaa

SEQ ID NO: 771775 - RNA, 19 nt, Artificial Sequence
  Description of Artificial Sequence: Synthetic oligonucleotide
  Antisense strand to SEQ ID NO: 771774
uuucacauggacugguguc

SEQ ID NO: 771776 - RNA, 19 nt, Artificial Sequence
  Description of Artificial Sequence: Synthetic oligonucleotide
  Sense strand starting at position 2312 of SEQ ID NO: 587168
gcaauauaguacuugguaa

SEQ ID NO: 771777 - RNA, 19 nt, Artificial Sequence
  Description of Artificial Sequence: Synthetic oligonucleotide
  Antisense strand to SEQ ID NO: 771776
uuaccaaguacuauauugc

SEQ ID NO: 771778 - RNA, 19 nt, Artificial Sequence
  Description of Artificial Sequence: Synthetic oligonucleotide
  Sense strand starting at position 2320 of SEQ ID NO: 587168
guacuugguaauuguaugu

SEQ ID NO: 771779 - RNA, 19 nt, Artificial Sequence
  Description of Artificial Sequence: Synthetic oligonucleotide
  Antisense strand to SEQ ID NO: 771778
acauacaauuaccaaguac

SEQ ID NO: 771780 - RNA, 19 nt, Artificial Sequence
  Description of Artificial Sequence: Synthetic oligonucleotide
  Sense strand starting at position 2329 of SEQ ID NO: 587168
aauuguaugucuguggcaa

SEQ ID NO: 771781 - RNA, 19 nt, Artificial Sequence
  Description of Artificial Sequence: Synthetic oligonucleotide
  Antisense strand to SEQ ID NO: 771780
uugccacagacauacaauu

SEQ ID NO: 771782 - RNA, 19 nt, Artificial Sequence
  Description of Artificial Sequence: Synthetic oligonucleotide
  Sense strand starting at position 2330 of SEQ ID NO: 587168
auuguaugucuguggcaaa

SEQ ID NO: 771783 - RNA, 19 nt, Artificial Sequence
  Description of Artificial Sequence: Synthetic oligonucleotide
  Antisense strand to SEQ ID NO: 771782
uuugccacagacauacaau

SEQ ID NO: 771784 - RNA, 19 nt, Artificial Sequence
  Description of Artificial Sequence: Synthetic oligonucleotide
  Sense strand starting at position 2444 of SEQ ID NO: 587168
ggagcuauauggaguggua

SEQ ID NO: 771785 - RNA, 19 nt, Artificial Sequence
  Description of Artificial Sequence: Synthetic oligonucleotide
  Antisense strand to SEQ ID NO: 771784
uaccacuccauauagcucc

SEQ ID NO: 771786 - RNA, 19 nt, Artificial Sequence
  Description of Artificial Sequence: Synthetic oligonucleotide
  Sense strand starting at position 2446 of SEQ ID NO: 587168
agcuauauggagugguauu

SEQ ID NO: 771787 - RNA, 19 nt, Artificial Sequence
  Description of Artificial Sequence: Synthetic oligonucleotide
  Antisense strand to SEQ ID NO: 771786
aauaccacuccauauagcu

SEQ ID NO: 771788 - RNA, 19 nt, Artificial Sequence
  Description of Artificial Sequence: Synthetic oligonucleotide
  Sense strand starting at position 2447 of SEQ ID NO: 587168
gcuauauggagugguauuu

SEQ ID NO: 771789 - RNA, 19 nt, Artificial Sequence
  Description of Artificial Sequence: Synthetic oligonucleotide
  Antisense strand to SEQ ID NO: 771788
aaauaccacuccauauagc

SEQ ID NO: 771790 - RNA, 19 nt, Artificial Sequence
  Description of Artificial Sequence: Synthetic oligonucleotide
  Sense strand starting at position 2470 of SEQ ID NO: 587168
auacuuggcccguggacaa

SEQ ID NO: 771791 - RNA, 19 nt, Artificial Sequence
  Description of Artificial Sequence: Synthetic oligonucleotide
  Antisense strand to SEQ ID NO: 771790
uuguccacgggccaaguau

SEQ ID NO: 771792 - RNA, 19 nt, Artificial Sequence
  Description of Artificial Sequence: Synthetic oligonucleotide
  Sense strand starting at position 2481 of SEQ ID NO: 587168
guggacaagggaugucuuu

SEQ ID NO: 771793 - RNA, 19 nt, Artificial Sequence
  Description of Artificial Sequence: Synthetic oligonucleotide
  Antisense strand to SEQ ID NO: 771792
aaagacaucccuuguccac

SEQ ID NO: 771794 - RNA, 19 nt, Artificial Sequence
  Description of Artificial Sequence: Synthetic oligonucleotide
  Sense strand starting at position 2488 of SEQ ID NO: 587168
agggaugucuuuccacaag

SEQ ID NO: 771795 - RNA, 19 nt, Artificial Sequence
  Description of Artificial Sequence: Synthetic oligonucleotide
  Antisense strand to SEQ ID NO: 771794
cuuguggaaagacaucccu

SEQ ID NO: 771796 - RNA, 19 nt, Artificial Sequence
  Description of Artificial Sequence: Synthetic oligonucleotide
  Sense strand starting at position 2516 of SEQ ID NO: 587168
uuauaagguucugugcuuu

SEQ ID NO: 771797 - RNA, 19 nt, Artificial Sequence
  Description of Artificial Sequence: Synthetic oligonucleotide
  Antisense strand to SEQ ID NO: 771796
aaagcacagaaccuuauaa

SEQ ID NO: 771798 - RNA, 19 nt, Artificial Sequence
  Description of Artificial Sequence: Synthetic oligonucleotide
  Sense strand starting at position 2535 of SEQ ID NO: 587168
gcucauguggcauaugcua

SEQ ID NO: 771799 - RNA, 19 nt, Artificial Sequence
  Description of Artificial Sequence: Synthetic oligonucleotide
  Antisense strand to SEQ ID NO: 771798
uagcauaugccacaugagc

SEQ ID NO: 771800 - RNA, 19 nt, Artificial Sequence
  Description of Artificial Sequence: Synthetic oligonucleotide
  Sense strand starting at position 2710 of SEQ ID NO: 587168
ggcuuuaaugguugugacu

SEQ ID NO: 771801 - RNA, 19 nt, Artificial Sequence
  Description of Artificial Sequence: Synthetic oligonucleotide
  Antisense strand to SEQ ID NO: 771800
agucacaaccauuaaagcc

SEQ ID NO: 771802 - RNA, 19 nt, Artificial Sequence
  Description of Artificial Sequence: Synthetic oligonucleotide
  Sense strand starting at position 2719 of SEQ ID NO: 587168
gguugugacuuuccacuau

SEQ ID NO: 771803 - RNA, 19 nt, Artificial Sequence
  Description of Artificial Sequence: Synthetic oligonucleotide
  Antisense strand to SEQ ID NO: 771802
auaguggaaagucacaacc

SEQ ID NO: 771804 - RNA, 19 nt, Artificial Sequence
  Description of Artificial Sequence: Synthetic oligonucleotide
  Sense strand starting at position 2723 of SEQ ID NO: 587168
gugacuuuccacuauguuc

SEQ ID NO: 771805 - RNA, 19 nt, Artificial Sequence
  Description of Artificial Sequence: Synthetic oligonucleotide
  Antisense strand to SEQ ID NO: 771804
gaacauaguggaaagucac

SEQ ID NO: 771806 - RNA, 19 nt, Artificial Sequence
  Description of Artificial Sequence: Synthetic oligonucleotide
  Sense strand starting at position 2756 of SEQ ID NO: 587168
gggagaaacucaguagcuu

SEQ ID NO: 771807 - RNA, 19 nt, Artificial Sequence
  Description of Artificial Sequence: Synthetic oligonucleotide
  Antisense strand to SEQ ID NO: 771806
aagcuacugaguuucuccc

SEQ ID NO: 771808 - RNA, 19 nt, Artificial Sequence
  Description of Artificial Sequence: Synthetic oligonucleotide
  Sense strand starting at position 2783 of SEQ ID NO: 587168
gacucuuacugcuuggaga

SEQ ID NO: 771809 - RNA, 19 nt, Artificial Sequence
  Description of Artificial Sequence: Synthetic oligonucleotide
  Antisense strand to SEQ ID NO: 771808
ucuccaagcaguaagaguc

SEQ ID NO: 771810 - RNA, 19 nt, Artificial Sequence
  Description of Artificial Sequence: Synthetic oligonucleotide
  Sense strand starting at position 2785 of SEQ ID NO: 587168
cucuuacugcuuggagaga

SEQ ID NO: 771811 - RNA, 19 nt, Artificial Sequence
  Description of Artificial Sequence: Synthetic oligonucleotide
  Antisense strand to SEQ ID NO: 771810
ucucuccaagcaguaagag

SEQ ID NO: 771812 - RNA, 19 nt, Artificial Sequence
  Description of Artificial Sequence: Synthetic oligonucleotide
  Sense strand starting at position 3523 of SEQ ID NO: 587168
agaucauccuggcccauau

SEQ ID NO: 771813 - RNA, 19 nt, Artificial Sequence
  Description of Artificial Sequence: Synthetic oligonucleotide
  Antisense strand to SEQ ID NO: 771812
auaugggccaggaugaucu

SEQ ID NO: 771814 - RNA, 19 nt, Artificial Sequence
  Description of Artificial Sequence: Synthetic oligonucleotide
  Sense strand starting at position 3706 of SEQ ID NO: 587168
gagcuagacucuguaucca

SEQ ID NO: 771815 - RNA, 19 nt, Artificial Sequence
  Description of Artificial Sequence: Synthetic oligonucleotide
  Antisense strand to SEQ ID NO: 771814
uggauacagagucuagcuc

SEQ ID NO: 771816 - RNA, 19 nt, Artificial Sequence
  Description of Artificial Sequence: Synthetic oligonucleotide
  Sense strand starting at position 3784 of SEQ ID NO: 587168
cgguaaucucuccacccua

SEQ ID NO: 771817 - RNA, 19 nt, Artificial Sequence
  Description of Artificial Sequence: Synthetic oligonucleotide
  Antisense strand to SEQ ID NO: 771816
uaggguggagagauuaccg

SEQ ID NO: 771818 - RNA, 19 nt, Artificial Sequence
  Description of Artificial Sequence: Synthetic oligonucleotide
  Sense strand starting at position 3919 of SEQ ID NO: 587168
gcugguauccuggaaguau

SEQ ID NO: 771819 - RNA, 19 nt, Artificial Sequence
  Description of Artificial Sequence: Synthetic oligonucleotide
  Antisense strand to SEQ ID NO: 771818
auacuuccaggauaccagc

SEQ ID NO: 771820 - RNA, 19 nt, Artificial Sequence
  Description of Artificial Sequence: Synthetic oligonucleotide
  Sense strand starting at position 3928 of SEQ ID NO: 587168
cuggaaguaucugcuacau

SEQ ID NO: 771821 - RNA, 19 nt, Artificial Sequence
  Description of Artificial Sequence: Synthetic oligonucleotide
  Antisense strand to SEQ ID NO: 771820
auguagcagauacuuccag

SEQ ID NO: 771822 - RNA, 19 nt, Artificial Sequence
  Description of Artificial Sequence: Synthetic oligonucleotide
  Sense strand starting at position 296 of SEQ ID NO: 587169
gaucgcagauugucuucua

SEQ ID NO: 771823 - RNA, 19 nt, Artificial Sequence
  Description of Artificial Sequence: Synthetic oligonucleotide
  Antisense strand to SEQ ID NO: 771822
uagaagacaaucugcgauc

SEQ ID NO: 771824 - RNA, 19 nt, Artificial Sequence
  Description of Artificial Sequence: Synthetic oligonucleotide
  Sense strand starting at position 299 of SEQ ID NO: 587169
cgcagauugucuucuacag

SEQ ID NO: 771825 - RNA, 19 nt, Artificial Sequence
  Description of Artificial Sequence: Synthetic oligonucleotide
  Antisense strand to SEQ ID NO: 771824
cuguagaagacaaucugcg

SEQ ID NO: 771826 - RNA, 19 nt, Artificial Sequence
  Description of Artificial Sequence: Synthetic oligonucleotide
  Sense strand starting at position 303 of SEQ ID NO: 587169
gauugucuucuacagguua

SEQ ID NO: 771827 - RNA, 19 nt, Artificial Sequence
  Description of Artificial Sequence: Synthetic oligonucleotide
  Antisense strand to SEQ ID NO: 771826
uaaccuguagaagacaauc

SEQ ID NO: 771828 - RNA, 19 nt, Artificial Sequence
  Description of Artificial Sequence: Synthetic oligonucleotide
  Sense strand starting at position 316 of SEQ ID NO: 587169
agguuaacacacuggauau

SEQ ID NO: 771829 - RNA, 19 nt, Artificial Sequence
  Description of Artificial Sequence: Synthetic oligonucleotide
  Antisense strand to SEQ ID NO: 771828
auauccaguguguuaaccu

SEQ ID NO: 771830 - RNA, 19 nt, Artificial Sequence
  Description of Artificial Sequence: Synthetic oligonucleotide
  Sense strand starting at position 369 of SEQ ID NO: 587169
gguaccuaaucccaggaga

SEQ ID NO: 771831 - RNA, 19 nt, Artificial Sequence
  Description of Artificial Sequence: Synthetic oligonucleotide
  Antisense strand to SEQ ID NO: 771830
ucuccugggauuagguacc

SEQ ID NO: 771832 - RNA, 19 nt, Artificial Sequence
  Description of Artificial Sequence: Synthetic oligonucleotide
  Sense strand starting at position 971 of SEQ ID NO: 587169
uuaauaucuucugaaggac

SEQ ID NO: 771833 - RNA, 19 nt, Artificial Sequence
  Description of Artificial Sequence: Synthetic oligonucleotide
  Antisense strand to SEQ ID NO: 771832
guccuucagaagauauuaa

SEQ ID NO: 771834 - RNA, 19 nt, Artificial Sequence
  Description of Artificial Sequence: Synthetic oligonucleotide
  Sense strand starting at position 974 of SEQ ID NO: 587169
auaucuucugaaggacacu

SEQ ID NO: 771835 - RNA, 19 nt, Artificial Sequence
  Description of Artificial Sequence: Synthetic oligonucleotide
  Antisense strand to SEQ ID NO: 771834
aguguccuucagaagauau

SEQ ID NO: 771836 - RNA, 19 nt, Artificial Sequence
  Description of Artificial Sequence: Synthetic oligonucleotide
  Sense strand starting at position 1016 of SEQ ID NO: 587169
uguauugggcaucauuauu

SEQ ID NO: 771837 - RNA, 19 nt, Artificial Sequence
  Description of Artificial Sequence: Synthetic oligonucleotide
  Antisense strand to SEQ ID NO: 771836
aauaaugaugcccaauaca

SEQ ID NO: 771838 - RNA, 19 nt, Artificial Sequence
  Description of Artificial Sequence: Synthetic oligonucleotide
  Sense strand starting at position 1021 of SEQ ID NO: 587169
ugggcaucauuauuagcaa

SEQ ID NO: 771839 - RNA, 19 nt, Artificial Sequence
  Description of Artificial Sequence: Synthetic oligonucleotide
  Antisense strand to SEQ ID NO: 771838
uugcuaauaaugaugccca

SEQ ID NO: 771840 - RNA, 19 nt, Artificial Sequence
  Description of Artificial Sequence: Synthetic oligonucleotide
  Sense strand starting at position 1024 of SEQ ID NO: 587169
gcaucauuauuagcaaaga

SEQ ID NO: 771841 - RNA, 19 nt, Artificial Sequence
  Description of Artificial Sequence: Synthetic oligonucleotide
  Antisense strand to SEQ ID NO: 771840
ucuuugcuaauaaugaugc

SEQ ID NO: 771842 - RNA, 19 nt, Artificial Sequence
  Description of Artificial Sequence: Synthetic oligonucleotide
  Sense strand starting at position 1047 of SEQ ID NO: 587169
uggcaaagaggucaucuau

SEQ ID NO: 771843 - RNA, 19 nt, Artificial Sequence
  Description of Artificial Sequence: Synthetic oligonucleotide
  Antisense strand to SEQ ID NO: 771842
auagaugaccucuuugcca

SEQ ID NO: 771844 - RNA, 19 nt, Artificial Sequence
  Description of Artificial Sequence: Synthetic oligonucleotide
  Sense strand starting at position 1056 of SEQ ID NO: 587169
ggucaucuauacuaaagac

SEQ ID NO: 771845 - RNA, 19 nt, Artificial Sequence
  Description of Artificial Sequence: Synthetic oligonucleotide
  Antisense strand to SEQ ID NO: 771844
gucuuuaguauagaugacc

SEQ ID NO: 771846 - RNA, 19 nt, Artificial Sequence
  Description of Artificial Sequence: Synthetic oligonucleotide
  Sense strand starting at position 1313 of SEQ ID NO: 587169
acgaacuuaagucggaaua

SEQ ID NO: 771847 - RNA, 19 nt, Artificial Sequence
  Description of Artificial Sequence: Synthetic oligonucleotide
  Antisense strand to SEQ ID NO: 771846
uauuccgacuuaaguucgu

SEQ ID NO: 771848 - RNA, 19 nt, Artificial Sequence
  Description of Artificial Sequence: Synthetic oligonucleotide
  Sense strand starting at position 1314 of SEQ ID NO: 587169
cgaacuuaagucggaauaa

SEQ ID NO: 771849 - RNA, 19 nt, Artificial Sequence
  Description of Artificial Sequence: Synthetic oligonucleotide
  Antisense strand to SEQ ID NO: 771848
uuauuccgacuuaaguucg

SEQ ID NO: 771850 - RNA, 19 nt, Artificial Sequence
  Description of Artificial Sequence: Synthetic oligonucleotide
  Sense strand starting at position 1315 of SEQ ID NO: 587169
gaacuuaagucggaauaag

SEQ ID NO: 771851 - RNA, 19 nt, Artificial Sequence
  Description of Artificial Sequence: Synthetic oligonucleotide
  Antisense strand to SEQ ID NO: 771850
cuuauuccgacuuaaguuc

SEQ ID NO: 771852 - RNA, 19 nt, Artificial Sequence
  Description of Artificial Sequence: Synthetic oligonucleotide
  Sense strand starting at position 1362 of SEQ ID NO: 587169
gagccuguucucuaagcua

SEQ ID NO: 771853 - RNA, 19 nt, Artificial Sequence
  Description of Artificial Sequence: Synthetic oligonucleotide
  Antisense strand to SEQ ID NO: 771852
uagcuuagagaacaggcuc

SEQ ID NO: 771854 - RNA, 19 nt, Artificial Sequence
  Description of Artificial Sequence: Synthetic oligonucleotide
  Sense strand starting at position 1431 of SEQ ID NO: 587169
gcguuuauaagguacagau

SEQ ID NO: 771855 - RNA, 19 nt, Artificial Sequence
  Description of Artificial Sequence: Synthetic oligonucleotide
  Antisense strand to SEQ ID NO: 771854
aucuguaccuuauaaacgc

SEQ ID NO: 771856 - RNA, 19 nt, Artificial Sequence
  Description of Artificial Sequence: Synthetic oligonucleotide
  Sense strand starting at position 1433 of SEQ ID NO: 587169
guuuauaagguacagaucu

SEQ ID NO: 771857 - RNA, 19 nt, Artificial Sequence
  Description of Artificial Sequence: Synthetic oligonucleotide
  Antisense strand to SEQ ID NO: 771856
agaucuguaccuuauaaac

SEQ ID NO: 771858 - RNA, 19 nt, Artificial Sequence
  Description of Artificial Sequence: Synthetic oligonucleotide
  Sense strand starting at position 1629 of SEQ ID NO: 587169
gguucuucccacggagaga

SEQ ID NO: 771859 - RNA, 19 nt, Artificial Sequence
  Description of Artificial Sequence: Synthetic oligonucleotide
  Antisense strand to SEQ ID NO: 771858
ucucuccgugggaagaacc

SEQ ID NO: 771860 - RNA, 19 nt, Artificial Sequence
  Description of Artificial Sequence: Synthetic oligonucleotide
  Sense strand starting at position 1630 of SEQ ID NO: 587169
guucuucccacggagagaa

SEQ ID NO: 771861 - RNA, 19 nt, Artificial Sequence
  Description of Artificial Sequence: Synthetic oligonucleotide
  Antisense strand to SEQ ID NO: 771860
uucucuccgugggaagaac

SEQ ID NO: 771862 - RNA, 19 nt, Artificial Sequence
  Description of Artificial Sequence: Synthetic oligonucleotide
  Sense strand starting at position 1717 of SEQ ID NO: 587169
ggguuaaaccguuagaucc

SEQ ID NO: 771863 - RNA, 19 nt, Artificial Sequence
  Description of Artificial Sequence: Synthetic oligonucleotide
  Antisense strand to SEQ ID NO: 771862
ggaucuaacgguuuaaccc

SEQ ID NO: 771864 - RNA, 19 nt, Artificial Sequence
  Description of Artificial Sequence: Synthetic oligonucleotide
  Sense strand starting at position 1757 of SEQ ID NO: 587169
ccgcguccucucuaggaau

SEQ ID NO: 771865 - RNA, 19 nt, Artificial Sequence
  Description of Artificial Sequence: Synthetic oligonucleotide
  Antisense strand to SEQ ID NO: 771864
auuccuagagaggacgcgg

SEQ ID NO: 771866 - RNA, 19 nt, Artificial Sequence
  Description of Artificial Sequence: Synthetic oligonucleotide
  Sense strand starting at position 2027 of SEQ ID NO: 587169
gagguugcucgugucugau

SEQ ID NO: 771867 - RNA, 19 nt, Artificial Sequence
  Description of Artificial Sequence: Synthetic oligonucleotide
  Antisense strand to SEQ ID NO: 771866
aucagacacgagcaaccuc

SEQ ID NO: 771868 - RNA, 19 nt, Artificial Sequence
  Description of Artificial Sequence: Synthetic oligonucleotide
  Sense strand starting at position 2097 of SEQ ID NO: 587169
ugaaguaggucuguaccuu

SEQ ID NO: 771869 - RNA, 19 nt, Artificial Sequence
  Description of Artificial Sequence: Synthetic oligonucleotide
  Antisense strand to SEQ ID NO: 771868
aagguacagaccuacuuca

SEQ ID NO: 771870 - RNA, 19 nt, Artificial Sequence
  Description of Artificial Sequence: Synthetic oligonucleotide
  Sense strand starting at position 2126 of SEQ ID NO: 587169
cgcaaaccucgcuuauguu

SEQ ID NO: 771871 - RNA, 19 nt, Artificial Sequence
  Description of Artificial Sequence: Synthetic oligonucleotide
  Antisense strand to SEQ ID NO: 771870
aacauaagcgagguuugcg

SEQ ID NO: 771872 - RNA, 19 nt, Artificial Sequence
  Description of Artificial Sequence: Synthetic oligonucleotide
  Sense strand starting at position 2284 of SEQ ID NO: 587169
ccagcuguucccggaacua

SEQ ID NO: 771873 - RNA, 19 nt, Artificial Sequence
  Description of Artificial Sequence: Synthetic oligonucleotide
  Antisense strand to SEQ ID NO: 771872
uaguuccgggaacagcugg

SEQ ID NO: 771874 - RNA, 19 nt, Artificial Sequence
  Description of Artificial Sequence: Synthetic oligonucleotide
  Sense strand starting at position 2460 of SEQ ID NO: 587169
gggcaucccuuugaagaga

SEQ ID NO: 771875 - RNA, 19 nt, Artificial Sequence
  Description of Artificial Sequence: Synthetic oligonucleotide
  Antisense strand to SEQ ID NO: 771874
ucucuucaaagggaugccc

SEQ ID NO: 771876 - RNA, 19 nt, Artificial Sequence
  Description of Artificial Sequence: Synthetic oligonucleotide
  Sense strand starting at position 2514 of SEQ ID NO: 587169
gggucucguccuuaaugau

SEQ ID NO: 771877 - RNA, 19 nt, Artificial Sequence
  Description of Artificial Sequence: Synthetic oligonucleotide
  Antisense strand to SEQ ID NO: 771876
aucauuaaggacgagaccc

SEQ ID NO: 771878 - RNA, 19 nt, Artificial Sequence
  Description of Artificial Sequence: Synthetic oligonucleotide
  Sense strand starting at position 3379 of SEQ ID NO: 587169
aaggaacugcugugaaauu

SEQ ID NO: 771879 - RNA, 19 nt, Artificial Sequence
  Description of Artificial Sequence: Synthetic oligonucleotide
  Antisense strand to SEQ ID NO: 771878
aauuucacagcaguuccuu

SEQ ID NO: 771880 - RNA, 19 nt, Artificial Sequence
  Description of Artificial Sequence: Synthetic oligonucleotide
  Sense strand starting at position 3501 of SEQ ID NO: 587169
cccggugaauguuugcaau

SEQ ID NO: 771881 - RNA, 19 nt, Artificial Sequence
  Description of Artificial Sequence: Synthetic oligonucleotide
  Antisense strand to SEQ ID NO: 771880
auugcaaacauucaccggg

SEQ ID NO: 771882 - RNA, 19 nt, Artificial Sequence
  Description of Artificial Sequence: Synthetic oligonucleotide
  Sense strand starting at position 3511 of SEQ ID NO: 587169
guuugcaaugcccguauuu

SEQ ID NO: 771883 - RNA, 19 nt, Artificial Sequence
  Description of Artificial Sequence: Synthetic oligonucleotide
  Antisense strand to SEQ ID NO: 771882
aaauacgggcauugcaaac

SEQ ID NO: 771884 - RNA, 19 nt, Artificial Sequence
  Description of Artificial Sequence: Synthetic oligonucleotide
  Sense strand starting at position 3533 of SEQ ID NO: 587169
guguuagugaguugguaua

SEQ ID NO: 771885 - RNA, 19 nt, Artificial Sequence
  Description of Artificial Sequence: Synthetic oligonucleotide
  Antisense strand to SEQ ID NO: 771884
uauaccaacucacuaacac

SEQ ID NO: 771886 - RNA, 19 nt, Artificial Sequence
  Description of Artificial Sequence: Synthetic oligonucleotide
  Sense strand starting at position 3535 of SEQ ID NO: 587169
guuagugaguugguauaga

SEQ ID NO: 771887 - RNA, 19 nt, Artificial Sequence
  Description of Artificial Sequence: Synthetic oligonucleotide
  Antisense strand to SEQ ID NO: 771886
ucuauaccaacucacuaac

SEQ ID NO: 771888 - RNA, 19 nt, Artificial Sequence
  Description of Artificial Sequence: Synthetic oligonucleotide
  Sense strand starting at position 3584 of SEQ ID NO: 587169
cguauaaaguuguuuaaug

SEQ ID NO: 771889 - RNA, 19 nt, Artificial Sequence
  Description of Artificial Sequence: Synthetic oligonucleotide
  Antisense strand to SEQ ID NO: 771888
cauuaaacaacuuuauacg

SEQ ID NO: 771890 - RNA, 19 nt, Artificial Sequence
  Description of Artificial Sequence: Synthetic oligonucleotide
  Sense strand starting at position 3592 of SEQ ID NO: 587169
guuguuuaaugucuaugaa

SEQ ID NO: 771891 - RNA, 19 nt, Artificial Sequence
  Description of Artificial Sequence: Synthetic oligonucleotide
  Antisense strand to SEQ ID NO: 771890
uucauagacauuaaacaac

SEQ ID NO: 771892 - RNA, 19 nt, Artificial Sequence
  Description of Artificial Sequence: Synthetic oligonucleotide
  Sense strand starting at position 3595 of SEQ ID NO: 587169
guuuaaugucuaugaaagu

SEQ ID NO: 771893 - RNA, 19 nt, Artificial Sequence
  Description of Artificial Sequence: Synthetic oligonucleotide
  Antisense strand to SEQ ID NO: 771892
acuuucauagacauuaaac

SEQ ID NO: 771894 - RNA, 19 nt, Artificial Sequence
  Description of Artificial Sequence: Synthetic oligonucleotide
  Sense strand starting at position 3602 of SEQ ID NO: 587169
gucuaugaaaguuguucca

SEQ ID NO: 771895 - RNA, 19 nt, Artificial Sequence
  Description of Artificial Sequence: Synthetic oligonucleotide
  Antisense strand to SEQ ID NO: 771894
uggaacaacuuucauagac

SEQ ID NO: 771896 - RNA, 19 nt, Artificial Sequence
  Description of Artificial Sequence: Synthetic oligonucleotide
  Sense strand starting at position 3604 of SEQ ID NO: 587169
cuaugaaaguuguuccaga

SEQ ID NO: 771897 - RNA, 19 nt, Artificial Sequence
  Description of Artificial Sequence: Synthetic oligonucleotide
  Antisense strand to SEQ ID NO: 771896
ucuggaacaacuuucauag

SEQ ID NO: 771898 - RNA, 19 nt, Artificial Sequence
  Description of Artificial Sequence: Synthetic oligonucleotide
  Sense strand starting at position 3605 of SEQ ID NO: 587169
uaugaaaguuguuccagau

SEQ ID NO: 771899 - RNA, 19 nt, Artificial Sequence
  Description of Artificial Sequence: Synthetic oligonucleotide
  Antisense strand to SEQ ID NO: 771898
aucuggaacaacuuucaua

SEQ ID NO: 771900 - RNA, 19 nt, Artificial Sequence
  Description of Artificial Sequence: Synthetic oligonucleotide
  Sense strand starting at position 3611 of SEQ ID NO: 587169
aguuguuccagaugggcau

SEQ ID NO: 771901 - RNA, 19 nt, Artificial Sequence
  Description of Artificial Sequence: Synthetic oligonucleotide
  Antisense strand to SEQ ID NO: 771900
augcccaucuggaacaacu

SEQ ID NO: 771902 - RNA, 19 nt, Artificial Sequence
  Description of Artificial Sequence: Synthetic oligonucleotide
  Sense strand starting at position 3 of SEQ ID NO: 587170
gauugucuucuacagguua

SEQ ID NO: 771903 - RNA, 19 nt, Artificial Sequence
  Description of Artificial Sequence: Synthetic oligonucleotide
  Antisense strand to SEQ ID NO: 771902
uaaccuguagaagacaauc

SEQ ID NO: 771904 - RNA, 19 nt, Artificial Sequence
  Description of Artificial Sequence: Synthetic oligonucleotide
  Sense strand starting at position 16 of SEQ ID NO: 587170
agguuaacacacuggauau

SEQ ID NO: 771905 - RNA, 19 nt, Artificial Sequence
  Description of Artificial Sequence: Synthetic oligonucleotide
  Antisense strand to SEQ ID NO: 771904
auauccaguguguuaaccu

SEQ ID NO: 771906 - RNA, 19 nt, Artificial Sequence
  Description of Artificial Sequence: Synthetic oligonucleotide
  Sense strand starting at position 69 of SEQ ID NO: 587170
gguaccuaaucccaggaga

SEQ ID NO: 771907 - RNA, 19 nt, Artificial Sequence
  Description of Artificial Sequence: Synthetic oligonucleotide
  Antisense strand to SEQ ID NO: 771906
ucuccugggauuagguacc

SEQ ID NO: 771908 - RNA, 19 nt, Artificial Sequence
  Description of Artificial Sequence: Synthetic oligonucleotide
  Sense strand starting at position 671 of SEQ ID NO: 587170
uuaauaucuucugaaggac

SEQ ID NO: 771909 - RNA, 19 nt, Artificial Sequence
  Description of Artificial Sequence: Synthetic oligonucleotide
  Antisense strand to SEQ ID NO: 771908
guccuucagaagauauuaa

SEQ ID NO: 771910 - RNA, 19 nt, Artificial Sequence
  Description of Artificial Sequence: Synthetic oligonucleotide
  Sense strand starting at position 674 of SEQ ID NO: 587170
auaucuucugaaggacacu

SEQ ID NO: 771911 - RNA, 19 nt, Artificial Sequence
  Description of Artificial Sequence: Synthetic oligonucleotide
  Antisense strand to SEQ ID NO: 771910
aguguccuucagaagauau

SEQ ID NO: 771912 - RNA, 19 nt, Artificial Sequence
  Description of Artificial Sequence: Synthetic oligonucleotide
  Sense strand starting at position 716 of SEQ ID NO: 587170
uguauugggcaucauuauu

SEQ ID NO: 771913 - RNA, 19 nt, Artificial Sequence
  Description of Artificial Sequence: Synthetic oligonucleotide
  Antisense strand to SEQ ID NO: 771912
aauaaugaugcccaauaca

SEQ ID NO: 771914 - RNA, 19 nt, Artificial Sequence
  Description of Artificial Sequence: Synthetic oligonucleotide
  Sense strand starting at position 721 of SEQ ID NO: 587170
ugggcaucauuauuagcaa

SEQ ID NO: 771915 - RNA, 19 nt, Artificial Sequence
  Description of Artificial Sequence: Synthetic oligonucleotide
  Antisense strand to SEQ ID NO: 771914
uugcuaauaaugaugccca

SEQ ID NO: 771916 - RNA, 19 nt, Artificial Sequence
  Description of Artificial Sequence: Synthetic oligonucleotide
  Sense strand starting at position 724 of SEQ ID NO: 587170
gcaucauuauuagcaaaga

SEQ ID NO: 771917 - RNA, 19 nt, Artificial Sequence
  Description of Artificial Sequence: Synthetic oligonucleotide
  Antisense strand to SEQ ID NO: 771916
ucuuugcuaauaaugaugc

SEQ ID NO: 771918 - RNA, 19 nt, Artificial Sequence
  Description of Artificial Sequence: Synthetic oligonucleotide
  Sense strand starting at position 747 of SEQ ID NO: 587170
uggcaaagaggucaucuau

SEQ ID NO: 771919 - RNA, 19 nt, Artificial Sequence
  Description of Artificial Sequence: Synthetic oligonucleotide
  Antisense strand to SEQ ID NO: 771918
auagaugaccucuuugcca

SEQ ID NO: 771920 - RNA, 19 nt, Artificial Sequence
  Description of Artificial Sequence: Synthetic oligonucleotide
  Sense strand starting at position 756 of SEQ ID NO: 587170
ggucaucuauacuaaagac

SEQ ID NO: 771921 - RNA, 19 nt, Artificial Sequence
  Description of Artificial Sequence: Synthetic oligonucleotide
  Antisense strand to SEQ ID NO: 771920
gucuuuaguauagaugacc

SEQ ID NO: 771922 - RNA, 19 nt, Artificial Sequence
  Description of Artificial Sequence: Synthetic oligonucleotide
  Sense strand starting at position 1013 of SEQ ID NO: 587170
acgaacuuaagucggaaua

SEQ ID NO: 771923 - RNA, 19 nt, Artificial Sequence
  Description of Artificial Sequence: Synthetic oligonucleotide
  Antisense strand to SEQ ID NO: 771922
uauuccgacuuaaguucgu

SEQ ID NO: 771924 - RNA, 19 nt, Artificial Sequence
  Description of Artificial Sequence: Synthetic oligonucleotide
  Sense strand starting at position 1014 of SEQ ID NO: 587170
cgaacuuaagucggaauaa

SEQ ID NO: 771925 - RNA, 19 nt, Artificial Sequence
  Description of Artificial Sequence: Synthetic oligonucleotide
  Antisense strand to SEQ ID NO: 771924
uuauuccgacuuaaguucg

SEQ ID NO: 771926 - RNA, 19 nt, Artificial Sequence
  Description of Artificial Sequence: Synthetic oligonucleotide
  Sense strand starting at position 1015 of SEQ ID NO: 587170
gaacuuaagucggaauaag

SEQ ID NO: 771927 - RNA, 19 nt, Artificial Sequence
  Description of Artificial Sequence: Synthetic oligonucleotide
  Antisense strand to SEQ ID NO: 771926
cuuauuccgacuuaaguuc

SEQ ID NO: 771928 - RNA, 19 nt, Artificial Sequence
  Description of Artificial Sequence: Synthetic oligonucleotide
  Sense strand starting at position 1062 of SEQ ID NO: 587170
gagccuguucucuaagcua

SEQ ID NO: 771929 - RNA, 19 nt, Artificial Sequence
  Description of Artificial Sequence: Synthetic oligonucleotide
  Antisense strand to SEQ ID NO: 771928
uagcuuagagaacaggcuc

SEQ ID NO: 771930 - RNA, 19 nt, Artificial Sequence
  Description of Artificial Sequence: Synthetic oligonucleotide
  Sense strand starting at position 1131 of SEQ ID NO: 587170
gcguuuauaagguacagau

SEQ ID NO: 771931 - RNA, 19 nt, Artificial Sequence
  Description of Artificial Sequence: Synthetic oligonucleotide
  Antisense strand to SEQ ID NO: 771930
aucuguaccuuauaaacgc

SEQ ID NO: 771932 - RNA, 19 nt, Artificial Sequence
  Description of Artificial Sequence: Synthetic oligonucleotide
  Sense strand starting at position 1133 of SEQ ID NO: 587170
guuuauaagguacagaucu

SEQ ID NO: 771933 - RNA, 19 nt, Artificial Sequence
  Description of Artificial Sequence: Synthetic oligonucleotide
  Antisense strand to SEQ ID NO: 771932
agaucuguaccuuauaaac

SEQ ID NO: 771934 - RNA, 19 nt, Artificial Sequence
  Description of Artificial Sequence: Synthetic oligonucleotide
  Sense strand starting at position 1329 of SEQ ID NO: 587170
gguucuucccacggagaga

SEQ ID NO: 771935 - RNA, 19 nt, Artificial Sequence
  Description of Artificial Sequence: Synthetic oligonucleotide
  Antisense strand to SEQ ID NO: 771934
ucucuccgugggaagaacc

SEQ ID NO: 771936 - RNA, 19 nt, Artificial Sequence
  Description of Artificial Sequence: Synthetic oligonucleotide
  Sense strand starting at position 1330 of SEQ ID NO: 587170
guucuucccacggagagaa

SEQ ID NO: 771937 - RNA, 19 nt, Artificial Sequence
  Description of Artificial Sequence: Synthetic oligonucleotide
  Antisense strand to SEQ ID NO: 771936
uucucuccgugggaagaac

SEQ ID NO: 771938 - RNA, 19 nt, Artificial Sequence
  Description of Artificial Sequence: Synthetic oligonucleotide
  Sense strand starting at position 1417 of SEQ ID NO: 587170
ggguuaaaccguuagaucc

SEQ ID NO: 771939 - RNA, 19 nt, Artificial Sequence
  Description of Artificial Sequence: Synthetic oligonucleotide
  Antisense strand to SEQ ID NO: 771938
ggaucuaacgguuuaaccc

SEQ ID NO: 771940 - RNA, 19 nt, Artificial Sequence
  Description of Artificial Sequence: Synthetic oligonucleotide
  Sense strand starting at position 1457 of SEQ ID NO: 587170
ccgcguccucucuaggaau

SEQ ID NO: 771941 - RNA, 19 nt, Artificial Sequence
  Description of Artificial Sequence: Synthetic oligonucleotide
  Antisense strand to SEQ ID NO: 771940
auuccuagagaggacgcgg

SEQ ID NO: 771942 - RNA, 19 nt, Artificial Sequence
  Description of Artificial Sequence: Synthetic oligonucleotide
  Sense strand starting at position 1727 of SEQ ID NO: 587170
gagguugcucgugucugau

SEQ ID NO: 771943 - RNA, 19 nt, Artificial Sequence
  Description of Artificial Sequence: Synthetic oligonucleotide
  Antisense strand to SEQ ID NO: 771942
aucagacacgagcaaccuc

SEQ ID NO: 771944 - RNA, 19 nt, Artificial Sequence
  Description of Artificial Sequence: Synthetic oligonucleotide
  Sense strand starting at position 1797 of SEQ ID NO: 587170
ugaaguaggucuguaccuu

SEQ ID NO: 771945 - RNA, 19 nt, Artificial Sequence
  Description of Artificial Sequence: Synthetic oligonucleotide
  Antisense strand to SEQ ID NO: 771944
aagguacagaccuacuuca

SEQ ID NO: 771946 - RNA, 19 nt, Artificial Sequence
  Description of Artificial Sequence: Synthetic oligonucleotide
  Sense strand starting at position 1826 of SEQ ID NO: 587170
cgcaaaccucgcuuauguu

SEQ ID NO: 771947 - RNA, 19 nt, Artificial Sequence
  Description of Artificial Sequence: Synthetic oligonucleotide
  Antisense strand to SEQ ID NO: 771946
aacauaagcgagguuugcg

SEQ ID NO: 771948 - RNA, 19 nt, Artificial Sequence
  Description of Artificial Sequence: Synthetic oligonucleotide
  Sense strand starting at position 1984 of SEQ ID NO: 587170
ccagcuguucccggaacua

SEQ ID NO: 771949 - RNA, 19 nt, Artificial Sequence
  Description of Artificial Sequence: Synthetic oligonucleotide
  Antisense strand to SEQ ID NO: 771948
uaguuccgggaacagcugg

SEQ ID NO: 771950 - RNA, 19 nt, Artificial Sequence
  Description of Artificial Sequence: Synthetic oligonucleotide
  Sense strand starting at position 2160 of SEQ ID NO: 587170
gggcaucccuuugaagaga

SEQ ID NO: 771951 - RNA, 19 nt, Artificial Sequence
  Description of Artificial Sequence: Synthetic oligonucleotide
  Antisense strand to SEQ ID NO: 771950
ucucuucaaagggaugccc

SEQ ID NO: 771952 - RNA, 19 nt, Artificial Sequence
  Description of Artificial Sequence: Synthetic oligonucleotide
  Sense strand starting at position 2214 of SEQ ID NO: 587170
gggucucguccuuaaugau

SEQ ID NO: 771953 - RNA, 19 nt, Artificial Sequence
  Description of Artificial Sequence: Synthetic oligonucleotide
  Antisense strand to SEQ ID NO: 771952
aucauuaaggacgagaccc

SEQ ID NO: 771954 - RNA, 19 nt, Artificial Sequence
  Description of Artificial Sequence: Synthetic oligonucleotide
  Sense strand starting at position 3079 of SEQ ID NO: 587170
aaggaacugcugugaaauu

SEQ ID NO: 771955 - RNA, 19 nt, Artificial Sequence
  Description of Artificial Sequence: Synthetic oligonucleotide
  Antisense strand to SEQ ID NO: 771954
aauuucacagcaguuccuu

SEQ ID NO: 771956 - RNA, 19 nt, Artificial Sequence
  Description of Artificial Sequence: Synthetic oligonucleotide
  Sense strand starting at position 3201 of SEQ ID NO: 587170
cccggugaauguuugcaau

SEQ ID NO: 771957 - RNA, 19 nt, Artificial Sequence
  Description of Artificial Sequence: Synthetic oligonucleotide
  Antisense strand to SEQ ID NO: 771956
auugcaaacauucaccggg

SEQ ID NO: 771958 - RNA, 19 nt, Artificial Sequence
  Description of Artificial Sequence: Synthetic oligonucleotide
  Sense strand starting at position 3211 of SEQ ID NO: 587170
guuugcaaugcccguauuu

SEQ ID NO: 771959 - RNA, 19 nt, Artificial Sequence
  Description of Artificial Sequence: Synthetic oligonucleotide
  Antisense strand to SEQ ID NO: 771958
aaauacgggcauugcaaac

SEQ ID NO: 771960 - RNA, 19 nt, Artificial Sequence
  Description of Artificial Sequence: Synthetic oligonucleotide
  Sense strand starting at position 3231 of SEQ ID NO: 587170
guguguuagugaguuggua

SEQ ID NO: 771961 - RNA, 19 nt, Artificial Sequence
  Description of Artificial Sequence: Synthetic oligonucleotide
  Antisense strand to SEQ ID NO: 771960
uaccaacucacuaacacac

SEQ ID NO: 771962 - RNA, 19 nt, Artificial Sequence
  Description of Artificial Sequence: Synthetic oligonucleotide
  Sense strand starting at position 3233 of SEQ ID NO: 587170
guguuagugaguugguaua

SEQ ID NO: 771963 - RNA, 19 nt, Artificial Sequence
  Description of Artificial Sequence: Synthetic oligonucleotide
  Antisense strand to SEQ ID NO: 771962
uauaccaacucacuaacac

SEQ ID NO: 771964 - RNA, 19 nt, Artificial Sequence
  Description of Artificial Sequence: Synthetic oligonucleotide
  Sense strand starting at position 3235 of SEQ ID NO: 587170
guuagugaguugguauaga

SEQ ID NO: 771965 - RNA, 19 nt, Artificial Sequence
  Description of Artificial Sequence: Synthetic oligonucleotide
  Antisense strand to SEQ ID NO: 771964
ucuauaccaacucacuaac

SEQ ID NO: 771966 - RNA, 19 nt, Artificial Sequence
  Description of Artificial Sequence: Synthetic oligonucleotide
  Sense strand starting at position 3284 of SEQ ID NO: 587170
cguauaaaguuguuuaaug

SEQ ID NO: 771967 - RNA, 19 nt, Artificial Sequence
  Description of Artificial Sequence: Synthetic oligonucleotide
  Antisense strand to SEQ ID NO: 771966
cauuaaacaacuuuauacg

SEQ ID NO: 771968 - RNA, 19 nt, Artificial Sequence
  Description of Artificial Sequence: Synthetic oligonucleotide
  Sense strand starting at position 3292 of SEQ ID NO: 587170
guuguuuaaugucuaugaa

SEQ ID NO: 771969 - RNA, 19 nt, Artificial Sequence
  Description of Artificial Sequence: Synthetic oligonucleotide
  Antisense strand to SEQ ID NO: 771968
uucauagacauuaaacaac

SEQ ID NO: 771970 - RNA, 19 nt, Artificial Sequence
  Description of Artificial Sequence: Synthetic oligonucleotide
  Sense strand starting at position 3295 of SEQ ID NO: 587170
guuuaaugucuaugaaagu

SEQ ID NO: 771971 - RNA, 19 nt, Artificial Sequence
  Description of Artificial Sequence: Synthetic oligonucleotide
  Antisense strand to SEQ ID NO: 771970
acuuucauagacauuaaac

SEQ ID NO: 771972 - RNA, 19 nt, Artificial Sequence
  Description of Artificial Sequence: Synthetic oligonucleotide
  Sense strand starting at position 3302 of SEQ ID NO: 587170
gucuaugaaaguuguucca

SEQ ID NO: 771973 - RNA, 19 nt, Artificial Sequence
  Description of Artificial Sequence: Synthetic oligonucleotide
  Antisense strand to SEQ ID NO: 771972
uggaacaacuuucauagac

SEQ ID NO: 771974 - RNA, 19 nt, Artificial Sequence
  Description of Artificial Sequence: Synthetic oligonucleotide
  Sense strand starting at position 3304 of SEQ ID NO: 587170
cuaugaaaguuguuccaga

SEQ ID NO: 771975 - RNA, 19 nt, Artificial Sequence
  Description of Artificial Sequence: Synthetic oligonucleotide
  Antisense strand to SEQ ID NO: 771974
ucuggaacaacuuucauag

SEQ ID NO: 771976 - RNA, 19 nt, Artificial Sequence
  Description of Artificial Sequence: Synthetic oligonucleotide
  Sense strand starting at position 3305 of SEQ ID NO: 587170
uaugaaaguuguuccagau

SEQ ID NO: 771977 - RNA, 19 nt, Artificial Sequence
  Description of Artificial Sequence: Synthetic oligonucleotide
  Antisense strand to SEQ ID NO: 771976
aucuggaacaacuuucaua

SEQ ID NO: 771978 - RNA, 19 nt, Artificial Sequence
  Description of Artificial Sequence: Synthetic oligonucleotide
  Sense strand starting at position 3311 of SEQ ID NO: 587170
aguuguuccagaugggcau

SEQ ID NO: 771979 - RNA, 19 nt, Artificial Sequence
  Description of Artificial Sequence: Synthetic oligonucleotide
  Antisense strand to SEQ ID NO: 771978
augcccaucuggaacaacu

SEQ ID NO: 771980 - RNA, 19 nt, Artificial Sequence
  Description of Artificial Sequence: Synthetic oligonucleotide
  Sense strand starting at position 3964 of SEQ ID NO: 587170
ccgcaaccgguuugaauua

SEQ ID NO: 771981 - RNA, 19 nt, Artificial Sequence
  Description of Artificial Sequence: Synthetic oligonucleotide
  Antisense strand to SEQ ID NO: 771980
uaauucaaaccgguugcgg

SEQ ID NO: 771982 - RNA, 19 nt, Artificial Sequence
  Description of Artificial Sequence: Synthetic oligonucleotide
  Sense strand starting at position 21 of SEQ ID NO: 587171
aacgcuucucaauagguca

SEQ ID NO: 771983 - RNA, 19 nt, Artificial Sequence
  Description of Artificial Sequence: Synthetic oligonucleotide
  Antisense strand to SEQ ID NO: 771982
ugaccuauugagaagcguu

SEQ ID NO: 771984 - RNA, 19 nt, Artificial Sequence
  Description of Artificial Sequence: Synthetic oligonucleotide
  Sense strand starting at position 116 of SEQ ID NO: 587171
agaaaugauggcuguggaa

SEQ ID NO: 771985 - RNA, 19 nt, Artificial Sequence
  Description of Artificial Sequence: Synthetic oligonucleotide
  Antisense strand to SEQ ID NO: 771984
uuccacagccaucauuucu

SEQ ID NO: 771986 - RNA, 19 nt, Artificial Sequence
  Description of Artificial Sequence: Synthetic oligonucleotide
  Sense strand starting at position 351 of SEQ ID NO: 587171
aucaguuuacaauguguaa

SEQ ID NO: 771987 - RNA, 19 nt, Artificial Sequence
  Description of Artificial Sequence: Synthetic oligonucleotide
  Antisense strand to SEQ ID NO: 771986
uuacacauuguaaacugau

SEQ ID NO: 771988 - RNA, 19 nt, Artificial Sequence
  Description of Artificial Sequence: Synthetic oligonucleotide
  Sense strand starting at position 354 of SEQ ID NO: 587171
aguuuacaauguguaagau

SEQ ID NO: 771989 - RNA, 19 nt, Artificial Sequence
  Description of Artificial Sequence: Synthetic oligonucleotide
  Antisense strand to SEQ ID NO: 771988
aucuuacacauuguaaacu

SEQ ID NO: 771990 - RNA, 19 nt, Artificial Sequence
  Description of Artificial Sequence: Synthetic oligonucleotide
  Sense strand starting at position 355 of SEQ ID NO: 587171
guuuacaauguguaagaug

SEQ ID NO: 771991 - RNA, 19 nt, Artificial Sequence
  Description of Artificial Sequence: Synthetic oligonucleotide
  Antisense strand to SEQ ID NO: 771990
caucuuacacauuguaaac

SEQ ID NO: 771992 - RNA, 19 nt, Artificial Sequence
  Description of Artificial Sequence: Synthetic oligonucleotide
  Sense strand starting at position 358 of SEQ ID NO: 587171
uacaauguguaagauggau

SEQ ID NO: 771993 - RNA, 19 nt, Artificial Sequence
  Description of Artificial Sequence: Synthetic oligonucleotide
  Antisense strand to SEQ ID NO: 771992
auccaucuuacacauugua

SEQ ID NO: 771994 - RNA, 19 nt, Artificial Sequence
  Description of Artificial Sequence: Synthetic oligonucleotide
  Sense strand starting at position 381 of SEQ ID NO: 587171
gguagcauccuaggacuga

SEQ ID NO: 771995 - RNA, 19 nt, Artificial Sequence
  Description of Artificial Sequence: Synthetic oligonucleotide
  Antisense strand to SEQ ID NO: 771994
ucaguccuaggaugcuacc

SEQ ID NO: 771996 - RNA, 19 nt, Artificial Sequence
  Description of Artificial Sequence: Synthetic oligonucleotide
  Sense strand starting at position 580 of SEQ ID NO: 587171
ucaguaccucuggaaguua

SEQ ID NO: 771997 - RNA, 19 nt, Artificial Sequence
  Description of Artificial Sequence: Synthetic oligonucleotide
  Antisense strand to SEQ ID NO: 771996
uaacuuccagagguacuga

SEQ ID NO: 771998 - RNA, 19 nt, Artificial Sequence
  Description of Artificial Sequence: Synthetic oligonucleotide
  Sense strand starting at position 648 of SEQ ID NO: 587171
cugguucuagcuugccaga

SEQ ID NO: 771999 - RNA, 19 nt, Artificial Sequence
  Description of Artificial Sequence: Synthetic oligonucleotide
  Antisense strand to SEQ ID NO: 771998
ucuggcaagcuagaaccag

SEQ ID NO: 772000 - RNA, 19 nt, Artificial Sequence
  Description of Artificial Sequence: Synthetic oligonucleotide
  Sense strand starting at position 650 of SEQ ID NO: 587171
gguucuagcuugccagaac

SEQ ID NO: 772001 - RNA, 19 nt, Artificial Sequence
  Description of Artificial Sequence: Synthetic oligonucleotide
  Antisense strand to SEQ ID NO: 772000
guucuggcaagcuagaacc

SEQ ID NO: 772002 - RNA, 19 nt, Artificial Sequence
  Description of Artificial Sequence: Synthetic oligonucleotide
  Sense strand starting at position 684 of SEQ ID NO: 587171
uguccauccuauccguaau

SEQ ID NO: 772003 - RNA, 19 nt, Artificial Sequence
  Description of Artificial Sequence: Synthetic oligonucleotide
  Antisense strand to SEQ ID NO: 772002
auuacggauaggauggaca

SEQ ID NO: 772004 - RNA, 19 nt, Artificial Sequence
  Description of Artificial Sequence: Synthetic oligonucleotide
  Sense strand starting at position 744 of SEQ ID NO: 587171
cugugaaaucugcgaugac

SEQ ID NO: 772005 - RNA, 19 nt, Artificial Sequence
  Description of Artificial Sequence: Synthetic oligonucleotide
  Antisense strand to SEQ ID NO: 772004
gucaucgcagauuucacag

SEQ ID NO: 772006 - RNA, 19 nt, Artificial Sequence
  Description of Artificial Sequence: Synthetic oligonucleotide
  Sense strand starting at position 747 of SEQ ID NO: 587171
ugaaaucugcgaugacaca

SEQ ID NO: 772007 - RNA, 19 nt, Artificial Sequence
  Description of Artificial Sequence: Synthetic oligonucleotide
  Antisense strand to SEQ ID NO: 772006
ugugucaucgcagauuuca

SEQ ID NO: 772008 - RNA, 19 nt, Artificial Sequence
  Description of Artificial Sequence: Synthetic oligonucleotide
  Sense strand starting at position 778 of SEQ ID NO: 587171
caccauggauguucuguaa

SEQ ID NO: 772009 - RNA, 19 nt, Artificial Sequence
  Description of Artificial Sequence: Synthetic oligonucleotide
  Antisense strand to SEQ ID NO: 772008
uuacagaacauccauggug

SEQ ID NO: 772010 - RNA, 19 nt, Artificial Sequence
  Description of Artificial Sequence: Synthetic oligonucleotide
  Sense strand starting at position 781 of SEQ ID NO: 587171
cauggauguucuguaauac

SEQ ID NO: 772011 - RNA, 19 nt, Artificial Sequence
  Description of Artificial Sequence: Synthetic oligonucleotide
  Antisense strand to SEQ ID NO: 772010
guauuacagaacauccaug

SEQ ID NO: 772012 - RNA, 19 nt, Artificial Sequence
  Description of Artificial Sequence: Synthetic oligonucleotide
  Sense strand starting at position 782 of SEQ ID NO: 587171
auggauguucuguaauacu

SEQ ID NO: 772013 - RNA, 19 nt, Artificial Sequence
  Description of Artificial Sequence: Synthetic oligonucleotide
  Antisense strand to SEQ ID NO: 772012
aguauuacagaacauccau

SEQ ID NO: 772014 - RNA, 19 nt, Artificial Sequence
  Description of Artificial Sequence: Synthetic oligonucleotide
  Sense strand starting at position 992 of SEQ ID NO: 587171
guauguccaguuuggaaag

SEQ ID NO: 772015 - RNA, 19 nt, Artificial Sequence
  Description of Artificial Sequence: Synthetic oligonucleotide
  Antisense strand to SEQ ID NO: 772014
cuuuccaaacuggacauac

SEQ ID NO: 772016 - RNA, 19 nt, Artificial Sequence
  Description of Artificial Sequence: Synthetic oligonucleotide
  Sense strand starting at position 1159 of SEQ ID NO: 587171
guaccauguaggugagacu

SEQ ID NO: 772017 - RNA, 19 nt, Artificial Sequence
  Description of Artificial Sequence: Synthetic oligonucleotide
  Antisense strand to SEQ ID NO: 772016
agucucaccuacaugguac

SEQ ID NO: 772018 - RNA, 19 nt, Artificial Sequence
  Description of Artificial Sequence: Synthetic oligonucleotide
  Sense strand starting at position 2422 of SEQ ID NO: 587171
gagcuagucuagccugaug

SEQ ID NO: 772019 - RNA, 19 nt, Artificial Sequence
  Description of Artificial Sequence: Synthetic oligonucleotide
  Antisense strand to SEQ ID NO: 772018
caucaggcuagacuagcuc

SEQ ID NO: 772020 - RNA, 19 nt, Artificial Sequence
  Description of Artificial Sequence: Synthetic oligonucleotide
  Sense strand starting at position 2424 of SEQ ID NO: 587171
gcuagucuagccugaugga

SEQ ID NO: 772021 - RNA, 19 nt, Artificial Sequence
  Description of Artificial Sequence: Synthetic oligonucleotide
  Antisense strand to SEQ ID NO: 772020
uccaucaggcuagacuagc

SEQ ID NO: 772022 - RNA, 19 nt, Artificial Sequence
  Description of Artificial Sequence: Synthetic oligonucleotide
  Sense strand starting at position 2440 of SEQ ID NO: 587171
ggaauagccucucugauca

SEQ ID NO: 772023 - RNA, 19 nt, Artificial Sequence
  Description of Artificial Sequence: Synthetic oligonucleotide
  Antisense strand to SEQ ID NO: 772022
ugaucagagaggcuauucc

SEQ ID NO: 772024 - RNA, 19 nt, Artificial Sequence
  Description of Artificial Sequence: Synthetic oligonucleotide
  Sense strand starting at position 2457 of SEQ ID NO: 587171
caguuucgaucuuugaaau

SEQ ID NO: 772025 - RNA, 19 nt, Artificial Sequence
  Description of Artificial Sequence: Synthetic oligonucleotide
  Antisense strand to SEQ ID NO: 772024
auuucaaagaucgaaacug

SEQ ID NO: 772026 - RNA, 19 nt, Artificial Sequence
  Description of Artificial Sequence: Synthetic oligonucleotide
  Sense strand starting at position 2458 of SEQ ID NO: 587171
aguuucgaucuuugaaaug

SEQ ID NO: 772027 - RNA, 19 nt, Artificial Sequence
  Description of Artificial Sequence: Synthetic oligonucleotide
  Antisense strand to SEQ ID NO: 772026
cauuucaaagaucgaaacu

SEQ ID NO: 772028 - RNA, 19 nt, Artificial Sequence
  Description of Artificial Sequence: Synthetic oligonucleotide
  Sense strand starting at position 2486 of SEQ ID NO: 587171
gccuuuaaguuauucuuga

SEQ ID NO: 772029 - RNA, 19 nt, Artificial Sequence
  Description of Artificial Sequence: Synthetic oligonucleotide
  Antisense strand to SEQ ID NO: 772028
ucaagaauaacuuaaaggc

SEQ ID NO: 772030 - RNA, 19 nt, Artificial Sequence
  Description of Artificial Sequence: Synthetic oligonucleotide
  Sense strand starting at position 2608 of SEQ ID NO: 587171
acuguuuccaaguguaguu

SEQ ID NO: 772031 - RNA, 19 nt, Artificial Sequence
  Description of Artificial Sequence: Synthetic oligonucleotide
  Antisense strand to SEQ ID NO: 772030
aacuacacuuggaaacagu

SEQ ID NO: 772032 - RNA, 19 nt, Artificial Sequence
  Description of Artificial Sequence: Synthetic oligonucleotide
  Sense strand starting at position 2786 of SEQ ID NO: 587171
cucuaaggacaucguauaa

SEQ ID NO: 772033 - RNA, 19 nt, Artificial Sequence
  Description of Artificial Sequence: Synthetic oligonucleotide
  Antisense strand to SEQ ID NO: 772032
uuauacgauguccuuagag

SEQ ID NO: 772034 - RNA, 19 nt, Artificial Sequence
  Description of Artificial Sequence: Synthetic oligonucleotide
  Sense strand starting at position 2793 of SEQ ID NO: 587171
gacaucguauaaguggaau

SEQ ID NO: 772035 - RNA, 19 nt, Artificial Sequence
  Description of Artificial Sequence: Synthetic oligonucleotide
  Antisense strand to SEQ ID NO: 772034
auuccacuuauacgauguc

SEQ ID NO: 772036 - RNA, 19 nt, Artificial Sequence
  Description of Artificial Sequence: Synthetic oligonucleotide
  Sense strand starting at position 2796 of SEQ ID NO: 587171
aucguauaaguggaaucau

SEQ ID NO: 772037 - RNA, 19 nt, Artificial Sequence
  Description of Artificial Sequence: Synthetic oligonucleotide
  Antisense strand to SEQ ID NO: 772036
augauuccacuuauacgau

SEQ ID NO: 772038 - RNA, 19 nt, Artificial Sequence
  Description of Artificial Sequence: Synthetic oligonucleotide
  Sense strand starting at position 2832 of SEQ ID NO: 587171
gugacagucuuacuuuagu

SEQ ID NO: 772039 - RNA, 19 nt, Artificial Sequence
  Description of Artificial Sequence: Synthetic oligonucleotide
  Antisense strand to SEQ ID NO: 772038
acuaaaguaagacugucac

SEQ ID NO: 772040 - RNA, 19 nt, Artificial Sequence
  Description of Artificial Sequence: Synthetic oligonucleotide
  Sense strand starting at position 2837 of SEQ ID NO: 587171
agucuuacuuuaguuagca

SEQ ID NO: 772041 - RNA, 19 nt, Artificial Sequence
  Description of Artificial Sequence: Synthetic oligonucleotide
  Antisense strand to SEQ ID NO: 772040
ugcuaacuaaaguaagacu

SEQ ID NO: 772042 - RNA, 19 nt, Artificial Sequence
  Description of Artificial Sequence: Synthetic oligonucleotide
  Sense strand starting at position 3444 of SEQ ID NO: 587171
cucugaacucugugcucua

SEQ ID NO: 772043 - RNA, 19 nt, Artificial Sequence
  Description of Artificial Sequence: Synthetic oligonucleotide
  Antisense strand to SEQ ID NO: 772042
uagagcacagaguucagag

SEQ ID NO: 772044 - RNA, 19 nt, Artificial Sequence
  Description of Artificial Sequence: Synthetic oligonucleotide
  Sense strand starting at position 3445 of SEQ ID NO: 587171
ucugaacucugugcucuau

SEQ ID NO: 772045 - RNA, 19 nt, Artificial Sequence
  Description of Artificial Sequence: Synthetic oligonucleotide
  Antisense strand to SEQ ID NO: 772044
auagagcacagaguucaga

SEQ ID NO: 772046 - RNA, 19 nt, Artificial Sequence
  Description of Artificial Sequence: Synthetic oligonucleotide
  Sense strand starting at position 3447 of SEQ ID NO: 587171
ugaacucugugcucuauuu

SEQ ID NO: 772047 - RNA, 19 nt, Artificial Sequence
  Description of Artificial Sequence: Synthetic oligonucleotide
  Antisense strand to SEQ ID NO: 772046
aaauagagcacagaguuca

SEQ ID NO: 772048 - RNA, 19 nt, Artificial Sequence
  Description of Artificial Sequence: Synthetic oligonucleotide
  Sense strand starting at position 3471 of SEQ ID NO: 587171
gggaaucauucguucauug

SEQ ID NO: 772049 - RNA, 19 nt, Artificial Sequence
  Description of Artificial Sequence: Synthetic oligonucleotide
  Antisense strand to SEQ ID NO: 772048
caaugaacgaaugauuccc

SEQ ID NO: 772050 - RNA, 19 nt, Artificial Sequence
  Description of Artificial Sequence: Synthetic oligonucleotide
  Sense strand starting at position 3625 of SEQ ID NO: 587171
ugaguuaacagguaacagu

SEQ ID NO: 772051 - RNA, 19 nt, Artificial Sequence
  Description of Artificial Sequence: Synthetic oligonucleotide
  Antisense strand to SEQ ID NO: 772050
acuguuaccuguuaacuca

SEQ ID NO: 772052 - RNA, 19 nt, Artificial Sequence
  Description of Artificial Sequence: Synthetic oligonucleotide
  Sense strand starting at position 3638 of SEQ ID NO: 587171
aacagugugucugucagaa

SEQ ID NO: 772053 - RNA, 19 nt, Artificial Sequence
  Description of Artificial Sequence: Synthetic oligonucleotide
  Antisense strand to SEQ ID NO: 772052
uucugacagacacacuguu

SEQ ID NO: 772054 - RNA, 19 nt, Artificial Sequence
  Description of Artificial Sequence: Synthetic oligonucleotide
  Sense strand starting at position 3646 of SEQ ID NO: 587171
gucugucagaaagaguguu

SEQ ID NO: 772055 - RNA, 19 nt, Artificial Sequence
  Description of Artificial Sequence: Synthetic oligonucleotide
  Antisense strand to SEQ ID NO: 772054
aacacucuuucugacagac

SEQ ID NO: 772056 - RNA, 19 nt, Artificial Sequence
  Description of Artificial Sequence: Synthetic oligonucleotide
  Sense strand starting at position 3652 of SEQ ID NO: 587171
cagaaagaguguuaggaag

SEQ ID NO: 772057 - RNA, 19 nt, Artificial Sequence
  Description of Artificial Sequence: Synthetic oligonucleotide
  Antisense strand to SEQ ID NO: 772056
cuuccuaacacucuuucug

SEQ ID NO: 772058 - RNA, 19 nt, Artificial Sequence
  Description of Artificial Sequence: Synthetic oligonucleotide
  Sense strand starting at position 3654 of SEQ ID NO: 587171
gaaagaguguuaggaagaa

SEQ ID NO: 772059 - RNA, 19 nt, Artificial Sequence
  Description of Artificial Sequence: Synthetic oligonucleotide
  Antisense strand to SEQ ID NO: 772058
uucuuccuaacacucuuuc

SEQ ID NO: 772060 - RNA, 19 nt, Artificial Sequence
  Description of Artificial Sequence: Synthetic oligonucleotide
  Sense strand starting at position 3733 of SEQ ID NO: 587171
uggagcuggcccugaagaa

SEQ ID NO: 772061 - RNA, 19 nt, Artificial Sequence
  Description of Artificial Sequence: Synthetic oligonucleotide
  Antisense strand to SEQ ID NO: 772060
uucuucagggccagcucca

SEQ ID NO: 772062 - RNA, 19 nt, Artificial Sequence
  Description of Artificial Sequence: Synthetic oligonucleotide
  Sense strand starting at position 107 of SEQ ID NO: 587172
uggcgcuuuccuuguaaac

SEQ ID NO: 772063 - RNA, 19 nt, Artificial Sequence
  Description of Artificial Sequence: Synthetic oligonucleotide
  Antisense strand to SEQ ID NO: 772062
guuuacaaggaaagcgcca

SEQ ID NO: 772064 - RNA, 19 nt, Artificial Sequence
  Description of Artificial Sequence: Synthetic oligonucleotide
  Sense strand starting at position 108 of SEQ ID NO: 587172
ggcgcuuuccuuguaaacu

SEQ ID NO: 772065 - RNA, 19 nt, Artificial Sequence
  Description of Artificial Sequence: Synthetic oligonucleotide
  Antisense strand to SEQ ID NO: 772064
aguuuacaaggaaagcgcc

SEQ ID NO: 772066 - RNA, 19 nt, Artificial Sequence
  Description of Artificial Sequence: Synthetic oligonucleotide
  Sense strand starting at position 386 of SEQ ID NO: 587172
aacgcuucucaauagguca

SEQ ID NO: 772067 - RNA, 19 nt, Artificial Sequence
  Description of Artificial Sequence: Synthetic oligonucleotide
  Antisense strand to SEQ ID NO: 772066
ugaccuauugagaagcguu

SEQ ID NO: 772068 - RNA, 19 nt, Artificial Sequence
  Description of Artificial Sequence: Synthetic oligonucleotide
  Sense strand starting at position 466 of SEQ ID NO: 587172
gucaaaggguauugaagaa

SEQ ID NO: 772069 - RNA, 19 nt, Artificial Sequence
  Description of Artificial Sequence: Synthetic oligonucleotide
  Antisense strand to SEQ ID NO: 772068
uucuucaauacccuuugac

SEQ ID NO: 772070 - RNA, 19 nt, Artificial Sequence
  Description of Artificial Sequence: Synthetic oligonucleotide
  Sense strand starting at position 481 of SEQ ID NO: 587172
agaaaugauggcuguggaa

SEQ ID NO: 772071 - RNA, 19 nt, Artificial Sequence
  Description of Artificial Sequence: Synthetic oligonucleotide
  Antisense strand to SEQ ID NO: 772070
uuccacagccaucauuucu

SEQ ID NO: 772072 - RNA, 19 nt, Artificial Sequence
  Description of Artificial Sequence: Synthetic oligonucleotide
  Sense strand starting at position 716 of SEQ ID NO: 587172
aucaguuuacaauguguaa

SEQ ID NO: 772073 - RNA, 19 nt, Artificial Sequence
  Description of Artificial Sequence: Synthetic oligonucleotide
  Antisense strand to SEQ ID NO: 772072
uuacacauuguaaacugau

SEQ ID NO: 772074 - RNA, 19 nt, Artificial Sequence
  Description of Artificial Sequence: Synthetic oligonucleotide
  Sense strand starting at position 719 of SEQ ID NO: 587172
aguuuacaauguguaagau

SEQ ID NO: 772075 - RNA, 19 nt, Artificial Sequence
  Description of Artificial Sequence: Synthetic oligonucleotide
  Antisense strand to SEQ ID NO: 772074
aucuuacacauuguaaacu

SEQ ID NO: 772076 - RNA, 19 nt, Artificial Sequence
  Description of Artificial Sequence: Synthetic oligonucleotide
  Sense strand starting at position 720 of SEQ ID NO: 587172
guuuacaauguguaagaug

SEQ ID NO: 772077 - RNA, 19 nt, Artificial Sequence
  Description of Artificial Sequence: Synthetic oligonucleotide
  Antisense strand to SEQ ID NO: 772076
caucuuacacauuguaaac

SEQ ID NO: 772078 - RNA, 19 nt, Artificial Sequence
  Description of Artificial Sequence: Synthetic oligonucleotide
  Sense strand starting at position 723 of SEQ ID NO: 587172
uacaauguguaagauggau

SEQ ID NO: 772079 - RNA, 19 nt, Artificial Sequence
  Description of Artificial Sequence: Synthetic oligonucleotide
  Antisense strand to SEQ ID NO: 772078
auccaucuuacacauugua

SEQ ID NO: 772080 - RNA, 19 nt, Artificial Sequence
  Description of Artificial Sequence: Synthetic oligonucleotide
  Sense strand starting at position 746 of SEQ ID NO: 587172
gguagcauccuaggacuga

SEQ ID NO: 772081 - RNA, 19 nt, Artificial Sequence
  Description of Artificial Sequence: Synthetic oligonucleotide
  Antisense strand to SEQ ID NO: 772080
ucaguccuaggaugcuacc

SEQ ID NO: 772082 - RNA, 19 nt, Artificial Sequence
  Description of Artificial Sequence: Synthetic oligonucleotide
  Sense strand starting at position 799 of SEQ ID NO: 587172
ggagcucaaucccaauaau

SEQ ID NO: 772083 - RNA, 19 nt, Artificial Sequence
  Description of Artificial Sequence: Synthetic oligonucleotide
  Antisense strand to SEQ ID NO: 772082
auuauugggauugagcucc

SEQ ID NO: 772084 - RNA, 19 nt, Artificial Sequence
  Description of Artificial Sequence: Synthetic oligonucleotide
  Sense strand starting at position 945 of SEQ ID NO: 587172
ucaguaccucuggaaguua

SEQ ID NO: 772085 - RNA, 19 nt, Artificial Sequence
  Description of Artificial Sequence: Synthetic oligonucleotide
  Antisense strand to SEQ ID NO: 772084
uaacuuccagagguacuga

SEQ ID NO: 772086 - RNA, 19 nt, Artificial Sequence
  Description of Artificial Sequence: Synthetic oligonucleotide
  Sense strand starting at position 1013 of SEQ ID NO: 587172
cugguucuagcuugccaga

SEQ ID NO: 772087 - RNA, 19 nt, Artificial Sequence
  Description of Artificial Sequence: Synthetic oligonucleotide
  Antisense strand to SEQ ID NO: 772086
ucuggcaagcuagaaccag

SEQ ID NO: 772088 - RNA, 19 nt, Artificial Sequence
  Description of Artificial Sequence: Synthetic oligonucleotide
  Sense strand starting at position 1015 of SEQ ID NO: 587172
gguucuagcuugccagaac

SEQ ID NO: 772089 - RNA, 19 nt, Artificial Sequence
  Description of Artificial Sequence: Synthetic oligonucleotide
  Antisense strand to SEQ ID NO: 772088
guucuggcaagcuagaacc

SEQ ID NO: 772090 - RNA, 19 nt, Artificial Sequence
  Description of Artificial Sequence: Synthetic oligonucleotide
  Sense strand starting at position 1049 of SEQ ID NO: 587172
uguccauccuauccguaau

SEQ ID NO: 772091 - RNA, 19 nt, Artificial Sequence
  Description of Artificial Sequence: Synthetic oligonucleotide
  Antisense strand to SEQ ID NO: 772090
auuacggauaggauggaca

SEQ ID NO: 772092 - RNA, 19 nt, Artificial Sequence
  Description of Artificial Sequence: Synthetic oligonucleotide
  Sense strand starting at position 1109 of SEQ ID NO: 587172
cugugaaaucugcgaugac

SEQ ID NO: 772093 - RNA, 19 nt, Artificial Sequence
  Description of Artificial Sequence: Synthetic oligonucleotide
  Antisense strand to SEQ ID NO: 772092
gucaucgcagauuucacag

SEQ ID NO: 772094 - RNA, 19 nt, Artificial Sequence
  Description of Artificial Sequence: Synthetic oligonucleotide
  Sense strand starting at position 1112 of SEQ ID NO: 587172
ugaaaucugcgaugacaca

SEQ ID NO: 772095 - RNA, 19 nt, Artificial Sequence
  Description of Artificial Sequence: Synthetic oligonucleotide
  Antisense strand to SEQ ID NO: 772094
ugugucaucgcagauuuca

SEQ ID NO: 772096 - RNA, 19 nt, Artificial Sequence
  Description of Artificial Sequence: Synthetic oligonucleotide
  Sense strand starting at position 1143 of SEQ ID NO: 587172
caccauggauguucuguaa

SEQ ID NO: 772097 - RNA, 19 nt, Artificial Sequence
  Description of Artificial Sequence: Synthetic oligonucleotide
  Antisense strand to SEQ ID NO: 772096
uuacagaacauccauggug

SEQ ID NO: 772098 - RNA, 19 nt, Artificial Sequence
  Description of Artificial Sequence: Synthetic oligonucleotide
  Sense strand starting at position 1146 of SEQ ID NO: 587172
cauggauguucuguaauac

SEQ ID NO: 772099 - RNA, 19 nt, Artificial Sequence
  Description of Artificial Sequence: Synthetic oligonucleotide
  Antisense strand to SEQ ID NO: 772098
guauuacagaacauccaug

SEQ ID NO: 772100 - RNA, 19 nt, Artificial Sequence
  Description of Artificial Sequence: Synthetic oligonucleotide
  Sense strand starting at position 1147 of SEQ ID NO: 587172
auggauguucuguaauacu

SEQ ID NO: 772101 - RNA, 19 nt, Artificial Sequence
  Description of Artificial Sequence: Synthetic oligonucleotide
  Antisense strand to SEQ ID NO: 772100
aguauuacagaacauccau

SEQ ID NO: 772102 - RNA, 19 nt, Artificial Sequence
  Description of Artificial Sequence: Synthetic oligonucleotide
  Sense strand starting at position 1150 of SEQ ID NO: 587172
gauguucuguaauacugga

SEQ ID NO: 772103 - RNA, 19 nt, Artificial Sequence
  Description of Artificial Sequence: Synthetic oligonucleotide
  Antisense strand to SEQ ID NO: 772102
uccaguauuacagaacauc

SEQ ID NO: 772104 - RNA, 19 nt, Artificial Sequence
  Description of Artificial Sequence: Synthetic oligonucleotide
  Sense strand starting at position 1357 of SEQ ID NO: 587172
guauguccaguuuggaaag

SEQ ID NO: 772105 - RNA, 19 nt, Artificial Sequence
  Description of Artificial Sequence: Synthetic oligonucleotide
  Antisense strand to SEQ ID NO: 772104
cuuuccaaacuggacauac

SEQ ID NO: 772106 - RNA, 19 nt, Artificial Sequence
  Description of Artificial Sequence: Synthetic oligonucleotide
  Sense strand starting at position 1524 of SEQ ID NO: 587172
guaccauguaggugagacu

SEQ ID NO: 772107 - RNA, 19 nt, Artificial Sequence
  Description of Artificial Sequence: Synthetic oligonucleotide
  Antisense strand to SEQ ID NO: 772106
agucucaccuacaugguac

SEQ ID NO: 772108 - RNA, 19 nt, Artificial Sequence
  Description of Artificial Sequence: Synthetic oligonucleotide
  Sense strand starting at position 2787 of SEQ ID NO: 587172
gagcuagucuagccugaug

SEQ ID NO: 772109 - RNA, 19 nt, Artificial Sequence
  Description of Artificial Sequence: Synthetic oligonucleotide
  Antisense strand to SEQ ID NO: 772108
caucaggcuagacuagcuc

SEQ ID NO: 772110 - RNA, 19 nt, Artificial Sequence
  Description of Artificial Sequence: Synthetic oligonucleotide
  Sense strand starting at position 2789 of SEQ ID NO: 587172
gcuagucuagccugaugga

SEQ ID NO: 772111 - RNA, 19 nt, Artificial Sequence
  Description of Artificial Sequence: Synthetic oligonucleotide
  Antisense strand to SEQ ID NO: 772110
uccaucaggcuagacuagc

SEQ ID NO: 772112 - RNA, 19 nt, Artificial Sequence
  Description of Artificial Sequence: Synthetic oligonucleotide
  Sense strand starting at position 2805 of SEQ ID NO: 587172
ggaauagccucucugauca

SEQ ID NO: 772113 - RNA, 19 nt, Artificial Sequence
  Description of Artificial Sequence: Synthetic oligonucleotide
  Antisense strand to SEQ ID NO: 772112
ugaucagagaggcuauucc

SEQ ID NO: 772114 - RNA, 19 nt, Artificial Sequence
  Description of Artificial Sequence: Synthetic oligonucleotide
  Sense strand starting at position 2822 of SEQ ID NO: 587172
caguuucgaucuuugaaau

SEQ ID NO: 772115 - RNA, 19 nt, Artificial Sequence
  Description of Artificial Sequence: Synthetic oligonucleotide
  Antisense strand to SEQ ID NO: 772114
auuucaaagaucgaaacug

SEQ ID NO: 772116 - RNA, 19 nt, Artificial Sequence
  Description of Artificial Sequence: Synthetic oligonucleotide
  Sense strand starting at position 2823 of SEQ ID NO: 587172
aguuucgaucuuugaaaug

SEQ ID NO: 772117 - RNA, 19 nt, Artificial Sequence
  Description of Artificial Sequence: Synthetic oligonucleotide
  Antisense strand to SEQ ID NO: 772116
cauuucaaagaucgaaacu

SEQ ID NO: 772118 - RNA, 19 nt, Artificial Sequence
  Description of Artificial Sequence: Synthetic oligonucleotide
  Sense strand starting at position 2851 of SEQ ID NO: 587172
gccuuuaaguuauucuuga

SEQ ID NO: 772119 - RNA, 19 nt, Artificial Sequence
  Description of Artificial Sequence: Synthetic oligonucleotide
  Antisense strand to SEQ ID NO: 772118
ucaagaauaacuuaaaggc

SEQ ID NO: 772120 - RNA, 19 nt, Artificial Sequence
  Description of Artificial Sequence: Synthetic oligonucleotide
  Sense strand starting at position 2973 of SEQ ID NO: 587172
acuguuuccaaguguaguu

SEQ ID NO: 772121 - RNA, 19 nt, Artificial Sequence
  Description of Artificial Sequence: Synthetic oligonucleotide
  Antisense strand to SEQ ID NO: 772120
aacuacacuuggaaacagu

SEQ ID NO: 772122 - RNA, 19 nt, Artificial Sequence
  Description of Artificial Sequence: Synthetic oligonucleotide
  Sense strand starting at position 3145 of SEQ ID NO: 587172
agacuacucuaaggacauc

SEQ ID NO: 772123 - RNA, 19 nt, Artificial Sequence
  Description of Artificial Sequence: Synthetic oligonucleotide
  Antisense strand to SEQ ID NO: 772122
gauguccuuagaguagucu

SEQ ID NO: 772124 - RNA, 19 nt, Artificial Sequence
  Description of Artificial Sequence: Synthetic oligonucleotide
  Sense strand starting at position 3151 of SEQ ID NO: 587172
cucuaaggacaucguauaa

SEQ ID NO: 772125 - RNA, 19 nt, Artificial Sequence
  Description of Artificial Sequence: Synthetic oligonucleotide
  Antisense strand to SEQ ID NO: 772124
uuauacgauguccuuagag

SEQ ID NO: 772126 - RNA, 19 nt, Artificial Sequence
  Description of Artificial Sequence: Synthetic oligonucleotide
  Sense strand starting at position 3158 of SEQ ID NO: 587172
gacaucguauaaguggaau

SEQ ID NO: 772127 - RNA, 19 nt, Artificial Sequence
  Description of Artificial Sequence: Synthetic oligonucleotide
  Antisense strand to SEQ ID NO: 772126
auuccacuuauacgauguc

SEQ ID NO: 772128 - RNA, 19 nt, Artificial Sequence
  Description of Artificial Sequence: Synthetic oligonucleotide
  Sense strand starting at position 3161 of SEQ ID NO: 587172
aucguauaaguggaaucau

SEQ ID NO: 772129 - RNA, 19 nt, Artificial Sequence
  Description of Artificial Sequence: Synthetic oligonucleotide
  Antisense strand to SEQ ID NO: 772128
augauuccacuuauacgau

SEQ ID NO: 772130 - RNA, 19 nt, Artificial Sequence
  Description of Artificial Sequence: Synthetic oligonucleotide
  Sense strand starting at position 3197 of SEQ ID NO: 587172
gugacagucuuacuuuagu

SEQ ID NO: 772131 - RNA, 19 nt, Artificial Sequence
  Description of Artificial Sequence: Synthetic oligonucleotide
  Antisense strand to SEQ ID NO: 772130
acuaaaguaagacugucac

SEQ ID NO: 772132 - RNA, 19 nt, Artificial Sequence
  Description of Artificial Sequence: Synthetic oligonucleotide
  Sense strand starting at position 3202 of SEQ ID NO: 587172
agucuuacuuuaguuagca

SEQ ID NO: 772133 - RNA, 19 nt, Artificial Sequence
  Description of Artificial Sequence: Synthetic oligonucleotide
  Antisense strand to SEQ ID NO: 772132
ugcuaacuaaaguaagacu

SEQ ID NO: 772134 - RNA, 19 nt, Artificial Sequence
  Description of Artificial Sequence: Synthetic oligonucleotide
  Sense strand starting at position 3809 of SEQ ID NO: 587172
cucugaacucugugcucua

SEQ ID NO: 772135 - RNA, 19 nt, Artificial Sequence
  Description of Artificial Sequence: Synthetic oligonucleotide
  Antisense strand to SEQ ID NO: 772134
uagagcacagaguucagag

SEQ ID NO: 772136 - RNA, 19 nt, Artificial Sequence
  Description of Artificial Sequence: Synthetic oligonucleotide
  Sense strand starting at position 3810 of SEQ ID NO: 587172
ucugaacucugugcucuau

SEQ ID NO: 772137 - RNA, 19 nt, Artificial Sequence
  Description of Artificial Sequence: Synthetic oligonucleotide
  Antisense strand to SEQ ID NO: 772136
auagagcacagaguucaga

SEQ ID NO: 772138 - RNA, 19 nt, Artificial Sequence
  Description of Artificial Sequence: Synthetic oligonucleotide
  Sense strand starting at position 3812 of SEQ ID NO: 587172
ugaacucugugcucuauuu

SEQ ID NO: 772139 - RNA, 19 nt, Artificial Sequence
  Description of Artificial Sequence: Synthetic oligonucleotide
  Antisense strand to SEQ ID NO: 772138
aaauagagcacagaguuca

SEQ ID NO: 772140 - RNA, 19 nt, Artificial Sequence
  Description of Artificial Sequence: Synthetic oligonucleotide
  Sense strand starting at position 3836 of SEQ ID NO: 587172
gggaaucauucguucauug

SEQ ID NO: 772141 - RNA, 19 nt, Artificial Sequence
  Description of Artificial Sequence: Synthetic oligonucleotide
  Antisense strand to SEQ ID NO: 772140
caaugaacgaaugauuccc

SEQ ID NO: 772142 - RNA, 19 nt, Artificial Sequence
  Description of Artificial Sequence: Synthetic oligonucleotide
  Sense strand starting at position 524 of SEQ ID NO: 587173
uggcauauuccaugcuugu

SEQ ID NO: 772143 - RNA, 19 nt, Artificial Sequence
  Description of Artificial Sequence: Synthetic oligonucleotide
  Antisense strand to SEQ ID NO: 772142
acaagcauggaauaugcca

SEQ ID NO: 772144 - RNA, 19 nt, Artificial Sequence
  Description of Artificial Sequence: Synthetic oligonucleotide
  Sense strand starting at position 551 of SEQ ID NO: 587173
cccacugucuggcugagua

SEQ ID NO: 772145 - RNA, 19 nt, Artificial Sequence
  Description of Artificial Sequence: Synthetic oligonucleotide
  Antisense strand to SEQ ID NO: 772144
uacucagccagacaguggg

SEQ ID NO: 772146 - RNA, 19 nt, Artificial Sequence
  Description of Artificial Sequence: Synthetic oligonucleotide
  Sense strand starting at position 900 of SEQ ID NO: 587173
ggagcccauucuuucuaga

SEQ ID NO: 772147 - RNA, 19 nt, Artificial Sequence
  Description of Artificial Sequence: Synthetic oligonucleotide
  Antisense strand to SEQ ID NO: 772146
ucuagaaagaaugggcucc

SEQ ID NO: 772148 - RNA, 19 nt, Artificial Sequence
  Description of Artificial Sequence: Synthetic oligonucleotide
  Sense strand starting at position 982 of SEQ ID NO: 587173
aggugccugccagauugau

SEQ ID NO: 772149 - RNA, 19 nt, Artificial Sequence
  Description of Artificial Sequence: Synthetic oligonucleotide
  Antisense strand to SEQ ID NO: 772148
aucaaucuggcaggcaccu

SEQ ID NO: 772150 - RNA, 19 nt, Artificial Sequence
  Description of Artificial Sequence: Synthetic oligonucleotide
  Sense strand starting at position 995 of SEQ ID NO: 587173
auugauggcuccuagcaua

SEQ ID NO: 772151 - RNA, 19 nt, Artificial Sequence
  Description of Artificial Sequence: Synthetic oligonucleotide
  Antisense strand to SEQ ID NO: 772150
uaugcuaggagccaucaau

SEQ ID NO: 772152 - RNA, 19 nt, Artificial Sequence
  Description of Artificial Sequence: Synthetic oligonucleotide
  Sense strand starting at position 1032 of SEQ ID NO: 587173
uugcuuacccgguggugaa

SEQ ID NO: 772153 - RNA, 19 nt, Artificial Sequence
  Description of Artificial Sequence: Synthetic oligonucleotide
  Antisense strand to SEQ ID NO: 772152
uucaccaccggguaagcaa

SEQ ID NO: 772154 - RNA, 19 nt, Artificial Sequence
  Description of Artificial Sequence: Synthetic oligonucleotide
  Sense strand starting at position 1301 of SEQ ID NO: 587173
gcuccaaagugcuagaaac

SEQ ID NO: 772155 - RNA, 19 nt, Artificial Sequence
  Description of Artificial Sequence: Synthetic oligonucleotide
  Antisense strand to SEQ ID NO: 772154
guuucuagcacuuuggagc

SEQ ID NO: 772156 - RNA, 19 nt, Artificial Sequence
  Description of Artificial Sequence: Synthetic oligonucleotide
  Sense strand starting at position 1513 of SEQ ID NO: 587173
ccucauaugucaugccuca

SEQ ID NO: 772157 - RNA, 19 nt, Artificial Sequence
  Description of Artificial Sequence: Synthetic oligonucleotide
  Antisense strand to SEQ ID NO: 772156
ugaggcaugacauaugagg

SEQ ID NO: 772158 - RNA, 19 nt, Artificial Sequence
  Description of Artificial Sequence: Synthetic oligonucleotide
  Sense strand starting at position 1802 of SEQ ID NO: 587173
gccacugguguccaagagu

SEQ ID NO: 772159 - RNA, 19 nt, Artificial Sequence
  Description of Artificial Sequence: Synthetic oligonucleotide
  Antisense strand to SEQ ID NO: 772158
acucuuggacaccaguggc

SEQ ID NO: 772160 - RNA, 19 nt, Artificial Sequence
  Description of Artificial Sequence: Synthetic oligonucleotide
  Sense strand starting at position 1805 of SEQ ID NO: 587173
acugguguccaagagucua

SEQ ID NO: 772161 - RNA, 19 nt, Artificial Sequence
  Description of Artificial Sequence: Synthetic oligonucleotide
  Antisense strand to SEQ ID NO: 772160
uagacucuuggacaccagu

SEQ ID NO: 772162 - RNA, 19 nt, Artificial Sequence
  Description of Artificial Sequence: Synthetic oligonucleotide
  Sense strand starting at position 1818 of SEQ ID NO: 587173
agucuaggaucuuccagaa

SEQ ID NO: 772163 - RNA, 19 nt, Artificial Sequence
  Description of Artificial Sequence: Synthetic oligonucleotide
  Antisense strand to SEQ ID NO: 772162
uucuggaagauccuagacu

SEQ ID NO: 772164 - RNA, 19 nt, Artificial Sequence
  Description of Artificial Sequence: Synthetic oligonucleotide
  Sense strand starting at position 2018 of SEQ ID NO: 587173
aagggauguuagcugcgau

SEQ ID NO: 772165 - RNA, 19 nt, Artificial Sequence
  Description of Artificial Sequence: Synthetic oligonucleotide
  Antisense strand to SEQ ID NO: 772164
aucgcagcuaacaucccuu

SEQ ID NO: 772166 - RNA, 19 nt, Artificial Sequence
  Description of Artificial Sequence: Synthetic oligonucleotide
  Sense strand starting at position 2021 of SEQ ID NO: 587173
ggauguuagcugcgaugca

SEQ ID NO: 772167 - RNA, 19 nt, Artificial Sequence
  Description of Artificial Sequence: Synthetic oligonucleotide
  Antisense strand to SEQ ID NO: 772166
ugcaucgcagcuaacaucc

SEQ ID NO: 772168 - RNA, 19 nt, Artificial Sequence
  Description of Artificial Sequence: Synthetic oligonucleotide
  Sense strand starting at position 2166 of SEQ ID NO: 587173
cacucacucuggugaggau

SEQ ID NO: 772169 - RNA, 19 nt, Artificial Sequence
  Description of Artificial Sequence: Synthetic oligonucleotide
  Antisense strand to SEQ ID NO: 772168
auccucaccagagugagug

SEQ ID NO: 772170 - RNA, 19 nt, Artificial Sequence
  Description of Artificial Sequence: Synthetic oligonucleotide
  Sense strand starting at position 2270 of SEQ ID NO: 587173
gauggacuucccgauucca

SEQ ID NO: 772171 - RNA, 19 nt, Artificial Sequence
  Description of Artificial Sequence: Synthetic oligonucleotide
  Antisense strand to SEQ ID NO: 772170
uggaaucgggaaguccauc

SEQ ID NO: 772172 - RNA, 19 nt, Artificial Sequence
  Description of Artificial Sequence: Synthetic oligonucleotide
  Sense strand starting at position 2319 of SEQ ID NO: 587173
aggccuggcuauccuuaua

SEQ ID NO: 772173 - RNA, 19 nt, Artificial Sequence
  Description of Artificial Sequence: Synthetic oligonucleotide
  Antisense strand to SEQ ID NO: 772172
uauaaggauagccaggccu

SEQ ID NO: 772174 - RNA, 19 nt, Artificial Sequence
  Description of Artificial Sequence: Synthetic oligonucleotide
  Sense strand starting at position 2322 of SEQ ID NO: 587173
ccuggcuauccuuauaaag

SEQ ID NO: 772175 - RNA, 19 nt, Artificial Sequence
  Description of Artificial Sequence: Synthetic oligonucleotide
  Antisense strand to SEQ ID NO: 772174
cuuuauaaggauagccagg

SEQ ID NO: 772176 - RNA, 19 nt, Artificial Sequence
  Description of Artificial Sequence: Synthetic oligonucleotide
  Sense strand starting at position 2333 of SEQ ID NO: 587173
uuauaaagccagggacaau

SEQ ID NO: 772177 - RNA, 19 nt, Artificial Sequence
  Description of Artificial Sequence: Synthetic oligonucleotide
  Antisense strand to SEQ ID NO: 772176
auugucccuggcuuuauaa

SEQ ID NO: 772178 - RNA, 19 nt, Artificial Sequence
  Description of Artificial Sequence: Synthetic oligonucleotide
  Sense strand starting at position 2450 of SEQ ID NO: 587173
gggacucccugcuaaaggu

SEQ ID NO: 772179 - RNA, 19 nt, Artificial Sequence
  Description of Artificial Sequence: Synthetic oligonucleotide
  Antisense strand to SEQ ID NO: 772178
accuuuagcagggaguccc

SEQ ID NO: 772180 - RNA, 19 nt, Artificial Sequence
  Description of Artificial Sequence: Synthetic oligonucleotide
  Sense strand starting at position 2459 of SEQ ID NO: 587173
ugcuaaaggucuugucuac

SEQ ID NO: 772181 - RNA, 19 nt, Artificial Sequence
  Description of Artificial Sequence: Synthetic oligonucleotide
  Antisense strand to SEQ ID NO: 772180
guagacaagaccuuuagca

SEQ ID NO: 772182 - RNA, 19 nt, Artificial Sequence
  Description of Artificial Sequence: Synthetic oligonucleotide
  Sense strand starting at position 2466 of SEQ ID NO: 587173
ggucuugucuacccugagu

SEQ ID NO: 772183 - RNA, 19 nt, Artificial Sequence
  Description of Artificial Sequence: Synthetic oligonucleotide
  Antisense strand to SEQ ID NO: 772182
acucaggguagacaagacc

SEQ ID NO: 772184 - RNA, 19 nt, Artificial Sequence
  Description of Artificial Sequence: Synthetic oligonucleotide
  Sense strand starting at position 2564 of SEQ ID NO: 587173
acaggagugcaguggucaa

SEQ ID NO: 772185 - RNA, 19 nt, Artificial Sequence
  Description of Artificial Sequence: Synthetic oligonucleotide
  Antisense strand to SEQ ID NO: 772184
uugaccacugcacuccugu

SEQ ID NO: 772186 - RNA, 19 nt, Artificial Sequence
  Description of Artificial Sequence: Synthetic oligonucleotide
  Sense strand starting at position 2568 of SEQ ID NO: 587173
gagugcaguggucaaccaa

SEQ ID NO: 772187 - RNA, 19 nt, Artificial Sequence
  Description of Artificial Sequence: Synthetic oligonucleotide
  Antisense strand to SEQ ID NO: 772186
uugguugaccacugcacuc

SEQ ID NO: 772188 - RNA, 19 nt, Artificial Sequence
  Description of Artificial Sequence: Synthetic oligonucleotide
  Sense strand starting at position 2691 of SEQ ID NO: 587173
ggcccucuuuaggguagua

SEQ ID NO: 772189 - RNA, 19 nt, Artificial Sequence
  Description of Artificial Sequence: Synthetic oligonucleotide
  Antisense strand to SEQ ID NO: 772188
uacuacccuaaagagggcc

SEQ ID NO: 772190 - RNA, 19 nt, Artificial Sequence
  Description of Artificial Sequence: Synthetic oligonucleotide
  Sense strand starting at position 2693 of SEQ ID NO: 587173
cccucuuuaggguaguaga

SEQ ID NO: 772191 - RNA, 19 nt, Artificial Sequence
  Description of Artificial Sequence: Synthetic oligonucleotide
  Antisense strand to SEQ ID NO: 772190
ucuacuacccuaaagaggg

SEQ ID NO: 772192 - RNA, 19 nt, Artificial Sequence
  Description of Artificial Sequence: Synthetic oligonucleotide
  Sense strand starting at position 2895 of SEQ ID NO: 587173
cugugacuuggccaguguu

SEQ ID NO: 772193 - RNA, 19 nt, Artificial Sequence
  Description of Artificial Sequence: Synthetic oligonucleotide
  Antisense strand to SEQ ID NO: 772192
aacacuggccaagucacag

SEQ ID NO: 772194 - RNA, 19 nt, Artificial Sequence
  Description of Artificial Sequence: Synthetic oligonucleotide
  Sense strand starting at position 2903 of SEQ ID NO: 587173
uggccaguguuucuaagaa

SEQ ID NO: 772195 - RNA, 19 nt, Artificial Sequence
  Description of Artificial Sequence: Synthetic oligonucleotide
  Antisense strand to SEQ ID NO: 772194
uucuuagaaacacuggcca

SEQ ID NO: 772196 - RNA, 19 nt, Artificial Sequence
  Description of Artificial Sequence: Synthetic oligonucleotide
  Sense strand starting at position 2939 of SEQ ID NO: 587173
ugaagugacucugcaagau

SEQ ID NO: 772197 - RNA, 19 nt, Artificial Sequence
  Description of Artificial Sequence: Synthetic oligonucleotide
  Antisense strand to SEQ ID NO: 772196
aucuugcagagucacuuca

SEQ ID NO: 772198 - RNA, 19 nt, Artificial Sequence
  Description of Artificial Sequence: Synthetic oligonucleotide
  Sense strand starting at position 3095 of SEQ ID NO: 587173
guaaauaagccacggaagu

SEQ ID NO: 772199 - RNA, 19 nt, Artificial Sequence
  Description of Artificial Sequence: Synthetic oligonucleotide
  Antisense strand to SEQ ID NO: 772198
acuuccguggcuuauuuac

SEQ ID NO: 772200 - RNA, 19 nt, Artificial Sequence
  Description of Artificial Sequence: Synthetic oligonucleotide
  Sense strand starting at position 3346 of SEQ ID NO: 587173
ucagcuguuucucaggagu

SEQ ID NO: 772201 - RNA, 19 nt, Artificial Sequence
  Description of Artificial Sequence: Synthetic oligonucleotide
  Antisense strand to SEQ ID NO: 772200
acuccugagaaacagcuga

SEQ ID NO: 772202 - RNA, 19 nt, Artificial Sequence
  Description of Artificial Sequence: Synthetic oligonucleotide
  Sense strand starting at position 3536 of SEQ ID NO: 587173
cauuucuugugcugaccga

SEQ ID NO: 772203 - RNA, 19 nt, Artificial Sequence
  Description of Artificial Sequence: Synthetic oligonucleotide
  Antisense strand to SEQ ID NO: 772202
ucggucagcacaagaaaug

SEQ ID NO: 772204 - RNA, 19 nt, Artificial Sequence
  Description of Artificial Sequence: Synthetic oligonucleotide
  Sense strand starting at position 3759 of SEQ ID NO: 587173
agggcaguguucuggacuu

SEQ ID NO: 772205 - RNA, 19 nt, Artificial Sequence
  Description of Artificial Sequence: Synthetic oligonucleotide
  Antisense strand to SEQ ID NO: 772204
aaguccagaacacugcccu

SEQ ID NO: 772206 - RNA, 19 nt, Artificial Sequence
  Description of Artificial Sequence: Synthetic oligonucleotide
  Sense strand starting at position 3912 of SEQ ID NO: 587173
ccuggacucuaggcaagaa

SEQ ID NO: 772207 - RNA, 19 nt, Artificial Sequence
  Description of Artificial Sequence: Synthetic oligonucleotide
  Antisense strand to SEQ ID NO: 772206
uucuugccuagaguccagg

SEQ ID NO: 772208 - RNA, 19 nt, Artificial Sequence
  Description of Artificial Sequence: Synthetic oligonucleotide
  Sense strand starting at position 42 of SEQ ID NO: 587174
cccuaugccucagugacua

SEQ ID NO: 772209 - RNA, 19 nt, Artificial Sequence
  Description of Artificial Sequence: Synthetic oligonucleotide
  Antisense strand to SEQ ID NO: 772208
uagucacugaggcauaggg

SEQ ID NO: 772210 - RNA, 19 nt, Artificial Sequence
  Description of Artificial Sequence: Synthetic oligonucleotide
  Sense strand starting at position 50 of SEQ ID NO: 587174
cucagugacuacuccaagu

SEQ ID NO: 772211 - RNA, 19 nt, Artificial Sequence
  Description of Artificial Sequence: Synthetic oligonucleotide
  Antisense strand to SEQ ID NO: 772210
acuuggaguagucacugag

SEQ ID NO: 772212 - RNA, 19 nt, Artificial Sequence
  Description of Artificial Sequence: Synthetic oligonucleotide
  Sense strand starting at position 257 of SEQ ID NO: 587174
ggaagucggguugagugaa

SEQ ID NO: 772213 - RNA, 19 nt, Artificial Sequence
  Description of Artificial Sequence: Synthetic oligonucleotide
  Antisense strand to SEQ ID NO: 772212
uucacucaacccgacuucc

SEQ ID NO: 772214 - RNA, 19 nt, Artificial Sequence
  Description of Artificial Sequence: Synthetic oligonucleotide
  Sense strand starting at position 288 of SEQ ID NO: 587174
gccucaaaggguuagcuuu

SEQ ID NO: 772215 - RNA, 19 nt, Artificial Sequence
  Description of Artificial Sequence: Synthetic oligonucleotide
  Antisense strand to SEQ ID NO: 772214
aaagcuaacccuuugaggc

SEQ ID NO: 772216 - RNA, 19 nt, Artificial Sequence
  Description of Artificial Sequence: Synthetic oligonucleotide
  Sense strand starting at position 296 of SEQ ID NO: 587174
ggguuagcuuuccaaagga

SEQ ID NO: 772217 - RNA, 19 nt, Artificial Sequence
  Description of Artificial Sequence: Synthetic oligonucleotide
  Antisense strand to SEQ ID NO: 772216
uccuuuggaaagcuaaccc

SEQ ID NO: 772218 - RNA, 19 nt, Artificial Sequence
  Description of Artificial Sequence: Synthetic oligonucleotide
  Sense strand starting at position 384 of SEQ ID NO: 587174
cucagauuguccucugucu

SEQ ID NO: 772219 - RNA, 19 nt, Artificial Sequence
  Description of Artificial Sequence: Synthetic oligonucleotide
  Antisense strand to SEQ ID NO: 772218
agacagaggacaaucugag

SEQ ID NO: 772220 - RNA, 19 nt, Artificial Sequence
  Description of Artificial Sequence: Synthetic oligonucleotide
  Sense strand starting at position 442 of SEQ ID NO: 587174
gcugaaauuuacuagagau

SEQ ID NO: 772221 - RNA, 19 nt, Artificial Sequence
  Description of Artificial Sequence: Synthetic oligonucleotide
  Antisense strand to SEQ ID NO: 772220
aucucuaguaaauuucagc

SEQ ID NO: 772222 - RNA, 19 nt, Artificial Sequence
  Description of Artificial Sequence: Synthetic oligonucleotide
  Sense strand starting at position 602 of SEQ ID NO: 587174
ugauaagaucucugcgccu

SEQ ID NO: 772223 - RNA, 19 nt, Artificial Sequence
  Description of Artificial Sequence: Synthetic oligonucleotide
  Antisense strand to SEQ ID NO: 772222
aggcgcagagaucuuauca

SEQ ID NO: 772224 - RNA, 19 nt, Artificial Sequence
  Description of Artificial Sequence: Synthetic oligonucleotide
  Sense strand starting at position 608 of SEQ ID NO: 587174
gaucucugcgccuagggaa

SEQ ID NO: 772225 - RNA, 19 nt, Artificial Sequence
  Description of Artificial Sequence: Synthetic oligonucleotide
  Antisense strand to SEQ ID NO: 772224
uucccuaggcgcagagauc

SEQ ID NO: 772226 - RNA, 19 nt, Artificial Sequence
  Description of Artificial Sequence: Synthetic oligonucleotide
  Sense strand starting at position 881 of SEQ ID NO: 587174
cugaaagucaguuaggcua

SEQ ID NO: 772227 - RNA, 19 nt, Artificial Sequence
  Description of Artificial Sequence: Synthetic oligonucleotide
  Antisense strand to SEQ ID NO: 772226
uagccuaacugacuuucag

SEQ ID NO: 772228 - RNA, 19 nt, Artificial Sequence
  Description of Artificial Sequence: Synthetic oligonucleotide
  Sense strand starting at position 883 of SEQ ID NO: 587174
gaaagucaguuaggcuaaa

SEQ ID NO: 772229 - RNA, 19 nt, Artificial Sequence
  Description of Artificial Sequence: Synthetic oligonucleotide
  Antisense strand to SEQ ID NO: 772228
uuuagccuaacugacuuuc

SEQ ID NO: 772230 - RNA, 19 nt, Artificial Sequence
  Description of Artificial Sequence: Synthetic oligonucleotide
  Sense strand starting at position 933 of SEQ ID NO: 587174
cugcuugagacacgugaaa

SEQ ID NO: 772231 - RNA, 19 nt, Artificial Sequence
  Description of Artificial Sequence: Synthetic oligonucleotide
  Antisense strand to SEQ ID NO: 772230
uuucacgugucucaagcag

SEQ ID NO: 772232 - RNA, 19 nt, Artificial Sequence
  Description of Artificial Sequence: Synthetic oligonucleotide
  Sense strand starting at position 935 of SEQ ID NO: 587174
gcuugagacacgugaaagu

SEQ ID NO: 772233 - RNA, 19 nt, Artificial Sequence
  Description of Artificial Sequence: Synthetic oligonucleotide
  Antisense strand to SEQ ID NO: 772232
acuuucacgugucucaagc

SEQ ID NO: 772234 - RNA, 19 nt, Artificial Sequence
  Description of Artificial Sequence: Synthetic oligonucleotide
  Sense strand starting at position 1134 of SEQ ID NO: 587174
uuaagcucugauuacguga

SEQ ID NO: 772235 - RNA, 19 nt, Artificial Sequence
  Description of Artificial Sequence: Synthetic oligonucleotide
  Antisense strand to SEQ ID NO: 772234
ucacguaaucagagcuuaa

SEQ ID NO: 772236 - RNA, 19 nt, Artificial Sequence
  Description of Artificial Sequence: Synthetic oligonucleotide
  Sense strand starting at position 1139 of SEQ ID NO: 587174
cucugauuacgugaccaga

SEQ ID NO: 772237 - RNA, 19 nt, Artificial Sequence
  Description of Artificial Sequence: Synthetic oligonucleotide
  Antisense strand to SEQ ID NO: 772236
ucuggucacguaaucagag

SEQ ID NO: 772238 - RNA, 19 nt, Artificial Sequence
  Description of Artificial Sequence: Synthetic oligonucleotide
  Sense strand starting at position 1141 of SEQ ID NO: 587174
cugauuacgugaccagaaa

SEQ ID NO: 772239 - RNA, 19 nt, Artificial Sequence
  Description of Artificial Sequence: Synthetic oligonucleotide
  Antisense strand to SEQ ID NO: 772238
uuucuggucacguaaucag

SEQ ID NO: 772240 - RNA, 19 nt, Artificial Sequence
  Description of Artificial Sequence: Synthetic oligonucleotide
  Sense strand starting at position 1214 of SEQ ID NO: 587174
ugaguuugcuuuccuuuau

SEQ ID NO: 772241 - RNA, 19 nt, Artificial Sequence
  Description of Artificial Sequence: Synthetic oligonucleotide
  Antisense strand to SEQ ID NO: 772240
auaaaggaaagcaaacuca

SEQ ID NO: 772242 - RNA, 19 nt, Artificial Sequence
  Description of Artificial Sequence: Synthetic oligonucleotide
  Sense strand starting at position 1296 of SEQ ID NO: 587174
cugggugcucuauaauucu

SEQ ID NO: 772243 - RNA, 19 nt, Artificial Sequence
  Description of Artificial Sequence: Synthetic oligonucleotide
  Antisense strand to SEQ ID NO: 772242
agaauuauagagcacccag

SEQ ID NO: 772244 - RNA, 19 nt, Artificial Sequence
  Description of Artificial Sequence: Synthetic oligonucleotide
  Sense strand starting at position 1349 of SEQ ID NO: 587174
uguggugacuuccauagau

SEQ ID NO: 772245 - RNA, 19 nt, Artificial Sequence
  Description of Artificial Sequence: Synthetic oligonucleotide
  Antisense strand to SEQ ID NO: 772244
aucuauggaagucaccaca

SEQ ID NO: 772246 - RNA, 19 nt, Artificial Sequence
  Description of Artificial Sequence: Synthetic oligonucleotide
  Sense strand starting at position 2018 of SEQ ID NO: 587174
agcaguccugauuggauaa

SEQ ID NO: 772247 - RNA, 19 nt, Artificial Sequence
  Description of Artificial Sequence: Synthetic oligonucleotide
  Antisense strand to SEQ ID NO: 772246
uuauccaaucaggacugcu

SEQ ID NO: 772248 - RNA, 19 nt, Artificial Sequence
  Description of Artificial Sequence: Synthetic oligonucleotide
  Sense strand starting at position 2069 of SEQ ID NO: 587174
gacagaagcugugcucaga

SEQ ID NO: 772249 - RNA, 19 nt, Artificial Sequence
  Description of Artificial Sequence: Synthetic oligonucleotide
  Antisense strand to SEQ ID NO: 772248
ucugagcacagcuucuguc

SEQ ID NO: 772250 - RNA, 19 nt, Artificial Sequence
  Description of Artificial Sequence: Synthetic oligonucleotide
  Sense strand starting at position 2295 of SEQ ID NO: 587174
ucugaauucugguccuuug

SEQ ID NO: 772251 - RNA, 19 nt, Artificial Sequence
  Description of Artificial Sequence: Synthetic oligonucleotide
  Antisense strand to SEQ ID NO: 772250
caaaggaccagaauucaga

SEQ ID NO: 772252 - RNA, 19 nt, Artificial Sequence
  Description of Artificial Sequence: Synthetic oligonucleotide
  Sense strand starting at position 2361 of SEQ ID NO: 587174
acgugagccacauguguau

SEQ ID NO: 772253 - RNA, 19 nt, Artificial Sequence
  Description of Artificial Sequence: Synthetic oligonucleotide
  Antisense strand to SEQ ID NO: 772252
auacacauguggcucacgu

SEQ ID NO: 772254 - RNA, 19 nt, Artificial Sequence
  Description of Artificial Sequence: Synthetic oligonucleotide
  Sense strand starting at position 2365 of SEQ ID NO: 587174
gagccacauguguauucua

SEQ ID NO: 772255 - RNA, 19 nt, Artificial Sequence
  Description of Artificial Sequence: Synthetic oligonucleotide
  Antisense strand to SEQ ID NO: 772254
uagaauacacauguggcuc

SEQ ID NO: 772256 - RNA, 19 nt, Artificial Sequence
  Description of Artificial Sequence: Synthetic oligonucleotide
  Sense strand starting at position 2368 of SEQ ID NO: 587174
ccacauguguauucuaaau

SEQ ID NO: 772257 - RNA, 19 nt, Artificial Sequence
  Description of Artificial Sequence: Synthetic oligonucleotide
  Antisense strand to SEQ ID NO: 772256
auuuagaauacacaugugg

SEQ ID NO: 772258 - RNA, 19 nt, Artificial Sequence
  Description of Artificial Sequence: Synthetic oligonucleotide
  Sense strand starting at position 2795 of SEQ ID NO: 587174
auaucugagcaauauguaa

SEQ ID NO: 772259 - RNA, 19 nt, Artificial Sequence
  Description of Artificial Sequence: Synthetic oligonucleotide
  Antisense strand to SEQ ID NO: 772258
uuacauauugcucagauau

SEQ ID NO: 772260 - RNA, 19 nt, Artificial Sequence
  Description of Artificial Sequence: Synthetic oligonucleotide
  Sense strand starting at position 2927 of SEQ ID NO: 587174
gccaauagcugucacauua

SEQ ID NO: 772261 - RNA, 19 nt, Artificial Sequence
  Description of Artificial Sequence: Synthetic oligonucleotide
  Antisense strand to SEQ ID NO: 772260
uaaugugacagcuauuggc

SEQ ID NO: 772262 - RNA, 19 nt, Artificial Sequence
  Description of Artificial Sequence: Synthetic oligonucleotide
  Sense strand starting at position 2968 of SEQ ID NO: 587174
guuugaagggccugaacau

SEQ ID NO: 772263 - RNA, 19 nt, Artificial Sequence
  Description of Artificial Sequence: Synthetic oligonucleotide
  Antisense strand to SEQ ID NO: 772262
auguucaggcccuucaaac

SEQ ID NO: 772264 - RNA, 19 nt, Artificial Sequence
  Description of Artificial Sequence: Synthetic oligonucleotide
  Sense strand starting at position 3038 of SEQ ID NO: 587174
ucaguucugagguggaaca

SEQ ID NO: 772265 - RNA, 19 nt, Artificial Sequence
  Description of Artificial Sequence: Synthetic oligonucleotide
  Antisense strand to SEQ ID NO: 772264
uguuccaccucagaacuga

SEQ ID NO: 772266 - RNA, 19 nt, Artificial Sequence
  Description of Artificial Sequence: Synthetic oligonucleotide
  Sense strand starting at position 3099 of SEQ ID NO: 587174
aaccuaagguuguuaagaa

SEQ ID NO: 772267 - RNA, 19 nt, Artificial Sequence
  Description of Artificial Sequence: Synthetic oligonucleotide
  Antisense strand to SEQ ID NO: 772266
uucuuaacaaccuuagguu

SEQ ID NO: 772268 - RNA, 19 nt, Artificial Sequence
  Description of Artificial Sequence: Synthetic oligonucleotide
  Sense strand starting at position 3100 of SEQ ID NO: 587174
accuaagguuguuaagaau

SEQ ID NO: 772269 - RNA, 19 nt, Artificial Sequence
  Description of Artificial Sequence: Synthetic oligonucleotide
  Antisense strand to SEQ ID NO: 772268
auucuuaacaaccuuaggu

SEQ ID NO: 772270 - RNA, 19 nt, Artificial Sequence
  Description of Artificial Sequence: Synthetic oligonucleotide
  Sense strand starting at position 3172 of SEQ ID NO: 587174
cugcauagagaauguauaa

SEQ ID NO: 772271 - RNA, 19 nt, Artificial Sequence
  Description of Artificial Sequence: Synthetic oligonucleotide
  Antisense strand to SEQ ID NO: 772270
uuauacauucucuaugcag

SEQ ID NO: 772272 - RNA, 19 nt, Artificial Sequence
  Description of Artificial Sequence: Synthetic oligonucleotide
  Sense strand starting at position 3214 of SEQ ID NO: 587174
ggaagaaaguuagaaacau

SEQ ID NO: 772273 - RNA, 19 nt, Artificial Sequence
  Description of Artificial Sequence: Synthetic oligonucleotide
  Antisense strand to SEQ ID NO: 772272
auguuucuaacuuucuucc

SEQ ID NO: 772274 - RNA, 19 nt, Artificial Sequence
  Description of Artificial Sequence: Synthetic oligonucleotide
  Sense strand starting at position 3560 of SEQ ID NO: 587174
ugcagucuuucucagguuu

SEQ ID NO: 772275 - RNA, 19 nt, Artificial Sequence
  Description of Artificial Sequence: Synthetic oligonucleotide
  Antisense strand to SEQ ID NO: 772274
aaaccugagaaagacugca

SEQ ID NO: 772276 - RNA, 19 nt, Artificial Sequence
  Description of Artificial Sequence: Synthetic oligonucleotide
  Sense strand starting at position 3679 of SEQ ID NO: 587174
ggugaucugugguccuauu

SEQ ID NO: 772277 - RNA, 19 nt, Artificial Sequence
  Description of Artificial Sequence: Synthetic oligonucleotide
  Antisense strand to SEQ ID NO: 772276
aauaggaccacagaucacc

SEQ ID NO: 772278 - RNA, 19 nt, Artificial Sequence
  Description of Artificial Sequence: Synthetic oligonucleotide
  Sense strand starting at position 3793 of SEQ ID NO: 587174
gaugcuauagagugucaau

SEQ ID NO: 772279 - RNA, 19 nt, Artificial Sequence
  Description of Artificial Sequence: Synthetic oligonucleotide
  Antisense strand to SEQ ID NO: 772278
auugacacucuauagcauc

SEQ ID NO: 772280 - RNA, 19 nt, Artificial Sequence
  Description of Artificial Sequence: Synthetic oligonucleotide
  Sense strand starting at position 3796 of SEQ ID NO: 587174
gcuauagagugucaaugca

SEQ ID NO: 772281 - RNA, 19 nt, Artificial Sequence
  Description of Artificial Sequence: Synthetic oligonucleotide
  Antisense strand to SEQ ID NO: 772280
ugcauugacacucuauagc

SEQ ID NO: 772282 - RNA, 19 nt, Artificial Sequence
  Description of Artificial Sequence: Synthetic oligonucleotide
  Sense strand starting at position 334 of SEQ ID NO: 587175
cuggaugccuuucuuacau

SEQ ID NO: 772283 - RNA, 19 nt, Artificial Sequence
  Description of Artificial Sequence: Synthetic oligonucleotide
  Antisense strand to SEQ ID NO: 772282
auguaagaaaggcauccag

SEQ ID NO: 772284 - RNA, 19 nt, Artificial Sequence
  Description of Artificial Sequence: Synthetic oligonucleotide
  Sense strand starting at position 1121 of SEQ ID NO: 587175
cauacauguggcugacaag

SEQ ID NO: 772285 - RNA, 19 nt, Artificial Sequence
  Description of Artificial Sequence: Synthetic oligonucleotide
  Antisense strand to SEQ ID NO: 772284
cuugucagccacauguaug

SEQ ID NO: 772286 - RNA, 19 nt, Artificial Sequence
  Description of Artificial Sequence: Synthetic oligonucleotide
  Sense strand starting at position 1283 of SEQ ID NO: 587175
uuauauguugugggaauca

SEQ ID NO: 772287 - RNA, 19 nt, Artificial Sequence
  Description of Artificial Sequence: Synthetic oligonucleotide
  Antisense strand to SEQ ID NO: 772286
ugauucccacaacauauaa

SEQ ID NO: 772288 - RNA, 19 nt, Artificial Sequence
  Description of Artificial Sequence: Synthetic oligonucleotide
  Sense strand starting at position 1310 of SEQ ID NO: 587175
gagagaucacugggugcaa

SEQ ID NO: 772289 - RNA, 19 nt, Artificial Sequence
  Description of Artificial Sequence: Synthetic oligonucleotide
  Antisense strand to SEQ ID NO: 772288
uugcacccagugaucucuc

SEQ ID NO: 772290 - RNA, 19 nt, Artificial Sequence
  Description of Artificial Sequence: Synthetic oligonucleotide
  Sense strand starting at position 1454 of SEQ ID NO: 587175
aaaccugcgaggugagaaa

SEQ ID NO: 772291 - RNA, 19 nt, Artificial Sequence
  Description of Artificial Sequence: Synthetic oligonucleotide
  Antisense strand to SEQ ID NO: 772290
uuucucaccucgcagguuu

SEQ ID NO: 772292 - RNA, 19 nt, Artificial Sequence
  Description of Artificial Sequence: Synthetic oligonucleotide
  Sense strand starting at position 1537 of SEQ ID NO: 587175
gcaacaugagccuaccuua

SEQ ID NO: 772293 - RNA, 19 nt, Artificial Sequence
  Description of Artificial Sequence: Synthetic oligonucleotide
  Antisense strand to SEQ ID NO: 772292
uaagguaggcucauguugc

SEQ ID NO: 772294 - RNA, 19 nt, Artificial Sequence
  Description of Artificial Sequence: Synthetic oligonucleotide
  Sense strand starting at position 1766 of SEQ ID NO: 587175
ccuggccuugcagauaauu

SEQ ID NO: 772295 - RNA, 19 nt, Artificial Sequence
  Description of Artificial Sequence: Synthetic oligonucleotide
  Antisense strand to SEQ ID NO: 772294
aauuaucugcaaggccagg

SEQ ID NO: 772296 - RNA, 19 nt, Artificial Sequence
  Description of Artificial Sequence: Synthetic oligonucleotide
  Sense strand starting at position 1812 of SEQ ID NO: 587175
gagucagacuggucaggaa

SEQ ID NO: 772297 - RNA, 19 nt, Artificial Sequence
  Description of Artificial Sequence: Synthetic oligonucleotide
  Antisense strand to SEQ ID NO: 772296
uuccugaccagucugacuc

SEQ ID NO: 772298 - RNA, 19 nt, Artificial Sequence
  Description of Artificial Sequence: Synthetic oligonucleotide
  Sense strand starting at position 1904 of SEQ ID NO: 587175
aguaaaguuuaagagaaag

SEQ ID NO: 772299 - RNA, 19 nt, Artificial Sequence
  Description of Artificial Sequence: Synthetic oligonucleotide
  Antisense strand to SEQ ID NO: 772298
cuuucucuuaaacuuuacu

SEQ ID NO: 772300 - RNA, 19 nt, Artificial Sequence
  Description of Artificial Sequence: Synthetic oligonucleotide
  Sense strand starting at position 1981 of SEQ ID NO: 587175
cuuaguuagggccauuagu

SEQ ID NO: 772301 - RNA, 19 nt, Artificial Sequence
  Description of Artificial Sequence: Synthetic oligonucleotide
  Antisense strand to SEQ ID NO: 772300
acuaauggcccuaacuaag

SEQ ID NO: 772302 - RNA, 19 nt, Artificial Sequence
  Description of Artificial Sequence: Synthetic oligonucleotide
  Sense strand starting at position 1991 of SEQ ID NO: 587175
gccauuagucgugugguag

SEQ ID NO: 772303 - RNA, 19 nt, Artificial Sequence
  Description of Artificial Sequence: Synthetic oligonucleotide
  Antisense strand to SEQ ID NO: 772302
cuaccacacgacuaauggc

SEQ ID NO: 772304 - RNA, 19 nt, Artificial Sequence
  Description of Artificial Sequence: Synthetic oligonucleotide
  Sense strand starting at position 2029 of SEQ ID NO: 587175
cucuauggcuguuuggaua

SEQ ID NO: 772305 - RNA, 19 nt, Artificial Sequence
  Description of Artificial Sequence: Synthetic oligonucleotide
  Antisense strand to SEQ ID NO: 772304
uauccaaacagccauagag

SEQ ID NO: 772306 - RNA, 19 nt, Artificial Sequence
  Description of Artificial Sequence: Synthetic oligonucleotide
  Sense strand starting at position 2094 of SEQ ID NO: 587175
ccaauauggcuaggacuau

SEQ ID NO: 772307 - RNA, 19 nt, Artificial Sequence
  Description of Artificial Sequence: Synthetic oligonucleotide
  Antisense strand to SEQ ID NO: 772306
auaguccuagccauauugg

SEQ ID NO: 772308 - RNA, 19 nt, Artificial Sequence
  Description of Artificial Sequence: Synthetic oligonucleotide
  Sense strand starting at position 2107 of SEQ ID NO: 587175
gacuauuuguacuaagguu

SEQ ID NO: 772309 - RNA, 19 nt, Artificial Sequence
  Description of Artificial Sequence: Synthetic oligonucleotide
  Antisense strand to SEQ ID NO: 772308
aaccuuaguacaaauaguc

SEQ ID NO: 772310 - RNA, 19 nt, Artificial Sequence
  Description of Artificial Sequence: Synthetic oligonucleotide
  Sense strand starting at position 2170 of SEQ ID NO: 587175
uggagacuauccuuuccaa

SEQ ID NO: 772311 - RNA, 19 nt, Artificial Sequence
  Description of Artificial Sequence: Synthetic oligonucleotide
  Antisense strand to SEQ ID NO: 772310
uuggaaaggauagucucca

SEQ ID NO: 772312 - RNA, 19 nt, Artificial Sequence
  Description of Artificial Sequence: Synthetic oligonucleotide
  Sense strand starting at position 2197 of SEQ ID NO: 587175
ugggaugugagcuaacuuu

SEQ ID NO: 772313 - RNA, 19 nt, Artificial Sequence
  Description of Artificial Sequence: Synthetic oligonucleotide
  Antisense strand to SEQ ID NO: 772312
aaaguuagcucacauccca

SEQ ID NO: 772314 - RNA, 19 nt, Artificial Sequence
  Description of Artificial Sequence: Synthetic oligonucleotide
  Sense strand starting at position 2275 of SEQ ID NO: 587175
guuaguaagguugaacuuu

SEQ ID NO: 772315 - RNA, 19 nt, Artificial Sequence
  Description of Artificial Sequence: Synthetic oligonucleotide
  Antisense strand to SEQ ID NO: 772314
aaaguucaaccuuacuaac

SEQ ID NO: 772316 - RNA, 19 nt, Artificial Sequence
  Description of Artificial Sequence: Synthetic oligonucleotide
  Sense strand starting at position 2413 of SEQ ID NO: 587175
gguaaugauuucuaguacu

SEQ ID NO: 772317 - RNA, 19 nt, Artificial Sequence
  Description of Artificial Sequence: Synthetic oligonucleotide
  Antisense strand to SEQ ID NO: 772316
aguacuagaaaucauuacc

SEQ ID NO: 772318 - RNA, 19 nt, Artificial Sequence
  Description of Artificial Sequence: Synthetic oligonucleotide
  Sense strand starting at position 2442 of SEQ ID NO: 587175
uuauaaugcgguuaagcau

SEQ ID NO: 772319 - RNA, 19 nt, Artificial Sequence
  Description of Artificial Sequence: Synthetic oligonucleotide
  Antisense strand to SEQ ID NO: 772318
augcuuaaccgcauuauaa

SEQ ID NO: 772320 - RNA, 19 nt, Artificial Sequence
  Description of Artificial Sequence: Synthetic oligonucleotide
  Sense strand starting at position 2689 of SEQ ID NO: 587175
ugaccauuuagcuggcagu

SEQ ID NO: 772321 - RNA, 19 nt, Artificial Sequence
  Description of Artificial Sequence: Synthetic oligonucleotide
  Antisense strand to SEQ ID NO: 772320
acugccagcuaaaugguca

SEQ ID NO: 772322 - RNA, 19 nt, Artificial Sequence
  Description of Artificial Sequence: Synthetic oligonucleotide
  Sense strand starting at position 2715 of SEQ ID NO: 587175
augcuuguggcccacagau

SEQ ID NO: 772323 - RNA, 19 nt, Artificial Sequence
  Description of Artificial Sequence: Synthetic oligonucleotide
  Antisense strand to SEQ ID NO: 772322
aucugugggccacaagcau

SEQ ID NO: 772324 - RNA, 19 nt, Artificial Sequence
  Description of Artificial Sequence: Synthetic oligonucleotide
  Sense strand starting at position 2887 of SEQ ID NO: 587175
guaauauuguuguccuagg

SEQ ID NO: 772325 - RNA, 19 nt, Artificial Sequence
  Description of Artificial Sequence: Synthetic oligonucleotide
  Antisense strand to SEQ ID NO: 772324
ccuaggacaacaauauuac

SEQ ID NO: 772326 - RNA, 19 nt, Artificial Sequence
  Description of Artificial Sequence: Synthetic oligonucleotide
  Sense strand starting at position 2894 of SEQ ID NO: 587175
uguuguccuaggcaaguua

SEQ ID NO: 772327 - RNA, 19 nt, Artificial Sequence
  Description of Artificial Sequence: Synthetic oligonucleotide
  Antisense strand to SEQ ID NO: 772326
uaacuugccuaggacaaca

SEQ ID NO: 772328 - RNA, 19 nt, Artificial Sequence
  Description of Artificial Sequence: Synthetic oligonucleotide
  Sense strand starting at position 3203 of SEQ ID NO: 587175
ugguuaacaugcucauaga

SEQ ID NO: 772329 - RNA, 19 nt, Artificial Sequence
  Description of Artificial Sequence: Synthetic oligonucleotide
  Antisense strand to SEQ ID NO: 772328
ucuaugagcauguuaacca

SEQ ID NO: 772330 - RNA, 19 nt, Artificial Sequence
  Description of Artificial Sequence: Synthetic oligonucleotide
  Sense strand starting at position 3204 of SEQ ID NO: 587175
gguuaacaugcucauagaa

SEQ ID NO: 772331 - RNA, 19 nt, Artificial Sequence
  Description of Artificial Sequence: Synthetic oligonucleotide
  Antisense strand to SEQ ID NO: 772330
uucuaugagcauguuaacc

SEQ ID NO: 772332 - RNA, 19 nt, Artificial Sequence
  Description of Artificial Sequence: Synthetic oligonucleotide
  Sense strand starting at position 3342 of SEQ ID NO: 587175
uuaaaccuguuguccauau

SEQ ID NO: 772333 - RNA, 19 nt, Artificial Sequence
  Description of Artificial Sequence: Synthetic oligonucleotide
  Antisense strand to SEQ ID NO: 772332
auauggacaacagguuuaa

SEQ ID NO: 772334 - RNA, 19 nt, Artificial Sequence
  Description of Artificial Sequence: Synthetic oligonucleotide
  Sense strand starting at position 3364 of SEQ ID NO: 587175
cugaucuggcucuaagaug

SEQ ID NO: 772335 - RNA, 19 nt, Artificial Sequence
  Description of Artificial Sequence: Synthetic oligonucleotide
  Antisense strand to SEQ ID NO: 772334
caucuuagagccagaucag

SEQ ID NO: 772336 - RNA, 19 nt, Artificial Sequence
  Description of Artificial Sequence: Synthetic oligonucleotide
  Sense strand starting at position 3370 of SEQ ID NO: 587175
uggcucuaagaugguaaga

SEQ ID NO: 772337 - RNA, 19 nt, Artificial Sequence
  Description of Artificial Sequence: Synthetic oligonucleotide
  Antisense strand to SEQ ID NO: 772336
ucuuaccaucuuagagcca

SEQ ID NO: 772338 - RNA, 19 nt, Artificial Sequence
  Description of Artificial Sequence: Synthetic oligonucleotide
  Sense strand starting at position 3381 of SEQ ID NO: 587175
ugguaagauuuacagaauu

SEQ ID NO: 772339 - RNA, 19 nt, Artificial Sequence
  Description of Artificial Sequence: Synthetic oligonucleotide
  Antisense strand to SEQ ID NO: 772338
aauucuguaaaucuuacca

SEQ ID NO: 772340 - RNA, 19 nt, Artificial Sequence
  Description of Artificial Sequence: Synthetic oligonucleotide
  Sense strand starting at position 3445 of SEQ ID NO: 587175
cauaauuggcccuagugau

SEQ ID NO: 772341 - RNA, 19 nt, Artificial Sequence
  Description of Artificial Sequence: Synthetic oligonucleotide
  Antisense strand to SEQ ID NO: 772340
aucacuagggccaauuaug

SEQ ID NO: 772342 - RNA, 19 nt, Artificial Sequence
  Description of Artificial Sequence: Synthetic oligonucleotide
  Sense strand starting at position 3459 of SEQ ID NO: 587175
gugauuguugguuagugga

SEQ ID NO: 772343 - RNA, 19 nt, Artificial Sequence
  Description of Artificial Sequence: Synthetic oligonucleotide
  Antisense strand to SEQ ID NO: 772342
uccacuaaccaacaaucac

SEQ ID NO: 772344 - RNA, 19 nt, Artificial Sequence
  Description of Artificial Sequence: Synthetic oligonucleotide
  Sense strand starting at position 3484 of SEQ ID NO: 587175
ugugcagucccagcaaguu

SEQ ID NO: 772345 - RNA, 19 nt, Artificial Sequence
  Description of Artificial Sequence: Synthetic oligonucleotide
  Antisense strand to SEQ ID NO: 772344
aacuugcugggacugcaca

SEQ ID NO: 772346 - RNA, 19 nt, Artificial Sequence
  Description of Artificial Sequence: Synthetic oligonucleotide
  Sense strand starting at position 3595 of SEQ ID NO: 587175
gagugagcccauggauacu

SEQ ID NO: 772347 - RNA, 19 nt, Artificial Sequence
  Description of Artificial Sequence: Synthetic oligonucleotide
  Antisense strand to SEQ ID NO: 772346
aguauccaugggcucacuc

SEQ ID NO: 772348 - RNA, 19 nt, Artificial Sequence
  Description of Artificial Sequence: Synthetic oligonucleotide
  Sense strand starting at position 3639 of SEQ ID NO: 587175
auacgacauccuugccaga

SEQ ID NO: 772349 - RNA, 19 nt, Artificial Sequence
  Description of Artificial Sequence: Synthetic oligonucleotide
  Antisense strand to SEQ ID NO: 772348
ucuggcaaggaugucguau

SEQ ID NO: 772350 - RNA, 19 nt, Artificial Sequence
  Description of Artificial Sequence: Synthetic oligonucleotide
  Sense strand starting at position 3646 of SEQ ID NO: 587175
auccuugccagagggaaau

SEQ ID NO: 772351 - RNA, 19 nt, Artificial Sequence
  Description of Artificial Sequence: Synthetic oligonucleotide
  Antisense strand to SEQ ID NO: 772350
auuucccucuggcaaggau

SEQ ID NO: 772352 - RNA, 19 nt, Artificial Sequence
  Description of Artificial Sequence: Synthetic oligonucleotide
  Sense strand starting at position 3657 of SEQ ID NO: 587175
agggaaauaccuugguuug

SEQ ID NO: 772353 - RNA, 19 nt, Artificial Sequence
  Description of Artificial Sequence: Synthetic oligonucleotide
  Antisense strand to SEQ ID NO: 772352
caaaccaagguauuucccu

SEQ ID NO: 772354 - RNA, 19 nt, Artificial Sequence
  Description of Artificial Sequence: Synthetic oligonucleotide
  Sense strand starting at position 3664 of SEQ ID NO: 587175
uaccuugguuugguuuaga

SEQ ID NO: 772355 - RNA, 19 nt, Artificial Sequence
  Description of Artificial Sequence: Synthetic oligonucleotide
  Antisense strand to SEQ ID NO: 772354
ucuaaaccaaaccaaggua

SEQ ID NO: 772356 - RNA, 19 nt, Artificial Sequence
  Description of Artificial Sequence: Synthetic oligonucleotide
  Sense strand starting at position 3667 of SEQ ID NO: 587175
cuugguuugguuuagaaga

SEQ ID NO: 772357 - RNA, 19 nt, Artificial Sequence
  Description of Artificial Sequence: Synthetic oligonucleotide
  Antisense strand to SEQ ID NO: 772356
ucuucuaaaccaaaccaag

SEQ ID NO: 772358 - RNA, 19 nt, Artificial Sequence
  Description of Artificial Sequence: Synthetic oligonucleotide
  Sense strand starting at position 3691 of SEQ ID NO: 587175
uuccuuugacccgacauga

SEQ ID NO: 772359 - RNA, 19 nt, Artificial Sequence
  Description of Artificial Sequence: Synthetic oligonucleotide
  Antisense strand to SEQ ID NO: 772358
ucaugucgggucaaaggaa

SEQ ID NO: 772360 - RNA, 19 nt, Artificial Sequence
  Description of Artificial Sequence: Synthetic oligonucleotide
  Sense strand starting at position 3836 of SEQ ID NO: 587175
ucauaauaagugugauaca

SEQ ID NO: 772361 - RNA, 19 nt, Artificial Sequence
  Description of Artificial Sequence: Synthetic oligonucleotide
  Antisense strand to SEQ ID NO: 772360
uguaucacacuuauuauga

SEQ ID NO: 772362 - RNA, 19 nt, Artificial Sequence
  Description of Artificial Sequence: Synthetic oligonucleotide
  Sense strand starting at position 56 of SEQ ID NO: 587176
ugcgcauaugaauaugaua

SEQ ID NO: 772363 - RNA, 19 nt, Artificial Sequence
  Description of Artificial Sequence: Synthetic oligonucleotide
  Antisense strand to SEQ ID NO: 772362
uaucauauucauaugcgca

SEQ ID NO: 772364 - RNA, 19 nt, Artificial Sequence
  Description of Artificial Sequence: Synthetic oligonucleotide
  Sense strand starting at position 165 of SEQ ID NO: 587176
ccuccuaagguguauugua

SEQ ID NO: 772365 - RNA, 19 nt, Artificial Sequence
  Description of Artificial Sequence: Synthetic oligonucleotide
  Antisense strand to SEQ ID NO: 772364
uacaauacaccuuaggagg

SEQ ID NO: 772366 - RNA, 19 nt, Artificial Sequence
  Description of Artificial Sequence: Synthetic oligonucleotide
  Sense strand starting at position 175 of SEQ ID NO: 587176
uguauuguaaaucagagua

SEQ ID NO: 772367 - RNA, 19 nt, Artificial Sequence
  Description of Artificial Sequence: Synthetic oligonucleotide
  Antisense strand to SEQ ID NO: 772366
uacucugauuuacaauaca

SEQ ID NO: 772368 - RNA, 19 nt, Artificial Sequence
  Description of Artificial Sequence: Synthetic oligonucleotide
  Sense strand starting at position 384 of SEQ ID NO: 587176
guacaucuugugggagacu

SEQ ID NO: 772369 - RNA, 19 nt, Artificial Sequence
  Description of Artificial Sequence: Synthetic oligonucleotide
  Antisense strand to SEQ ID NO: 772368
agucucccacaagauguac

SEQ ID NO: 772370 - RNA, 19 nt, Artificial Sequence
  Description of Artificial Sequence: Synthetic oligonucleotide
  Sense strand starting at position 393 of SEQ ID NO: 587176
gugggagacugucccuuua

SEQ ID NO: 772371 - RNA, 19 nt, Artificial Sequence
  Description of Artificial Sequence: Synthetic oligonucleotide
  Antisense strand to SEQ ID NO: 772370
uaaagggacagucucccac

SEQ ID NO: 772372 - RNA, 19 nt, Artificial Sequence
  Description of Artificial Sequence: Synthetic oligonucleotide
  Sense strand starting at position 395 of SEQ ID NO: 587176
gggagacugucccuuuaag

SEQ ID NO: 772373 - RNA, 19 nt, Artificial Sequence
  Description of Artificial Sequence: Synthetic oligonucleotide
  Antisense strand to SEQ ID NO: 772372
cuuaaagggacagucuccc

SEQ ID NO: 772374 - RNA, 19 nt, Artificial Sequence
  Description of Artificial Sequence: Synthetic oligonucleotide
  Sense strand starting at position 500 of SEQ ID NO: 587176
ugagauucucauggugaau

SEQ ID NO: 772375 - RNA, 19 nt, Artificial Sequence
  Description of Artificial Sequence: Synthetic oligonucleotide
  Antisense strand to SEQ ID NO: 772374
auucaccaugagaaucuca

SEQ ID NO: 772376 - RNA, 19 nt, Artificial Sequence
  Description of Artificial Sequence: Synthetic oligonucleotide
  Sense strand starting at position 900 of SEQ ID NO: 587176
aggaauacagucggcauaa

SEQ ID NO: 772377 - RNA, 19 nt, Artificial Sequence
  Description of Artificial Sequence: Synthetic oligonucleotide
  Antisense strand to SEQ ID NO: 772376
uuaugccgacuguauuccu

SEQ ID NO: 772378 - RNA, 19 nt, Artificial Sequence
  Description of Artificial Sequence: Synthetic oligonucleotide
  Sense strand starting at position 901 of SEQ ID NO: 587176
ggaauacagucggcauaau

SEQ ID NO: 772379 - RNA, 19 nt, Artificial Sequence
  Description of Artificial Sequence: Synthetic oligonucleotide
  Antisense strand to SEQ ID NO: 772378
auuaugccgacuguauucc

SEQ ID NO: 772380 - RNA, 19 nt, Artificial Sequence
  Description of Artificial Sequence: Synthetic oligonucleotide
  Sense strand starting at position 902 of SEQ ID NO: 587176
gaauacagucggcauaauu

SEQ ID NO: 772381 - RNA, 19 nt, Artificial Sequence
  Description of Artificial Sequence: Synthetic oligonucleotide
  Antisense strand to SEQ ID NO: 772380
aauuaugccgacuguauuc

SEQ ID NO: 772382 - RNA, 19 nt, Artificial Sequence
  Description of Artificial Sequence: Synthetic oligonucleotide
  Sense strand starting at position 974 of SEQ ID NO: 587176
agaacuuacgcucacuuaa

SEQ ID NO: 772383 - RNA, 19 nt, Artificial Sequence
  Description of Artificial Sequence: Synthetic oligonucleotide
  Antisense strand to SEQ ID NO: 772382
uuaagugagcguaaguucu

SEQ ID NO: 772384 - RNA, 19 nt, Artificial Sequence
  Description of Artificial Sequence: Synthetic oligonucleotide
  Sense strand starting at position 1037 of SEQ ID NO: 587176
agaguucuacuaugagcaa

SEQ ID NO: 772385 - RNA, 19 nt, Artificial Sequence
  Description of Artificial Sequence: Synthetic oligonucleotide
  Antisense strand to SEQ ID NO: 772384
uugcucauaguagaacucu

SEQ ID NO: 772386 - RNA, 19 nt, Artificial Sequence
  Description of Artificial Sequence: Synthetic oligonucleotide
  Sense strand starting at position 1240 of SEQ ID NO: 587176
gguagcaaucuggagcaga

SEQ ID NO: 772387 - RNA, 19 nt, Artificial Sequence
  Description of Artificial Sequence: Synthetic oligonucleotide
  Antisense strand to SEQ ID NO: 772386
ucugcuccagauugcuacc

SEQ ID NO: 772388 - RNA, 19 nt, Artificial Sequence
  Description of Artificial Sequence: Synthetic oligonucleotide
  Sense strand starting at position 1952 of SEQ ID NO: 587176
ggccaaagccugggaacua

SEQ ID NO: 772389 - RNA, 19 nt, Artificial Sequence
  Description of Artificial Sequence: Synthetic oligonucleotide
  Antisense strand to SEQ ID NO: 772388
uaguucccaggcuuuggcc

SEQ ID NO: 772390 - RNA, 19 nt, Artificial Sequence
  Description of Artificial Sequence: Synthetic oligonucleotide
  Sense strand starting at position 2112 of SEQ ID NO: 587176
ggacaaauaccgugacucu

SEQ ID NO: 772391 - RNA, 19 nt, Artificial Sequence
  Description of Artificial Sequence: Synthetic oligonucleotide
  Antisense strand to SEQ ID NO: 772390
agagucacgguauuugucc

SEQ ID NO: 772392 - RNA, 19 nt, Artificial Sequence
  Description of Artificial Sequence: Synthetic oligonucleotide
  Sense strand starting at position 2113 of SEQ ID NO: 587176
gacaaauaccgugacucua

SEQ ID NO: 772393 - RNA, 19 nt, Artificial Sequence
  Description of Artificial Sequence: Synthetic oligonucleotide
  Antisense strand to SEQ ID NO: 772392
uagagucacgguauuuguc

SEQ ID NO: 772394 - RNA, 19 nt, Artificial Sequence
  Description of Artificial Sequence: Synthetic oligonucleotide
  Sense strand starting at position 2121 of SEQ ID NO: 587176
ccgugacucuauuucccau

SEQ ID NO: 772395 - RNA, 19 nt, Artificial Sequence
  Description of Artificial Sequence: Synthetic oligonucleotide
  Antisense strand to SEQ ID NO: 772394
augggaaauagagucacgg

SEQ ID NO: 772396 - RNA, 19 nt, Artificial Sequence
  Description of Artificial Sequence: Synthetic oligonucleotide
  Sense strand starting at position 2171 of SEQ ID NO: 587176
uuugaaaugucucuaucug

SEQ ID NO: 772397 - RNA, 19 nt, Artificial Sequence
  Description of Artificial Sequence: Synthetic oligonucleotide
  Antisense strand to SEQ ID NO: 772396
cagauagagacauuucaaa

SEQ ID NO: 772398 - RNA, 19 nt, Artificial Sequence
  Description of Artificial Sequence: Synthetic oligonucleotide
  Sense strand starting at position 2282 of SEQ ID NO: 587176
ggaugucuugacuaucuuu

SEQ ID NO: 772399 - RNA, 19 nt, Artificial Sequence
  Description of Artificial Sequence: Synthetic oligonucleotide
  Antisense strand to SEQ ID NO: 772398
aaagauagucaagacaucc

SEQ ID NO: 772400 - RNA, 19 nt, Artificial Sequence
  Description of Artificial Sequence: Synthetic oligonucleotide
  Sense strand starting at position 2285 of SEQ ID NO: 587176
ugucuugacuaucuuuaag

SEQ ID NO: 772401 - RNA, 19 nt, Artificial Sequence
  Description of Artificial Sequence: Synthetic oligonucleotide
  Antisense strand to SEQ ID NO: 772400
cuuaaagauagucaagaca

SEQ ID NO: 772402 - RNA, 19 nt, Artificial Sequence
  Description of Artificial Sequence: Synthetic oligonucleotide
  Sense strand starting at position 2372 of SEQ ID NO: 587176
cggagagcucaaggcuuaa

SEQ ID NO: 772403 - RNA, 19 nt, Artificial Sequence
  Description of Artificial Sequence: Synthetic oligonucleotide
  Antisense strand to SEQ ID NO: 772402
uuaagccuugagcucuccg

SEQ ID NO: 772404 - RNA, 19 nt, Artificial Sequence
  Description of Artificial Sequence: Synthetic oligonucleotide
  Sense strand starting at position 2402 of SEQ ID NO: 587176
augugcaaccgugacaaau

SEQ ID NO: 772405 - RNA, 19 nt, Artificial Sequence
  Description of Artificial Sequence: Synthetic oligonucleotide
  Antisense strand to SEQ ID NO: 772404
auuugucacgguugcacau

SEQ ID NO: 772406 - RNA, 19 nt, Artificial Sequence
  Description of Artificial Sequence: Synthetic oligonucleotide
  Sense strand starting at position 2441 of SEQ ID NO: 587176
gcuagcuuaugaucacaau

SEQ ID NO: 772407 - RNA, 19 nt, Artificial Sequence
  Description of Artificial Sequence: Synthetic oligonucleotide
  Antisense strand to SEQ ID NO: 772406
auugugaucauaagcuagc

SEQ ID NO: 772408 - RNA, 19 nt, Artificial Sequence
  Description of Artificial Sequence: Synthetic oligonucleotide
  Sense strand starting at position 2509 of SEQ ID NO: 587176
agaggauuagccugggaca

SEQ ID NO: 772409 - RNA, 19 nt, Artificial Sequence
  Description of Artificial Sequence: Synthetic oligonucleotide
  Antisense strand to SEQ ID NO: 772408
ugucccaggcuaauccucu

SEQ ID NO: 772410 - RNA, 19 nt, Artificial Sequence
  Description of Artificial Sequence: Synthetic oligonucleotide
  Sense strand starting at position 2510 of SEQ ID NO: 587176
gaggauuagccugggacag

SEQ ID NO: 772411 - RNA, 19 nt, Artificial Sequence
  Description of Artificial Sequence: Synthetic oligonucleotide
  Antisense strand to SEQ ID NO: 772410
cugucccaggcuaauccuc

SEQ ID NO: 772412 - RNA, 19 nt, Artificial Sequence
  Description of Artificial Sequence: Synthetic oligonucleotide
  Sense strand starting at position 2722 of SEQ ID NO: 587176
uuuagaaagccauguuacu

SEQ ID NO: 772413 - RNA, 19 nt, Artificial Sequence
  Description of Artificial Sequence: Synthetic oligonucleotide
  Antisense strand to SEQ ID NO: 772412
aguaacauggcuuucuaaa

SEQ ID NO: 772414 - RNA, 19 nt, Artificial Sequence
  Description of Artificial Sequence: Synthetic oligonucleotide
  Sense strand starting at position 2796 of SEQ ID NO: 587176
agguaaucgaugcaaguua

SEQ ID NO: 772415 - RNA, 19 nt, Artificial Sequence
  Description of Artificial Sequence: Synthetic oligonucleotide
  Antisense strand to SEQ ID NO: 772414
uaacuugcaucgauuaccu

SEQ ID NO: 772416 - RNA, 19 nt, Artificial Sequence
  Description of Artificial Sequence: Synthetic oligonucleotide
  Sense strand starting at position 2833 of SEQ ID NO: 587176
uugguugacuucccacaau

SEQ ID NO: 772417 - RNA, 19 nt, Artificial Sequence
  Description of Artificial Sequence: Synthetic oligonucleotide
  Antisense strand to SEQ ID NO: 772416
auugugggaagucaaccaa

SEQ ID NO: 772418 - RNA, 19 nt, Artificial Sequence
  Description of Artificial Sequence: Synthetic oligonucleotide
  Sense strand starting at position 3380 of SEQ ID NO: 587176
ugcagaagucccugaugga

SEQ ID NO: 772419 - RNA, 19 nt, Artificial Sequence
  Description of Artificial Sequence: Synthetic oligonucleotide
  Antisense strand to SEQ ID NO: 772418
uccaucagggacuucugca

SEQ ID NO: 772420 - RNA, 19 nt, Artificial Sequence
  Description of Artificial Sequence: Synthetic oligonucleotide
  Sense strand starting at position 3429 of SEQ ID NO: 587176
acuggagugccucaugaac

SEQ ID NO: 772421 - RNA, 19 nt, Artificial Sequence
  Description of Artificial Sequence: Synthetic oligonucleotide
  Antisense strand to SEQ ID NO: 772420
guucaugaggcacuccagu

SEQ ID NO: 772422 - RNA, 19 nt, Artificial Sequence
  Description of Artificial Sequence: Synthetic oligonucleotide
  Sense strand starting at position 3502 of SEQ ID NO: 587176
aguagaaauuugcuggcuu

SEQ ID NO: 772423 - RNA, 19 nt, Artificial Sequence
  Description of Artificial Sequence: Synthetic oligonucleotide
  Antisense strand to SEQ ID NO: 772422
aagccagcaaauuucuacu

SEQ ID NO: 772424 - RNA, 19 nt, Artificial Sequence
  Description of Artificial Sequence: Synthetic oligonucleotide
  Sense strand starting at position 3567 of SEQ ID NO: 587176
ugguuugcauuuguuuaca

SEQ ID NO: 772425 - RNA, 19 nt, Artificial Sequence
  Description of Artificial Sequence: Synthetic oligonucleotide
  Antisense strand to SEQ ID NO: 772424
uguaaacaaaugcaaacca

SEQ ID NO: 772426 - RNA, 19 nt, Artificial Sequence
  Description of Artificial Sequence: Synthetic oligonucleotide
  Sense strand starting at position 3592 of SEQ ID NO: 587176
gcaucacugauugggacuu

SEQ ID NO: 772427 - RNA, 19 nt, Artificial Sequence
  Description of Artificial Sequence: Synthetic oligonucleotide
  Antisense strand to SEQ ID NO: 772426
aagucccaaucagugaugc

SEQ ID NO: 772428 - RNA, 19 nt, Artificial Sequence
  Description of Artificial Sequence: Synthetic oligonucleotide
  Sense strand starting at position 3929 of SEQ ID NO: 587176
gucugaucacauggugauc

SEQ ID NO: 772429 - RNA, 19 nt, Artificial Sequence
  Description of Artificial Sequence: Synthetic oligonucleotide
  Antisense strand to SEQ ID NO: 772428
gaucaccaugugaucagac

SEQ ID NO: 772430 - RNA, 19 nt, Artificial Sequence
  Description of Artificial Sequence: Synthetic oligonucleotide
  Sense strand starting at position 3938 of SEQ ID NO: 587176
cauggugaucucuguaaug

SEQ ID NO: 772431 - RNA, 19 nt, Artificial Sequence
  Description of Artificial Sequence: Synthetic oligonucleotide
  Antisense strand to SEQ ID NO: 772430
cauuacagagaucaccaug

SEQ ID NO: 772432 - RNA, 19 nt, Artificial Sequence
  Description of Artificial Sequence: Synthetic oligonucleotide
  Sense strand starting at position 3940 of SEQ ID NO: 587176
uggugaucucuguaaugag

SEQ ID NO: 772433 - RNA, 19 nt, Artificial Sequence
  Description of Artificial Sequence: Synthetic oligonucleotide
  Antisense strand to SEQ ID NO: 772432
cucauuacagagaucacca

SEQ ID NO: 772434 - RNA, 19 nt, Artificial Sequence
  Description of Artificial Sequence: Synthetic oligonucleotide
  Sense strand starting at position 3949 of SEQ ID NO: 587176
cuguaaugagauuaauguu

SEQ ID NO: 772435 - RNA, 19 nt, Artificial Sequence
  Description of Artificial Sequence: Synthetic oligonucleotide
  Antisense strand to SEQ ID NO: 772434
aacauuaaucucauuacag

SEQ ID NO: 772436 - RNA, 19 nt, Artificial Sequence
  Description of Artificial Sequence: Synthetic oligonucleotide
  Sense strand starting at position 3955 of SEQ ID NO: 587176
ugagauuaauguuugcaaa

SEQ ID NO: 772437 - RNA, 19 nt, Artificial Sequence
  Description of Artificial Sequence: Synthetic oligonucleotide
  Antisense strand to SEQ ID NO: 772436
uuugcaaacauuaaucuca

SEQ ID NO: 772438 - RNA, 19 nt, Artificial Sequence
  Description of Artificial Sequence: Synthetic oligonucleotide
  Sense strand starting at position 3974 of SEQ ID NO: 587176
gaccuaaucucuguugggu

SEQ ID NO: 772439 - RNA, 19 nt, Artificial Sequence
  Description of Artificial Sequence: Synthetic oligonucleotide
  Antisense strand to SEQ ID NO: 772438
acccaacagagauuagguc

SEQ ID NO: 772440 - RNA, 19 nt, Artificial Sequence
  Description of Artificial Sequence: Synthetic oligonucleotide
  Sense strand starting at position 3980 of SEQ ID NO: 587176
aucucuguugggugagaga

SEQ ID NO: 772441 - RNA, 19 nt, Artificial Sequence
  Description of Artificial Sequence: Synthetic oligonucleotide
  Antisense strand to SEQ ID NO: 772440
ucucucacccaacagagau

SEQ ID NO: 772442 - RNA, 19 nt, Artificial Sequence
  Description of Artificial Sequence: Synthetic oligonucleotide
  Sense strand starting at position 59 of SEQ ID NO: 587177
ucacuuaagugcuaaacga

SEQ ID NO: 772443 - RNA, 19 nt, Artificial Sequence
  Description of Artificial Sequence: Synthetic oligonucleotide
  Antisense strand to SEQ ID NO: 772442
ucguuuagcacuuaaguga

SEQ ID NO: 772444 - RNA, 19 nt, Artificial Sequence
  Description of Artificial Sequence: Synthetic oligonucleotide
  Sense strand starting at position 152 of SEQ ID NO: 587177
uugcaaguucuugaaccau

SEQ ID NO: 772445 - RNA, 19 nt, Artificial Sequence
  Description of Artificial Sequence: Synthetic oligonucleotide
  Antisense strand to SEQ ID NO: 772444
augguucaagaacuugcaa

SEQ ID NO: 772446 - RNA, 19 nt, Artificial Sequence
  Description of Artificial Sequence: Synthetic oligonucleotide
  Sense strand starting at position 234 of SEQ ID NO: 587177
aauccagugggccgaaauu

SEQ ID NO: 772447 - RNA, 19 nt, Artificial Sequence
  Description of Artificial Sequence: Synthetic oligonucleotide
  Antisense strand to SEQ ID NO: 772446
aauuucggcccacuggauu

SEQ ID NO: 772448 - RNA, 19 nt, Artificial Sequence
  Description of Artificial Sequence: Synthetic oligonucleotide
  Sense strand starting at position 245 of SEQ ID NO: 587177
ccgaaauuauuucuguguu

SEQ ID NO: 772449 - RNA, 19 nt, Artificial Sequence
  Description of Artificial Sequence: Synthetic oligonucleotide
  Antisense strand to SEQ ID NO: 772448
aacacagaaauaauuucgg

SEQ ID NO: 772450 - RNA, 19 nt, Artificial Sequence
  Description of Artificial Sequence: Synthetic oligonucleotide
  Sense strand starting at position 246 of SEQ ID NO: 587177
cgaaauuauuucuguguuc

SEQ ID NO: 772451 - RNA, 19 nt, Artificial Sequence
  Description of Artificial Sequence: Synthetic oligonucleotide
  Antisense strand to SEQ ID NO: 772450
gaacacagaaauaauuucg

SEQ ID NO: 772452 - RNA, 19 nt, Artificial Sequence
  Description of Artificial Sequence: Synthetic oligonucleotide
  Sense strand starting at position 276 of SEQ ID NO: 587177
ccagcauaugauugauuga

SEQ ID NO: 772453 - RNA, 19 nt, Artificial Sequence
  Description of Artificial Sequence: Synthetic oligonucleotide
  Antisense strand to SEQ ID NO: 772452
ucaaucaaucauaugcugg

SEQ ID NO: 772454 - RNA, 19 nt, Artificial Sequence
  Description of Artificial Sequence: Synthetic oligonucleotide
  Sense strand starting at position 279 of SEQ ID NO: 587177
gcauaugauugauugacca

SEQ ID NO: 772455 - RNA, 19 nt, Artificial Sequence
  Description of Artificial Sequence: Synthetic oligonucleotide
  Antisense strand to SEQ ID NO: 772454
uggucaaucaaucauaugc

SEQ ID NO: 772456 - RNA, 19 nt, Artificial Sequence
  Description of Artificial Sequence: Synthetic oligonucleotide
  Sense strand starting at position 283 of SEQ ID NO: 587177
augauugauugaccagcaa

SEQ ID NO: 772457 - RNA, 19 nt, Artificial Sequence
  Description of Artificial Sequence: Synthetic oligonucleotide
  Antisense strand to SEQ ID NO: 772456
uugcuggucaaucaaucau

SEQ ID NO: 772458 - RNA, 19 nt, Artificial Sequence
  Description of Artificial Sequence: Synthetic oligonucleotide
  Sense strand starting at position 297 of SEQ ID NO: 587177
agcaauaugucuccggaaa

SEQ ID NO: 772459 - RNA, 19 nt, Artificial Sequence
  Description of Artificial Sequence: Synthetic oligonucleotide
  Antisense strand to SEQ ID NO: 772458
uuuccggagacauauugcu

SEQ ID NO: 772460 - RNA, 19 nt, Artificial Sequence
  Description of Artificial Sequence: Synthetic oligonucleotide
  Sense strand starting at position 298 of SEQ ID NO: 587177
gcaauaugucuccggaaau

SEQ ID NO: 772461 - RNA, 19 nt, Artificial Sequence
  Description of Artificial Sequence: Synthetic oligonucleotide
  Antisense strand to SEQ ID NO: 772460
auuuccggagacauauugc

SEQ ID NO: 772462 - RNA, 19 nt, Artificial Sequence
  Description of Artificial Sequence: Synthetic oligonucleotide
  Sense strand starting at position 299 of SEQ ID NO: 587177
caauaugucuccggaaaug

SEQ ID NO: 772463 - RNA, 19 nt, Artificial Sequence
  Description of Artificial Sequence: Synthetic oligonucleotide
  Antisense strand to SEQ ID NO: 772462
cauuuccggagacauauug

SEQ ID NO: 772464 - RNA, 19 nt, Artificial Sequence
  Description of Artificial Sequence: Synthetic oligonucleotide
  Sense strand starting at position 322 of SEQ ID NO: 587177
cuggguugguuugaagaca

SEQ ID NO: 772465 - RNA, 19 nt, Artificial Sequence
  Description of Artificial Sequence: Synthetic oligonucleotide
  Antisense strand to SEQ ID NO: 772464
ugucuucaaaccaacccag

SEQ ID NO: 772466 - RNA, 19 nt, Artificial Sequence
  Description of Artificial Sequence: Synthetic oligonucleotide
  Sense strand starting at position 502 of SEQ ID NO: 587177
gcugaaauuuaccagagau

SEQ ID NO: 772467 - RNA, 19 nt, Artificial Sequence
  Description of Artificial Sequence: Synthetic oligonucleotide
  Antisense strand to SEQ ID NO: 772466
aucucugguaaauuucagc

SEQ ID NO: 772468 - RNA, 19 nt, Artificial Sequence
  Description of Artificial Sequence: Synthetic oligonucleotide
  Sense strand starting at position 663 of SEQ ID NO: 587177
ugauaagaucucuguaccu

SEQ ID NO: 772469 - RNA, 19 nt, Artificial Sequence
  Description of Artificial Sequence: Synthetic oligonucleotide
  Antisense strand to SEQ ID NO: 772468
agguacagagaucuuauca

SEQ ID NO: 772470 - RNA, 19 nt, Artificial Sequence
  Description of Artificial Sequence: Synthetic oligonucleotide
  Sense strand starting at position 672 of SEQ ID NO: 587177
cucuguaccuagggaagau

SEQ ID NO: 772471 - RNA, 19 nt, Artificial Sequence
  Description of Artificial Sequence: Synthetic oligonucleotide
  Antisense strand to SEQ ID NO: 772470
aucuucccuagguacagag

SEQ ID NO: 772472 - RNA, 19 nt, Artificial Sequence
  Description of Artificial Sequence: Synthetic oligonucleotide
  Sense strand starting at position 752 of SEQ ID NO: 587177
gguuucuucucaugggaaa

SEQ ID NO: 772473 - RNA, 19 nt, Artificial Sequence
  Description of Artificial Sequence: Synthetic oligonucleotide
  Antisense strand to SEQ ID NO: 772472
uuucccaugagaagaaacc

SEQ ID NO: 772474 - RNA, 19 nt, Artificial Sequence
  Description of Artificial Sequence: Synthetic oligonucleotide
  Sense strand starting at position 753 of SEQ ID NO: 587177
guuucuucucaugggaaau

SEQ ID NO: 772475 - RNA, 19 nt, Artificial Sequence
  Description of Artificial Sequence: Synthetic oligonucleotide
  Antisense strand to SEQ ID NO: 772474
auuucccaugagaagaaac

SEQ ID NO: 772476 - RNA, 19 nt, Artificial Sequence
  Description of Artificial Sequence: Synthetic oligonucleotide
  Sense strand starting at position 1153 of SEQ ID NO: 587177
guaaauuacuaccuuguga

SEQ ID NO: 772477 - RNA, 19 nt, Artificial Sequence
  Description of Artificial Sequence: Synthetic oligonucleotide
  Antisense strand to SEQ ID NO: 772476
ucacaagguaguaauuuac

SEQ ID NO: 772478 - RNA, 19 nt, Artificial Sequence
  Description of Artificial Sequence: Synthetic oligonucleotide
  Sense strand starting at position 1534 of SEQ ID NO: 587177
cccgucgucucugcacaau

SEQ ID NO: 772479 - RNA, 19 nt, Artificial Sequence
  Description of Artificial Sequence: Synthetic oligonucleotide
  Antisense strand to SEQ ID NO: 772478
auugugcagagacgacggg

SEQ ID NO: 772480 - RNA, 19 nt, Artificial Sequence
  Description of Artificial Sequence: Synthetic oligonucleotide
  Sense strand starting at position 1726 of SEQ ID NO: 587177
gcgggaagacccgaguacu

SEQ ID NO: 772481 - RNA, 19 nt, Artificial Sequence
  Description of Artificial Sequence: Synthetic oligonucleotide
  Antisense strand to SEQ ID NO: 772480
aguacucgggucuucccgc

SEQ ID NO: 772482 - RNA, 19 nt, Artificial Sequence
  Description of Artificial Sequence: Synthetic oligonucleotide
  Sense strand starting at position 2033 of SEQ ID NO: 587177
cggcgucccugauuggaua

SEQ ID NO: 772483 - RNA, 19 nt, Artificial Sequence
  Description of Artificial Sequence: Synthetic oligonucleotide
  Antisense strand to SEQ ID NO: 772482
uauccaaucagggacgccg

SEQ ID NO: 772484 - RNA, 19 nt, Artificial Sequence
  Description of Artificial Sequence: Synthetic oligonucleotide
  Sense strand starting at position 2034 of SEQ ID NO: 587177
ggcgucccugauuggauaa

SEQ ID NO: 772485 - RNA, 19 nt, Artificial Sequence
  Description of Artificial Sequence: Synthetic oligonucleotide
  Antisense strand to SEQ ID NO: 772484
uuauccaaucagggacgcc

SEQ ID NO: 772486 - RNA, 19 nt, Artificial Sequence
  Description of Artificial Sequence: Synthetic oligonucleotide
  Sense strand starting at position 2045 of SEQ ID NO: 587177
uuggauaacguuuaacaac

SEQ ID NO: 772487 - RNA, 19 nt, Artificial Sequence
  Description of Artificial Sequence: Synthetic oligonucleotide
  Antisense strand to SEQ ID NO: 772486
guuguuaaacguuauccaa

SEQ ID NO: 772488 - RNA, 19 nt, Artificial Sequence
  Description of Artificial Sequence: Synthetic oligonucleotide
  Sense strand starting at position 2672 of SEQ ID NO: 587177
cacucuaauugagaugguu

SEQ ID NO: 772489 - RNA, 19 nt, Artificial Sequence
  Description of Artificial Sequence: Synthetic oligonucleotide
  Antisense strand to SEQ ID NO: 772488
aaccaucucaauuagagug

SEQ ID NO: 772490 - RNA, 19 nt, Artificial Sequence
  Description of Artificial Sequence: Synthetic oligonucleotide
  Sense strand starting at position 2674 of SEQ ID NO: 587177
cucuaauugagaugguuag

SEQ ID NO: 772491 - RNA, 19 nt, Artificial Sequence
  Description of Artificial Sequence: Synthetic oligonucleotide
  Antisense strand to SEQ ID NO: 772490
cuaaccaucucaauuagag

SEQ ID NO: 772492 - RNA, 19 nt, Artificial Sequence
  Description of Artificial Sequence: Synthetic oligonucleotide
  Sense strand starting at position 2675 of SEQ ID NO: 587177
ucuaauugagaugguuagu

SEQ ID NO: 772493 - RNA, 19 nt, Artificial Sequence
  Description of Artificial Sequence: Synthetic oligonucleotide
  Antisense strand to SEQ ID NO: 772492
acuaaccaucucaauuaga

SEQ ID NO: 772494 - RNA, 19 nt, Artificial Sequence
  Description of Artificial Sequence: Synthetic oligonucleotide
  Sense strand starting at position 2714 of SEQ ID NO: 587177
agaccauucuugugaccuc

SEQ ID NO: 772495 - RNA, 19 nt, Artificial Sequence
  Description of Artificial Sequence: Synthetic oligonucleotide
  Antisense strand to SEQ ID NO: 772494
gaggucacaagaauggucu

SEQ ID NO: 772496 - RNA, 19 nt, Artificial Sequence
  Description of Artificial Sequence: Synthetic oligonucleotide
  Sense strand starting at position 2895 of SEQ ID NO: 587177
auaguagccuucugaaaga

SEQ ID NO: 772497 - RNA, 19 nt, Artificial Sequence
  Description of Artificial Sequence: Synthetic oligonucleotide
  Antisense strand to SEQ ID NO: 772496
ucuuucagaaggcuacuau

SEQ ID NO: 772498 - RNA, 19 nt, Artificial Sequence
  Description of Artificial Sequence: Synthetic oligonucleotide
  Sense strand starting at position 3140 of SEQ ID NO: 587177
uugcauaugugguuuauau

SEQ ID NO: 772499 - RNA, 19 nt, Artificial Sequence
  Description of Artificial Sequence: Synthetic oligonucleotide
  Antisense strand to SEQ ID NO: 772498
auauaaaccacauaugcaa

SEQ ID NO: 772500 - RNA, 19 nt, Artificial Sequence
  Description of Artificial Sequence: Synthetic oligonucleotide
  Sense strand starting at position 3142 of SEQ ID NO: 587177
gcauaugugguuuauauaa

SEQ ID NO: 772501 - RNA, 19 nt, Artificial Sequence
  Description of Artificial Sequence: Synthetic oligonucleotide
  Antisense strand to SEQ ID NO: 772500
uuauauaaaccacauaugc

SEQ ID NO: 772502 - RNA, 19 nt, Artificial Sequence
  Description of Artificial Sequence: Synthetic oligonucleotide
  Sense strand starting at position 3309 of SEQ ID NO: 587177
cccauauagcacuguuuau

SEQ ID NO: 772503 - RNA, 19 nt, Artificial Sequence
  Description of Artificial Sequence: Synthetic oligonucleotide
  Antisense strand to SEQ ID NO: 772502
auaaacagugcuauauggg

SEQ ID NO: 772504 - RNA, 19 nt, Artificial Sequence
  Description of Artificial Sequence: Synthetic oligonucleotide
  Sense strand starting at position 3367 of SEQ ID NO: 587177
cacgguagcucacaucuau

SEQ ID NO: 772505 - RNA, 19 nt, Artificial Sequence
  Description of Artificial Sequence: Synthetic oligonucleotide
  Antisense strand to SEQ ID NO: 772504
auagaugugagcuaccgug

SEQ ID NO: 772506 - RNA, 19 nt, Artificial Sequence
  Description of Artificial Sequence: Synthetic oligonucleotide
  Sense strand starting at position 3413 of SEQ ID NO: 587177
gggagaaucacuugcgcuc

SEQ ID NO: 772507 - RNA, 19 nt, Artificial Sequence
  Description of Artificial Sequence: Synthetic oligonucleotide
  Antisense strand to SEQ ID NO: 772506
gagcgcaagugauucuccc

SEQ ID NO: 772508 - RNA, 19 nt, Artificial Sequence
  Description of Artificial Sequence: Synthetic oligonucleotide
  Sense strand starting at position 3438 of SEQ ID NO: 587177
ucaagugcagccugaauaa

SEQ ID NO: 772509 - RNA, 19 nt, Artificial Sequence
  Description of Artificial Sequence: Synthetic oligonucleotide
  Antisense strand to SEQ ID NO: 772508
uuauucaggcugcacuuga

SEQ ID NO: 772510 - RNA, 19 nt, Artificial Sequence
  Description of Artificial Sequence: Synthetic oligonucleotide
  Sense strand starting at position 3465 of SEQ ID NO: 587177
agauccuaugugcaugaaa

SEQ ID NO: 772511 - RNA, 19 nt, Artificial Sequence
  Description of Artificial Sequence: Synthetic oligonucleotide
  Antisense strand to SEQ ID NO: 772510
uuucaugcacauaggaucu

SEQ ID NO: 772512 - RNA, 19 nt, Artificial Sequence
  Description of Artificial Sequence: Synthetic oligonucleotide
  Sense strand starting at position 3885 of SEQ ID NO: 587177
gagccaugauugguuacga

SEQ ID NO: 772513 - RNA, 19 nt, Artificial Sequence
  Description of Artificial Sequence: Synthetic oligonucleotide
  Antisense strand to SEQ ID NO: 772512
ucguaaccaaucauggcuc

SEQ ID NO: 772514 - RNA, 19 nt, Artificial Sequence
  Description of Artificial Sequence: Synthetic oligonucleotide
  Sense strand starting at position 3889 of SEQ ID NO: 587177
caugauugguuacgacacu

SEQ ID NO: 772515 - RNA, 19 nt, Artificial Sequence
  Description of Artificial Sequence: Synthetic oligonucleotide
  Antisense strand to SEQ ID NO: 772514
agugucguaaccaaucaug

SEQ ID NO: 772516 - RNA, 19 nt, Artificial Sequence
  Description of Artificial Sequence: Synthetic oligonucleotide
  Sense strand starting at position 3923 of SEQ ID NO: 587177
uggugagagugugauccuu

SEQ ID NO: 772517 - RNA, 19 nt, Artificial Sequence
  Description of Artificial Sequence: Synthetic oligonucleotide
  Antisense strand to SEQ ID NO: 772516
aaggaucacacucucacca

SEQ ID NO: 772518 - RNA, 19 nt, Artificial Sequence
  Description of Artificial Sequence: Synthetic oligonucleotide
  Sense strand starting at position 3925 of SEQ ID NO: 587177
gugagagugugauccuuuc

SEQ ID NO: 772519 - RNA, 19 nt, Artificial Sequence
  Description of Artificial Sequence: Synthetic oligonucleotide
  Antisense strand to SEQ ID NO: 772518
gaaaggaucacacucucac

SEQ ID NO: 772520 - RNA, 19 nt, Artificial Sequence
  Description of Artificial Sequence: Synthetic oligonucleotide
  Sense strand starting at position 3931 of SEQ ID NO: 587177
gugugauccuuucuccaaa

SEQ ID NO: 772521 - RNA, 19 nt, Artificial Sequence
  Description of Artificial Sequence: Synthetic oligonucleotide
  Antisense strand to SEQ ID NO: 772520
uuuggagaaaggaucacac

SEQ ID NO: 772522 - RNA, 19 nt, Artificial Sequence
  Description of Artificial Sequence: Synthetic oligonucleotide
  Sense strand starting at position 98 of SEQ ID NO: 587178
ccugaaaugucugagaaga

SEQ ID NO: 772523 - RNA, 19 nt, Artificial Sequence
  Description of Artificial Sequence: Synthetic oligonucleotide
  Antisense strand to SEQ ID NO: 772522
ucuucucagacauuucagg

SEQ ID NO: 772524 - RNA, 19 nt, Artificial Sequence
  Description of Artificial Sequence: Synthetic oligonucleotide
  Sense strand starting at position 100 of SEQ ID NO: 587178
ugaaaugucugagaagaga

SEQ ID NO: 772525 - RNA, 19 nt, Artificial Sequence
  Description of Artificial Sequence: Synthetic oligonucleotide
  Antisense strand to SEQ ID NO: 772524
ucucuucucagacauuuca

SEQ ID NO: 772526 - RNA, 19 nt, Artificial Sequence
  Description of Artificial Sequence: Synthetic oligonucleotide
  Sense strand starting at position 142 of SEQ ID NO: 587178
uaaguucuacaacgacaga

SEQ ID NO: 772527 - RNA, 19 nt, Artificial Sequence
  Description of Artificial Sequence: Synthetic oligonucleotide
  Antisense strand to SEQ ID NO: 772526
ucugucguuguagaacuua

SEQ ID NO: 772528 - RNA, 19 nt, Artificial Sequence
  Description of Artificial Sequence: Synthetic oligonucleotide
  Sense strand starting at position 172 of SEQ ID NO: 587178
uaaggcauaguuugggauu

SEQ ID NO: 772529 - RNA, 19 nt, Artificial Sequence
  Description of Artificial Sequence: Synthetic oligonucleotide
  Antisense strand to SEQ ID NO: 772528
aaucccaaacuaugccuua

SEQ ID NO: 772530 - RNA, 19 nt, Artificial Sequence
  Description of Artificial Sequence: Synthetic oligonucleotide
  Sense strand starting at position 540 of SEQ ID NO: 587178
ugacgacauguagguaauu

SEQ ID NO: 772531 - RNA, 19 nt, Artificial Sequence
  Description of Artificial Sequence: Synthetic oligonucleotide
  Antisense strand to SEQ ID NO: 772530
aauuaccuacaugucguca

SEQ ID NO: 772532 - RNA, 19 nt, Artificial Sequence
  Description of Artificial Sequence: Synthetic oligonucleotide
  Sense strand starting at position 542 of SEQ ID NO: 587178
acgacauguagguaauugu

SEQ ID NO: 772533 - RNA, 19 nt, Artificial Sequence
  Description of Artificial Sequence: Synthetic oligonucleotide
  Antisense strand to SEQ ID NO: 772532
acaauuaccuacaugucgu

SEQ ID NO: 772534 - RNA, 19 nt, Artificial Sequence
  Description of Artificial Sequence: Synthetic oligonucleotide
  Sense strand starting at position 722 of SEQ ID NO: 587178
cuguuaacuuccuugaaag

SEQ ID NO: 772535 - RNA, 19 nt, Artificial Sequence
  Description of Artificial Sequence: Synthetic oligonucleotide
  Antisense strand to SEQ ID NO: 772534
cuuucaaggaaguuaacag

SEQ ID NO: 772536 - RNA, 19 nt, Artificial Sequence
  Description of Artificial Sequence: Synthetic oligonucleotide
  Sense strand starting at position 723 of SEQ ID NO: 587178
uguuaacuuccuugaaagc

SEQ ID NO: 772537 - RNA, 19 nt, Artificial Sequence
  Description of Artificial Sequence: Synthetic oligonucleotide
  Antisense strand to SEQ ID NO: 772536
gcuuucaaggaaguuaaca

SEQ ID NO: 772538 - RNA, 19 nt, Artificial Sequence
  Description of Artificial Sequence: Synthetic oligonucleotide
  Sense strand starting at position 724 of SEQ ID NO: 587178
guuaacuuccuugaaagca

SEQ ID NO: 772539 - RNA, 19 nt, Artificial Sequence
  Description of Artificial Sequence: Synthetic oligonucleotide
  Antisense strand to SEQ ID NO: 772538
ugcuuucaaggaaguuaac

SEQ ID NO: 772540 - RNA, 19 nt, Artificial Sequence
  Description of Artificial Sequence: Synthetic oligonucleotide
  Sense strand starting at position 790 of SEQ ID NO: 587178
acgcacuuucuacaagaau

SEQ ID NO: 772541 - RNA, 19 nt, Artificial Sequence
  Description of Artificial Sequence: Synthetic oligonucleotide
  Antisense strand to SEQ ID NO: 772540
auucuuguagaaagugcgu

SEQ ID NO: 772542 - RNA, 19 nt, Artificial Sequence
  Description of Artificial Sequence: Synthetic oligonucleotide
  Sense strand starting at position 822 of SEQ ID NO: 587178
cccugcucauggucaaauu

SEQ ID NO: 772543 - RNA, 19 nt, Artificial Sequence
  Description of Artificial Sequence: Synthetic oligonucleotide
  Antisense strand to SEQ ID NO: 772542
aauuugaccaugagcaggg

SEQ ID NO: 772544 - RNA, 19 nt, Artificial Sequence
  Description of Artificial Sequence: Synthetic oligonucleotide
  Sense strand starting at position 882 of SEQ ID NO: 587178
cuaacaugauucucgaagu

SEQ ID NO: 772545 - RNA, 19 nt, Artificial Sequence
  Description of Artificial Sequence: Synthetic oligonucleotide
  Antisense strand to SEQ ID NO: 772544
acuucgagaaucauguuag

SEQ ID NO: 772546 - RNA, 19 nt, Artificial Sequence
  Description of Artificial Sequence: Synthetic oligonucleotide
  Sense strand starting at position 888 of SEQ ID NO: 587178
ugauucucgaaguguuucu

SEQ ID NO: 772547 - RNA, 19 nt, Artificial Sequence
  Description of Artificial Sequence: Synthetic oligonucleotide
  Antisense strand to SEQ ID NO: 772546
agaaacacuucgagaauca

SEQ ID NO: 772548 - RNA, 19 nt, Artificial Sequence
  Description of Artificial Sequence: Synthetic oligonucleotide
  Sense strand starting at position 1042 of SEQ ID NO: 587178
acuuaaagccuuggagauc

SEQ ID NO: 772549 - RNA, 19 nt, Artificial Sequence
  Description of Artificial Sequence: Synthetic oligonucleotide
  Antisense strand to SEQ ID NO: 772548
gaucuccaaggcuuuaagu

SEQ ID NO: 772550 - RNA, 19 nt, Artificial Sequence
  Description of Artificial Sequence: Synthetic oligonucleotide
  Sense strand starting at position 1080 of SEQ ID NO: 587178
acucucgauuuacaguuaa

SEQ ID NO: 772551 - RNA, 19 nt, Artificial Sequence
  Description of Artificial Sequence: Synthetic oligonucleotide
  Antisense strand to SEQ ID NO: 772550
uuaacuguaaaucgagagu

SEQ ID NO: 772552 - RNA, 19 nt, Artificial Sequence
  Description of Artificial Sequence: Synthetic oligonucleotide
  Sense strand starting at position 1156 of SEQ ID NO: 587178
agcugaaagcuucgugacu

SEQ ID NO: 772553 - RNA, 19 nt, Artificial Sequence
  Description of Artificial Sequence: Synthetic oligonucleotide
  Antisense strand to SEQ ID NO: 772552
agucacgaagcuuucagcu

SEQ ID NO: 772554 - RNA, 19 nt, Artificial Sequence
  Description of Artificial Sequence: Synthetic oligonucleotide
  Sense strand starting at position 1309 of SEQ ID NO: 587178
gcaacugcacuguagauaa

SEQ ID NO: 772555 - RNA, 19 nt, Artificial Sequence
  Description of Artificial Sequence: Synthetic oligonucleotide
  Antisense strand to SEQ ID NO: 772554
uuaucuacagugcaguugc

SEQ ID NO: 772556 - RNA, 19 nt, Artificial Sequence
  Description of Artificial Sequence: Synthetic oligonucleotide
  Sense strand starting at position 1597 of SEQ ID NO: 587178
uaaagcaagcgucagagaa

SEQ ID NO: 772557 - RNA, 19 nt, Artificial Sequence
  Description of Artificial Sequence: Synthetic oligonucleotide
  Antisense strand to SEQ ID NO: 772556
uucucugacgcuugcuuua

SEQ ID NO: 772558 - RNA, 19 nt, Artificial Sequence
  Description of Artificial Sequence: Synthetic oligonucleotide
  Sense strand starting at position 1601 of SEQ ID NO: 587178
gcaagcgucagagaaguuu

SEQ ID NO: 772559 - RNA, 19 nt, Artificial Sequence
  Description of Artificial Sequence: Synthetic oligonucleotide
  Antisense strand to SEQ ID NO: 772558
aaacuucucugacgcuugc

SEQ ID NO: 772560 - RNA, 19 nt, Artificial Sequence
  Description of Artificial Sequence: Synthetic oligonucleotide
  Sense strand starting at position 2221 of SEQ ID NO: 587178
ugcuaaaugcuuugaggga

SEQ ID NO: 772561 - RNA, 19 nt, Artificial Sequence
  Description of Artificial Sequence: Synthetic oligonucleotide
  Antisense strand to SEQ ID NO: 772560
ucccucaaagcauuuagca

SEQ ID NO: 772562 - RNA, 19 nt, Artificial Sequence
  Description of Artificial Sequence: Synthetic oligonucleotide
  Sense strand starting at position 2372 of SEQ ID NO: 587178
ugggaacaguuuccauauc

SEQ ID NO: 772563 - RNA, 19 nt, Artificial Sequence
  Description of Artificial Sequence: Synthetic oligonucleotide
  Antisense strand to SEQ ID NO: 772562
gauauggaaacuguuccca

SEQ ID NO: 772564 - RNA, 19 nt, Artificial Sequence
  Description of Artificial Sequence: Synthetic oligonucleotide
  Sense strand starting at position 2448 of SEQ ID NO: 587178
guaaucaugugccuuggaa

SEQ ID NO: 772565 - RNA, 19 nt, Artificial Sequence
  Description of Artificial Sequence: Synthetic oligonucleotide
  Antisense strand to SEQ ID NO: 772564
uuccaaggcacaugauuac

SEQ ID NO: 772566 - RNA, 19 nt, Artificial Sequence
  Description of Artificial Sequence: Synthetic oligonucleotide
  Sense strand starting at position 2450 of SEQ ID NO: 587178
aaucaugugccuuggaaag

SEQ ID NO: 772567 - RNA, 19 nt, Artificial Sequence
  Description of Artificial Sequence: Synthetic oligonucleotide
  Antisense strand to SEQ ID NO: 772566
cuuuccaaggcacaugauu

SEQ ID NO: 772568 - RNA, 19 nt, Artificial Sequence
  Description of Artificial Sequence: Synthetic oligonucleotide
  Sense strand starting at position 2500 of SEQ ID NO: 587178
guccucaugcuacauguaa

SEQ ID NO: 772569 - RNA, 19 nt, Artificial Sequence
  Description of Artificial Sequence: Synthetic oligonucleotide
  Antisense strand to SEQ ID NO: 772568
uuacauguagcaugaggac

SEQ ID NO: 772570 - RNA, 19 nt, Artificial Sequence
  Description of Artificial Sequence: Synthetic oligonucleotide
  Sense strand starting at position 2512 of SEQ ID NO: 587178
cauguaagacgaugugucu

SEQ ID NO: 772571 - RNA, 19 nt, Artificial Sequence
  Description of Artificial Sequence: Synthetic oligonucleotide
  Antisense strand to SEQ ID NO: 772570
agacacaucgucuuacaug

SEQ ID NO: 772572 - RNA, 19 nt, Artificial Sequence
  Description of Artificial Sequence: Synthetic oligonucleotide
  Sense strand starting at position 2518 of SEQ ID NO: 587178
agacgaugugucuggaauu

SEQ ID NO: 772573 - RNA, 19 nt, Artificial Sequence
  Description of Artificial Sequence: Synthetic oligonucleotide
  Antisense strand to SEQ ID NO: 772572
aauuccagacacaucgucu

SEQ ID NO: 772574 - RNA, 19 nt, Artificial Sequence
  Description of Artificial Sequence: Synthetic oligonucleotide
  Sense strand starting at position 2561 of SEQ ID NO: 587178
accauuuaaucgccaugua

SEQ ID NO: 772575 - RNA, 19 nt, Artificial Sequence
  Description of Artificial Sequence: Synthetic oligonucleotide
  Antisense strand to SEQ ID NO: 772574
uacauggcgauuaaauggu

SEQ ID NO: 772576 - RNA, 19 nt, Artificial Sequence
  Description of Artificial Sequence: Synthetic oligonucleotide
  Sense strand starting at position 2564 of SEQ ID NO: 587178
auuuaaucgccauguacuu

SEQ ID NO: 772577 - RNA, 19 nt, Artificial Sequence
  Description of Artificial Sequence: Synthetic oligonucleotide
  Antisense strand to SEQ ID NO: 772576
aaguacauggcgauuaaau

SEQ ID NO: 772578 - RNA, 19 nt, Artificial Sequence
  Description of Artificial Sequence: Synthetic oligonucleotide
  Sense strand starting at position 2631 of SEQ ID NO: 587178
accauugucucucuggaga

SEQ ID NO: 772579 - RNA, 19 nt, Artificial Sequence
  Description of Artificial Sequence: Synthetic oligonucleotide
  Antisense strand to SEQ ID NO: 772578
ucuccagagagacaauggu

SEQ ID NO: 772580 - RNA, 19 nt, Artificial Sequence
  Description of Artificial Sequence: Synthetic oligonucleotide
  Sense strand starting at position 2681 of SEQ ID NO: 587178
cgugaaguguuuccucuga

SEQ ID NO: 772581 - RNA, 19 nt, Artificial Sequence
  Description of Artificial Sequence: Synthetic oligonucleotide
  Antisense strand to SEQ ID NO: 772580
ucagaggaaacacuucacg

SEQ ID NO: 772582 - RNA, 19 nt, Artificial Sequence
  Description of Artificial Sequence: Synthetic oligonucleotide
  Sense strand starting at position 2683 of SEQ ID NO: 587178
ugaaguguuuccucugaga

SEQ ID NO: 772583 - RNA, 19 nt, Artificial Sequence
  Description of Artificial Sequence: Synthetic oligonucleotide
  Antisense strand to SEQ ID NO: 772582
ucucagaggaaacacuuca

SEQ ID NO: 772584 - RNA, 19 nt, Artificial Sequence
  Description of Artificial Sequence: Synthetic oligonucleotide
  Sense strand starting at position 2685 of SEQ ID NO: 587178
aaguguuuccucugagaac

SEQ ID NO: 772585 - RNA, 19 nt, Artificial Sequence
  Description of Artificial Sequence: Synthetic oligonucleotide
  Antisense strand to SEQ ID NO: 772584
guucucagaggaaacacuu

SEQ ID NO: 772586 - RNA, 19 nt, Artificial Sequence
  Description of Artificial Sequence: Synthetic oligonucleotide
  Sense strand starting at position 3063 of SEQ ID NO: 587178
ucuacauccucagagagau

SEQ ID NO: 772587 - RNA, 19 nt, Artificial Sequence
  Description of Artificial Sequence: Synthetic oligonucleotide
  Antisense strand to SEQ ID NO: 772586
aucucucugaggauguaga

SEQ ID NO: 772588 - RNA, 19 nt, Artificial Sequence
  Description of Artificial Sequence: Synthetic oligonucleotide
  Sense strand starting at position 3139 of SEQ ID NO: 587178
cguuacccugcuggaaauu

SEQ ID NO: 772589 - RNA, 19 nt, Artificial Sequence
  Description of Artificial Sequence: Synthetic oligonucleotide
  Antisense strand to SEQ ID NO: 772588
aauuuccagcaggguaacg

SEQ ID NO: 772590 - RNA, 19 nt, Artificial Sequence
  Description of Artificial Sequence: Synthetic oligonucleotide
  Sense strand starting at position 3234 of SEQ ID NO: 587178
acugaaaugucugucuacu

SEQ ID NO: 772591 - RNA, 19 nt, Artificial Sequence
  Description of Artificial Sequence: Synthetic oligonucleotide
  Antisense strand to SEQ ID NO: 772590
aguagacagacauuucagu

SEQ ID NO: 772592 - RNA, 19 nt, Artificial Sequence
  Description of Artificial Sequence: Synthetic oligonucleotide
  Sense strand starting at position 3236 of SEQ ID NO: 587178
ugaaaugucugucuacugu

SEQ ID NO: 772593 - RNA, 19 nt, Artificial Sequence
  Description of Artificial Sequence: Synthetic oligonucleotide
  Antisense strand to SEQ ID NO: 772592
acaguagacagacauuuca

SEQ ID NO: 772594 - RNA, 19 nt, Artificial Sequence
  Description of Artificial Sequence: Synthetic oligonucleotide
  Sense strand starting at position 3347 of SEQ ID NO: 587178
aggcauuauuuccagggca

SEQ ID NO: 772595 - RNA, 19 nt, Artificial Sequence
  Description of Artificial Sequence: Synthetic oligonucleotide
  Antisense strand to SEQ ID NO: 772594
ugcccuggaaauaaugccu

SEQ ID NO: 772596 - RNA, 19 nt, Artificial Sequence
  Description of Artificial Sequence: Synthetic oligonucleotide
  Sense strand starting at position 3377 of SEQ ID NO: 587178
gggcacgucacugaaucau

SEQ ID NO: 772597 - RNA, 19 nt, Artificial Sequence
  Description of Artificial Sequence: Synthetic oligonucleotide
  Antisense strand to SEQ ID NO: 772596
augauucagugacgugccc

SEQ ID NO: 772598 - RNA, 19 nt, Artificial Sequence
  Description of Artificial Sequence: Synthetic oligonucleotide
  Sense strand starting at position 3862 of SEQ ID NO: 587178
ugcugaggucauuaaacag

SEQ ID NO: 772599 - RNA, 19 nt, Artificial Sequence
  Description of Artificial Sequence: Synthetic oligonucleotide
  Antisense strand to SEQ ID NO: 772598
cuguuuaaugaccucagca

SEQ ID NO: 772600 - RNA, 19 nt, Artificial Sequence
  Description of Artificial Sequence: Synthetic oligonucleotide
  Sense strand starting at position 3944 of SEQ ID NO: 587178
gcauguugccagguagcuu

SEQ ID NO: 772601 - RNA, 19 nt, Artificial Sequence
  Description of Artificial Sequence: Synthetic oligonucleotide
  Antisense strand to SEQ ID NO: 772600
aagcuaccuggcaacaugc

SEQ ID NO: 772602 - RNA, 19 nt, Artificial Sequence
  Description of Artificial Sequence: Synthetic oligonucleotide
  Sense strand starting at position 203 of SEQ ID NO: 587179
gagacuguccuaugggaga

SEQ ID NO: 772603 - RNA, 19 nt, Artificial Sequence
  Description of Artificial Sequence: Synthetic oligonucleotide
  Antisense strand to SEQ ID NO: 772602
ucucccauaggacagucuc

SEQ ID NO: 772604 - RNA, 19 nt, Artificial Sequence
  Description of Artificial Sequence: Synthetic oligonucleotide
  Sense strand starting at position 395 of SEQ ID NO: 587179
ugguaagaucucugugccu

SEQ ID NO: 772605 - RNA, 19 nt, Artificial Sequence
  Description of Artificial Sequence: Synthetic oligonucleotide
  Antisense strand to SEQ ID NO: 772604
aggcacagagaucuuacca

SEQ ID NO: 772606 - RNA, 19 nt, Artificial Sequence
  Description of Artificial Sequence: Synthetic oligonucleotide
  Sense strand starting at position 397 of SEQ ID NO: 587179
guaagaucucugugccuag

SEQ ID NO: 772607 - RNA, 19 nt, Artificial Sequence
  Description of Artificial Sequence: Synthetic oligonucleotide
  Antisense strand to SEQ ID NO: 772606
cuaggcacagagaucuuac

SEQ ID NO: 772608 - RNA, 19 nt, Artificial Sequence
  Description of Artificial Sequence: Synthetic oligonucleotide
  Sense strand starting at position 408 of SEQ ID NO: 587179
gugccuagggaagauuauu

SEQ ID NO: 772609 - RNA, 19 nt, Artificial Sequence
  Description of Artificial Sequence: Synthetic oligonucleotide
  Antisense strand to SEQ ID NO: 772608
aauaaucuucccuaggcac

SEQ ID NO: 772610 - RNA, 19 nt, Artificial Sequence
  Description of Artificial Sequence: Synthetic oligonucleotide
  Sense strand starting at position 469 of SEQ ID NO: 587179
ggaugauucuuugcuuucu

SEQ ID NO: 772611 - RNA, 19 nt, Artificial Sequence
  Description of Artificial Sequence: Synthetic oligonucleotide
  Antisense strand to SEQ ID NO: 772610
agaaagcaaagaaucaucc

SEQ ID NO: 772612 - RNA, 19 nt, Artificial Sequence
  Description of Artificial Sequence: Synthetic oligonucleotide
  Sense strand starting at position 482 of SEQ ID NO: 587179
cuuucuucuccugggaaau

SEQ ID NO: 772613 - RNA, 19 nt, Artificial Sequence
  Description of Artificial Sequence: Synthetic oligonucleotide
  Antisense strand to SEQ ID NO: 772612
auuucccaggagaagaaag

SEQ ID NO: 772614 - RNA, 19 nt, Artificial Sequence
  Description of Artificial Sequence: Synthetic oligonucleotide
  Sense strand starting at position 483 of SEQ ID NO: 587179
uuucuucuccugggaaaua

SEQ ID NO: 772615 - RNA, 19 nt, Artificial Sequence
  Description of Artificial Sequence: Synthetic oligonucleotide
  Antisense strand to SEQ ID NO: 772614
uauuucccaggagaagaaa

SEQ ID NO: 772616 - RNA, 19 nt, Artificial Sequence
  Description of Artificial Sequence: Synthetic oligonucleotide
  Sense strand starting at position 607 of SEQ ID NO: 587179
ggaugaggaaguuggcauu

SEQ ID NO: 772617 - RNA, 19 nt, Artificial Sequence
  Description of Artificial Sequence: Synthetic oligonucleotide
  Antisense strand to SEQ ID NO: 772616
aaugccaacuuccucaucc

SEQ ID NO: 772618 - RNA, 19 nt, Artificial Sequence
  Description of Artificial Sequence: Synthetic oligonucleotide
  Sense strand starting at position 699 of SEQ ID NO: 587179
gggaguagucuugagacuc

SEQ ID NO: 772619 - RNA, 19 nt, Artificial Sequence
  Description of Artificial Sequence: Synthetic oligonucleotide
  Antisense strand to SEQ ID NO: 772618
gagucucaagacuacuccc

SEQ ID NO: 772620 - RNA, 19 nt, Artificial Sequence
  Description of Artificial Sequence: Synthetic oligonucleotide
  Sense strand starting at position 1392 of SEQ ID NO: 587179
ggugcucuauaauuuguga

SEQ ID NO: 772621 - RNA, 19 nt, Artificial Sequence
  Description of Artificial Sequence: Synthetic oligonucleotide
  Antisense strand to SEQ ID NO: 772620
ucacaaauuauagagcacc

SEQ ID NO: 772622 - RNA, 19 nt, Artificial Sequence
  Description of Artificial Sequence: Synthetic oligonucleotide
  Sense strand starting at position 1396 of SEQ ID NO: 587179
cucuauaauuugugaauga

SEQ ID NO: 772623 - RNA, 19 nt, Artificial Sequence
  Description of Artificial Sequence: Synthetic oligonucleotide
  Antisense strand to SEQ ID NO: 772622
ucauucacaaauuauagag

SEQ ID NO: 772624 - RNA, 19 nt, Artificial Sequence
  Description of Artificial Sequence: Synthetic oligonucleotide
  Sense strand starting at position 1397 of SEQ ID NO: 587179
ucuauaauuugugaaugac

SEQ ID NO: 772625 - RNA, 19 nt, Artificial Sequence
  Description of Artificial Sequence: Synthetic oligonucleotide
  Antisense strand to SEQ ID NO: 772624
gucauucacaaauuauaga

SEQ ID NO: 772626 - RNA, 19 nt, Artificial Sequence
  Description of Artificial Sequence: Synthetic oligonucleotide
  Sense strand starting at position 1407 of SEQ ID NO: 587179
gugaaugacugucugauua

SEQ ID NO: 772627 - RNA, 19 nt, Artificial Sequence
  Description of Artificial Sequence: Synthetic oligonucleotide
  Antisense strand to SEQ ID NO: 772626
uaaucagacagucauucac

SEQ ID NO: 772628 - RNA, 19 nt, Artificial Sequence
  Description of Artificial Sequence: Synthetic oligonucleotide
  Sense strand starting at position 1411 of SEQ ID NO: 587179
augacugucugauuaaauu

SEQ ID NO: 772629 - RNA, 19 nt, Artificial Sequence
  Description of Artificial Sequence: Synthetic oligonucleotide
  Antisense strand to SEQ ID NO: 772628
aauuuaaucagacagucau

SEQ ID NO: 772630 - RNA, 19 nt, Artificial Sequence
  Description of Artificial Sequence: Synthetic oligonucleotide
  Sense strand starting at position 1503 of SEQ ID NO: 587179
agcucuuccuagucaugaa

SEQ ID NO: 772631 - RNA, 19 nt, Artificial Sequence
  Description of Artificial Sequence: Synthetic oligonucleotide
  Antisense strand to SEQ ID NO: 772630
uucaugacuaggaagagcu

SEQ ID NO: 772632 - RNA, 19 nt, Artificial Sequence
  Description of Artificial Sequence: Synthetic oligonucleotide
  Sense strand starting at position 1529 of SEQ ID NO: 587179
ucccgagucaucgaggaga

SEQ ID NO: 772633 - RNA, 19 nt, Artificial Sequence
  Description of Artificial Sequence: Synthetic oligonucleotide
  Antisense strand to SEQ ID NO: 772632
ucuccucgaugacucggga

SEQ ID NO: 772634 - RNA, 19 nt, Artificial Sequence
  Description of Artificial Sequence: Synthetic oligonucleotide
  Sense strand starting at position 1531 of SEQ ID NO: 587179
ccgagucaucgaggagaga

SEQ ID NO: 772635 - RNA, 19 nt, Artificial Sequence
  Description of Artificial Sequence: Synthetic oligonucleotide
  Antisense strand to SEQ ID NO: 772634
ucucuccucgaugacucgg

SEQ ID NO: 772636 - RNA, 19 nt, Artificial Sequence
  Description of Artificial Sequence: Synthetic oligonucleotide
  Sense strand starting at position 1532 of SEQ ID NO: 587179
cgagucaucgaggagagau

SEQ ID NO: 772637 - RNA, 19 nt, Artificial Sequence
  Description of Artificial Sequence: Synthetic oligonucleotide
  Antisense strand to SEQ ID NO: 772636
aucucuccucgaugacucg

SEQ ID NO: 772638 - RNA, 19 nt, Artificial Sequence
  Description of Artificial Sequence: Synthetic oligonucleotide
  Sense strand starting at position 2050 of SEQ ID NO: 587179
cugauuggaggauguuuaa

SEQ ID NO: 772639 - RNA, 19 nt, Artificial Sequence
  Description of Artificial Sequence: Synthetic oligonucleotide
  Antisense strand to SEQ ID NO: 772638
uuaaacauccuccaaucag

SEQ ID NO: 772640 - RNA, 19 nt, Artificial Sequence
  Description of Artificial Sequence: Synthetic oligonucleotide
  Sense strand starting at position 2094 of SEQ ID NO: 587179
gacagaaggugugcucagu

SEQ ID NO: 772641 - RNA, 19 nt, Artificial Sequence
  Description of Artificial Sequence: Synthetic oligonucleotide
  Antisense strand to SEQ ID NO: 772640
acugagcacaccuucuguc

SEQ ID NO: 772642 - RNA, 19 nt, Artificial Sequence
  Description of Artificial Sequence: Synthetic oligonucleotide
  Sense strand starting at position 2107 of SEQ ID NO: 587179
cucaguugcugggcugaaa

SEQ ID NO: 772643 - RNA, 19 nt, Artificial Sequence
  Description of Artificial Sequence: Synthetic oligonucleotide
  Antisense strand to SEQ ID NO: 772642
uuucagcccagcaacugag

SEQ ID NO: 772644 - RNA, 19 nt, Artificial Sequence
  Description of Artificial Sequence: Synthetic oligonucleotide
  Sense strand starting at position 2164 of SEQ ID NO: 587179
agggcuuccucccugaacu

SEQ ID NO: 772645 - RNA, 19 nt, Artificial Sequence
  Description of Artificial Sequence: Synthetic oligonucleotide
  Antisense strand to SEQ ID NO: 772644
aguucagggaggaagcccu

SEQ ID NO: 772646 - RNA, 19 nt, Artificial Sequence
  Description of Artificial Sequence: Synthetic oligonucleotide
  Sense strand starting at position 2252 of SEQ ID NO: 587179
aauaguauagugugugaaa

SEQ ID NO: 772647 - RNA, 19 nt, Artificial Sequence
  Description of Artificial Sequence: Synthetic oligonucleotide
  Antisense strand to SEQ ID NO: 772646
uuucacacacuauacuauu

SEQ ID NO: 772648 - RNA, 19 nt, Artificial Sequence
  Description of Artificial Sequence: Synthetic oligonucleotide
  Sense strand starting at position 2253 of SEQ ID NO: 587179
auaguauagugugugaaag

SEQ ID NO: 772649 - RNA, 19 nt, Artificial Sequence
  Description of Artificial Sequence: Synthetic oligonucleotide
  Antisense strand to SEQ ID NO: 772648
cuuucacacacuauacuau

SEQ ID NO: 772650 - RNA, 19 nt, Artificial Sequence
  Description of Artificial Sequence: Synthetic oligonucleotide
  Sense strand starting at position 2380 of SEQ ID NO: 587179
cacugagaugauugcauau

SEQ ID NO: 772651 - RNA, 19 nt, Artificial Sequence
  Description of Artificial Sequence: Synthetic oligonucleotide
  Antisense strand to SEQ ID NO: 772650
auaugcaaucaucucagug

SEQ ID NO: 772652 - RNA, 19 nt, Artificial Sequence
  Description of Artificial Sequence: Synthetic oligonucleotide
  Sense strand starting at position 2645 of SEQ ID NO: 587179
uccagaguagcuggcuaau

SEQ ID NO: 772653 - RNA, 19 nt, Artificial Sequence
  Description of Artificial Sequence: Synthetic oligonucleotide
  Antisense strand to SEQ ID NO: 772652
auuagccagcuacucugga

SEQ ID NO: 772654 - RNA, 19 nt, Artificial Sequence
  Description of Artificial Sequence: Synthetic oligonucleotide
  Sense strand starting at position 2647 of SEQ ID NO: 587179
cagaguagcuggcuaauuu

SEQ ID NO: 772655 - RNA, 19 nt, Artificial Sequence
  Description of Artificial Sequence: Synthetic oligonucleotide
  Antisense strand to SEQ ID NO: 772654
aaauuagccagcuacucug

SEQ ID NO: 772656 - RNA, 19 nt, Artificial Sequence
  Description of Artificial Sequence: Synthetic oligonucleotide
  Sense strand starting at position 2960 of SEQ ID NO: 587179
cggaguuaauucucugaaa

SEQ ID NO: 772657 - RNA, 19 nt, Artificial Sequence
  Description of Artificial Sequence: Synthetic oligonucleotide
  Antisense strand to SEQ ID NO: 772656
uuucagagaauuaacuccg

SEQ ID NO: 772658 - RNA, 19 nt, Artificial Sequence
  Description of Artificial Sequence: Synthetic oligonucleotide
  Sense strand starting at position 2961 of SEQ ID NO: 587179
ggaguuaauucucugaaau

SEQ ID NO: 772659 - RNA, 19 nt, Artificial Sequence
  Description of Artificial Sequence: Synthetic oligonucleotide
  Antisense strand to SEQ ID NO: 772658
auuucagagaauuaacucc

SEQ ID NO: 772660 - RNA, 19 nt, Artificial Sequence
  Description of Artificial Sequence: Synthetic oligonucleotide
  Sense strand starting at position 2981 of SEQ ID NO: 587179
aaauguaagccacauguga

SEQ ID NO: 772661 - RNA, 19 nt, Artificial Sequence
  Description of Artificial Sequence: Synthetic oligonucleotide
  Antisense strand to SEQ ID NO: 772660
ucacauguggcuuacauuu

SEQ ID NO: 772662 - RNA, 19 nt, Artificial Sequence
  Description of Artificial Sequence: Synthetic oligonucleotide
  Sense strand starting at position 3047 of SEQ ID NO: 587179
gguggaauuuauuguaaca

SEQ ID NO: 772663 - RNA, 19 nt, Artificial Sequence
  Description of Artificial Sequence: Synthetic oligonucleotide
  Antisense strand to SEQ ID NO: 772662
uguuacaauaaauuccacc

SEQ ID NO: 772664 - RNA, 19 nt, Artificial Sequence
  Description of Artificial Sequence: Synthetic oligonucleotide
  Sense strand starting at position 3125 of SEQ ID NO: 587179
uuuaauaugugagcaguau

SEQ ID NO: 772665 - RNA, 19 nt, Artificial Sequence
  Description of Artificial Sequence: Synthetic oligonucleotide
  Antisense strand to SEQ ID NO: 772664
auacugcucacauauuaaa

SEQ ID NO: 772666 - RNA, 19 nt, Artificial Sequence
  Description of Artificial Sequence: Synthetic oligonucleotide
  Sense strand starting at position 3126 of SEQ ID NO: 587179
uuaauaugugagcaguaug

SEQ ID NO: 772667 - RNA, 19 nt, Artificial Sequence
  Description of Artificial Sequence: Synthetic oligonucleotide
  Antisense strand to SEQ ID NO: 772666
cauacugcucacauauuaa

SEQ ID NO: 772668 - RNA, 19 nt, Artificial Sequence
  Description of Artificial Sequence: Synthetic oligonucleotide
  Sense strand starting at position 3129 of SEQ ID NO: 587179
auaugugagcaguauguaa

SEQ ID NO: 772669 - RNA, 19 nt, Artificial Sequence
  Description of Artificial Sequence: Synthetic oligonucleotide
  Antisense strand to SEQ ID NO: 772668
uuacauacugcucacauau

SEQ ID NO: 772670 - RNA, 19 nt, Artificial Sequence
  Description of Artificial Sequence: Synthetic oligonucleotide
  Sense strand starting at position 3131 of SEQ ID NO: 587179
augugagcaguauguaauu

SEQ ID NO: 772671 - RNA, 19 nt, Artificial Sequence
  Description of Artificial Sequence: Synthetic oligonucleotide
  Antisense strand to SEQ ID NO: 772670
aauuacauacugcucacau

SEQ ID NO: 772672 - RNA, 19 nt, Artificial Sequence
  Description of Artificial Sequence: Synthetic oligonucleotide
  Sense strand starting at position 3610 of SEQ ID NO: 587179
gagggucucacuuacggaa

SEQ ID NO: 772673 - RNA, 19 nt, Artificial Sequence
  Description of Artificial Sequence: Synthetic oligonucleotide
  Antisense strand to SEQ ID NO: 772672
uuccguaagugagacccuc

SEQ ID NO: 772674 - RNA, 19 nt, Artificial Sequence
  Description of Artificial Sequence: Synthetic oligonucleotide
  Sense strand starting at position 3687 of SEQ ID NO: 587179
cuacaucaaugagaagaaa

SEQ ID NO: 772675 - RNA, 19 nt, Artificial Sequence
  Description of Artificial Sequence: Synthetic oligonucleotide
  Antisense strand to SEQ ID NO: 772674
uuucuucucauugauguag

SEQ ID NO: 772676 - RNA, 19 nt, Artificial Sequence
  Description of Artificial Sequence: Synthetic oligonucleotide
  Sense strand starting at position 3849 of SEQ ID NO: 587179
guggcauaggguuacagua

SEQ ID NO: 772677 - RNA, 19 nt, Artificial Sequence
  Description of Artificial Sequence: Synthetic oligonucleotide
  Antisense strand to SEQ ID NO: 772676
uacuguaacccuaugccac

SEQ ID NO: 772678 - RNA, 19 nt, Artificial Sequence
  Description of Artificial Sequence: Synthetic oligonucleotide
  Sense strand starting at position 3858 of SEQ ID NO: 587179
gguuacaguauccguuaca

SEQ ID NO: 772679 - RNA, 19 nt, Artificial Sequence
  Description of Artificial Sequence: Synthetic oligonucleotide
  Antisense strand to SEQ ID NO: 772678
uguaacggauacuguaacc

SEQ ID NO: 772680 - RNA, 19 nt, Artificial Sequence
  Description of Artificial Sequence: Synthetic oligonucleotide
  Sense strand starting at position 3861 of SEQ ID NO: 587179
uacaguauccguuacagaa

SEQ ID NO: 772681 - RNA, 19 nt, Artificial Sequence
  Description of Artificial Sequence: Synthetic oligonucleotide
  Antisense strand to SEQ ID NO: 772680
uucuguaacggauacugua

SEQ ID NO: 772682 - RNA, 19 nt, Artificial Sequence
  Description of Artificial Sequence: Synthetic oligonucleotide
  Sense strand starting at position 101 of SEQ ID NO: 587180
uucugaaugguuugaagug

SEQ ID NO: 772683 - RNA, 19 nt, Artificial Sequence
  Description of Artificial Sequence: Synthetic oligonucleotide
  Antisense strand to SEQ ID NO: 772682
cacuucaaaccauucagaa

SEQ ID NO: 772684 - RNA, 19 nt, Artificial Sequence
  Description of Artificial Sequence: Synthetic oligonucleotide
  Sense strand starting at position 506 of SEQ ID NO: 587180
uaaguuagacugugagaua

SEQ ID NO: 772685 - RNA, 19 nt, Artificial Sequence
  Description of Artificial Sequence: Synthetic oligonucleotide
  Antisense strand to SEQ ID NO: 772684
uaucucacagucuaacuua

SEQ ID NO: 772686 - RNA, 19 nt, Artificial Sequence
  Description of Artificial Sequence: Synthetic oligonucleotide
  Sense strand starting at position 583 of SEQ ID NO: 587180
ccguaauagucuguuacca

SEQ ID NO: 772687 - RNA, 19 nt, Artificial Sequence
  Description of Artificial Sequence: Synthetic oligonucleotide
  Antisense strand to SEQ ID NO: 772686
ugguaacagacuauuacgg

SEQ ID NO: 772688 - RNA, 19 nt, Artificial Sequence
  Description of Artificial Sequence: Synthetic oligonucleotide
  Sense strand starting at position 591 of SEQ ID NO: 587180
gucuguuaccaucagauag

SEQ ID NO: 772689 - RNA, 19 nt, Artificial Sequence
  Description of Artificial Sequence: Synthetic oligonucleotide
  Antisense strand to SEQ ID NO: 772688
cuaucugaugguaacagac

SEQ ID NO: 772690 - RNA, 19 nt, Artificial Sequence
  Description of Artificial Sequence: Synthetic oligonucleotide
  Sense strand starting at position 635 of SEQ ID NO: 587180
aaaccauuaggguguuaaa

SEQ ID NO: 772691 - RNA, 19 nt, Artificial Sequence
  Description of Artificial Sequence: Synthetic oligonucleotide
  Antisense strand to SEQ ID NO: 772690
uuuaacacccuaaugguuu

SEQ ID NO: 772692 - RNA, 19 nt, Artificial Sequence
  Description of Artificial Sequence: Synthetic oligonucleotide
  Sense strand starting at position 658 of SEQ ID NO: 587180
auauuuaacucaggagacu

SEQ ID NO: 772693 - RNA, 19 nt, Artificial Sequence
  Description of Artificial Sequence: Synthetic oligonucleotide
  Antisense strand to SEQ ID NO: 772692
agucuccugaguuaaauau

SEQ ID NO: 772694 - RNA, 19 nt, Artificial Sequence
  Description of Artificial Sequence: Synthetic oligonucleotide
  Sense strand starting at position 667 of SEQ ID NO: 587180
ucaggagacuaccaaagau

SEQ ID NO: 772695 - RNA, 19 nt, Artificial Sequence
  Description of Artificial Sequence: Synthetic oligonucleotide
  Antisense strand to SEQ ID NO: 772694
aucuuugguagucuccuga

SEQ ID NO: 772696 - RNA, 19 nt, Artificial Sequence
  Description of Artificial Sequence: Synthetic oligonucleotide
  Sense strand starting at position 680 of SEQ ID NO: 587180
aaagauuuguuugguagag

SEQ ID NO: 772697 - RNA, 19 nt, Artificial Sequence
  Description of Artificial Sequence: Synthetic oligonucleotide
  Antisense strand to SEQ ID NO: 772696
cucuaccaaacaaaucuuu

SEQ ID NO: 772698 - RNA, 19 nt, Artificial Sequence
  Description of Artificial Sequence: Synthetic oligonucleotide
  Sense strand starting at position 682 of SEQ ID NO: 587180
agauuuguuugguagaggu

SEQ ID NO: 772699 - RNA, 19 nt, Artificial Sequence
  Description of Artificial Sequence: Synthetic oligonucleotide
  Antisense strand to SEQ ID NO: 772698
accucuaccaaacaaaucu

SEQ ID NO: 772700 - RNA, 19 nt, Artificial Sequence
  Description of Artificial Sequence: Synthetic oligonucleotide
  Sense strand starting at position 686 of SEQ ID NO: 587180
uuguuugguagagguacua

SEQ ID NO: 772701 - RNA, 19 nt, Artificial Sequence
  Description of Artificial Sequence: Synthetic oligonucleotide
  Antisense strand to SEQ ID NO: 772700
uaguaccucuaccaaacaa

SEQ ID NO: 772702 - RNA, 19 nt, Artificial Sequence
  Description of Artificial Sequence: Synthetic oligonucleotide
  Sense strand starting at position 771 of SEQ ID NO: 587180
cgcugagguaaauacuuaa

SEQ ID NO: 772703 - RNA, 19 nt, Artificial Sequence
  Description of Artificial Sequence: Synthetic oligonucleotide
  Antisense strand to SEQ ID NO: 772702
uuaaguauuuaccucagcg

SEQ ID NO: 772704 - RNA, 19 nt, Artificial Sequence
  Description of Artificial Sequence: Synthetic oligonucleotide
  Sense strand starting at position 841 of SEQ ID NO: 587180
gucgcaacagucugagaac

SEQ ID NO: 772705 - RNA, 19 nt, Artificial Sequence
  Description of Artificial Sequence: Synthetic oligonucleotide
  Antisense strand to SEQ ID NO: 772704
guucucagacuguugcgac

SEQ ID NO: 772706 - RNA, 19 nt, Artificial Sequence
  Description of Artificial Sequence: Synthetic oligonucleotide
  Sense strand starting at position 1282 of SEQ ID NO: 587180
ggcaaaucuguagagugga

SEQ ID NO: 772707 - RNA, 19 nt, Artificial Sequence
  Description of Artificial Sequence: Synthetic oligonucleotide
  Antisense strand to SEQ ID NO: 772706
uccacucuacagauuugcc

SEQ ID NO: 772708 - RNA, 19 nt, Artificial Sequence
  Description of Artificial Sequence: Synthetic oligonucleotide
  Sense strand starting at position 1313 of SEQ ID NO: 587180
ccagucugcgacuggaaau

SEQ ID NO: 772709 - RNA, 19 nt, Artificial Sequence
  Description of Artificial Sequence: Synthetic oligonucleotide
  Antisense strand to SEQ ID NO: 772708
auuuccagucgcagacugg

SEQ ID NO: 772710 - RNA, 19 nt, Artificial Sequence
  Description of Artificial Sequence: Synthetic oligonucleotide
  Sense strand starting at position 1385 of SEQ ID NO: 587180
caguguacuggugaggaga

SEQ ID NO: 772711 - RNA, 19 nt, Artificial Sequence
  Description of Artificial Sequence: Synthetic oligonucleotide
  Antisense strand to SEQ ID NO: 772710
ucuccucaccaguacacug

SEQ ID NO: 772712 - RNA, 19 nt, Artificial Sequence
  Description of Artificial Sequence: Synthetic oligonucleotide
  Sense strand starting at position 1398 of SEQ ID NO: 587180
aggagaaagagcugcuaau

SEQ ID NO: 772713 - RNA, 19 nt, Artificial Sequence
  Description of Artificial Sequence: Synthetic oligonucleotide
  Antisense strand to SEQ ID NO: 772712
auuagcagcucuuucuccu

SEQ ID NO: 772714 - RNA, 19 nt, Artificial Sequence
  Description of Artificial Sequence: Synthetic oligonucleotide
  Sense strand starting at position 2004 of SEQ ID NO: 587180
auaggacgcaaucaguaaa

SEQ ID NO: 772715 - RNA, 19 nt, Artificial Sequence
  Description of Artificial Sequence: Synthetic oligonucleotide
  Antisense strand to SEQ ID NO: 772714
uuuacugauugcguccuau

SEQ ID NO: 772716 - RNA, 19 nt, Artificial Sequence
  Description of Artificial Sequence: Synthetic oligonucleotide
  Sense strand starting at position 2174 of SEQ ID NO: 587180
guucgcuuaguucagugaa

SEQ ID NO: 772717 - RNA, 19 nt, Artificial Sequence
  Description of Artificial Sequence: Synthetic oligonucleotide
  Antisense strand to SEQ ID NO: 772716
uucacugaacuaagcgaac

SEQ ID NO: 772718 - RNA, 19 nt, Artificial Sequence
  Description of Artificial Sequence: Synthetic oligonucleotide
  Sense strand starting at position 2385 of SEQ ID NO: 587180
auuguugugagccggagaa

SEQ ID NO: 772719 - RNA, 19 nt, Artificial Sequence
  Description of Artificial Sequence: Synthetic oligonucleotide
  Antisense strand to SEQ ID NO: 772718
uucuccggcucacaacaau

SEQ ID NO: 772720 - RNA, 19 nt, Artificial Sequence
  Description of Artificial Sequence: Synthetic oligonucleotide
  Sense strand starting at position 2840 of SEQ ID NO: 587180
ggguuucucuccuuccuua

SEQ ID NO: 772721 - RNA, 19 nt, Artificial Sequence
  Description of Artificial Sequence: Synthetic oligonucleotide
  Antisense strand to SEQ ID NO: 772720
uaaggaaggagagaaaccc

SEQ ID NO: 772722 - RNA, 19 nt, Artificial Sequence
  Description of Artificial Sequence: Synthetic oligonucleotide
  Sense strand starting at position 3069 of SEQ ID NO: 587180
cucugcgaucccggauuua

SEQ ID NO: 772723 - RNA, 19 nt, Artificial Sequence
  Description of Artificial Sequence: Synthetic oligonucleotide
  Antisense strand to SEQ ID NO: 772722
uaaauccgggaucgcagag

SEQ ID NO: 772724 - RNA, 19 nt, Artificial Sequence
  Description of Artificial Sequence: Synthetic oligonucleotide
  Sense strand starting at position 3146 of SEQ ID NO: 587180
guucuuuggucuuuggaga

SEQ ID NO: 772725 - RNA, 19 nt, Artificial Sequence
  Description of Artificial Sequence: Synthetic oligonucleotide
  Antisense strand to SEQ ID NO: 772724
ucuccaaagaccaaagaac

SEQ ID NO: 772726 - RNA, 19 nt, Artificial Sequence
  Description of Artificial Sequence: Synthetic oligonucleotide
  Sense strand starting at position 3147 of SEQ ID NO: 587180
uucuuuggucuuuggagaa

SEQ ID NO: 772727 - RNA, 19 nt, Artificial Sequence
  Description of Artificial Sequence: Synthetic oligonucleotide
  Antisense strand to SEQ ID NO: 772726
uucuccaaagaccaaagaa

SEQ ID NO: 772728 - RNA, 19 nt, Artificial Sequence
  Description of Artificial Sequence: Synthetic oligonucleotide
  Sense strand starting at position 3168 of SEQ ID NO: 587180
acggguauuucagcagugu

SEQ ID NO: 772729 - RNA, 19 nt, Artificial Sequence
  Description of Artificial Sequence: Synthetic oligonucleotide
  Antisense strand to SEQ ID NO: 772728
acacugcugaaauacccgu

SEQ ID NO: 772730 - RNA, 19 nt, Artificial Sequence
  Description of Artificial Sequence: Synthetic oligonucleotide
  Sense strand starting at position 3169 of SEQ ID NO: 587180
cggguauuucagcaguguu

SEQ ID NO: 772731 - RNA, 19 nt, Artificial Sequence
  Description of Artificial Sequence: Synthetic oligonucleotide
  Antisense strand to SEQ ID NO: 772730
aacacugcugaaauacccg

SEQ ID NO: 772732 - RNA, 19 nt, Artificial Sequence
  Description of Artificial Sequence: Synthetic oligonucleotide
  Sense strand starting at position 3246 of SEQ ID NO: 587180
cagggcugcugagugauaa

SEQ ID NO: 772733 - RNA, 19 nt, Artificial Sequence
  Description of Artificial Sequence: Synthetic oligonucleotide
  Antisense strand to SEQ ID NO: 772732
uuaucacucagcagcccug

SEQ ID NO: 772734 - RNA, 19 nt, Artificial Sequence
  Description of Artificial Sequence: Synthetic oligonucleotide
  Sense strand starting at position 3247 of SEQ ID NO: 587180
agggcugcugagugauaaa

SEQ ID NO: 772735 - RNA, 19 nt, Artificial Sequence
  Description of Artificial Sequence: Synthetic oligonucleotide
  Antisense strand to SEQ ID NO: 772734
uuuaucacucagcagcccu

SEQ ID NO: 772736 - RNA, 19 nt, Artificial Sequence
  Description of Artificial Sequence: Synthetic oligonucleotide
  Sense strand starting at position 3277 of SEQ ID NO: 587180
aucggaaagccugguucuu

SEQ ID NO: 772737 - RNA, 19 nt, Artificial Sequence
  Description of Artificial Sequence: Synthetic oligonucleotide
  Antisense strand to SEQ ID NO: 772736
aagaaccaggcuuuccgau

SEQ ID NO: 772738 - RNA, 19 nt, Artificial Sequence
  Description of Artificial Sequence: Synthetic oligonucleotide
  Sense strand starting at position 3332 of SEQ ID NO: 587180
gacacuggcguucggagaa

SEQ ID NO: 772739 - RNA, 19 nt, Artificial Sequence
  Description of Artificial Sequence: Synthetic oligonucleotide
  Antisense strand to SEQ ID NO: 772738
uucuccgaacgccaguguc

SEQ ID NO: 772740 - RNA, 19 nt, Artificial Sequence
  Description of Artificial Sequence: Synthetic oligonucleotide
  Sense strand starting at position 3402 of SEQ ID NO: 587180
cauuaauguugacugauga

SEQ ID NO: 772741 - RNA, 19 nt, Artificial Sequence
  Description of Artificial Sequence: Synthetic oligonucleotide
  Antisense strand to SEQ ID NO: 772740
ucaucagucaacauuaaug

SEQ ID NO: 772742 - RNA, 19 nt, Artificial Sequence
  Description of Artificial Sequence: Synthetic oligonucleotide
  Sense strand starting at position 3403 of SEQ ID NO: 587180
auuaauguugacugaugaa

SEQ ID NO: 772743 - RNA, 19 nt, Artificial Sequence
  Description of Artificial Sequence: Synthetic oligonucleotide
  Antisense strand to SEQ ID NO: 772742
uucaucagucaacauuaau

SEQ ID NO: 772744 - RNA, 19 nt, Artificial Sequence
  Description of Artificial Sequence: Synthetic oligonucleotide
  Sense strand starting at position 3423 of SEQ ID NO: 587180
acaggagucucccuuccuu

SEQ ID NO: 772745 - RNA, 19 nt, Artificial Sequence
  Description of Artificial Sequence: Synthetic oligonucleotide
  Antisense strand to SEQ ID NO: 772744
aaggaagggagacuccugu

SEQ ID NO: 772746 - RNA, 19 nt, Artificial Sequence
  Description of Artificial Sequence: Synthetic oligonucleotide
  Sense strand starting at position 3529 of SEQ ID NO: 587180
gguugagacuauuaagaag

SEQ ID NO: 772747 - RNA, 19 nt, Artificial Sequence
  Description of Artificial Sequence: Synthetic oligonucleotide
  Antisense strand to SEQ ID NO: 772746
cuucuuaauagucucaacc

SEQ ID NO: 772748 - RNA, 19 nt, Artificial Sequence
  Description of Artificial Sequence: Synthetic oligonucleotide
  Sense strand starting at position 3734 of SEQ ID NO: 587180
uuaggugauguguagauau

SEQ ID NO: 772749 - RNA, 19 nt, Artificial Sequence
  Description of Artificial Sequence: Synthetic oligonucleotide
  Antisense strand to SEQ ID NO: 772748
auaucuacacaucaccuaa

SEQ ID NO: 772750 - RNA, 19 nt, Artificial Sequence
  Description of Artificial Sequence: Synthetic oligonucleotide
  Sense strand starting at position 3736 of SEQ ID NO: 587180
aggugauguguagauaucu

SEQ ID NO: 772751 - RNA, 19 nt, Artificial Sequence
  Description of Artificial Sequence: Synthetic oligonucleotide
  Antisense strand to SEQ ID NO: 772750
agauaucuacacaucaccu

SEQ ID NO: 772752 - RNA, 19 nt, Artificial Sequence
  Description of Artificial Sequence: Synthetic oligonucleotide
  Sense strand starting at position 3741 of SEQ ID NO: 587180
auguguagauaucugcuua

SEQ ID NO: 772753 - RNA, 19 nt, Artificial Sequence
  Description of Artificial Sequence: Synthetic oligonucleotide
  Antisense strand to SEQ ID NO: 772752
uaagcagauaucuacacau

SEQ ID NO: 772754 - RNA, 19 nt, Artificial Sequence
  Description of Artificial Sequence: Synthetic oligonucleotide
  Sense strand starting at position 3745 of SEQ ID NO: 587180
guagauaucugcuuauguu

SEQ ID NO: 772755 - RNA, 19 nt, Artificial Sequence
  Description of Artificial Sequence: Synthetic oligonucleotide
  Antisense strand to SEQ ID NO: 772754
aacauaagcagauaucuac

SEQ ID NO: 772756 - RNA, 19 nt, Artificial Sequence
  Description of Artificial Sequence: Synthetic oligonucleotide
  Sense strand starting at position 3939 of SEQ ID NO: 587180
ucuggauugugacuaauua

SEQ ID NO: 772757 - RNA, 19 nt, Artificial Sequence
  Description of Artificial Sequence: Synthetic oligonucleotide
  Antisense strand to SEQ ID NO: 772756
uaauuagucacaauccaga

SEQ ID NO: 772758 - RNA, 19 nt, Artificial Sequence
  Description of Artificial Sequence: Synthetic oligonucleotide
  Sense strand starting at position 3947 of SEQ ID NO: 587180
gugacuaauuaccaagaca

SEQ ID NO: 772759 - RNA, 19 nt, Artificial Sequence
  Description of Artificial Sequence: Synthetic oligonucleotide
  Antisense strand to SEQ ID NO: 772758
ugucuugguaauuagucac

SEQ ID NO: 772760 - RNA, 19 nt, Artificial Sequence
  Description of Artificial Sequence: Synthetic oligonucleotide
  Sense strand starting at position 3963 of SEQ ID NO: 587180
acaauaguuugaccugaac

SEQ ID NO: 772761 - RNA, 19 nt, Artificial Sequence
  Description of Artificial Sequence: Synthetic oligonucleotide
  Antisense strand to SEQ ID NO: 772760
guucaggucaaacuauugu

SEQ ID NO: 772762 - RNA, 19 nt, Artificial Sequence
  Description of Artificial Sequence: Synthetic oligonucleotide
  Sense strand starting at position 320 of SEQ ID NO: 587181
gguaaacuaauuggugcaa

SEQ ID NO: 772763 - RNA, 19 nt, Artificial Sequence
  Description of Artificial Sequence: Synthetic oligonucleotide
  Antisense strand to SEQ ID NO: 772762
uugcaccaauuaguuuacc

SEQ ID NO: 772764 - RNA, 19 nt, Artificial Sequence
  Description of Artificial Sequence: Synthetic oligonucleotide
  Sense strand starting at position 321 of SEQ ID NO: 587181
guaaacuaauuggugcaau

SEQ ID NO: 772765 - RNA, 19 nt, Artificial Sequence
  Description of Artificial Sequence: Synthetic oligonucleotide
  Antisense strand to SEQ ID NO: 772764
auugcaccaauuaguuuac

SEQ ID NO: 772766 - RNA, 19 nt, Artificial Sequence
  Description of Artificial Sequence: Synthetic oligonucleotide
  Sense strand starting at position 344 of SEQ ID NO: 587181
agcugagaccuauggcuaa

SEQ ID NO: 772767 - RNA, 19 nt, Artificial Sequence
  Description of Artificial Sequence: Synthetic oligonucleotide
  Antisense strand to SEQ ID NO: 772766
uuagccauaggucucagcu

SEQ ID NO: 772768 - RNA, 19 nt, Artificial Sequence
  Description of Artificial Sequence: Synthetic oligonucleotide
  Sense strand starting at position 388 of SEQ ID NO: 587181
guucacuggucaucuggga

SEQ ID NO: 772769 - RNA, 19 nt, Artificial Sequence
  Description of Artificial Sequence: Synthetic oligonucleotide
  Antisense strand to SEQ ID NO: 772768
ucccagaugaccagugaac

SEQ ID NO: 772770 - RNA, 19 nt, Artificial Sequence
  Description of Artificial Sequence: Synthetic oligonucleotide
  Sense strand starting at position 657 of SEQ ID NO: 587181
aucgccaggcccuguaaua

SEQ ID NO: 772771 - RNA, 19 nt, Artificial Sequence
  Description of Artificial Sequence: Synthetic oligonucleotide
  Antisense strand to SEQ ID NO: 772770
uauuacagggccuggcgau

SEQ ID NO: 772772 - RNA, 19 nt, Artificial Sequence
  Description of Artificial Sequence: Synthetic oligonucleotide
  Sense strand starting at position 679 of SEQ ID NO: 587181
guaagaggugcugguguuu

SEQ ID NO: 772773 - RNA, 19 nt, Artificial Sequence
  Description of Artificial Sequence: Synthetic oligonucleotide
  Antisense strand to SEQ ID NO: 772772
aaacaccagcaccucuuac

SEQ ID NO: 772774 - RNA, 19 nt, Artificial Sequence
  Description of Artificial Sequence: Synthetic oligonucleotide
  Sense strand starting at position 944 of SEQ ID NO: 587181
gagagucuucccugggcaa

SEQ ID NO: 772775 - RNA, 19 nt, Artificial Sequence
  Description of Artificial Sequence: Synthetic oligonucleotide
  Antisense strand to SEQ ID NO: 772774
uugcccagggaagacucuc

SEQ ID NO: 772776 - RNA, 19 nt, Artificial Sequence
  Description of Artificial Sequence: Synthetic oligonucleotide
  Sense strand starting at position 945 of SEQ ID NO: 587181
agagucuucccugggcaag

SEQ ID NO: 772777 - RNA, 19 nt, Artificial Sequence
  Description of Artificial Sequence: Synthetic oligonucleotide
  Antisense strand to SEQ ID NO: 772776
cuugcccagggaagacucu

SEQ ID NO: 772778 - RNA, 19 nt, Artificial Sequence
  Description of Artificial Sequence: Synthetic oligonucleotide
  Sense strand starting at position 1031 of SEQ ID NO: 587181
cacggagaucaucgaugga

SEQ ID NO: 772779 - RNA, 19 nt, Artificial Sequence
  Description of Artificial Sequence: Synthetic oligonucleotide
  Antisense strand to SEQ ID NO: 772778
uccaucgaugaucuccgug

SEQ ID NO: 772780 - RNA, 19 nt, Artificial Sequence
  Description of Artificial Sequence: Synthetic oligonucleotide
  Sense strand starting at position 1041 of SEQ ID NO: 587181
aucgauggagccugaagaa

SEQ ID NO: 772781 - RNA, 19 nt, Artificial Sequence
  Description of Artificial Sequence: Synthetic oligonucleotide
  Antisense strand to SEQ ID NO: 772780
uucuucaggcuccaucgau

SEQ ID NO: 772782 - RNA, 19 nt, Artificial Sequence
  Description of Artificial Sequence: Synthetic oligonucleotide
  Sense strand starting at position 1053 of SEQ ID NO: 587181
ugaagaaaugccuggugcu

SEQ ID NO: 772783 - RNA, 19 nt, Artificial Sequence
  Description of Artificial Sequence: Synthetic oligonucleotide
  Antisense strand to SEQ ID NO: 772782
agcaccaggcauuucuuca

SEQ ID NO: 772784 - RNA, 19 nt, Artificial Sequence
  Description of Artificial Sequence: Synthetic oligonucleotide
  Sense strand starting at position 1054 of SEQ ID NO: 587181
gaagaaaugccuggugcua

SEQ ID NO: 772785 - RNA, 19 nt, Artificial Sequence
  Description of Artificial Sequence: Synthetic oligonucleotide
  Antisense strand to SEQ ID NO: 772784
uagcaccaggcauuucuuc

SEQ ID NO: 772786 - RNA, 19 nt, Artificial Sequence
  Description of Artificial Sequence: Synthetic oligonucleotide
  Sense strand starting at position 1162 of SEQ ID NO: 587181
guuugucaaccgcaggaaa

SEQ ID NO: 772787 - RNA, 19 nt, Artificial Sequence
  Description of Artificial Sequence: Synthetic oligonucleotide
  Antisense strand to SEQ ID NO: 772786
uuuccugcgguugacaaac

SEQ ID NO: 772788 - RNA, 19 nt, Artificial Sequence
  Description of Artificial Sequence: Synthetic oligonucleotide
  Sense strand starting at position 1236 of SEQ ID NO: 587181
gagagugaauuacucauua

SEQ ID NO: 772789 - RNA, 19 nt, Artificial Sequence
  Description of Artificial Sequence: Synthetic oligonucleotide
  Antisense strand to SEQ ID NO: 772788
uaaugaguaauucacucuc

SEQ ID NO: 772790 - RNA, 19 nt, Artificial Sequence
  Description of Artificial Sequence: Synthetic oligonucleotide
  Sense strand starting at position 1249 of SEQ ID NO: 587181
ucauuacacuuggugaaag

SEQ ID NO: 772791 - RNA, 19 nt, Artificial Sequence
  Description of Artificial Sequence: Synthetic oligonucleotide
  Antisense strand to SEQ ID NO: 772790
cuuucaccaaguguaauga

SEQ ID NO: 772792 - RNA, 19 nt, Artificial Sequence
  Description of Artificial Sequence: Synthetic oligonucleotide
  Sense strand starting at position 1257 of SEQ ID NO: 587181
cuuggugaaaggugguaau

SEQ ID NO: 772793 - RNA, 19 nt, Artificial Sequence
  Description of Artificial Sequence: Synthetic oligonucleotide
  Antisense strand to SEQ ID NO: 772792
auuaccaccuuucaccaag

SEQ ID NO: 772794 - RNA, 19 nt, Artificial Sequence
  Description of Artificial Sequence: Synthetic oligonucleotide
  Sense strand starting at position 1260 of SEQ ID NO: 587181
ggugaaaggugguaaucaa

SEQ ID NO: 772795 - RNA, 19 nt, Artificial Sequence
  Description of Artificial Sequence: Synthetic oligonucleotide
  Antisense strand to SEQ ID NO: 772794
uugauuaccaccuuucacc

SEQ ID NO: 772796 - RNA, 19 nt, Artificial Sequence
  Description of Artificial Sequence: Synthetic oligonucleotide
  Sense strand starting at position 1300 of SEQ ID NO: 587181
caaauuggccaccguguaa

SEQ ID NO: 772797 - RNA, 19 nt, Artificial Sequence
  Description of Artificial Sequence: Synthetic oligonucleotide
  Antisense strand to SEQ ID NO: 772796
uuacacgguggccaauuug

SEQ ID NO: 772798 - RNA, 19 nt, Artificial Sequence
  Description of Artificial Sequence: Synthetic oligonucleotide
  Sense strand starting at position 2220 of SEQ ID NO: 587181
gacugugggcuugauuacu

SEQ ID NO: 772799 - RNA, 19 nt, Artificial Sequence
  Description of Artificial Sequence: Synthetic oligonucleotide
  Antisense strand to SEQ ID NO: 772798
aguaaucaagcccacaguc

SEQ ID NO: 772800 - RNA, 19 nt, Artificial Sequence
  Description of Artificial Sequence: Synthetic oligonucleotide
  Sense strand starting at position 2225 of SEQ ID NO: 587181
ugggcuugauuacuguuaa

SEQ ID NO: 772801 - RNA, 19 nt, Artificial Sequence
  Description of Artificial Sequence: Synthetic oligonucleotide
  Antisense strand to SEQ ID NO: 772800
uuaacaguaaucaagccca

SEQ ID NO: 772802 - RNA, 19 nt, Artificial Sequence
  Description of Artificial Sequence: Synthetic oligonucleotide
  Sense strand starting at position 2236 of SEQ ID NO: 587181
acuguuaauucugcaaaug

SEQ ID NO: 772803 - RNA, 19 nt, Artificial Sequence
  Description of Artificial Sequence: Synthetic oligonucleotide
  Antisense strand to SEQ ID NO: 772802
cauuugcagaauuaacagu

SEQ ID NO: 772804 - RNA, 19 nt, Artificial Sequence
  Description of Artificial Sequence: Synthetic oligonucleotide
  Sense strand starting at position 2237 of SEQ ID NO: 587181
cuguuaauucugcaaaugu

SEQ ID NO: 772805 - RNA, 19 nt, Artificial Sequence
  Description of Artificial Sequence: Synthetic oligonucleotide
  Antisense strand to SEQ ID NO: 772804
acauuugcagaauuaacag

SEQ ID NO: 772806 - RNA, 19 nt, Artificial Sequence
  Description of Artificial Sequence: Synthetic oligonucleotide
  Sense strand starting at position 2257 of SEQ ID NO: 587181
uugggcaucccgggagaaa

SEQ ID NO: 772807 - RNA, 19 nt, Artificial Sequence
  Description of Artificial Sequence: Synthetic oligonucleotide
  Antisense strand to SEQ ID NO: 772806
uuucucccgggaugcccaa

SEQ ID NO: 772808 - RNA, 19 nt, Artificial Sequence
  Description of Artificial Sequence: Synthetic oligonucleotide
  Sense strand starting at position 2279 of SEQ ID NO: 587181
gugccugacccuugugaaa

SEQ ID NO: 772809 - RNA, 19 nt, Artificial Sequence
  Description of Artificial Sequence: Synthetic oligonucleotide
  Antisense strand to SEQ ID NO: 772808
uuucacaagggucaggcac

SEQ ID NO: 772810 - RNA, 19 nt, Artificial Sequence
  Description of Artificial Sequence: Synthetic oligonucleotide
  Sense strand starting at position 2409 of SEQ ID NO: 587181
ggacccaucccagagcuuu

SEQ ID NO: 772811 - RNA, 19 nt, Artificial Sequence
  Description of Artificial Sequence: Synthetic oligonucleotide
  Antisense strand to SEQ ID NO: 772810
aaagcucugggaugggucc

SEQ ID NO: 772812 - RNA, 19 nt, Artificial Sequence
  Description of Artificial Sequence: Synthetic oligonucleotide
  Sense strand starting at position 2428 of SEQ ID NO: 587181
ugcacuguuauggaugaua

SEQ ID NO: 772813 - RNA, 19 nt, Artificial Sequence
  Description of Artificial Sequence: Synthetic oligonucleotide
  Antisense strand to SEQ ID NO: 772812
uaucauccauaacagugca

SEQ ID NO: 772814 - RNA, 19 nt, Artificial Sequence
  Description of Artificial Sequence: Synthetic oligonucleotide
  Sense strand starting at position 2430 of SEQ ID NO: 587181
cacuguuauggaugauaga

SEQ ID NO: 772815 - RNA, 19 nt, Artificial Sequence
  Description of Artificial Sequence: Synthetic oligonucleotide
  Antisense strand to SEQ ID NO: 772814
ucuaucauccauaacagug

SEQ ID NO: 772816 - RNA, 19 nt, Artificial Sequence
  Description of Artificial Sequence: Synthetic oligonucleotide
  Sense strand starting at position 2433 of SEQ ID NO: 587181
uguuauggaugauagagaa

SEQ ID NO: 772817 - RNA, 19 nt, Artificial Sequence
  Description of Artificial Sequence: Synthetic oligonucleotide
  Antisense strand to SEQ ID NO: 772816
uucucuaucauccauaaca

SEQ ID NO: 772818 - RNA, 19 nt, Artificial Sequence
  Description of Artificial Sequence: Synthetic oligonucleotide
  Sense strand starting at position 3349 of SEQ ID NO: 587181
aggcuaaggcuguaggauu

SEQ ID NO: 772819 - RNA, 19 nt, Artificial Sequence
  Description of Artificial Sequence: Synthetic oligonucleotide
  Antisense strand to SEQ ID NO: 772818
aauccuacagccuuagccu

SEQ ID NO: 772820 - RNA, 19 nt, Artificial Sequence
  Description of Artificial Sequence: Synthetic oligonucleotide
  Sense strand starting at position 3474 of SEQ ID NO: 587181
cuuuaaaucgggcagucau

SEQ ID NO: 772821 - RNA, 19 nt, Artificial Sequence
  Description of Artificial Sequence: Synthetic oligonucleotide
  Antisense strand to SEQ ID NO: 772820
augacugcccgauuuaaag

SEQ ID NO: 772822 - RNA, 19 nt, Artificial Sequence
  Description of Artificial Sequence: Synthetic oligonucleotide
  Sense strand starting at position 3609 of SEQ ID NO: 587181
aggucagugucacuuugaa

SEQ ID NO: 772823 - RNA, 19 nt, Artificial Sequence
  Description of Artificial Sequence: Synthetic oligonucleotide
  Antisense strand to SEQ ID NO: 772822
uucaaagugacacugaccu

SEQ ID NO: 772824 - RNA, 19 nt, Artificial Sequence
  Description of Artificial Sequence: Synthetic oligonucleotide
  Sense strand starting at position 3663 of SEQ ID NO: 587181
gccaguauaagcugaugaa

SEQ ID NO: 772825 - RNA, 19 nt, Artificial Sequence
  Description of Artificial Sequence: Synthetic oligonucleotide
  Antisense strand to SEQ ID NO: 772824
uucaucagcuuauacuggc

SEQ ID NO: 772826 - RNA, 19 nt, Artificial Sequence
  Description of Artificial Sequence: Synthetic oligonucleotide
  Sense strand starting at position 3666 of SEQ ID NO: 587181
aguauaagcugaugaagau

SEQ ID NO: 772827 - RNA, 19 nt, Artificial Sequence
  Description of Artificial Sequence: Synthetic oligonucleotide
  Antisense strand to SEQ ID NO: 772826
aucuucaucagcuuauacu

SEQ ID NO: 772828 - RNA, 19 nt, Artificial Sequence
  Description of Artificial Sequence: Synthetic oligonucleotide
  Sense strand starting at position 3758 of SEQ ID NO: 587181
gagggugagcuuugcaguu

SEQ ID NO: 772829 - RNA, 19 nt, Artificial Sequence
  Description of Artificial Sequence: Synthetic oligonucleotide
  Antisense strand to SEQ ID NO: 772828
aacugcaaagcucacccuc

SEQ ID NO: 772830 - RNA, 19 nt, Artificial Sequence
  Description of Artificial Sequence: Synthetic oligonucleotide
  Sense strand starting at position 3762 of SEQ ID NO: 587181
gugagcuuugcaguugcau

SEQ ID NO: 772831 - RNA, 19 nt, Artificial Sequence
  Description of Artificial Sequence: Synthetic oligonucleotide
  Antisense strand to SEQ ID NO: 772830
augcaacugcaaagcucac

SEQ ID NO: 772832 - RNA, 19 nt, Artificial Sequence
  Description of Artificial Sequence: Synthetic oligonucleotide
  Sense strand starting at position 3775 of SEQ ID NO: 587181
uugcauacaccugaguuua

SEQ ID NO: 772833 - RNA, 19 nt, Artificial Sequence
  Description of Artificial Sequence: Synthetic oligonucleotide
  Antisense strand to SEQ ID NO: 772832
uaaacucagguguaugcaa

SEQ ID NO: 772834 - RNA, 19 nt, Artificial Sequence
  Description of Artificial Sequence: Synthetic oligonucleotide
  Sense strand starting at position 3777 of SEQ ID NO: 587181
gcauacaccugaguuuaaa

SEQ ID NO: 772835 - RNA, 19 nt, Artificial Sequence
  Description of Artificial Sequence: Synthetic oligonucleotide
  Antisense strand to SEQ ID NO: 772834
uuuaaacucagguguaugc

SEQ ID NO: 772836 - RNA, 19 nt, Artificial Sequence
  Description of Artificial Sequence: Synthetic oligonucleotide
  Sense strand starting at position 3818 of SEQ ID NO: 587181
cuaugacuuugagcaacuu

SEQ ID NO: 772837 - RNA, 19 nt, Artificial Sequence
  Description of Artificial Sequence: Synthetic oligonucleotide
  Antisense strand to SEQ ID NO: 772836
aaguugcucaaagucauag

SEQ ID NO: 772838 - RNA, 19 nt, Artificial Sequence
  Description of Artificial Sequence: Synthetic oligonucleotide
  Sense strand starting at position 3919 of SEQ ID NO: 587181
ugagaauugugccuggcac

SEQ ID NO: 772839 - RNA, 19 nt, Artificial Sequence
  Description of Artificial Sequence: Synthetic oligonucleotide
  Antisense strand to SEQ ID NO: 772838
gugccaggcacaauucuca

SEQ ID NO: 772840 - RNA, 19 nt, Artificial Sequence
  Description of Artificial Sequence: Synthetic oligonucleotide
  Sense strand starting at position 3941 of SEQ ID NO: 587181
gcgagcauucugcaaagau

SEQ ID NO: 772841 - RNA, 19 nt, Artificial Sequence
  Description of Artificial Sequence: Synthetic oligonucleotide
  Antisense strand to SEQ ID NO: 772840
aucuuugcagaaugcucgc

SEQ ID NO: 772842 - RNA, 19 nt, Artificial Sequence
  Description of Artificial Sequence: Synthetic oligonucleotide
  Sense strand starting at position 380 of SEQ ID NO: 587182
auacgcucguuccucuaau

SEQ ID NO: 772843 - RNA, 19 nt, Artificial Sequence
  Description of Artificial Sequence: Synthetic oligonucleotide
  Antisense strand to SEQ ID NO: 772842
auuagaggaacgagcguau

SEQ ID NO: 772844 - RNA, 19 nt, Artificial Sequence
  Description of Artificial Sequence: Synthetic oligonucleotide
  Sense strand starting at position 381 of SEQ ID NO: 587182
uacgcucguuccucuaauu

SEQ ID NO: 772845 - RNA, 19 nt, Artificial Sequence
  Description of Artificial Sequence: Synthetic oligonucleotide
  Antisense strand to SEQ ID NO: 772844
aauuagaggaacgagcgua

SEQ ID NO: 772846 - RNA, 19 nt, Artificial Sequence
  Description of Artificial Sequence: Synthetic oligonucleotide
  Sense strand starting at position 428 of SEQ ID NO: 587182
gcuaucuucuccuggaguu

SEQ ID NO: 772847 - RNA, 19 nt, Artificial Sequence
  Description of Artificial Sequence: Synthetic oligonucleotide
  Antisense strand to SEQ ID NO: 772846
aacuccaggagaagauagc

SEQ ID NO: 772848 - RNA, 19 nt, Artificial Sequence
  Description of Artificial Sequence: Synthetic oligonucleotide
  Sense strand starting at position 429 of SEQ ID NO: 587182
cuaucuucuccuggaguuu

SEQ ID NO: 772849 - RNA, 19 nt, Artificial Sequence
  Description of Artificial Sequence: Synthetic oligonucleotide
  Antisense strand to SEQ ID NO: 772848
aaacuccaggagaagauag

SEQ ID NO: 772850 - RNA, 19 nt, Artificial Sequence
  Description of Artificial Sequence: Synthetic oligonucleotide
  Sense strand starting at position 465 of SEQ ID NO: 587182
uguaaacaccgauguggau

SEQ ID NO: 772851 - RNA, 19 nt, Artificial Sequence
  Description of Artificial Sequence: Synthetic oligonucleotide
  Antisense strand to SEQ ID NO: 772850
auccacaucgguguuuaca

SEQ ID NO: 772852 - RNA, 19 nt, Artificial Sequence
  Description of Artificial Sequence: Synthetic oligonucleotide
  Sense strand starting at position 539 of SEQ ID NO: 587182
gagccugagccagguguau

SEQ ID NO: 772853 - RNA, 19 nt, Artificial Sequence
  Description of Artificial Sequence: Synthetic oligonucleotide
  Antisense strand to SEQ ID NO: 772852
auacaccuggcucaggcuc

SEQ ID NO: 772854 - RNA, 19 nt, Artificial Sequence
  Description of Artificial Sequence: Synthetic oligonucleotide
  Sense strand starting at position 541 of SEQ ID NO: 587182
gccugagccagguguauca

SEQ ID NO: 772855 - RNA, 19 nt, Artificial Sequence
  Description of Artificial Sequence: Synthetic oligonucleotide
  Antisense strand to SEQ ID NO: 772854
ugauacaccuggcucaggc

SEQ ID NO: 772856 - RNA, 19 nt, Artificial Sequence
  Description of Artificial Sequence: Synthetic oligonucleotide
  Sense strand starting at position 550 of SEQ ID NO: 587182
agguguaucacgcgaugca

SEQ ID NO: 772857 - RNA, 19 nt, Artificial Sequence
  Description of Artificial Sequence: Synthetic oligonucleotide
  Antisense strand to SEQ ID NO: 772856
ugcaucgcgugauacaccu

SEQ ID NO: 772858 - RNA, 19 nt, Artificial Sequence
  Description of Artificial Sequence: Synthetic oligonucleotide
  Sense strand starting at position 633 of SEQ ID NO: 587182
ugcguacgcuuagcagaau

SEQ ID NO: 772859 - RNA, 19 nt, Artificial Sequence
  Description of Artificial Sequence: Synthetic oligonucleotide
  Antisense strand to SEQ ID NO: 772858
auucugcuaagcguacgca

SEQ ID NO: 772860 - RNA, 19 nt, Artificial Sequence
  Description of Artificial Sequence: Synthetic oligonucleotide
  Sense strand starting at position 634 of SEQ ID NO: 587182
gcguacgcuuagcagaauu

SEQ ID NO: 772861 - RNA, 19 nt, Artificial Sequence
  Description of Artificial Sequence: Synthetic oligonucleotide
  Antisense strand to SEQ ID NO: 772860
aauucugcuaagcguacgc

SEQ ID NO: 772862 - RNA, 19 nt, Artificial Sequence
  Description of Artificial Sequence: Synthetic oligonucleotide
  Sense strand starting at position 706 of SEQ ID NO: 587182
gcgcgaauaacuguguuaa

SEQ ID NO: 772863 - RNA, 19 nt, Artificial Sequence
  Description of Artificial Sequence: Synthetic oligonucleotide
  Antisense strand to SEQ ID NO: 772862
uuaacacaguuauucgcgc

SEQ ID NO: 772864 - RNA, 19 nt, Artificial Sequence
  Description of Artificial Sequence: Synthetic oligonucleotide
  Sense strand starting at position 707 of SEQ ID NO: 587182
cgcgaauaacuguguuaac

SEQ ID NO: 772865 - RNA, 19 nt, Artificial Sequence
  Description of Artificial Sequence: Synthetic oligonucleotide
  Antisense strand to SEQ ID NO: 772864
guuaacacaguuauucgcg

SEQ ID NO: 772866 - RNA, 19 nt, Artificial Sequence
  Description of Artificial Sequence: Synthetic oligonucleotide
  Sense strand starting at position 708 of SEQ ID NO: 587182
gcgaauaacuguguuaaca

SEQ ID NO: 772867 - RNA, 19 nt, Artificial Sequence
  Description of Artificial Sequence: Synthetic oligonucleotide
  Antisense strand to SEQ ID NO: 772866
uguuaacacaguuauucgc

SEQ ID NO: 772868 - RNA, 19 nt, Artificial Sequence
  Description of Artificial Sequence: Synthetic oligonucleotide
  Sense strand starting at position 755 of SEQ ID NO: 587182
aaguuagggucgcugucau

SEQ ID NO: 772869 - RNA, 19 nt, Artificial Sequence
  Description of Artificial Sequence: Synthetic oligonucleotide
  Antisense strand to SEQ ID NO: 772868
augacagcgacccuaacuu

SEQ ID NO: 772870 - RNA, 19 nt, Artificial Sequence
  Description of Artificial Sequence: Synthetic oligonucleotide
  Sense strand starting at position 832 of SEQ ID NO: 587182
gcugggucgccguuaaagu

SEQ ID NO: 772871 - RNA, 19 nt, Artificial Sequence
  Description of Artificial Sequence: Synthetic oligonucleotide
  Antisense strand to SEQ ID NO: 772870
acuuuaacggcgacccagc

SEQ ID NO: 772872 - RNA, 19 nt, Artificial Sequence
  Description of Artificial Sequence: Synthetic oligonucleotide
  Sense strand starting at position 889 of SEQ ID NO: 587182
gcaggaucccgcuaggcua

SEQ ID NO: 772873 - RNA, 19 nt, Artificial Sequence
  Description of Artificial Sequence: Synthetic oligonucleotide
  Antisense strand to SEQ ID NO: 772872
uagccuagcgggauccugc

SEQ ID NO: 772874 - RNA, 19 nt, Artificial Sequence
  Description of Artificial Sequence: Synthetic oligonucleotide
  Sense strand starting at position 1249 of SEQ ID NO: 587182
acuuguucugucuaggaaa

SEQ ID NO: 772875 - RNA, 19 nt, Artificial Sequence
  Description of Artificial Sequence: Synthetic oligonucleotide
  Antisense strand to SEQ ID NO: 772874
uuuccuagacagaacaagu

SEQ ID NO: 772876 - RNA, 19 nt, Artificial Sequence
  Description of Artificial Sequence: Synthetic oligonucleotide
  Sense strand starting at position 1714 of SEQ ID NO: 587182
ccguguacaggugaugaga

SEQ ID NO: 772877 - RNA, 19 nt, Artificial Sequence
  Description of Artificial Sequence: Synthetic oligonucleotide
  Antisense strand to SEQ ID NO: 772876
ucucaucaccuguacacgg

SEQ ID NO: 772878 - RNA, 19 nt, Artificial Sequence
  Description of Artificial Sequence: Synthetic oligonucleotide
  Sense strand starting at position 2176 of SEQ ID NO: 587182
agcugagcgcucuccagua

SEQ ID NO: 772879 - RNA, 19 nt, Artificial Sequence
  Description of Artificial Sequence: Synthetic oligonucleotide
  Antisense strand to SEQ ID NO: 772878
uacuggagagcgcucagcu

SEQ ID NO: 772880 - RNA, 19 nt, Artificial Sequence
  Description of Artificial Sequence: Synthetic oligonucleotide
  Sense strand starting at position 2256 of SEQ ID NO: 587182
ugcucauuaucuugguaaa

SEQ ID NO: 772881 - RNA, 19 nt, Artificial Sequence
  Description of Artificial Sequence: Synthetic oligonucleotide
  Antisense strand to SEQ ID NO: 772880
uuuaccaagauaaugagca

SEQ ID NO: 772882 - RNA, 19 nt, Artificial Sequence
  Description of Artificial Sequence: Synthetic oligonucleotide
  Sense strand starting at position 2309 of SEQ ID NO: 587182
ugaaacaugcaauguauga

SEQ ID NO: 772883 - RNA, 19 nt, Artificial Sequence
  Description of Artificial Sequence: Synthetic oligonucleotide
  Antisense strand to SEQ ID NO: 772882
ucauacauugcauguuuca

SEQ ID NO: 772884 - RNA, 19 nt, Artificial Sequence
  Description of Artificial Sequence: Synthetic oligonucleotide
  Sense strand starting at position 2411 of SEQ ID NO: 587182
ugaauaaucguguaagacc

SEQ ID NO: 772885 - RNA, 19 nt, Artificial Sequence
  Description of Artificial Sequence: Synthetic oligonucleotide
  Antisense strand to SEQ ID NO: 772884
ggucuuacacgauuauuca

SEQ ID NO: 772886 - RNA, 19 nt, Artificial Sequence
  Description of Artificial Sequence: Synthetic oligonucleotide
  Sense strand starting at position 2596 of SEQ ID NO: 587182
uggauuuccuuugacaugu

SEQ ID NO: 772887 - RNA, 19 nt, Artificial Sequence
  Description of Artificial Sequence: Synthetic oligonucleotide
  Antisense strand to SEQ ID NO: 772886
acaugucaaaggaaaucca

SEQ ID NO: 772888 - RNA, 19 nt, Artificial Sequence
  Description of Artificial Sequence: Synthetic oligonucleotide
  Sense strand starting at position 3228 of SEQ ID NO: 587182
cuaagaagauaagaaauga

SEQ ID NO: 772889 - RNA, 19 nt, Artificial Sequence
  Description of Artificial Sequence: Synthetic oligonucleotide
  Antisense strand to SEQ ID NO: 772888
ucauuucuuaucuucuuag

SEQ ID NO: 772890 - RNA, 19 nt, Artificial Sequence
  Description of Artificial Sequence: Synthetic oligonucleotide
  Sense strand starting at position 3245 of SEQ ID NO: 587182
gagguaucacaauagccau

SEQ ID NO: 772891 - RNA, 19 nt, Artificial Sequence
  Description of Artificial Sequence: Synthetic oligonucleotide
  Antisense strand to SEQ ID NO: 772890
auggcuauugugauaccuc

SEQ ID NO: 772892 - RNA, 19 nt, Artificial Sequence
  Description of Artificial Sequence: Synthetic oligonucleotide
  Sense strand starting at position 3389 of SEQ ID NO: 587182
gcgcgauccuaccucacua

SEQ ID NO: 772893 - RNA, 19 nt, Artificial Sequence
  Description of Artificial Sequence: Synthetic oligonucleotide
  Antisense strand to SEQ ID NO: 772892
uagugagguaggaucgcgc

SEQ ID NO: 772894 - RNA, 19 nt, Artificial Sequence
  Description of Artificial Sequence: Synthetic oligonucleotide
  Sense strand starting at position 3871 of SEQ ID NO: 587182
auauauacguauccugaag

SEQ ID NO: 772895 - RNA, 19 nt, Artificial Sequence
  Description of Artificial Sequence: Synthetic oligonucleotide
  Antisense strand to SEQ ID NO: 772894
cuucaggauacguauauau

SEQ ID NO: 772896 - RNA, 19 nt, Artificial Sequence
  Description of Artificial Sequence: Synthetic oligonucleotide
  Sense strand starting at position 3873 of SEQ ID NO: 587182
auauacguauccugaagua

SEQ ID NO: 772897 - RNA, 19 nt, Artificial Sequence
  Description of Artificial Sequence: Synthetic oligonucleotide
  Antisense strand to SEQ ID NO: 772896
uacuucaggauacguauau

SEQ ID NO: 772898 - RNA, 19 nt, Artificial Sequence
  Description of Artificial Sequence: Synthetic oligonucleotide
  Sense strand starting at position 3878 of SEQ ID NO: 587182
cguauccugaaguauguuu

SEQ ID NO: 772899 - RNA, 19 nt, Artificial Sequence
  Description of Artificial Sequence: Synthetic oligonucleotide
  Antisense strand to SEQ ID NO: 772898
aaacauacuucaggauacg

SEQ ID NO: 772900 - RNA, 19 nt, Artificial Sequence
  Description of Artificial Sequence: Synthetic oligonucleotide
  Sense strand starting at position 3883 of SEQ ID NO: 587182
ccugaaguauguuuauggu

SEQ ID NO: 772901 - RNA, 19 nt, Artificial Sequence
  Description of Artificial Sequence: Synthetic oligonucleotide
  Antisense strand to SEQ ID NO: 772900
accauaaacauacuucagg

SEQ ID NO: 772902 - RNA, 19 nt, Artificial Sequence
  Description of Artificial Sequence: Synthetic oligonucleotide
  Sense strand starting at position 3886 of SEQ ID NO: 587182
gaaguauguuuauggucug

SEQ ID NO: 772903 - RNA, 19 nt, Artificial Sequence
  Description of Artificial Sequence: Synthetic oligonucleotide
  Antisense strand to SEQ ID NO: 772902
cagaccauaaacauacuuc

SEQ ID NO: 772904 - RNA, 19 nt, Artificial Sequence
  Description of Artificial Sequence: Synthetic oligonucleotide
  Sense strand starting at position 3889 of SEQ ID NO: 587182
guauguuuauggucuguuu

SEQ ID NO: 772905 - RNA, 19 nt, Artificial Sequence
  Description of Artificial Sequence: Synthetic oligonucleotide
  Antisense strand to SEQ ID NO: 772904
aaacagaccauaaacauac

SEQ ID NO: 772906 - RNA, 19 nt, Artificial Sequence
  Description of Artificial Sequence: Synthetic oligonucleotide
  Sense strand starting at position 3898 of SEQ ID NO: 587182
uggucuguuuccuacaacu

SEQ ID NO: 772907 - RNA, 19 nt, Artificial Sequence
  Description of Artificial Sequence: Synthetic oligonucleotide
  Antisense strand to SEQ ID NO: 772906
aguuguaggaaacagacca

SEQ ID NO: 772908 - RNA, 19 nt, Artificial Sequence
  Description of Artificial Sequence: Synthetic oligonucleotide
  Sense strand starting at position 3900 of SEQ ID NO: 587182
gucuguuuccuacaacuag

SEQ ID NO: 772909 - RNA, 19 nt, Artificial Sequence
  Description of Artificial Sequence: Synthetic oligonucleotide
  Antisense strand to SEQ ID NO: 772908
cuaguuguaggaaacagac

SEQ ID NO: 772910 - RNA, 19 nt, Artificial Sequence
  Description of Artificial Sequence: Synthetic oligonucleotide
  Sense strand starting at position 3949 of SEQ ID NO: 587182
uuuguuuagugauguaccu

SEQ ID NO: 772911 - RNA, 19 nt, Artificial Sequence
  Description of Artificial Sequence: Synthetic oligonucleotide
  Antisense strand to SEQ ID NO: 772910
agguacaucacuaaacaaa

SEQ ID NO: 772912 - RNA, 19 nt, Artificial Sequence
  Description of Artificial Sequence: Synthetic oligonucleotide
  Sense strand starting at position 85 of SEQ ID NO: 587183
ugccacaucuggcugaguu

SEQ ID NO: 772913 - RNA, 19 nt, Artificial Sequence
  Description of Artificial Sequence: Synthetic oligonucleotide
  Antisense strand to SEQ ID NO: 772912
aacucagccagauguggca

SEQ ID NO: 772914 - RNA, 19 nt, Artificial Sequence
  Description of Artificial Sequence: Synthetic oligonucleotide
  Sense strand starting at position 86 of SEQ ID NO: 587183
gccacaucuggcugaguuu

SEQ ID NO: 772915 - RNA, 19 nt, Artificial Sequence
  Description of Artificial Sequence: Synthetic oligonucleotide
  Antisense strand to SEQ ID NO: 772914
aaacucagccagauguggc

SEQ ID NO: 772916 - RNA, 19 nt, Artificial Sequence
  Description of Artificial Sequence: Synthetic oligonucleotide
  Sense strand starting at position 227 of SEQ ID NO: 587183
ccgaguccagccuaaacuu

SEQ ID NO: 772917 - RNA, 19 nt, Artificial Sequence
  Description of Artificial Sequence: Synthetic oligonucleotide
  Antisense strand to SEQ ID NO: 772916
aaguuuaggcuggacucgg

SEQ ID NO: 772918 - RNA, 19 nt, Artificial Sequence
  Description of Artificial Sequence: Synthetic oligonucleotide
  Sense strand starting at position 404 of SEQ ID NO: 587183
guaagaaaguucuaacguu

SEQ ID NO: 772919 - RNA, 19 nt, Artificial Sequence
  Description of Artificial Sequence: Synthetic oligonucleotide
  Antisense strand to SEQ ID NO: 772918
aacguuagaacuuucuuac

SEQ ID NO: 772920 - RNA, 19 nt, Artificial Sequence
  Description of Artificial Sequence: Synthetic oligonucleotide
  Sense strand starting at position 417 of SEQ ID NO: 587183
aacguucugucagcuaacu

SEQ ID NO: 772921 - RNA, 19 nt, Artificial Sequence
  Description of Artificial Sequence: Synthetic oligonucleotide
  Antisense strand to SEQ ID NO: 772920
aguuagcugacagaacguu

SEQ ID NO: 772922 - RNA, 19 nt, Artificial Sequence
  Description of Artificial Sequence: Synthetic oligonucleotide
  Sense strand starting at position 426 of SEQ ID NO: 587183
ucagcuaacuugcuagaca

SEQ ID NO: 772923 - RNA, 19 nt, Artificial Sequence
  Description of Artificial Sequence: Synthetic oligonucleotide
  Antisense strand to SEQ ID NO: 772922
ugucuagcaaguuagcuga

SEQ ID NO: 772924 - RNA, 19 nt, Artificial Sequence
  Description of Artificial Sequence: Synthetic oligonucleotide
  Sense strand starting at position 441 of SEQ ID NO: 587183
gacacugugcuccgaacua

SEQ ID NO: 772925 - RNA, 19 nt, Artificial Sequence
  Description of Artificial Sequence: Synthetic oligonucleotide
  Antisense strand to SEQ ID NO: 772924
uaguucggagcacaguguc

SEQ ID NO: 772926 - RNA, 19 nt, Artificial Sequence
  Description of Artificial Sequence: Synthetic oligonucleotide
  Sense strand starting at position 553 of SEQ ID NO: 587183
gaccuagugcaucacagaa

SEQ ID NO: 772927 - RNA, 19 nt, Artificial Sequence
  Description of Artificial Sequence: Synthetic oligonucleotide
  Antisense strand to SEQ ID NO: 772926
uucugugaugcacuagguc

SEQ ID NO: 772928 - RNA, 19 nt, Artificial Sequence
  Description of Artificial Sequence: Synthetic oligonucleotide
  Sense strand starting at position 555 of SEQ ID NO: 587183
ccuagugcaucacagaaau

SEQ ID NO: 772929 - RNA, 19 nt, Artificial Sequence
  Description of Artificial Sequence: Synthetic oligonucleotide
  Antisense strand to SEQ ID NO: 772928
auuucugugaugcacuagg

SEQ ID NO: 772930 - RNA, 19 nt, Artificial Sequence
  Description of Artificial Sequence: Synthetic oligonucleotide
  Sense strand starting at position 1164 of SEQ ID NO: 587183
auacgcucguuccucuaau

SEQ ID NO: 772931 - RNA, 19 nt, Artificial Sequence
  Description of Artificial Sequence: Synthetic oligonucleotide
  Antisense strand to SEQ ID NO: 772930
auuagaggaacgagcguau

SEQ ID NO: 772932 - RNA, 19 nt, Artificial Sequence
  Description of Artificial Sequence: Synthetic oligonucleotide
  Sense strand starting at position 1165 of SEQ ID NO: 587183
uacgcucguuccucuaauu

SEQ ID NO: 772933 - RNA, 19 nt, Artificial Sequence
  Description of Artificial Sequence: Synthetic oligonucleotide
  Antisense strand to SEQ ID NO: 772932
aauuagaggaacgagcgua

SEQ ID NO: 772934 - RNA, 19 nt, Artificial Sequence
  Description of Artificial Sequence: Synthetic oligonucleotide
  Sense strand starting at position 1212 of SEQ ID NO: 587183
gcuaucuucuccuggaguu

SEQ ID NO: 772935 - RNA, 19 nt, Artificial Sequence
  Description of Artificial Sequence: Synthetic oligonucleotide
  Antisense strand to SEQ ID NO: 772934
aacuccaggagaagauagc

SEQ ID NO: 772936 - RNA, 19 nt, Artificial Sequence
  Description of Artificial Sequence: Synthetic oligonucleotide
  Sense strand starting at position 1213 of SEQ ID NO: 587183
cuaucuucuccuggaguuu

SEQ ID NO: 772937 - RNA, 19 nt, Artificial Sequence
  Description of Artificial Sequence: Synthetic oligonucleotide
  Antisense strand to SEQ ID NO: 772936
aaacuccaggagaagauag

SEQ ID NO: 772938 - RNA, 19 nt, Artificial Sequence
  Description of Artificial Sequence: Synthetic oligonucleotide
  Sense strand starting at position 1249 of SEQ ID NO: 587183
uguaaacaccgauguggau

SEQ ID NO: 772939 - RNA, 19 nt, Artificial Sequence
  Description of Artificial Sequence: Synthetic oligonucleotide
  Antisense strand to SEQ ID NO: 772938
auccacaucgguguuuaca

SEQ ID NO: 772940 - RNA, 19 nt, Artificial Sequence
  Description of Artificial Sequence: Synthetic oligonucleotide
  Sense strand starting at position 1323 of SEQ ID NO: 587183
gagccugagccagguguau

SEQ ID NO: 772941 - RNA, 19 nt, Artificial Sequence
  Description of Artificial Sequence: Synthetic oligonucleotide
  Antisense strand to SEQ ID NO: 772940
auacaccuggcucaggcuc

SEQ ID NO: 772942 - RNA, 19 nt, Artificial Sequence
  Description of Artificial Sequence: Synthetic oligonucleotide
  Sense strand starting at position 1325 of SEQ ID NO: 587183
gccugagccagguguauca

SEQ ID NO: 772943 - RNA, 19 nt, Artificial Sequence
  Description of Artificial Sequence: Synthetic oligonucleotide
  Antisense strand to SEQ ID NO: 772942
ugauacaccuggcucaggc

SEQ ID NO: 772944 - RNA, 19 nt, Artificial Sequence
  Description of Artificial Sequence: Synthetic oligonucleotide
  Sense strand starting at position 1334 of SEQ ID NO: 587183
agguguaucacgcgaugca

SEQ ID NO: 772945 - RNA, 19 nt, Artificial Sequence
  Description of Artificial Sequence: Synthetic oligonucleotide
  Antisense strand to SEQ ID NO: 772944
ugcaucgcgugauacaccu

SEQ ID NO: 772946 - RNA, 19 nt, Artificial Sequence
  Description of Artificial Sequence: Synthetic oligonucleotide
  Sense strand starting at position 1417 of SEQ ID NO: 587183
ugcguacgcuuagcagaau

SEQ ID NO: 772947 - RNA, 19 nt, Artificial Sequence
  Description of Artificial Sequence: Synthetic oligonucleotide
  Antisense strand to SEQ ID NO: 772946
auucugcuaagcguacgca

SEQ ID NO: 772948 - RNA, 19 nt, Artificial Sequence
  Description of Artificial Sequence: Synthetic oligonucleotide
  Sense strand starting at position 1418 of SEQ ID NO: 587183
gcguacgcuuagcagaauu

SEQ ID NO: 772949 - RNA, 19 nt, Artificial Sequence
  Description of Artificial Sequence: Synthetic oligonucleotide
  Antisense strand to SEQ ID NO: 772948
aauucugcuaagcguacgc

SEQ ID NO: 772950 - RNA, 19 nt, Artificial Sequence
  Description of Artificial Sequence: Synthetic oligonucleotide
  Sense strand starting at position 1490 of SEQ ID NO: 587183
gcgcgaauaacuguguuaa

SEQ ID NO: 772951 - RNA, 19 nt, Artificial Sequence
  Description of Artificial Sequence: Synthetic oligonucleotide
  Antisense strand to SEQ ID NO: 772950
uuaacacaguuauucgcgc

SEQ ID NO: 772952 - RNA, 19 nt, Artificial Sequence
  Description of Artificial Sequence: Synthetic oligonucleotide
  Sense strand starting at position 1491 of SEQ ID NO: 587183
cgcgaauaacuguguuaac

SEQ ID NO: 772953 - RNA, 19 nt, Artificial Sequence
  Description of Artificial Sequence: Synthetic oligonucleotide
  Antisense strand to SEQ ID NO: 772952
guuaacacaguuauucgcg

SEQ ID NO: 772954 - RNA, 19 nt, Artificial Sequence
  Description of Artificial Sequence: Synthetic oligonucleotide
  Sense strand starting at position 1492 of SEQ ID NO: 587183
gcgaauaacuguguuaaca

SEQ ID NO: 772955 - RNA, 19 nt, Artificial Sequence
  Description of Artificial Sequence: Synthetic oligonucleotide
  Antisense strand to SEQ ID NO: 772954
uguuaacacaguuauucgc

SEQ ID NO: 772956 - RNA, 19 nt, Artificial Sequence
  Description of Artificial Sequence: Synthetic oligonucleotide
  Sense strand starting at position 1539 of SEQ ID NO: 587183
aaguuagggucgcugucau

SEQ ID NO: 772957 - RNA, 19 nt, Artificial Sequence
  Description of Artificial Sequence: Synthetic oligonucleotide
  Antisense strand to SEQ ID NO: 772956
augacagcgacccuaacuu

SEQ ID NO: 772958 - RNA, 19 nt, Artificial Sequence
  Description of Artificial Sequence: Synthetic oligonucleotide
  Sense strand starting at position 1616 of SEQ ID NO: 587183
gcugggucgccguuaaagu

SEQ ID NO: 772959 - RNA, 19 nt, Artificial Sequence
  Description of Artificial Sequence: Synthetic oligonucleotide
  Antisense strand to SEQ ID NO: 772958
acuuuaacggcgacccagc

SEQ ID NO: 772960 - RNA, 19 nt, Artificial Sequence
  Description of Artificial Sequence: Synthetic oligonucleotide
  Sense strand starting at position 1673 of SEQ ID NO: 587183
gcaggaucccgcuaggcua

SEQ ID NO: 772961 - RNA, 19 nt, Artificial Sequence
  Description of Artificial Sequence: Synthetic oligonucleotide
  Antisense strand to SEQ ID NO: 772960
uagccuagcgggauccugc

SEQ ID NO: 772962 - RNA, 19 nt, Artificial Sequence
  Description of Artificial Sequence: Synthetic oligonucleotide
  Sense strand starting at position 2033 of SEQ ID NO: 587183
acuuguucugucuaggaaa

SEQ ID NO: 772963 - RNA, 19 nt, Artificial Sequence
  Description of Artificial Sequence: Synthetic oligonucleotide
  Antisense strand to SEQ ID NO: 772962
uuuccuagacagaacaagu

SEQ ID NO: 772964 - RNA, 19 nt, Artificial Sequence
  Description of Artificial Sequence: Synthetic oligonucleotide
  Sense strand starting at position 2498 of SEQ ID NO: 587183
ccguguacaggugaugaga

SEQ ID NO: 772965 - RNA, 19 nt, Artificial Sequence
  Description of Artificial Sequence: Synthetic oligonucleotide
  Antisense strand to SEQ ID NO: 772964
ucucaucaccuguacacgg

SEQ ID NO: 772966 - RNA, 19 nt, Artificial Sequence
  Description of Artificial Sequence: Synthetic oligonucleotide
  Sense strand starting at position 2960 of SEQ ID NO: 587183
agcugagcgcucuccagua

SEQ ID NO: 772967 - RNA, 19 nt, Artificial Sequence
  Description of Artificial Sequence: Synthetic oligonucleotide
  Antisense strand to SEQ ID NO: 772966
uacuggagagcgcucagcu

SEQ ID NO: 772968 - RNA, 19 nt, Artificial Sequence
  Description of Artificial Sequence: Synthetic oligonucleotide
  Sense strand starting at position 3040 of SEQ ID NO: 587183
ugcucauuaucuugguaaa

SEQ ID NO: 772969 - RNA, 19 nt, Artificial Sequence
  Description of Artificial Sequence: Synthetic oligonucleotide
  Antisense strand to SEQ ID NO: 772968
uuuaccaagauaaugagca

SEQ ID NO: 772970 - RNA, 19 nt, Artificial Sequence
  Description of Artificial Sequence: Synthetic oligonucleotide
  Sense strand starting at position 3093 of SEQ ID NO: 587183
ugaaacaugcaauguauga

SEQ ID NO: 772971 - RNA, 19 nt, Artificial Sequence
  Description of Artificial Sequence: Synthetic oligonucleotide
  Antisense strand to SEQ ID NO: 772970
ucauacauugcauguuuca

SEQ ID NO: 772972 - RNA, 19 nt, Artificial Sequence
  Description of Artificial Sequence: Synthetic oligonucleotide
  Sense strand starting at position 3195 of SEQ ID NO: 587183
ugaauaaucguguaagacc

SEQ ID NO: 772973 - RNA, 19 nt, Artificial Sequence
  Description of Artificial Sequence: Synthetic oligonucleotide
  Antisense strand to SEQ ID NO: 772972
ggucuuacacgauuauuca

SEQ ID NO: 772974 - RNA, 19 nt, Artificial Sequence
  Description of Artificial Sequence: Synthetic oligonucleotide
  Sense strand starting at position 3380 of SEQ ID NO: 587183
uggauuuccuuugacaugu

SEQ ID NO: 772975 - RNA, 19 nt, Artificial Sequence
  Description of Artificial Sequence: Synthetic oligonucleotide
  Antisense strand to SEQ ID NO: 772974
acaugucaaaggaaaucca

SEQ ID NO: 772976 - RNA, 19 nt, Artificial Sequence
  Description of Artificial Sequence: Synthetic oligonucleotide
  Sense strand starting at position 60 of SEQ ID NO: 587184
agccaaugugauggacaca

SEQ ID NO: 772977 - RNA, 19 nt, Artificial Sequence
  Description of Artificial Sequence: Synthetic oligonucleotide
  Antisense strand to SEQ ID NO: 772976
uguguccaucacauuggcu

SEQ ID NO: 772978 - RNA, 19 nt, Artificial Sequence
  Description of Artificial Sequence: Synthetic oligonucleotide
  Sense strand starting at position 110 of SEQ ID NO: 587184
uguccuguuccagaacaga

SEQ ID NO: 772979 - RNA, 19 nt, Artificial Sequence
  Description of Artificial Sequence: Synthetic oligonucleotide
  Antisense strand to SEQ ID NO: 772978
ucuguucuggaacaggaca

SEQ ID NO: 772980 - RNA, 19 nt, Artificial Sequence
  Description of Artificial Sequence: Synthetic oligonucleotide
  Sense strand starting at position 372 of SEQ ID NO: 587184
gaguuuagauuccagcaac

SEQ ID NO: 772981 - RNA, 19 nt, Artificial Sequence
  Description of Artificial Sequence: Synthetic oligonucleotide
  Antisense strand to SEQ ID NO: 772980
guugcuggaaucuaaacuc

SEQ ID NO: 772982 - RNA, 19 nt, Artificial Sequence
  Description of Artificial Sequence: Synthetic oligonucleotide
  Sense strand starting at position 449 of SEQ ID NO: 587184
cugccaguccacuguaaac

SEQ ID NO: 772983 - RNA, 19 nt, Artificial Sequence
  Description of Artificial Sequence: Synthetic oligonucleotide
  Antisense strand to SEQ ID NO: 772982
guuuacaguggacuggcag

SEQ ID NO: 772984 - RNA, 19 nt, Artificial Sequence
  Description of Artificial Sequence: Synthetic oligonucleotide
  Sense strand starting at position 488 of SEQ ID NO: 587184
cauccaacucugggucaga

SEQ ID NO: 772985 - RNA, 19 nt, Artificial Sequence
  Description of Artificial Sequence: Synthetic oligonucleotide
  Antisense strand to SEQ ID NO: 772984
ucugacccagaguuggaug

SEQ ID NO: 772986 - RNA, 19 nt, Artificial Sequence
  Description of Artificial Sequence: Synthetic oligonucleotide
  Sense strand starting at position 516 of SEQ ID NO: 587184
gggucucaucagcaucaau

SEQ ID NO: 772987 - RNA, 19 nt, Artificial Sequence
  Description of Artificial Sequence: Synthetic oligonucleotide
  Antisense strand to SEQ ID NO: 772986
auugaugcugaugagaccc

SEQ ID NO: 772988 - RNA, 19 nt, Artificial Sequence
  Description of Artificial Sequence: Synthetic oligonucleotide
  Sense strand starting at position 692 of SEQ ID NO: 587184
ggcccugcacucuaggaua

SEQ ID NO: 772989 - RNA, 19 nt, Artificial Sequence
  Description of Artificial Sequence: Synthetic oligonucleotide
  Antisense strand to SEQ ID NO: 772988
uauccuagagugcagggcc

SEQ ID NO: 772990 - RNA, 19 nt, Artificial Sequence
  Description of Artificial Sequence: Synthetic oligonucleotide
  Sense strand starting at position 741 of SEQ ID NO: 587184
gugacaagguaucucccaa

SEQ ID NO: 772991 - RNA, 19 nt, Artificial Sequence
  Description of Artificial Sequence: Synthetic oligonucleotide
  Antisense strand to SEQ ID NO: 772990
uugggagauaccuugucac

SEQ ID NO: 772992 - RNA, 19 nt, Artificial Sequence
  Description of Artificial Sequence: Synthetic oligonucleotide
  Sense strand starting at position 792 of SEQ ID NO: 587184
agaggcaaagcuugaaagu

SEQ ID NO: 772993 - RNA, 19 nt, Artificial Sequence
  Description of Artificial Sequence: Synthetic oligonucleotide
  Antisense strand to SEQ ID NO: 772992
acuuucaagcuuugccucu

SEQ ID NO: 772994 - RNA, 19 nt, Artificial Sequence
  Description of Artificial Sequence: Synthetic oligonucleotide
  Sense strand starting at position 793 of SEQ ID NO: 587184
gaggcaaagcuugaaaguu

SEQ ID NO: 772995 - RNA, 19 nt, Artificial Sequence
  Description of Artificial Sequence: Synthetic oligonucleotide
  Antisense strand to SEQ ID NO: 772994
aacuuucaagcuuugccuc

SEQ ID NO: 772996 - RNA, 19 nt, Artificial Sequence
  Description of Artificial Sequence: Synthetic oligonucleotide
  Sense strand starting at position 991 of SEQ ID NO: 587184
cacugucuguccucggauu

SEQ ID NO: 772997 - RNA, 19 nt, Artificial Sequence
  Description of Artificial Sequence: Synthetic oligonucleotide
  Antisense strand to SEQ ID NO: 772996
aauccgaggacagacagug

SEQ ID NO: 772998 - RNA, 19 nt, Artificial Sequence
  Description of Artificial Sequence: Synthetic oligonucleotide
  Sense strand starting at position 2450 of SEQ ID NO: 587184
gggugaacgucuugugggu

SEQ ID NO: 772999 - RNA, 19 nt, Artificial Sequence
  Description of Artificial Sequence: Synthetic oligonucleotide
  Antisense strand to SEQ ID NO: 772998
acccacaagacguucaccc

SEQ ID NO: 773000 - RNA, 19 nt, Artificial Sequence
  Description of Artificial Sequence: Synthetic oligonucleotide
  Sense strand starting at position 2491 of SEQ ID NO: 587184
gggugaacgucuuaugggu

SEQ ID NO: 773001 - RNA, 19 nt, Artificial Sequence
  Description of Artificial Sequence: Synthetic oligonucleotide
  Antisense strand to SEQ ID NO: 773000
acccauaagacguucaccc

SEQ ID NO: 773002 - RNA, 19 nt, Artificial Sequence
  Description of Artificial Sequence: Synthetic oligonucleotide
  Sense strand starting at position 2743 of SEQ ID NO: 587184
caggaugagcucuggcauu

SEQ ID NO: 773003 - RNA, 19 nt, Artificial Sequence
  Description of Artificial Sequence: Synthetic oligonucleotide
  Antisense strand to SEQ ID NO: 773002
aaugccagagcucauccug

SEQ ID NO: 773004 - RNA, 19 nt, Artificial Sequence
  Description of Artificial Sequence: Synthetic oligonucleotide
  Sense strand starting at position 2777 of SEQ ID NO: 587184
cugucuuccgccuggaaug

SEQ ID NO: 773005 - RNA, 19 nt, Artificial Sequence
  Description of Artificial Sequence: Synthetic oligonucleotide
  Antisense strand to SEQ ID NO: 773004
cauuccaggcggaagacag

SEQ ID NO: 773006 - RNA, 19 nt, Artificial Sequence
  Description of Artificial Sequence: Synthetic oligonucleotide
  Sense strand starting at position 2906 of SEQ ID NO: 587184
caggcacggugucuguaau

SEQ ID NO: 773007 - RNA, 19 nt, Artificial Sequence
  Description of Artificial Sequence: Synthetic oligonucleotide
  Antisense strand to SEQ ID NO: 773006
auuacagacaccgugccug

SEQ ID NO: 773008 - RNA, 19 nt, Artificial Sequence
  Description of Artificial Sequence: Synthetic oligonucleotide
  Sense strand starting at position 2986 of SEQ ID NO: 587184
gcuaacauggugggugaaa

SEQ ID NO: 773009 - RNA, 19 nt, Artificial Sequence
  Description of Artificial Sequence: Synthetic oligonucleotide
  Antisense strand to SEQ ID NO: 773008
uuucacccaccauguuagc

SEQ ID NO: 773010 - RNA, 19 nt, Artificial Sequence
  Description of Artificial Sequence: Synthetic oligonucleotide
  Sense strand starting at position 3261 of SEQ ID NO: 587184
cagugaugucgcuuggcuc

SEQ ID NO: 773011 - RNA, 19 nt, Artificial Sequence
  Description of Artificial Sequence: Synthetic oligonucleotide
  Antisense strand to SEQ ID NO: 773010
gagccaagcgacaucacug

SEQ ID NO: 773012 - RNA, 19 nt, Artificial Sequence
  Description of Artificial Sequence: Synthetic oligonucleotide
  Sense strand starting at position 3324 of SEQ ID NO: 587184
ggagucccauucuuguuua

SEQ ID NO: 773013 - RNA, 19 nt, Artificial Sequence
  Description of Artificial Sequence: Synthetic oligonucleotide
  Antisense strand to SEQ ID NO: 773012
uaaacaagaaugggacucc

SEQ ID NO: 773014 - RNA, 19 nt, Artificial Sequence
  Description of Artificial Sequence: Synthetic oligonucleotide
  Sense strand starting at position 3621 of SEQ ID NO: 587184
ccaguagggccugagaagu

SEQ ID NO: 773015 - RNA, 19 nt, Artificial Sequence
  Description of Artificial Sequence: Synthetic oligonucleotide
  Antisense strand to SEQ ID NO: 773014
acuucucaggcccuacugg

SEQ ID NO: 773016 - RNA, 19 nt, Artificial Sequence
  Description of Artificial Sequence: Synthetic oligonucleotide
  Sense strand starting at position 3736 of SEQ ID NO: 587184
cugacucuccuguggguau

SEQ ID NO: 773017 - RNA, 19 nt, Artificial Sequence
  Description of Artificial Sequence: Synthetic oligonucleotide
  Antisense strand to SEQ ID NO: 773016
auacccacaggagagucag

SEQ ID NO: 773018 - RNA, 19 nt, Artificial Sequence
  Description of Artificial Sequence: Synthetic oligonucleotide
  Sense strand starting at position 3805 of SEQ ID NO: 587184
ccgucagguucaguaggaa

SEQ ID NO: 773019 - RNA, 19 nt, Artificial Sequence
  Description of Artificial Sequence: Synthetic oligonucleotide
  Antisense strand to SEQ ID NO: 773018
uuccuacugaaccugacgg

SEQ ID NO: 773020 - RNA, 19 nt, Artificial Sequence
  Description of Artificial Sequence: Synthetic oligonucleotide
  Sense strand starting at position 3857 of SEQ ID NO: 587184
cucugacuguaggacaauu

SEQ ID NO: 773021 - RNA, 19 nt, Artificial Sequence
  Description of Artificial Sequence: Synthetic oligonucleotide
  Antisense strand to SEQ ID NO: 773020
aauuguccuacagucagag

SEQ ID NO: 773022 - RNA, 19 nt, Artificial Sequence
  Description of Artificial Sequence: Synthetic oligonucleotide
  Sense strand starting at position 23 of SEQ ID NO: 587185
cuacgugucuauguagaga

SEQ ID NO: 773023 - RNA, 19 nt, Artificial Sequence
  Description of Artificial Sequence: Synthetic oligonucleotide
  Antisense strand to SEQ ID NO: 773022
ucucuacauagacacguag

SEQ ID NO: 773024 - RNA, 19 nt, Artificial Sequence
  Description of Artificial Sequence: Synthetic oligonucleotide
  Sense strand starting at position 26 of SEQ ID NO: 587185
cgugucuauguagagacaa

SEQ ID NO: 773025 - RNA, 19 nt, Artificial Sequence
  Description of Artificial Sequence: Synthetic oligonucleotide
  Antisense strand to SEQ ID NO: 773024
uugucucuacauagacacg

SEQ ID NO: 773026 - RNA, 19 nt, Artificial Sequence
  Description of Artificial Sequence: Synthetic oligonucleotide
  Sense strand starting at position 46 of SEQ ID NO: 587185
auaagacaugcauggaagu

SEQ ID NO: 773027 - RNA, 19 nt, Artificial Sequence
  Description of Artificial Sequence: Synthetic oligonucleotide
  Antisense strand to SEQ ID NO: 773026
acuuccaugcaugucuuau

SEQ ID NO: 773028 - RNA, 19 nt, Artificial Sequence
  Description of Artificial Sequence: Synthetic oligonucleotide
  Sense strand starting at position 86 of SEQ ID NO: 587185
acuggcuaccucuggagaa

SEQ ID NO: 773029 - RNA, 19 nt, Artificial Sequence
  Description of Artificial Sequence: Synthetic oligonucleotide
  Antisense strand to SEQ ID NO: 773028
uucuccagagguagccagu

SEQ ID NO: 773030 - RNA, 19 nt, Artificial Sequence
  Description of Artificial Sequence: Synthetic oligonucleotide
  Sense strand starting at position 189 of SEQ ID NO: 587185
guauuaagaucugauaaac

SEQ ID NO: 773031 - RNA, 19 nt, Artificial Sequence
  Description of Artificial Sequence: Synthetic oligonucleotide
  Antisense strand to SEQ ID NO: 773030
guuuaucagaucuuaauac

SEQ ID NO: 773032 - RNA, 19 nt, Artificial Sequence
  Description of Artificial Sequence: Synthetic oligonucleotide
  Sense strand starting at position 201 of SEQ ID NO: 587185
gauaaacuugggugguaga

SEQ ID NO: 773033 - RNA, 19 nt, Artificial Sequence
  Description of Artificial Sequence: Synthetic oligonucleotide
  Antisense strand to SEQ ID NO: 773032
ucuaccacccaaguuuauc

SEQ ID NO: 773034 - RNA, 19 nt, Artificial Sequence
  Description of Artificial Sequence: Synthetic oligonucleotide
  Sense strand starting at position 327 of SEQ ID NO: 587185
uccugcuugcguuacagaa

SEQ ID NO: 773035 - RNA, 19 nt, Artificial Sequence
  Description of Artificial Sequence: Synthetic oligonucleotide
  Antisense strand to SEQ ID NO: 773034
uucuguaacgcaagcagga

SEQ ID NO: 773036 - RNA, 19 nt, Artificial Sequence
  Description of Artificial Sequence: Synthetic oligonucleotide
  Sense strand starting at position 380 of SEQ ID NO: 587185
ggcauaguggcucagggau

SEQ ID NO: 773037 - RNA, 19 nt, Artificial Sequence
  Description of Artificial Sequence: Synthetic oligonucleotide
  Antisense strand to SEQ ID NO: 773036
aucccugagccacuaugcc

SEQ ID NO: 773038 - RNA, 19 nt, Artificial Sequence
  Description of Artificial Sequence: Synthetic oligonucleotide
  Sense strand starting at position 695 of SEQ ID NO: 587185
ggcugacauucucuuguaa

SEQ ID NO: 773039 - RNA, 19 nt, Artificial Sequence
  Description of Artificial Sequence: Synthetic oligonucleotide
  Antisense strand to SEQ ID NO: 773038
uuacaagagaaugucagcc

SEQ ID NO: 773040 - RNA, 19 nt, Artificial Sequence
  Description of Artificial Sequence: Synthetic oligonucleotide
  Sense strand starting at position 720 of SEQ ID NO: 587185
aaagccuuucuguggacua

SEQ ID NO: 773041 - RNA, 19 nt, Artificial Sequence
  Description of Artificial Sequence: Synthetic oligonucleotide
  Antisense strand to SEQ ID NO: 773040
uaguccacagaaaggcuuu

SEQ ID NO: 773042 - RNA, 19 nt, Artificial Sequence
  Description of Artificial Sequence: Synthetic oligonucleotide
  Sense strand starting at position 722 of SEQ ID NO: 587185
agccuuucuguggacuauu

SEQ ID NO: 773043 - RNA, 19 nt, Artificial Sequence
  Description of Artificial Sequence: Synthetic oligonucleotide
  Antisense strand to SEQ ID NO: 773042
aauaguccacagaaaggcu

SEQ ID NO: 773044 - RNA, 19 nt, Artificial Sequence
  Description of Artificial Sequence: Synthetic oligonucleotide
  Sense strand starting at position 731 of SEQ ID NO: 587185
guggacuauuuacacuaau

SEQ ID NO: 773045 - RNA, 19 nt, Artificial Sequence
  Description of Artificial Sequence: Synthetic oligonucleotide
  Antisense strand to SEQ ID NO: 773044
auuaguguaaauaguccac

SEQ ID NO: 773046 - RNA, 19 nt, Artificial Sequence
  Description of Artificial Sequence: Synthetic oligonucleotide
  Sense strand starting at position 784 of SEQ ID NO: 587185
cuuauaucacugugaugua

SEQ ID NO: 773047 - RNA, 19 nt, Artificial Sequence
  Description of Artificial Sequence: Synthetic oligonucleotide
  Antisense strand to SEQ ID NO: 773046
uacaucacagugauauaag

SEQ ID NO: 773048 - RNA, 19 nt, Artificial Sequence
  Description of Artificial Sequence: Synthetic oligonucleotide
  Sense strand starting at position 791 of SEQ ID NO: 587185
cacugugauguaugggaau

SEQ ID NO: 773049 - RNA, 19 nt, Artificial Sequence
  Description of Artificial Sequence: Synthetic oligonucleotide
  Antisense strand to SEQ ID NO: 773048
auucccauacaucacagug

SEQ ID NO: 773050 - RNA, 19 nt, Artificial Sequence
  Description of Artificial Sequence: Synthetic oligonucleotide
  Sense strand starting at position 794 of SEQ ID NO: 587185
ugugauguaugggaaugga

SEQ ID NO: 773051 - RNA, 19 nt, Artificial Sequence
  Description of Artificial Sequence: Synthetic oligonucleotide
  Antisense strand to SEQ ID NO: 773050
uccauucccauacaucaca

SEQ ID NO: 773052 - RNA, 19 nt, Artificial Sequence
  Description of Artificial Sequence: Synthetic oligonucleotide
  Sense strand starting at position 808 of SEQ ID NO: 587185
auggaaauaugauacagau

SEQ ID NO: 773053 - RNA, 19 nt, Artificial Sequence
  Description of Artificial Sequence: Synthetic oligonucleotide
  Antisense strand to SEQ ID NO: 773052
aucuguaucauauuuccau

SEQ ID NO: 773054 - RNA, 19 nt, Artificial Sequence
  Description of Artificial Sequence: Synthetic oligonucleotide
  Sense strand starting at position 1179 of SEQ ID NO: 587185
ccaguaauccguguucgcu

SEQ ID NO: 773055 - RNA, 19 nt, Artificial Sequence
  Description of Artificial Sequence: Synthetic oligonucleotide
  Antisense strand to SEQ ID NO: 773054
agcgaacacggauuacugg

SEQ ID NO: 773056 - RNA, 19 nt, Artificial Sequence
  Description of Artificial Sequence: Synthetic oligonucleotide
  Sense strand starting at position 1180 of SEQ ID NO: 587185
caguaauccguguucgcuu

SEQ ID NO: 773057 - RNA, 19 nt, Artificial Sequence
  Description of Artificial Sequence: Synthetic oligonucleotide
  Antisense strand to SEQ ID NO: 773056
aagcgaacacggauuacug

SEQ ID NO: 773058 - RNA, 19 nt, Artificial Sequence
  Description of Artificial Sequence: Synthetic oligonucleotide
  Sense strand starting at position 1199 of SEQ ID NO: 587185
uaugcugaggucuauaaca

SEQ ID NO: 773059 - RNA, 19 nt, Artificial Sequence
  Description of Artificial Sequence: Synthetic oligonucleotide
  Antisense strand to SEQ ID NO: 773058
uguuauagaccucagcaua

SEQ ID NO: 773060 - RNA, 19 nt, Artificial Sequence
  Description of Artificial Sequence: Synthetic oligonucleotide
  Sense strand starting at position 1201 of SEQ ID NO: 587185
ugcugaggucuauaacaag

SEQ ID NO: 773061 - RNA, 19 nt, Artificial Sequence
  Description of Artificial Sequence: Synthetic oligonucleotide
  Antisense strand to SEQ ID NO: 773060
cuuguuauagaccucagca

SEQ ID NO: 773062 - RNA, 19 nt, Artificial Sequence
  Description of Artificial Sequence: Synthetic oligonucleotide
  Sense strand starting at position 1226 of SEQ ID NO: 587185
ccuggauggaucugucacu

SEQ ID NO: 773063 - RNA, 19 nt, Artificial Sequence
  Description of Artificial Sequence: Synthetic oligonucleotide
  Antisense strand to SEQ ID NO: 773062
agugacagauccauccagg

SEQ ID NO: 773064 - RNA, 19 nt, Artificial Sequence
  Description of Artificial Sequence: Synthetic oligonucleotide
  Sense strand starting at position 1286 of SEQ ID NO: 587185
cacgaaauguaauaaggaa

SEQ ID NO: 773065 - RNA, 19 nt, Artificial Sequence
  Description of Artificial Sequence: Synthetic oligonucleotide
  Antisense strand to SEQ ID NO: 773064
uuccuuauuacauuucgug

SEQ ID NO: 773066 - RNA, 19 nt, Artificial Sequence
  Description of Artificial Sequence: Synthetic oligonucleotide
  Sense strand starting at position 1529 of SEQ ID NO: 587185
aggaucugcuccuuggaga

SEQ ID NO: 773067 - RNA, 19 nt, Artificial Sequence
  Description of Artificial Sequence: Synthetic oligonucleotide
  Antisense strand to SEQ ID NO: 773066
ucuccaaggagcagauccu

SEQ ID NO: 773068 - RNA, 19 nt, Artificial Sequence
  Description of Artificial Sequence: Synthetic oligonucleotide
  Sense strand starting at position 1638 of SEQ ID NO: 587185
uaaagugcagucgagaagu

SEQ ID NO: 773069 - RNA, 19 nt, Artificial Sequence
  Description of Artificial Sequence: Synthetic oligonucleotide
  Antisense strand to SEQ ID NO: 773068
acuucucgacugcacuuua

SEQ ID NO: 773070 - RNA, 19 nt, Artificial Sequence
  Description of Artificial Sequence: Synthetic oligonucleotide
  Sense strand starting at position 1640 of SEQ ID NO: 587185
aagugcagucgagaaguuu

SEQ ID NO: 773071 - RNA, 19 nt, Artificial Sequence
  Description of Artificial Sequence: Synthetic oligonucleotide
  Antisense strand to SEQ ID NO: 773070
aaacuucucgacugcacuu

SEQ ID NO: 773072 - RNA, 19 nt, Artificial Sequence
  Description of Artificial Sequence: Synthetic oligonucleotide
  Sense strand starting at position 1700 of SEQ ID NO: 587185
ccgggugagucuuccucca

SEQ ID NO: 773073 - RNA, 19 nt, Artificial Sequence
  Description of Artificial Sequence: Synthetic oligonucleotide
  Antisense strand to SEQ ID NO: 773072
uggaggaagacucacccgg

SEQ ID NO: 773074 - RNA, 19 nt, Artificial Sequence
  Description of Artificial Sequence: Synthetic oligonucleotide
  Sense strand starting at position 1702 of SEQ ID NO: 587185
gggugagucuuccuccacu

SEQ ID NO: 773075 - RNA, 19 nt, Artificial Sequence
  Description of Artificial Sequence: Synthetic oligonucleotide
  Antisense strand to SEQ ID NO: 773074
aguggaggaagacucaccc

SEQ ID NO: 773076 - RNA, 19 nt, Artificial Sequence
  Description of Artificial Sequence: Synthetic oligonucleotide
  Sense strand starting at position 1984 of SEQ ID NO: 587185
cucagcuuugcgccuacaa

SEQ ID NO: 773077 - RNA, 19 nt, Artificial Sequence
  Description of Artificial Sequence: Synthetic oligonucleotide
  Antisense strand to SEQ ID NO: 773076
uuguaggcgcaaagcugag

SEQ ID NO: 773078 - RNA, 19 nt, Artificial Sequence
  Description of Artificial Sequence: Synthetic oligonucleotide
  Sense strand starting at position 2171 of SEQ ID NO: 587185
cccgcaucccgaggaaaua

SEQ ID NO: 773079 - RNA, 19 nt, Artificial Sequence
  Description of Artificial Sequence: Synthetic oligonucleotide
  Antisense strand to SEQ ID NO: 773078
uauuuccucgggaugcggg

SEQ ID NO: 773080 - RNA, 19 nt, Artificial Sequence
  Description of Artificial Sequence: Synthetic oligonucleotide
  Sense strand starting at position 2423 of SEQ ID NO: 587185
uuauauugcccagguugga

SEQ ID NO: 773081 - RNA, 19 nt, Artificial Sequence
  Description of Artificial Sequence: Synthetic oligonucleotide
  Antisense strand to SEQ ID NO: 773080
uccaaccugggcaauauaa

SEQ ID NO: 773082 - RNA, 19 nt, Artificial Sequence
  Description of Artificial Sequence: Synthetic oligonucleotide
  Sense strand starting at position 3145 of SEQ ID NO: 587185
ggcguucugauacgacaga

SEQ ID NO: 773083 - RNA, 19 nt, Artificial Sequence
  Description of Artificial Sequence: Synthetic oligonucleotide
  Antisense strand to SEQ ID NO: 773082
ucugucguaucagaacgcc

SEQ ID NO: 773084 - RNA, 19 nt, Artificial Sequence
  Description of Artificial Sequence: Synthetic oligonucleotide
  Sense strand starting at position 3457 of SEQ ID NO: 587185
uaaagacugcagugagaua

SEQ ID NO: 773085 - RNA, 19 nt, Artificial Sequence
  Description of Artificial Sequence: Synthetic oligonucleotide
  Antisense strand to SEQ ID NO: 773084
uaucucacugcagucuuua

SEQ ID NO: 773086 - RNA, 19 nt, Artificial Sequence
  Description of Artificial Sequence: Synthetic oligonucleotide
  Sense strand starting at position 3531 of SEQ ID NO: 587185
caaagugucuugguugaug

SEQ ID NO: 773087 - RNA, 19 nt, Artificial Sequence
  Description of Artificial Sequence: Synthetic oligonucleotide
  Antisense strand to SEQ ID NO: 773086
caucaaccaagacacuuug

SEQ ID NO: 773088 - RNA, 19 nt, Artificial Sequence
  Description of Artificial Sequence: Synthetic oligonucleotide
  Sense strand starting at position 3582 of SEQ ID NO: 587185
augagacgaucgcuugaga

SEQ ID NO: 773089 - RNA, 19 nt, Artificial Sequence
  Description of Artificial Sequence: Synthetic oligonucleotide
  Antisense strand to SEQ ID NO: 773088
ucucaagcgaucgucucau

SEQ ID NO: 773090 - RNA, 19 nt, Artificial Sequence
  Description of Artificial Sequence: Synthetic oligonucleotide
  Sense strand starting at position 3585 of SEQ ID NO: 587185
agacgaucgcuugagacca

SEQ ID NO: 773091 - RNA, 19 nt, Artificial Sequence
  Description of Artificial Sequence: Synthetic oligonucleotide
  Antisense strand to SEQ ID NO: 773090
uggucucaagcgaucgucu

SEQ ID NO: 773092 - RNA, 19 nt, Artificial Sequence
  Description of Artificial Sequence: Synthetic oligonucleotide
  Sense strand starting at position 3634 of SEQ ID NO: 587185
gaggaugugucuccauaua

SEQ ID NO: 773093 - RNA, 19 nt, Artificial Sequence
  Description of Artificial Sequence: Synthetic oligonucleotide
  Antisense strand to SEQ ID NO: 773092
uauauggagacacauccuc

SEQ ID NO: 773094 - RNA, 19 nt, Artificial Sequence
  Description of Artificial Sequence: Synthetic oligonucleotide
  Sense strand starting at position 3908 of SEQ ID NO: 587185
uuuaucaauccaggugugu

SEQ ID NO: 773095 - RNA, 19 nt, Artificial Sequence
  Description of Artificial Sequence: Synthetic oligonucleotide
  Antisense strand to SEQ ID NO: 773094
acacaccuggauugauaaa

SEQ ID NO: 773096 - RNA, 19 nt, Artificial Sequence
  Description of Artificial Sequence: Synthetic oligonucleotide
  Sense strand starting at position 3912 of SEQ ID NO: 587185
ucaauccagguguguuuaa

SEQ ID NO: 773097 - RNA, 19 nt, Artificial Sequence
  Description of Artificial Sequence: Synthetic oligonucleotide
  Antisense strand to SEQ ID NO: 773096
uuaaacacaccuggauuga

SEQ ID NO: 773098 - RNA, 19 nt, Artificial Sequence
  Description of Artificial Sequence: Synthetic oligonucleotide
  Sense strand starting at position 3913 of SEQ ID NO: 587185
caauccagguguguuuaau

SEQ ID NO: 773099 - RNA, 19 nt, Artificial Sequence
  Description of Artificial Sequence: Synthetic oligonucleotide
  Antisense strand to SEQ ID NO: 773098
auuaaacacaccuggauug

SEQ ID NO: 773100 - RNA, 19 nt, Artificial Sequence
  Description of Artificial Sequence: Synthetic oligonucleotide
  Sense strand starting at position 3922 of SEQ ID NO: 587185
uguguuuaauaacuagaca

SEQ ID NO: 773101 - RNA, 19 nt, Artificial Sequence
  Description of Artificial Sequence: Synthetic oligonucleotide
  Antisense strand to SEQ ID NO: 773100
ugucuaguuauuaaacaca

SEQ ID NO: 773102 - RNA, 19 nt, Artificial Sequence
  Description of Artificial Sequence: Synthetic oligonucleotide
  Sense strand starting at position 25 of SEQ ID NO: 587186
cuaagaaucuuggucucca

SEQ ID NO: 773103 - RNA, 19 nt, Artificial Sequence
  Description of Artificial Sequence: Synthetic oligonucleotide
  Antisense strand to SEQ ID NO: 773102
uggagaccaagauucuuag

SEQ ID NO: 773104 - RNA, 19 nt, Artificial Sequence
  Description of Artificial Sequence: Synthetic oligonucleotide
  Sense strand starting at position 160 of SEQ ID NO: 587186
cccgccuuuccugacagaa

SEQ ID NO: 773105 - RNA, 19 nt, Artificial Sequence
  Description of Artificial Sequence: Synthetic oligonucleotide
  Antisense strand to SEQ ID NO: 773104
uucugucaggaaaggcggg

SEQ ID NO: 773106 - RNA, 19 nt, Artificial Sequence
  Description of Artificial Sequence: Synthetic oligonucleotide
  Sense strand starting at position 199 of SEQ ID NO: 587186
auugacugaugucuuaagu

SEQ ID NO: 773107 - RNA, 19 nt, Artificial Sequence
  Description of Artificial Sequence: Synthetic oligonucleotide
  Antisense strand to SEQ ID NO: 773106
acuuaagacaucagucaau

SEQ ID NO: 773108 - RNA, 19 nt, Artificial Sequence
  Description of Artificial Sequence: Synthetic oligonucleotide
  Sense strand starting at position 208 of SEQ ID NO: 587186
ugucuuaagucuucccaaa

SEQ ID NO: 773109 - RNA, 19 nt, Artificial Sequence
  Description of Artificial Sequence: Synthetic oligonucleotide
  Antisense strand to SEQ ID NO: 773108
uuugggaagacuuaagaca

SEQ ID NO: 773110 - RNA, 19 nt, Artificial Sequence
  Description of Artificial Sequence: Synthetic oligonucleotide
  Sense strand starting at position 260 of SEQ ID NO: 587186
ggauacauguucuuaggac

SEQ ID NO: 773111 - RNA, 19 nt, Artificial Sequence
  Description of Artificial Sequence: Synthetic oligonucleotide
  Antisense strand to SEQ ID NO: 773110
guccuaagaacauguaucc

SEQ ID NO: 773112 - RNA, 19 nt, Artificial Sequence
  Description of Artificial Sequence: Synthetic oligonucleotide
  Sense strand starting at position 355 of SEQ ID NO: 587186
cuucguaaacauggaugaa

SEQ ID NO: 773113 - RNA, 19 nt, Artificial Sequence
  Description of Artificial Sequence: Synthetic oligonucleotide
  Antisense strand to SEQ ID NO: 773112
uucauccauguuuacgaag

SEQ ID NO: 773114 - RNA, 19 nt, Artificial Sequence
  Description of Artificial Sequence: Synthetic oligonucleotide
  Sense strand starting at position 358 of SEQ ID NO: 587186
cguaaacauggaugaauca

SEQ ID NO: 773115 - RNA, 19 nt, Artificial Sequence
  Description of Artificial Sequence: Synthetic oligonucleotide
  Antisense strand to SEQ ID NO: 773114
ugauucauccauguuuacg

SEQ ID NO: 773116 - RNA, 19 nt, Artificial Sequence
  Description of Artificial Sequence: Synthetic oligonucleotide
  Sense strand starting at position 562 of SEQ ID NO: 587186
ggaguuucagggugggaca

SEQ ID NO: 773117 - RNA, 19 nt, Artificial Sequence
  Description of Artificial Sequence: Synthetic oligonucleotide
  Antisense strand to SEQ ID NO: 773116
ugucccacccugaaacucc

SEQ ID NO: 773118 - RNA, 19 nt, Artificial Sequence
  Description of Artificial Sequence: Synthetic oligonucleotide
  Sense strand starting at position 1029 of SEQ ID NO: 587186
acccuuuaaucaguaaggu

SEQ ID NO: 773119 - RNA, 19 nt, Artificial Sequence
  Description of Artificial Sequence: Synthetic oligonucleotide
  Antisense strand to SEQ ID NO: 773118
accuuacugauuaaagggu

SEQ ID NO: 773120 - RNA, 19 nt, Artificial Sequence
  Description of Artificial Sequence: Synthetic oligonucleotide
  Sense strand starting at position 1030 of SEQ ID NO: 587186
cccuuuaaucaguaaggug

SEQ ID NO: 773121 - RNA, 19 nt, Artificial Sequence
  Description of Artificial Sequence: Synthetic oligonucleotide
  Antisense strand to SEQ ID NO: 773120
caccuuacugauuaaaggg

SEQ ID NO: 773122 - RNA, 19 nt, Artificial Sequence
  Description of Artificial Sequence: Synthetic oligonucleotide
  Sense strand starting at position 1059 of SEQ ID NO: 587186
ucacgauuccgggacaaau

SEQ ID NO: 773123 - RNA, 19 nt, Artificial Sequence
  Description of Artificial Sequence: Synthetic oligonucleotide
  Antisense strand to SEQ ID NO: 773122
auuugucccggaaucguga

SEQ ID NO: 773124 - RNA, 19 nt, Artificial Sequence
  Description of Artificial Sequence: Synthetic oligonucleotide
  Sense strand starting at position 1109 of SEQ ID NO: 587186
gggacuacuuucucaugga

SEQ ID NO: 773125 - RNA, 19 nt, Artificial Sequence
  Description of Artificial Sequence: Synthetic oligonucleotide
  Antisense strand to SEQ ID NO: 773124
uccaugagaaaguaguccc

SEQ ID NO: 773126 - RNA, 19 nt, Artificial Sequence
  Description of Artificial Sequence: Synthetic oligonucleotide
  Sense strand starting at position 1304 of SEQ ID NO: 587186
ugcgucuucguguuucuca

SEQ ID NO: 773127 - RNA, 19 nt, Artificial Sequence
  Description of Artificial Sequence: Synthetic oligonucleotide
  Antisense strand to SEQ ID NO: 773126
ugagaaacacgaagacgca

SEQ ID NO: 773128 - RNA, 19 nt, Artificial Sequence
  Description of Artificial Sequence: Synthetic oligonucleotide
  Sense strand starting at position 2389 of SEQ ID NO: 587186
gcgugugcuguucuggaau

SEQ ID NO: 773129 - RNA, 19 nt, Artificial Sequence
  Description of Artificial Sequence: Synthetic oligonucleotide
  Antisense strand to SEQ ID NO: 773128
auuccagaacagcacacgc

SEQ ID NO: 773130 - RNA, 19 nt, Artificial Sequence
  Description of Artificial Sequence: Synthetic oligonucleotide
  Sense strand starting at position 2392 of SEQ ID NO: 587186
ugugcuguucuggaauuga

SEQ ID NO: 773131 - RNA, 19 nt, Artificial Sequence
  Description of Artificial Sequence: Synthetic oligonucleotide
  Antisense strand to SEQ ID NO: 773130
ucaauuccagaacagcaca

SEQ ID NO: 773132 - RNA, 19 nt, Artificial Sequence
  Description of Artificial Sequence: Synthetic oligonucleotide
  Sense strand starting at position 2502 of SEQ ID NO: 587186
gggagcucugcgcuguaua

SEQ ID NO: 773133 - RNA, 19 nt, Artificial Sequence
  Description of Artificial Sequence: Synthetic oligonucleotide
  Antisense strand to SEQ ID NO: 773132
uauacagcgcagagcuccc

SEQ ID NO: 773134 - RNA, 19 nt, Artificial Sequence
  Description of Artificial Sequence: Synthetic oligonucleotide
  Sense strand starting at position 2541 of SEQ ID NO: 587186
gugccucugaguucugcau

SEQ ID NO: 773135 - RNA, 19 nt, Artificial Sequence
  Description of Artificial Sequence: Synthetic oligonucleotide
  Antisense strand to SEQ ID NO: 773134
augcagaacucagaggcac

SEQ ID NO: 773136 - RNA, 19 nt, Artificial Sequence
  Description of Artificial Sequence: Synthetic oligonucleotide
  Sense strand starting at position 2768 of SEQ ID NO: 587186
gugggaaagaucuguuucu

SEQ ID NO: 773137 - RNA, 19 nt, Artificial Sequence
  Description of Artificial Sequence: Synthetic oligonucleotide
  Antisense strand to SEQ ID NO: 773136
agaaacagaucuuucccac

SEQ ID NO: 773138 - RNA, 19 nt, Artificial Sequence
  Description of Artificial Sequence: Synthetic oligonucleotide
  Sense strand starting at position 2769 of SEQ ID NO: 587186
ugggaaagaucuguuucuc

SEQ ID NO: 773139 - RNA, 19 nt, Artificial Sequence
  Description of Artificial Sequence: Synthetic oligonucleotide
  Antisense strand to SEQ ID NO: 773138
gagaaacagaucuuuccca

SEQ ID NO: 773140 - RNA, 19 nt, Artificial Sequence
  Description of Artificial Sequence: Synthetic oligonucleotide
  Sense strand starting at position 2878 of SEQ ID NO: 587186
ugcugaagguaguuucaga

SEQ ID NO: 773141 - RNA, 19 nt, Artificial Sequence
  Description of Artificial Sequence: Synthetic oligonucleotide
  Antisense strand to SEQ ID NO: 773140
ucugaaacuaccuucagca

SEQ ID NO: 773142 - RNA, 19 nt, Artificial Sequence
  Description of Artificial Sequence: Synthetic oligonucleotide
  Sense strand starting at position 2894 of SEQ ID NO: 587186
agagaagcacaucaguguu

SEQ ID NO: 773143 - RNA, 19 nt, Artificial Sequence
  Description of Artificial Sequence: Synthetic oligonucleotide
  Antisense strand to SEQ ID NO: 773142
aacacugaugugcuucucu

SEQ ID NO: 773144 - RNA, 19 nt, Artificial Sequence
  Description of Artificial Sequence: Synthetic oligonucleotide
  Sense strand starting at position 2904 of SEQ ID NO: 587186
aucaguguuaagcagauga

SEQ ID NO: 773145 - RNA, 19 nt, Artificial Sequence
  Description of Artificial Sequence: Synthetic oligonucleotide
  Antisense strand to SEQ ID NO: 773144
ucaucugcuuaacacugau

SEQ ID NO: 773146 - RNA, 19 nt, Artificial Sequence
  Description of Artificial Sequence: Synthetic oligonucleotide
  Sense strand starting at position 2906 of SEQ ID NO: 587186
caguguuaagcagaugaga

SEQ ID NO: 773147 - RNA, 19 nt, Artificial Sequence
  Description of Artificial Sequence: Synthetic oligonucleotide
  Antisense strand to SEQ ID NO: 773146
ucucaucugcuuaacacug

SEQ ID NO: 773148 - RNA, 19 nt, Artificial Sequence
  Description of Artificial Sequence: Synthetic oligonucleotide
  Sense strand starting at position 2908 of SEQ ID NO: 587186
guguuaagcagaugagaaa

SEQ ID NO: 773149 - RNA, 19 nt, Artificial Sequence
  Description of Artificial Sequence: Synthetic oligonucleotide
  Antisense strand to SEQ ID NO: 773148
uuucucaucugcuuaacac

SEQ ID NO: 773150 - RNA, 19 nt, Artificial Sequence
  Description of Artificial Sequence: Synthetic oligonucleotide
  Sense strand starting at position 2962 of SEQ ID NO: 587186
gaccgcucccucuaggaaa

SEQ ID NO: 773151 - RNA, 19 nt, Artificial Sequence
  Description of Artificial Sequence: Synthetic oligonucleotide
  Antisense strand to SEQ ID NO: 773150
uuuccuagagggagcgguc

SEQ ID NO: 773152 - RNA, 19 nt, Artificial Sequence
  Description of Artificial Sequence: Synthetic oligonucleotide
  Sense strand starting at position 2995 of SEQ ID NO: 587186
aaaugaauugggugguuag

SEQ ID NO: 773153 - RNA, 19 nt, Artificial Sequence
  Description of Artificial Sequence: Synthetic oligonucleotide
  Antisense strand to SEQ ID NO: 773152
cuaaccacccaauucauuu

SEQ ID NO: 773154 - RNA, 19 nt, Artificial Sequence
  Description of Artificial Sequence: Synthetic oligonucleotide
  Sense strand starting at position 3005 of SEQ ID NO: 587186
ggugguuagcguaaaucga

SEQ ID NO: 773155 - RNA, 19 nt, Artificial Sequence
  Description of Artificial Sequence: Synthetic oligonucleotide
  Antisense strand to SEQ ID NO: 773154
ucgauuuacgcuaaccacc

SEQ ID NO: 773156 - RNA, 19 nt, Artificial Sequence
  Description of Artificial Sequence: Synthetic oligonucleotide
  Sense strand starting at position 3009 of SEQ ID NO: 587186
guuagcguaaaucgaauuu

SEQ ID NO: 773157 - RNA, 19 nt, Artificial Sequence
  Description of Artificial Sequence: Synthetic oligonucleotide
  Antisense strand to SEQ ID NO: 773156
aaauucgauuuacgcuaac

SEQ ID NO: 773158 - RNA, 19 nt, Artificial Sequence
  Description of Artificial Sequence: Synthetic oligonucleotide
  Sense strand starting at position 3203 of SEQ ID NO: 587186
auguaaugcuccuuauuug

SEQ ID NO: 773159 - RNA, 19 nt, Artificial Sequence
  Description of Artificial Sequence: Synthetic oligonucleotide
  Antisense strand to SEQ ID NO: 773158
caaauaaggagcauuacau

SEQ ID NO: 773160 - RNA, 19 nt, Artificial Sequence
  Description of Artificial Sequence: Synthetic oligonucleotide
  Sense strand starting at position 3210 of SEQ ID NO: 587186
gcuccuuauuugcauuuga

SEQ ID NO: 773161 - RNA, 19 nt, Artificial Sequence
  Description of Artificial Sequence: Synthetic oligonucleotide
  Antisense strand to SEQ ID NO: 773160
ucaaaugcaaauaaggagc

SEQ ID NO: 773162 - RNA, 19 nt, Artificial Sequence
  Description of Artificial Sequence: Synthetic oligonucleotide
  Sense strand starting at position 3265 of SEQ ID NO: 587186
uccuuuggcagguacagau

SEQ ID NO: 773163 - RNA, 19 nt, Artificial Sequence
  Description of Artificial Sequence: Synthetic oligonucleotide
  Antisense strand to SEQ ID NO: 773162
aucuguaccugccaaagga

SEQ ID NO: 773164 - RNA, 19 nt, Artificial Sequence
  Description of Artificial Sequence: Synthetic oligonucleotide
  Sense strand starting at position 3340 of SEQ ID NO: 587186
cucuuuaagugauugggaa

SEQ ID NO: 773165 - RNA, 19 nt, Artificial Sequence
  Description of Artificial Sequence: Synthetic oligonucleotide
  Antisense strand to SEQ ID NO: 773164
uucccaaucacuuaaagag

SEQ ID NO: 773166 - RNA, 19 nt, Artificial Sequence
  Description of Artificial Sequence: Synthetic oligonucleotide
  Sense strand starting at position 3341 of SEQ ID NO: 587186
ucuuuaagugauugggaau

SEQ ID NO: 773167 - RNA, 19 nt, Artificial Sequence
  Description of Artificial Sequence: Synthetic oligonucleotide
  Antisense strand to SEQ ID NO: 773166
auucccaaucacuuaaaga

SEQ ID NO: 773168 - RNA, 19 nt, Artificial Sequence
  Description of Artificial Sequence: Synthetic oligonucleotide
  Sense strand starting at position 3342 of SEQ ID NO: 587186
cuuuaagugauugggaauc

SEQ ID NO: 773169 - RNA, 19 nt, Artificial Sequence
  Description of Artificial Sequence: Synthetic oligonucleotide
  Antisense strand to SEQ ID NO: 773168
gauucccaaucacuuaaag

SEQ ID NO: 773170 - RNA, 19 nt, Artificial Sequence
  Description of Artificial Sequence: Synthetic oligonucleotide
  Sense strand starting at position 3363 of SEQ ID NO: 587186
cuggaauauuccucucugu

SEQ ID NO: 773171 - RNA, 19 nt, Artificial Sequence
  Description of Artificial Sequence: Synthetic oligonucleotide
  Antisense strand to SEQ ID NO: 773170
acagagaggaauauuccag

SEQ ID NO: 773172 - RNA, 19 nt, Artificial Sequence
  Description of Artificial Sequence: Synthetic oligonucleotide
  Sense strand starting at position 3453 of SEQ ID NO: 587186
aauguauuauuugggauag

SEQ ID NO: 773173 - RNA, 19 nt, Artificial Sequence
  Description of Artificial Sequence: Synthetic oligonucleotide
  Antisense strand to SEQ ID NO: 773172
cuaucccaaauaauacauu

SEQ ID NO: 773174 - RNA, 19 nt, Artificial Sequence
  Description of Artificial Sequence: Synthetic oligonucleotide
  Sense strand starting at position 3527 of SEQ ID NO: 587186
uuguaaauguggucauaaa

SEQ ID NO: 773175 - RNA, 19 nt, Artificial Sequence
  Description of Artificial Sequence: Synthetic oligonucleotide
  Antisense strand to SEQ ID NO: 773174
uuuaugaccacauuuacaa

SEQ ID NO: 773176 - RNA, 19 nt, Artificial Sequence
  Description of Artificial Sequence: Synthetic oligonucleotide
  Sense strand starting at position 3528 of SEQ ID NO: 587186
uguaaauguggucauaaau

SEQ ID NO: 773177 - RNA, 19 nt, Artificial Sequence
  Description of Artificial Sequence: Synthetic oligonucleotide
  Antisense strand to SEQ ID NO: 773176
auuuaugaccacauuuaca

SEQ ID NO: 773178 - RNA, 19 nt, Artificial Sequence
  Description of Artificial Sequence: Synthetic oligonucleotide
  Sense strand starting at position 3534 of SEQ ID NO: 587186
uguggucauaaaugggaau

SEQ ID NO: 773179 - RNA, 19 nt, Artificial Sequence
  Description of Artificial Sequence: Synthetic oligonucleotide
  Antisense strand to SEQ ID NO: 773178
auucccauuuaugaccaca

SEQ ID NO: 773180 - RNA, 19 nt, Artificial Sequence
  Description of Artificial Sequence: Synthetic oligonucleotide
  Sense strand starting at position 3535 of SEQ ID NO: 587186
guggucauaaaugggaauu

SEQ ID NO: 773181 - RNA, 19 nt, Artificial Sequence
  Description of Artificial Sequence: Synthetic oligonucleotide
  Antisense strand to SEQ ID NO: 773180
aauucccauuuaugaccac

SEQ ID NO: 773182 - RNA, 19 nt, Artificial Sequence
  Description of Artificial Sequence: Synthetic oligonucleotide
  Sense strand starting at position 265 of SEQ ID NO: 587187
ugcauauauugaguuagau

SEQ ID NO: 773183 - RNA, 19 nt, Artificial Sequence
  Description of Artificial Sequence: Synthetic oligonucleotide
  Antisense strand to SEQ ID NO: 773182
aucuaacucaauauaugca

SEQ ID NO: 773184 - RNA, 19 nt, Artificial Sequence
  Description of Artificial Sequence: Synthetic oligonucleotide
  Sense strand starting at position 461 of SEQ ID NO: 587187
aaacgugacgccuagagaa

SEQ ID NO: 773185 - RNA, 19 nt, Artificial Sequence
  Description of Artificial Sequence: Synthetic oligonucleotide
  Antisense strand to SEQ ID NO: 773184
uucucuaggcgucacguuu

SEQ ID NO: 773186 - RNA, 19 nt, Artificial Sequence
  Description of Artificial Sequence: Synthetic oligonucleotide
  Sense strand starting at position 463 of SEQ ID NO: 587187
acgugacgccuagagaauu

SEQ ID NO: 773187 - RNA, 19 nt, Artificial Sequence
  Description of Artificial Sequence: Synthetic oligonucleotide
  Antisense strand to SEQ ID NO: 773186
aauucucuaggcgucacgu

SEQ ID NO: 773188 - RNA, 19 nt, Artificial Sequence
  Description of Artificial Sequence: Synthetic oligonucleotide
  Sense strand starting at position 553 of SEQ ID NO: 587187
uacugaucaugauagcuga

SEQ ID NO: 773189 - RNA, 19 nt, Artificial Sequence
  Description of Artificial Sequence: Synthetic oligonucleotide
  Antisense strand to SEQ ID NO: 773188
ucagcuaucaugaucagua

SEQ ID NO: 773190 - RNA, 19 nt, Artificial Sequence
  Description of Artificial Sequence: Synthetic oligonucleotide
  Sense strand starting at position 556 of SEQ ID NO: 587187
ugaucaugauagcugauga

SEQ ID NO: 773191 - RNA, 19 nt, Artificial Sequence
  Description of Artificial Sequence: Synthetic oligonucleotide
  Antisense strand to SEQ ID NO: 773190
ucaucagcuaucaugauca

SEQ ID NO: 773192 - RNA, 19 nt, Artificial Sequence
  Description of Artificial Sequence: Synthetic oligonucleotide
  Sense strand starting at position 631 of SEQ ID NO: 587187
aucucaugauguucuagga

SEQ ID NO: 773193 - RNA, 19 nt, Artificial Sequence
  Description of Artificial Sequence: Synthetic oligonucleotide
  Antisense strand to SEQ ID NO: 773192
uccuagaacaucaugagau

SEQ ID NO: 773194 - RNA, 19 nt, Artificial Sequence
  Description of Artificial Sequence: Synthetic oligonucleotide
  Sense strand starting at position 744 of SEQ ID NO: 587187
guaugcggcuucccuuaua

SEQ ID NO: 773195 - RNA, 19 nt, Artificial Sequence
  Description of Artificial Sequence: Synthetic oligonucleotide
  Antisense strand to SEQ ID NO: 773194
uauaagggaagccgcauac

SEQ ID NO: 773196 - RNA, 19 nt, Artificial Sequence
  Description of Artificial Sequence: Synthetic oligonucleotide
  Sense strand starting at position 747 of SEQ ID NO: 587187
ugcggcuucccuuauauuu

SEQ ID NO: 773197 - RNA, 19 nt, Artificial Sequence
  Description of Artificial Sequence: Synthetic oligonucleotide
  Antisense strand to SEQ ID NO: 773196
aaauauaagggaagccgca

SEQ ID NO: 773198 - RNA, 19 nt, Artificial Sequence
  Description of Artificial Sequence: Synthetic oligonucleotide
  Sense strand starting at position 789 of SEQ ID NO: 587187
acaggaucaucgcuaccau

SEQ ID NO: 773199 - RNA, 19 nt, Artificial Sequence
  Description of Artificial Sequence: Synthetic oligonucleotide
  Antisense strand to SEQ ID NO: 773198
augguagcgaugauccugu

SEQ ID NO: 773200 - RNA, 19 nt, Artificial Sequence
  Description of Artificial Sequence: Synthetic oligonucleotide
  Sense strand starting at position 984 of SEQ ID NO: 587187
agaccucuuggguggcaaa

SEQ ID NO: 773201 - RNA, 19 nt, Artificial Sequence
  Description of Artificial Sequence: Synthetic oligonucleotide
  Antisense strand to SEQ ID NO: 773200
uuugccacccaagaggucu

SEQ ID NO: 773202 - RNA, 19 nt, Artificial Sequence
  Description of Artificial Sequence: Synthetic oligonucleotide
  Sense strand starting at position 985 of SEQ ID NO: 587187
gaccucuuggguggcaaau

SEQ ID NO: 773203 - RNA, 19 nt, Artificial Sequence
  Description of Artificial Sequence: Synthetic oligonucleotide
  Antisense strand to SEQ ID NO: 773202
auuugccacccaagagguc

SEQ ID NO: 773204 - RNA, 19 nt, Artificial Sequence
  Description of Artificial Sequence: Synthetic oligonucleotide
  Sense strand starting at position 1311 of SEQ ID NO: 587187
ucagauugcuggugacgaa

SEQ ID NO: 773205 - RNA, 19 nt, Artificial Sequence
  Description of Artificial Sequence: Synthetic oligonucleotide
  Antisense strand to SEQ ID NO: 773204
uucgucaccagcaaucuga

SEQ ID NO: 773206 - RNA, 19 nt, Artificial Sequence
  Description of Artificial Sequence: Synthetic oligonucleotide
  Sense strand starting at position 2197 of SEQ ID NO: 587187
cucacauucccacgagaag

SEQ ID NO: 773207 - RNA, 19 nt, Artificial Sequence
  Description of Artificial Sequence: Synthetic oligonucleotide
  Antisense strand to SEQ ID NO: 773206
cuucucgugggaaugugag

SEQ ID NO: 773208 - RNA, 19 nt, Artificial Sequence
  Description of Artificial Sequence: Synthetic oligonucleotide
  Sense strand starting at position 2354 of SEQ ID NO: 587187
ggaaaugugcagggugaga

SEQ ID NO: 773209 - RNA, 19 nt, Artificial Sequence
  Description of Artificial Sequence: Synthetic oligonucleotide
  Antisense strand to SEQ ID NO: 773208
ucucacccugcacauuucc

SEQ ID NO: 773210 - RNA, 19 nt, Artificial Sequence
  Description of Artificial Sequence: Synthetic oligonucleotide
  Sense strand starting at position 2395 of SEQ ID NO: 587187
gagccuauggguggaauga

SEQ ID NO: 773211 - RNA, 19 nt, Artificial Sequence
  Description of Artificial Sequence: Synthetic oligonucleotide
  Antisense strand to SEQ ID NO: 773210
ucauuccacccauaggcuc

SEQ ID NO: 773212 - RNA, 19 nt, Artificial Sequence
  Description of Artificial Sequence: Synthetic oligonucleotide
  Sense strand starting at position 2397 of SEQ ID NO: 587187
gccuauggguggaaugagu

SEQ ID NO: 773213 - RNA, 19 nt, Artificial Sequence
  Description of Artificial Sequence: Synthetic oligonucleotide
  Antisense strand to SEQ ID NO: 773212
acucauuccacccauaggc

SEQ ID NO: 773214 - RNA, 19 nt, Artificial Sequence
  Description of Artificial Sequence: Synthetic oligonucleotide
  Sense strand starting at position 2449 of SEQ ID NO: 587187
auagaucauuugcggaaau

SEQ ID NO: 773215 - RNA, 19 nt, Artificial Sequence
  Description of Artificial Sequence: Synthetic oligonucleotide
  Antisense strand to SEQ ID NO: 773214
auuuccgcaaaugaucuau

SEQ ID NO: 773216 - RNA, 19 nt, Artificial Sequence
  Description of Artificial Sequence: Synthetic oligonucleotide
  Sense strand starting at position 2450 of SEQ ID NO: 587187
uagaucauuugcggaaauu

SEQ ID NO: 773217 - RNA, 19 nt, Artificial Sequence
  Description of Artificial Sequence: Synthetic oligonucleotide
  Antisense strand to SEQ ID NO: 773216
aauuuccgcaaaugaucua

SEQ ID NO: 773218 - RNA, 19 nt, Artificial Sequence
  Description of Artificial Sequence: Synthetic oligonucleotide
  Sense strand starting at position 2462 of SEQ ID NO: 587187
ggaaauuacaaaugugguu

SEQ ID NO: 773219 - RNA, 19 nt, Artificial Sequence
  Description of Artificial Sequence: Synthetic oligonucleotide
  Antisense strand to SEQ ID NO: 773218
aaccacauuuguaauuucc

SEQ ID NO: 773220 - RNA, 19 nt, Artificial Sequence
  Description of Artificial Sequence: Synthetic oligonucleotide
  Sense strand starting at position 2467 of SEQ ID NO: 587187
uuacaaaugugguugccaa

SEQ ID NO: 773221 - RNA, 19 nt, Artificial Sequence
  Description of Artificial Sequence: Synthetic oligonucleotide
  Antisense strand to SEQ ID NO: 773220
uuggcaaccacauuuguaa

SEQ ID NO: 773222 - RNA, 19 nt, Artificial Sequence
  Description of Artificial Sequence: Synthetic oligonucleotide
  Sense strand starting at position 2509 of SEQ ID NO: 587187
cggccuguguugggaucaa

SEQ ID NO: 773223 - RNA, 19 nt, Artificial Sequence
  Description of Artificial Sequence: Synthetic oligonucleotide
  Antisense strand to SEQ ID NO: 773222
uugaucccaacacaggccg

SEQ ID NO: 773224 - RNA, 19 nt, Artificial Sequence
  Description of Artificial Sequence: Synthetic oligonucleotide
  Sense strand starting at position 2513 of SEQ ID NO: 587187
cuguguugggaucaauaau

SEQ ID NO: 773225 - RNA, 19 nt, Artificial Sequence
  Description of Artificial Sequence: Synthetic oligonucleotide
  Antisense strand to SEQ ID NO: 773224
auuauugaucccaacacag

SEQ ID NO: 773226 - RNA, 19 nt, Artificial Sequence
  Description of Artificial Sequence: Synthetic oligonucleotide
  Sense strand starting at position 3024 of SEQ ID NO: 587187
gcccgagcaucuuggacua

SEQ ID NO: 773227 - RNA, 19 nt, Artificial Sequence
  Description of Artificial Sequence: Synthetic oligonucleotide
  Antisense strand to SEQ ID NO: 773226
uaguccaagaugcucgggc

SEQ ID NO: 773228 - RNA, 19 nt, Artificial Sequence
  Description of Artificial Sequence: Synthetic oligonucleotide
  Sense strand starting at position 3195 of SEQ ID NO: 587187
guuugcugcgucugagcaa

SEQ ID NO: 773229 - RNA, 19 nt, Artificial Sequence
  Description of Artificial Sequence: Synthetic oligonucleotide
  Antisense strand to SEQ ID NO: 773228
uugcucagacgcagcaaac

SEQ ID NO: 773230 - RNA, 19 nt, Artificial Sequence
  Description of Artificial Sequence: Synthetic oligonucleotide
  Sense strand starting at position 3196 of SEQ ID NO: 587187
uuugcugcgucugagcaaa

SEQ ID NO: 773231 - RNA, 19 nt, Artificial Sequence
  Description of Artificial Sequence: Synthetic oligonucleotide
  Antisense strand to SEQ ID NO: 773230
uuugcucagacgcagcaaa

SEQ ID NO: 773232 - RNA, 19 nt, Artificial Sequence
  Description of Artificial Sequence: Synthetic oligonucleotide
  Sense strand starting at position 3620 of SEQ ID NO: 587187
gcaagucuauaugcagaga

SEQ ID NO: 773233 - RNA, 19 nt, Artificial Sequence
  Description of Artificial Sequence: Synthetic oligonucleotide
  Antisense strand to SEQ ID NO: 773232
ucucugcauauagacuugc

SEQ ID NO: 773234 - RNA, 19 nt, Artificial Sequence
  Description of Artificial Sequence: Synthetic oligonucleotide
  Sense strand starting at position 3709 of SEQ ID NO: 587187
auccaucucugcuaggaau

SEQ ID NO: 773235 - RNA, 19 nt, Artificial Sequence
  Description of Artificial Sequence: Synthetic oligonucleotide
  Antisense strand to SEQ ID NO: 773234
auuccuagcagagauggau

SEQ ID NO: 773236 - RNA, 19 nt, Artificial Sequence
  Description of Artificial Sequence: Synthetic oligonucleotide
  Sense strand starting at position 3741 of SEQ ID NO: 587187
guuagaguuuguaagggua

SEQ ID NO: 773237 - RNA, 19 nt, Artificial Sequence
  Description of Artificial Sequence: Synthetic oligonucleotide
  Antisense strand to SEQ ID NO: 773236
uacccuuacaaacucuaac

SEQ ID NO: 773238 - RNA, 19 nt, Artificial Sequence
  Description of Artificial Sequence: Synthetic oligonucleotide
  Sense strand starting at position 3743 of SEQ ID NO: 587187
uagaguuuguaaggguaau

SEQ ID NO: 773239 - RNA, 19 nt, Artificial Sequence
  Description of Artificial Sequence: Synthetic oligonucleotide
  Antisense strand to SEQ ID NO: 773238
auuacccuuacaaacucua

SEQ ID NO: 773240 - RNA, 19 nt, Artificial Sequence
  Description of Artificial Sequence: Synthetic oligonucleotide
  Sense strand starting at position 3744 of SEQ ID NO: 587187
agaguuuguaaggguaaug

SEQ ID NO: 773241 - RNA, 19 nt, Artificial Sequence
  Description of Artificial Sequence: Synthetic oligonucleotide
  Antisense strand to SEQ ID NO: 773240
cauuacccuuacaaacucu

SEQ ID NO: 773242 - RNA, 19 nt, Artificial Sequence
  Description of Artificial Sequence: Synthetic oligonucleotide
  Sense strand starting at position 3755 of SEQ ID NO: 587187
ggguaauggaguugacuga

SEQ ID NO: 773243 - RNA, 19 nt, Artificial Sequence
  Description of Artificial Sequence: Synthetic oligonucleotide
  Antisense strand to SEQ ID NO: 773242
ucagucaacuccauuaccc

SEQ ID NO: 773244 - RNA, 19 nt, Artificial Sequence
  Description of Artificial Sequence: Synthetic oligonucleotide
  Sense strand starting at position 3766 of SEQ ID NO: 587187
uugacugauuggugggaga

SEQ ID NO: 773245 - RNA, 19 nt, Artificial Sequence
  Description of Artificial Sequence: Synthetic oligonucleotide
  Antisense strand to SEQ ID NO: 773244
ucucccaccaaucagucaa

SEQ ID NO: 773246 - RNA, 19 nt, Artificial Sequence
  Description of Artificial Sequence: Synthetic oligonucleotide
  Sense strand starting at position 3768 of SEQ ID NO: 587187
gacugauuggugggagagu

SEQ ID NO: 773247 - RNA, 19 nt, Artificial Sequence
  Description of Artificial Sequence: Synthetic oligonucleotide
  Antisense strand to SEQ ID NO: 773246
acucucccaccaaucaguc

SEQ ID NO: 773248 - RNA, 19 nt, Artificial Sequence
  Description of Artificial Sequence: Synthetic oligonucleotide
  Sense strand starting at position 3777 of SEQ ID NO: 587187
gugggagagugcuggugaa

SEQ ID NO: 773249 - RNA, 19 nt, Artificial Sequence
  Description of Artificial Sequence: Synthetic oligonucleotide
  Antisense strand to SEQ ID NO: 773248
uucaccagcacucucccac

SEQ ID NO: 773250 - RNA, 19 nt, Artificial Sequence
  Description of Artificial Sequence: Synthetic oligonucleotide
  Sense strand starting at position 3778 of SEQ ID NO: 587187
ugggagagugcuggugaaa

SEQ ID NO: 773251 - RNA, 19 nt, Artificial Sequence
  Description of Artificial Sequence: Synthetic oligonucleotide
  Antisense strand to SEQ ID NO: 773250
uuucaccagcacucuccca

SEQ ID NO: 773252 - RNA, 19 nt, Artificial Sequence
  Description of Artificial Sequence: Synthetic oligonucleotide
  Sense strand starting at position 3789 of SEQ ID NO: 587187
uggugaaaucgugguacaa

SEQ ID NO: 773253 - RNA, 19 nt, Artificial Sequence
  Description of Artificial Sequence: Synthetic oligonucleotide
  Antisense strand to SEQ ID NO: 773252
uuguaccacgauuucacca

SEQ ID NO: 773254 - RNA, 19 nt, Artificial Sequence
  Description of Artificial Sequence: Synthetic oligonucleotide
  Sense strand starting at position 3791 of SEQ ID NO: 587187
gugaaaucgugguacaagg

SEQ ID NO: 773255 - RNA, 19 nt, Artificial Sequence
  Description of Artificial Sequence: Synthetic oligonucleotide
  Antisense strand to SEQ ID NO: 773254
ccuuguaccacgauuucac

SEQ ID NO: 773256 - RNA, 19 nt, Artificial Sequence
  Description of Artificial Sequence: Synthetic oligonucleotide
  Sense strand starting at position 3887 of SEQ ID NO: 587187
accggaacucguggucuga

SEQ ID NO: 773257 - RNA, 19 nt, Artificial Sequence
  Description of Artificial Sequence: Synthetic oligonucleotide
  Antisense strand to SEQ ID NO: 773256
ucagaccacgaguuccggu

SEQ ID NO: 773258 - RNA, 19 nt, Artificial Sequence
  Description of Artificial Sequence: Synthetic oligonucleotide
  Sense strand starting at position 3889 of SEQ ID NO: 587187
cggaacucguggucugaaa

SEQ ID NO: 773259 - RNA, 19 nt, Artificial Sequence
  Description of Artificial Sequence: Synthetic oligonucleotide
  Antisense strand to SEQ ID NO: 773258
uuucagaccacgaguuccg

SEQ ID NO: 773260 - RNA, 19 nt, Artificial Sequence
  Description of Artificial Sequence: Synthetic oligonucleotide
  Sense strand starting at position 102 of SEQ ID NO: 587188
uccggauggccuuguuauu

SEQ ID NO: 773261 - RNA, 19 nt, Artificial Sequence
  Description of Artificial Sequence: Synthetic oligonucleotide
  Antisense strand to SEQ ID NO: 773260
aauaacaaggccauccgga

SEQ ID NO: 773262 - RNA, 19 nt, Artificial Sequence
  Description of Artificial Sequence: Synthetic oligonucleotide
  Sense strand starting at position 694 of SEQ ID NO: 587188
agaggaauauuccaggaga

SEQ ID NO: 773263 - RNA, 19 nt, Artificial Sequence
  Description of Artificial Sequence: Synthetic oligonucleotide
  Antisense strand to SEQ ID NO: 773262
ucuccuggaauauuccucu

SEQ ID NO: 773264 - RNA, 19 nt, Artificial Sequence
  Description of Artificial Sequence: Synthetic oligonucleotide
  Sense strand starting at position 924 of SEQ ID NO: 587188
aguuauacuuaacugaaug

SEQ ID NO: 773265 - RNA, 19 nt, Artificial Sequence
  Description of Artificial Sequence: Synthetic oligonucleotide
  Antisense strand to SEQ ID NO: 773264
cauucaguuaaguauaacu

SEQ ID NO: 773266 - RNA, 19 nt, Artificial Sequence
  Description of Artificial Sequence: Synthetic oligonucleotide
  Sense strand starting at position 942 of SEQ ID NO: 587188
guaacaggguuucuuggau

SEQ ID NO: 773267 - RNA, 19 nt, Artificial Sequence
  Description of Artificial Sequence: Synthetic oligonucleotide
  Antisense strand to SEQ ID NO: 773266
auccaagaaacccuguuac

SEQ ID NO: 773268 - RNA, 19 nt, Artificial Sequence
  Description of Artificial Sequence: Synthetic oligonucleotide
  Sense strand starting at position 946 of SEQ ID NO: 587188
caggguuucuuggauuaag

SEQ ID NO: 773269 - RNA, 19 nt, Artificial Sequence
  Description of Artificial Sequence: Synthetic oligonucleotide
  Antisense strand to SEQ ID NO: 773268
cuuaauccaagaaacccug

SEQ ID NO: 773270 - RNA, 19 nt, Artificial Sequence
  Description of Artificial Sequence: Synthetic oligonucleotide
  Sense strand starting at position 1029 of SEQ ID NO: 587188
uacagcauuuacgguaaau

SEQ ID NO: 773271 - RNA, 19 nt, Artificial Sequence
  Description of Artificial Sequence: Synthetic oligonucleotide
  Antisense strand to SEQ ID NO: 773270
auuuaccguaaaugcugua

SEQ ID NO: 773272 - RNA, 19 nt, Artificial Sequence
  Description of Artificial Sequence: Synthetic oligonucleotide
  Sense strand starting at position 1164 of SEQ ID NO: 587188
ugaugugcuucucugaaac

SEQ ID NO: 773273 - RNA, 19 nt, Artificial Sequence
  Description of Artificial Sequence: Synthetic oligonucleotide
  Antisense strand to SEQ ID NO: 773272
guuucagagaagcacauca

SEQ ID NO: 773274 - RNA, 19 nt, Artificial Sequence
  Description of Artificial Sequence: Synthetic oligonucleotide
  Sense strand starting at position 1247 of SEQ ID NO: 587188
cagggacagcguuguugau

SEQ ID NO: 773275 - RNA, 19 nt, Artificial Sequence
  Description of Artificial Sequence: Synthetic oligonucleotide
  Antisense strand to SEQ ID NO: 773274
aucaacaacgcugucccug

SEQ ID NO: 773276 - RNA, 19 nt, Artificial Sequence
  Description of Artificial Sequence: Synthetic oligonucleotide
  Sense strand starting at position 1261 of SEQ ID NO: 587188
uugaucugagccuacaaca

SEQ ID NO: 773277 - RNA, 19 nt, Artificial Sequence
  Description of Artificial Sequence: Synthetic oligonucleotide
  Antisense strand to SEQ ID NO: 773276
uguuguaggcucagaucaa

SEQ ID NO: 773278 - RNA, 19 nt, Artificial Sequence
  Description of Artificial Sequence: Synthetic oligonucleotide
  Sense strand starting at position 1280 of SEQ ID NO: 587188
ggccgagaaacagaucuuu

SEQ ID NO: 773279 - RNA, 19 nt, Artificial Sequence
  Description of Artificial Sequence: Synthetic oligonucleotide
  Antisense strand to SEQ ID NO: 773278
aaagaucuguuucucggcc

SEQ ID NO: 773280 - RNA, 19 nt, Artificial Sequence
  Description of Artificial Sequence: Synthetic oligonucleotide
  Sense strand starting at position 1303 of SEQ ID NO: 587188
cccggauucuuucucccaa

SEQ ID NO: 773281 - RNA, 19 nt, Artificial Sequence
  Description of Artificial Sequence: Synthetic oligonucleotide
  Antisense strand to SEQ ID NO: 773280
uugggagaaagaauccggg

SEQ ID NO: 773282 - RNA, 19 nt, Artificial Sequence
  Description of Artificial Sequence: Synthetic oligonucleotide
  Sense strand starting at position 1304 of SEQ ID NO: 587188
ccggauucuuucucccaaa

SEQ ID NO: 773283 - RNA, 19 nt, Artificial Sequence
  Description of Artificial Sequence: Synthetic oligonucleotide
  Antisense strand to SEQ ID NO: 773282
uuugggagaaagaauccgg

SEQ ID NO: 773284 - RNA, 19 nt, Artificial Sequence
  Description of Artificial Sequence: Synthetic oligonucleotide
  Sense strand starting at position 1305 of SEQ ID NO: 587188
cggauucuuucucccaaac

SEQ ID NO: 773285 - RNA, 19 nt, Artificial Sequence
  Description of Artificial Sequence: Synthetic oligonucleotide
  Antisense strand to SEQ ID NO: 773284
guuugggagaaagaauccg

SEQ ID NO: 773286 - RNA, 19 nt, Artificial Sequence
  Description of Artificial Sequence: Synthetic oligonucleotide
  Sense strand starting at position 1396 of SEQ ID NO: 587188
gcgcgaucccacuaacgau

SEQ ID NO: 773287 - RNA, 19 nt, Artificial Sequence
  Description of Artificial Sequence: Synthetic oligonucleotide
  Antisense strand to SEQ ID NO: 773286
aucguuagugggaucgcgc

SEQ ID NO: 773288 - RNA, 19 nt, Artificial Sequence
  Description of Artificial Sequence: Synthetic oligonucleotide
  Sense strand starting at position 1656 of SEQ ID NO: 587188
ccaggucaauuccagaaca

SEQ ID NO: 773289 - RNA, 19 nt, Artificial Sequence
  Description of Artificial Sequence: Synthetic oligonucleotide
  Antisense strand to SEQ ID NO: 773288
uguucuggaauugaccugg

SEQ ID NO: 773290 - RNA, 19 nt, Artificial Sequence
  Description of Artificial Sequence: Synthetic oligonucleotide
  Sense strand starting at position 2364 of SEQ ID NO: 587188
gaggguuucguuugugagg

SEQ ID NO: 773291 - RNA, 19 nt, Artificial Sequence
  Description of Artificial Sequence: Synthetic oligonucleotide
  Antisense strand to SEQ ID NO: 773290
ccucacaaacgaaacccuc

SEQ ID NO: 773292 - RNA, 19 nt, Artificial Sequence
  Description of Artificial Sequence: Synthetic oligonucleotide
  Sense strand starting at position 2924 of SEQ ID NO: 587188
guguguaguuagaaaggau

SEQ ID NO: 773293 - RNA, 19 nt, Artificial Sequence
  Description of Artificial Sequence: Synthetic oligonucleotide
  Antisense strand to SEQ ID NO: 773292
auccuuucuaacuacacac

SEQ ID NO: 773294 - RNA, 19 nt, Artificial Sequence
  Description of Artificial Sequence: Synthetic oligonucleotide
  Sense strand starting at position 2939 of SEQ ID NO: 587188
ggauguccaugagaaagua

SEQ ID NO: 773295 - RNA, 19 nt, Artificial Sequence
  Description of Artificial Sequence: Synthetic oligonucleotide
  Antisense strand to SEQ ID NO: 773294
uacuuucucauggacaucc

SEQ ID NO: 773296 - RNA, 19 nt, Artificial Sequence
  Description of Artificial Sequence: Synthetic oligonucleotide
  Sense strand starting at position 2951 of SEQ ID NO: 587188
gaaaguagucccugcauag

SEQ ID NO: 773297 - RNA, 19 nt, Artificial Sequence
  Description of Artificial Sequence: Synthetic oligonucleotide
  Antisense strand to SEQ ID NO: 773296
cuaugcagggacuacuuuc

SEQ ID NO: 773298 - RNA, 19 nt, Artificial Sequence
  Description of Artificial Sequence: Synthetic oligonucleotide
  Sense strand starting at position 2978 of SEQ ID NO: 587188
gcgugugcacaucuguauu

SEQ ID NO: 773299 - RNA, 19 nt, Artificial Sequence
  Description of Artificial Sequence: Synthetic oligonucleotide
  Antisense strand to SEQ ID NO: 773298
aauacagaugugcacacgc

SEQ ID NO: 773300 - RNA, 19 nt, Artificial Sequence
  Description of Artificial Sequence: Synthetic oligonucleotide
  Sense strand starting at position 2988 of SEQ ID NO: 587188
aucuguauuugucccggaa

SEQ ID NO: 773301 - RNA, 19 nt, Artificial Sequence
  Description of Artificial Sequence: Synthetic oligonucleotide
  Antisense strand to SEQ ID NO: 773300
uuccgggacaaauacagau

SEQ ID NO: 773302 - RNA, 19 nt, Artificial Sequence
  Description of Artificial Sequence: Synthetic oligonucleotide
  Sense strand starting at position 2992 of SEQ ID NO: 587188
guauuugucccggaaucgu

SEQ ID NO: 773303 - RNA, 19 nt, Artificial Sequence
  Description of Artificial Sequence: Synthetic oligonucleotide
  Antisense strand to SEQ ID NO: 773302
acgauuccgggacaaauac

SEQ ID NO: 773304 - RNA, 19 nt, Artificial Sequence
  Description of Artificial Sequence: Synthetic oligonucleotide
  Sense strand starting at position 3001 of SEQ ID NO: 587188
ccggaaucgugaaauguag

SEQ ID NO: 773305 - RNA, 19 nt, Artificial Sequence
  Description of Artificial Sequence: Synthetic oligonucleotide
  Antisense strand to SEQ ID NO: 773304
cuacauuucacgauuccgg

SEQ ID NO: 773306 - RNA, 19 nt, Artificial Sequence
  Description of Artificial Sequence: Synthetic oligonucleotide
  Sense strand starting at position 3003 of SEQ ID NO: 587188
ggaaucgugaaauguagau

SEQ ID NO: 773307 - RNA, 19 nt, Artificial Sequence
  Description of Artificial Sequence: Synthetic oligonucleotide
  Antisense strand to SEQ ID NO: 773306
aucuacauuucacgauucc

SEQ ID NO: 773308 - RNA, 19 nt, Artificial Sequence
  Description of Artificial Sequence: Synthetic oligonucleotide
  Sense strand starting at position 3016 of SEQ ID NO: 587188
guagaugcaccuuacugau

SEQ ID NO: 773309 - RNA, 19 nt, Artificial Sequence
  Description of Artificial Sequence: Synthetic oligonucleotide
  Antisense strand to SEQ ID NO: 773308
aucaguaaggugcaucuac

SEQ ID NO: 773310 - RNA, 19 nt, Artificial Sequence
  Description of Artificial Sequence: Synthetic oligonucleotide
  Sense strand starting at position 3018 of SEQ ID NO: 587188
agaugcaccuuacugauua

SEQ ID NO: 773311 - RNA, 19 nt, Artificial Sequence
  Description of Artificial Sequence: Synthetic oligonucleotide
  Antisense strand to SEQ ID NO: 773310
uaaucaguaaggugcaucu

SEQ ID NO: 773312 - RNA, 19 nt, Artificial Sequence
  Description of Artificial Sequence: Synthetic oligonucleotide
  Sense strand starting at position 3022 of SEQ ID NO: 587188
gcaccuuacugauuaaagg

SEQ ID NO: 773313 - RNA, 19 nt, Artificial Sequence
  Description of Artificial Sequence: Synthetic oligonucleotide
  Antisense strand to SEQ ID NO: 773312
ccuuuaaucaguaaggugc

SEQ ID NO: 773314 - RNA, 19 nt, Artificial Sequence
  Description of Artificial Sequence: Synthetic oligonucleotide
  Sense strand starting at position 3404 of SEQ ID NO: 587188
acguuucuuuggguguaaa

SEQ ID NO: 773315 - RNA, 19 nt, Artificial Sequence
  Description of Artificial Sequence: Synthetic oligonucleotide
  Antisense strand to SEQ ID NO: 773314
uuuacacccaaagaaacgu

SEQ ID NO: 773316 - RNA, 19 nt, Artificial Sequence
  Description of Artificial Sequence: Synthetic oligonucleotide
  Sense strand starting at position 3405 of SEQ ID NO: 587188
cguuucuuuggguguaaag

SEQ ID NO: 773317 - RNA, 19 nt, Artificial Sequence
  Description of Artificial Sequence: Synthetic oligonucleotide
  Antisense strand to SEQ ID NO: 773316
cuuuacacccaaagaaacg

SEQ ID NO: 773318 - RNA, 19 nt, Artificial Sequence
  Description of Artificial Sequence: Synthetic oligonucleotide
  Sense strand starting at position 3407 of SEQ ID NO: 587188
uuucuuuggguguaaaguu

SEQ ID NO: 773319 - RNA, 19 nt, Artificial Sequence
  Description of Artificial Sequence: Synthetic oligonucleotide
  Antisense strand to SEQ ID NO: 773318
aacuuuacacccaaagaaa

SEQ ID NO: 773320 - RNA, 19 nt, Artificial Sequence
  Description of Artificial Sequence: Synthetic oligonucleotide
  Sense strand starting at position 3445 of SEQ ID NO: 587188
uauguauacguguaguaac

SEQ ID NO: 773321 - RNA, 19 nt, Artificial Sequence
  Description of Artificial Sequence: Synthetic oligonucleotide
  Antisense strand to SEQ ID NO: 773320
guuacuacacguauacaua

SEQ ID NO: 773322 - RNA, 19 nt, Artificial Sequence
  Description of Artificial Sequence: Synthetic oligonucleotide
  Sense strand starting at position 3565 of SEQ ID NO: 587188
ccuggauccuuggcaagga

SEQ ID NO: 773323 - RNA, 19 nt, Artificial Sequence
  Description of Artificial Sequence: Synthetic oligonucleotide
  Antisense strand to SEQ ID NO: 773322
uccuugccaaggauccagg

SEQ ID NO: 773324 - RNA, 19 nt, Artificial Sequence
  Description of Artificial Sequence: Synthetic oligonucleotide
  Sense strand starting at position 3585 of SEQ ID NO: 587188
ugaucugcucuugaaaccu

SEQ ID NO: 773325 - RNA, 19 nt, Artificial Sequence
  Description of Artificial Sequence: Synthetic oligonucleotide
  Antisense strand to SEQ ID NO: 773324
agguuucaagagcagauca

SEQ ID NO: 773326 - RNA, 19 nt, Artificial Sequence
  Description of Artificial Sequence: Synthetic oligonucleotide
  Sense strand starting at position 3704 of SEQ ID NO: 587188
cauguuuacgaagagucaa

SEQ ID NO: 773327 - RNA, 19 nt, Artificial Sequence
  Description of Artificial Sequence: Synthetic oligonucleotide
  Antisense strand to SEQ ID NO: 773326
uugacucuucguaaacaug

SEQ ID NO: 773328 - RNA, 19 nt, Artificial Sequence
  Description of Artificial Sequence: Synthetic oligonucleotide
  Sense strand starting at position 3751 of SEQ ID NO: 587188
agccaaauaugagugagga

SEQ ID NO: 773329 - RNA, 19 nt, Artificial Sequence
  Description of Artificial Sequence: Synthetic oligonucleotide
  Antisense strand to SEQ ID NO: 773328
uccucacucauauuuggcu

SEQ ID NO: 773330 - RNA, 19 nt, Artificial Sequence
  Description of Artificial Sequence: Synthetic oligonucleotide
  Sense strand starting at position 3752 of SEQ ID NO: 587188
gccaaauaugagugaggaa

SEQ ID NO: 773331 - RNA, 19 nt, Artificial Sequence
  Description of Artificial Sequence: Synthetic oligonucleotide
  Antisense strand to SEQ ID NO: 773330
uuccucacucauauuuggc

SEQ ID NO: 773332 - RNA, 19 nt, Artificial Sequence
  Description of Artificial Sequence: Synthetic oligonucleotide
  Sense strand starting at position 3774 of SEQ ID NO: 587188
caagguacugucugaagag

SEQ ID NO: 773333 - RNA, 19 nt, Artificial Sequence
  Description of Artificial Sequence: Synthetic oligonucleotide
  Antisense strand to SEQ ID NO: 773332
cucuucagacaguaccuug

SEQ ID NO: 773334 - RNA, 19 nt, Artificial Sequence
  Description of Artificial Sequence: Synthetic oligonucleotide
  Sense strand starting at position 3802 of SEQ ID NO: 587188
acauguauccaaggugguu

SEQ ID NO: 773335 - RNA, 19 nt, Artificial Sequence
  Description of Artificial Sequence: Synthetic oligonucleotide
  Antisense strand to SEQ ID NO: 773334
aaccaccuuggauacaugu

SEQ ID NO: 773336 - RNA, 19 nt, Artificial Sequence
  Description of Artificial Sequence: Synthetic oligonucleotide
  Sense strand starting at position 3963 of SEQ ID NO: 587188
uuggcaauuggcuaucuga

SEQ ID NO: 773337 - RNA, 19 nt, Artificial Sequence
  Description of Artificial Sequence: Synthetic oligonucleotide
  Antisense strand to SEQ ID NO: 773336
ucagauagccaauugccaa

SEQ ID NO: 773338 - RNA, 19 nt, Artificial Sequence
  Description of Artificial Sequence: Synthetic oligonucleotide
  Sense strand starting at position 3966 of SEQ ID NO: 587188
gcaauuggcuaucugaaga

SEQ ID NO: 773339 - RNA, 19 nt, Artificial Sequence
  Description of Artificial Sequence: Synthetic oligonucleotide
  Antisense strand to SEQ ID NO: 773338
ucuucagauagccaauugc

SEQ ID NO: 773340 - RNA, 19 nt, Artificial Sequence
  Description of Artificial Sequence: Synthetic oligonucleotide
  Sense strand starting at position 31 of SEQ ID NO: 587189
ccaagagaucuuugaaggu

SEQ ID NO: 773341 - RNA, 19 nt, Artificial Sequence
  Description of Artificial Sequence: Synthetic oligonucleotide
  Antisense strand to SEQ ID NO: 773340
accuucaaagaucucuugg

SEQ ID NO: 773342 - RNA, 19 nt, Artificial Sequence
  Description of Artificial Sequence: Synthetic oligonucleotide
  Sense strand starting at position 74 of SEQ ID NO: 587189
uucugucagcucuggaaac

SEQ ID NO: 773343 - RNA, 19 nt, Artificial Sequence
  Description of Artificial Sequence: Synthetic oligonucleotide
  Antisense strand to SEQ ID NO: 773342
guuuccagagcugacagaa

SEQ ID NO: 773344 - RNA, 19 nt, Artificial Sequence
  Description of Artificial Sequence: Synthetic oligonucleotide
  Sense strand starting at position 168 of SEQ ID NO: 587189
agcguccuugccugggaaa

SEQ ID NO: 773345 - RNA, 19 nt, Artificial Sequence
  Description of Artificial Sequence: Synthetic oligonucleotide
  Antisense strand to SEQ ID NO: 773344
uuucccaggcaaggacgcu

SEQ ID NO: 773346 - RNA, 19 nt, Artificial Sequence
  Description of Artificial Sequence: Synthetic oligonucleotide
  Sense strand starting at position 170 of SEQ ID NO: 587189
cguccuugccugggaaagu

SEQ ID NO: 773347 - RNA, 19 nt, Artificial Sequence
  Description of Artificial Sequence: Synthetic oligonucleotide
  Antisense strand to SEQ ID NO: 773346
acuuucccaggcaaggacg

SEQ ID NO: 773348 - RNA, 19 nt, Artificial Sequence
  Description of Artificial Sequence: Synthetic oligonucleotide
  Sense strand starting at position 319 of SEQ ID NO: 587189
gggagugagugucacuuua

SEQ ID NO: 773349 - RNA, 19 nt, Artificial Sequence
  Description of Artificial Sequence: Synthetic oligonucleotide
  Antisense strand to SEQ ID NO: 773348
uaaagugacacucacuccc

SEQ ID NO: 773350 - RNA, 19 nt, Artificial Sequence
  Description of Artificial Sequence: Synthetic oligonucleotide
  Sense strand starting at position 360 of SEQ ID NO: 587189
ucgagaggauccucuugua

SEQ ID NO: 773351 - RNA, 19 nt, Artificial Sequence
  Description of Artificial Sequence: Synthetic oligonucleotide
  Antisense strand to SEQ ID NO: 773350
uacaagaggauccucucga

SEQ ID NO: 773352 - RNA, 19 nt, Artificial Sequence
  Description of Artificial Sequence: Synthetic oligonucleotide
  Sense strand starting at position 363 of SEQ ID NO: 587189
agaggauccucuuguagcu

SEQ ID NO: 773353 - RNA, 19 nt, Artificial Sequence
  Description of Artificial Sequence: Synthetic oligonucleotide
  Antisense strand to SEQ ID NO: 773352
agcuacaagaggauccucu

SEQ ID NO: 773354 - RNA, 19 nt, Artificial Sequence
  Description of Artificial Sequence: Synthetic oligonucleotide
  Sense strand starting at position 368 of SEQ ID NO: 587189
auccucuuguagcuagaaa

SEQ ID NO: 773355 - RNA, 19 nt, Artificial Sequence
  Description of Artificial Sequence: Synthetic oligonucleotide
  Antisense strand to SEQ ID NO: 773354
uuucuagcuacaagaggau

SEQ ID NO: 773356 - RNA, 19 nt, Artificial Sequence
  Description of Artificial Sequence: Synthetic oligonucleotide
  Sense strand starting at position 387 of SEQ ID NO: 587189
augaucgccucuuccuaaa

SEQ ID NO: 773357 - RNA, 19 nt, Artificial Sequence
  Description of Artificial Sequence: Synthetic oligonucleotide
  Antisense strand to SEQ ID NO: 773356
uuuaggaagaggcgaucau

SEQ ID NO: 773358 - RNA, 19 nt, Artificial Sequence
  Description of Artificial Sequence: Synthetic oligonucleotide
  Sense strand starting at position 2222 of SEQ ID NO: 587189
aggugaugguccuaaggcu

SEQ ID NO: 773359 - RNA, 19 nt, Artificial Sequence
  Description of Artificial Sequence: Synthetic oligonucleotide
  Antisense strand to SEQ ID NO: 773358
agccuuaggaccaucaccu

SEQ ID NO: 773360 - RNA, 19 nt, Artificial Sequence
  Description of Artificial Sequence: Synthetic oligonucleotide
  Sense strand starting at position 2748 of SEQ ID NO: 587189
acggguccuucgaaguaga

SEQ ID NO: 773361 - RNA, 19 nt, Artificial Sequence
  Description of Artificial Sequence: Synthetic oligonucleotide
  Antisense strand to SEQ ID NO: 773360
ucuacuucgaaggacccgu

SEQ ID NO: 773362 - RNA, 19 nt, Artificial Sequence
  Description of Artificial Sequence: Synthetic oligonucleotide
  Sense strand starting at position 2751 of SEQ ID NO: 587189
gguccuucgaaguagaaac

SEQ ID NO: 773363 - RNA, 19 nt, Artificial Sequence
  Description of Artificial Sequence: Synthetic oligonucleotide
  Antisense strand to SEQ ID NO: 773362
guuucuacuucgaaggacc

SEQ ID NO: 773364 - RNA, 19 nt, Artificial Sequence
  Description of Artificial Sequence: Synthetic oligonucleotide
  Sense strand starting at position 3057 of SEQ ID NO: 587189
gagguuucuccuuggccuu

SEQ ID NO: 773365 - RNA, 19 nt, Artificial Sequence
  Description of Artificial Sequence: Synthetic oligonucleotide
  Antisense strand to SEQ ID NO: 773364
aaggccaaggagaaaccuc

SEQ ID NO: 773366 - RNA, 19 nt, Artificial Sequence
  Description of Artificial Sequence: Synthetic oligonucleotide
  Sense strand starting at position 3093 of SEQ ID NO: 587189
uccugaaagcuccggagau

SEQ ID NO: 773367 - RNA, 19 nt, Artificial Sequence
  Description of Artificial Sequence: Synthetic oligonucleotide
  Antisense strand to SEQ ID NO: 773366
aucuccggagcuuucagga

SEQ ID NO: 773368 - RNA, 19 nt, Artificial Sequence
  Description of Artificial Sequence: Synthetic oligonucleotide
  Sense strand starting at position 3094 of SEQ ID NO: 587189
ccugaaagcuccggagaug

SEQ ID NO: 773369 - RNA, 19 nt, Artificial Sequence
  Description of Artificial Sequence: Synthetic oligonucleotide
  Antisense strand to SEQ ID NO: 773368
caucuccggagcuuucagg

SEQ ID NO: 773370 - RNA, 19 nt, Artificial Sequence
  Description of Artificial Sequence: Synthetic oligonucleotide
  Sense strand starting at position 3111 of SEQ ID NO: 587189
ugcugaagucuggacuguu

SEQ ID NO: 773371 - RNA, 19 nt, Artificial Sequence
  Description of Artificial Sequence: Synthetic oligonucleotide
  Antisense strand to SEQ ID NO: 773370
aacaguccagacuucagca

SEQ ID NO: 773372 - RNA, 19 nt, Artificial Sequence
  Description of Artificial Sequence: Synthetic oligonucleotide
  Sense strand starting at position 3135 of SEQ ID NO: 587189
ccggucuccucuccaugaa

SEQ ID NO: 773373 - RNA, 19 nt, Artificial Sequence
  Description of Artificial Sequence: Synthetic oligonucleotide
  Antisense strand to SEQ ID NO: 773372
uucauggagaggagaccgg

SEQ ID NO: 773374 - RNA, 19 nt, Artificial Sequence
  Description of Artificial Sequence: Synthetic oligonucleotide
  Sense strand starting at position 3343 of SEQ ID NO: 587189
ggaugagugccuggaagag

SEQ ID NO: 773375 - RNA, 19 nt, Artificial Sequence
  Description of Artificial Sequence: Synthetic oligonucleotide
  Antisense strand to SEQ ID NO: 773374
cucuuccaggcacucaucc

SEQ ID NO: 773376 - RNA, 19 nt, Artificial Sequence
  Description of Artificial Sequence: Synthetic oligonucleotide
  Sense strand starting at position 3421 of SEQ ID NO: 587189
uggaguagcaugugucacu

SEQ ID NO: 773377 - RNA, 19 nt, Artificial Sequence
  Description of Artificial Sequence: Synthetic oligonucleotide
  Antisense strand to SEQ ID NO: 773376
agugacacaugcuacucca

SEQ ID NO: 773378 - RNA, 19 nt, Artificial Sequence
  Description of Artificial Sequence: Synthetic oligonucleotide
  Sense strand starting at position 3470 of SEQ ID NO: 587189
gccgguguugugagacuua

SEQ ID NO: 773379 - RNA, 19 nt, Artificial Sequence
  Description of Artificial Sequence: Synthetic oligonucleotide
  Antisense strand to SEQ ID NO: 773378
uaagucucacaacaccggc

SEQ ID NO: 773380 - RNA, 19 nt, Artificial Sequence
  Description of Artificial Sequence: Synthetic oligonucleotide
  Sense strand starting at position 3480 of SEQ ID NO: 587189
ugagacuuacagugagagu

SEQ ID NO: 773381 - RNA, 19 nt, Artificial Sequence
  Description of Artificial Sequence: Synthetic oligonucleotide
  Antisense strand to SEQ ID NO: 773380
acucucacuguaagucuca

SEQ ID NO: 773382 - RNA, 19 nt, Artificial Sequence
  Description of Artificial Sequence: Synthetic oligonucleotide
  Sense strand starting at position 3543 of SEQ ID NO: 587189
guggcucuuucugaggacu

SEQ ID NO: 773383 - RNA, 19 nt, Artificial Sequence
  Description of Artificial Sequence: Synthetic oligonucleotide
  Antisense strand to SEQ ID NO: 773382
aguccucagaaagagccac

SEQ ID NO: 773384 - RNA, 19 nt, Artificial Sequence
  Description of Artificial Sequence: Synthetic oligonucleotide
  Sense strand starting at position 3546 of SEQ ID NO: 587189
gcucuuucugaggacucca

SEQ ID NO: 773385 - RNA, 19 nt, Artificial Sequence
  Description of Artificial Sequence: Synthetic oligonucleotide
  Antisense strand to SEQ ID NO: 773384
uggaguccucagaaagagc

SEQ ID NO: 773386 - RNA, 19 nt, Artificial Sequence
  Description of Artificial Sequence: Synthetic oligonucleotide
  Sense strand starting at position 3569 of SEQ ID NO: 587189
aggaguugaucccagucau

SEQ ID NO: 773387 - RNA, 19 nt, Artificial Sequence
  Description of Artificial Sequence: Synthetic oligonucleotide
  Antisense strand to SEQ ID NO: 773386
augacugggaucaacuccu

SEQ ID NO: 773388 - RNA, 19 nt, Artificial Sequence
  Description of Artificial Sequence: Synthetic oligonucleotide
  Sense strand starting at position 3719 of SEQ ID NO: 587189
acaggauacucggagggau

SEQ ID NO: 773389 - RNA, 19 nt, Artificial Sequence
  Description of Artificial Sequence: Synthetic oligonucleotide
  Antisense strand to SEQ ID NO: 773388
aucccuccgaguauccugu

SEQ ID NO: 773390 - RNA, 19 nt, Artificial Sequence
  Description of Artificial Sequence: Synthetic oligonucleotide
  Sense strand starting at position 3875 of SEQ ID NO: 587189
gccggauucucggauuauu

SEQ ID NO: 773391 - RNA, 19 nt, Artificial Sequence
  Description of Artificial Sequence: Synthetic oligonucleotide
  Antisense strand to SEQ ID NO: 773390
aauaauccgagaauccggc

SEQ ID NO: 773392 - RNA, 19 nt, Artificial Sequence
  Description of Artificial Sequence: Synthetic oligonucleotide
  Sense strand starting at position 3885 of SEQ ID NO: 587189
cggauuauuucauccggcu

SEQ ID NO: 773393 - RNA, 19 nt, Artificial Sequence
  Description of Artificial Sequence: Synthetic oligonucleotide
  Antisense strand to SEQ ID NO: 773392
agccggaugaaauaauccg

SEQ ID NO: 773394 - RNA, 19 nt, Artificial Sequence
  Description of Artificial Sequence: Synthetic oligonucleotide
  Sense strand starting at position 3950 of SEQ ID NO: 587189
uccagaggguccucucauu

SEQ ID NO: 773395 - RNA, 19 nt, Artificial Sequence
  Description of Artificial Sequence: Synthetic oligonucleotide
  Antisense strand to SEQ ID NO: 773394
aaugagaggacccucugga

SEQ ID NO: 773396 - RNA, 19 nt, Artificial Sequence
  Description of Artificial Sequence: Synthetic oligonucleotide
  Sense strand starting at position 4 of SEQ ID NO: 587190
gcgagauaucuuuaggacc

SEQ ID NO: 773397 - RNA, 19 nt, Artificial Sequence
  Description of Artificial Sequence: Synthetic oligonucleotide
  Antisense strand to SEQ ID NO: 773396
gguccuaaagauaucucgc

SEQ ID NO: 773398 - RNA, 19 nt, Artificial Sequence
  Description of Artificial Sequence: Synthetic oligonucleotide
  Sense strand starting at position 58 of SEQ ID NO: 587190
aucuguuugcaggaggaau

SEQ ID NO: 773399 - RNA, 19 nt, Artificial Sequence
  Description of Artificial Sequence: Synthetic oligonucleotide
  Antisense strand to SEQ ID NO: 773398
auuccuccugcaaacagau

SEQ ID NO: 773400 - RNA, 19 nt, Artificial Sequence
  Description of Artificial Sequence: Synthetic oligonucleotide
  Sense strand starting at position 399 of SEQ ID NO: 587190
ugaucugggucuucuacau

SEQ ID NO: 773401 - RNA, 19 nt, Artificial Sequence
  Description of Artificial Sequence: Synthetic oligonucleotide
  Antisense strand to SEQ ID NO: 773400
auguagaagacccagauca

SEQ ID NO: 773402 - RNA, 19 nt, Artificial Sequence
  Description of Artificial Sequence: Synthetic oligonucleotide
  Sense strand starting at position 405 of SEQ ID NO: 587190
gggucuucuacauguagaa

SEQ ID NO: 773403 - RNA, 19 nt, Artificial Sequence
  Description of Artificial Sequence: Synthetic oligonucleotide
  Antisense strand to SEQ ID NO: 773402
uucuacauguagaagaccc

SEQ ID NO: 773404 - RNA, 19 nt, Artificial Sequence
  Description of Artificial Sequence: Synthetic oligonucleotide
  Sense strand starting at position 455 of SEQ ID NO: 587190
ucuauaaagucuuugagug

SEQ ID NO: 773405 - RNA, 19 nt, Artificial Sequence
  Description of Artificial Sequence: Synthetic oligonucleotide
  Antisense strand to SEQ ID NO: 773404
cacucaaagacuuuauaga

SEQ ID NO: 773406 - RNA, 19 nt, Artificial Sequence
  Description of Artificial Sequence: Synthetic oligonucleotide
  Sense strand starting at position 456 of SEQ ID NO: 587190
cuauaaagucuuugaguga

SEQ ID NO: 773407 - RNA, 19 nt, Artificial Sequence
  Description of Artificial Sequence: Synthetic oligonucleotide
  Antisense strand to SEQ ID NO: 773406
ucacucaaagacuuuauag

SEQ ID NO: 773408 - RNA, 19 nt, Artificial Sequence
  Description of Artificial Sequence: Synthetic oligonucleotide
  Sense strand starting at position 459 of SEQ ID NO: 587190
uaaagucuuugagugauaa

SEQ ID NO: 773409 - RNA, 19 nt, Artificial Sequence
  Description of Artificial Sequence: Synthetic oligonucleotide
  Antisense strand to SEQ ID NO: 773408
uuaucacucaaagacuuua

SEQ ID NO: 773410 - RNA, 19 nt, Artificial Sequence
  Description of Artificial Sequence: Synthetic oligonucleotide
  Sense strand starting at position 460 of SEQ ID NO: 587190
aaagucuuugagugauaaa

SEQ ID NO: 773411 - RNA, 19 nt, Artificial Sequence
  Description of Artificial Sequence: Synthetic oligonucleotide
  Antisense strand to SEQ ID NO: 773410
uuuaucacucaaagacuuu

SEQ ID NO: 773412 - RNA, 19 nt, Artificial Sequence
  Description of Artificial Sequence: Synthetic oligonucleotide
  Sense strand starting at position 530 of SEQ ID NO: 587190
gcacacuuaguugacaauu

SEQ ID NO: 773413 - RNA, 19 nt, Artificial Sequence
  Description of Artificial Sequence: Synthetic oligonucleotide
  Antisense strand to SEQ ID NO: 773412
aauugucaacuaagugugc

SEQ ID NO: 773414 - RNA, 19 nt, Artificial Sequence
  Description of Artificial Sequence: Synthetic oligonucleotide
  Sense strand starting at position 575 of SEQ ID NO: 587190
aaacuuauuggugaagucu

SEQ ID NO: 773415 - RNA, 19 nt, Artificial Sequence
  Description of Artificial Sequence: Synthetic oligonucleotide
  Antisense strand to SEQ ID NO: 773414
agacuucaccaauaaguuu

SEQ ID NO: 773416 - RNA, 19 nt, Artificial Sequence
  Description of Artificial Sequence: Synthetic oligonucleotide
  Sense strand starting at position 643 of SEQ ID NO: 587190
uguggaucuguccaaaggu

SEQ ID NO: 773417 - RNA, 19 nt, Artificial Sequence
  Description of Artificial Sequence: Synthetic oligonucleotide
  Antisense strand to SEQ ID NO: 773416
accuuuggacagauccaca

SEQ ID NO: 773418 - RNA, 19 nt, Artificial Sequence
  Description of Artificial Sequence: Synthetic oligonucleotide
  Sense strand starting at position 658 of SEQ ID NO: 587190
aggucagauggugagucau

SEQ ID NO: 773419 - RNA, 19 nt, Artificial Sequence
  Description of Artificial Sequence: Synthetic oligonucleotide
  Antisense strand to SEQ ID NO: 773418
augacucaccaucugaccu

SEQ ID NO: 773420 - RNA, 19 nt, Artificial Sequence
  Description of Artificial Sequence: Synthetic oligonucleotide
  Sense strand starting at position 660 of SEQ ID NO: 587190
gucagauggugagucauag

SEQ ID NO: 773421 - RNA, 19 nt, Artificial Sequence
  Description of Artificial Sequence: Synthetic oligonucleotide
  Antisense strand to SEQ ID NO: 773420
cuaugacucaccaucugac

SEQ ID NO: 773422 - RNA, 19 nt, Artificial Sequence
  Description of Artificial Sequence: Synthetic oligonucleotide
  Sense strand starting at position 889 of SEQ ID NO: 587190
ugagguugugacuauugga

SEQ ID NO: 773423 - RNA, 19 nt, Artificial Sequence
  Description of Artificial Sequence: Synthetic oligonucleotide
  Antisense strand to SEQ ID NO: 773422
uccaauagucacaaccuca

SEQ ID NO: 773424 - RNA, 19 nt, Artificial Sequence
  Description of Artificial Sequence: Synthetic oligonucleotide
  Sense strand starting at position 1198 of SEQ ID NO: 587190
cucaaagcagauugugaau

SEQ ID NO: 773425 - RNA, 19 nt, Artificial Sequence
  Description of Artificial Sequence: Synthetic oligonucleotide
  Antisense strand to SEQ ID NO: 773424
auucacaaucugcuuugag

SEQ ID NO: 773426 - RNA, 19 nt, Artificial Sequence
  Description of Artificial Sequence: Synthetic oligonucleotide
  Sense strand starting at position 1308 of SEQ ID NO: 587190
ccuggcuaacaguaugaau

SEQ ID NO: 773427 - RNA, 19 nt, Artificial Sequence
  Description of Artificial Sequence: Synthetic oligonucleotide
  Antisense strand to SEQ ID NO: 773426
auucauacuguuagccagg

SEQ ID NO: 773428 - RNA, 19 nt, Artificial Sequence
  Description of Artificial Sequence: Synthetic oligonucleotide
  Sense strand starting at position 1378 of SEQ ID NO: 587190
cucagaggcagucaaaguu

SEQ ID NO: 773429 - RNA, 19 nt, Artificial Sequence
  Description of Artificial Sequence: Synthetic oligonucleotide
  Antisense strand to SEQ ID NO: 773428
aacuuugacugccucugag

SEQ ID NO: 773430 - RNA, 19 nt, Artificial Sequence
  Description of Artificial Sequence: Synthetic oligonucleotide
  Sense strand starting at position 1385 of SEQ ID NO: 587190
gcagucaaaguuggaauua

SEQ ID NO: 773431 - RNA, 19 nt, Artificial Sequence
  Description of Artificial Sequence: Synthetic oligonucleotide
  Antisense strand to SEQ ID NO: 773430
uaauuccaacuuugacugc

SEQ ID NO: 773432 - RNA, 19 nt, Artificial Sequence
  Description of Artificial Sequence: Synthetic oligonucleotide
  Sense strand starting at position 1395 of SEQ ID NO: 587190
uuggaauuaugacucucau

SEQ ID NO: 773433 - RNA, 19 nt, Artificial Sequence
  Description of Artificial Sequence: Synthetic oligonucleotide
  Antisense strand to SEQ ID NO: 773432
augagagucauaauuccaa

SEQ ID NO: 773434 - RNA, 19 nt, Artificial Sequence
  Description of Artificial Sequence: Synthetic oligonucleotide
  Sense strand starting at position 1545 of SEQ ID NO: 587190
gagguugugagucaaauac

SEQ ID NO: 773435 - RNA, 19 nt, Artificial Sequence
  Description of Artificial Sequence: Synthetic oligonucleotide
  Antisense strand to SEQ ID NO: 773434
guauuugacucacaaccuc

SEQ ID NO: 773436 - RNA, 19 nt, Artificial Sequence
  Description of Artificial Sequence: Synthetic oligonucleotide
  Sense strand starting at position 1569 of SEQ ID NO: 587190
cauaucucgcaagauaugu

SEQ ID NO: 773437 - RNA, 19 nt, Artificial Sequence
  Description of Artificial Sequence: Synthetic oligonucleotide
  Antisense strand to SEQ ID NO: 773436
acauaucuugcgagauaug

SEQ ID NO: 773438 - RNA, 19 nt, Artificial Sequence
  Description of Artificial Sequence: Synthetic oligonucleotide
  Sense strand starting at position 1577 of SEQ ID NO: 587190
gcaagauauguugacuguc

SEQ ID NO: 773439 - RNA, 19 nt, Artificial Sequence
  Description of Artificial Sequence: Synthetic oligonucleotide
  Antisense strand to SEQ ID NO: 773438
gacagucaacauaucuugc

SEQ ID NO: 773440 - RNA, 19 nt, Artificial Sequence
  Description of Artificial Sequence: Synthetic oligonucleotide
  Sense strand starting at position 1720 of SEQ ID NO: 587190
uacaguugagauugucaca

SEQ ID NO: 773441 - RNA, 19 nt, Artificial Sequence
  Description of Artificial Sequence: Synthetic oligonucleotide
  Antisense strand to SEQ ID NO: 773440
ugugacaaucucaacugua

SEQ ID NO: 773442 - RNA, 19 nt, Artificial Sequence
  Description of Artificial Sequence: Synthetic oligonucleotide
  Sense strand starting at position 1765 of SEQ ID NO: 587190
guuccucuucugcaugaga

SEQ ID NO: 773443 - RNA, 19 nt, Artificial Sequence
  Description of Artificial Sequence: Synthetic oligonucleotide
  Antisense strand to SEQ ID NO: 773442
ucucaugcagaagaggaac

SEQ ID NO: 773444 - RNA, 19 nt, Artificial Sequence
  Description of Artificial Sequence: Synthetic oligonucleotide
  Sense strand starting at position 1800 of SEQ ID NO: 587190
auuguaauguaucucugga

SEQ ID NO: 773445 - RNA, 19 nt, Artificial Sequence
  Description of Artificial Sequence: Synthetic oligonucleotide
  Antisense strand to SEQ ID NO: 773444
uccagagauacauuacaau

SEQ ID NO: 773446 - RNA, 19 nt, Artificial Sequence
  Description of Artificial Sequence: Synthetic oligonucleotide
  Sense strand starting at position 1808 of SEQ ID NO: 587190
guaucucuggaccaaucau

SEQ ID NO: 773447 - RNA, 19 nt, Artificial Sequence
  Description of Artificial Sequence: Synthetic oligonucleotide
  Antisense strand to SEQ ID NO: 773446
augauugguccagagauac

SEQ ID NO: 773448 - RNA, 19 nt, Artificial Sequence
  Description of Artificial Sequence: Synthetic oligonucleotide
  Sense strand starting at position 2112 of SEQ ID NO: 587190
cccaguaccuaggugauau

SEQ ID NO: 773449 - RNA, 19 nt, Artificial Sequence
  Description of Artificial Sequence: Synthetic oligonucleotide
  Antisense strand to SEQ ID NO: 773448
auaucaccuagguacuggg

SEQ ID NO: 773450 - RNA, 19 nt, Artificial Sequence
  Description of Artificial Sequence: Synthetic oligonucleotide
  Sense strand starting at position 2113 of SEQ ID NO: 587190
ccaguaccuaggugauaug

SEQ ID NO: 773451 - RNA, 19 nt, Artificial Sequence
  Description of Artificial Sequence: Synthetic oligonucleotide
  Antisense strand to SEQ ID NO: 773450
cauaucaccuagguacugg

SEQ ID NO: 773452 - RNA, 19 nt, Artificial Sequence
  Description of Artificial Sequence: Synthetic oligonucleotide
  Sense strand starting at position 2370 of SEQ ID NO: 587190
uaggauggucacggaauau

SEQ ID NO: 773453 - RNA, 19 nt, Artificial Sequence
  Description of Artificial Sequence: Synthetic oligonucleotide
  Antisense strand to SEQ ID NO: 773452
auauuccgugaccauccua

SEQ ID NO: 773454 - RNA, 19 nt, Artificial Sequence
  Description of Artificial Sequence: Synthetic oligonucleotide
  Sense strand starting at position 2566 of SEQ ID NO: 587190
aggcaaucaaguuggaauu

SEQ ID NO: 773455 - RNA, 19 nt, Artificial Sequence
  Description of Artificial Sequence: Synthetic oligonucleotide
  Antisense strand to SEQ ID NO: 773454
aauuccaacuugauugccu

SEQ ID NO: 773456 - RNA, 19 nt, Artificial Sequence
  Description of Artificial Sequence: Synthetic oligonucleotide
  Sense strand starting at position 2572 of SEQ ID NO: 587190
ucaaguuggaauugugacu

SEQ ID NO: 773457 - RNA, 19 nt, Artificial Sequence
  Description of Artificial Sequence: Synthetic oligonucleotide
  Antisense strand to SEQ ID NO: 773456
agucacaauuccaacuuga

SEQ ID NO: 773458 - RNA, 19 nt, Artificial Sequence
  Description of Artificial Sequence: Synthetic oligonucleotide
  Sense strand starting at position 2706 of SEQ ID NO: 587190
cgugcauugauuuagucca

SEQ ID NO: 773459 - RNA, 19 nt, Artificial Sequence
  Description of Artificial Sequence: Synthetic oligonucleotide
  Antisense strand to SEQ ID NO: 773458
uggacuaaaucaaugcacg

SEQ ID NO: 773460 - RNA, 19 nt, Artificial Sequence
  Description of Artificial Sequence: Synthetic oligonucleotide
  Sense strand starting at position 2732 of SEQ ID NO: 587190
gacugacuugcauaguuga

SEQ ID NO: 773461 - RNA, 19 nt, Artificial Sequence
  Description of Artificial Sequence: Synthetic oligonucleotide
  Antisense strand to SEQ ID NO: 773460
ucaacuaugcaagucaguc

SEQ ID NO: 773462 - RNA, 19 nt, Artificial Sequence
  Description of Artificial Sequence: Synthetic oligonucleotide
  Sense strand starting at position 2939 of SEQ ID NO: 587190
ugcauuugagugugagauu

SEQ ID NO: 773463 - RNA, 19 nt, Artificial Sequence
  Description of Artificial Sequence: Synthetic oligonucleotide
  Antisense strand to SEQ ID NO: 773462
aaucucacacucaaaugca

SEQ ID NO: 773464 - RNA, 19 nt, Artificial Sequence
  Description of Artificial Sequence: Synthetic oligonucleotide
  Sense strand starting at position 2940 of SEQ ID NO: 587190
gcauuugagugugagauuu

SEQ ID NO: 773465 - RNA, 19 nt, Artificial Sequence
  Description of Artificial Sequence: Synthetic oligonucleotide
  Antisense strand to SEQ ID NO: 773464
aaaucucacacucaaaugc

SEQ ID NO: 773466 - RNA, 19 nt, Artificial Sequence
  Description of Artificial Sequence: Synthetic oligonucleotide
  Sense strand starting at position 2960 of SEQ ID NO: 587190
ggaccucaccagugagaac

SEQ ID NO: 773467 - RNA, 19 nt, Artificial Sequence
  Description of Artificial Sequence: Synthetic oligonucleotide
  Antisense strand to SEQ ID NO: 773466
guucucacuggugaggucc

SEQ ID NO: 773468 - RNA, 19 nt, Artificial Sequence
  Description of Artificial Sequence: Synthetic oligonucleotide
  Sense strand starting at position 3005 of SEQ ID NO: 587190
aucagauggaugugcauau

SEQ ID NO: 773469 - RNA, 19 nt, Artificial Sequence
  Description of Artificial Sequence: Synthetic oligonucleotide
  Antisense strand to SEQ ID NO: 773468
auaugcacauccaucugau

SEQ ID NO: 773470 - RNA, 19 nt, Artificial Sequence
  Description of Artificial Sequence: Synthetic oligonucleotide
  Sense strand starting at position 3314 of SEQ ID NO: 587190
agugauaugccacaauucu

SEQ ID NO: 773471 - RNA, 19 nt, Artificial Sequence
  Description of Artificial Sequence: Synthetic oligonucleotide
  Antisense strand to SEQ ID NO: 773470
agaauuguggcauaucacu

SEQ ID NO: 773472 - RNA, 19 nt, Artificial Sequence
  Description of Artificial Sequence: Synthetic oligonucleotide
  Sense strand starting at position 3376 of SEQ ID NO: 587190
auaugacuggcccagcaau

SEQ ID NO: 773473 - RNA, 19 nt, Artificial Sequence
  Description of Artificial Sequence: Synthetic oligonucleotide
  Antisense strand to SEQ ID NO: 773472
auugcugggccagucauau

SEQ ID NO: 773474 - RNA, 19 nt, Artificial Sequence
  Description of Artificial Sequence: Synthetic oligonucleotide
  Sense strand starting at position 3876 of SEQ ID NO: 587190
aaguacuaggcuuagugau

SEQ ID NO: 773475 - RNA, 19 nt, Artificial Sequence
  Description of Artificial Sequence: Synthetic oligonucleotide
  Antisense strand to SEQ ID NO: 773474
aucacuaagccuaguacuu

SEQ ID NO: 773476 - RNA, 19 nt, Artificial Sequence
  Description of Artificial Sequence: Synthetic oligonucleotide
  Sense strand starting at position 16 of SEQ ID NO: 587191
uagggaccauguucuuauu

SEQ ID NO: 773477 - RNA, 19 nt, Artificial Sequence
  Description of Artificial Sequence: Synthetic oligonucleotide
  Antisense strand to SEQ ID NO: 773476
aauaagaacauggucccua

SEQ ID NO: 773478 - RNA, 19 nt, Artificial Sequence
  Description of Artificial Sequence: Synthetic oligonucleotide
  Sense strand starting at position 22 of SEQ ID NO: 587191
ccauguucuuauuccaguu

SEQ ID NO: 773479 - RNA, 19 nt, Artificial Sequence
  Description of Artificial Sequence: Synthetic oligonucleotide
  Antisense strand to SEQ ID NO: 773478
aacuggaauaagaacaugg

SEQ ID NO: 773480 - RNA, 19 nt, Artificial Sequence
  Description of Artificial Sequence: Synthetic oligonucleotide
  Sense strand starting at position 285 of SEQ ID NO: 587191
ugaccaucacugcaaggua

SEQ ID NO: 773481 - RNA, 19 nt, Artificial Sequence
  Description of Artificial Sequence: Synthetic oligonucleotide
  Antisense strand to SEQ ID NO: 773480
uaccuugcagugaugguca

SEQ ID NO: 773482 - RNA, 19 nt, Artificial Sequence
  Description of Artificial Sequence: Synthetic oligonucleotide
  Sense strand starting at position 299 of SEQ ID NO: 587191
agguaagauuaagagaaau

SEQ ID NO: 773483 - RNA, 19 nt, Artificial Sequence
  Description of Artificial Sequence: Synthetic oligonucleotide
  Antisense strand to SEQ ID NO: 773482
auuucucuuaaucuuaccu

SEQ ID NO: 773484 - RNA, 19 nt, Artificial Sequence
  Description of Artificial Sequence: Synthetic oligonucleotide
  Sense strand starting at position 359 of SEQ ID NO: 587191
ggacuuugcaaaggaucuu

SEQ ID NO: 773485 - RNA, 19 nt, Artificial Sequence
  Description of Artificial Sequence: Synthetic oligonucleotide
  Antisense strand to SEQ ID NO: 773484
aagauccuuugcaaagucc

SEQ ID NO: 773486 - RNA, 19 nt, Artificial Sequence
  Description of Artificial Sequence: Synthetic oligonucleotide
  Sense strand starting at position 786 of SEQ ID NO: 587191
agaaccaaaucauagaaga

SEQ ID NO: 773487 - RNA, 19 nt, Artificial Sequence
  Description of Artificial Sequence: Synthetic oligonucleotide
  Antisense strand to SEQ ID NO: 773486
ucuucuaugauuugguucu

SEQ ID NO: 773488 - RNA, 19 nt, Artificial Sequence
  Description of Artificial Sequence: Synthetic oligonucleotide
  Sense strand starting at position 804 of SEQ ID NO: 587191
agucucuaauuuggaauuu

SEQ ID NO: 773489 - RNA, 19 nt, Artificial Sequence
  Description of Artificial Sequence: Synthetic oligonucleotide
  Antisense strand to SEQ ID NO: 773488
aaauuccaaauuagagacu

SEQ ID NO: 773490 - RNA, 19 nt, Artificial Sequence
  Description of Artificial Sequence: Synthetic oligonucleotide
  Sense strand starting at position 815 of SEQ ID NO: 587191
uggaauuuguggcauuaaa

SEQ ID NO: 773491 - RNA, 19 nt, Artificial Sequence
  Description of Artificial Sequence: Synthetic oligonucleotide
  Antisense strand to SEQ ID NO: 773490
uuuaaugccacaaauucca

SEQ ID NO: 773492 - RNA, 19 nt, Artificial Sequence
  Description of Artificial Sequence: Synthetic oligonucleotide
  Sense strand starting at position 845 of SEQ ID NO: 587191
gguacaauuuaauagugua

SEQ ID NO: 773493 - RNA, 19 nt, Artificial Sequence
  Description of Artificial Sequence: Synthetic oligonucleotide
  Antisense strand to SEQ ID NO: 773492
uacacuauuaaauuguacc

SEQ ID NO: 773494 - RNA, 19 nt, Artificial Sequence
  Description of Artificial Sequence: Synthetic oligonucleotide
  Sense strand starting at position 859 of SEQ ID NO: 587191
guguaaagcuuucugugga

SEQ ID NO: 773495 - RNA, 19 nt, Artificial Sequence
  Description of Artificial Sequence: Synthetic oligonucleotide
  Antisense strand to SEQ ID NO: 773494
uccacagaaagcuuuacac

SEQ ID NO: 773496 - RNA, 19 nt, Artificial Sequence
  Description of Artificial Sequence: Synthetic oligonucleotide
  Sense strand starting at position 862 of SEQ ID NO: 587191
uaaagcuuucuguggaaac

SEQ ID NO: 773497 - RNA, 19 nt, Artificial Sequence
  Description of Artificial Sequence: Synthetic oligonucleotide
  Antisense strand to SEQ ID NO: 773496
guuuccacagaaagcuuua

SEQ ID NO: 773498 - RNA, 19 nt, Artificial Sequence
  Description of Artificial Sequence: Synthetic oligonucleotide
  Sense strand starting at position 864 of SEQ ID NO: 587191
aagcuuucuguggaaacuu

SEQ ID NO: 773499 - RNA, 19 nt, Artificial Sequence
  Description of Artificial Sequence: Synthetic oligonucleotide
  Antisense strand to SEQ ID NO: 773498
aaguuuccacagaaagcuu

SEQ ID NO: 773500 - RNA, 19 nt, Artificial Sequence
  Description of Artificial Sequence: Synthetic oligonucleotide
  Sense strand starting at position 1153 of SEQ ID NO: 587191
ccuguaugacagcgugaca

SEQ ID NO: 773501 - RNA, 19 nt, Artificial Sequence
  Description of Artificial Sequence: Synthetic oligonucleotide
  Antisense strand to SEQ ID NO: 773500
ugucacgcugucauacagg

SEQ ID NO: 773502 - RNA, 19 nt, Artificial Sequence
  Description of Artificial Sequence: Synthetic oligonucleotide
  Sense strand starting at position 1228 of SEQ ID NO: 587191
ucaaguuggugcccagaga

SEQ ID NO: 773503 - RNA, 19 nt, Artificial Sequence
  Description of Artificial Sequence: Synthetic oligonucleotide
  Antisense strand to SEQ ID NO: 773502
ucucugggcaccaacuuga

SEQ ID NO: 773504 - RNA, 19 nt, Artificial Sequence
  Description of Artificial Sequence: Synthetic oligonucleotide
  Sense strand starting at position 1229 of SEQ ID NO: 587191
caaguuggugcccagagaa

SEQ ID NO: 773505 - RNA, 19 nt, Artificial Sequence
  Description of Artificial Sequence: Synthetic oligonucleotide
  Antisense strand to SEQ ID NO: 773504
uucucugggcaccaacuug

SEQ ID NO: 773506 - RNA, 19 nt, Artificial Sequence
  Description of Artificial Sequence: Synthetic oligonucleotide
  Sense strand starting at position 1252 of SEQ ID NO: 587191
gcuaguuaugauugcucau

SEQ ID NO: 773507 - RNA, 19 nt, Artificial Sequence
  Description of Artificial Sequence: Synthetic oligonucleotide
  Antisense strand to SEQ ID NO: 773506
augagcaaucauaacuagc

SEQ ID NO: 773508 - RNA, 19 nt, Artificial Sequence
  Description of Artificial Sequence: Synthetic oligonucleotide
  Sense strand starting at position 1460 of SEQ ID NO: 587191
aggaaaugucuugguaaca

SEQ ID NO: 773509 - RNA, 19 nt, Artificial Sequence
  Description of Artificial Sequence: Synthetic oligonucleotide
  Antisense strand to SEQ ID NO: 773508
uguuaccaagacauuuccu

SEQ ID NO: 773510 - RNA, 19 nt, Artificial Sequence
  Description of Artificial Sequence: Synthetic oligonucleotide
  Sense strand starting at position 1461 of SEQ ID NO: 587191
ggaaaugucuugguaacac

SEQ ID NO: 773511 - RNA, 19 nt, Artificial Sequence
  Description of Artificial Sequence: Synthetic oligonucleotide
  Antisense strand to SEQ ID NO: 773510
guguuaccaagacauuucc

SEQ ID NO: 773512 - RNA, 19 nt, Artificial Sequence
  Description of Artificial Sequence: Synthetic oligonucleotide
  Sense strand starting at position 2408 of SEQ ID NO: 587191
gucucuagccguuauacca

SEQ ID NO: 773513 - RNA, 19 nt, Artificial Sequence
  Description of Artificial Sequence: Synthetic oligonucleotide
  Antisense strand to SEQ ID NO: 773512
ugguauaacggcuagagac

SEQ ID NO: 773514 - RNA, 19 nt, Artificial Sequence
  Description of Artificial Sequence: Synthetic oligonucleotide
  Sense strand starting at position 2665 of SEQ ID NO: 587191
cacuaaguugugggaucga

SEQ ID NO: 773515 - RNA, 19 nt, Artificial Sequence
  Description of Artificial Sequence: Synthetic oligonucleotide
  Antisense strand to SEQ ID NO: 773514
ucgaucccacaacuuagug

SEQ ID NO: 773516 - RNA, 19 nt, Artificial Sequence
  Description of Artificial Sequence: Synthetic oligonucleotide
  Sense strand starting at position 2670 of SEQ ID NO: 587191
aguugugggaucgaaaucu

SEQ ID NO: 773517 - RNA, 19 nt, Artificial Sequence
  Description of Artificial Sequence: Synthetic oligonucleotide
  Antisense strand to SEQ ID NO: 773516
agauuucgaucccacaacu

SEQ ID NO: 773518 - RNA, 19 nt, Artificial Sequence
  Description of Artificial Sequence: Synthetic oligonucleotide
  Sense strand starting at position 2679 of SEQ ID NO: 587191
aucgaaaucucaguagguc

SEQ ID NO: 773519 - RNA, 19 nt, Artificial Sequence
  Description of Artificial Sequence: Synthetic oligonucleotide
  Antisense strand to SEQ ID NO: 773518
gaccuacugagauuucgau

SEQ ID NO: 773520 - RNA, 19 nt, Artificial Sequence
  Description of Artificial Sequence: Synthetic oligonucleotide
  Sense strand starting at position 2896 of SEQ ID NO: 587191
ccuggauccuuacagaaua

SEQ ID NO: 773521 - RNA, 19 nt, Artificial Sequence
  Description of Artificial Sequence: Synthetic oligonucleotide
  Antisense strand to SEQ ID NO: 773520
uauucuguaaggauccagg

SEQ ID NO: 773522 - RNA, 19 nt, Artificial Sequence
  Description of Artificial Sequence: Synthetic oligonucleotide
  Sense strand starting at position 2906 of SEQ ID NO: 587191
uacagaauaugucuuguag

SEQ ID NO: 773523 - RNA, 19 nt, Artificial Sequence
  Description of Artificial Sequence: Synthetic oligonucleotide
  Antisense strand to SEQ ID NO: 773522
cuacaagacauauucugua

SEQ ID NO: 773524 - RNA, 19 nt, Artificial Sequence
  Description of Artificial Sequence: Synthetic oligonucleotide
  Sense strand starting at position 2912 of SEQ ID NO: 587191
auaugucuuguaggugaag

SEQ ID NO: 773525 - RNA, 19 nt, Artificial Sequence
  Description of Artificial Sequence: Synthetic oligonucleotide
  Antisense strand to SEQ ID NO: 773524
cuucaccuacaagacauau

SEQ ID NO: 773526 - RNA, 19 nt, Artificial Sequence
  Description of Artificial Sequence: Synthetic oligonucleotide
  Sense strand starting at position 2914 of SEQ ID NO: 587191
augucuuguaggugaagcu

SEQ ID NO: 773527 - RNA, 19 nt, Artificial Sequence
  Description of Artificial Sequence: Synthetic oligonucleotide
  Antisense strand to SEQ ID NO: 773526
agcuucaccuacaagacau

SEQ ID NO: 773528 - RNA, 19 nt, Artificial Sequence
  Description of Artificial Sequence: Synthetic oligonucleotide
  Sense strand starting at position 2915 of SEQ ID NO: 587191
ugucuuguaggugaagcua

SEQ ID NO: 773529 - RNA, 19 nt, Artificial Sequence
  Description of Artificial Sequence: Synthetic oligonucleotide
  Antisense strand to SEQ ID NO: 773528
uagcuucaccuacaagaca

SEQ ID NO: 773530 - RNA, 19 nt, Artificial Sequence
  Description of Artificial Sequence: Synthetic oligonucleotide
  Sense strand starting at position 2996 of SEQ ID NO: 587191
cuguuacuacuuuguuuaa

SEQ ID NO: 773531 - RNA, 19 nt, Artificial Sequence
  Description of Artificial Sequence: Synthetic oligonucleotide
  Antisense strand to SEQ ID NO: 773530
uuaaacaaaguaguaacag

SEQ ID NO: 773532 - RNA, 19 nt, Artificial Sequence
  Description of Artificial Sequence: Synthetic oligonucleotide
  Sense strand starting at position 3033 of SEQ ID NO: 587191
uuuaauguuacuggacguu

SEQ ID NO: 773533 - RNA, 19 nt, Artificial Sequence
  Description of Artificial Sequence: Synthetic oligonucleotide
  Antisense strand to SEQ ID NO: 773532
aacguccaguaacauuaaa

SEQ ID NO: 773534 - RNA, 19 nt, Artificial Sequence
  Description of Artificial Sequence: Synthetic oligonucleotide
  Sense strand starting at position 3294 of SEQ ID NO: 587191
uuuccuuguguugaacaga

SEQ ID NO: 773535 - RNA, 19 nt, Artificial Sequence
  Description of Artificial Sequence: Synthetic oligonucleotide
  Antisense strand to SEQ ID NO: 773534
ucuguucaacacaaggaaa

SEQ ID NO: 773536 - RNA, 19 nt, Artificial Sequence
  Description of Artificial Sequence: Synthetic oligonucleotide
  Sense strand starting at position 3297 of SEQ ID NO: 587191
ccuuguguugaacagaaau

SEQ ID NO: 773537 - RNA, 19 nt, Artificial Sequence
  Description of Artificial Sequence: Synthetic oligonucleotide
  Antisense strand to SEQ ID NO: 773536
auuucuguucaacacaagg

SEQ ID NO: 773538 - RNA, 19 nt, Artificial Sequence
  Description of Artificial Sequence: Synthetic oligonucleotide
  Sense strand starting at position 3321 of SEQ ID NO: 587191
ccuggugaugucuaucuau

SEQ ID NO: 773539 - RNA, 19 nt, Artificial Sequence
  Description of Artificial Sequence: Synthetic oligonucleotide
  Antisense strand to SEQ ID NO: 773538
auagauagacaucaccagg

SEQ ID NO: 773540 - RNA, 19 nt, Artificial Sequence
  Description of Artificial Sequence: Synthetic oligonucleotide
  Sense strand starting at position 3324 of SEQ ID NO: 587191
ggugaugucuaucuauugu

SEQ ID NO: 773541 - RNA, 19 nt, Artificial Sequence
  Description of Artificial Sequence: Synthetic oligonucleotide
  Antisense strand to SEQ ID NO: 773540
acaauagauagacaucacc

SEQ ID NO: 773542 - RNA, 19 nt, Artificial Sequence
  Description of Artificial Sequence: Synthetic oligonucleotide
  Sense strand starting at position 3363 of SEQ ID NO: 587191
gacaauagaugacacagua

SEQ ID NO: 773543 - RNA, 19 nt, Artificial Sequence
  Description of Artificial Sequence: Synthetic oligonucleotide
  Antisense strand to SEQ ID NO: 773542
uacugugucaucuauuguc

SEQ ID NO: 773544 - RNA, 19 nt, Artificial Sequence
  Description of Artificial Sequence: Synthetic oligonucleotide
  Sense strand starting at position 3421 of SEQ ID NO: 587191
gagcuaaagguuuggaguu

SEQ ID NO: 773545 - RNA, 19 nt, Artificial Sequence
  Description of Artificial Sequence: Synthetic oligonucleotide
  Antisense strand to SEQ ID NO: 773544
aacuccaaaccuuuagcuc

SEQ ID NO: 773546 - RNA, 19 nt, Artificial Sequence
  Description of Artificial Sequence: Synthetic oligonucleotide
  Sense strand starting at position 3436 of SEQ ID NO: 587191
aguucuuccugaguugcca

SEQ ID NO: 773547 - RNA, 19 nt, Artificial Sequence
  Description of Artificial Sequence: Synthetic oligonucleotide
  Antisense strand to SEQ ID NO: 773546
uggcaacucaggaagaacu

SEQ ID NO: 773548 - RNA, 19 nt, Artificial Sequence
  Description of Artificial Sequence: Synthetic oligonucleotide
  Sense strand starting at position 3485 of SEQ ID NO: 587191
accuauuagcaaugugaug

SEQ ID NO: 773549 - RNA, 19 nt, Artificial Sequence
  Description of Artificial Sequence: Synthetic oligonucleotide
  Antisense strand to SEQ ID NO: 773548
caucacauugcuaauaggu

SEQ ID NO: 773550 - RNA, 19 nt, Artificial Sequence
  Description of Artificial Sequence: Synthetic oligonucleotide
  Sense strand starting at position 3526 of SEQ ID NO: 587191
gugagugagcuauggcagu

SEQ ID NO: 773551 - RNA, 19 nt, Artificial Sequence
  Description of Artificial Sequence: Synthetic oligonucleotide
  Antisense strand to SEQ ID NO: 773550
acugccauagcucacucac

SEQ ID NO: 773552 - RNA, 19 nt, Artificial Sequence
  Description of Artificial Sequence: Synthetic oligonucleotide
  Sense strand starting at position 3547 of SEQ ID NO: 587191
ggcacaucgcguccaaguu

SEQ ID NO: 773553 - RNA, 19 nt, Artificial Sequence
  Description of Artificial Sequence: Synthetic oligonucleotide
  Antisense strand to SEQ ID NO: 773552
aacuuggacgcgaugugcc

SEQ ID NO: 773554 - RNA, 19 nt, Artificial Sequence
  Description of Artificial Sequence: Synthetic oligonucleotide
  Sense strand starting at position 3712 of SEQ ID NO: 587191
aacaguuugccagaugaca

SEQ ID NO: 773555 - RNA, 19 nt, Artificial Sequence
  Description of Artificial Sequence: Synthetic oligonucleotide
  Antisense strand to SEQ ID NO: 773554
ugucaucuggcaaacuguu

SEQ ID NO: 773556 - RNA, 19 nt, Artificial Sequence
  Description of Artificial Sequence: Synthetic oligonucleotide
  Sense strand starting at position 383 of SEQ ID NO: 587192
agaaccaaaucauagaaga

SEQ ID NO: 773557 - RNA, 19 nt, Artificial Sequence
  Description of Artificial Sequence: Synthetic oligonucleotide
  Antisense strand to SEQ ID NO: 773556
ucuucuaugauuugguucu

SEQ ID NO: 773558 - RNA, 19 nt, Artificial Sequence
  Description of Artificial Sequence: Synthetic oligonucleotide
  Sense strand starting at position 401 of SEQ ID NO: 587192
agucucuaauuuggaauuu

SEQ ID NO: 773559 - RNA, 19 nt, Artificial Sequence
  Description of Artificial Sequence: Synthetic oligonucleotide
  Antisense strand to SEQ ID NO: 773558
aaauuccaaauuagagacu

SEQ ID NO: 773560 - RNA, 19 nt, Artificial Sequence
  Description of Artificial Sequence: Synthetic oligonucleotide
  Sense strand starting at position 412 of SEQ ID NO: 587192
uggaauuuguggcauuaaa

SEQ ID NO: 773561 - RNA, 19 nt, Artificial Sequence
  Description of Artificial Sequence: Synthetic oligonucleotide
  Antisense strand to SEQ ID NO: 773560
uuuaaugccacaaauucca

SEQ ID NO: 773562 - RNA, 19 nt, Artificial Sequence
  Description of Artificial Sequence: Synthetic oligonucleotide
  Sense strand starting at position 442 of SEQ ID NO: 587192
gguacaauuuaauagugua

SEQ ID NO: 773563 - RNA, 19 nt, Artificial Sequence
  Description of Artificial Sequence: Synthetic oligonucleotide
  Antisense strand to SEQ ID NO: 773562
uacacuauuaaauuguacc

SEQ ID NO: 773564 - RNA, 19 nt, Artificial Sequence
  Description of Artificial Sequence: Synthetic oligonucleotide
  Sense strand starting at position 456 of SEQ ID NO: 587192
guguaaagcuuucugugga

SEQ ID NO: 773565 - RNA, 19 nt, Artificial Sequence
  Description of Artificial Sequence: Synthetic oligonucleotide
  Antisense strand to SEQ ID NO: 773564
uccacagaaagcuuuacac

SEQ ID NO: 773566 - RNA, 19 nt, Artificial Sequence
  Description of Artificial Sequence: Synthetic oligonucleotide
  Sense strand starting at position 459 of SEQ ID NO: 587192
uaaagcuuucuguggaaac

SEQ ID NO: 773567 - RNA, 19 nt, Artificial Sequence
  Description of Artificial Sequence: Synthetic oligonucleotide
  Antisense strand to SEQ ID NO: 773566
guuuccacagaaagcuuua

SEQ ID NO: 773568 - RNA, 19 nt, Artificial Sequence
  Description of Artificial Sequence: Synthetic oligonucleotide
  Sense strand starting at position 461 of SEQ ID NO: 587192
aagcuuucuguggaaacuu

SEQ ID NO: 773569 - RNA, 19 nt, Artificial Sequence
  Description of Artificial Sequence: Synthetic oligonucleotide
  Antisense strand to SEQ ID NO: 773568
aaguuuccacagaaagcuu

SEQ ID NO: 773570 - RNA, 19 nt, Artificial Sequence
  Description of Artificial Sequence: Synthetic oligonucleotide
  Sense strand starting at position 750 of SEQ ID NO: 587192
ccuguaugacagcgugaca

SEQ ID NO: 773571 - RNA, 19 nt, Artificial Sequence
  Description of Artificial Sequence: Synthetic oligonucleotide
  Antisense strand to SEQ ID NO: 773570
ugucacgcugucauacagg

SEQ ID NO: 773572 - RNA, 19 nt, Artificial Sequence
  Description of Artificial Sequence: Synthetic oligonucleotide
  Sense strand starting at position 825 of SEQ ID NO: 587192
ucaaguuggugcccagaga

SEQ ID NO: 773573 - RNA, 19 nt, Artificial Sequence
  Description of Artificial Sequence: Synthetic oligonucleotide
  Antisense strand to SEQ ID NO: 773572
ucucugggcaccaacuuga

SEQ ID NO: 773574 - RNA, 19 nt, Artificial Sequence
  Description of Artificial Sequence: Synthetic oligonucleotide
  Sense strand starting at position 826 of SEQ ID NO: 587192
caaguuggugcccagagaa

SEQ ID NO: 773575 - RNA, 19 nt, Artificial Sequence
  Description of Artificial Sequence: Synthetic oligonucleotide
  Antisense strand to SEQ ID NO: 773574
uucucugggcaccaacuug

SEQ ID NO: 773576 - RNA, 19 nt, Artificial Sequence
  Description of Artificial Sequence: Synthetic oligonucleotide
  Sense strand starting at position 1057 of SEQ ID NO: 587192
aggaaaugucuugguaaca

SEQ ID NO: 773577 - RNA, 19 nt, Artificial Sequence
  Description of Artificial Sequence: Synthetic oligonucleotide
  Antisense strand to SEQ ID NO: 773576
uguuaccaagacauuuccu

SEQ ID NO: 773578 - RNA, 19 nt, Artificial Sequence
  Description of Artificial Sequence: Synthetic oligonucleotide
  Sense strand starting at position 1058 of SEQ ID NO: 587192
ggaaaugucuugguaacac

SEQ ID NO: 773579 - RNA, 19 nt, Artificial Sequence
  Description of Artificial Sequence: Synthetic oligonucleotide
  Antisense strand to SEQ ID NO: 773578
guguuaccaagacauuucc

SEQ ID NO: 773580 - RNA, 19 nt, Artificial Sequence
  Description of Artificial Sequence: Synthetic oligonucleotide
  Sense strand starting at position 2005 of SEQ ID NO: 587192
gucucuagccguuauacca

SEQ ID NO: 773581 - RNA, 19 nt, Artificial Sequence
  Description of Artificial Sequence: Synthetic oligonucleotide
  Antisense strand to SEQ ID NO: 773580
ugguauaacggcuagagac

SEQ ID NO: 773582 - RNA, 19 nt, Artificial Sequence
  Description of Artificial Sequence: Synthetic oligonucleotide
  Sense strand starting at position 2262 of SEQ ID NO: 587192
cacuaaguugugggaucga

SEQ ID NO: 773583 - RNA, 19 nt, Artificial Sequence
  Description of Artificial Sequence: Synthetic oligonucleotide
  Antisense strand to SEQ ID NO: 773582
ucgaucccacaacuuagug

SEQ ID NO: 773584 - RNA, 19 nt, Artificial Sequence
  Description of Artificial Sequence: Synthetic oligonucleotide
  Sense strand starting at position 2267 of SEQ ID NO: 587192
aguugugggaucgaaaucu

SEQ ID NO: 773585 - RNA, 19 nt, Artificial Sequence
  Description of Artificial Sequence: Synthetic oligonucleotide
  Antisense strand to SEQ ID NO: 773584
agauuucgaucccacaacu

SEQ ID NO: 773586 - RNA, 19 nt, Artificial Sequence
  Description of Artificial Sequence: Synthetic oligonucleotide
  Sense strand starting at position 2276 of SEQ ID NO: 587192
aucgaaaucucaguagguc

SEQ ID NO: 773587 - RNA, 19 nt, Artificial Sequence
  Description of Artificial Sequence: Synthetic oligonucleotide
  Antisense strand to SEQ ID NO: 773586
gaccuacugagauuucgau

SEQ ID NO: 773588 - RNA, 19 nt, Artificial Sequence
  Description of Artificial Sequence: Synthetic oligonucleotide
  Sense strand starting at position 2493 of SEQ ID NO: 587192
ccuggauccuuacagaaua

SEQ ID NO: 773589 - RNA, 19 nt, Artificial Sequence
  Description of Artificial Sequence: Synthetic oligonucleotide
  Antisense strand to SEQ ID NO: 773588
uauucuguaaggauccagg

SEQ ID NO: 773590 - RNA, 19 nt, Artificial Sequence
  Description of Artificial Sequence: Synthetic oligonucleotide
  Sense strand starting at position 2503 of SEQ ID NO: 587192
uacagaauaugucuuguag

SEQ ID NO: 773591 - RNA, 19 nt, Artificial Sequence
  Description of Artificial Sequence: Synthetic oligonucleotide
  Antisense strand to SEQ ID NO: 773590
cuacaagacauauucugua

SEQ ID NO: 773592 - RNA, 19 nt, Artificial Sequence
  Description of Artificial Sequence: Synthetic oligonucleotide
  Sense strand starting at position 2509 of SEQ ID NO: 587192
auaugucuuguaggugaag

SEQ ID NO: 773593 - RNA, 19 nt, Artificial Sequence
  Description of Artificial Sequence: Synthetic oligonucleotide
  Antisense strand to SEQ ID NO: 773592
cuucaccuacaagacauau

SEQ ID NO: 773594 - RNA, 19 nt, Artificial Sequence
  Description of Artificial Sequence: Synthetic oligonucleotide
  Sense strand starting at position 2511 of SEQ ID NO: 587192
augucuuguaggugaagcu

SEQ ID NO: 773595 - RNA, 19 nt, Artificial Sequence
  Description of Artificial Sequence: Synthetic oligonucleotide
  Antisense strand to SEQ ID NO: 773594
agcuucaccuacaagacau

SEQ ID NO: 773596 - RNA, 19 nt, Artificial Sequence
  Description of Artificial Sequence: Synthetic oligonucleotide
  Sense strand starting at position 2512 of SEQ ID NO: 587192
ugucuuguaggugaagcua

SEQ ID NO: 773597 - RNA, 19 nt, Artificial Sequence
  Description of Artificial Sequence: Synthetic oligonucleotide
  Antisense strand to SEQ ID NO: 773596
uagcuucaccuacaagaca

SEQ ID NO: 773598 - RNA, 19 nt, Artificial Sequence
  Description of Artificial Sequence: Synthetic oligonucleotide
  Sense strand starting at position 2593 of SEQ ID NO: 587192
cuguuacuacuuuguuuaa

SEQ ID NO: 773599 - RNA, 19 nt, Artificial Sequence
  Description of Artificial Sequence: Synthetic oligonucleotide
  Antisense strand to SEQ ID NO: 773598
uuaaacaaaguaguaacag

SEQ ID NO: 773600 - RNA, 19 nt, Artificial Sequence
  Description of Artificial Sequence: Synthetic oligonucleotide
  Sense strand starting at position 2630 of SEQ ID NO: 587192
uuuaauguuacuggacguu

SEQ ID NO: 773601 - RNA, 19 nt, Artificial Sequence
  Description of Artificial Sequence: Synthetic oligonucleotide
  Antisense strand to SEQ ID NO: 773600
aacguccaguaacauuaaa

SEQ ID NO: 773602 - RNA, 19 nt, Artificial Sequence
  Description of Artificial Sequence: Synthetic oligonucleotide
  Sense strand starting at position 2891 of SEQ ID NO: 587192
uuuccuuguguugaacaga

SEQ ID NO: 773603 - RNA, 19 nt, Artificial Sequence
  Description of Artificial Sequence: Synthetic oligonucleotide
  Antisense strand to SEQ ID NO: 773602
ucuguucaacacaaggaaa

SEQ ID NO: 773604 - RNA, 19 nt, Artificial Sequence
  Description of Artificial Sequence: Synthetic oligonucleotide
  Sense strand starting at position 2894 of SEQ ID NO: 587192
ccuuguguugaacagaaau

SEQ ID NO: 773605 - RNA, 19 nt, Artificial Sequence
  Description of Artificial Sequence: Synthetic oligonucleotide
  Antisense strand to SEQ ID NO: 773604
auuucuguucaacacaagg

SEQ ID NO: 773606 - RNA, 19 nt, Artificial Sequence
  Description of Artificial Sequence: Synthetic oligonucleotide
  Sense strand starting at position 2918 of SEQ ID NO: 587192
ccuggugaugucuaucuau

SEQ ID NO: 773607 - RNA, 19 nt, Artificial Sequence
  Description of Artificial Sequence: Synthetic oligonucleotide
  Antisense strand to SEQ ID NO: 773606
auagauagacaucaccagg

SEQ ID NO: 773608 - RNA, 19 nt, Artificial Sequence
  Description of Artificial Sequence: Synthetic oligonucleotide
  Sense strand starting at position 2921 of SEQ ID NO: 587192
ggugaugucuaucuauugu

SEQ ID NO: 773609 - RNA, 19 nt, Artificial Sequence
  Description of Artificial Sequence: Synthetic oligonucleotide
  Antisense strand to SEQ ID NO: 773608
acaauagauagacaucacc

SEQ ID NO: 773610 - RNA, 19 nt, Artificial Sequence
  Description of Artificial Sequence: Synthetic oligonucleotide
  Sense strand starting at position 2960 of SEQ ID NO: 587192
gacaauagaugacacagua

SEQ ID NO: 773611 - RNA, 19 nt, Artificial Sequence
  Description of Artificial Sequence: Synthetic oligonucleotide
  Antisense strand to SEQ ID NO: 773610
uacugugucaucuauuguc

SEQ ID NO: 773612 - RNA, 19 nt, Artificial Sequence
  Description of Artificial Sequence: Synthetic oligonucleotide
  Sense strand starting at position 3018 of SEQ ID NO: 587192
gagcuaaagguuuggaguu

SEQ ID NO: 773613 - RNA, 19 nt, Artificial Sequence
  Description of Artificial Sequence: Synthetic oligonucleotide
  Antisense strand to SEQ ID NO: 773612
aacuccaaaccuuuagcuc

SEQ ID NO: 773614 - RNA, 19 nt, Artificial Sequence
  Description of Artificial Sequence: Synthetic oligonucleotide
  Sense strand starting at position 3033 of SEQ ID NO: 587192
aguucuuccugaguugcca

SEQ ID NO: 773615 - RNA, 19 nt, Artificial Sequence
  Description of Artificial Sequence: Synthetic oligonucleotide
  Antisense strand to SEQ ID NO: 773614
uggcaacucaggaagaacu

SEQ ID NO: 773616 - RNA, 19 nt, Artificial Sequence
  Description of Artificial Sequence: Synthetic oligonucleotide
  Sense strand starting at position 3082 of SEQ ID NO: 587192
accuauuagcaaugugaug

SEQ ID NO: 773617 - RNA, 19 nt, Artificial Sequence
  Description of Artificial Sequence: Synthetic oligonucleotide
  Antisense strand to SEQ ID NO: 773616
caucacauugcuaauaggu

SEQ ID NO: 773618 - RNA, 19 nt, Artificial Sequence
  Description of Artificial Sequence: Synthetic oligonucleotide
  Sense strand starting at position 3144 of SEQ ID NO: 587192
ggcacaucgcguccaaguu

SEQ ID NO: 773619 - RNA, 19 nt, Artificial Sequence
  Description of Artificial Sequence: Synthetic oligonucleotide
  Antisense strand to SEQ ID NO: 773618
aacuuggacgcgaugugcc

SEQ ID NO: 773620 - RNA, 19 nt, Artificial Sequence
  Description of Artificial Sequence: Synthetic oligonucleotide
  Sense strand starting at position 3309 of SEQ ID NO: 587192
aacaguuugccagaugaca

SEQ ID NO: 773621 - RNA, 19 nt, Artificial Sequence
  Description of Artificial Sequence: Synthetic oligonucleotide
  Antisense strand to SEQ ID NO: 773620
ugucaucuggcaaacuguu

SEQ ID NO: 773622 - RNA, 19 nt, Artificial Sequence
  Description of Artificial Sequence: Synthetic oligonucleotide
  Sense strand starting at position 3801 of SEQ ID NO: 587192
uuccuaaagguacaguaau

SEQ ID NO: 773623 - RNA, 19 nt, Artificial Sequence
  Description of Artificial Sequence: Synthetic oligonucleotide
  Antisense strand to SEQ ID NO: 773622
auuacuguaccuuuaggaa

SEQ ID NO: 773624 - RNA, 19 nt, Artificial Sequence
  Description of Artificial Sequence: Synthetic oligonucleotide
  Sense strand starting at position 3807 of SEQ ID NO: 587192
aagguacaguaaucaggau

SEQ ID NO: 773625 - RNA, 19 nt, Artificial Sequence
  Description of Artificial Sequence: Synthetic oligonucleotide
  Antisense strand to SEQ ID NO: 773624
auccugauuacuguaccuu

SEQ ID NO: 773626 - RNA, 19 nt, Artificial Sequence
  Description of Artificial Sequence: Synthetic oligonucleotide
  Sense strand starting at position 3813 of SEQ ID NO: 587192
caguaaucaggaugguaug

SEQ ID NO: 773627 - RNA, 19 nt, Artificial Sequence
  Description of Artificial Sequence: Synthetic oligonucleotide
  Antisense strand to SEQ ID NO: 773626
cauaccauccugauuacug

SEQ ID NO: 773628 - RNA, 19 nt, Artificial Sequence
  Description of Artificial Sequence: Synthetic oligonucleotide
  Sense strand starting at position 3874 of SEQ ID NO: 587192
aguccagaaauaugagguu

SEQ ID NO: 773629 - RNA, 19 nt, Artificial Sequence
  Description of Artificial Sequence: Synthetic oligonucleotide
  Antisense strand to SEQ ID NO: 773628
aaccucauauuucuggacu

SEQ ID NO: 773630 - RNA, 19 nt, Artificial Sequence
  Description of Artificial Sequence: Synthetic oligonucleotide
  Sense strand starting at position 3889 of SEQ ID NO: 587192
gguugaauuucuuaaagaa

SEQ ID NO: 773631 - RNA, 19 nt, Artificial Sequence
  Description of Artificial Sequence: Synthetic oligonucleotide
  Antisense strand to SEQ ID NO: 773630
uucuuuaagaaauucaacc

SEQ ID NO: 773632 - RNA, 19 nt, Artificial Sequence
  Description of Artificial Sequence: Synthetic oligonucleotide
  Sense strand starting at position 3965 of SEQ ID NO: 587192
aagguaauucugcaucuag

SEQ ID NO: 773633 - RNA, 19 nt, Artificial Sequence
  Description of Artificial Sequence: Synthetic oligonucleotide
  Antisense strand to SEQ ID NO: 773632
cuagaugcagaauuaccuu

SEQ ID NO: 773634 - RNA, 19 nt, Artificial Sequence
  Description of Artificial Sequence: Synthetic oligonucleotide
  Sense strand starting at position 3976 of SEQ ID NO: 587192
gcaucuagcuaagcugaaa

SEQ ID NO: 773635 - RNA, 19 nt, Artificial Sequence
  Description of Artificial Sequence: Synthetic oligonucleotide
  Antisense strand to SEQ ID NO: 773634
uuucagcuuagcuagaugc

SEQ ID NO: 773636 - RNA, 19 nt, Artificial Sequence
  Description of Artificial Sequence: Synthetic oligonucleotide
  Sense strand starting at position 249 of SEQ ID NO: 587193
uuggacauaucucugggua

SEQ ID NO: 773637 - RNA, 19 nt, Artificial Sequence
  Description of Artificial Sequence: Synthetic oligonucleotide
  Antisense strand to SEQ ID NO: 773636
uacccagagauauguccaa

SEQ ID NO: 773638 - RNA, 19 nt, Artificial Sequence
  Description of Artificial Sequence: Synthetic oligonucleotide
  Sense strand starting at position 250 of SEQ ID NO: 587193
uggacauaucucuggguau

SEQ ID NO: 773639 - RNA, 19 nt, Artificial Sequence
  Description of Artificial Sequence: Synthetic oligonucleotide
  Antisense strand to SEQ ID NO: 773638
auacccagagauaugucca

SEQ ID NO: 773640 - RNA, 19 nt, Artificial Sequence
  Description of Artificial Sequence: Synthetic oligonucleotide
  Sense strand starting at position 252 of SEQ ID NO: 587193
gacauaucucuggguauau

SEQ ID NO: 773641 - RNA, 19 nt, Artificial Sequence
  Description of Artificial Sequence: Synthetic oligonucleotide
  Antisense strand to SEQ ID NO: 773640
auauacccagagauauguc

SEQ ID NO: 773642 - RNA, 19 nt, Artificial Sequence
  Description of Artificial Sequence: Synthetic oligonucleotide
  Sense strand starting at position 253 of SEQ ID NO: 587193
acauaucucuggguauauc

SEQ ID NO: 773643 - RNA, 19 nt, Artificial Sequence
  Description of Artificial Sequence: Synthetic oligonucleotide
  Antisense strand to SEQ ID NO: 773642
gauauacccagagauaugu

SEQ ID NO: 773644 - RNA, 19 nt, Artificial Sequence
  Description of Artificial Sequence: Synthetic oligonucleotide
  Sense strand starting at position 263 of SEQ ID NO: 587193
ggguauaucaccuggguua

SEQ ID NO: 773645 - RNA, 19 nt, Artificial Sequence
  Description of Artificial Sequence: Synthetic oligonucleotide
  Antisense strand to SEQ ID NO: 773644
uaacccaggugauauaccc

SEQ ID NO: 773646 - RNA, 19 nt, Artificial Sequence
  Description of Artificial Sequence: Synthetic oligonucleotide
  Sense strand starting at position 264 of SEQ ID NO: 587193
gguauaucaccuggguuau

SEQ ID NO: 773647 - RNA, 19 nt, Artificial Sequence
  Description of Artificial Sequence: Synthetic oligonucleotide
  Antisense strand to SEQ ID NO: 773646
auaacccaggugauauacc

SEQ ID NO: 773648 - RNA, 19 nt, Artificial Sequence
  Description of Artificial Sequence: Synthetic oligonucleotide
  Sense strand starting at position 265 of SEQ ID NO: 587193
guauaucaccuggguuaug

SEQ ID NO: 773649 - RNA, 19 nt, Artificial Sequence
  Description of Artificial Sequence: Synthetic oligonucleotide
  Antisense strand to SEQ ID NO: 773648
cauaacccaggugauauac

SEQ ID NO: 773650 - RNA, 19 nt, Artificial Sequence
  Description of Artificial Sequence: Synthetic oligonucleotide
  Sense strand starting at position 318 of SEQ ID NO: 587193
gggaaaucauaguauauuu

SEQ ID NO: 773651 - RNA, 19 nt, Artificial Sequence
  Description of Artificial Sequence: Synthetic oligonucleotide
  Antisense strand to SEQ ID NO: 773650
aaauauacuaugauuuccc

SEQ ID NO: 773652 - RNA, 19 nt, Artificial Sequence
  Description of Artificial Sequence: Synthetic oligonucleotide
  Sense strand starting at position 382 of SEQ ID NO: 587193
uccugcuuccaguaagaau

SEQ ID NO: 773653 - RNA, 19 nt, Artificial Sequence
  Description of Artificial Sequence: Synthetic oligonucleotide
  Antisense strand to SEQ ID NO: 773652
auucuuacuggaagcagga

SEQ ID NO: 773654 - RNA, 19 nt, Artificial Sequence
  Description of Artificial Sequence: Synthetic oligonucleotide
  Sense strand starting at position 460 of SEQ ID NO: 587193
gacagugggaauugugaca

SEQ ID NO: 773655 - RNA, 19 nt, Artificial Sequence
  Description of Artificial Sequence: Synthetic oligonucleotide
  Antisense strand to SEQ ID NO: 773654
ugucacaauucccacuguc

SEQ ID NO: 773656 - RNA, 19 nt, Artificial Sequence
  Description of Artificial Sequence: Synthetic oligonucleotide
  Sense strand starting at position 465 of SEQ ID NO: 587193
ugggaauugugacauuucu

SEQ ID NO: 773657 - RNA, 19 nt, Artificial Sequence
  Description of Artificial Sequence: Synthetic oligonucleotide
  Antisense strand to SEQ ID NO: 773656
agaaaugucacaauuccca

SEQ ID NO: 773658 - RNA, 19 nt, Artificial Sequence
  Description of Artificial Sequence: Synthetic oligonucleotide
  Sense strand starting at position 694 of SEQ ID NO: 587193
ccaguuagcagacaugaug

SEQ ID NO: 773659 - RNA, 19 nt, Artificial Sequence
  Description of Artificial Sequence: Synthetic oligonucleotide
  Antisense strand to SEQ ID NO: 773658
caucaugucugcuaacugg

SEQ ID NO: 773660 - RNA, 19 nt, Artificial Sequence
  Description of Artificial Sequence: Synthetic oligonucleotide
  Sense strand starting at position 780 of SEQ ID NO: 587193
cagguaagggucugcauuu

SEQ ID NO: 773661 - RNA, 19 nt, Artificial Sequence
  Description of Artificial Sequence: Synthetic oligonucleotide
  Antisense strand to SEQ ID NO: 773660
aaaugcagacccuuaccug

SEQ ID NO: 773662 - RNA, 19 nt, Artificial Sequence
  Description of Artificial Sequence: Synthetic oligonucleotide
  Sense strand starting at position 836 of SEQ ID NO: 587193
uuauaaaguccaugaguuu

SEQ ID NO: 773663 - RNA, 19 nt, Artificial Sequence
  Description of Artificial Sequence: Synthetic oligonucleotide
  Antisense strand to SEQ ID NO: 773662
aaacucauggacuuuauaa

SEQ ID NO: 773664 - RNA, 19 nt, Artificial Sequence
  Description of Artificial Sequence: Synthetic oligonucleotide
  Sense strand starting at position 889 of SEQ ID NO: 587193
gagagauugugacucucau

SEQ ID NO: 773665 - RNA, 19 nt, Artificial Sequence
  Description of Artificial Sequence: Synthetic oligonucleotide
  Antisense strand to SEQ ID NO: 773664
augagagucacaaucucuc

SEQ ID NO: 773666 - RNA, 19 nt, Artificial Sequence
  Description of Artificial Sequence: Synthetic oligonucleotide
  Sense strand starting at position 1196 of SEQ ID NO: 587193
aacacucaugcguacagua

SEQ ID NO: 773667 - RNA, 19 nt, Artificial Sequence
  Description of Artificial Sequence: Synthetic oligonucleotide
  Antisense strand to SEQ ID NO: 773666
uacuguacgcaugaguguu

SEQ ID NO: 773668 - RNA, 19 nt, Artificial Sequence
  Description of Artificial Sequence: Synthetic oligonucleotide
  Sense strand starting at position 1221 of SEQ ID NO: 587193
ccuauuauacuguacgcaa

SEQ ID NO: 773669 - RNA, 19 nt, Artificial Sequence
  Description of Artificial Sequence: Synthetic oligonucleotide
  Antisense strand to SEQ ID NO: 773668
uugcguacaguauaauagg

SEQ ID NO: 773670 - RNA, 19 nt, Artificial Sequence
  Description of Artificial Sequence: Synthetic oligonucleotide
  Sense strand starting at position 1811 of SEQ ID NO: 587193
gaugcaacucaccagaagu

SEQ ID NO: 773671 - RNA, 19 nt, Artificial Sequence
  Description of Artificial Sequence: Synthetic oligonucleotide
  Antisense strand to SEQ ID NO: 773670
acuucuggugaguugcauc

SEQ ID NO: 773672 - RNA, 19 nt, Artificial Sequence
  Description of Artificial Sequence: Synthetic oligonucleotide
  Sense strand starting at position 1993 of SEQ ID NO: 587193
ucaaguaccuaggugauau

SEQ ID NO: 773673 - RNA, 19 nt, Artificial Sequence
  Description of Artificial Sequence: Synthetic oligonucleotide
  Antisense strand to SEQ ID NO: 773672
auaucaccuagguacuuga

SEQ ID NO: 773674 - RNA, 19 nt, Artificial Sequence
  Description of Artificial Sequence: Synthetic oligonucleotide
  Sense strand starting at position 2265 of SEQ ID NO: 587193
gugacaugacucuggguuu

SEQ ID NO: 773675 - RNA, 19 nt, Artificial Sequence
  Description of Artificial Sequence: Synthetic oligonucleotide
  Antisense strand to SEQ ID NO: 773674
aaacccagagucaugucac

SEQ ID NO: 773676 - RNA, 19 nt, Artificial Sequence
  Description of Artificial Sequence: Synthetic oligonucleotide
  Sense strand starting at position 2268 of SEQ ID NO: 587193
acaugacucuggguuuauu

SEQ ID NO: 773677 - RNA, 19 nt, Artificial Sequence
  Description of Artificial Sequence: Synthetic oligonucleotide
  Antisense strand to SEQ ID NO: 773676
aauaaacccagagucaugu

SEQ ID NO: 773678 - RNA, 19 nt, Artificial Sequence
  Description of Artificial Sequence: Synthetic oligonucleotide
  Sense strand starting at position 2280 of SEQ ID NO: 587193
guuuauuaccuaggugaua

SEQ ID NO: 773679 - RNA, 19 nt, Artificial Sequence
  Description of Artificial Sequence: Synthetic oligonucleotide
  Antisense strand to SEQ ID NO: 773678
uaucaccuagguaauaaac

SEQ ID NO: 773680 - RNA, 19 nt, Artificial Sequence
  Description of Artificial Sequence: Synthetic oligonucleotide
  Sense strand starting at position 2281 of SEQ ID NO: 587193
uuuauuaccuaggugauau

SEQ ID NO: 773681 - RNA, 19 nt, Artificial Sequence
  Description of Artificial Sequence: Synthetic oligonucleotide
  Antisense strand to SEQ ID NO: 773680
auaucaccuagguaauaaa

SEQ ID NO: 773682 - RNA, 19 nt, Artificial Sequence
  Description of Artificial Sequence: Synthetic oligonucleotide
  Sense strand starting at position 2340 of SEQ ID NO: 587193
gugacauaccucuggacac

SEQ ID NO: 773683 - RNA, 19 nt, Artificial Sequence
  Description of Artificial Sequence: Synthetic oligonucleotide
  Antisense strand to SEQ ID NO: 773682
guguccagagguaugucac

SEQ ID NO: 773684 - RNA, 19 nt, Artificial Sequence
  Description of Artificial Sequence: Synthetic oligonucleotide
  Sense strand starting at position 2431 of SEQ ID NO: 587193
gcccauaaccuagguaaug

SEQ ID NO: 773685 - RNA, 19 nt, Artificial Sequence
  Description of Artificial Sequence: Synthetic oligonucleotide
  Antisense strand to SEQ ID NO: 773684
cauuaccuagguuaugggc

SEQ ID NO: 773686 - RNA, 19 nt, Artificial Sequence
  Description of Artificial Sequence: Synthetic oligonucleotide
  Sense strand starting at position 2432 of SEQ ID NO: 587193
cccauaaccuagguaaugu

SEQ ID NO: 773687 - RNA, 19 nt, Artificial Sequence
  Description of Artificial Sequence: Synthetic oligonucleotide
  Antisense strand to SEQ ID NO: 773686
acauuaccuagguuauggg

SEQ ID NO: 773688 - RNA, 19 nt, Artificial Sequence
  Description of Artificial Sequence: Synthetic oligonucleotide
  Sense strand starting at position 2505 of SEQ ID NO: 587193
ggguccaucaccuagguaa

SEQ ID NO: 773689 - RNA, 19 nt, Artificial Sequence
  Description of Artificial Sequence: Synthetic oligonucleotide
  Antisense strand to SEQ ID NO: 773688
uuaccuaggugauggaccc

SEQ ID NO: 773690 - RNA, 19 nt, Artificial Sequence
  Description of Artificial Sequence: Synthetic oligonucleotide
  Sense strand starting at position 2507 of SEQ ID NO: 587193
guccaucaccuagguaaug

SEQ ID NO: 773691 - RNA, 19 nt, Artificial Sequence
  Description of Artificial Sequence: Synthetic oligonucleotide
  Antisense strand to SEQ ID NO: 773690
cauuaccuaggugauggac

SEQ ID NO: 773692 - RNA, 19 nt, Artificial Sequence
  Description of Artificial Sequence: Synthetic oligonucleotide
  Sense strand starting at position 2625 of SEQ ID NO: 587193
ccuguuaacagggagcauu

SEQ ID NO: 773693 - RNA, 19 nt, Artificial Sequence
  Description of Artificial Sequence: Synthetic oligonucleotide
  Antisense strand to SEQ ID NO: 773692
aaugcucccuguuaacagg

SEQ ID NO: 773694 - RNA, 19 nt, Artificial Sequence
  Description of Artificial Sequence: Synthetic oligonucleotide
  Sense strand starting at position 2711 of SEQ ID NO: 587193
gggauugugacauacugcu

SEQ ID NO: 773695 - RNA, 19 nt, Artificial Sequence
  Description of Artificial Sequence: Synthetic oligonucleotide
  Antisense strand to SEQ ID NO: 773694
agcaguaugucacaauccc

SEQ ID NO: 773696 - RNA, 19 nt, Artificial Sequence
  Description of Artificial Sequence: Synthetic oligonucleotide
  Sense strand starting at position 2948 of SEQ ID NO: 587193
aggcuuaggccauagguaa

SEQ ID NO: 773697 - RNA, 19 nt, Artificial Sequence
  Description of Artificial Sequence: Synthetic oligonucleotide
  Antisense strand to SEQ ID NO: 773696
uuaccuauggccuaagccu

SEQ ID NO: 773698 - RNA, 19 nt, Artificial Sequence
  Description of Artificial Sequence: Synthetic oligonucleotide
  Sense strand starting at position 2977 of SEQ ID NO: 587193
cuccuacuuguauaaaguu

SEQ ID NO: 773699 - RNA, 19 nt, Artificial Sequence
  Description of Artificial Sequence: Synthetic oligonucleotide
  Antisense strand to SEQ ID NO: 773698
aacuuuauacaaguaggag

SEQ ID NO: 773700 - RNA, 19 nt, Artificial Sequence
  Description of Artificial Sequence: Synthetic oligonucleotide
  Sense strand starting at position 3029 of SEQ ID NO: 587193
gaagcccuagagugauaga

SEQ ID NO: 773701 - RNA, 19 nt, Artificial Sequence
  Description of Artificial Sequence: Synthetic oligonucleotide
  Antisense strand to SEQ ID NO: 773700
ucuaucacucuagggcuuc

SEQ ID NO: 773702 - RNA, 19 nt, Artificial Sequence
  Description of Artificial Sequence: Synthetic oligonucleotide
  Sense strand starting at position 3036 of SEQ ID NO: 587193
uagagugauagaggugaua

SEQ ID NO: 773703 - RNA, 19 nt, Artificial Sequence
  Description of Artificial Sequence: Synthetic oligonucleotide
  Antisense strand to SEQ ID NO: 773702
uaucaccucuaucacucua

SEQ ID NO: 773704 - RNA, 19 nt, Artificial Sequence
  Description of Artificial Sequence: Synthetic oligonucleotide
  Sense strand starting at position 3038 of SEQ ID NO: 587193
gagugauagaggugauaac

SEQ ID NO: 773705 - RNA, 19 nt, Artificial Sequence
  Description of Artificial Sequence: Synthetic oligonucleotide
  Antisense strand to SEQ ID NO: 773704
guuaucaccucuaucacuc

SEQ ID NO: 773706 - RNA, 19 nt, Artificial Sequence
  Description of Artificial Sequence: Synthetic oligonucleotide
  Sense strand starting at position 3104 of SEQ ID NO: 587193
ccgacagacucuuccucau

SEQ ID NO: 773707 - RNA, 19 nt, Artificial Sequence
  Description of Artificial Sequence: Synthetic oligonucleotide
  Antisense strand to SEQ ID NO: 773706
augaggaagagucugucgg

SEQ ID NO: 773708 - RNA, 19 nt, Artificial Sequence
  Description of Artificial Sequence: Synthetic oligonucleotide
  Sense strand starting at position 3268 of SEQ ID NO: 587193
cugugaguucccuauugga

SEQ ID NO: 773709 - RNA, 19 nt, Artificial Sequence
  Description of Artificial Sequence: Synthetic oligonucleotide
  Antisense strand to SEQ ID NO: 773708
uccaauagggaacucacag

SEQ ID NO: 773710 - RNA, 19 nt, Artificial Sequence
  Description of Artificial Sequence: Synthetic oligonucleotide
  Sense strand starting at position 3344 of SEQ ID NO: 587193
cuguaucuccuuuacuuga

SEQ ID NO: 773711 - RNA, 19 nt, Artificial Sequence
  Description of Artificial Sequence: Synthetic oligonucleotide
  Antisense strand to SEQ ID NO: 773710
ucaaguaaaggagauacag

SEQ ID NO: 773712 - RNA, 19 nt, Artificial Sequence
  Description of Artificial Sequence: Synthetic oligonucleotide
  Sense strand starting at position 3960 of SEQ ID NO: 587193
gugaaaccugucuaggcua

SEQ ID NO: 773713 - RNA, 19 nt, Artificial Sequence
  Description of Artificial Sequence: Synthetic oligonucleotide
  Antisense strand to SEQ ID NO: 773712
uagccuagacagguuucac

SEQ ID NO: 773714 - RNA, 19 nt, Artificial Sequence
  Description of Artificial Sequence: Synthetic oligonucleotide
  Sense strand starting at position 3962 of SEQ ID NO: 587193
gaaaccugucuaggcuaau

SEQ ID NO: 773715 - RNA, 19 nt, Artificial Sequence
  Description of Artificial Sequence: Synthetic oligonucleotide
  Antisense strand to SEQ ID NO: 773714
auuagccuagacagguuuc

SEQ ID NO: 773716 - RNA, 19 nt, Artificial Sequence
  Description of Artificial Sequence: Synthetic oligonucleotide
  Sense strand starting at position 47 of SEQ ID NO: 587194
gugucagccuuuccaagga

SEQ ID NO: 773717 - RNA, 19 nt, Artificial Sequence
  Description of Artificial Sequence: Synthetic oligonucleotide
  Antisense strand to SEQ ID NO: 773716
uccuuggaaaggcugacac

SEQ ID NO: 773718 - RNA, 19 nt, Artificial Sequence
  Description of Artificial Sequence: Synthetic oligonucleotide
  Sense strand starting at position 52 of SEQ ID NO: 587194
agccuuuccaaggaagagu

SEQ ID NO: 773719 - RNA, 19 nt, Artificial Sequence
  Description of Artificial Sequence: Synthetic oligonucleotide
  Antisense strand to SEQ ID NO: 773718
acucuuccuuggaaaggcu

SEQ ID NO: 773720 - RNA, 19 nt, Artificial Sequence
  Description of Artificial Sequence: Synthetic oligonucleotide
  Sense strand starting at position 65 of SEQ ID NO: 587194
aagagugcaccaggagauu

SEQ ID NO: 773721 - RNA, 19 nt, Artificial Sequence
  Description of Artificial Sequence: Synthetic oligonucleotide
  Antisense strand to SEQ ID NO: 773720
aaucuccuggugcacucuu

SEQ ID NO: 773722 - RNA, 19 nt, Artificial Sequence
  Description of Artificial Sequence: Synthetic oligonucleotide
  Sense strand starting at position 138 of SEQ ID NO: 587194
caggcaguccugugggaga

SEQ ID NO: 773723 - RNA, 19 nt, Artificial Sequence
  Description of Artificial Sequence: Synthetic oligonucleotide
  Antisense strand to SEQ ID NO: 773722
ucucccacaggacugccug

SEQ ID NO: 773724 - RNA, 19 nt, Artificial Sequence
  Description of Artificial Sequence: Synthetic oligonucleotide
  Sense strand starting at position 140 of SEQ ID NO: 587194
ggcaguccugugggagaaa

SEQ ID NO: 773725 - RNA, 19 nt, Artificial Sequence
  Description of Artificial Sequence: Synthetic oligonucleotide
  Antisense strand to SEQ ID NO: 773724
uuucucccacaggacugcc

SEQ ID NO: 773726 - RNA, 19 nt, Artificial Sequence
  Description of Artificial Sequence: Synthetic oligonucleotide
  Sense strand starting at position 199 of SEQ ID NO: 587194
auagucaugguggguauca

SEQ ID NO: 773727 - RNA, 19 nt, Artificial Sequence
  Description of Artificial Sequence: Synthetic oligonucleotide
  Antisense strand to SEQ ID NO: 773726
ugauacccaccaugacuau

SEQ ID NO: 773728 - RNA, 19 nt, Artificial Sequence
  Description of Artificial Sequence: Synthetic oligonucleotide
  Sense strand starting at position 200 of SEQ ID NO: 587194
uagucaugguggguaucau

SEQ ID NO: 773729 - RNA, 19 nt, Artificial Sequence
  Description of Artificial Sequence: Synthetic oligonucleotide
  Antisense strand to SEQ ID NO: 773728
augauacccaccaugacua

SEQ ID NO: 773730 - RNA, 19 nt, Artificial Sequence
  Description of Artificial Sequence: Synthetic oligonucleotide
  Sense strand starting at position 209 of SEQ ID NO: 587194
uggguaucaugguuuauuc

SEQ ID NO: 773731 - RNA, 19 nt, Artificial Sequence
  Description of Artificial Sequence: Synthetic oligonucleotide
  Antisense strand to SEQ ID NO: 773730
gaauaaaccaugauaccca

SEQ ID NO: 773732 - RNA, 19 nt, Artificial Sequence
  Description of Artificial Sequence: Synthetic oligonucleotide
  Sense strand starting at position 219 of SEQ ID NO: 587194
gguuuauucccagacagua

SEQ ID NO: 773733 - RNA, 19 nt, Artificial Sequence
  Description of Artificial Sequence: Synthetic oligonucleotide
  Antisense strand to SEQ ID NO: 773732
uacugucugggaauaaacc

SEQ ID NO: 773734 - RNA, 19 nt, Artificial Sequence
  Description of Artificial Sequence: Synthetic oligonucleotide
  Sense strand starting at position 332 of SEQ ID NO: 587194
auaagaucucugugccuau

SEQ ID NO: 773735 - RNA, 19 nt, Artificial Sequence
  Description of Artificial Sequence: Synthetic oligonucleotide
  Antisense strand to SEQ ID NO: 773734
auaggcacagagaucuuau

SEQ ID NO: 773736 - RNA, 19 nt, Artificial Sequence
  Description of Artificial Sequence: Synthetic oligonucleotide
  Sense strand starting at position 336 of SEQ ID NO: 587194
gaucucugugccuauggaa

SEQ ID NO: 773737 - RNA, 19 nt, Artificial Sequence
  Description of Artificial Sequence: Synthetic oligonucleotide
  Antisense strand to SEQ ID NO: 773736
uuccauaggcacagagauc

SEQ ID NO: 773738 - RNA, 19 nt, Artificial Sequence
  Description of Artificial Sequence: Synthetic oligonucleotide
  Sense strand starting at position 384 of SEQ ID NO: 587194
uuacaauaguguccaggga

SEQ ID NO: 773739 - RNA, 19 nt, Artificial Sequence
  Description of Artificial Sequence: Synthetic oligonucleotide
  Antisense strand to SEQ ID NO: 773738
ucccuggacacuauuguaa

SEQ ID NO: 773740 - RNA, 19 nt, Artificial Sequence
  Description of Artificial Sequence: Synthetic oligonucleotide
  Sense strand starting at position 388 of SEQ ID NO: 587194
aauaguguccagggauuac

SEQ ID NO: 773741 - RNA, 19 nt, Artificial Sequence
  Description of Artificial Sequence: Synthetic oligonucleotide
  Antisense strand to SEQ ID NO: 773740
guaaucccuggacacuauu

SEQ ID NO: 773742 - RNA, 19 nt, Artificial Sequence
  Description of Artificial Sequence: Synthetic oligonucleotide
  Sense strand starting at position 398 of SEQ ID NO: 587194
agggauuacucuuugcuuu

SEQ ID NO: 773743 - RNA, 19 nt, Artificial Sequence
  Description of Artificial Sequence: Synthetic oligonucleotide
  Antisense strand to SEQ ID NO: 773742
aaagcaaagaguaaucccu

SEQ ID NO: 773744 - RNA, 19 nt, Artificial Sequence
  Description of Artificial Sequence: Synthetic oligonucleotide
  Sense strand starting at position 1205 of SEQ ID NO: 587194
guacccuccgauuacauaa

SEQ ID NO: 773745 - RNA, 19 nt, Artificial Sequence
  Description of Artificial Sequence: Synthetic oligonucleotide
  Antisense strand to SEQ ID NO: 773744
uuauguaaucggaggguac

SEQ ID NO: 773746 - RNA, 19 nt, Artificial Sequence
  Description of Artificial Sequence: Synthetic oligonucleotide
  Sense strand starting at position 1510 of SEQ ID NO: 587194
ccgaguuaucggcagagau

SEQ ID NO: 773747 - RNA, 19 nt, Artificial Sequence
  Description of Artificial Sequence: Synthetic oligonucleotide
  Antisense strand to SEQ ID NO: 773746
aucucugccgauaacucgg

SEQ ID NO: 773748 - RNA, 19 nt, Artificial Sequence
  Description of Artificial Sequence: Synthetic oligonucleotide
  Sense strand starting at position 1512 of SEQ ID NO: 587194
gaguuaucggcagagaugc

SEQ ID NO: 773749 - RNA, 19 nt, Artificial Sequence
  Description of Artificial Sequence: Synthetic oligonucleotide
  Antisense strand to SEQ ID NO: 773748
gcaucucugccgauaacuc

SEQ ID NO: 773750 - RNA, 19 nt, Artificial Sequence
  Description of Artificial Sequence: Synthetic oligonucleotide
  Sense strand starting at position 1831 of SEQ ID NO: 587194
agcugugcaucucccaaua

SEQ ID NO: 773751 - RNA, 19 nt, Artificial Sequence
  Description of Artificial Sequence: Synthetic oligonucleotide
  Antisense strand to SEQ ID NO: 773750
uauugggagaugcacagcu

SEQ ID NO: 773752 - RNA, 19 nt, Artificial Sequence
  Description of Artificial Sequence: Synthetic oligonucleotide
  Sense strand starting at position 1878 of SEQ ID NO: 587194
ggccucuaggagcagaaua

SEQ ID NO: 773753 - RNA, 19 nt, Artificial Sequence
  Description of Artificial Sequence: Synthetic oligonucleotide
  Antisense strand to SEQ ID NO: 773752
uauucugcuccuagaggcc

SEQ ID NO: 773754 - RNA, 19 nt, Artificial Sequence
  Description of Artificial Sequence: Synthetic oligonucleotide
  Sense strand starting at position 2016 of SEQ ID NO: 587194
ccgcgucccugauuggaua

SEQ ID NO: 773755 - RNA, 19 nt, Artificial Sequence
  Description of Artificial Sequence: Synthetic oligonucleotide
  Antisense strand to SEQ ID NO: 773754
uauccaaucagggacgcgg

SEQ ID NO: 773756 - RNA, 19 nt, Artificial Sequence
  Description of Artificial Sequence: Synthetic oligonucleotide
  Sense strand starting at position 2017 of SEQ ID NO: 587194
cgcgucccugauuggauaa

SEQ ID NO: 773757 - RNA, 19 nt, Artificial Sequence
  Description of Artificial Sequence: Synthetic oligonucleotide
  Antisense strand to SEQ ID NO: 773756
uuauccaaucagggacgcg

SEQ ID NO: 773758 - RNA, 19 nt, Artificial Sequence
  Description of Artificial Sequence: Synthetic oligonucleotide
  Sense strand starting at position 2092 of SEQ ID NO: 587194
ggcugaacguagaaagagu

SEQ ID NO: 773759 - RNA, 19 nt, Artificial Sequence
  Description of Artificial Sequence: Synthetic oligonucleotide
  Antisense strand to SEQ ID NO: 773758
acucuuucuacguucagcc

SEQ ID NO: 773760 - RNA, 19 nt, Artificial Sequence
  Description of Artificial Sequence: Synthetic oligonucleotide
  Sense strand starting at position 2183 of SEQ ID NO: 587194
ugcauauaacccugcguau

SEQ ID NO: 773761 - RNA, 19 nt, Artificial Sequence
  Description of Artificial Sequence: Synthetic oligonucleotide
  Antisense strand to SEQ ID NO: 773760
auacgcaggguuauaugca

SEQ ID NO: 773762 - RNA, 19 nt, Artificial Sequence
  Description of Artificial Sequence: Synthetic oligonucleotide
  Sense strand starting at position 2202 of SEQ ID NO: 587194
aaggucguaugccuuuaua

SEQ ID NO: 773763 - RNA, 19 nt, Artificial Sequence
  Description of Artificial Sequence: Synthetic oligonucleotide
  Antisense strand to SEQ ID NO: 773762
uauaaaggcauacgaccuu

SEQ ID NO: 773764 - RNA, 19 nt, Artificial Sequence
  Description of Artificial Sequence: Synthetic oligonucleotide
  Sense strand starting at position 2205 of SEQ ID NO: 587194
gucguaugccuuuauaaau

SEQ ID NO: 773765 - RNA, 19 nt, Artificial Sequence
  Description of Artificial Sequence: Synthetic oligonucleotide
  Antisense strand to SEQ ID NO: 773764
auuuauaaaggcauacgac

SEQ ID NO: 773766 - RNA, 19 nt, Artificial Sequence
  Description of Artificial Sequence: Synthetic oligonucleotide
  Sense strand starting at position 2345 of SEQ ID NO: 587194
aaggcaguccucugaaauu

SEQ ID NO: 773767 - RNA, 19 nt, Artificial Sequence
  Description of Artificial Sequence: Synthetic oligonucleotide
  Antisense strand to SEQ ID NO: 773766
aauuucagaggacugccuu

SEQ ID NO: 773768 - RNA, 19 nt, Artificial Sequence
  Description of Artificial Sequence: Synthetic oligonucleotide
  Sense strand starting at position 2364 of SEQ ID NO: 587194
gaaugugagccacgugaau

SEQ ID NO: 773769 - RNA, 19 nt, Artificial Sequence
  Description of Artificial Sequence: Synthetic oligonucleotide
  Antisense strand to SEQ ID NO: 773768
auucacguggcucacauuc

SEQ ID NO: 773770 - RNA, 19 nt, Artificial Sequence
  Description of Artificial Sequence: Synthetic oligonucleotide
  Sense strand starting at position 2366 of SEQ ID NO: 587194
augugagccacgugaauuc

SEQ ID NO: 773771 - RNA, 19 nt, Artificial Sequence
  Description of Artificial Sequence: Synthetic oligonucleotide
  Antisense strand to SEQ ID NO: 773770
gaauucacguggcucacau

SEQ ID NO: 773772 - RNA, 19 nt, Artificial Sequence
  Description of Artificial Sequence: Synthetic oligonucleotide
  Sense strand starting at position 2373 of SEQ ID NO: 587194
ccacgugaauucuaaauuu

SEQ ID NO: 773773 - RNA, 19 nt, Artificial Sequence
  Description of Artificial Sequence: Synthetic oligonucleotide
  Antisense strand to SEQ ID NO: 773772
aaauuuagaauucacgugg

SEQ ID NO: 773774 - RNA, 19 nt, Artificial Sequence
  Description of Artificial Sequence: Synthetic oligonucleotide
  Sense strand starting at position 2480 of SEQ ID NO: 587194
uuuaauaugugaccaguau

SEQ ID NO: 773775 - RNA, 19 nt, Artificial Sequence
  Description of Artificial Sequence: Synthetic oligonucleotide
  Antisense strand to SEQ ID NO: 773774
auacuggucacauauuaaa

SEQ ID NO: 773776 - RNA, 19 nt, Artificial Sequence
  Description of Artificial Sequence: Synthetic oligonucleotide
  Sense strand starting at position 2481 of SEQ ID NO: 587194
uuaauaugugaccaguaug

SEQ ID NO: 773777 - RNA, 19 nt, Artificial Sequence
  Description of Artificial Sequence: Synthetic oligonucleotide
  Antisense strand to SEQ ID NO: 773776
cauacuggucacauauuaa

SEQ ID NO: 773778 - RNA, 19 nt, Artificial Sequence
  Description of Artificial Sequence: Synthetic oligonucleotide
  Sense strand starting at position 2484 of SEQ ID NO: 587194
auaugugaccaguauguaa

SEQ ID NO: 773779 - RNA, 19 nt, Artificial Sequence
  Description of Artificial Sequence: Synthetic oligonucleotide
  Antisense strand to SEQ ID NO: 773778
uuacauacuggucacauau

SEQ ID NO: 773780 - RNA, 19 nt, Artificial Sequence
  Description of Artificial Sequence: Synthetic oligonucleotide
  Sense strand starting at position 2486 of SEQ ID NO: 587194
augugaccaguauguaauu

SEQ ID NO: 773781 - RNA, 19 nt, Artificial Sequence
  Description of Artificial Sequence: Synthetic oligonucleotide
  Antisense strand to SEQ ID NO: 773780
aauuacauacuggucacau

SEQ ID NO: 773782 - RNA, 19 nt, Artificial Sequence
  Description of Artificial Sequence: Synthetic oligonucleotide
  Sense strand starting at position 2487 of SEQ ID NO: 587194
ugugaccaguauguaauua

SEQ ID NO: 773783 - RNA, 19 nt, Artificial Sequence
  Description of Artificial Sequence: Synthetic oligonucleotide
  Antisense strand to SEQ ID NO: 773782
uaauuacauacuggucaca

SEQ ID NO: 773784 - RNA, 19 nt, Artificial Sequence
  Description of Artificial Sequence: Synthetic oligonucleotide
  Sense strand starting at position 2488 of SEQ ID NO: 587194
gugaccaguauguaauuau

SEQ ID NO: 773785 - RNA, 19 nt, Artificial Sequence
  Description of Artificial Sequence: Synthetic oligonucleotide
  Antisense strand to SEQ ID NO: 773784
auaauuacauacuggucac

SEQ ID NO: 773786 - RNA, 19 nt, Artificial Sequence
  Description of Artificial Sequence: Synthetic oligonucleotide
  Sense strand starting at position 3247 of SEQ ID NO: 587194
gaagaagaaugcucuaugu

SEQ ID NO: 773787 - RNA, 19 nt, Artificial Sequence
  Description of Artificial Sequence: Synthetic oligonucleotide
  Antisense strand to SEQ ID NO: 773786
acauagagcauucuucuuc

SEQ ID NO: 773788 - RNA, 19 nt, Artificial Sequence
  Description of Artificial Sequence: Synthetic oligonucleotide
  Sense strand starting at position 3249 of SEQ ID NO: 587194
agaagaaugcucuaugucu

SEQ ID NO: 773789 - RNA, 19 nt, Artificial Sequence
  Description of Artificial Sequence: Synthetic oligonucleotide
  Antisense strand to SEQ ID NO: 773788
agacauagagcauucuucu

SEQ ID NO: 773790 - RNA, 19 nt, Artificial Sequence
  Description of Artificial Sequence: Synthetic oligonucleotide
  Sense strand starting at position 3255 of SEQ ID NO: 587194
augcucuaugucuacagau

SEQ ID NO: 773791 - RNA, 19 nt, Artificial Sequence
  Description of Artificial Sequence: Synthetic oligonucleotide
  Antisense strand to SEQ ID NO: 773790
aucuguagacauagagcau

SEQ ID NO: 773792 - RNA, 19 nt, Artificial Sequence
  Description of Artificial Sequence: Synthetic oligonucleotide
  Sense strand starting at position 3677 of SEQ ID NO: 587194
ugguuucuguuucuagcua

SEQ ID NO: 773793 - RNA, 19 nt, Artificial Sequence
  Description of Artificial Sequence: Synthetic oligonucleotide
  Antisense strand to SEQ ID NO: 773792
uagcuagaaacagaaacca

SEQ ID NO: 773794 - RNA, 19 nt, Artificial Sequence
  Description of Artificial Sequence: Synthetic oligonucleotide
  Sense strand starting at position 3705 of SEQ ID NO: 587194
aguggauucggacaguauc

SEQ ID NO: 773795 - RNA, 19 nt, Artificial Sequence
  Description of Artificial Sequence: Synthetic oligonucleotide
  Antisense strand to SEQ ID NO: 773794
gauacuguccgaauccacu

SEQ ID NO: 773796 - RNA, 19 nt, Artificial Sequence
  Description of Artificial Sequence: Synthetic oligonucleotide
  Sense strand starting at position 112 of SEQ ID NO: 587195
aguugugugauguggauuu

SEQ ID NO: 773797 - RNA, 19 nt, Artificial Sequence
  Description of Artificial Sequence: Synthetic oligonucleotide
  Antisense strand to SEQ ID NO: 773796
aaauccacaucacacaacu

SEQ ID NO: 773798 - RNA, 19 nt, Artificial Sequence
  Description of Artificial Sequence: Synthetic oligonucleotide
  Sense strand starting at position 299 of SEQ ID NO: 587195
augaguuuauuggcuacau

SEQ ID NO: 773799 - RNA, 19 nt, Artificial Sequence
  Description of Artificial Sequence: Synthetic oligonucleotide
  Antisense strand to SEQ ID NO: 773798
auguagccaauaaacucau

SEQ ID NO: 773800 - RNA, 19 nt, Artificial Sequence
  Description of Artificial Sequence: Synthetic oligonucleotide
  Sense strand starting at position 300 of SEQ ID NO: 587195
ugaguuuauuggcuacaua

SEQ ID NO: 773801 - RNA, 19 nt, Artificial Sequence
  Description of Artificial Sequence: Synthetic oligonucleotide
  Antisense strand to SEQ ID NO: 773800
uauguagccaauaaacuca

SEQ ID NO: 773802 - RNA, 19 nt, Artificial Sequence
  Description of Artificial Sequence: Synthetic oligonucleotide
  Sense strand starting at position 301 of SEQ ID NO: 587195
gaguuuauuggcuacauaa

SEQ ID NO: 773803 - RNA, 19 nt, Artificial Sequence
  Description of Artificial Sequence: Synthetic oligonucleotide
  Antisense strand to SEQ ID NO: 773802
uuauguagccaauaaacuc

SEQ ID NO: 773804 - RNA, 19 nt, Artificial Sequence
  Description of Artificial Sequence: Synthetic oligonucleotide
  Sense strand starting at position 408 of SEQ ID NO: 587195
ggcuaaacuagcgauccau

SEQ ID NO: 773805 - RNA, 19 nt, Artificial Sequence
  Description of Artificial Sequence: Synthetic oligonucleotide
  Antisense strand to SEQ ID NO: 773804
auggaucgcuaguuuagcc

SEQ ID NO: 773806 - RNA, 19 nt, Artificial Sequence
  Description of Artificial Sequence: Synthetic oligonucleotide
  Sense strand starting at position 844 of SEQ ID NO: 587195
gggugcucauaccuauaau

SEQ ID NO: 773807 - RNA, 19 nt, Artificial Sequence
  Description of Artificial Sequence: Synthetic oligonucleotide
  Antisense strand to SEQ ID NO: 773806
auuauagguaugagcaccc

SEQ ID NO: 773808 - RNA, 19 nt, Artificial Sequence
  Description of Artificial Sequence: Synthetic oligonucleotide
  Sense strand starting at position 972 of SEQ ID NO: 587195
gagguaguauugcuaacac

SEQ ID NO: 773809 - RNA, 19 nt, Artificial Sequence
  Description of Artificial Sequence: Synthetic oligonucleotide
  Antisense strand to SEQ ID NO: 773808
guguuagcaauacuaccuc

SEQ ID NO: 773810 - RNA, 19 nt, Artificial Sequence
  Description of Artificial Sequence: Synthetic oligonucleotide
  Sense strand starting at position 1228 of SEQ ID NO: 587195
ggcuaacucagugaaagcu

SEQ ID NO: 773811 - RNA, 19 nt, Artificial Sequence
  Description of Artificial Sequence: Synthetic oligonucleotide
  Antisense strand to SEQ ID NO: 773810
agcuuucacugaguuagcc

SEQ ID NO: 773812 - RNA, 19 nt, Artificial Sequence
  Description of Artificial Sequence: Synthetic oligonucleotide
  Sense strand starting at position 1514 of SEQ ID NO: 587195
agauguuacccucaggcau

SEQ ID NO: 773813 - RNA, 19 nt, Artificial Sequence
  Description of Artificial Sequence: Synthetic oligonucleotide
  Antisense strand to SEQ ID NO: 773812
augccugaggguaacaucu

SEQ ID NO: 773814 - RNA, 19 nt, Artificial Sequence
  Description of Artificial Sequence: Synthetic oligonucleotide
  Sense strand starting at position 1597 of SEQ ID NO: 587195
agagaaugcaagcauuguu

SEQ ID NO: 773815 - RNA, 19 nt, Artificial Sequence
  Description of Artificial Sequence: Synthetic oligonucleotide
  Antisense strand to SEQ ID NO: 773814
aacaaugcuugcauucucu

SEQ ID NO: 773816 - RNA, 19 nt, Artificial Sequence
  Description of Artificial Sequence: Synthetic oligonucleotide
  Sense strand starting at position 1699 of SEQ ID NO: 587195
ccaugaaauugagucuggu

SEQ ID NO: 773817 - RNA, 19 nt, Artificial Sequence
  Description of Artificial Sequence: Synthetic oligonucleotide
  Antisense strand to SEQ ID NO: 773816
accagacucaauuucaugg

SEQ ID NO: 773818 - RNA, 19 nt, Artificial Sequence
  Description of Artificial Sequence: Synthetic oligonucleotide
  Sense strand starting at position 1702 of SEQ ID NO: 587195
ugaaauugagucuggugaa

SEQ ID NO: 773819 - RNA, 19 nt, Artificial Sequence
  Description of Artificial Sequence: Synthetic oligonucleotide
  Antisense strand to SEQ ID NO: 773818
uucaccagacucaauuuca

SEQ ID NO: 773820 - RNA, 19 nt, Artificial Sequence
  Description of Artificial Sequence: Synthetic oligonucleotide
  Sense strand starting at position 1769 of SEQ ID NO: 587195
aaacaugcuguggagagua

SEQ ID NO: 773821 - RNA, 19 nt, Artificial Sequence
  Description of Artificial Sequence: Synthetic oligonucleotide
  Antisense strand to SEQ ID NO: 773820
uacucuccacagcauguuu

SEQ ID NO: 773822 - RNA, 19 nt, Artificial Sequence
  Description of Artificial Sequence: Synthetic oligonucleotide
  Sense strand starting at position 1771 of SEQ ID NO: 587195
acaugcuguggagaguaua

SEQ ID NO: 773823 - RNA, 19 nt, Artificial Sequence
  Description of Artificial Sequence: Synthetic oligonucleotide
  Antisense strand to SEQ ID NO: 773822
uauacucuccacagcaugu

SEQ ID NO: 773824 - RNA, 19 nt, Artificial Sequence
  Description of Artificial Sequence: Synthetic oligonucleotide
  Sense strand starting at position 1781 of SEQ ID NO: 587195
gagaguauaucaucuguca

SEQ ID NO: 773825 - RNA, 19 nt, Artificial Sequence
  Description of Artificial Sequence: Synthetic oligonucleotide
  Antisense strand to SEQ ID NO: 773824
ugacagaugauauacucuc

SEQ ID NO: 773826 - RNA, 19 nt, Artificial Sequence
  Description of Artificial Sequence: Synthetic oligonucleotide
  Sense strand starting at position 1784 of SEQ ID NO: 587195
aguauaucaucugucacau

SEQ ID NO: 773827 - RNA, 19 nt, Artificial Sequence
  Description of Artificial Sequence: Synthetic oligonucleotide
  Antisense strand to SEQ ID NO: 773826
augugacagaugauauacu

SEQ ID NO: 773828 - RNA, 19 nt, Artificial Sequence
  Description of Artificial Sequence: Synthetic oligonucleotide
  Sense strand starting at position 1871 of SEQ ID NO: 587195
uucugagaacacuggcauu

SEQ ID NO: 773829 - RNA, 19 nt, Artificial Sequence
  Description of Artificial Sequence: Synthetic oligonucleotide
  Antisense strand to SEQ ID NO: 773828
aaugccaguguucucagaa

SEQ ID NO: 773830 - RNA, 19 nt, Artificial Sequence
  Description of Artificial Sequence: Synthetic oligonucleotide
  Sense strand starting at position 1986 of SEQ ID NO: 587195
gcauucugagaaggcauaa

SEQ ID NO: 773831 - RNA, 19 nt, Artificial Sequence
  Description of Artificial Sequence: Synthetic oligonucleotide
  Antisense strand to SEQ ID NO: 773830
uuaugccuucucagaaugc

SEQ ID NO: 773832 - RNA, 19 nt, Artificial Sequence
  Description of Artificial Sequence: Synthetic oligonucleotide
  Sense strand starting at position 2016 of SEQ ID NO: 587195
agaagcaucuuguuaauau

SEQ ID NO: 773833 - RNA, 19 nt, Artificial Sequence
  Description of Artificial Sequence: Synthetic oligonucleotide
  Antisense strand to SEQ ID NO: 773832
auauuaacaagaugcuucu

SEQ ID NO: 773834 - RNA, 19 nt, Artificial Sequence
  Description of Artificial Sequence: Synthetic oligonucleotide
  Sense strand starting at position 2033 of SEQ ID NO: 587195
auaugacacgaagguuaaa

SEQ ID NO: 773835 - RNA, 19 nt, Artificial Sequence
  Description of Artificial Sequence: Synthetic oligonucleotide
  Antisense strand to SEQ ID NO: 773834
uuuaaccuucgugucauau

SEQ ID NO: 773836 - RNA, 19 nt, Artificial Sequence
  Description of Artificial Sequence: Synthetic oligonucleotide
  Sense strand starting at position 2078 of SEQ ID NO: 587195
guagguauggcagacagua

SEQ ID NO: 773837 - RNA, 19 nt, Artificial Sequence
  Description of Artificial Sequence: Synthetic oligonucleotide
  Antisense strand to SEQ ID NO: 773836
uacugucugccauaccuac

SEQ ID NO: 773838 - RNA, 19 nt, Artificial Sequence
  Description of Artificial Sequence: Synthetic oligonucleotide
  Sense strand starting at position 2154 of SEQ ID NO: 587195
uguucaggaguucgggaau

SEQ ID NO: 773839 - RNA, 19 nt, Artificial Sequence
  Description of Artificial Sequence: Synthetic oligonucleotide
  Antisense strand to SEQ ID NO: 773838
auucccgaacuccugaaca

SEQ ID NO: 773840 - RNA, 19 nt, Artificial Sequence
  Description of Artificial Sequence: Synthetic oligonucleotide
  Sense strand starting at position 2157 of SEQ ID NO: 587195
ucaggaguucgggaauuca

SEQ ID NO: 773841 - RNA, 19 nt, Artificial Sequence
  Description of Artificial Sequence: Synthetic oligonucleotide
  Antisense strand to SEQ ID NO: 773840
ugaauucccgaacuccuga

SEQ ID NO: 773842 - RNA, 19 nt, Artificial Sequence
  Description of Artificial Sequence: Synthetic oligonucleotide
  Sense strand starting at position 2252 of SEQ ID NO: 587195
cuaaauacugauggcaauu

SEQ ID NO: 773843 - RNA, 19 nt, Artificial Sequence
  Description of Artificial Sequence: Synthetic oligonucleotide
  Antisense strand to SEQ ID NO: 773842
aauugccaucaguauuuag

SEQ ID NO: 773844 - RNA, 19 nt, Artificial Sequence
  Description of Artificial Sequence: Synthetic oligonucleotide
  Sense strand starting at position 2354 of SEQ ID NO: 587195
auuguaaagucuccaagug

SEQ ID NO: 773845 - RNA, 19 nt, Artificial Sequence
  Description of Artificial Sequence: Synthetic oligonucleotide
  Antisense strand to SEQ ID NO: 773844
cacuuggagacuuuacaau

SEQ ID NO: 773846 - RNA, 19 nt, Artificial Sequence
  Description of Artificial Sequence: Synthetic oligonucleotide
  Sense strand starting at position 2368 of SEQ ID NO: 587195
aagugacucuaaguguaga

SEQ ID NO: 773847 - RNA, 19 nt, Artificial Sequence
  Description of Artificial Sequence: Synthetic oligonucleotide
  Antisense strand to SEQ ID NO: 773846
ucuacacuuagagucacuu

SEQ ID NO: 773848 - RNA, 19 nt, Artificial Sequence
  Description of Artificial Sequence: Synthetic oligonucleotide
  Sense strand starting at position 2369 of SEQ ID NO: 587195
agugacucuaaguguagau

SEQ ID NO: 773849 - RNA, 19 nt, Artificial Sequence
  Description of Artificial Sequence: Synthetic oligonucleotide
  Antisense strand to SEQ ID NO: 773848
aucuacacuuagagucacu

SEQ ID NO: 773850 - RNA, 19 nt, Artificial Sequence
  Description of Artificial Sequence: Synthetic oligonucleotide
  Sense strand starting at position 2528 of SEQ ID NO: 587195
augcaaaggagaugucacu

SEQ ID NO: 773851 - RNA, 19 nt, Artificial Sequence
  Description of Artificial Sequence: Synthetic oligonucleotide
  Antisense strand to SEQ ID NO: 773850
agugacaucuccuuugcau

SEQ ID NO: 773852 - RNA, 19 nt, Artificial Sequence
  Description of Artificial Sequence: Synthetic oligonucleotide
  Sense strand starting at position 2537 of SEQ ID NO: 587195
agaugucacuauucugauu

SEQ ID NO: 773853 - RNA, 19 nt, Artificial Sequence
  Description of Artificial Sequence: Synthetic oligonucleotide
  Antisense strand to SEQ ID NO: 773852
aaucagaauagugacaucu

SEQ ID NO: 773854 - RNA, 19 nt, Artificial Sequence
  Description of Artificial Sequence: Synthetic oligonucleotide
  Sense strand starting at position 2593 of SEQ ID NO: 587195
ucagucuuccacugggauu

SEQ ID NO: 773855 - RNA, 19 nt, Artificial Sequence
  Description of Artificial Sequence: Synthetic oligonucleotide
  Antisense strand to SEQ ID NO: 773854
aaucccaguggaagacuga

SEQ ID NO: 773856 - RNA, 19 nt, Artificial Sequence
  Description of Artificial Sequence: Synthetic oligonucleotide
  Sense strand starting at position 2722 of SEQ ID NO: 587195
gaaaguugauguccaguac

SEQ ID NO: 773857 - RNA, 19 nt, Artificial Sequence
  Description of Artificial Sequence: Synthetic oligonucleotide
  Antisense strand to SEQ ID NO: 773856
guacuggacaucaacuuuc

SEQ ID NO: 773858 - RNA, 19 nt, Artificial Sequence
  Description of Artificial Sequence: Synthetic oligonucleotide
  Sense strand starting at position 2726 of SEQ ID NO: 587195
guugauguccaguaccuua

SEQ ID NO: 773859 - RNA, 19 nt, Artificial Sequence
  Description of Artificial Sequence: Synthetic oligonucleotide
  Antisense strand to SEQ ID NO: 773858
uaagguacuggacaucaac

SEQ ID NO: 773860 - RNA, 19 nt, Artificial Sequence
  Description of Artificial Sequence: Synthetic oligonucleotide
  Sense strand starting at position 2737 of SEQ ID NO: 587195
guaccuuaugggcaacagu

SEQ ID NO: 773861 - RNA, 19 nt, Artificial Sequence
  Description of Artificial Sequence: Synthetic oligonucleotide
  Antisense strand to SEQ ID NO: 773860
acuguugcccauaagguac

SEQ ID NO: 773862 - RNA, 19 nt, Artificial Sequence
  Description of Artificial Sequence: Synthetic oligonucleotide
  Sense strand starting at position 2895 of SEQ ID NO: 587195
ucuugaagguuguuauuac

SEQ ID NO: 773863 - RNA, 19 nt, Artificial Sequence
  Description of Artificial Sequence: Synthetic oligonucleotide
  Antisense strand to SEQ ID NO: 773862
guaauaacaaccuucaaga

SEQ ID NO: 773864 - RNA, 19 nt, Artificial Sequence
  Description of Artificial Sequence: Synthetic oligonucleotide
  Sense strand starting at position 3048 of SEQ ID NO: 587195
gcagaagaaauccagcagu

SEQ ID NO: 773865 - RNA, 19 nt, Artificial Sequence
  Description of Artificial Sequence: Synthetic oligonucleotide
  Antisense strand to SEQ ID NO: 773864
acugcuggauuucuucugc

SEQ ID NO: 773866 - RNA, 19 nt, Artificial Sequence
  Description of Artificial Sequence: Synthetic oligonucleotide
  Sense strand starting at position 3143 of SEQ ID NO: 587195
uguggcauucuugaaucaa

SEQ ID NO: 773867 - RNA, 19 nt, Artificial Sequence
  Description of Artificial Sequence: Synthetic oligonucleotide
  Antisense strand to SEQ ID NO: 773866
uugauucaagaaugccaca

SEQ ID NO: 773868 - RNA, 19 nt, Artificial Sequence
  Description of Artificial Sequence: Synthetic oligonucleotide
  Sense strand starting at position 3462 of SEQ ID NO: 587195
agccauucugaggagcaau

SEQ ID NO: 773869 - RNA, 19 nt, Artificial Sequence
  Description of Artificial Sequence: Synthetic oligonucleotide
  Antisense strand to SEQ ID NO: 773868
auugcuccucagaauggcu

SEQ ID NO: 773870 - RNA, 19 nt, Artificial Sequence
  Description of Artificial Sequence: Synthetic oligonucleotide
  Sense strand starting at position 3515 of SEQ ID NO: 587195
gguccugugagauaaggca

SEQ ID NO: 773871 - RNA, 19 nt, Artificial Sequence
  Description of Artificial Sequence: Synthetic oligonucleotide
  Antisense strand to SEQ ID NO: 773870
ugccuuaucucacaggacc

SEQ ID NO: 773872 - RNA, 19 nt, Artificial Sequence
  Description of Artificial Sequence: Synthetic oligonucleotide
  Sense strand starting at position 3641 of SEQ ID NO: 587195
uaagcauaagcuuggaaga

SEQ ID NO: 773873 - RNA, 19 nt, Artificial Sequence
  Description of Artificial Sequence: Synthetic oligonucleotide
  Antisense strand to SEQ ID NO: 773872
ucuuccaagcuuaugcuua

SEQ ID NO: 773874 - RNA, 19 nt, Artificial Sequence
  Description of Artificial Sequence: Synthetic oligonucleotide
  Sense strand starting at position 3642 of SEQ ID NO: 587195
aagcauaagcuuggaagaa

SEQ ID NO: 773875 - RNA, 19 nt, Artificial Sequence
  Description of Artificial Sequence: Synthetic oligonucleotide
  Antisense strand to SEQ ID NO: 773874
uucuuccaagcuuaugcuu

SEQ ID NO: 773876 - RNA, 19 nt, Artificial Sequence
  Description of Artificial Sequence: Synthetic oligonucleotide
  Sense strand starting at position 53 of SEQ ID NO: 587196
cagaguuagucugugagaa

SEQ ID NO: 773877 - RNA, 19 nt, Artificial Sequence
  Description of Artificial Sequence: Synthetic oligonucleotide
  Antisense strand to SEQ ID NO: 773876
uucucacagacuaacucug

SEQ ID NO: 773878 - RNA, 19 nt, Artificial Sequence
  Description of Artificial Sequence: Synthetic oligonucleotide
  Sense strand starting at position 54 of SEQ ID NO: 587196
agaguuagucugugagaac

SEQ ID NO: 773879 - RNA, 19 nt, Artificial Sequence
  Description of Artificial Sequence: Synthetic oligonucleotide
  Antisense strand to SEQ ID NO: 773878
guucucacagacuaacucu

SEQ ID NO: 773880 - RNA, 19 nt, Artificial Sequence
  Description of Artificial Sequence: Synthetic oligonucleotide
  Sense strand starting at position 55 of SEQ ID NO: 587196
gaguuagucugugagaaca

SEQ ID NO: 773881 - RNA, 19 nt, Artificial Sequence
  Description of Artificial Sequence: Synthetic oligonucleotide
  Antisense strand to SEQ ID NO: 773880
uguucucacagacuaacuc

SEQ ID NO: 773882 - RNA, 19 nt, Artificial Sequence
  Description of Artificial Sequence: Synthetic oligonucleotide
  Sense strand starting at position 65 of SEQ ID NO: 587196
gugagaacagaaugguuga

SEQ ID NO: 773883 - RNA, 19 nt, Artificial Sequence
  Description of Artificial Sequence: Synthetic oligonucleotide
  Antisense strand to SEQ ID NO: 773882
ucaaccauucuguucucac

SEQ ID NO: 773884 - RNA, 19 nt, Artificial Sequence
  Description of Artificial Sequence: Synthetic oligonucleotide
  Sense strand starting at position 439 of SEQ ID NO: 587196
gugauagccuauuccugua

SEQ ID NO: 773885 - RNA, 19 nt, Artificial Sequence
  Description of Artificial Sequence: Synthetic oligonucleotide
  Antisense strand to SEQ ID NO: 773884
uacaggaauaggcuaucac

SEQ ID NO: 773886 - RNA, 19 nt, Artificial Sequence
  Description of Artificial Sequence: Synthetic oligonucleotide
  Sense strand starting at position 690 of SEQ ID NO: 587196
gcaacauugcgaggcucua

SEQ ID NO: 773887 - RNA, 19 nt, Artificial Sequence
  Description of Artificial Sequence: Synthetic oligonucleotide
  Antisense strand to SEQ ID NO: 773886
uagagccucgcaauguugc

SEQ ID NO: 773888 - RNA, 19 nt, Artificial Sequence
  Description of Artificial Sequence: Synthetic oligonucleotide
  Sense strand starting at position 788 of SEQ ID NO: 587196
caauuagacugagguggau

SEQ ID NO: 773889 - RNA, 19 nt, Artificial Sequence
  Description of Artificial Sequence: Synthetic oligonucleotide
  Antisense strand to SEQ ID NO: 773888
auccaccucagucuaauug

SEQ ID NO: 773890 - RNA, 19 nt, Artificial Sequence
  Description of Artificial Sequence: Synthetic oligonucleotide
  Sense strand starting at position 804 of SEQ ID NO: 587196
gauugauucuucucggcuc

SEQ ID NO: 773891 - RNA, 19 nt, Artificial Sequence
  Description of Artificial Sequence: Synthetic oligonucleotide
  Antisense strand to SEQ ID NO: 773890
gagccgagaagaaucaauc

SEQ ID NO: 773892 - RNA, 19 nt, Artificial Sequence
  Description of Artificial Sequence: Synthetic oligonucleotide
  Sense strand starting at position 807 of SEQ ID NO: 587196
ugauucuucucggcucuca

SEQ ID NO: 773893 - RNA, 19 nt, Artificial Sequence
  Description of Artificial Sequence: Synthetic oligonucleotide
  Antisense strand to SEQ ID NO: 773892
ugagagccgagaagaauca

SEQ ID NO: 773894 - RNA, 19 nt, Artificial Sequence
  Description of Artificial Sequence: Synthetic oligonucleotide
  Sense strand starting at position 1387 of SEQ ID NO: 587196
gcucuaagauucuugaauc

SEQ ID NO: 773895 - RNA, 19 nt, Artificial Sequence
  Description of Artificial Sequence: Synthetic oligonucleotide
  Antisense strand to SEQ ID NO: 773894
gauucaagaaucuuagagc

SEQ ID NO: 773896 - RNA, 19 nt, Artificial Sequence
  Description of Artificial Sequence: Synthetic oligonucleotide
  Sense strand starting at position 1508 of SEQ ID NO: 587196
ucacgaauccugcacccua

SEQ ID NO: 773897 - RNA, 19 nt, Artificial Sequence
  Description of Artificial Sequence: Synthetic oligonucleotide
  Antisense strand to SEQ ID NO: 773896
uagggugcaggauucguga

SEQ ID NO: 773898 - RNA, 19 nt, Artificial Sequence
  Description of Artificial Sequence: Synthetic oligonucleotide
  Sense strand starting at position 1521 of SEQ ID NO: 587196
acccuaagucuggauucuu

SEQ ID NO: 773899 - RNA, 19 nt, Artificial Sequence
  Description of Artificial Sequence: Synthetic oligonucleotide
  Antisense strand to SEQ ID NO: 773898
aagaauccagacuuagggu

SEQ ID NO: 773900 - RNA, 19 nt, Artificial Sequence
  Description of Artificial Sequence: Synthetic oligonucleotide
  Sense strand starting at position 1529 of SEQ ID NO: 587196
ucuggauucuucccugaug

SEQ ID NO: 773901 - RNA, 19 nt, Artificial Sequence
  Description of Artificial Sequence: Synthetic oligonucleotide
  Antisense strand to SEQ ID NO: 773900
caucagggaagaauccaga

SEQ ID NO: 773902 - RNA, 19 nt, Artificial Sequence
  Description of Artificial Sequence: Synthetic oligonucleotide
  Sense strand starting at position 1530 of SEQ ID NO: 587196
cuggauucuucccugauga

SEQ ID NO: 773903 - RNA, 19 nt, Artificial Sequence
  Description of Artificial Sequence: Synthetic oligonucleotide
  Antisense strand to SEQ ID NO: 773902
ucaucagggaagaauccag

SEQ ID NO: 773904 - RNA, 19 nt, Artificial Sequence
  Description of Artificial Sequence: Synthetic oligonucleotide
  Sense strand starting at position 1531 of SEQ ID NO: 587196
uggauucuucccugaugac

SEQ ID NO: 773905 - RNA, 19 nt, Artificial Sequence
  Description of Artificial Sequence: Synthetic oligonucleotide
  Antisense strand to SEQ ID NO: 773904
gucaucagggaagaaucca

SEQ ID NO: 773906 - RNA, 19 nt, Artificial Sequence
  Description of Artificial Sequence: Synthetic oligonucleotide
  Sense strand starting at position 1561 of SEQ ID NO: 587196
ugcacagucugggugagau

SEQ ID NO: 773907 - RNA, 19 nt, Artificial Sequence
  Description of Artificial Sequence: Synthetic oligonucleotide
  Antisense strand to SEQ ID NO: 773906
aucucacccagacugugca

SEQ ID NO: 773908 - RNA, 19 nt, Artificial Sequence
  Description of Artificial Sequence: Synthetic oligonucleotide
  Sense strand starting at position 2037 of SEQ ID NO: 587196
cgcugcauuccugauugga

SEQ ID NO: 773909 - RNA, 19 nt, Artificial Sequence
  Description of Artificial Sequence: Synthetic oligonucleotide
  Antisense strand to SEQ ID NO: 773908
uccaaucaggaaugcagcg

SEQ ID NO: 773910 - RNA, 19 nt, Artificial Sequence
  Description of Artificial Sequence: Synthetic oligonucleotide
  Sense strand starting at position 2039 of SEQ ID NO: 587196
cugcauuccugauuggaca

SEQ ID NO: 773911 - RNA, 19 nt, Artificial Sequence
  Description of Artificial Sequence: Synthetic oligonucleotide
  Antisense strand to SEQ ID NO: 773910
uguccaaucaggaaugcag

SEQ ID NO: 773912 - RNA, 19 nt, Artificial Sequence
  Description of Artificial Sequence: Synthetic oligonucleotide
  Sense strand starting at position 2041 of SEQ ID NO: 587196
gcauuccugauuggacagu

SEQ ID NO: 773913 - RNA, 19 nt, Artificial Sequence
  Description of Artificial Sequence: Synthetic oligonucleotide
  Antisense strand to SEQ ID NO: 773912
acuguccaaucaggaaugc

SEQ ID NO: 773914 - RNA, 19 nt, Artificial Sequence
  Description of Artificial Sequence: Synthetic oligonucleotide
  Sense strand starting at position 2134 of SEQ ID NO: 587196
cagacacugggcugaauaa

SEQ ID NO: 773915 - RNA, 19 nt, Artificial Sequence
  Description of Artificial Sequence: Synthetic oligonucleotide
  Antisense strand to SEQ ID NO: 773914
uuauucagcccagugucug

SEQ ID NO: 773916 - RNA, 19 nt, Artificial Sequence
  Description of Artificial Sequence: Synthetic oligonucleotide
  Sense strand starting at position 2222 of SEQ ID NO: 587196
cccagaggauacuugcauu

SEQ ID NO: 773917 - RNA, 19 nt, Artificial Sequence
  Description of Artificial Sequence: Synthetic oligonucleotide
  Antisense strand to SEQ ID NO: 773916
aaugcaaguauccucuggg

SEQ ID NO: 773918 - RNA, 19 nt, Artificial Sequence
  Description of Artificial Sequence: Synthetic oligonucleotide
  Sense strand starting at position 2225 of SEQ ID NO: 587196
agaggauacuugcauuuaa

SEQ ID NO: 773919 - RNA, 19 nt, Artificial Sequence
  Description of Artificial Sequence: Synthetic oligonucleotide
  Antisense strand to SEQ ID NO: 773918
uuaaaugcaaguauccucu

SEQ ID NO: 773920 - RNA, 19 nt, Artificial Sequence
  Description of Artificial Sequence: Synthetic oligonucleotide
  Sense strand starting at position 2822 of SEQ ID NO: 587196
gagggauuauccucaugcu

SEQ ID NO: 773921 - RNA, 19 nt, Artificial Sequence
  Description of Artificial Sequence: Synthetic oligonucleotide
  Antisense strand to SEQ ID NO: 773920
agcaugaggauaaucccuc

SEQ ID NO: 773922 - RNA, 19 nt, Artificial Sequence
  Description of Artificial Sequence: Synthetic oligonucleotide
  Sense strand starting at position 2823 of SEQ ID NO: 587196
agggauuauccucaugcua

SEQ ID NO: 773923 - RNA, 19 nt, Artificial Sequence
  Description of Artificial Sequence: Synthetic oligonucleotide
  Antisense strand to SEQ ID NO: 773922
uagcaugaggauaaucccu

SEQ ID NO: 773924 - RNA, 19 nt, Artificial Sequence
  Description of Artificial Sequence: Synthetic oligonucleotide
  Sense strand starting at position 2863 of SEQ ID NO: 587196
ucucaagauauccgaugga

SEQ ID NO: 773925 - RNA, 19 nt, Artificial Sequence
  Description of Artificial Sequence: Synthetic oligonucleotide
  Antisense strand to SEQ ID NO: 773924
uccaucggauaucuugaga

SEQ ID NO: 773926 - RNA, 19 nt, Artificial Sequence
  Description of Artificial Sequence: Synthetic oligonucleotide
  Sense strand starting at position 2866 of SEQ ID NO: 587196
caagauauccgauggauua

SEQ ID NO: 773927 - RNA, 19 nt, Artificial Sequence
  Description of Artificial Sequence: Synthetic oligonucleotide
  Antisense strand to SEQ ID NO: 773926
uaauccaucggauaucuug

SEQ ID NO: 773928 - RNA, 19 nt, Artificial Sequence
  Description of Artificial Sequence: Synthetic oligonucleotide
  Sense strand starting at position 2971 of SEQ ID NO: 587196
uuccgucauggucaugauu

SEQ ID NO: 773929 - RNA, 19 nt, Artificial Sequence
  Description of Artificial Sequence: Synthetic oligonucleotide
  Antisense strand to SEQ ID NO: 773928
aaucaugaccaugacggaa

SEQ ID NO: 773930 - RNA, 19 nt, Artificial Sequence
  Description of Artificial Sequence: Synthetic oligonucleotide
  Sense strand starting at position 2974 of SEQ ID NO: 587196
cgucauggucaugauugua

SEQ ID NO: 773931 - RNA, 19 nt, Artificial Sequence
  Description of Artificial Sequence: Synthetic oligonucleotide
  Antisense strand to SEQ ID NO: 773930
uacaaucaugaccaugacg

SEQ ID NO: 773932 - RNA, 19 nt, Artificial Sequence
  Description of Artificial Sequence: Synthetic oligonucleotide
  Sense strand starting at position 3018 of SEQ ID NO: 587196
guagaacuaugacuuaauu

SEQ ID NO: 773933 - RNA, 19 nt, Artificial Sequence
  Description of Artificial Sequence: Synthetic oligonucleotide
  Antisense strand to SEQ ID NO: 773932
aauuaagucauaguucuac

SEQ ID NO: 773934 - RNA, 19 nt, Artificial Sequence
  Description of Artificial Sequence: Synthetic oligonucleotide
  Sense strand starting at position 3054 of SEQ ID NO: 587196
cauuacguggucugaggua

SEQ ID NO: 773935 - RNA, 19 nt, Artificial Sequence
  Description of Artificial Sequence: Synthetic oligonucleotide
  Antisense strand to SEQ ID NO: 773934
uaccucagaccacguaaug

SEQ ID NO: 773936 - RNA, 19 nt, Artificial Sequence
  Description of Artificial Sequence: Synthetic oligonucleotide
  Sense strand starting at position 3059 of SEQ ID NO: 587196
cguggucugagguauuugu

SEQ ID NO: 773937 - RNA, 19 nt, Artificial Sequence
  Description of Artificial Sequence: Synthetic oligonucleotide
  Antisense strand to SEQ ID NO: 773936
acaaauaccucagaccacg

SEQ ID NO: 773938 - RNA, 19 nt, Artificial Sequence
  Description of Artificial Sequence: Synthetic oligonucleotide
  Sense strand starting at position 3133 of SEQ ID NO: 587196
gaggcaguccucugcagua

SEQ ID NO: 773939 - RNA, 19 nt, Artificial Sequence
  Description of Artificial Sequence: Synthetic oligonucleotide
  Antisense strand to SEQ ID NO: 773938
uacugcagaggacugccuc

SEQ ID NO: 773940 - RNA, 19 nt, Artificial Sequence
  Description of Artificial Sequence: Synthetic oligonucleotide
  Sense strand starting at position 3135 of SEQ ID NO: 587196
ggcaguccucugcaguaaa

SEQ ID NO: 773941 - RNA, 19 nt, Artificial Sequence
  Description of Artificial Sequence: Synthetic oligonucleotide
  Antisense strand to SEQ ID NO: 773940
uuuacugcagaggacugcc

SEQ ID NO: 773942 - RNA, 19 nt, Artificial Sequence
  Description of Artificial Sequence: Synthetic oligonucleotide
  Sense strand starting at position 3522 of SEQ ID NO: 587196
auggaauaaugguagaauu

SEQ ID NO: 773943 - RNA, 19 nt, Artificial Sequence
  Description of Artificial Sequence: Synthetic oligonucleotide
  Antisense strand to SEQ ID NO: 773942
aauucuaccauuauuccau

SEQ ID NO: 773944 - RNA, 19 nt, Artificial Sequence
  Description of Artificial Sequence: Synthetic oligonucleotide
  Sense strand starting at position 3532 of SEQ ID NO: 587196
gguagaauugauuguaaca

SEQ ID NO: 773945 - RNA, 19 nt, Artificial Sequence
  Description of Artificial Sequence: Synthetic oligonucleotide
  Antisense strand to SEQ ID NO: 773944
uguuacaaucaauucuacc

SEQ ID NO: 773946 - RNA, 19 nt, Artificial Sequence
  Description of Artificial Sequence: Synthetic oligonucleotide
  Sense strand starting at position 3611 of SEQ ID NO: 587196
guuaauaaagcguauacau

SEQ ID NO: 773947 - RNA, 19 nt, Artificial Sequence
  Description of Artificial Sequence: Synthetic oligonucleotide
  Antisense strand to SEQ ID NO: 773946
auguauacgcuuuauuaac

SEQ ID NO: 773948 - RNA, 19 nt, Artificial Sequence
  Description of Artificial Sequence: Synthetic oligonucleotide
  Sense strand starting at position 3716 of SEQ ID NO: 587196
ggccaugucagagguguuu

SEQ ID NO: 773949 - RNA, 19 nt, Artificial Sequence
  Description of Artificial Sequence: Synthetic oligonucleotide
  Antisense strand to SEQ ID NO: 773948
aaacaccucugacauggcc

SEQ ID NO: 773950 - RNA, 19 nt, Artificial Sequence
  Description of Artificial Sequence: Synthetic oligonucleotide
  Sense strand starting at position 3718 of SEQ ID NO: 587196
ccaugucagagguguuuga

SEQ ID NO: 773951 - RNA, 19 nt, Artificial Sequence
  Description of Artificial Sequence: Synthetic oligonucleotide
  Antisense strand to SEQ ID NO: 773950
ucaaacaccucugacaugg

SEQ ID NO: 773952 - RNA, 19 nt, Artificial Sequence
  Description of Artificial Sequence: Synthetic oligonucleotide
  Sense strand starting at position 3749 of SEQ ID NO: 587196
gcaucuggaauagguguua

SEQ ID NO: 773953 - RNA, 19 nt, Artificial Sequence
  Description of Artificial Sequence: Synthetic oligonucleotide
  Antisense strand to SEQ ID NO: 773952
uaacaccuauuccagaugc

SEQ ID NO: 773954 - RNA, 19 nt, Artificial Sequence
  Description of Artificial Sequence: Synthetic oligonucleotide
  Sense strand starting at position 3754 of SEQ ID NO: 587196
uggaauagguguuagguaa

SEQ ID NO: 773955 - RNA, 19 nt, Artificial Sequence
  Description of Artificial Sequence: Synthetic oligonucleotide
  Antisense strand to SEQ ID NO: 773954
uuaccuaacaccuauucca

SEQ ID NO: 773956 - RNA, 19 nt, Artificial Sequence
  Description of Artificial Sequence: Synthetic oligonucleotide
  Sense strand starting at position 36 of SEQ ID NO: 587197
cucugcuuuccuguuaugu

SEQ ID NO: 773957 - RNA, 19 nt, Artificial Sequence
  Description of Artificial Sequence: Synthetic oligonucleotide
  Antisense strand to SEQ ID NO: 773956
acauaacaggaaagcagag

SEQ ID NO: 773958 - RNA, 19 nt, Artificial Sequence
  Description of Artificial Sequence: Synthetic oligonucleotide
  Sense strand starting at position 165 of SEQ ID NO: 587197
uugauaaugugaucuggac

SEQ ID NO: 773959 - RNA, 19 nt, Artificial Sequence
  Description of Artificial Sequence: Synthetic oligonucleotide
  Antisense strand to SEQ ID NO: 773958
guccagaucacauuaucaa

SEQ ID NO: 773960 - RNA, 19 nt, Artificial Sequence
  Description of Artificial Sequence: Synthetic oligonucleotide
  Sense strand starting at position 325 of SEQ ID NO: 587197
gacccuguagagcauuaaa

SEQ ID NO: 773961 - RNA, 19 nt, Artificial Sequence
  Description of Artificial Sequence: Synthetic oligonucleotide
  Antisense strand to SEQ ID NO: 773960
uuuaaugcucuacaggguc

SEQ ID NO: 773962 - RNA, 19 nt, Artificial Sequence
  Description of Artificial Sequence: Synthetic oligonucleotide
  Sense strand starting at position 357 of SEQ ID NO: 587197
uggcaauuaggcugaaaug

SEQ ID NO: 773963 - RNA, 19 nt, Artificial Sequence
  Description of Artificial Sequence: Synthetic oligonucleotide
  Antisense strand to SEQ ID NO: 773962
cauuucagccuaauugcca

SEQ ID NO: 773964 - RNA, 19 nt, Artificial Sequence
  Description of Artificial Sequence: Synthetic oligonucleotide
  Sense strand starting at position 366 of SEQ ID NO: 587197
ggcugaaauggccaugaug

SEQ ID NO: 773965 - RNA, 19 nt, Artificial Sequence
  Description of Artificial Sequence: Synthetic oligonucleotide
  Antisense strand to SEQ ID NO: 773964
caucauggccauuucagcc

SEQ ID NO: 773966 - RNA, 19 nt, Artificial Sequence
  Description of Artificial Sequence: Synthetic oligonucleotide
  Sense strand starting at position 368 of SEQ ID NO: 587197
cugaaauggccaugaugcu

SEQ ID NO: 773967 - RNA, 19 nt, Artificial Sequence
  Description of Artificial Sequence: Synthetic oligonucleotide
  Antisense strand to SEQ ID NO: 773966
agcaucauggccauuucag

SEQ ID NO: 773968 - RNA, 19 nt, Artificial Sequence
  Description of Artificial Sequence: Synthetic oligonucleotide
  Sense strand starting at position 407 of SEQ ID NO: 587197
accuaacuacgucgaaaga

SEQ ID NO: 773969 - RNA, 19 nt, Artificial Sequence
  Description of Artificial Sequence: Synthetic oligonucleotide
  Antisense strand to SEQ ID NO: 773968
ucuuucgacguaguuaggu

SEQ ID NO: 773970 - RNA, 19 nt, Artificial Sequence
  Description of Artificial Sequence: Synthetic oligonucleotide
  Sense strand starting at position 408 of SEQ ID NO: 587197
ccuaacuacgucgaaagaa

SEQ ID NO: 773971 - RNA, 19 nt, Artificial Sequence
  Description of Artificial Sequence: Synthetic oligonucleotide
  Antisense strand to SEQ ID NO: 773970
uucuuucgacguaguuagg

SEQ ID NO: 773972 - RNA, 19 nt, Artificial Sequence
  Description of Artificial Sequence: Synthetic oligonucleotide
  Sense strand starting at position 543 of SEQ ID NO: 587197
gugcaaaugcaauacauaa

SEQ ID NO: 773973 - RNA, 19 nt, Artificial Sequence
  Description of Artificial Sequence: Synthetic oligonucleotide
  Antisense strand to SEQ ID NO: 773972
uuauguauugcauuugcac

SEQ ID NO: 773974 - RNA, 19 nt, Artificial Sequence
  Description of Artificial Sequence: Synthetic oligonucleotide
  Sense strand starting at position 645 of SEQ ID NO: 587197
cccaaaccauaguuggaua

SEQ ID NO: 773975 - RNA, 19 nt, Artificial Sequence
  Description of Artificial Sequence: Synthetic oligonucleotide
  Antisense strand to SEQ ID NO: 773974
uauccaacuaugguuuggg

SEQ ID NO: 773976 - RNA, 19 nt, Artificial Sequence
  Description of Artificial Sequence: Synthetic oligonucleotide
  Sense strand starting at position 656 of SEQ ID NO: 587197
guuggauauucucugauuc

SEQ ID NO: 773977 - RNA, 19 nt, Artificial Sequence
  Description of Artificial Sequence: Synthetic oligonucleotide
  Antisense strand to SEQ ID NO: 773976
gaaucagagaauauccaac

SEQ ID NO: 773978 - RNA, 19 nt, Artificial Sequence
  Description of Artificial Sequence: Synthetic oligonucleotide
  Sense strand starting at position 714 of SEQ ID NO: 587197
cgguucuggcauuacuaua

SEQ ID NO: 773979 - RNA, 19 nt, Artificial Sequence
  Description of Artificial Sequence: Synthetic oligonucleotide
  Antisense strand to SEQ ID NO: 773978
uauaguaaugccagaaccg

SEQ ID NO: 773980 - RNA, 19 nt, Artificial Sequence
  Description of Artificial Sequence: Synthetic oligonucleotide
  Sense strand starting at position 728 of SEQ ID NO: 587197
cuauaaaugccucagacug

SEQ ID NO: 773981 - RNA, 19 nt, Artificial Sequence
  Description of Artificial Sequence: Synthetic oligonucleotide
  Antisense strand to SEQ ID NO: 773980
cagucugaggcauuuauag

SEQ ID NO: 773982 - RNA, 19 nt, Artificial Sequence
  Description of Artificial Sequence: Synthetic oligonucleotide
  Sense strand starting at position 762 of SEQ ID NO: 587197
agaggauuaacuggcucau

SEQ ID NO: 773983 - RNA, 19 nt, Artificial Sequence
  Description of Artificial Sequence: Synthetic oligonucleotide
  Antisense strand to SEQ ID NO: 773982
augagccaguuaauccucu

SEQ ID NO: 773984 - RNA, 19 nt, Artificial Sequence
  Description of Artificial Sequence: Synthetic oligonucleotide
  Sense strand starting at position 766 of SEQ ID NO: 587197
gauuaacuggcucaugguu

SEQ ID NO: 773985 - RNA, 19 nt, Artificial Sequence
  Description of Artificial Sequence: Synthetic oligonucleotide
  Antisense strand to SEQ ID NO: 773984
aaccaugagccaguuaauc

SEQ ID NO: 773986 - RNA, 19 nt, Artificial Sequence
  Description of Artificial Sequence: Synthetic oligonucleotide
  Sense strand starting at position 936 of SEQ ID NO: 587197
agucacuaucgagagguca

SEQ ID NO: 773987 - RNA, 19 nt, Artificial Sequence
  Description of Artificial Sequence: Synthetic oligonucleotide
  Antisense strand to SEQ ID NO: 773986
ugaccucucgauagugacu

SEQ ID NO: 773988 - RNA, 19 nt, Artificial Sequence
  Description of Artificial Sequence: Synthetic oligonucleotide
  Sense strand starting at position 938 of SEQ ID NO: 587197
ucacuaucgagaggucaau

SEQ ID NO: 773989 - RNA, 19 nt, Artificial Sequence
  Description of Artificial Sequence: Synthetic oligonucleotide
  Antisense strand to SEQ ID NO: 773988
auugaccucucgauaguga

SEQ ID NO: 773990 - RNA, 19 nt, Artificial Sequence
  Description of Artificial Sequence: Synthetic oligonucleotide
  Sense strand starting at position 1048 of SEQ ID NO: 587197
acauuuaaauaggagaguu

SEQ ID NO: 773991 - RNA, 19 nt, Artificial Sequence
  Description of Artificial Sequence: Synthetic oligonucleotide
  Antisense strand to SEQ ID NO: 773990
aacucuccuauuuaaaugu

SEQ ID NO: 773992 - RNA, 19 nt, Artificial Sequence
  Description of Artificial Sequence: Synthetic oligonucleotide
  Sense strand starting at position 1511 of SEQ ID NO: 587197
gaaugaggauucucgucuu

SEQ ID NO: 773993 - RNA, 19 nt, Artificial Sequence
  Description of Artificial Sequence: Synthetic oligonucleotide
  Antisense strand to SEQ ID NO: 773992
aagacgagaauccucauuc

SEQ ID NO: 773994 - RNA, 19 nt, Artificial Sequence
  Description of Artificial Sequence: Synthetic oligonucleotide
  Sense strand starting at position 1514 of SEQ ID NO: 587197
ugaggauucucgucuuaug

SEQ ID NO: 773995 - RNA, 19 nt, Artificial Sequence
  Description of Artificial Sequence: Synthetic oligonucleotide
  Antisense strand to SEQ ID NO: 773994
cauaagacgagaauccuca

SEQ ID NO: 773996 - RNA, 19 nt, Artificial Sequence
  Description of Artificial Sequence: Synthetic oligonucleotide
  Sense strand starting at position 1541 of SEQ ID NO: 587197
gcacaaucuggaggagacu

SEQ ID NO: 773997 - RNA, 19 nt, Artificial Sequence
  Description of Artificial Sequence: Synthetic oligonucleotide
  Antisense strand to SEQ ID NO: 773996
agucuccuccagauugugc

SEQ ID NO: 773998 - RNA, 19 nt, Artificial Sequence
  Description of Artificial Sequence: Synthetic oligonucleotide
  Sense strand starting at position 1589 of SEQ ID NO: 587197
gucucugggcuggaaagaa

SEQ ID NO: 773999 - RNA, 19 nt, Artificial Sequence
  Description of Artificial Sequence: Synthetic oligonucleotide
  Antisense strand to SEQ ID NO: 773998
uucuuuccagcccagagac

SEQ ID NO: 774000 - RNA, 19 nt, Artificial Sequence
  Description of Artificial Sequence: Synthetic oligonucleotide
  Sense strand starting at position 1605 of SEQ ID NO: 587197
gaaauucgcguuuauggac

SEQ ID NO: 774001 - RNA, 19 nt, Artificial Sequence
  Description of Artificial Sequence: Synthetic oligonucleotide
  Antisense strand to SEQ ID NO: 774000
guccauaaacgcgaauuuc

SEQ ID NO: 774002 - RNA, 19 nt, Artificial Sequence
  Description of Artificial Sequence: Synthetic oligonucleotide
  Sense strand starting at position 2181 of SEQ ID NO: 587197
agcgauuucuccuuguguu

SEQ ID NO: 774003 - RNA, 19 nt, Artificial Sequence
  Description of Artificial Sequence: Synthetic oligonucleotide
  Antisense strand to SEQ ID NO: 774002
aacacaaggagaaaucgcu

SEQ ID NO: 774004 - RNA, 19 nt, Artificial Sequence
  Description of Artificial Sequence: Synthetic oligonucleotide
  Sense strand starting at position 2348 of SEQ ID NO: 587197
ccuuuaguugcaggagauc

SEQ ID NO: 774005 - RNA, 19 nt, Artificial Sequence
  Description of Artificial Sequence: Synthetic oligonucleotide
  Antisense strand to SEQ ID NO: 774004
gaucuccugcaacuaaagg

SEQ ID NO: 774006 - RNA, 19 nt, Artificial Sequence
  Description of Artificial Sequence: Synthetic oligonucleotide
  Sense strand starting at position 2396 of SEQ ID NO: 587197
gcuggcugcagacaauuau

SEQ ID NO: 774007 - RNA, 19 nt, Artificial Sequence
  Description of Artificial Sequence: Synthetic oligonucleotide
  Antisense strand to SEQ ID NO: 774006
auaauugucugcagccagc

SEQ ID NO: 774008 - RNA, 19 nt, Artificial Sequence
  Description of Artificial Sequence: Synthetic oligonucleotide
  Sense strand starting at position 2826 of SEQ ID NO: 587197
cugagaugaugagaacaau

SEQ ID NO: 774009 - RNA, 19 nt, Artificial Sequence
  Description of Artificial Sequence: Synthetic oligonucleotide
  Antisense strand to SEQ ID NO: 774008
auuguucucaucaucucag

SEQ ID NO: 774010 - RNA, 19 nt, Artificial Sequence
  Description of Artificial Sequence: Synthetic oligonucleotide
  Sense strand starting at position 2859 of SEQ ID NO: 587197
auaacugaguccucacaag

SEQ ID NO: 774011 - RNA, 19 nt, Artificial Sequence
  Description of Artificial Sequence: Synthetic oligonucleotide
  Antisense strand to SEQ ID NO: 774010
cuugugaggacucaguuau

SEQ ID NO: 774012 - RNA, 19 nt, Artificial Sequence
  Description of Artificial Sequence: Synthetic oligonucleotide
  Sense strand starting at position 2891 of SEQ ID NO: 587197
ggugguucccaucacacuu

SEQ ID NO: 774013 - RNA, 19 nt, Artificial Sequence
  Description of Artificial Sequence: Synthetic oligonucleotide
  Antisense strand to SEQ ID NO: 774012
aagugugaugggaaccacc

SEQ ID NO: 774014 - RNA, 19 nt, Artificial Sequence
  Description of Artificial Sequence: Synthetic oligonucleotide
  Sense strand starting at position 3021 of SEQ ID NO: 587197
ggagcauuggaccagcuua

SEQ ID NO: 774015 - RNA, 19 nt, Artificial Sequence
  Description of Artificial Sequence: Synthetic oligonucleotide
  Antisense strand to SEQ ID NO: 774014
uaagcugguccaaugcucc

SEQ ID NO: 774016 - RNA, 19 nt, Artificial Sequence
  Description of Artificial Sequence: Synthetic oligonucleotide
  Sense strand starting at position 3035 of SEQ ID NO: 587197
gcuuacucacaccaguuau

SEQ ID NO: 774017 - RNA, 19 nt, Artificial Sequence
  Description of Artificial Sequence: Synthetic oligonucleotide
  Antisense strand to SEQ ID NO: 774016
auaacuggugugaguaagc

SEQ ID NO: 774018 - RNA, 19 nt, Artificial Sequence
  Description of Artificial Sequence: Synthetic oligonucleotide
  Sense strand starting at position 3045 of SEQ ID NO: 587197
accaguuauccaggauacc

SEQ ID NO: 774019 - RNA, 19 nt, Artificial Sequence
  Description of Artificial Sequence: Synthetic oligonucleotide
  Antisense strand to SEQ ID NO: 774018
gguauccuggauaacuggu

SEQ ID NO: 774020 - RNA, 19 nt, Artificial Sequence
  Description of Artificial Sequence: Synthetic oligonucleotide
  Sense strand starting at position 3069 of SEQ ID NO: 587197
aguguaacugggcauaacu

SEQ ID NO: 774021 - RNA, 19 nt, Artificial Sequence
  Description of Artificial Sequence: Synthetic oligonucleotide
  Antisense strand to SEQ ID NO: 774020
aguuaugcccaguuacacu

SEQ ID NO: 774022 - RNA, 19 nt, Artificial Sequence
  Description of Artificial Sequence: Synthetic oligonucleotide
  Sense strand starting at position 3117 of SEQ ID NO: 587197
uuucuuugacucuggcaga

SEQ ID NO: 774023 - RNA, 19 nt, Artificial Sequence
  Description of Artificial Sequence: Synthetic oligonucleotide
  Antisense strand to SEQ ID NO: 774022
ucugccagagucaaagaaa

SEQ ID NO: 774024 - RNA, 19 nt, Artificial Sequence
  Description of Artificial Sequence: Synthetic oligonucleotide
  Sense strand starting at position 3418 of SEQ ID NO: 587197
auaacauugugacuuguaa

SEQ ID NO: 774025 - RNA, 19 nt, Artificial Sequence
  Description of Artificial Sequence: Synthetic oligonucleotide
  Antisense strand to SEQ ID NO: 774024
uuacaagucacaauguuau

SEQ ID NO: 774026 - RNA, 19 nt, Artificial Sequence
  Description of Artificial Sequence: Synthetic oligonucleotide
  Sense strand starting at position 3545 of SEQ ID NO: 587197
ucaaguggaagauguagau

SEQ ID NO: 774027 - RNA, 19 nt, Artificial Sequence
  Description of Artificial Sequence: Synthetic oligonucleotide
  Antisense strand to SEQ ID NO: 774026
aucuacaucuuccacuuga

SEQ ID NO: 774028 - RNA, 19 nt, Artificial Sequence
  Description of Artificial Sequence: Synthetic oligonucleotide
  Sense strand starting at position 3694 of SEQ ID NO: 587197
caguuaucuggugauggga

SEQ ID NO: 774029 - RNA, 19 nt, Artificial Sequence
  Description of Artificial Sequence: Synthetic oligonucleotide
  Antisense strand to SEQ ID NO: 774028
ucccaucaccagauaacug

SEQ ID NO: 774030 - RNA, 19 nt, Artificial Sequence
  Description of Artificial Sequence: Synthetic oligonucleotide
  Sense strand starting at position 3721 of SEQ ID NO: 587197
cagaaaggauuauauggau

SEQ ID NO: 774031 - RNA, 19 nt, Artificial Sequence
  Description of Artificial Sequence: Synthetic oligonucleotide
  Antisense strand to SEQ ID NO: 774030
auccauauaauccuuucug

SEQ ID NO: 774032 - RNA, 19 nt, Artificial Sequence
  Description of Artificial Sequence: Synthetic oligonucleotide
  Sense strand starting at position 3775 of SEQ ID NO: 587197
gauccugaggcuugggaaa

SEQ ID NO: 774033 - RNA, 19 nt, Artificial Sequence
  Description of Artificial Sequence: Synthetic oligonucleotide
  Antisense strand to SEQ ID NO: 774032
uuucccaagccucaggauc

SEQ ID NO: 774034 - RNA, 19 nt, Artificial Sequence
  Description of Artificial Sequence: Synthetic oligonucleotide
  Sense strand starting at position 3892 of SEQ ID NO: 587197
cuucccuaugaauguugaa

SEQ ID NO: 774035 - RNA, 19 nt, Artificial Sequence
  Description of Artificial Sequence: Synthetic oligonucleotide
  Antisense strand to SEQ ID NO: 774034
uucaacauucauagggaag

SEQ ID NO: 774036 - RNA, 19 nt, Artificial Sequence
  Description of Artificial Sequence: Synthetic oligonucleotide
  Sense strand starting at position 170 of SEQ ID NO: 587198
cgcauauguuuauuacaga

SEQ ID NO: 774037 - RNA, 19 nt, Artificial Sequence
  Description of Artificial Sequence: Synthetic oligonucleotide
  Antisense strand to SEQ ID NO: 774036
ucuguaauaaacauaugcg

SEQ ID NO: 774038 - RNA, 19 nt, Artificial Sequence
  Description of Artificial Sequence: Synthetic oligonucleotide
  Sense strand starting at position 171 of SEQ ID NO: 587198
gcauauguuuauuacagaa

SEQ ID NO: 774039 - RNA, 19 nt, Artificial Sequence
  Description of Artificial Sequence: Synthetic oligonucleotide
  Antisense strand to SEQ ID NO: 774038
uucuguaauaaacauaugc
